United States Patent Application Publication US 2018/0305689 A1 - sequence listing, part 35

SEQ ID NO: 483180 - RNA, 19 nt, Artificial Sequence
  Description of Artificial Sequence: Synthetic oligonucleotide
  Antisense Strand to SEQ ID NO: 483179
ucuccucagggagaaggcg

SEQ ID NO: 483181 - RNA, 19 nt, Artificial Sequence
  Description of Artificial Sequence: Synthetic oligonucleotide
  Sense strand starting at position 2499 of SEQ ID NO: 317339
cggacacuuacuugguaga

SEQ ID NO: 483182 - RNA, 19 nt, Artificial Sequence
  Description of Artificial Sequence: Synthetic oligonucleotide
  Antisense Strand to SEQ ID NO: 483181
ucuaccaaguaaguguccg

SEQ ID NO: 483183 - RNA, 19 nt, Artificial Sequence
  Description of Artificial Sequence: Synthetic oligonucleotide
  Sense strand starting at position 2501 of SEQ ID NO: 317339
gacacuuacuugguagagu

SEQ ID NO: 483184 - RNA, 19 nt, Artificial Sequence
  Description of Artificial Sequence: Synthetic oligonucleotide
  Antisense Strand to SEQ ID NO: 483183
acucuaccaaguaaguguc

SEQ ID NO: 483185 - RNA, 19 nt, Artificial Sequence
  Description of Artificial Sequence: Synthetic oligonucleotide
  Sense strand starting at position 2735 of SEQ ID NO: 317339
gagaauugagucugaccuc

SEQ ID NO: 483186 - RNA, 19 nt, Artificial Sequence
  Description of Artificial Sequence: Synthetic oligonucleotide
  Antisense Strand to SEQ ID NO: 483185
gaggucagacucaauucuc

SEQ ID NO: 483187 - RNA, 19 nt, Artificial Sequence
  Description of Artificial Sequence: Synthetic oligonucleotide
  Sense strand starting at position 2812 of SEQ ID NO: 317339
gcugccaucaucgcaguaa

SEQ ID NO: 483188 - RNA, 19 nt, Artificial Sequence
  Description of Artificial Sequence: Synthetic oligonucleotide
  Antisense Strand to SEQ ID NO: 483187
uuacugcgaugauggcagc

SEQ ID NO: 483189 - RNA, 19 nt, Artificial Sequence
  Description of Artificial Sequence: Synthetic oligonucleotide
  Sense strand starting at position 2887 of SEQ ID NO: 317339
acaucuuguccauagguuu

SEQ ID NO: 483190 - RNA, 19 nt, Artificial Sequence
  Description of Artificial Sequence: Synthetic oligonucleotide
  Antisense Strand to SEQ ID NO: 483189
aaaccuauggacaagaugu

SEQ ID NO: 483191 - RNA, 19 nt, Artificial Sequence
  Description of Artificial Sequence: Synthetic oligonucleotide
  Sense strand starting at position 3037 of SEQ ID NO: 317339
ggcagaaacuaggugguua

SEQ ID NO: 483192 - RNA, 19 nt, Artificial Sequence
  Description of Artificial Sequence: Synthetic oligonucleotide
  Antisense Strand to SEQ ID NO: 483191
uaaccaccuaguuucugcc

SEQ ID NO: 483193 - RNA, 19 nt, Artificial Sequence
  Description of Artificial Sequence: Synthetic oligonucleotide
  Sense strand starting at position 3038 of SEQ ID NO: 317339
gcagaaacuaggugguuau

SEQ ID NO: 483194 - RNA, 19 nt, Artificial Sequence
  Description of Artificial Sequence: Synthetic oligonucleotide
  Antisense Strand to SEQ ID NO: 483193
auaaccaccuaguuucugc

SEQ ID NO: 483195 - RNA, 19 nt, Artificial Sequence
  Description of Artificial Sequence: Synthetic oligonucleotide
  Sense strand starting at position 3039 of SEQ ID NO: 317339
cagaaacuaggugguuaua

SEQ ID NO: 483196 - RNA, 19 nt, Artificial Sequence
  Description of Artificial Sequence: Synthetic oligonucleotide
  Antisense Strand to SEQ ID NO: 483195
uauaaccaccuaguuucug

SEQ ID NO: 483197 - RNA, 19 nt, Artificial Sequence
  Description of Artificial Sequence: Synthetic oligonucleotide
  Sense strand starting at position 3041 of SEQ ID NO: 317339
gaaacuaggugguuauaag

SEQ ID NO: 483198 - RNA, 19 nt, Artificial Sequence
  Description of Artificial Sequence: Synthetic oligonucleotide
  Antisense Strand to SEQ ID NO: 483197
cuuauaaccaccuaguuuc

SEQ ID NO: 483199 - RNA, 19 nt, Artificial Sequence
  Description of Artificial Sequence: Synthetic oligonucleotide
  Sense strand starting at position 3083 of SEQ ID NO: 317339
gcaagaaaucucugcccag

SEQ ID NO: 483200 - RNA, 19 nt, Artificial Sequence
  Description of Artificial Sequence: Synthetic oligonucleotide
  Antisense Strand to SEQ ID NO: 483199
cugggcagagauuucuugc

SEQ ID NO: 483201 - RNA, 19 nt, Artificial Sequence
  Description of Artificial Sequence: Synthetic oligonucleotide
  Sense strand starting at position 3403 of SEQ ID NO: 317339
gagcaaauacaugggcauu

SEQ ID NO: 483202 - RNA, 19 nt, Artificial Sequence
  Description of Artificial Sequence: Synthetic oligonucleotide
  Antisense Strand to SEQ ID NO: 483201
aaugcccauguauuugcuc

SEQ ID NO: 483203 - RNA, 19 nt, Artificial Sequence
  Description of Artificial Sequence: Synthetic oligonucleotide
  Sense strand starting at position 3600 of SEQ ID NO: 317339
gcucaaauagguuaacuuu

SEQ ID NO: 483204 - RNA, 19 nt, Artificial Sequence
  Description of Artificial Sequence: Synthetic oligonucleotide
  Antisense Strand to SEQ ID NO: 483203
aaaguuaaccuauuugagc

SEQ ID NO: 483205 - RNA, 19 nt, Artificial Sequence
  Description of Artificial Sequence: Synthetic oligonucleotide
  Sense strand starting at position 3633 of SEQ ID NO: 317339
guaaguaauguugaaccaa

SEQ ID NO: 483206 - RNA, 19 nt, Artificial Sequence
  Description of Artificial Sequence: Synthetic oligonucleotide
  Antisense Strand to SEQ ID NO: 483205
uugguucaacauuacuuac

SEQ ID NO: 483207 - RNA, 19 nt, Artificial Sequence
  Description of Artificial Sequence: Synthetic oligonucleotide
  Sense strand starting at position 3764 of SEQ ID NO: 317339
gucucuucccaagggaaag

SEQ ID NO: 483208 - RNA, 19 nt, Artificial Sequence
  Description of Artificial Sequence: Synthetic oligonucleotide
  Antisense Strand to SEQ ID NO: 483207
cuuucccuugggaagagac

SEQ ID NO: 483209 - RNA, 19 nt, Artificial Sequence
  Description of Artificial Sequence: Synthetic oligonucleotide
  Sense strand starting at position 3784 of SEQ ID NO: 317339
agaaacuguuaaucaugua

SEQ ID NO: 483210 - RNA, 19 nt, Artificial Sequence
  Description of Artificial Sequence: Synthetic oligonucleotide
  Antisense Strand to SEQ ID NO: 483209
uacaugauuaacaguuucu

SEQ ID NO: 483211 - RNA, 19 nt, Artificial Sequence
  Description of Artificial Sequence: Synthetic oligonucleotide
  Sense strand starting at position 3796 of SEQ ID NO: 317339
ucauguaauuacucgaaag

SEQ ID NO: 483212 - RNA, 19 nt, Artificial Sequence
  Description of Artificial Sequence: Synthetic oligonucleotide
  Antisense Strand to SEQ ID NO: 483211
cuuucgaguaauuacauga

SEQ ID NO: 483213 - RNA, 19 nt, Artificial Sequence
  Description of Artificial Sequence: Synthetic oligonucleotide
  Sense strand starting at position 3798 of SEQ ID NO: 317339
auguaauuacucgaaagca

SEQ ID NO: 483214 - RNA, 19 nt, Artificial Sequence
  Description of Artificial Sequence: Synthetic oligonucleotide
  Antisense Strand to SEQ ID NO: 483213
ugcuuucgaguaauuacau

SEQ ID NO: 483215 - RNA, 19 nt, Artificial Sequence
  Description of Artificial Sequence: Synthetic oligonucleotide
  Sense strand starting at position 3843 of SEQ ID NO: 317339
uuugguuuccuauguauuu

SEQ ID NO: 483216 - RNA, 19 nt, Artificial Sequence
  Description of Artificial Sequence: Synthetic oligonucleotide
  Antisense Strand to SEQ ID NO: 483215
aaauacauaggaaaccaaa

SEQ ID NO: 483217 - RNA, 19 nt, Artificial Sequence
  Description of Artificial Sequence: Synthetic oligonucleotide
  Sense strand starting at position 5 of SEQ ID NO: 317340
gccucaauuuacugagcca

SEQ ID NO: 483218 - RNA, 19 nt, Artificial Sequence
  Description of Artificial Sequence: Synthetic oligonucleotide
  Antisense Strand to SEQ ID NO: 483217
uggcucaguaaauugaggc

SEQ ID NO: 483219 - RNA, 19 nt, Artificial Sequence
  Description of Artificial Sequence: Synthetic oligonucleotide
  Sense strand starting at position 55 of SEQ ID NO: 317340
gugggucgaguggguuaaa

SEQ ID NO: 483220 - RNA, 19 nt, Artificial Sequence
  Description of Artificial Sequence: Synthetic oligonucleotide
  Antisense Strand to SEQ ID NO: 483219
uuuaacccacucgacccac

SEQ ID NO: 483221 - RNA, 19 nt, Artificial Sequence
  Description of Artificial Sequence: Synthetic oligonucleotide
  Sense strand starting at position 93 of SEQ ID NO: 317340
acagucagaguuuggugaa

SEQ ID NO: 483222 - RNA, 19 nt, Artificial Sequence
  Description of Artificial Sequence: Synthetic oligonucleotide
  Antisense Strand to SEQ ID NO: 483221
uucaccaaacucugacugu

SEQ ID NO: 483223 - RNA, 19 nt, Artificial Sequence
  Description of Artificial Sequence: Synthetic oligonucleotide
  Sense strand starting at position 105 of SEQ ID NO: 317340
uggugaauguggguuggaa

SEQ ID NO: 483224 - RNA, 19 nt, Artificial Sequence
  Description of Artificial Sequence: Synthetic oligonucleotide
  Antisense Strand to SEQ ID NO: 483223
uuccaacccacauucacca

SEQ ID NO: 483225 - RNA, 19 nt, Artificial Sequence
  Description of Artificial Sequence: Synthetic oligonucleotide
  Sense strand starting at position 107 of SEQ ID NO: 317340
gugaauguggguuggaaga

SEQ ID NO: 483226 - RNA, 19 nt, Artificial Sequence
  Description of Artificial Sequence: Synthetic oligonucleotide
  Antisense Strand to SEQ ID NO: 483225
ucuuccaacccacauucac

SEQ ID NO: 483227 - RNA, 19 nt, Artificial Sequence
  Description of Artificial Sequence: Synthetic oligonucleotide
  Sense strand starting at position 164 of SEQ ID NO: 317340
ggaagcuuuggccaagcuu

SEQ ID NO: 483228 - RNA, 19 nt, Artificial Sequence
  Description of Artificial Sequence: Synthetic oligonucleotide
  Antisense Strand to SEQ ID NO: 483227
aagcuuggccaaagcuucc

SEQ ID NO: 483229 - RNA, 19 nt, Artificial Sequence
  Description of Artificial Sequence: Synthetic oligonucleotide
  Sense strand starting at position 339 of SEQ ID NO: 317340
uggaaauggucugcgcaga

SEQ ID NO: 483230 - RNA, 19 nt, Artificial Sequence
  Description of Artificial Sequence: Synthetic oligonucleotide
  Antisense Strand to SEQ ID NO: 483229
ucugcgcagaccauuucca

SEQ ID NO: 483231 - RNA, 19 nt, Artificial Sequence
  Description of Artificial Sequence: Synthetic oligonucleotide
  Sense strand starting at position 340 of SEQ ID NO: 317340
ggaaauggucugcgcagau

SEQ ID NO: 483232 - RNA, 19 nt, Artificial Sequence
  Description of Artificial Sequence: Synthetic oligonucleotide
  Antisense Strand to SEQ ID NO: 483231
aucugcgcagaccauuucc

SEQ ID NO: 483233 - RNA, 19 nt, Artificial Sequence
  Description of Artificial Sequence: Synthetic oligonucleotide
  Sense strand starting at position 363 of SEQ ID NO: 317340
cgaccuucccuugggauga

SEQ ID NO: 483234 - RNA, 19 nt, Artificial Sequence
  Description of Artificial Sequence: Synthetic oligonucleotide
  Antisense Strand to SEQ ID NO: 483233
ucaucccaagggaaggucg

SEQ ID NO: 483235 - RNA, 19 nt, Artificial Sequence
  Description of Artificial Sequence: Synthetic oligonucleotide
  Sense strand starting at position 376 of SEQ ID NO: 317340
ggaugaggguguuccagau

SEQ ID NO: 483236 - RNA, 19 nt, Artificial Sequence
  Description of Artificial Sequence: Synthetic oligonucleotide
  Antisense Strand to SEQ ID NO: 483235
aucuggaacacccucaucc

SEQ ID NO: 483237 - RNA, 19 nt, Artificial Sequence
  Description of Artificial Sequence: Synthetic oligonucleotide
  Sense strand starting at position 382 of SEQ ID NO: 317340
ggguguuccagaugaggau

SEQ ID NO: 483238 - RNA, 19 nt, Artificial Sequence
  Description of Artificial Sequence: Synthetic oligonucleotide
  Antisense Strand to SEQ ID NO: 483237
auccucaucuggaacaccc

SEQ ID NO: 483239 - RNA, 19 nt, Artificial Sequence
  Description of Artificial Sequence: Synthetic oligonucleotide
  Sense strand starting at position 414 of SEQ ID NO: 317340
gugcgugguguccuuguaa

SEQ ID NO: 483240 - RNA, 19 nt, Artificial Sequence
  Description of Artificial Sequence: Synthetic oligonucleotide
  Antisense Strand to SEQ ID NO: 483239
uuacaaggacaccacgcac

SEQ ID NO: 483241 - RNA, 19 nt, Artificial Sequence
  Description of Artificial Sequence: Synthetic oligonucleotide
  Sense strand starting at position 417 of SEQ ID NO: 317340
cgugguguccuuguaagua

SEQ ID NO: 483242 - RNA, 19 nt, Artificial Sequence
  Description of Artificial Sequence: Synthetic oligonucleotide
  Antisense Strand to SEQ ID NO: 483241
uacuuacaaggacaccacg

SEQ ID NO: 483243 - RNA, 19 nt, Artificial Sequence
  Description of Artificial Sequence: Synthetic oligonucleotide
  Sense strand starting at position 495 of SEQ ID NO: 317340
cggagaguggacugaugua

SEQ ID NO: 483244 - RNA, 19 nt, Artificial Sequence
  Description of Artificial Sequence: Synthetic oligonucleotide
  Antisense Strand to SEQ ID NO: 483243
uacaucaguccacucuccg

SEQ ID NO: 483245 - RNA, 19 nt, Artificial Sequence
  Description of Artificial Sequence: Synthetic oligonucleotide
  Sense strand starting at position 590 of SEQ ID NO: 317340
acgccuugaguucggaauu

SEQ ID NO: 483246 - RNA, 19 nt, Artificial Sequence
  Description of Artificial Sequence: Synthetic oligonucleotide
  Antisense Strand to SEQ ID NO: 483245
aauuccgaacucaaggcgu

SEQ ID NO: 483247 - RNA, 19 nt, Artificial Sequence
  Description of Artificial Sequence: Synthetic oligonucleotide
  Sense strand starting at position 739 of SEQ ID NO: 317340
ccguguugcuggaagagug

SEQ ID NO: 483248 - RNA, 19 nt, Artificial Sequence
  Description of Artificial Sequence: Synthetic oligonucleotide
  Antisense Strand to SEQ ID NO: 483247
cacucuuccagcaacacgg

SEQ ID NO: 483249 - RNA, 19 nt, Artificial Sequence
  Description of Artificial Sequence: Synthetic oligonucleotide
  Sense strand starting at position 740 of SEQ ID NO: 317340
cguguugcuggaagaguga

SEQ ID NO: 483250 - RNA, 19 nt, Artificial Sequence
  Description of Artificial Sequence: Synthetic oligonucleotide
  Antisense Strand to SEQ ID NO: 483249
ucacucuuccagcaacacg

SEQ ID NO: 483251 - RNA, 19 nt, Artificial Sequence
  Description of Artificial Sequence: Synthetic oligonucleotide
  Sense strand starting at position 757 of SEQ ID NO: 317340
gagugacgucuccaugcaa

SEQ ID NO: 483252 - RNA, 19 nt, Artificial Sequence
  Description of Artificial Sequence: Synthetic oligonucleotide
  Antisense Strand to SEQ ID NO: 483251
uugcauggagacgucacuc

SEQ ID NO: 483253 - RNA, 19 nt, Artificial Sequence
  Description of Artificial Sequence: Synthetic oligonucleotide
  Sense strand starting at position 802 of SEQ ID NO: 317340
ggacacaguugucaucacu

SEQ ID NO: 483254 - RNA, 19 nt, Artificial Sequence
  Description of Artificial Sequence: Synthetic oligonucleotide
  Antisense Strand to SEQ ID NO: 483253
agugaugacaacugugucc

SEQ ID NO: 483255 - RNA, 19 nt, Artificial Sequence
  Description of Artificial Sequence: Synthetic oligonucleotide
  Sense strand starting at position 808 of SEQ ID NO: 317340
aguugucaucacugucaac

SEQ ID NO: 483256 - RNA, 19 nt, Artificial Sequence
  Description of Artificial Sequence: Synthetic oligonucleotide
  Antisense Strand to SEQ ID NO: 483255
guugacagugaugacaacu

SEQ ID NO: 483257 - RNA, 19 nt, Artificial Sequence
  Description of Artificial Sequence: Synthetic oligonucleotide
  Sense strand starting at position 830 of SEQ ID NO: 317340
aguguugacagucacauaa

SEQ ID NO: 483258 - RNA, 19 nt, Artificial Sequence
  Description of Artificial Sequence: Synthetic oligonucleotide
  Antisense Strand to SEQ ID NO: 483257
uuaugugacugucaacacu

SEQ ID NO: 483259 - RNA, 19 nt, Artificial Sequence
  Description of Artificial Sequence: Synthetic oligonucleotide
  Sense strand starting at position 832 of SEQ ID NO: 317340
uguugacagucacauaauu

SEQ ID NO: 483260 - RNA, 19 nt, Artificial Sequence
  Description of Artificial Sequence: Synthetic oligonucleotide
  Antisense Strand to SEQ ID NO: 483259
aauuaugugacugucaaca

SEQ ID NO: 483261 - RNA, 19 nt, Artificial Sequence
  Description of Artificial Sequence: Synthetic oligonucleotide
  Sense strand starting at position 1366 of SEQ ID NO: 317340
ccagacccucccuggaauu

SEQ ID NO: 483262 - RNA, 19 nt, Artificial Sequence
  Description of Artificial Sequence: Synthetic oligonucleotide
  Antisense Strand to SEQ ID NO: 483261
aauuccagggagggucugg

SEQ ID NO: 483263 - RNA, 19 nt, Artificial Sequence
  Description of Artificial Sequence: Synthetic oligonucleotide
  Sense strand starting at position 1414 of SEQ ID NO: 317340
gguccauuugguuguugga

SEQ ID NO: 483264 - RNA, 19 nt, Artificial Sequence
  Description of Artificial Sequence: Synthetic oligonucleotide
  Antisense Strand to SEQ ID NO: 483263
uccaacaaccaaauggacc

SEQ ID NO: 483265 - RNA, 19 nt, Artificial Sequence
  Description of Artificial Sequence: Synthetic oligonucleotide
  Sense strand starting at position 1451 of SEQ ID NO: 317340
gcaucagaguggccaguua

SEQ ID NO: 483266 - RNA, 19 nt, Artificial Sequence
  Description of Artificial Sequence: Synthetic oligonucleotide
  Antisense Strand to SEQ ID NO: 483265
uaacuggccacucugaugc

SEQ ID NO: 483267 - RNA, 19 nt, Artificial Sequence
  Description of Artificial Sequence: Synthetic oligonucleotide
  Sense strand starting at position 1524 of SEQ ID NO: 317340
gguaguguggcccaagcua

SEQ ID NO: 483268 - RNA, 19 nt, Artificial Sequence
  Description of Artificial Sequence: Synthetic oligonucleotide
  Antisense Strand to SEQ ID NO: 483267
uagcuugggccacacuacc

SEQ ID NO: 483269 - RNA, 19 nt, Artificial Sequence
  Description of Artificial Sequence: Synthetic oligonucleotide
  Sense strand starting at position 2183 of SEQ ID NO: 317340
gguugaucauuagcucuuu

SEQ ID NO: 483270 - RNA, 19 nt, Artificial Sequence
  Description of Artificial Sequence: Synthetic oligonucleotide
  Antisense Strand to SEQ ID NO: 483269
aaagagcuaaugaucaacc

SEQ ID NO: 483271 - RNA, 19 nt, Artificial Sequence
  Description of Artificial Sequence: Synthetic oligonucleotide
  Sense strand starting at position 2531 of SEQ ID NO: 317340
cgugcaauuucuuccgucu

SEQ ID NO: 483272 - RNA, 19 nt, Artificial Sequence
  Description of Artificial Sequence: Synthetic oligonucleotide
  Antisense Strand to SEQ ID NO: 483271
agacggaagaaauugcacg

SEQ ID NO: 483273 - RNA, 19 nt, Artificial Sequence
  Description of Artificial Sequence: Synthetic oligonucleotide
  Sense strand starting at position 2568 of SEQ ID NO: 317340
ggccacuggcuccaucaau

SEQ ID NO: 483274 - RNA, 19 nt, Artificial Sequence
  Description of Artificial Sequence: Synthetic oligonucleotide
  Antisense Strand to SEQ ID NO: 483273
auugauggagccaguggcc

SEQ ID NO: 483275 - RNA, 19 nt, Artificial Sequence
  Description of Artificial Sequence: Synthetic oligonucleotide
  Sense strand starting at position 2577 of SEQ ID NO: 317340
cuccaucaaugggaacauu

SEQ ID NO: 483276 - RNA, 19 nt, Artificial Sequence
  Description of Artificial Sequence: Synthetic oligonucleotide
  Antisense Strand to SEQ ID NO: 483275
aauguucccauugauggag

SEQ ID NO: 483277 - RNA, 19 nt, Artificial Sequence
  Description of Artificial Sequence: Synthetic oligonucleotide
  Sense strand starting at position 2627 of SEQ ID NO: 317340
ccgcaagcucuccuugcua

SEQ ID NO: 483278 - RNA, 19 nt, Artificial Sequence
  Description of Artificial Sequence: Synthetic oligonucleotide
  Antisense Strand to SEQ ID NO: 483277
uagcaaggagagcuugcgg

SEQ ID NO: 483279 - RNA, 19 nt, Artificial Sequence
  Description of Artificial Sequence: Synthetic oligonucleotide
  Sense strand starting at position 2974 of SEQ ID NO: 317340
cugugauaggucggagcuu

SEQ ID NO: 483280 - RNA, 19 nt, Artificial Sequence
  Description of Artificial Sequence: Synthetic oligonucleotide
  Antisense Strand to SEQ ID NO: 483279
aagcuccgaccuaucacag

SEQ ID NO: 483281 - RNA, 19 nt, Artificial Sequence
  Description of Artificial Sequence: Synthetic oligonucleotide
  Sense strand starting at position 2996 of SEQ ID NO: 317340
acacaccugguuugagaaa

SEQ ID NO: 483282 - RNA, 19 nt, Artificial Sequence
  Description of Artificial Sequence: Synthetic oligonucleotide
  Antisense Strand to SEQ ID NO: 483281
uuucucaaaccaggugugu

SEQ ID NO: 483283 - RNA, 19 nt, Artificial Sequence
  Description of Artificial Sequence: Synthetic oligonucleotide
  Sense strand starting at position 3034 of SEQ ID NO: 317340
ucaaauaguuauguaucca

SEQ ID NO: 483284 - RNA, 19 nt, Artificial Sequence
  Description of Artificial Sequence: Synthetic oligonucleotide
  Antisense Strand to SEQ ID NO: 483283
uggauacauaacuauuuga

SEQ ID NO: 483285 - RNA, 19 nt, Artificial Sequence
  Description of Artificial Sequence: Synthetic oligonucleotide
  Sense strand starting at position 3084 of SEQ ID NO: 317340
gguaaugugacaugcccaa

SEQ ID NO: 483286 - RNA, 19 nt, Artificial Sequence
  Description of Artificial Sequence: Synthetic oligonucleotide
  Antisense Strand to SEQ ID NO: 483285
uugggcaugucacauuacc

SEQ ID NO: 483287 - RNA, 19 nt, Artificial Sequence
  Description of Artificial Sequence: Synthetic oligonucleotide
  Sense strand starting at position 3137 of SEQ ID NO: 317340
aggucugacugguucugaa

SEQ ID NO: 483288 - RNA, 19 nt, Artificial Sequence
  Description of Artificial Sequence: Synthetic oligonucleotide
  Antisense Strand to SEQ ID NO: 483287
uucagaaccagucagaccu

SEQ ID NO: 483289 - RNA, 19 nt, Artificial Sequence
  Description of Artificial Sequence: Synthetic oligonucleotide
  Sense strand starting at position 3144 of SEQ ID NO: 317340
acugguucugaaggcuuua

SEQ ID NO: 483290 - RNA, 19 nt, Artificial Sequence
  Description of Artificial Sequence: Synthetic oligonucleotide
  Antisense Strand to SEQ ID NO: 483289
uaaagccuucagaaccagu

SEQ ID NO: 483291 - RNA, 19 nt, Artificial Sequence
  Description of Artificial Sequence: Synthetic oligonucleotide
  Sense strand starting at position 3766 of SEQ ID NO: 317340
aaaggacacuuugagagaa

SEQ ID NO: 483292 - RNA, 19 nt, Artificial Sequence
  Description of Artificial Sequence: Synthetic oligonucleotide
  Antisense Strand to SEQ ID NO: 483291
uucucucaaaguguccuuu

SEQ ID NO: 483293 - RNA, 19 nt, Artificial Sequence
  Description of Artificial Sequence: Synthetic oligonucleotide
  Sense strand starting at position 3791 of SEQ ID NO: 317340
guggcagcaaucugaaagu

SEQ ID NO: 483294 - RNA, 19 nt, Artificial Sequence
  Description of Artificial Sequence: Synthetic oligonucleotide
  Antisense Strand to SEQ ID NO: 483293
acuuucagauugcugccac

SEQ ID NO: 483295 - RNA, 19 nt, Artificial Sequence
  Description of Artificial Sequence: Synthetic oligonucleotide
  Sense strand starting at position 3899 of SEQ ID NO: 317340
ggaagaugguguucucucu

SEQ ID NO: 483296 - RNA, 19 nt, Artificial Sequence
  Description of Artificial Sequence: Synthetic oligonucleotide
  Antisense Strand to SEQ ID NO: 483295
agagagaacaccaucuucc

SEQ ID NO: 483297 - RNA, 19 nt, Artificial Sequence
  Description of Artificial Sequence: Synthetic oligonucleotide
  Sense strand starting at position 59 of SEQ ID NO: 317341
acuuaacuccuuugagagc

SEQ ID NO: 483298 - RNA, 19 nt, Artificial Sequence
  Description of Artificial Sequence: Synthetic oligonucleotide
  Antisense Strand to SEQ ID NO: 483297
gcucucaaaggaguuaagu

SEQ ID NO: 483299 - RNA, 19 nt, Artificial Sequence
  Description of Artificial Sequence: Synthetic oligonucleotide
  Sense strand starting at position 65 of SEQ ID NO: 317341
cuccuuugagagcaauaug

SEQ ID NO: 483300 - RNA, 19 nt, Artificial Sequence
  Description of Artificial Sequence: Synthetic oligonucleotide
  Antisense Strand to SEQ ID NO: 483299
cauauugcucucaaaggag

SEQ ID NO: 483301 - RNA, 19 nt, Artificial Sequence
  Description of Artificial Sequence: Synthetic oligonucleotide
  Sense strand starting at position 73 of SEQ ID NO: 317341
agagcaauaugcccacuuu

SEQ ID NO: 483302 - RNA, 19 nt, Artificial Sequence
  Description of Artificial Sequence: Synthetic oligonucleotide
  Antisense Strand to SEQ ID NO: 483301
aaagugggcauauugcucu

SEQ ID NO: 483303 - RNA, 19 nt, Artificial Sequence
  Description of Artificial Sequence: Synthetic oligonucleotide
  Sense strand starting at position 104 of SEQ ID NO: 317341
agguauccagagcaguuaa

SEQ ID NO: 483304 - RNA, 19 nt, Artificial Sequence
  Description of Artificial Sequence: Synthetic oligonucleotide
  Antisense Strand to SEQ ID NO: 483303
uuaacugcucuggauaccu

SEQ ID NO: 483305 - RNA, 19 nt, Artificial Sequence
  Description of Artificial Sequence: Synthetic oligonucleotide
  Sense strand starting at position 172 of SEQ ID NO: 317341
caggguuugccugauccca

SEQ ID NO: 483306 - RNA, 19 nt, Artificial Sequence
  Description of Artificial Sequence: Synthetic oligonucleotide
  Antisense Strand to SEQ ID NO: 483305
ugggaucaggcaaacccug

SEQ ID NO: 483307 - RNA, 19 nt, Artificial Sequence
  Description of Artificial Sequence: Synthetic oligonucleotide
  Sense strand starting at position 174 of SEQ ID NO: 317341
ggguuugccugaucccaga

SEQ ID NO: 483308 - RNA, 19 nt, Artificial Sequence
  Description of Artificial Sequence: Synthetic oligonucleotide
  Antisense Strand to SEQ ID NO: 483307
ucugggaucaggcaaaccc

SEQ ID NO: 483309 - RNA, 19 nt, Artificial Sequence
  Description of Artificial Sequence: Synthetic oligonucleotide
  Sense strand starting at position 471 of SEQ ID NO: 317341
ccucuaguggagcacuaau

SEQ ID NO: 483310 - RNA, 19 nt, Artificial Sequence
  Description of Artificial Sequence: Synthetic oligonucleotide
  Antisense Strand to SEQ ID NO: 483309
auuagugcuccacuagagg

SEQ ID NO: 483311 - RNA, 19 nt, Artificial Sequence
  Description of Artificial Sequence: Synthetic oligonucleotide
  Sense strand starting at position 775 of SEQ ID NO: 317341
gugauuuauuccgcucuga

SEQ ID NO: 483312 - RNA, 19 nt, Artificial Sequence
  Description of Artificial Sequence: Synthetic oligonucleotide
  Antisense Strand to SEQ ID NO: 483311
ucagagcggaauaaaucac

SEQ ID NO: 483313 - RNA, 19 nt, Artificial Sequence
  Description of Artificial Sequence: Synthetic oligonucleotide
  Sense strand starting at position 788 of SEQ ID NO: 317341
cucugaagucagcggaaau

SEQ ID NO: 483314 - RNA, 19 nt, Artificial Sequence
  Description of Artificial Sequence: Synthetic oligonucleotide
  Antisense Strand to SEQ ID NO: 483313
auuuccgcugacuucagag

SEQ ID NO: 483315 - RNA, 19 nt, Artificial Sequence
  Description of Artificial Sequence: Synthetic oligonucleotide
  Sense strand starting at position 789 of SEQ ID NO: 317341
ucugaagucagcggaaauu

SEQ ID NO: 483316 - RNA, 19 nt, Artificial Sequence
  Description of Artificial Sequence: Synthetic oligonucleotide
  Antisense Strand to SEQ ID NO: 483315
aauuuccgcugacuucaga

SEQ ID NO: 483317 - RNA, 19 nt, Artificial Sequence
  Description of Artificial Sequence: Synthetic oligonucleotide
  Sense strand starting at position 799 of SEQ ID NO: 317341
gcggaaauuugacccgugu

SEQ ID NO: 483318 - RNA, 19 nt, Artificial Sequence
  Description of Artificial Sequence: Synthetic oligonucleotide
  Antisense Strand to SEQ ID NO: 483317
acacgggucaaauuuccgc

SEQ ID NO: 483319 - RNA, 19 nt, Artificial Sequence
  Description of Artificial Sequence: Synthetic oligonucleotide
  Sense strand starting at position 801 of SEQ ID NO: 317341
ggaaauuugacccguguuu

SEQ ID NO: 483320 - RNA, 19 nt, Artificial Sequence
  Description of Artificial Sequence: Synthetic oligonucleotide
  Antisense Strand to SEQ ID NO: 483319
aaacacgggucaaauuucc

SEQ ID NO: 483321 - RNA, 19 nt, Artificial Sequence
  Description of Artificial Sequence: Synthetic oligonucleotide
  Sense strand starting at position 889 of SEQ ID NO: 317341
gggcauuucugaaaggcgu

SEQ ID NO: 483322 - RNA, 19 nt, Artificial Sequence
  Description of Artificial Sequence: Synthetic oligonucleotide
  Antisense Strand to SEQ ID NO: 483321
acgccuuucagaaaugccc

SEQ ID NO: 483323 - RNA, 19 nt, Artificial Sequence
  Description of Artificial Sequence: Synthetic oligonucleotide
  Sense strand starting at position 891 of SEQ ID NO: 317341
gcauuucugaaaggcguga

SEQ ID NO: 483324 - RNA, 19 nt, Artificial Sequence
  Description of Artificial Sequence: Synthetic oligonucleotide
  Antisense Strand to SEQ ID NO: 483323
ucacgccuuucagaaaugc

SEQ ID NO: 483325 - RNA, 19 nt, Artificial Sequence
  Description of Artificial Sequence: Synthetic oligonucleotide
  Sense strand starting at position 895 of SEQ ID NO: 317341
uucugaaaggcgugacaau

SEQ ID NO: 483326 - RNA, 19 nt, Artificial Sequence
  Description of Artificial Sequence: Synthetic oligonucleotide
  Antisense Strand to SEQ ID NO: 483325
auugucacgccuuucagaa

SEQ ID NO: 483327 - RNA, 19 nt, Artificial Sequence
  Description of Artificial Sequence: Synthetic oligonucleotide
  Sense strand starting at position 896 of SEQ ID NO: 317341
ucugaaaggcgugacaaua

SEQ ID NO: 483328 - RNA, 19 nt, Artificial Sequence
  Description of Artificial Sequence: Synthetic oligonucleotide
  Antisense Strand to SEQ ID NO: 483327
uauugucacgccuuucaga

SEQ ID NO: 483329 - RNA, 19 nt, Artificial Sequence
  Description of Artificial Sequence: Synthetic oligonucleotide
  Sense strand starting at position 930 of SEQ ID NO: 317341
aggguaauucgaugcagag

SEQ ID NO: 483330 - RNA, 19 nt, Artificial Sequence
  Description of Artificial Sequence: Synthetic oligonucleotide
  Antisense Strand to SEQ ID NO: 483329
cucugcaucgaauuacccu

SEQ ID NO: 483331 - RNA, 19 nt, Artificial Sequence
  Description of Artificial Sequence: Synthetic oligonucleotide
  Sense strand starting at position 932 of SEQ ID NO: 317341
gguaauucgaugcagagaa

SEQ ID NO: 483332 - RNA, 19 nt, Artificial Sequence
  Description of Artificial Sequence: Synthetic oligonucleotide
  Antisense Strand to SEQ ID NO: 483331
uucucugcaucgaauuacc

SEQ ID NO: 483333 - RNA, 19 nt, Artificial Sequence
  Description of Artificial Sequence: Synthetic oligonucleotide
  Sense strand starting at position 934 of SEQ ID NO: 317341
uaauucgaugcagagaauu

SEQ ID NO: 483334 - RNA, 19 nt, Artificial Sequence
  Description of Artificial Sequence: Synthetic oligonucleotide
  Antisense Strand to SEQ ID NO: 483333
aauucucugcaucgaauua

SEQ ID NO: 483335 - RNA, 19 nt, Artificial Sequence
  Description of Artificial Sequence: Synthetic oligonucleotide
  Sense strand starting at position 2624 of SEQ ID NO: 317341
cccggaaaucucugcagag

SEQ ID NO: 483336 - RNA, 19 nt, Artificial Sequence
  Description of Artificial Sequence: Synthetic oligonucleotide
  Antisense Strand to SEQ ID NO: 483335
cucugcagagauuuccggg

SEQ ID NO: 483337 - RNA, 19 nt, Artificial Sequence
  Description of Artificial Sequence: Synthetic oligonucleotide
  Sense strand starting at position 2626 of SEQ ID NO: 317341
cggaaaucucugcagagug

SEQ ID NO: 483338 - RNA, 19 nt, Artificial Sequence
  Description of Artificial Sequence: Synthetic oligonucleotide
  Antisense Strand to SEQ ID NO: 483337
cacucugcagagauuuccg

SEQ ID NO: 483339 - RNA, 19 nt, Artificial Sequence
  Description of Artificial Sequence: Synthetic oligonucleotide
  Sense strand starting at position 2656 of SEQ ID NO: 317341
ugccgaauucccgcguuua

SEQ ID NO: 483340 - RNA, 19 nt, Artificial Sequence
  Description of Artificial Sequence: Synthetic oligonucleotide
  Antisense Strand to SEQ ID NO: 483339
uaaacgcgggaauucggca

SEQ ID NO: 483341 - RNA, 19 nt, Artificial Sequence
  Description of Artificial Sequence: Synthetic oligonucleotide
  Sense strand starting at position 2658 of SEQ ID NO: 317341
ccgaauucccgcguuuauc

SEQ ID NO: 483342 - RNA, 19 nt, Artificial Sequence
  Description of Artificial Sequence: Synthetic oligonucleotide
  Antisense Strand to SEQ ID NO: 483341
gauaaacgcgggaauucgg

SEQ ID NO: 483343 - RNA, 19 nt, Artificial Sequence
  Description of Artificial Sequence: Synthetic oligonucleotide
  Sense strand starting at position 2742 of SEQ ID NO: 317341
ggugcagucauugaaguuu

SEQ ID NO: 483344 - RNA, 19 nt, Artificial Sequence
  Description of Artificial Sequence: Synthetic oligonucleotide
  Antisense Strand to SEQ ID NO: 483343
aaacuucaaugacugcacc

SEQ ID NO: 483345 - RNA, 19 nt, Artificial Sequence
  Description of Artificial Sequence: Synthetic oligonucleotide
  Sense strand starting at position 2750 of SEQ ID NO: 317341
cauugaaguuugucgaauc

SEQ ID NO: 483346 - RNA, 19 nt, Artificial Sequence
  Description of Artificial Sequence: Synthetic oligonucleotide
  Antisense Strand to SEQ ID NO: 483345
gauucgacaaacuucaaug

SEQ ID NO: 483347 - RNA, 19 nt, Artificial Sequence
  Description of Artificial Sequence: Synthetic oligonucleotide
  Sense strand starting at position 2793 of SEQ ID NO: 317341
agacucguuccugggauac

SEQ ID NO: 483348 - RNA, 19 nt, Artificial Sequence
  Description of Artificial Sequence: Synthetic oligonucleotide
  Antisense Strand to SEQ ID NO: 483347
guaucccaggaacgagucu

SEQ ID NO: 483349 - RNA, 19 nt, Artificial Sequence
  Description of Artificial Sequence: Synthetic oligonucleotide
  Sense strand starting at position 3166 of SEQ ID NO: 317341
gccuaagugccuuaugaaa

SEQ ID NO: 483350 - RNA, 19 nt, Artificial Sequence
  Description of Artificial Sequence: Synthetic oligonucleotide
  Antisense Strand to SEQ ID NO: 483349
uuucauaaggcacuuaggc

SEQ ID NO: 483351 - RNA, 19 nt, Artificial Sequence
  Description of Artificial Sequence: Synthetic oligonucleotide
  Sense strand starting at position 3193 of SEQ ID NO: 317341
augugaaaccugggccaaa

SEQ ID NO: 483352 - RNA, 19 nt, Artificial Sequence
  Description of Artificial Sequence: Synthetic oligonucleotide
  Antisense Strand to SEQ ID NO: 483351
uuuggcccagguuucacau

SEQ ID NO: 483353 - RNA, 19 nt, Artificial Sequence
  Description of Artificial Sequence: Synthetic oligonucleotide
  Sense strand starting at position 3245 of SEQ ID NO: 317341
ccaaucaucgucuauuggu

SEQ ID NO: 483354 - RNA, 19 nt, Artificial Sequence
  Description of Artificial Sequence: Synthetic oligonucleotide
  Antisense Strand to SEQ ID NO: 483353
accaauagacgaugauugg

SEQ ID NO: 483355 - RNA, 19 nt, Artificial Sequence
  Description of Artificial Sequence: Synthetic oligonucleotide
  Sense strand starting at position 3288 of SEQ ID NO: 317341
ucggcuuauuugucaaaca

SEQ ID NO: 483356 - RNA, 19 nt, Artificial Sequence
  Description of Artificial Sequence: Synthetic oligonucleotide
  Antisense Strand to SEQ ID NO: 483355
uguuugacaaauaagccga

SEQ ID NO: 483357 - RNA, 19 nt, Artificial Sequence
  Description of Artificial Sequence: Synthetic oligonucleotide
  Sense strand starting at position 3338 of SEQ ID NO: 317341
cggcaaguugagugaaaca

SEQ ID NO: 483358 - RNA, 19 nt, Artificial Sequence
  Description of Artificial Sequence: Synthetic oligonucleotide
  Antisense Strand to SEQ ID NO: 483357
uguuucacucaacuugccg

SEQ ID NO: 483359 - RNA, 19 nt, Artificial Sequence
  Description of Artificial Sequence: Synthetic oligonucleotide
  Sense strand starting at position 3396 of SEQ ID NO: 317341
cgcggucaaacgcauuuau

SEQ ID NO: 483360 - RNA, 19 nt, Artificial Sequence
  Description of Artificial Sequence: Synthetic oligonucleotide
  Antisense Strand to SEQ ID NO: 483359
auaaaugcguuugaccgcg

SEQ ID NO: 483361 - RNA, 19 nt, Artificial Sequence
  Description of Artificial Sequence: Synthetic oligonucleotide
  Sense strand starting at position 3442 of SEQ ID NO: 317341
gucgauuccggagaaacuu

SEQ ID NO: 483362 - RNA, 19 nt, Artificial Sequence
  Description of Artificial Sequence: Synthetic oligonucleotide
  Antisense Strand to SEQ ID NO: 483361
aaguuucuccggaaucgac

SEQ ID NO: 483363 - RNA, 19 nt, Artificial Sequence
  Description of Artificial Sequence: Synthetic oligonucleotide
  Sense strand starting at position 3558 of SEQ ID NO: 317341
agguauugggauuagcauu

SEQ ID NO: 483364 - RNA, 19 nt, Artificial Sequence
  Description of Artificial Sequence: Synthetic oligonucleotide
  Antisense Strand to SEQ ID NO: 483363
aaugcuaaucccaauaccu

SEQ ID NO: 483365 - RNA, 19 nt, Artificial Sequence
  Description of Artificial Sequence: Synthetic oligonucleotide
  Sense strand starting at position 3653 of SEQ ID NO: 317341
cucuuagaguuacauauuu

SEQ ID NO: 483366 - RNA, 19 nt, Artificial Sequence
  Description of Artificial Sequence: Synthetic oligonucleotide
  Antisense Strand to SEQ ID NO: 483365
aaauauguaacucuaagag

SEQ ID NO: 483367 - RNA, 19 nt, Artificial Sequence
  Description of Artificial Sequence: Synthetic oligonucleotide
  Sense strand starting at position 3757 of SEQ ID NO: 317341
aguuuaagcauaugggaaa

SEQ ID NO: 483368 - RNA, 19 nt, Artificial Sequence
  Description of Artificial Sequence: Synthetic oligonucleotide
  Antisense Strand to SEQ ID NO: 483367
uuucccauaugcuuaaacu

SEQ ID NO: 483369 - RNA, 19 nt, Artificial Sequence
  Description of Artificial Sequence: Synthetic oligonucleotide
  Sense strand starting at position 3783 of SEQ ID NO: 317341
gcagaaauuucuuagauau

SEQ ID NO: 483370 - RNA, 19 nt, Artificial Sequence
  Description of Artificial Sequence: Synthetic oligonucleotide
  Antisense Strand to SEQ ID NO: 483369
auaucuaagaaauuucugc

SEQ ID NO: 483371 - RNA, 19 nt, Artificial Sequence
  Description of Artificial Sequence: Synthetic oligonucleotide
  Sense strand starting at position 3824 of SEQ ID NO: 317341
aaggucuugccagacuuaa

SEQ ID NO: 483372 - RNA, 19 nt, Artificial Sequence
  Description of Artificial Sequence: Synthetic oligonucleotide
  Antisense Strand to SEQ ID NO: 483371
uuaagucuggcaagaccuu

SEQ ID NO: 483373 - RNA, 19 nt, Artificial Sequence
  Description of Artificial Sequence: Synthetic oligonucleotide
  Sense strand starting at position 3949 of SEQ ID NO: 317341
uagugauuauaaucagaug

SEQ ID NO: 483374 - RNA, 19 nt, Artificial Sequence
  Description of Artificial Sequence: Synthetic oligonucleotide
  Antisense Strand to SEQ ID NO: 483373
caucugauuauaaucacua

SEQ ID NO: 483375 - RNA, 19 nt, Artificial Sequence
  Description of Artificial Sequence: Synthetic oligonucleotide
  Sense strand starting at position 3977 of SEQ ID NO: 317341
augacauguuuacugcuaa

SEQ ID NO: 483376 - RNA, 19 nt, Artificial Sequence
  Description of Artificial Sequence: Synthetic oligonucleotide
  Antisense Strand to SEQ ID NO: 483375
uuagcaguaaacaugucau

SEQ ID NO: 483377 - RNA, 19 nt, Artificial Sequence
  Description of Artificial Sequence: Synthetic oligonucleotide
  Sense strand starting at position 91 of SEQ ID NO: 317342
uuacaaauguuucuugaug

SEQ ID NO: 483378 - RNA, 19 nt, Artificial Sequence
  Description of Artificial Sequence: Synthetic oligonucleotide
  Antisense Strand to SEQ ID NO: 483377
caucaagaaacauuuguaa

SEQ ID NO: 483379 - RNA, 19 nt, Artificial Sequence
  Description of Artificial Sequence: Synthetic oligonucleotide
  Sense strand starting at position 97 of SEQ ID NO: 317342
auguuucuugaugaaugca

SEQ ID NO: 483380 - RNA, 19 nt, Artificial Sequence
  Description of Artificial Sequence: Synthetic oligonucleotide
  Antisense Strand to SEQ ID NO: 483379
ugcauucaucaagaaacau

SEQ ID NO: 483381 - RNA, 19 nt, Artificial Sequence
  Description of Artificial Sequence: Synthetic oligonucleotide
  Sense strand starting at position 100 of SEQ ID NO: 317342
uuucuugaugaaugcacau

SEQ ID NO: 483382 - RNA, 19 nt, Artificial Sequence
  Description of Artificial Sequence: Synthetic oligonucleotide
  Antisense Strand to SEQ ID NO: 483381
augugcauucaucaagaaa

SEQ ID NO: 483383 - RNA, 19 nt, Artificial Sequence
  Description of Artificial Sequence: Synthetic oligonucleotide
  Sense strand starting at position 106 of SEQ ID NO: 317342
gaugaaugcacauguguga

SEQ ID NO: 483384 - RNA, 19 nt, Artificial Sequence
  Description of Artificial Sequence: Synthetic oligonucleotide
  Antisense Strand to SEQ ID NO: 483383
ucacacaugugcauucauc

SEQ ID NO: 483385 - RNA, 19 nt, Artificial Sequence
  Description of Artificial Sequence: Synthetic oligonucleotide
  Sense strand starting at position 198 of SEQ ID NO: 317342
guuaaucuguaguuuaaga

SEQ ID NO: 483386 - RNA, 19 nt, Artificial Sequence
  Description of Artificial Sequence: Synthetic oligonucleotide
  Antisense Strand to SEQ ID NO: 483385
ucuuaaacuacagauuaac

SEQ ID NO: 483387 - RNA, 19 nt, Artificial Sequence
  Description of Artificial Sequence: Synthetic oligonucleotide
  Sense strand starting at position 375 of SEQ ID NO: 317342
uugaguuaugcugaaagcu

SEQ ID NO: 483388 - RNA, 19 nt, Artificial Sequence
  Description of Artificial Sequence: Synthetic oligonucleotide
  Antisense Strand to SEQ ID NO: 483387
agcuuucagcauaacucaa

SEQ ID NO: 483389 - RNA, 19 nt, Artificial Sequence
  Description of Artificial Sequence: Synthetic oligonucleotide
  Sense strand starting at position 609 of SEQ ID NO: 317342
ugugguaacugauuguaug

SEQ ID NO: 483390 - RNA, 19 nt, Artificial Sequence
  Description of Artificial Sequence: Synthetic oligonucleotide
  Antisense Strand to SEQ ID NO: 483389
cauacaaucaguuaccaca

SEQ ID NO: 483391 - RNA, 19 nt, Artificial Sequence
  Description of Artificial Sequence: Synthetic oligonucleotide
  Sense strand starting at position 615 of SEQ ID NO: 317342
aacugauuguaugcgauuu

SEQ ID NO: 483392 - RNA, 19 nt, Artificial Sequence
  Description of Artificial Sequence: Synthetic oligonucleotide
  Antisense Strand to SEQ ID NO: 483391
aaaucgcauacaaucaguu

SEQ ID NO: 483393 - RNA, 19 nt, Artificial Sequence
  Description of Artificial Sequence: Synthetic oligonucleotide
  Sense strand starting at position 2032 of SEQ ID NO: 317342
gcuaauugccaagggauag

SEQ ID NO: 483394 - RNA, 19 nt, Artificial Sequence
  Description of Artificial Sequence: Synthetic oligonucleotide
  Antisense Strand to SEQ ID NO: 483393
cuaucccuuggcaauuagc

SEQ ID NO: 483395 - RNA, 19 nt, Artificial Sequence
  Description of Artificial Sequence: Synthetic oligonucleotide
  Sense strand starting at position 2090 of SEQ ID NO: 317342
aggagaauuucagggagug

SEQ ID NO: 483396 - RNA, 19 nt, Artificial Sequence
  Description of Artificial Sequence: Synthetic oligonucleotide
  Antisense Strand to SEQ ID NO: 483395
cacucccugaaauucuccu

SEQ ID NO: 483397 - RNA, 19 nt, Artificial Sequence
  Description of Artificial Sequence: Synthetic oligonucleotide
  Sense strand starting at position 2170 of SEQ ID NO: 317342
agaagcaaugccuaaguga

SEQ ID NO: 483398 - RNA, 19 nt, Artificial Sequence
  Description of Artificial Sequence: Synthetic oligonucleotide
  Antisense Strand to SEQ ID NO: 483397
ucacuuaggcauugcuucu

SEQ ID NO: 483399 - RNA, 19 nt, Artificial Sequence
  Description of Artificial Sequence: Synthetic oligonucleotide
  Sense strand starting at position 2173 of SEQ ID NO: 317342
agcaaugccuaagugauuu

SEQ ID NO: 483400 - RNA, 19 nt, Artificial Sequence
  Description of Artificial Sequence: Synthetic oligonucleotide
  Antisense Strand to SEQ ID NO: 483399
aaaucacuuaggcauugcu

SEQ ID NO: 483401 - RNA, 19 nt, Artificial Sequence
  Description of Artificial Sequence: Synthetic oligonucleotide
  Sense strand starting at position 2191 of SEQ ID NO: 317342
uggguaaacguuuaaguac

SEQ ID NO: 483402 - RNA, 19 nt, Artificial Sequence
  Description of Artificial Sequence: Synthetic oligonucleotide
  Antisense Strand to SEQ ID NO: 483401
guacuuaaacguuuaccca

SEQ ID NO: 483403 - RNA, 19 nt, Artificial Sequence
  Description of Artificial Sequence: Synthetic oligonucleotide
  Sense strand starting at position 2424 of SEQ ID NO: 317342
guacuagguacucgggaaa

SEQ ID NO: 483404 - RNA, 19 nt, Artificial Sequence
  Description of Artificial Sequence: Synthetic oligonucleotide
  Antisense Strand to SEQ ID NO: 483403
uuucccgaguaccuaguac

SEQ ID NO: 483405 - RNA, 19 nt, Artificial Sequence
  Description of Artificial Sequence: Synthetic oligonucleotide
  Sense strand starting at position 2439 of SEQ ID NO: 317342
gaaagaauguuguucugau

SEQ ID NO: 483406 - RNA, 19 nt, Artificial Sequence
  Description of Artificial Sequence: Synthetic oligonucleotide
  Antisense Strand to SEQ ID NO: 483405
aucagaacaacauucuuuc

SEQ ID NO: 483407 - RNA, 19 nt, Artificial Sequence
  Description of Artificial Sequence: Synthetic oligonucleotide
  Sense strand starting at position 2440 of SEQ ID NO: 317342
aaagaauguuguucugauu

SEQ ID NO: 483408 - RNA, 19 nt, Artificial Sequence
  Description of Artificial Sequence: Synthetic oligonucleotide
  Antisense Strand to SEQ ID NO: 483407
aaucagaacaacauucuuu

SEQ ID NO: 483409 - RNA, 19 nt, Artificial Sequence
  Description of Artificial Sequence: Synthetic oligonucleotide
  Sense strand starting at position 2562 of SEQ ID NO: 317342
agccucagcuauuuaguua

SEQ ID NO: 483410 - RNA, 19 nt, Artificial Sequence
  Description of Artificial Sequence: Synthetic oligonucleotide
  Antisense Strand to SEQ ID NO: 483409
uaacuaaauagcugaggcu

SEQ ID NO: 483411 - RNA, 19 nt, Artificial Sequence
  Description of Artificial Sequence: Synthetic oligonucleotide
  Sense strand starting at position 2644 of SEQ ID NO: 317342
augggauaaugagaauuaa

SEQ ID NO: 483412 - RNA, 19 nt, Artificial Sequence
  Description of Artificial Sequence: Synthetic oligonucleotide
  Antisense Strand to SEQ ID NO: 483411
uuaauucucauuaucccau

SEQ ID NO: 483413 - RNA, 19 nt, Artificial Sequence
  Description of Artificial Sequence: Synthetic oligonucleotide
  Sense strand starting at position 2713 of SEQ ID NO: 317342
gguguuuguacuuauaauu

SEQ ID NO: 483414 - RNA, 19 nt, Artificial Sequence
  Description of Artificial Sequence: Synthetic oligonucleotide
  Antisense Strand to SEQ ID NO: 483413
aauuauaaguacaaacacc

SEQ ID NO: 483415 - RNA, 19 nt, Artificial Sequence
  Description of Artificial Sequence: Synthetic oligonucleotide
  Sense strand starting at position 2745 of SEQ ID NO: 317342
uauggaaaggcagguauau

SEQ ID NO: 483416 - RNA, 19 nt, Artificial Sequence
  Description of Artificial Sequence: Synthetic oligonucleotide
  Antisense Strand to SEQ ID NO: 483415
auauaccugccuuuccaua

SEQ ID NO: 483417 - RNA, 19 nt, Artificial Sequence
  Description of Artificial Sequence: Synthetic oligonucleotide
  Sense strand starting at position 2875 of SEQ ID NO: 317342
accuuauguaaugguagua

SEQ ID NO: 483418 - RNA, 19 nt, Artificial Sequence
  Description of Artificial Sequence: Synthetic oligonucleotide
  Antisense Strand to SEQ ID NO: 483417
uacuaccauuacauaaggu

SEQ ID NO: 483419 - RNA, 19 nt, Artificial Sequence
  Description of Artificial Sequence: Synthetic oligonucleotide
  Sense strand starting at position 2888 of SEQ ID NO: 317342
guaguaugugaauggaaac

SEQ ID NO: 483420 - RNA, 19 nt, Artificial Sequence
  Description of Artificial Sequence: Synthetic oligonucleotide
  Antisense Strand to SEQ ID NO: 483419
guuuccauucacauacuac

SEQ ID NO: 483421 - RNA, 19 nt, Artificial Sequence
  Description of Artificial Sequence: Synthetic oligonucleotide
  Sense strand starting at position 2920 of SEQ ID NO: 317342
agguguaccaaaugaaagu

SEQ ID NO: 483422 - RNA, 19 nt, Artificial Sequence
  Description of Artificial Sequence: Synthetic oligonucleotide
  Antisense Strand to SEQ ID NO: 483421
acuuucauuugguacaccu

SEQ ID NO: 483423 - RNA, 19 nt, Artificial Sequence
  Description of Artificial Sequence: Synthetic oligonucleotide
  Sense strand starting at position 2929 of SEQ ID NO: 317342
aaaugaaaguaugugguaa

SEQ ID NO: 483424 - RNA, 19 nt, Artificial Sequence
  Description of Artificial Sequence: Synthetic oligonucleotide
  Antisense Strand to SEQ ID NO: 483423
uuaccacauacuuucauuu

SEQ ID NO: 483425 - RNA, 19 nt, Artificial Sequence
  Description of Artificial Sequence: Synthetic oligonucleotide
  Sense strand starting at position 3096 of SEQ ID NO: 317342
ugaacagcuuucuuucuga

SEQ ID NO: 483426 - RNA, 19 nt, Artificial Sequence
  Description of Artificial Sequence: Synthetic oligonucleotide
  Antisense Strand to SEQ ID NO: 483425
ucagaaagaaagcuguuca

SEQ ID NO: 483427 - RNA, 19 nt, Artificial Sequence
  Description of Artificial Sequence: Synthetic oligonucleotide
  Sense strand starting at position 3236 of SEQ ID NO: 317342
gcauaagcucaagagaucu

SEQ ID NO: 483428 - RNA, 19 nt, Artificial Sequence
  Description of Artificial Sequence: Synthetic oligonucleotide
  Antisense Strand to SEQ ID NO: 483427
agaucucuugagcuuaugc

SEQ ID NO: 483429 - RNA, 19 nt, Artificial Sequence
  Description of Artificial Sequence: Synthetic oligonucleotide
  Sense strand starting at position 3263 of SEQ ID NO: 317342
gcaugaugaccauaguuau

SEQ ID NO: 483430 - RNA, 19 nt, Artificial Sequence
  Description of Artificial Sequence: Synthetic oligonucleotide
  Antisense Strand to SEQ ID NO: 483429
auaacuauggucaucaugc

SEQ ID NO: 483431 - RNA, 19 nt, Artificial Sequence
  Description of Artificial Sequence: Synthetic oligonucleotide
  Sense strand starting at position 3266 of SEQ ID NO: 317342
ugaugaccauaguuauaac

SEQ ID NO: 483432 - RNA, 19 nt, Artificial Sequence
  Description of Artificial Sequence: Synthetic oligonucleotide
  Antisense Strand to SEQ ID NO: 483431
guuauaacuauggucauca

SEQ ID NO: 483433 - RNA, 19 nt, Artificial Sequence
  Description of Artificial Sequence: Synthetic oligonucleotide
  Sense strand starting at position 3362 of SEQ ID NO: 317342
auagguuaauuccuugauu

SEQ ID NO: 483434 - RNA, 19 nt, Artificial Sequence
  Description of Artificial Sequence: Synthetic oligonucleotide
  Antisense Strand to SEQ ID NO: 483433
aaucaaggaauuaaccuau

SEQ ID NO: 483435 - RNA, 19 nt, Artificial Sequence
  Description of Artificial Sequence: Synthetic oligonucleotide
  Sense strand starting at position 3418 of SEQ ID NO: 317342
ugugguacaccauaaguau

SEQ ID NO: 483436 - RNA, 19 nt, Artificial Sequence
  Description of Artificial Sequence: Synthetic oligonucleotide
  Antisense Strand to SEQ ID NO: 483435
auacuuaugguguaccaca

SEQ ID NO: 483437 - RNA, 19 nt, Artificial Sequence
  Description of Artificial Sequence: Synthetic oligonucleotide
  Sense strand starting at position 3421 of SEQ ID NO: 317342
gguacaccauaaguauaua

SEQ ID NO: 483438 - RNA, 19 nt, Artificial Sequence
  Description of Artificial Sequence: Synthetic oligonucleotide
  Antisense Strand to SEQ ID NO: 483437
uauauacuuaugguguacc

SEQ ID NO: 483439 - RNA, 19 nt, Artificial Sequence
  Description of Artificial Sequence: Synthetic oligonucleotide
  Sense strand starting at position 3697 of SEQ ID NO: 317342
ccaucuucuguugaucaga

SEQ ID NO: 483440 - RNA, 19 nt, Artificial Sequence
  Description of Artificial Sequence: Synthetic oligonucleotide
  Antisense Strand to SEQ ID NO: 483439
ucugaucaacagaagaugg

SEQ ID NO: 483441 - RNA, 19 nt, Artificial Sequence
  Description of Artificial Sequence: Synthetic oligonucleotide
  Sense strand starting at position 3699 of SEQ ID NO: 317342
aucuucuguugaucagauu

SEQ ID NO: 483442 - RNA, 19 nt, Artificial Sequence
  Description of Artificial Sequence: Synthetic oligonucleotide
  Antisense Strand to SEQ ID NO: 483441
aaucugaucaacagaagau

SEQ ID NO: 483443 - RNA, 19 nt, Artificial Sequence
  Description of Artificial Sequence: Synthetic oligonucleotide
  Sense strand starting at position 3724 of SEQ ID NO: 317342
auguuaaagcugcaagaga

SEQ ID NO: 483444 - RNA, 19 nt, Artificial Sequence
  Description of Artificial Sequence: Synthetic oligonucleotide
  Antisense Strand to SEQ ID NO: 483443
ucucuugcagcuuuaacau

SEQ ID NO: 483445 - RNA, 19 nt, Artificial Sequence
  Description of Artificial Sequence: Synthetic oligonucleotide
  Sense strand starting at position 3795 of SEQ ID NO: 317342
gguuaaaugaucugaccag

SEQ ID NO: 483446 - RNA, 19 nt, Artificial Sequence
  Description of Artificial Sequence: Synthetic oligonucleotide
  Antisense Strand to SEQ ID NO: 483445
cuggucagaucauuuaacc

SEQ ID NO: 483447 - RNA, 19 nt, Artificial Sequence
  Description of Artificial Sequence: Synthetic oligonucleotide
  Sense strand starting at position 3812 of SEQ ID NO: 317342
agaguaauccugcaagcaa

SEQ ID NO: 483448 - RNA, 19 nt, Artificial Sequence
  Description of Artificial Sequence: Synthetic oligonucleotide
  Antisense Strand to SEQ ID NO: 483447
uugcuugcaggauuacucu

SEQ ID NO: 483449 - RNA, 19 nt, Artificial Sequence
  Description of Artificial Sequence: Synthetic oligonucleotide
  Sense strand starting at position 3860 of SEQ ID NO: 317342
gacguuuaggaaugaaauc

SEQ ID NO: 483450 - RNA, 19 nt, Artificial Sequence
  Description of Artificial Sequence: Synthetic oligonucleotide
  Antisense Strand to SEQ ID NO: 483449
gauuucauuccuaaacguc

SEQ ID NO: 483451 - RNA, 19 nt, Artificial Sequence
  Description of Artificial Sequence: Synthetic oligonucleotide
  Sense strand starting at position 3871 of SEQ ID NO: 317342
augaaauccuagcuuaagu

SEQ ID NO: 483452 - RNA, 19 nt, Artificial Sequence
  Description of Artificial Sequence: Synthetic oligonucleotide
  Antisense Strand to SEQ ID NO: 483451
acuuaagcuaggauuucau

SEQ ID NO: 483453 - RNA, 19 nt, Artificial Sequence
  Description of Artificial Sequence: Synthetic oligonucleotide
  Sense strand starting at position 3964 of SEQ ID NO: 317342
ucuguuaggauaugugauu

SEQ ID NO: 483454 - RNA, 19 nt, Artificial Sequence
  Description of Artificial Sequence: Synthetic oligonucleotide
  Antisense Strand to SEQ ID NO: 483453
aaucacauauccuaacaga

SEQ ID NO: 483455 - RNA, 19 nt, Artificial Sequence
  Description of Artificial Sequence: Synthetic oligonucleotide
  Sense strand starting at position 3973 of SEQ ID NO: 317342
auaugugauuuggaugcaa

SEQ ID NO: 483456 - RNA, 19 nt, Artificial Sequence
  Description of Artificial Sequence: Synthetic oligonucleotide
  Antisense Strand to SEQ ID NO: 483455
uugcauccaaaucacauau

SEQ ID NO: 483457 - RNA, 19 nt, Artificial Sequence
  Description of Artificial Sequence: Synthetic oligonucleotide
  Sense strand starting at position 26 of SEQ ID NO: 317343
uucuaucacucuuugggua

SEQ ID NO: 483458 - RNA, 19 nt, Artificial Sequence
  Description of Artificial Sequence: Synthetic oligonucleotide
  Antisense Strand to SEQ ID NO: 483457
uacccaaagagugauagaa

SEQ ID NO: 483459 - RNA, 19 nt, Artificial Sequence
  Description of Artificial Sequence: Synthetic oligonucleotide
  Sense strand starting at position 27 of SEQ ID NO: 317343
ucuaucacucuuuggguaa

SEQ ID NO: 483460 - RNA, 19 nt, Artificial Sequence
  Description of Artificial Sequence: Synthetic oligonucleotide
  Antisense Strand to SEQ ID NO: 483459
uuacccaaagagugauaga

SEQ ID NO: 483461 - RNA, 19 nt, Artificial Sequence
  Description of Artificial Sequence: Synthetic oligonucleotide
  Sense strand starting at position 109 of SEQ ID NO: 317343
gccuuaugaacagggauca

SEQ ID NO: 483462 - RNA, 19 nt, Artificial Sequence
  Description of Artificial Sequence: Synthetic oligonucleotide
  Antisense Strand to SEQ ID NO: 483461
ugaucccuguucauaaggc

SEQ ID NO: 483463 - RNA, 19 nt, Artificial Sequence
  Description of Artificial Sequence: Synthetic oligonucleotide
  Sense strand starting at position 186 of SEQ ID NO: 317343
aguaacuaggcuuaagagu

SEQ ID NO: 483464 - RNA, 19 nt, Artificial Sequence
  Description of Artificial Sequence: Synthetic oligonucleotide
  Antisense Strand to SEQ ID NO: 483463
acucuuaagccuaguuacu

SEQ ID NO: 483465 - RNA, 19 nt, Artificial Sequence
  Description of Artificial Sequence: Synthetic oligonucleotide
  Sense strand starting at position 337 of SEQ ID NO: 317343
gaaagugagccucagagua

SEQ ID NO: 483466 - RNA, 19 nt, Artificial Sequence
  Description of Artificial Sequence: Synthetic oligonucleotide
  Antisense Strand to SEQ ID NO: 483465
uacucugaggcucacuuuc

SEQ ID NO: 483467 - RNA, 19 nt, Artificial Sequence
  Description of Artificial Sequence: Synthetic oligonucleotide
  Sense strand starting at position 424 of SEQ ID NO: 317343
cucagaacacugcaaaguu

SEQ ID NO: 483468 - RNA, 19 nt, Artificial Sequence
  Description of Artificial Sequence: Synthetic oligonucleotide
  Antisense Strand to SEQ ID NO: 483467
aacuuugcaguguucugag

SEQ ID NO: 483469 - RNA, 19 nt, Artificial Sequence
  Description of Artificial Sequence: Synthetic oligonucleotide
  Sense strand starting at position 448 of SEQ ID NO: 317343
ccugcaauaccagagucua

SEQ ID NO: 483470 - RNA, 19 nt, Artificial Sequence
  Description of Artificial Sequence: Synthetic oligonucleotide
  Antisense Strand to SEQ ID NO: 483469
uagacucugguauugcagg

SEQ ID NO: 483471 - RNA, 19 nt, Artificial Sequence
  Description of Artificial Sequence: Synthetic oligonucleotide
  Sense strand starting at position 670 of SEQ ID NO: 317343
ggcuuaugacaauauagcu

SEQ ID NO: 483472 - RNA, 19 nt, Artificial Sequence
  Description of Artificial Sequence: Synthetic oligonucleotide
  Antisense Strand to SEQ ID NO: 483471
agcuauauugucauaagcc

SEQ ID NO: 483473 - RNA, 19 nt, Artificial Sequence
  Description of Artificial Sequence: Synthetic oligonucleotide
  Sense strand starting at position 727 of SEQ ID NO: 317343
ccuagaaggacguggaaau

SEQ ID NO: 483474 - RNA, 19 nt, Artificial Sequence
  Description of Artificial Sequence: Synthetic oligonucleotide
  Antisense Strand to SEQ ID NO: 483473
auuuccacguccuucuagg

SEQ ID NO: 483475 - RNA, 19 nt, Artificial Sequence
  Description of Artificial Sequence: Synthetic oligonucleotide
  Sense strand starting at position 753 of SEQ ID NO: 317343
ggaugugauaacugucaau

SEQ ID NO: 483476 - RNA, 19 nt, Artificial Sequence
  Description of Artificial Sequence: Synthetic oligonucleotide
  Antisense Strand to SEQ ID NO: 483475
auugacaguuaucacaucc

SEQ ID NO: 483477 - RNA, 19 nt, Artificial Sequence
  Description of Artificial Sequence: Synthetic oligonucleotide
  Sense strand starting at position 1051 of SEQ ID NO: 317343
ggugauaccucaucaagca

SEQ ID NO: 483478 - RNA, 19 nt, Artificial Sequence
  Description of Artificial Sequence: Synthetic oligonucleotide
  Antisense Strand to SEQ ID NO: 483477
ugcuugaugagguaucacc

SEQ ID NO: 483479 - RNA, 19 nt, Artificial Sequence
  Description of Artificial Sequence: Synthetic oligonucleotide
  Sense strand starting at position 1107 of SEQ ID NO: 317343
uccgaaagccaguaucuua

SEQ ID NO: 483480 - RNA, 19 nt, Artificial Sequence
  Description of Artificial Sequence: Synthetic oligonucleotide
  Antisense Strand to SEQ ID NO: 483479
uaagauacuggcuuucgga

SEQ ID NO: 483481 - RNA, 19 nt, Artificial Sequence
  Description of Artificial Sequence: Synthetic oligonucleotide
  Sense strand starting at position 2662 of SEQ ID NO: 317343
acaguuaagagaggucuaa

SEQ ID NO: 483482 - RNA, 19 nt, Artificial Sequence
  Description of Artificial Sequence: Synthetic oligonucleotide
  Antisense Strand to SEQ ID NO: 483481
uuagaccucucuuaacugu

SEQ ID NO: 483483 - RNA, 19 nt, Artificial Sequence
  Description of Artificial Sequence: Synthetic oligonucleotide
  Sense strand starting at position 2875 of SEQ ID NO: 317343
uggaucacuuccuucggaa

SEQ ID NO: 483484 - RNA, 19 nt, Artificial Sequence
  Description of Artificial Sequence: Synthetic oligonucleotide
  Antisense Strand to SEQ ID NO: 483483
uuccgaaggaagugaucca

SEQ ID NO: 483485 - RNA, 19 nt, Artificial Sequence
  Description of Artificial Sequence: Synthetic oligonucleotide
  Sense strand starting at position 2946 of SEQ ID NO: 317343
guuaaacacgcugacagau

SEQ ID NO: 483486 - RNA, 19 nt, Artificial Sequence
  Description of Artificial Sequence: Synthetic oligonucleotide
  Antisense Strand to SEQ ID NO: 483485
aucugucagcguguuuaac

SEQ ID NO: 483487 - RNA, 19 nt, Artificial Sequence
  Description of Artificial Sequence: Synthetic oligonucleotide
  Sense strand starting at position 2982 of SEQ ID NO: 317343
auuguaagaaugugaaguc

SEQ ID NO: 483488 - RNA, 19 nt, Artificial Sequence
  Description of Artificial Sequence: Synthetic oligonucleotide
  Antisense Strand to SEQ ID NO: 483487
gacuucacauucuuacaau

SEQ ID NO: 483489 - RNA, 19 nt, Artificial Sequence
  Description of Artificial Sequence: Synthetic oligonucleotide
  Sense strand starting at position 2995 of SEQ ID NO: 317343
gaagucugccuuuagaaug

SEQ ID NO: 483490 - RNA, 19 nt, Artificial Sequence
  Description of Artificial Sequence: Synthetic oligonucleotide
  Antisense Strand to SEQ ID NO: 483489
cauucuaaaggcagacuuc

SEQ ID NO: 483491 - RNA, 19 nt, Artificial Sequence
  Description of Artificial Sequence: Synthetic oligonucleotide
  Sense strand starting at position 3005 of SEQ ID NO: 317343
uuuagaaugcggcaggaaa

SEQ ID NO: 483492 - RNA, 19 nt, Artificial Sequence
  Description of Artificial Sequence: Synthetic oligonucleotide
  Antisense Strand to SEQ ID NO: 483491
uuuccugccgcauucuaaa

SEQ ID NO: 483493 - RNA, 19 nt, Artificial Sequence
  Description of Artificial Sequence: Synthetic oligonucleotide
  Sense strand starting at position 3186 of SEQ ID NO: 317343
ggacucaugccaugacuga

SEQ ID NO: 483494 - RNA, 19 nt, Artificial Sequence
  Description of Artificial Sequence: Synthetic oligonucleotide
  Antisense Strand to SEQ ID NO: 483493
ucagucauggcaugagucc

SEQ ID NO: 483495 - RNA, 19 nt, Artificial Sequence
  Description of Artificial Sequence: Synthetic oligonucleotide
  Sense strand starting at position 3341 of SEQ ID NO: 317343
cuagcacuacgugaucaau

SEQ ID NO: 483496 - RNA, 19 nt, Artificial Sequence
  Description of Artificial Sequence: Synthetic oligonucleotide
  Antisense Strand to SEQ ID NO: 483495
auugaucacguagugcuag

SEQ ID NO: 483497 - RNA, 19 nt, Artificial Sequence
  Description of Artificial Sequence: Synthetic oligonucleotide
  Sense strand starting at position 3343 of SEQ ID NO: 317343
agcacuacgugaucaauag

SEQ ID NO: 483498 - RNA, 19 nt, Artificial Sequence
  Description of Artificial Sequence: Synthetic oligonucleotide
  Antisense Strand to SEQ ID NO: 483497
cuauugaucacguagugcu

SEQ ID NO: 483499 - RNA, 19 nt, Artificial Sequence
  Description of Artificial Sequence: Synthetic oligonucleotide
  Sense strand starting at position 3347 of SEQ ID NO: 317343
cuacgugaucaauaguucu

SEQ ID NO: 483500 - RNA, 19 nt, Artificial Sequence
  Description of Artificial Sequence: Synthetic oligonucleotide
  Antisense Strand to SEQ ID NO: 483499
agaacuauugaucacguag

SEQ ID NO: 483501 - RNA, 19 nt, Artificial Sequence
  Description of Artificial Sequence: Synthetic oligonucleotide
  Sense strand starting at position 3357 of SEQ ID NO: 317343
aauaguucucaauaggugu

SEQ ID NO: 483502 - RNA, 19 nt, Artificial Sequence
  Description of Artificial Sequence: Synthetic oligonucleotide
  Antisense Strand to SEQ ID NO: 483501
acaccuauugagaacuauu

SEQ ID NO: 483503 - RNA, 19 nt, Artificial Sequence
  Description of Artificial Sequence: Synthetic oligonucleotide
  Sense strand starting at position 3473 of SEQ ID NO: 317343
ugucuaguacacugacaca

SEQ ID NO: 483504 - RNA, 19 nt, Artificial Sequence
  Description of Artificial Sequence: Synthetic oligonucleotide
  Antisense Strand to SEQ ID NO: 483503
ugugucaguguacuagaca

SEQ ID NO: 483505 - RNA, 19 nt, Artificial Sequence
  Description of Artificial Sequence: Synthetic oligonucleotide
  Sense strand starting at position 3501 of SEQ ID NO: 317343
caauacuugguuuguugaa

SEQ ID NO: 483506 - RNA, 19 nt, Artificial Sequence
  Description of Artificial Sequence: Synthetic oligonucleotide
  Antisense Strand to SEQ ID NO: 483505
uucaacaaaccaaguauug

SEQ ID NO: 483507 - RNA, 19 nt, Artificial Sequence
  Description of Artificial Sequence: Synthetic oligonucleotide
  Sense strand starting at position 3502 of SEQ ID NO: 317343
aauacuugguuuguugaaa

SEQ ID NO: 483508 - RNA, 19 nt, Artificial Sequence
  Description of Artificial Sequence: Synthetic oligonucleotide
  Antisense Strand to SEQ ID NO: 483507
uuucaacaaaccaaguauu

SEQ ID NO: 483509 - RNA, 19 nt, Artificial Sequence
  Description of Artificial Sequence: Synthetic oligonucleotide
  Sense strand starting at position 3503 of SEQ ID NO: 317343
auacuugguuuguugaaag

SEQ ID NO: 483510 - RNA, 19 nt, Artificial Sequence
  Description of Artificial Sequence: Synthetic oligonucleotide
  Antisense Strand to SEQ ID NO: 483509
cuuucaacaaaccaaguau

SEQ ID NO: 483511 - RNA, 19 nt, Artificial Sequence
  Description of Artificial Sequence: Synthetic oligonucleotide
  Sense strand starting at position 3514 of SEQ ID NO: 317343
guugaaaguuaaguagacu

SEQ ID NO: 483512 - RNA, 19 nt, Artificial Sequence
  Description of Artificial Sequence: Synthetic oligonucleotide
  Antisense Strand to SEQ ID NO: 483511
agucuacuuaacuuucaac

SEQ ID NO: 483513 - RNA, 19 nt, Artificial Sequence
  Description of Artificial Sequence: Synthetic oligonucleotide
  Sense strand starting at position 3520 of SEQ ID NO: 317343
aguuaaguagacuauaagu

SEQ ID NO: 483514 - RNA, 19 nt, Artificial Sequence
  Description of Artificial Sequence: Synthetic oligonucleotide
  Antisense Strand to SEQ ID NO: 483513
acuuauagucuacuuaacu

SEQ ID NO: 483515 - RNA, 19 nt, Artificial Sequence
  Description of Artificial Sequence: Synthetic oligonucleotide
  Sense strand starting at position 3556 of SEQ ID NO: 317343
agcuauuuauucguagcaa

SEQ ID NO: 483516 - RNA, 19 nt, Artificial Sequence
  Description of Artificial Sequence: Synthetic oligonucleotide
  Antisense Strand to SEQ ID NO: 483515
uugcuacgaauaaauagcu

SEQ ID NO: 483517 - RNA, 19 nt, Artificial Sequence
  Description of Artificial Sequence: Synthetic oligonucleotide
  Sense strand starting at position 3605 of SEQ ID NO: 317343
uaacuauaagucgaguauu

SEQ ID NO: 483518 - RNA, 19 nt, Artificial Sequence
  Description of Artificial Sequence: Synthetic oligonucleotide
  Antisense Strand to SEQ ID NO: 483517
aauacucgacuuauaguua

SEQ ID NO: 483519 - RNA, 19 nt, Artificial Sequence
  Description of Artificial Sequence: Synthetic oligonucleotide
  Sense strand starting at position 3641 of SEQ ID NO: 317343
cuagucaaaggaugugauu

SEQ ID NO: 483520 - RNA, 19 nt, Artificial Sequence
  Description of Artificial Sequence: Synthetic oligonucleotide
  Antisense Strand to SEQ ID NO: 483519
aaucacauccuuugacuag

SEQ ID NO: 483521 - RNA, 19 nt, Artificial Sequence
  Description of Artificial Sequence: Synthetic oligonucleotide
  Sense strand starting at position 3643 of SEQ ID NO: 317343
agucaaaggaugugauugu

SEQ ID NO: 483522 - RNA, 19 nt, Artificial Sequence
  Description of Artificial Sequence: Synthetic oligonucleotide
  Antisense Strand to SEQ ID NO: 483521
acaaucacauccuuugacu

SEQ ID NO: 483523 - RNA, 19 nt, Artificial Sequence
  Description of Artificial Sequence: Synthetic oligonucleotide
  Sense strand starting at position 3727 of SEQ ID NO: 317343
uucugaccagucugaacuu

SEQ ID NO: 483524 - RNA, 19 nt, Artificial Sequence
  Description of Artificial Sequence: Synthetic oligonucleotide
  Antisense Strand to SEQ ID NO: 483523
aaguucagacuggucagaa

SEQ ID NO: 483525 - RNA, 19 nt, Artificial Sequence
  Description of Artificial Sequence: Synthetic oligonucleotide
  Sense strand starting at position 3742 of SEQ ID NO: 317343
acuuguugccggaggguua

SEQ ID NO: 483526 - RNA, 19 nt, Artificial Sequence
  Description of Artificial Sequence: Synthetic oligonucleotide
  Antisense Strand to SEQ ID NO: 483525
uaacccuccggcaacaagu

SEQ ID NO: 483527 - RNA, 19 nt, Artificial Sequence
  Description of Artificial Sequence: Synthetic oligonucleotide
  Sense strand starting at position 3827 of SEQ ID NO: 317343
acuagucaguuucuauaag

SEQ ID NO: 483528 - RNA, 19 nt, Artificial Sequence
  Description of Artificial Sequence: Synthetic oligonucleotide
  Antisense Strand to SEQ ID NO: 483527
cuuauagaaacugacuagu

SEQ ID NO: 483529 - RNA, 19 nt, Artificial Sequence
  Description of Artificial Sequence: Synthetic oligonucleotide
  Sense strand starting at position 3895 of SEQ ID NO: 317343
ugaaguuagcacuaauguu

SEQ ID NO: 483530 - RNA, 19 nt, Artificial Sequence
  Description of Artificial Sequence: Synthetic oligonucleotide
  Antisense Strand to SEQ ID NO: 483529
aacauuagugcuaacuuca

SEQ ID NO: 483531 - RNA, 19 nt, Artificial Sequence
  Description of Artificial Sequence: Synthetic oligonucleotide
  Sense strand starting at position 3931 of SEQ ID NO: 317343
uguuguaguguggaacaau

SEQ ID NO: 483532 - RNA, 19 nt, Artificial Sequence
  Description of Artificial Sequence: Synthetic oligonucleotide
  Antisense Strand to SEQ ID NO: 483531
auuguuccacacuacaaca

SEQ ID NO: 483533 - RNA, 19 nt, Artificial Sequence
  Description of Artificial Sequence: Synthetic oligonucleotide
  Sense strand starting at position 3934 of SEQ ID NO: 317343
uguaguguggaacaaugaa

SEQ ID NO: 483534 - RNA, 19 nt, Artificial Sequence
  Description of Artificial Sequence: Synthetic oligonucleotide
  Antisense Strand to SEQ ID NO: 483533
uucauuguuccacacuaca

SEQ ID NO: 483535 - RNA, 19 nt, Artificial Sequence
  Description of Artificial Sequence: Synthetic oligonucleotide
  Sense strand starting at position 3976 of SEQ ID NO: 317343
cggguucuagcuguagcau

SEQ ID NO: 483536 - RNA, 19 nt, Artificial Sequence
  Description of Artificial Sequence: Synthetic oligonucleotide
  Antisense Strand to SEQ ID NO: 483535
augcuacagcuagaacccg

SEQ ID NO: 483537 - RNA, 19 nt, Artificial Sequence
  Description of Artificial Sequence: Synthetic oligonucleotide
  Sense strand starting at position 86 of SEQ ID NO: 317344
gaccuaaaggcuugaguca

SEQ ID NO: 483538 - RNA, 19 nt, Artificial Sequence
  Description of Artificial Sequence: Synthetic oligonucleotide
  Antisense Strand to SEQ ID NO: 483537
ugacucaagccuuuagguc

SEQ ID NO: 483539 - RNA, 19 nt, Artificial Sequence
  Description of Artificial Sequence: Synthetic oligonucleotide
  Sense strand starting at position 87 of SEQ ID NO: 317344
accuaaaggcuugagucau

SEQ ID NO: 483540 - RNA, 19 nt, Artificial Sequence
  Description of Artificial Sequence: Synthetic oligonucleotide
  Antisense Strand to SEQ ID NO: 483539
augacucaagccuuuaggu

SEQ ID NO: 483541 - RNA, 19 nt, Artificial Sequence
  Description of Artificial Sequence: Synthetic oligonucleotide
  Sense strand starting at position 93 of SEQ ID NO: 317344
aggcuugagucauucuuga

SEQ ID NO: 483542 - RNA, 19 nt, Artificial Sequence
  Description of Artificial Sequence: Synthetic oligonucleotide
  Antisense Strand to SEQ ID NO: 483541
ucaagaaugacucaagccu

SEQ ID NO: 483543 - RNA, 19 nt, Artificial Sequence
  Description of Artificial Sequence: Synthetic oligonucleotide
  Sense strand starting at position 113 of SEQ ID NO: 317344
gccucuuuccuguguaaac

SEQ ID NO: 483544 - RNA, 19 nt, Artificial Sequence
  Description of Artificial Sequence: Synthetic oligonucleotide
  Antisense Strand to SEQ ID NO: 483543
guuuacacaggaaagaggc

SEQ ID NO: 483545 - RNA, 19 nt, Artificial Sequence
  Description of Artificial Sequence: Synthetic oligonucleotide
  Sense strand starting at position 115 of SEQ ID NO: 317344
cucuuuccuguguaaacca

SEQ ID NO: 483546 - RNA, 19 nt, Artificial Sequence
  Description of Artificial Sequence: Synthetic oligonucleotide
  Antisense Strand to SEQ ID NO: 483545
ugguuuacacaggaaagag

SEQ ID NO: 483547 - RNA, 19 nt, Artificial Sequence
  Description of Artificial Sequence: Synthetic oligonucleotide
  Sense strand starting at position 150 of SEQ ID NO: 317344
ggucucaauugcuuuagga

SEQ ID NO: 483548 - RNA, 19 nt, Artificial Sequence
  Description of Artificial Sequence: Synthetic oligonucleotide
  Antisense Strand to SEQ ID NO: 483547
uccuaaagcaauugagacc

SEQ ID NO: 483549 - RNA, 19 nt, Artificial Sequence
  Description of Artificial Sequence: Synthetic oligonucleotide
  Sense strand starting at position 152 of SEQ ID NO: 317344
ucucaauugcuuuaggaau

SEQ ID NO: 483550 - RNA, 19 nt, Artificial Sequence
  Description of Artificial Sequence: Synthetic oligonucleotide
  Antisense Strand to SEQ ID NO: 483549
auuccuaaagcaauugaga

SEQ ID NO: 483551 - RNA, 19 nt, Artificial Sequence
  Description of Artificial Sequence: Synthetic oligonucleotide
  Sense strand starting at position 154 of SEQ ID NO: 317344
ucaauugcuuuaggaauuu

SEQ ID NO: 483552 - RNA, 19 nt, Artificial Sequence
  Description of Artificial Sequence: Synthetic oligonucleotide
  Antisense Strand to SEQ ID NO: 483551
aaauuccuaaagcaauuga

SEQ ID NO: 483553 - RNA, 19 nt, Artificial Sequence
  Description of Artificial Sequence: Synthetic oligonucleotide
  Sense strand starting at position 173 of SEQ ID NO: 317344
agcuaauguuaaggacaua

SEQ ID NO: 483554 - RNA, 19 nt, Artificial Sequence
  Description of Artificial Sequence: Synthetic oligonucleotide
  Antisense Strand to SEQ ID NO: 483553
uauguccuuaacauuagcu

SEQ ID NO: 483555 - RNA, 19 nt, Artificial Sequence
  Description of Artificial Sequence: Synthetic oligonucleotide
  Sense strand starting at position 214 of SEQ ID NO: 317344
gaaagagucuguggucugu

SEQ ID NO: 483556 - RNA, 19 nt, Artificial Sequence
  Description of Artificial Sequence: Synthetic oligonucleotide
  Antisense Strand to SEQ ID NO: 483555
acagaccacagacucuuuc

SEQ ID NO: 483557 - RNA, 19 nt, Artificial Sequence
  Description of Artificial Sequence: Synthetic oligonucleotide
  Sense strand starting at position 298 of SEQ ID NO: 317344
agaucuacauguuccaaga

SEQ ID NO: 483558 - RNA, 19 nt, Artificial Sequence
  Description of Artificial Sequence: Synthetic oligonucleotide
  Antisense Strand to SEQ ID NO: 483557
ucuuggaacauguagaucu

SEQ ID NO: 483559 - RNA, 19 nt, Artificial Sequence
  Description of Artificial Sequence: Synthetic oligonucleotide
  Sense strand starting at position 300 of SEQ ID NO: 317344
aucuacauguuccaagaga

SEQ ID NO: 483560 - RNA, 19 nt, Artificial Sequence
  Description of Artificial Sequence: Synthetic oligonucleotide
  Antisense Strand to SEQ ID NO: 483559
ucucuuggaacauguagau

SEQ ID NO: 483561 - RNA, 19 nt, Artificial Sequence
  Description of Artificial Sequence: Synthetic oligonucleotide
  Sense strand starting at position 341 of SEQ ID NO: 317344
ucaauuauguauuccuagu

SEQ ID NO: 483562 - RNA, 19 nt, Artificial Sequence
  Description of Artificial Sequence: Synthetic oligonucleotide
  Antisense Strand to SEQ ID NO: 483561
acuaggaauacauaauuga

SEQ ID NO: 483563 - RNA, 19 nt, Artificial Sequence
  Description of Artificial Sequence: Synthetic oligonucleotide
  Sense strand starting at position 352 of SEQ ID NO: 317344
uuccuagugugcucaguaa

SEQ ID NO: 483564 - RNA, 19 nt, Artificial Sequence
  Description of Artificial Sequence: Synthetic oligonucleotide
  Antisense Strand to SEQ ID NO: 483563
uuacugagcacacuaggaa

SEQ ID NO: 483565 - RNA, 19 nt, Artificial Sequence
  Description of Artificial Sequence: Synthetic oligonucleotide
  Sense strand starting at position 363 of SEQ ID NO: 317344
cucaguaagucgccacuua

SEQ ID NO: 483566 - RNA, 19 nt, Artificial Sequence
  Description of Artificial Sequence: Synthetic oligonucleotide
  Antisense Strand to SEQ ID NO: 483565
uaaguggcgacuuacugag

SEQ ID NO: 483567 - RNA, 19 nt, Artificial Sequence
  Description of Artificial Sequence: Synthetic oligonucleotide
  Sense strand starting at position 364 of SEQ ID NO: 317344
ucaguaagucgccacuuaa

SEQ ID NO: 483568 - RNA, 19 nt, Artificial Sequence
  Description of Artificial Sequence: Synthetic oligonucleotide
  Antisense Strand to SEQ ID NO: 483567
uuaaguggcgacuuacuga

SEQ ID NO: 483569 - RNA, 19 nt, Artificial Sequence
  Description of Artificial Sequence: Synthetic oligonucleotide
  Sense strand starting at position 390 of SEQ ID NO: 317344
agaguucacccguggagau

SEQ ID NO: 483570 - RNA, 19 nt, Artificial Sequence
  Description of Artificial Sequence: Synthetic oligonucleotide
  Antisense Strand to SEQ ID NO: 483569
aucuccacgggugaacucu

SEQ ID NO: 483571 - RNA, 19 nt, Artificial Sequence
  Description of Artificial Sequence: Synthetic oligonucleotide
  Sense strand starting at position 391 of SEQ ID NO: 317344
gaguucacccguggagaua

SEQ ID NO: 483572 - RNA, 19 nt, Artificial Sequence
  Description of Artificial Sequence: Synthetic oligonucleotide
  Antisense Strand to SEQ ID NO: 483571
uaucuccacgggugaacuc

SEQ ID NO: 483573 - RNA, 19 nt, Artificial Sequence
  Description of Artificial Sequence: Synthetic oligonucleotide
  Sense strand starting at position 392 of SEQ ID NO: 317344
aguucacccguggagauau

SEQ ID NO: 483574 - RNA, 19 nt, Artificial Sequence
  Description of Artificial Sequence: Synthetic oligonucleotide
  Antisense Strand to SEQ ID NO: 483573
auaucuccacgggugaacu

SEQ ID NO: 483575 - RNA, 19 nt, Artificial Sequence
  Description of Artificial Sequence: Synthetic oligonucleotide
  Sense strand starting at position 413 of SEQ ID NO: 317344
aaucuuguaucuguaggua

SEQ ID NO: 483576 - RNA, 19 nt, Artificial Sequence
  Description of Artificial Sequence: Synthetic oligonucleotide
  Antisense Strand to SEQ ID NO: 483575
uaccuacagauacaagauu

SEQ ID NO: 483577 - RNA, 19 nt, Artificial Sequence
  Description of Artificial Sequence: Synthetic oligonucleotide
  Sense strand starting at position 425 of SEQ ID NO: 317344
guagguaucugcuuagaaa

SEQ ID NO: 483578 - RNA, 19 nt, Artificial Sequence
  Description of Artificial Sequence: Synthetic oligonucleotide
  Antisense Strand to SEQ ID NO: 483577
uuucuaagcagauaccuac

SEQ ID NO: 483579 - RNA, 19 nt, Artificial Sequence
  Description of Artificial Sequence: Synthetic oligonucleotide
  Sense strand starting at position 781 of SEQ ID NO: 317344
aagguaguuucuugcauga

SEQ ID NO: 483580 - RNA, 19 nt, Artificial Sequence
  Description of Artificial Sequence: Synthetic oligonucleotide
  Antisense Strand to SEQ ID NO: 483579
ucaugcaagaaacuaccuu

SEQ ID NO: 483581 - RNA, 19 nt, Artificial Sequence
  Description of Artificial Sequence: Synthetic oligonucleotide
  Sense strand starting at position 783 of SEQ ID NO: 317344
gguaguuucuugcaugauu

SEQ ID NO: 483582 - RNA, 19 nt, Artificial Sequence
  Description of Artificial Sequence: Synthetic oligonucleotide
  Antisense Strand to SEQ ID NO: 483581
aaucaugcaagaaacuacc

SEQ ID NO: 483583 - RNA, 19 nt, Artificial Sequence
  Description of Artificial Sequence: Synthetic oligonucleotide
  Sense strand starting at position 792 of SEQ ID NO: 317344
uugcaugauuccgcgcuca

SEQ ID NO: 483584 - RNA, 19 nt, Artificial Sequence
  Description of Artificial Sequence: Synthetic oligonucleotide
  Antisense Strand to SEQ ID NO: 483583
ugagcgcggaaucaugcaa

SEQ ID NO: 483585 - RNA, 19 nt, Artificial Sequence
  Description of Artificial Sequence: Synthetic oligonucleotide
  Sense strand starting at position 794 of SEQ ID NO: 317344
gcaugauuccgcgcucagc

SEQ ID NO: 483586 - RNA, 19 nt, Artificial Sequence
  Description of Artificial Sequence: Synthetic oligonucleotide
  Antisense Strand to SEQ ID NO: 483585
gcugagcgcggaaucaugc

SEQ ID NO: 483587 - RNA, 19 nt, Artificial Sequence
  Description of Artificial Sequence: Synthetic oligonucleotide
  Sense strand starting at position 795 of SEQ ID NO: 317344
caugauuccgcgcucagca

SEQ ID NO: 483588 - RNA, 19 nt, Artificial Sequence
  Description of Artificial Sequence: Synthetic oligonucleotide
  Antisense Strand to SEQ ID NO: 483587
ugcugagcgcggaaucaug

SEQ ID NO: 483589 - RNA, 19 nt, Artificial Sequence
  Description of Artificial Sequence: Synthetic oligonucleotide
  Sense strand starting at position 800 of SEQ ID NO: 317344
uuccgcgcucagcauaauu

SEQ ID NO: 483590 - RNA, 19 nt, Artificial Sequence
  Description of Artificial Sequence: Synthetic oligonucleotide
  Antisense Strand to SEQ ID NO: 483589
aauuaugcugagcgcggaa

SEQ ID NO: 483591 - RNA, 19 nt, Artificial Sequence
  Description of Artificial Sequence: Synthetic oligonucleotide
  Sense strand starting at position 833 of SEQ ID NO: 317344
cagugaaguuggguccgau

SEQ ID NO: 483592 - RNA, 19 nt, Artificial Sequence
  Description of Artificial Sequence: Synthetic oligonucleotide
  Antisense Strand to SEQ ID NO: 483591
aucggacccaacuucacug

SEQ ID NO: 483593 - RNA, 19 nt, Artificial Sequence
  Description of Artificial Sequence: Synthetic oligonucleotide
  Sense strand starting at position 1208 of SEQ ID NO: 317344
gcagguaagcccugucaac

SEQ ID NO: 483594 - RNA, 19 nt, Artificial Sequence
  Description of Artificial Sequence: Synthetic oligonucleotide
  Antisense Strand to SEQ ID NO: 483593
guugacagggcuuaccugc

SEQ ID NO: 483595 - RNA, 19 nt, Artificial Sequence
  Description of Artificial Sequence: Synthetic oligonucleotide
  Sense strand starting at position 1269 of SEQ ID NO: 317344
ucacgagaagcucgucaga

SEQ ID NO: 483596 - RNA, 19 nt, Artificial Sequence
  Description of Artificial Sequence: Synthetic oligonucleotide
  Antisense Strand to SEQ ID NO: 483595
ucugacgagcuucucguga

SEQ ID NO: 483597 - RNA, 19 nt, Artificial Sequence
  Description of Artificial Sequence: Synthetic oligonucleotide
  Sense strand starting at position 1271 of SEQ ID NO: 317344
acgagaagcucgucagaga

SEQ ID NO: 483598 - RNA, 19 nt, Artificial Sequence
  Description of Artificial Sequence: Synthetic oligonucleotide
  Antisense Strand to SEQ ID NO: 483597
ucucugacgagcuucucgu

SEQ ID NO: 483599 - RNA, 19 nt, Artificial Sequence
  Description of Artificial Sequence: Synthetic oligonucleotide
  Sense strand starting at position 2344 of SEQ ID NO: 317344
gcagcuuuggcgggagauu

SEQ ID NO: 483600 - RNA, 19 nt, Artificial Sequence
  Description of Artificial Sequence: Synthetic oligonucleotide
  Antisense Strand to SEQ ID NO: 483599
aaucucccgccaaagcugc

SEQ ID NO: 483601 - RNA, 19 nt, Artificial Sequence
  Description of Artificial Sequence: Synthetic oligonucleotide
  Sense strand starting at position 2674 of SEQ ID NO: 317344
cugagucuuuccgguccca

SEQ ID NO: 483602 - RNA, 19 nt, Artificial Sequence
  Description of Artificial Sequence: Synthetic oligonucleotide
  Antisense Strand to SEQ ID NO: 483601
ugggaccggaaagacucag

SEQ ID NO: 483603 - RNA, 19 nt, Artificial Sequence
  Description of Artificial Sequence: Synthetic oligonucleotide
  Sense strand starting at position 2819 of SEQ ID NO: 317344
ggaguugacuggguuugua

SEQ ID NO: 483604 - RNA, 19 nt, Artificial Sequence
  Description of Artificial Sequence: Synthetic oligonucleotide
  Antisense Strand to SEQ ID NO: 483603
uacaaacccagucaacucc

SEQ ID NO: 483605 - RNA, 19 nt, Artificial Sequence
  Description of Artificial Sequence: Synthetic oligonucleotide
  Sense strand starting at position 2827 of SEQ ID NO: 317344
cuggguuuguauccugaag

SEQ ID NO: 483606 - RNA, 19 nt, Artificial Sequence
  Description of Artificial Sequence: Synthetic oligonucleotide
  Antisense Strand to SEQ ID NO: 483605
cuucaggauacaaacccag

SEQ ID NO: 483607 - RNA, 19 nt, Artificial Sequence
  Description of Artificial Sequence: Synthetic oligonucleotide
  Sense strand starting at position 2829 of SEQ ID NO: 317344
ggguuuguauccugaagaa

SEQ ID NO: 483608 - RNA, 19 nt, Artificial Sequence
  Description of Artificial Sequence: Synthetic oligonucleotide
  Antisense Strand to SEQ ID NO: 483607
uucuucaggauacaaaccc

SEQ ID NO: 483609 - RNA, 19 nt, Artificial Sequence
  Description of Artificial Sequence: Synthetic oligonucleotide
  Sense strand starting at position 2841 of SEQ ID NO: 317344
ugaagaaucccuggcucag

SEQ ID NO: 483610 - RNA, 19 nt, Artificial Sequence
  Description of Artificial Sequence: Synthetic oligonucleotide
  Antisense Strand to SEQ ID NO: 483609
cugagccagggauucuuca

SEQ ID NO: 483611 - RNA, 19 nt, Artificial Sequence
  Description of Artificial Sequence: Synthetic oligonucleotide
  Sense strand starting at position 3520 of SEQ ID NO: 317344
gaggcagugggcuaagauu

SEQ ID NO: 483612 - RNA, 19 nt, Artificial Sequence
  Description of Artificial Sequence: Synthetic oligonucleotide
  Antisense Strand to SEQ ID NO: 483611
aaucuuagcccacugccuc

SEQ ID NO: 483613 - RNA, 19 nt, Artificial Sequence
  Description of Artificial Sequence: Synthetic oligonucleotide
  Sense strand starting at position 3762 of SEQ ID NO: 317344
cucuuaguagcucaauaag

SEQ ID NO: 483614 - RNA, 19 nt, Artificial Sequence
  Description of Artificial Sequence: Synthetic oligonucleotide
  Antisense Strand to SEQ ID NO: 483613
cuuauugagcuacuaagag

SEQ ID NO: 483615 - RNA, 19 nt, Artificial Sequence
  Description of Artificial Sequence: Synthetic oligonucleotide
  Sense strand starting at position 3790 of SEQ ID NO: 317344
ugagcuaagcaauauugga

SEQ ID NO: 483616 - RNA, 19 nt, Artificial Sequence
  Description of Artificial Sequence: Synthetic oligonucleotide
  Antisense Strand to SEQ ID NO: 483615
uccaauauugcuuagcuca

SEQ ID NO: 483617 - RNA, 19 nt, Artificial Sequence
  Description of Artificial Sequence: Synthetic oligonucleotide
  Sense strand starting at position 133 of SEQ ID NO: 317345
acauuucugcuguggguca

SEQ ID NO: 483618 - RNA, 19 nt, Artificial Sequence
  Description of Artificial Sequence: Synthetic oligonucleotide
  Antisense Strand to SEQ ID NO: 483617
ugacccacagcagaaaugu

SEQ ID NO: 483619 - RNA, 19 nt, Artificial Sequence
  Description of Artificial Sequence: Synthetic oligonucleotide
  Sense strand starting at position 138 of SEQ ID NO: 317345
ucugcugugggucagagau

SEQ ID NO: 483620 - RNA, 19 nt, Artificial Sequence
  Description of Artificial Sequence: Synthetic oligonucleotide
  Antisense Strand to SEQ ID NO: 483619
aucucugacccacagcaga

SEQ ID NO: 483621 - RNA, 19 nt, Artificial Sequence
  Description of Artificial Sequence: Synthetic oligonucleotide
  Sense strand starting at position 432 of SEQ ID NO: 317345
cagaaaucagaacgagcuu

SEQ ID NO: 483622 - RNA, 19 nt, Artificial Sequence
  Description of Artificial Sequence: Synthetic oligonucleotide
  Antisense Strand to SEQ ID NO: 483621
aagcucguucugauuucug

SEQ ID NO: 483623 - RNA, 19 nt, Artificial Sequence
  Description of Artificial Sequence: Synthetic oligonucleotide
  Sense strand starting at position 444 of SEQ ID NO: 317345
cgagcuuugagucaaacag

SEQ ID NO: 483624 - RNA, 19 nt, Artificial Sequence
  Description of Artificial Sequence: Synthetic oligonucleotide
  Antisense Strand to SEQ ID NO: 483623
cuguuugacucaaagcucg

SEQ ID NO: 483625 - RNA, 19 nt, Artificial Sequence
  Description of Artificial Sequence: Synthetic oligonucleotide
  Sense strand starting at position 479 of SEQ ID NO: 317345
uuguauguugaguagaggu

SEQ ID NO: 483626 - RNA, 19 nt, Artificial Sequence
  Description of Artificial Sequence: Synthetic oligonucleotide
  Antisense Strand to SEQ ID NO: 483625
accucuacucaacauacaa

SEQ ID NO: 483627 - RNA, 19 nt, Artificial Sequence
  Description of Artificial Sequence: Synthetic oligonucleotide
  Sense strand starting at position 523 of SEQ ID NO: 317345
gguugaagucugggcagaa

SEQ ID NO: 483628 - RNA, 19 nt, Artificial Sequence
  Description of Artificial Sequence: Synthetic oligonucleotide
  Antisense Strand to SEQ ID NO: 483627
uucugcccagacuucaacc

SEQ ID NO: 483629 - RNA, 19 nt, Artificial Sequence
  Description of Artificial Sequence: Synthetic oligonucleotide
  Sense strand starting at position 524 of SEQ ID NO: 317345
guugaagucugggcagaac

SEQ ID NO: 483630 - RNA, 19 nt, Artificial Sequence
  Description of Artificial Sequence: Synthetic oligonucleotide
  Antisense Strand to SEQ ID NO: 483629
guucugcccagacuucaac

SEQ ID NO: 483631 - RNA, 19 nt, Artificial Sequence
  Description of Artificial Sequence: Synthetic oligonucleotide
  Sense strand starting at position 574 of SEQ ID NO: 317345
acgucuaacaccgauggaa

SEQ ID NO: 483632 - RNA, 19 nt, Artificial Sequence
  Description of Artificial Sequence: Synthetic oligonucleotide
  Antisense Strand to SEQ ID NO: 483631
uuccaucgguguuagacgu

SEQ ID NO: 483633 - RNA, 19 nt, Artificial Sequence
  Description of Artificial Sequence: Synthetic oligonucleotide
  Sense strand starting at position 576 of SEQ ID NO: 317345
gucuaacaccgauggaauu

SEQ ID NO: 483634 - RNA, 19 nt, Artificial Sequence
  Description of Artificial Sequence: Synthetic oligonucleotide
  Antisense Strand to SEQ ID NO: 483633
aauuccaucgguguuagac

SEQ ID NO: 483635 - RNA, 19 nt, Artificial Sequence
  Description of Artificial Sequence: Synthetic oligonucleotide
  Sense strand starting at position 577 of SEQ ID NO: 317345
ucuaacaccgauggaauua

SEQ ID NO: 483636 - RNA, 19 nt, Artificial Sequence
  Description of Artificial Sequence: Synthetic oligonucleotide
  Antisense Strand to SEQ ID NO: 483635
uaauuccaucgguguuaga

SEQ ID NO: 483637 - RNA, 19 nt, Artificial Sequence
  Description of Artificial Sequence: Synthetic oligonucleotide
  Sense strand starting at position 661 of SEQ ID NO: 317345
gucuauugagccuggauga

SEQ ID NO: 483638 - RNA, 19 nt, Artificial Sequence
  Description of Artificial Sequence: Synthetic oligonucleotide
  Antisense Strand to SEQ ID NO: 483637
ucauccaggcucaauagac

SEQ ID NO: 483639 - RNA, 19 nt, Artificial Sequence
  Description of Artificial Sequence: Synthetic oligonucleotide
  Sense strand starting at position 662 of SEQ ID NO: 317345
ucuauugagccuggaugau

SEQ ID NO: 483640 - RNA, 19 nt, Artificial Sequence
  Description of Artificial Sequence: Synthetic oligonucleotide
  Antisense Strand to SEQ ID NO: 483639
aucauccaggcucaauaga

SEQ ID NO: 483641 - RNA, 19 nt, Artificial Sequence
  Description of Artificial Sequence: Synthetic oligonucleotide
  Sense strand starting at position 719 of SEQ ID NO: 317345
caagguaagccaugguaaa

SEQ ID NO: 483642 - RNA, 19 nt, Artificial Sequence
  Description of Artificial Sequence: Synthetic oligonucleotide
  Antisense Strand to SEQ ID NO: 483641
uuuaccauggcuuaccuug

SEQ ID NO: 483643 - RNA, 19 nt, Artificial Sequence
  Description of Artificial Sequence: Synthetic oligonucleotide
  Sense strand starting at position 720 of SEQ ID NO: 317345
aagguaagccaugguaaag

SEQ ID NO: 483644 - RNA, 19 nt, Artificial Sequence
  Description of Artificial Sequence: Synthetic oligonucleotide
  Antisense Strand to SEQ ID NO: 483643
cuuuaccauggcuuaccuu

SEQ ID NO: 483645 - RNA, 19 nt, Artificial Sequence
  Description of Artificial Sequence: Synthetic oligonucleotide
  Sense strand starting at position 755 of SEQ ID NO: 317345
guuggucggacucaacaau

SEQ ID NO: 483646 - RNA, 19 nt, Artificial Sequence
  Description of Artificial Sequence: Synthetic oligonucleotide
  Antisense Strand to SEQ ID NO: 483645
auuguugaguccgaccaac

SEQ ID NO: 483647 - RNA, 19 nt, Artificial Sequence
  Description of Artificial Sequence: Synthetic oligonucleotide
  Sense strand starting at position 784 of SEQ ID NO: 317345
augugagauuacuuucucu

SEQ ID NO: 483648 - RNA, 19 nt, Artificial Sequence
  Description of Artificial Sequence: Synthetic oligonucleotide
  Antisense Strand to SEQ ID NO: 483647
agagaaaguaaucucacau

SEQ ID NO: 483649 - RNA, 19 nt, Artificial Sequence
  Description of Artificial Sequence: Synthetic oligonucleotide
  Sense strand starting at position 787 of SEQ ID NO: 317345
ugagauuacuuucucugac

SEQ ID NO: 483650 - RNA, 19 nt, Artificial Sequence
  Description of Artificial Sequence: Synthetic oligonucleotide
  Antisense Strand to SEQ ID NO: 483649
gucagagaaaguaaucuca

SEQ ID NO: 483651 - RNA, 19 nt, Artificial Sequence
  Description of Artificial Sequence: Synthetic oligonucleotide
  Sense strand starting at position 869 of SEQ ID NO: 317345
uuugucuuccacuggacaa

SEQ ID NO: 483652 - RNA, 19 nt, Artificial Sequence
  Description of Artificial Sequence: Synthetic oligonucleotide
  Antisense Strand to SEQ ID NO: 483651
uuguccaguggaagacaaa

SEQ ID NO: 483653 - RNA, 19 nt, Artificial Sequence
  Description of Artificial Sequence: Synthetic oligonucleotide
  Sense strand starting at position 1178 of SEQ ID NO: 317345
uagacagauccguaccuga

SEQ ID NO: 483654 - RNA, 19 nt, Artificial Sequence
  Description of Artificial Sequence: Synthetic oligonucleotide
  Antisense Strand to SEQ ID NO: 483653
ucagguacggaucugucua

SEQ ID NO: 483655 - RNA, 19 nt, Artificial Sequence
  Description of Artificial Sequence: Synthetic oligonucleotide
  Sense strand starting at position 2255 of SEQ ID NO: 317345
gguggauaaccucaucgau

SEQ ID NO: 483656 - RNA, 19 nt, Artificial Sequence
  Description of Artificial Sequence: Synthetic oligonucleotide
  Antisense Strand to SEQ ID NO: 483655
aucgaugagguuauccacc

SEQ ID NO: 483657 - RNA, 19 nt, Artificial Sequence
  Description of Artificial Sequence: Synthetic oligonucleotide
  Sense strand starting at position 2258 of SEQ ID NO: 317345
ggauaaccucaucgaugca

SEQ ID NO: 483658 - RNA, 19 nt, Artificial Sequence
  Description of Artificial Sequence: Synthetic oligonucleotide
  Antisense Strand to SEQ ID NO: 483657
ugcaucgaugagguuaucc

SEQ ID NO: 483659 - RNA, 19 nt, Artificial Sequence
  Description of Artificial Sequence: Synthetic oligonucleotide
  Sense strand starting at position 2284 of SEQ ID NO: 317345
ggcagaaacuguuccuaua

SEQ ID NO: 483660 - RNA, 19 nt, Artificial Sequence
  Description of Artificial Sequence: Synthetic oligonucleotide
  Antisense Strand to SEQ ID NO: 483659
uauaggaacaguuucugcc

SEQ ID NO: 483661 - RNA, 19 nt, Artificial Sequence
  Description of Artificial Sequence: Synthetic oligonucleotide
  Sense strand starting at position 2320 of SEQ ID NO: 317345
gggugcuugacuuaauaug

SEQ ID NO: 483662 - RNA, 19 nt, Artificial Sequence
  Description of Artificial Sequence: Synthetic oligonucleotide
  Antisense Strand to SEQ ID NO: 483661
cauauuaagucaagcaccc

SEQ ID NO: 483663 - RNA, 19 nt, Artificial Sequence
  Description of Artificial Sequence: Synthetic oligonucleotide
  Sense strand starting at position 2328 of SEQ ID NO: 317345
gacuuaauaugagcgauuc

SEQ ID NO: 483664 - RNA, 19 nt, Artificial Sequence
  Description of Artificial Sequence: Synthetic oligonucleotide
  Antisense Strand to SEQ ID NO: 483663
gaaucgcucauauuaaguc

SEQ ID NO: 483665 - RNA, 19 nt, Artificial Sequence
  Description of Artificial Sequence: Synthetic oligonucleotide
  Sense strand starting at position 2407 of SEQ ID NO: 317345
agucuuaaaguagaaugua

SEQ ID NO: 483666 - RNA, 19 nt, Artificial Sequence
  Description of Artificial Sequence: Synthetic oligonucleotide
  Antisense Strand to SEQ ID NO: 483665
uacauucuacuuuaagacu

SEQ ID NO: 483667 - RNA, 19 nt, Artificial Sequence
  Description of Artificial Sequence: Synthetic oligonucleotide
  Sense strand starting at position 2490 of SEQ ID NO: 317345
ccgugagauagauaccauu

SEQ ID NO: 483668 - RNA, 19 nt, Artificial Sequence
  Description of Artificial Sequence: Synthetic oligonucleotide
  Antisense Strand to SEQ ID NO: 483667
aaugguaucuaucucacgg

SEQ ID NO: 483669 - RNA, 19 nt, Artificial Sequence
  Description of Artificial Sequence: Synthetic oligonucleotide
  Sense strand starting at position 2549 of SEQ ID NO: 317345
gaggaauucucagucuuau

SEQ ID NO: 483670 - RNA, 19 nt, Artificial Sequence
  Description of Artificial Sequence: Synthetic oligonucleotide
  Antisense Strand to SEQ ID NO: 483669
auaagacugagaauuccuc

SEQ ID NO: 483671 - RNA, 19 nt, Artificial Sequence
  Description of Artificial Sequence: Synthetic oligonucleotide
  Sense strand starting at position 2625 of SEQ ID NO: 317345
cagagaagagcuuggcuaa

SEQ ID NO: 483672 - RNA, 19 nt, Artificial Sequence
  Description of Artificial Sequence: Synthetic oligonucleotide
  Antisense Strand to SEQ ID NO: 483671
uuagccaagcucuucucug

SEQ ID NO: 483673 - RNA, 19 nt, Artificial Sequence
  Description of Artificial Sequence: Synthetic oligonucleotide
  Sense strand starting at position 2626 of SEQ ID NO: 317345
agagaagagcuuggcuaau

SEQ ID NO: 483674 - RNA, 19 nt, Artificial Sequence
  Description of Artificial Sequence: Synthetic oligonucleotide
  Antisense Strand to SEQ ID NO: 483673
auuagccaagcucuucucu

SEQ ID NO: 483675 - RNA, 19 nt, Artificial Sequence
  Description of Artificial Sequence: Synthetic oligonucleotide
  Sense strand starting at position 2628 of SEQ ID NO: 317345
agaagagcuuggcuaauaa

SEQ ID NO: 483676 - RNA, 19 nt, Artificial Sequence
  Description of Artificial Sequence: Synthetic oligonucleotide
  Antisense Strand to SEQ ID NO: 483675
uuauuagccaagcucuucu

SEQ ID NO: 483677 - RNA, 19 nt, Artificial Sequence
  Description of Artificial Sequence: Synthetic oligonucleotide
  Sense strand starting at position 2783 of SEQ ID NO: 317345
gagauucccugcuugagac

SEQ ID NO: 483678 - RNA, 19 nt, Artificial Sequence
  Description of Artificial Sequence: Synthetic oligonucleotide
  Antisense Strand to SEQ ID NO: 483677
gucucaagcagggaaucuc

SEQ ID NO: 483679 - RNA, 19 nt, Artificial Sequence
  Description of Artificial Sequence: Synthetic oligonucleotide
  Sense strand starting at position 2784 of SEQ ID NO: 317345
agauucccugcuugagaca

SEQ ID NO: 483680 - RNA, 19 nt, Artificial Sequence
  Description of Artificial Sequence: Synthetic oligonucleotide
  Antisense Strand to SEQ ID NO: 483679
ugucucaagcagggaaucu

SEQ ID NO: 483681 - RNA, 19 nt, Artificial Sequence
  Description of Artificial Sequence: Synthetic oligonucleotide
  Sense strand starting at position 2797 of SEQ ID NO: 317345
gagacagguuuaucccaaa

SEQ ID NO: 483682 - RNA, 19 nt, Artificial Sequence
  Description of Artificial Sequence: Synthetic oligonucleotide
  Antisense Strand to SEQ ID NO: 483681
uuugggauaaaccugucuc

SEQ ID NO: 483683 - RNA, 19 nt, Artificial Sequence
  Description of Artificial Sequence: Synthetic oligonucleotide
  Sense strand starting at position 2831 of SEQ ID NO: 317345
agcucuuaggaauggagau

SEQ ID NO: 483684 - RNA, 19 nt, Artificial Sequence
  Description of Artificial Sequence: Synthetic oligonucleotide
  Antisense Strand to SEQ ID NO: 483683
aucuccauuccuaagagcu

SEQ ID NO: 483685 - RNA, 19 nt, Artificial Sequence
  Description of Artificial Sequence: Synthetic oligonucleotide
  Sense strand starting at position 2955 of SEQ ID NO: 317345
gugaccauaaagugauagu

SEQ ID NO: 483686 - RNA, 19 nt, Artificial Sequence
  Description of Artificial Sequence: Synthetic oligonucleotide
  Antisense Strand to SEQ ID NO: 483685
acuaucacuuuauggucac

SEQ ID NO: 483687 - RNA, 19 nt, Artificial Sequence
  Description of Artificial Sequence: Synthetic oligonucleotide
  Sense strand starting at position 3011 of SEQ ID NO: 317345
gaaaucaaggcucagucuu

SEQ ID NO: 483688 - RNA, 19 nt, Artificial Sequence
  Description of Artificial Sequence: Synthetic oligonucleotide
  Antisense Strand to SEQ ID NO: 483687
aagacugagccuugauuuc

SEQ ID NO: 483689 - RNA, 19 nt, Artificial Sequence
  Description of Artificial Sequence: Synthetic oligonucleotide
  Sense strand starting at position 3070 of SEQ ID NO: 317345
uucuucuaucugggaacuu

SEQ ID NO: 483690 - RNA, 19 nt, Artificial Sequence
  Description of Artificial Sequence: Synthetic oligonucleotide
  Antisense Strand to SEQ ID NO: 483689
aaguucccagauagaagaa

SEQ ID NO: 483691 - RNA, 19 nt, Artificial Sequence
  Description of Artificial Sequence: Synthetic oligonucleotide
  Sense strand starting at position 3107 of SEQ ID NO: 317345
ggcacagagugacuucuau

SEQ ID NO: 483692 - RNA, 19 nt, Artificial Sequence
  Description of Artificial Sequence: Synthetic oligonucleotide
  Antisense Strand to SEQ ID NO: 483691
auagaagucacucugugcc

SEQ ID NO: 483693 - RNA, 19 nt, Artificial Sequence
  Description of Artificial Sequence: Synthetic oligonucleotide
  Sense strand starting at position 3261 of SEQ ID NO: 317345
uguaaauuccacgagggca

SEQ ID NO: 483694 - RNA, 19 nt, Artificial Sequence
  Description of Artificial Sequence: Synthetic oligonucleotide
  Antisense Strand to SEQ ID NO: 483693
ugcccucguggaauuuaca

SEQ ID NO: 483695 - RNA, 19 nt, Artificial Sequence
  Description of Artificial Sequence: Synthetic oligonucleotide
  Sense strand starting at position 3301 of SEQ ID NO: 317345
aggauaauguacccuuaca

SEQ ID NO: 483696 - RNA, 19 nt, Artificial Sequence
  Description of Artificial Sequence: Synthetic oligonucleotide
  Antisense Strand to SEQ ID NO: 483695
uguaaggguacauuauccu

SEQ ID NO: 483697 - RNA, 19 nt, Artificial Sequence
  Description of Artificial Sequence: Synthetic oligonucleotide
  Sense strand starting at position 309 of SEQ ID NO: 317346
ucucauaaguggguaaaca

SEQ ID NO: 483698 - RNA, 19 nt, Artificial Sequence
  Description of Artificial Sequence: Synthetic oligonucleotide
  Antisense Strand to SEQ ID NO: 483697
uguuuacccacuuaugaga

SEQ ID NO: 483699 - RNA, 19 nt, Artificial Sequence
  Description of Artificial Sequence: Synthetic oligonucleotide
  Sense strand starting at position 340 of SEQ ID NO: 317346
ugggaaaguuaguuccuau

SEQ ID NO: 483700 - RNA, 19 nt, Artificial Sequence
  Description of Artificial Sequence: Synthetic oligonucleotide
  Antisense Strand to SEQ ID NO: 483699
auaggaacuaacuuuccca

SEQ ID NO: 483701 - RNA, 19 nt, Artificial Sequence
  Description of Artificial Sequence: Synthetic oligonucleotide
  Sense strand starting at position 364 of SEQ ID NO: 317346
augguaugagcccauuaaa

SEQ ID NO: 483702 - RNA, 19 nt, Artificial Sequence
  Description of Artificial Sequence: Synthetic oligonucleotide
  Antisense Strand to SEQ ID NO: 483701
uuuaaugggcucauaccau

SEQ ID NO: 483703 - RNA, 19 nt, Artificial Sequence
  Description of Artificial Sequence: Synthetic oligonucleotide
  Sense strand starting at position 390 of SEQ ID NO: 317346
ggugaaauauguuccauac

SEQ ID NO: 483704 - RNA, 19 nt, Artificial Sequence
  Description of Artificial Sequence: Synthetic oligonucleotide
  Antisense Strand to SEQ ID NO: 483703
guauggaacauauuucacc

SEQ ID NO: 483705 - RNA, 19 nt, Artificial Sequence
  Description of Artificial Sequence: Synthetic oligonucleotide
  Sense strand starting at position 774 of SEQ ID NO: 317346
uaaugucucccagagguau

SEQ ID NO: 483706 - RNA, 19 nt, Artificial Sequence
  Description of Artificial Sequence: Synthetic oligonucleotide
  Antisense Strand to SEQ ID NO: 483705
auaccucugggagacauua

SEQ ID NO: 483707 - RNA, 19 nt, Artificial Sequence
  Description of Artificial Sequence: Synthetic oligonucleotide
  Sense strand starting at position 811 of SEQ ID NO: 317346
ggaauaaggucacuggcuu

SEQ ID NO: 483708 - RNA, 19 nt, Artificial Sequence
  Description of Artificial Sequence: Synthetic oligonucleotide
  Antisense Strand to SEQ ID NO: 483707
aagccagugaccuuauucc

SEQ ID NO: 483709 - RNA, 19 nt, Artificial Sequence
  Description of Artificial Sequence: Synthetic oligonucleotide
  Sense strand starting at position 812 of SEQ ID NO: 317346
gaauaaggucacuggcuua

SEQ ID NO: 483710 - RNA, 19 nt, Artificial Sequence
  Description of Artificial Sequence: Synthetic oligonucleotide
  Antisense Strand to SEQ ID NO: 483709
uaagccagugaccuuauuc

SEQ ID NO: 483711 - RNA, 19 nt, Artificial Sequence
  Description of Artificial Sequence: Synthetic oligonucleotide
  Sense strand starting at position 842 of SEQ ID NO: 317346
ugcgaaucuagugaugaug

SEQ ID NO: 483712 - RNA, 19 nt, Artificial Sequence
  Description of Artificial Sequence: Synthetic oligonucleotide
  Antisense Strand to SEQ ID NO: 483711
caucaucacuagauucgca

SEQ ID NO: 483713 - RNA, 19 nt, Artificial Sequence
  Description of Artificial Sequence: Synthetic oligonucleotide
  Sense strand starting at position 910 of SEQ ID NO: 317346
uucgcauugcuccugaagu

SEQ ID NO: 483714 - RNA, 19 nt, Artificial Sequence
  Description of Artificial Sequence: Synthetic oligonucleotide
  Antisense Strand to SEQ ID NO: 483713
acuucaggagcaaugcgaa

SEQ ID NO: 483715 - RNA, 19 nt, Artificial Sequence
  Description of Artificial Sequence: Synthetic oligonucleotide
  Sense strand starting at position 958 of SEQ ID NO: 317346
gcuggauauggccaccaga

SEQ ID NO: 483716 - RNA, 19 nt, Artificial Sequence
  Description of Artificial Sequence: Synthetic oligonucleotide
  Antisense Strand to SEQ ID NO: 483715
ucugguggccauauccagc

SEQ ID NO: 483717 - RNA, 19 nt, Artificial Sequence
  Description of Artificial Sequence: Synthetic oligonucleotide
  Sense strand starting at position 1071 of SEQ ID NO: 317346
ugacuaugccacugacaca

SEQ ID NO: 483718 - RNA, 19 nt, Artificial Sequence
  Description of Artificial Sequence: Synthetic oligonucleotide
  Antisense Strand to SEQ ID NO: 483717
ugugucaguggcauaguca

SEQ ID NO: 483719 - RNA, 19 nt, Artificial Sequence
  Description of Artificial Sequence: Synthetic oligonucleotide
  Sense strand starting at position 1128 of SEQ ID NO: 317346
uugggauucuugguuuaag

SEQ ID NO: 483720 - RNA, 19 nt, Artificial Sequence
  Description of Artificial Sequence: Synthetic oligonucleotide
  Antisense Strand to SEQ ID NO: 483719
cuuaaaccaagaaucccaa

SEQ ID NO: 483721 - RNA, 19 nt, Artificial Sequence
  Description of Artificial Sequence: Synthetic oligonucleotide
  Sense strand starting at position 1333 of SEQ ID NO: 317346
cugaacaagucucugugau

SEQ ID NO: 483722 - RNA, 19 nt, Artificial Sequence
  Description of Artificial Sequence: Synthetic oligonucleotide
  Antisense Strand to SEQ ID NO: 483721
aucacagagacuuguucag

SEQ ID NO: 483723 - RNA, 19 nt, Artificial Sequence
  Description of Artificial Sequence: Synthetic oligonucleotide
  Sense strand starting at position 1334 of SEQ ID NO: 317346
ugaacaagucucugugaua

SEQ ID NO: 483724 - RNA, 19 nt, Artificial Sequence
  Description of Artificial Sequence: Synthetic oligonucleotide
  Antisense Strand to SEQ ID NO: 483723
uaucacagagacuuguuca

SEQ ID NO: 483725 - RNA, 19 nt, Artificial Sequence
  Description of Artificial Sequence: Synthetic oligonucleotide
  Sense strand starting at position 1335 of SEQ ID NO: 317346
gaacaagucucugugauau

SEQ ID NO: 483726 - RNA, 19 nt, Artificial Sequence
  Description of Artificial Sequence: Synthetic oligonucleotide
  Antisense Strand to SEQ ID NO: 483725
auaucacagagacuuguuc

SEQ ID NO: 483727 - RNA, 19 nt, Artificial Sequence
  Description of Artificial Sequence: Synthetic oligonucleotide
  Sense strand starting at position 1386 of SEQ ID NO: 317346
agauuagaagaguguuuaa

SEQ ID NO: 483728 - RNA, 19 nt, Artificial Sequence
  Description of Artificial Sequence: Synthetic oligonucleotide
  Antisense Strand to SEQ ID NO: 483727
uuaaacacucuucuaaucu

SEQ ID NO: 483729 - RNA, 19 nt, Artificial Sequence
  Description of Artificial Sequence: Synthetic oligonucleotide
  Sense strand starting at position 1389 of SEQ ID NO: 317346
uuagaagaguguuuaacac

SEQ ID NO: 483730 - RNA, 19 nt, Artificial Sequence
  Description of Artificial Sequence: Synthetic oligonucleotide
  Antisense Strand to SEQ ID NO: 483729
guguuaaacacucuucuaa

SEQ ID NO: 483731 - RNA, 19 nt, Artificial Sequence
  Description of Artificial Sequence: Synthetic oligonucleotide
  Sense strand starting at position 1465 of SEQ ID NO: 317346
ggguuacuuaccugagauc

SEQ ID NO: 483732 - RNA, 19 nt, Artificial Sequence
  Description of Artificial Sequence: Synthetic oligonucleotide
  Antisense Strand to SEQ ID NO: 483731
gaucucagguaaguaaccc

SEQ ID NO: 483733 - RNA, 19 nt, Artificial Sequence
  Description of Artificial Sequence: Synthetic oligonucleotide
  Sense strand starting at position 1585 of SEQ ID NO: 317346
agcuaauggccaggagaua

SEQ ID NO: 483734 - RNA, 19 nt, Artificial Sequence
  Description of Artificial Sequence: Synthetic oligonucleotide
  Antisense Strand to SEQ ID NO: 483733
uaucuccuggccauuagcu

SEQ ID NO: 483735 - RNA, 19 nt, Artificial Sequence
  Description of Artificial Sequence: Synthetic oligonucleotide
  Sense strand starting at position 1633 of SEQ ID NO: 317346
agagcagucccacagcaau

SEQ ID NO: 483736 - RNA, 19 nt, Artificial Sequence
  Description of Artificial Sequence: Synthetic oligonucleotide
  Antisense Strand to SEQ ID NO: 483735
auugcugugggacugcucu

SEQ ID NO: 483737 - RNA, 19 nt, Artificial Sequence
  Description of Artificial Sequence: Synthetic oligonucleotide
  Sense strand starting at position 1736 of SEQ ID NO: 317346
aguggacaccacugugaaa

SEQ ID NO: 483738 - RNA, 19 nt, Artificial Sequence
  Description of Artificial Sequence: Synthetic oligonucleotide
  Antisense Strand to SEQ ID NO: 483737
uuucacagugguguccacu

SEQ ID NO: 483739 - RNA, 19 nt, Artificial Sequence
  Description of Artificial Sequence: Synthetic oligonucleotide
  Sense strand starting at position 1941 of SEQ ID NO: 317346
cgaagucacacauggagaa

SEQ ID NO: 483740 - RNA, 19 nt, Artificial Sequence
  Description of Artificial Sequence: Synthetic oligonucleotide
  Antisense Strand to SEQ ID NO: 483739
uucuccaugugugacuucg

SEQ ID NO: 483741 - RNA, 19 nt, Artificial Sequence
  Description of Artificial Sequence: Synthetic oligonucleotide
  Sense strand starting at position 2039 of SEQ ID NO: 317346
uuaucacaggcaugaaaca

SEQ ID NO: 483742 - RNA, 19 nt, Artificial Sequence
  Description of Artificial Sequence: Synthetic oligonucleotide
  Antisense Strand to SEQ ID NO: 483741
uguuucaugccugugauaa

SEQ ID NO: 483743 - RNA, 19 nt, Artificial Sequence
  Description of Artificial Sequence: Synthetic oligonucleotide
  Sense strand starting at position 2107 of SEQ ID NO: 317346
acugaauauguaugugaga

SEQ ID NO: 483744 - RNA, 19 nt, Artificial Sequence
  Description of Artificial Sequence: Synthetic oligonucleotide
  Antisense Strand to SEQ ID NO: 483743
ucucacauacauauucagu

SEQ ID NO: 483745 - RNA, 19 nt, Artificial Sequence
  Description of Artificial Sequence: Synthetic oligonucleotide
  Sense strand starting at position 2108 of SEQ ID NO: 317346
cugaauauguaugugagau

SEQ ID NO: 483746 - RNA, 19 nt, Artificial Sequence
  Description of Artificial Sequence: Synthetic oligonucleotide
  Antisense Strand to SEQ ID NO: 483745
aucucacauacauauucag

SEQ ID NO: 483747 - RNA, 19 nt, Artificial Sequence
  Description of Artificial Sequence: Synthetic oligonucleotide
  Sense strand starting at position 2114 of SEQ ID NO: 317346
auguaugugagaugagaca

SEQ ID NO: 483748 - RNA, 19 nt, Artificial Sequence
  Description of Artificial Sequence: Synthetic oligonucleotide
  Antisense Strand to SEQ ID NO: 483747
ugucucaucucacauacau

SEQ ID NO: 483749 - RNA, 19 nt, Artificial Sequence
  Description of Artificial Sequence: Synthetic oligonucleotide
  Sense strand starting at position 2179 of SEQ ID NO: 317346
cacauugugucccuggaaa

SEQ ID NO: 483750 - RNA, 19 nt, Artificial Sequence
  Description of Artificial Sequence: Synthetic oligonucleotide
  Antisense Strand to SEQ ID NO: 483749
uuuccagggacacaaugug

SEQ ID NO: 483751 - RNA, 19 nt, Artificial Sequence
  Description of Artificial Sequence: Synthetic oligonucleotide
  Sense strand starting at position 2586 of SEQ ID NO: 317346
auaagagucuacuuugaga

SEQ ID NO: 483752 - RNA, 19 nt, Artificial Sequence
  Description of Artificial Sequence: Synthetic oligonucleotide
  Antisense Strand to SEQ ID NO: 483751
ucucaaaguagacucuuau

SEQ ID NO: 483753 - RNA, 19 nt, Artificial Sequence
  Description of Artificial Sequence: Synthetic oligonucleotide
  Sense strand starting at position 2588 of SEQ ID NO: 317346
aagagucuacuuugagaua

SEQ ID NO: 483754 - RNA, 19 nt, Artificial Sequence
  Description of Artificial Sequence: Synthetic oligonucleotide
  Antisense Strand to SEQ ID NO: 483753
uaucucaaaguagacucuu

SEQ ID NO: 483755 - RNA, 19 nt, Artificial Sequence
  Description of Artificial Sequence: Synthetic oligonucleotide
  Sense strand starting at position 2657 of SEQ ID NO: 317346
uaaagagcuuggucugaaa

SEQ ID NO: 483756 - RNA, 19 nt, Artificial Sequence
  Description of Artificial Sequence: Synthetic oligonucleotide
  Antisense Strand to SEQ ID NO: 483755
uuucagaccaagcucuuua

SEQ ID NO: 483757 - RNA, 19 nt, Artificial Sequence
  Description of Artificial Sequence: Synthetic oligonucleotide
  Sense strand starting at position 2659 of SEQ ID NO: 317346
aagagcuuggucugaaaug

SEQ ID NO: 483758 - RNA, 19 nt, Artificial Sequence
  Description of Artificial Sequence: Synthetic oligonucleotide
  Antisense Strand to SEQ ID NO: 483757
cauuucagaccaagcucuu

SEQ ID NO: 483759 - RNA, 19 nt, Artificial Sequence
  Description of Artificial Sequence: Synthetic oligonucleotide
  Sense strand starting at position 2664 of SEQ ID NO: 317346
cuuggucugaaauggagau

SEQ ID NO: 483760 - RNA, 19 nt, Artificial Sequence
  Description of Artificial Sequence: Synthetic oligonucleotide
  Antisense Strand to SEQ ID NO: 483759
aucuccauuucagaccaag

SEQ ID NO: 483761 - RNA, 19 nt, Artificial Sequence
  Description of Artificial Sequence: Synthetic oligonucleotide
  Sense strand starting at position 2893 of SEQ ID NO: 317346
gagggauacuagcuaugca

SEQ ID NO: 483762 - RNA, 19 nt, Artificial Sequence
  Description of Artificial Sequence: Synthetic oligonucleotide
  Antisense Strand to SEQ ID NO: 483761
ugcauagcuaguaucccuc

SEQ ID NO: 483763 - RNA, 19 nt, Artificial Sequence
  Description of Artificial Sequence: Synthetic oligonucleotide
  Sense strand starting at position 2894 of SEQ ID NO: 317346
agggauacuagcuaugcau

SEQ ID NO: 483764 - RNA, 19 nt, Artificial Sequence
  Description of Artificial Sequence: Synthetic oligonucleotide
  Antisense Strand to SEQ ID NO: 483763
augcauagcuaguaucccu

SEQ ID NO: 483765 - RNA, 19 nt, Artificial Sequence
  Description of Artificial Sequence: Synthetic oligonucleotide
  Sense strand starting at position 2958 of SEQ ID NO: 317346
aggacaugcugacuguaua

SEQ ID NO: 483766 - RNA, 19 nt, Artificial Sequence
  Description of Artificial Sequence: Synthetic oligonucleotide
  Antisense Strand to SEQ ID NO: 483765
uauacagucagcauguccu

SEQ ID NO: 483767 - RNA, 19 nt, Artificial Sequence
  Description of Artificial Sequence: Synthetic oligonucleotide
  Sense strand starting at position 2959 of SEQ ID NO: 317346
ggacaugcugacuguauaa

SEQ ID NO: 483768 - RNA, 19 nt, Artificial Sequence
  Description of Artificial Sequence: Synthetic oligonucleotide
  Antisense Strand to SEQ ID NO: 483767
uuauacagucagcaugucc

SEQ ID NO: 483769 - RNA, 19 nt, Artificial Sequence
  Description of Artificial Sequence: Synthetic oligonucleotide
  Sense strand starting at position 3161 of SEQ ID NO: 317346
cgggaaaggucucuggaag

SEQ ID NO: 483770 - RNA, 19 nt, Artificial Sequence
  Description of Artificial Sequence: Synthetic oligonucleotide
  Antisense Strand to SEQ ID NO: 483769
cuuccagagaccuuucccg

SEQ ID NO: 483771 - RNA, 19 nt, Artificial Sequence
  Description of Artificial Sequence: Synthetic oligonucleotide
  Sense strand starting at position 3194 of SEQ ID NO: 317346
gcuugaaugaugcagaggu

SEQ ID NO: 483772 - RNA, 19 nt, Artificial Sequence
  Description of Artificial Sequence: Synthetic oligonucleotide
  Antisense Strand to SEQ ID NO: 483771
accucugcaucauucaagc

SEQ ID NO: 483773 - RNA, 19 nt, Artificial Sequence
  Description of Artificial Sequence: Synthetic oligonucleotide
  Sense strand starting at position 3275 of SEQ ID NO: 317346
ggugacagagguggugaua

SEQ ID NO: 483774 - RNA, 19 nt, Artificial Sequence
  Description of Artificial Sequence: Synthetic oligonucleotide
  Antisense Strand to SEQ ID NO: 483773
uaucaccaccucugucacc

SEQ ID NO: 483775 - RNA, 19 nt, Artificial Sequence
  Description of Artificial Sequence: Synthetic oligonucleotide
  Sense strand starting at position 3743 of SEQ ID NO: 317346
ggugucugccuagauaaug

SEQ ID NO: 483776 - RNA, 19 nt, Artificial Sequence
  Description of Artificial Sequence: Synthetic oligonucleotide
  Antisense Strand to SEQ ID NO: 483775
cauuaucuaggcagacacc

SEQ ID NO: 483777 - RNA, 19 nt, Artificial Sequence
  Description of Artificial Sequence: Synthetic oligonucleotide
  Sense strand starting at position 8 of SEQ ID NO: 317347
acacauaaguuugcagaau

SEQ ID NO: 483778 - RNA, 19 nt, Artificial Sequence
  Description of Artificial Sequence: Synthetic oligonucleotide
  Antisense Strand to SEQ ID NO: 483777
auucugcaaacuuaugugu

SEQ ID NO: 483779 - RNA, 19 nt, Artificial Sequence
  Description of Artificial Sequence: Synthetic oligonucleotide
  Sense strand starting at position 217 of SEQ ID NO: 317347
acgagaagcgauagcuagu

SEQ ID NO: 483780 - RNA, 19 nt, Artificial Sequence
  Description of Artificial Sequence: Synthetic oligonucleotide
  Antisense Strand to SEQ ID NO: 483779
acuagcuaucgcuucucgu

SEQ ID NO: 483781 - RNA, 19 nt, Artificial Sequence
  Description of Artificial Sequence: Synthetic oligonucleotide
  Sense strand starting at position 452 of SEQ ID NO: 317347
uuguucuaaguugaauaca

SEQ ID NO: 483782 - RNA, 19 nt, Artificial Sequence
  Description of Artificial Sequence: Synthetic oligonucleotide
  Antisense Strand to SEQ ID NO: 483781
uguauucaacuuagaacaa

SEQ ID NO: 483783 - RNA, 19 nt, Artificial Sequence
  Description of Artificial Sequence: Synthetic oligonucleotide
  Sense strand starting at position 544 of SEQ ID NO: 317347
cccggaagcuacuucuaaa

SEQ ID NO: 483784 - RNA, 19 nt, Artificial Sequence
  Description of Artificial Sequence: Synthetic oligonucleotide
  Antisense Strand to SEQ ID NO: 483783
uuuagaaguagcuuccggg

SEQ ID NO: 483785 - RNA, 19 nt, Artificial Sequence
  Description of Artificial Sequence: Synthetic oligonucleotide
  Sense strand starting at position 741 of SEQ ID NO: 317347
gcaugaguuagguauuaaa

SEQ ID NO: 483786 - RNA, 19 nt, Artificial Sequence
  Description of Artificial Sequence: Synthetic oligonucleotide
  Antisense Strand to SEQ ID NO: 483785
uuuaauaccuaacucaugc

SEQ ID NO: 483787 - RNA, 19 nt, Artificial Sequence
  Description of Artificial Sequence: Synthetic oligonucleotide
  Sense strand starting at position 762 of SEQ ID NO: 317347
ugucaauaagcuuggaaac

SEQ ID NO: 483788 - RNA, 19 nt, Artificial Sequence
  Description of Artificial Sequence: Synthetic oligonucleotide
  Antisense Strand to SEQ ID NO: 483787
guuuccaagcuuauugaca

SEQ ID NO: 483789 - RNA, 19 nt, Artificial Sequence
  Description of Artificial Sequence: Synthetic oligonucleotide
  Sense strand starting at position 763 of SEQ ID NO: 317347
gucaauaagcuuggaaacu

SEQ ID NO: 483790 - RNA, 19 nt, Artificial Sequence
  Description of Artificial Sequence: Synthetic oligonucleotide
  Antisense Strand to SEQ ID NO: 483789
aguuuccaagcuuauugac

SEQ ID NO: 483791 - RNA, 19 nt, Artificial Sequence
  Description of Artificial Sequence: Synthetic oligonucleotide
  Sense strand starting at position 840 of SEQ ID NO: 317347
guaguacaagauugucuaa

SEQ ID NO: 483792 - RNA, 19 nt, Artificial Sequence
  Description of Artificial Sequence: Synthetic oligonucleotide
  Antisense Strand to SEQ ID NO: 483791
uuagacaaucuuguacuac

SEQ ID NO: 483793 - RNA, 19 nt, Artificial Sequence
  Description of Artificial Sequence: Synthetic oligonucleotide
  Sense strand starting at position 842 of SEQ ID NO: 317347
aguacaagauugucuaaag

SEQ ID NO: 483794 - RNA, 19 nt, Artificial Sequence
  Description of Artificial Sequence: Synthetic oligonucleotide
  Antisense Strand to SEQ ID NO: 483793
cuuuagacaaucuuguacu

SEQ ID NO: 483795 - RNA, 19 nt, Artificial Sequence
  Description of Artificial Sequence: Synthetic oligonucleotide
  Sense strand starting at position 843 of SEQ ID NO: 317347
guacaagauugucuaaagg

SEQ ID NO: 483796 - RNA, 19 nt, Artificial Sequence
  Description of Artificial Sequence: Synthetic oligonucleotide
  Antisense Strand to SEQ ID NO: 483795
ccuuuagacaaucuuguac

SEQ ID NO: 483797 - RNA, 19 nt, Artificial Sequence
  Description of Artificial Sequence: Synthetic oligonucleotide
  Sense strand starting at position 1072 of SEQ ID NO: 317347
ggaaguaugcuguaaugaa

SEQ ID NO: 483798 - RNA, 19 nt, Artificial Sequence
  Description of Artificial Sequence: Synthetic oligonucleotide
  Antisense Strand to SEQ ID NO: 483797
uucauuacagcauacuucc

SEQ ID NO: 483799 - RNA, 19 nt, Artificial Sequence
  Description of Artificial Sequence: Synthetic oligonucleotide
  Sense strand starting at position 1087 of SEQ ID NO: 317347
ugaaguguccuguaaucaa

SEQ ID NO: 483800 - RNA, 19 nt, Artificial Sequence
  Description of Artificial Sequence: Synthetic oligonucleotide
  Antisense Strand to SEQ ID NO: 483799
uugauuacaggacacuuca

SEQ ID NO: 483801 - RNA, 19 nt, Artificial Sequence
  Description of Artificial Sequence: Synthetic oligonucleotide
  Sense strand starting at position 1090 of SEQ ID NO: 317347
aguguccuguaaucaaaga

SEQ ID NO: 483802 - RNA, 19 nt, Artificial Sequence
  Description of Artificial Sequence: Synthetic oligonucleotide
  Antisense Strand to SEQ ID NO: 483801
ucuuugauuacaggacacu

SEQ ID NO: 483803 - RNA, 19 nt, Artificial Sequence
  Description of Artificial Sequence: Synthetic oligonucleotide
  Sense strand starting at position 1325 of SEQ ID NO: 317347
ccuagauucccuugggaua

SEQ ID NO: 483804 - RNA, 19 nt, Artificial Sequence
  Description of Artificial Sequence: Synthetic oligonucleotide
  Antisense Strand to SEQ ID NO: 483803
uaucccaagggaaucuagg

SEQ ID NO: 483805 - RNA, 19 nt, Artificial Sequence
  Description of Artificial Sequence: Synthetic oligonucleotide
  Sense strand starting at position 1326 of SEQ ID NO: 317347
cuagauucccuugggauag

SEQ ID NO: 483806 - RNA, 19 nt, Artificial Sequence
  Description of Artificial Sequence: Synthetic oligonucleotide
  Antisense Strand to SEQ ID NO: 483805
cuaucccaagggaaucuag

SEQ ID NO: 483807 - RNA, 19 nt, Artificial Sequence
  Description of Artificial Sequence: Synthetic oligonucleotide
  Sense strand starting at position 1341 of SEQ ID NO: 317347
auaggaugcuacuuugaag

SEQ ID NO: 483808 - RNA, 19 nt, Artificial Sequence
  Description of Artificial Sequence: Synthetic oligonucleotide
  Antisense Strand to SEQ ID NO: 483807
cuucaaaguagcauccuau

SEQ ID NO: 483809 - RNA, 19 nt, Artificial Sequence
  Description of Artificial Sequence: Synthetic oligonucleotide
  Sense strand starting at position 1358 of SEQ ID NO: 317347
aggcaagaggaguaaguuu

SEQ ID NO: 483810 - RNA, 19 nt, Artificial Sequence
  Description of Artificial Sequence: Synthetic oligonucleotide
  Antisense Strand to SEQ ID NO: 483809
aaacuuacuccucuugccu

SEQ ID NO: 483811 - RNA, 19 nt, Artificial Sequence
  Description of Artificial Sequence: Synthetic oligonucleotide
  Sense strand starting at position 1405 of SEQ ID NO: 317347
ucaggauagucauuguuug

SEQ ID NO: 483812 - RNA, 19 nt, Artificial Sequence
  Description of Artificial Sequence: Synthetic oligonucleotide
  Antisense Strand to SEQ ID NO: 483811
caaacaaugacuauccuga

SEQ ID NO: 483813 - RNA, 19 nt, Artificial Sequence
  Description of Artificial Sequence: Synthetic oligonucleotide
  Sense strand starting at position 1683 of SEQ ID NO: 317347
cagcgaucgccagcacuau

SEQ ID NO: 483814 - RNA, 19 nt, Artificial Sequence
  Description of Artificial Sequence: Synthetic oligonucleotide
  Antisense Strand to SEQ ID NO: 483813
auagugcuggcgaucgcug

SEQ ID NO: 483815 - RNA, 19 nt, Artificial Sequence
  Description of Artificial Sequence: Synthetic oligonucleotide
  Sense strand starting at position 1740 of SEQ ID NO: 317347
gccucauauuuguuagggu

SEQ ID NO: 483816 - RNA, 19 nt, Artificial Sequence
  Description of Artificial Sequence: Synthetic oligonucleotide
  Antisense Strand to SEQ ID NO: 483815
acccuaacaaauaugaggc

SEQ ID NO: 483817 - RNA, 19 nt, Artificial Sequence
  Description of Artificial Sequence: Synthetic oligonucleotide
  Sense strand starting at position 1923 of SEQ ID NO: 317347
gaggguugggaguaguagu

SEQ ID NO: 483818 - RNA, 19 nt, Artificial Sequence
  Description of Artificial Sequence: Synthetic oligonucleotide
  Antisense Strand to SEQ ID NO: 483817
acuacuacucccaacccuc

SEQ ID NO: 483819 - RNA, 19 nt, Artificial Sequence
  Description of Artificial Sequence: Synthetic oligonucleotide
  Sense strand starting at position 2270 of SEQ ID NO: 317347
agcauaucuccauggagag

SEQ ID NO: 483820 - RNA, 19 nt, Artificial Sequence
  Description of Artificial Sequence: Synthetic oligonucleotide
  Antisense Strand to SEQ ID NO: 483819
cucuccauggagauaugcu

SEQ ID NO: 483821 - RNA, 19 nt, Artificial Sequence
  Description of Artificial Sequence: Synthetic oligonucleotide
  Sense strand starting at position 2346 of SEQ ID NO: 317347
ggauuucuccguugaagcu

SEQ ID NO: 483822 - RNA, 19 nt, Artificial Sequence
  Description of Artificial Sequence: Synthetic oligonucleotide
  Antisense Strand to SEQ ID NO: 483821
agcuucaacggagaaaucc

SEQ ID NO: 483823 - RNA, 19 nt, Artificial Sequence
  Description of Artificial Sequence: Synthetic oligonucleotide
  Sense strand starting at position 2487 of SEQ ID NO: 317347
cugagcugccggaguuaga

SEQ ID NO: 483824 - RNA, 19 nt, Artificial Sequence
  Description of Artificial Sequence: Synthetic oligonucleotide
  Antisense Strand to SEQ ID NO: 483823
ucuaacuccggcagcucag

SEQ ID NO: 483825 - RNA, 19 nt, Artificial Sequence
  Description of Artificial Sequence: Synthetic oligonucleotide
  Sense strand starting at position 2503 of SEQ ID NO: 317347
agagguguccgcgcgggaa

SEQ ID NO: 483826 - RNA, 19 nt, Artificial Sequence
  Description of Artificial Sequence: Synthetic oligonucleotide
  Antisense Strand to SEQ ID NO: 483825
uucccgcgcggacaccucu

SEQ ID NO: 483827 - RNA, 19 nt, Artificial Sequence
  Description of Artificial Sequence: Synthetic oligonucleotide
  Sense strand starting at position 2997 of SEQ ID NO: 317347
gugcuaguucuaucugcca

SEQ ID NO: 483828 - RNA, 19 nt, Artificial Sequence
  Description of Artificial Sequence: Synthetic oligonucleotide
  Antisense Strand to SEQ ID NO: 483827
uggcagauagaacuagcac

SEQ ID NO: 483829 - RNA, 19 nt, Artificial Sequence
  Description of Artificial Sequence: Synthetic oligonucleotide
  Sense strand starting at position 3043 of SEQ ID NO: 317347
accagugacauugaugguu

SEQ ID NO: 483830 - RNA, 19 nt, Artificial Sequence
  Description of Artificial Sequence: Synthetic oligonucleotide
  Antisense Strand to SEQ ID NO: 483829
aaccaucaaugucacuggu

SEQ ID NO: 483831 - RNA, 19 nt, Artificial Sequence
  Description of Artificial Sequence: Synthetic oligonucleotide
  Sense strand starting at position 3213 of SEQ ID NO: 317347
ggaagagauuguuucguga

SEQ ID NO: 483832 - RNA, 19 nt, Artificial Sequence
  Description of Artificial Sequence: Synthetic oligonucleotide
  Antisense Strand to SEQ ID NO: 483831
ucacgaaacaaucucuucc

SEQ ID NO: 483833 - RNA, 19 nt, Artificial Sequence
  Description of Artificial Sequence: Synthetic oligonucleotide
  Sense strand starting at position 3216 of SEQ ID NO: 317347
agagauuguuucgugauga

SEQ ID NO: 483834 - RNA, 19 nt, Artificial Sequence
  Description of Artificial Sequence: Synthetic oligonucleotide
  Antisense Strand to SEQ ID NO: 483833
ucaucacgaaacaaucucu

SEQ ID NO: 483835 - RNA, 19 nt, Artificial Sequence
  Description of Artificial Sequence: Synthetic oligonucleotide
  Sense strand starting at position 3278 of SEQ ID NO: 317347
ucgugucauuuccucuauu

SEQ ID NO: 483836 - RNA, 19 nt, Artificial Sequence
  Description of Artificial Sequence: Synthetic oligonucleotide
  Antisense Strand to SEQ ID NO: 483835
aauagaggaaaugacacga

SEQ ID NO: 483837 - RNA, 19 nt, Artificial Sequence
  Description of Artificial Sequence: Synthetic oligonucleotide
  Sense strand starting at position 3302 of SEQ ID NO: 317347
uagcuuuaucuugauggca

SEQ ID NO: 483838 - RNA, 19 nt, Artificial Sequence
  Description of Artificial Sequence: Synthetic oligonucleotide
  Antisense Strand to SEQ ID NO: 483837
ugccaucaagauaaagcua

SEQ ID NO: 483839 - RNA, 19 nt, Artificial Sequence
  Description of Artificial Sequence: Synthetic oligonucleotide
  Sense strand starting at position 3305 of SEQ ID NO: 317347
cuuuaucuugauggcaaga

SEQ ID NO: 483840 - RNA, 19 nt, Artificial Sequence
  Description of Artificial Sequence: Synthetic oligonucleotide
  Antisense Strand to SEQ ID NO: 483839
ucuugccaucaagauaaag

SEQ ID NO: 483841 - RNA, 19 nt, Artificial Sequence
  Description of Artificial Sequence: Synthetic oligonucleotide
  Sense strand starting at position 3383 of SEQ ID NO: 317347
agugucaucuaauuauaca

SEQ ID NO: 483842 - RNA, 19 nt, Artificial Sequence
  Description of Artificial Sequence: Synthetic oligonucleotide
  Antisense Strand to SEQ ID NO: 483841
uguauaauuagaugacacu

SEQ ID NO: 483843 - RNA, 19 nt, Artificial Sequence
  Description of Artificial Sequence: Synthetic oligonucleotide
  Sense strand starting at position 3604 of SEQ ID NO: 317347
agguuaaagagucauacgu

SEQ ID NO: 483844 - RNA, 19 nt, Artificial Sequence
  Description of Artificial Sequence: Synthetic oligonucleotide
  Antisense Strand to SEQ ID NO: 483843
acguaugacucuuuaaccu

SEQ ID NO: 483845 - RNA, 19 nt, Artificial Sequence
  Description of Artificial Sequence: Synthetic oligonucleotide
  Sense strand starting at position 3621 of SEQ ID NO: 317347
gucucagucauugaaggga

SEQ ID NO: 483846 - RNA, 19 nt, Artificial Sequence
  Description of Artificial Sequence: Synthetic oligonucleotide
  Antisense Strand to SEQ ID NO: 483845
ucccuucaaugacugagac

SEQ ID NO: 483847 - RNA, 19 nt, Artificial Sequence
  Description of Artificial Sequence: Synthetic oligonucleotide
  Sense strand starting at position 3625 of SEQ ID NO: 317347
cagucauugaagggauagu

SEQ ID NO: 483848 - RNA, 19 nt, Artificial Sequence
  Description of Artificial Sequence: Synthetic oligonucleotide
  Antisense Strand to SEQ ID NO: 483847
acuaucccuucaaugacug

SEQ ID NO: 483849 - RNA, 19 nt, Artificial Sequence
  Description of Artificial Sequence: Synthetic oligonucleotide
  Sense strand starting at position 3675 of SEQ ID NO: 317347
uacagaaauugagcuguuu

SEQ ID NO: 483850 - RNA, 19 nt, Artificial Sequence
  Description of Artificial Sequence: Synthetic oligonucleotide
  Antisense Strand to SEQ ID NO: 483849
aaacagcucaauuucugua

SEQ ID NO: 483851 - RNA, 19 nt, Artificial Sequence
  Description of Artificial Sequence: Synthetic oligonucleotide
  Sense strand starting at position 3739 of SEQ ID NO: 317347
cuguguagagcagaaucua

SEQ ID NO: 483852 - RNA, 19 nt, Artificial Sequence
  Description of Artificial Sequence: Synthetic oligonucleotide
  Antisense Strand to SEQ ID NO: 483851
uagauucugcucuacacag

SEQ ID NO: 483853 - RNA, 19 nt, Artificial Sequence
  Description of Artificial Sequence: Synthetic oligonucleotide
  Sense strand starting at position 3829 of SEQ ID NO: 317347
ucucuuaaggccuguauuu

SEQ ID NO: 483854 - RNA, 19 nt, Artificial Sequence
  Description of Artificial Sequence: Synthetic oligonucleotide
  Antisense Strand to SEQ ID NO: 483853
aaauacaggccuuaagaga

SEQ ID NO: 483855 - RNA, 19 nt, Artificial Sequence
  Description of Artificial Sequence: Synthetic oligonucleotide
  Sense strand starting at position 3841 of SEQ ID NO: 317347
uguauuuguuugcugugga

SEQ ID NO: 483856 - RNA, 19 nt, Artificial Sequence
  Description of Artificial Sequence: Synthetic oligonucleotide
  Antisense Strand to SEQ ID NO: 483855
uccacagcaaacaaauaca

SEQ ID NO: 483857 - RNA, 19 nt, Artificial Sequence
  Description of Artificial Sequence: Synthetic oligonucleotide
  Sense strand starting at position 87 of SEQ ID NO: 317348
gccacaggucuggaagagu

SEQ ID NO: 483858 - RNA, 19 nt, Artificial Sequence
  Description of Artificial Sequence: Synthetic oligonucleotide
  Antisense Strand to SEQ ID NO: 483857
acucuuccagaccuguggc

SEQ ID NO: 483859 - RNA, 19 nt, Artificial Sequence
  Description of Artificial Sequence: Synthetic oligonucleotide
  Sense strand starting at position 119 of SEQ ID NO: 317348
cuagcauuccuaggguaca

SEQ ID NO: 483860 - RNA, 19 nt, Artificial Sequence
  Description of Artificial Sequence: Synthetic oligonucleotide
  Antisense Strand to SEQ ID NO: 483859
uguacccuaggaaugcuag

SEQ ID NO: 483861 - RNA, 19 nt, Artificial Sequence
  Description of Artificial Sequence: Synthetic oligonucleotide
  Sense strand starting at position 156 of SEQ ID NO: 317348
gacaguaucuggcccuaga

SEQ ID NO: 483862 - RNA, 19 nt, Artificial Sequence
  Description of Artificial Sequence: Synthetic oligonucleotide
  Antisense Strand to SEQ ID NO: 483861
ucuagggccagauacuguc

SEQ ID NO: 483863 - RNA, 19 nt, Artificial Sequence
  Description of Artificial Sequence: Synthetic oligonucleotide
  Sense strand starting at position 159 of SEQ ID NO: 317348
aguaucuggcccuagaaca

SEQ ID NO: 483864 - RNA, 19 nt, Artificial Sequence
  Description of Artificial Sequence: Synthetic oligonucleotide
  Antisense Strand to SEQ ID NO: 483863
uguucuagggccagauacu

SEQ ID NO: 483865 - RNA, 19 nt, Artificial Sequence
  Description of Artificial Sequence: Synthetic oligonucleotide
  Sense strand starting at position 285 of SEQ ID NO: 317348
ccaacuauauggguggauu

SEQ ID NO: 483866 - RNA, 19 nt, Artificial Sequence
  Description of Artificial Sequence: Synthetic oligonucleotide
  Antisense Strand to SEQ ID NO: 483865
aauccacccauauaguugg

SEQ ID NO: 483867 - RNA, 19 nt, Artificial Sequence
  Description of Artificial Sequence: Synthetic oligonucleotide
  Sense strand starting at position 286 of SEQ ID NO: 317348
caacuauauggguggauua

SEQ ID NO: 483868 - RNA, 19 nt, Artificial Sequence
  Description of Artificial Sequence: Synthetic oligonucleotide
  Antisense Strand to SEQ ID NO: 483867
uaauccacccauauaguug

SEQ ID NO: 483869 - RNA, 19 nt, Artificial Sequence
  Description of Artificial Sequence: Synthetic oligonucleotide
  Sense strand starting at position 287 of SEQ ID NO: 317348
aacuauauggguggauuau

SEQ ID NO: 483870 - RNA, 19 nt, Artificial Sequence
  Description of Artificial Sequence: Synthetic oligonucleotide
  Antisense Strand to SEQ ID NO: 483869
auaauccacccauauaguu

SEQ ID NO: 483871 - RNA, 19 nt, Artificial Sequence
  Description of Artificial Sequence: Synthetic oligonucleotide
  Sense strand starting at position 373 of SEQ ID NO: 317348
gcacuuucguuauuucuuu

SEQ ID NO: 483872 - RNA, 19 nt, Artificial Sequence
  Description of Artificial Sequence: Synthetic oligonucleotide
  Antisense Strand to SEQ ID NO: 483871
aaagaaauaacgaaagugc

SEQ ID NO: 483873 - RNA, 19 nt, Artificial Sequence
  Description of Artificial Sequence: Synthetic oligonucleotide
  Sense strand starting at position 450 of SEQ ID NO: 317348
aggacagugcuugaugcaa

SEQ ID NO: 483874 - RNA, 19 nt, Artificial Sequence
  Description of Artificial Sequence: Synthetic oligonucleotide
  Antisense Strand to SEQ ID NO: 483873
uugcaucaagcacuguccu

SEQ ID NO: 483875 - RNA, 19 nt, Artificial Sequence
  Description of Artificial Sequence: Synthetic oligonucleotide
  Sense strand starting at position 479 of SEQ ID NO: 317348
ugguaauacugaucccauc

SEQ ID NO: 483876 - RNA, 19 nt, Artificial Sequence
  Description of Artificial Sequence: Synthetic oligonucleotide
  Antisense Strand to SEQ ID NO: 483875
gaugggaucaguauuacca

SEQ ID NO: 483877 - RNA, 19 nt, Artificial Sequence
  Description of Artificial Sequence: Synthetic oligonucleotide
  Sense strand starting at position 879 of SEQ ID NO: 317348
uagucaggcuugucuagaa

SEQ ID NO: 483878 - RNA, 19 nt, Artificial Sequence
  Description of Artificial Sequence: Synthetic oligonucleotide
  Antisense Strand to SEQ ID NO: 483877
uucuagacaagccugacua

SEQ ID NO: 483879 - RNA, 19 nt, Artificial Sequence
  Description of Artificial Sequence: Synthetic oligonucleotide
  Sense strand starting at position 1349 of SEQ ID NO: 317348
ggugcaccaagguguaaau

SEQ ID NO: 483880 - RNA, 19 nt, Artificial Sequence
  Description of Artificial Sequence: Synthetic oligonucleotide
  Antisense Strand to SEQ ID NO: 483879
auuuacaccuuggugcacc

SEQ ID NO: 483881 - RNA, 19 nt, Artificial Sequence
  Description of Artificial Sequence: Synthetic oligonucleotide
  Sense strand starting at position 2175 of SEQ ID NO: 317348
gugagcauugagcaggaaa

SEQ ID NO: 483882 - RNA, 19 nt, Artificial Sequence
  Description of Artificial Sequence: Synthetic oligonucleotide
  Antisense Strand to SEQ ID NO: 483881
uuuccugcucaaugcucac

SEQ ID NO: 483883 - RNA, 19 nt, Artificial Sequence
  Description of Artificial Sequence: Synthetic oligonucleotide
  Sense strand starting at position 2214 of SEQ ID NO: 317348
agagccaguucugugugaa

SEQ ID NO: 483884 - RNA, 19 nt, Artificial Sequence
  Description of Artificial Sequence: Synthetic oligonucleotide
  Antisense Strand to SEQ ID NO: 483883
uucacacagaacuggcucu

SEQ ID NO: 483885 - RNA, 19 nt, Artificial Sequence
  Description of Artificial Sequence: Synthetic oligonucleotide
  Sense strand starting at position 2215 of SEQ ID NO: 317348
gagccaguucugugugaag

SEQ ID NO: 483886 - RNA, 19 nt, Artificial Sequence
  Description of Artificial Sequence: Synthetic oligonucleotide
  Antisense Strand to SEQ ID NO: 483885
cuucacacagaacuggcuc

SEQ ID NO: 483887 - RNA, 19 nt, Artificial Sequence
  Description of Artificial Sequence: Synthetic oligonucleotide
  Sense strand starting at position 2217 of SEQ ID NO: 317348
gccaguucugugugaagaa

SEQ ID NO: 483888 - RNA, 19 nt, Artificial Sequence
  Description of Artificial Sequence: Synthetic oligonucleotide
  Antisense Strand to SEQ ID NO: 483887
uucuucacacagaacuggc

SEQ ID NO: 483889 - RNA, 19 nt, Artificial Sequence
  Description of Artificial Sequence: Synthetic oligonucleotide
  Sense strand starting at position 2230 of SEQ ID NO: 317348
gaagaaauuuaguagcuga

SEQ ID NO: 483890 - RNA, 19 nt, Artificial Sequence
  Description of Artificial Sequence: Synthetic oligonucleotide
  Antisense Strand to SEQ ID NO: 483889
ucagcuacuaaauuucuuc

SEQ ID NO: 483891 - RNA, 19 nt, Artificial Sequence
  Description of Artificial Sequence: Synthetic oligonucleotide
  Sense strand starting at position 2266 of SEQ ID NO: 317348
aaaccagcggugugagauu

SEQ ID NO: 483892 - RNA, 19 nt, Artificial Sequence
  Description of Artificial Sequence: Synthetic oligonucleotide
  Antisense Strand to SEQ ID NO: 483891
aaucucacaccgcugguuu

SEQ ID NO: 483893 - RNA, 19 nt, Artificial Sequence
  Description of Artificial Sequence: Synthetic oligonucleotide
  Sense strand starting at position 2334 of SEQ ID NO: 317348
cgcuuuaauccguuacguu

SEQ ID NO: 483894 - RNA, 19 nt, Artificial Sequence
  Description of Artificial Sequence: Synthetic oligonucleotide
  Antisense Strand to SEQ ID NO: 483893
aacguaacggauuaaagcg

SEQ ID NO: 483895 - RNA, 19 nt, Artificial Sequence
  Description of Artificial Sequence: Synthetic oligonucleotide
  Sense strand starting at position 2362 of SEQ ID NO: 317348
cagagaugguuccuuugac

SEQ ID NO: 483896 - RNA, 19 nt, Artificial Sequence
  Description of Artificial Sequence: Synthetic oligonucleotide
  Antisense Strand to SEQ ID NO: 483895
gucaaaggaaccaucucug

SEQ ID NO: 483897 - RNA, 19 nt, Artificial Sequence
  Description of Artificial Sequence: Synthetic oligonucleotide
  Sense strand starting at position 2377 of SEQ ID NO: 317348
ugaccuuucuuggcaucuu

SEQ ID NO: 483898 - RNA, 19 nt, Artificial Sequence
  Description of Artificial Sequence: Synthetic oligonucleotide
  Antisense Strand to SEQ ID NO: 483897
aagaugccaagaaagguca

SEQ ID NO: 483899 - RNA, 19 nt, Artificial Sequence
  Description of Artificial Sequence: Synthetic oligonucleotide
  Sense strand starting at position 2481 of SEQ ID NO: 317348
cuuggaaauugcuuuaauc

SEQ ID NO: 483900 - RNA, 19 nt, Artificial Sequence
  Description of Artificial Sequence: Synthetic oligonucleotide
  Antisense Strand to SEQ ID NO: 483899
gauuaaagcaauuuccaag

SEQ ID NO: 483901 - RNA, 19 nt, Artificial Sequence
  Description of Artificial Sequence: Synthetic oligonucleotide
  Sense strand starting at position 2483 of SEQ ID NO: 317348
uggaaauugcuuuaaucug

SEQ ID NO: 483902 - RNA, 19 nt, Artificial Sequence
  Description of Artificial Sequence: Synthetic oligonucleotide
  Antisense Strand to SEQ ID NO: 483901
cagauuaaagcaauuucca

SEQ ID NO: 483903 - RNA, 19 nt, Artificial Sequence
  Description of Artificial Sequence: Synthetic oligonucleotide
  Sense strand starting at position 2516 of SEQ ID NO: 317348
cagggauccuuugucuagu

SEQ ID NO: 483904 - RNA, 19 nt, Artificial Sequence
  Description of Artificial Sequence: Synthetic oligonucleotide
  Antisense Strand to SEQ ID NO: 483903
acuagacaaaggaucccug

SEQ ID NO: 483905 - RNA, 19 nt, Artificial Sequence
  Description of Artificial Sequence: Synthetic oligonucleotide
  Sense strand starting at position 2518 of SEQ ID NO: 317348
gggauccuuugucuaguca

SEQ ID NO: 483906 - RNA, 19 nt, Artificial Sequence
  Description of Artificial Sequence: Synthetic oligonucleotide
  Antisense Strand to SEQ ID NO: 483905
ugacuagacaaaggauccc

SEQ ID NO: 483907 - RNA, 19 nt, Artificial Sequence
  Description of Artificial Sequence: Synthetic oligonucleotide
  Sense strand starting at position 2610 of SEQ ID NO: 317348
ugauaauauccagagcagu

SEQ ID NO: 483908 - RNA, 19 nt, Artificial Sequence
  Description of Artificial Sequence: Synthetic oligonucleotide
  Antisense Strand to SEQ ID NO: 483907
acugcucuggauauuauca

SEQ ID NO: 483909 - RNA, 19 nt, Artificial Sequence
  Description of Artificial Sequence: Synthetic oligonucleotide
  Sense strand starting at position 2684 of SEQ ID NO: 317348
ucaaauugaugcuugggau

SEQ ID NO: 483910 - RNA, 19 nt, Artificial Sequence
  Description of Artificial Sequence: Synthetic oligonucleotide
  Antisense Strand to SEQ ID NO: 483909
aucccaagcaucaauuuga

SEQ ID NO: 483911 - RNA, 19 nt, Artificial Sequence
  Description of Artificial Sequence: Synthetic oligonucleotide
  Sense strand starting at position 2685 of SEQ ID NO: 317348
caaauugaugcuugggauu

SEQ ID NO: 483912 - RNA, 19 nt, Artificial Sequence
  Description of Artificial Sequence: Synthetic oligonucleotide
  Antisense Strand to SEQ ID NO: 483911
aaucccaagcaucaauuug

SEQ ID NO: 483913 - RNA, 19 nt, Artificial Sequence
  Description of Artificial Sequence: Synthetic oligonucleotide
  Sense strand starting at position 2698 of SEQ ID NO: 317348
gggauuaggcccugcacau

SEQ ID NO: 483914 - RNA, 19 nt, Artificial Sequence
  Description of Artificial Sequence: Synthetic oligonucleotide
  Antisense Strand to SEQ ID NO: 483913
augugcagggccuaauccc

SEQ ID NO: 483915 - RNA, 19 nt, Artificial Sequence
  Description of Artificial Sequence: Synthetic oligonucleotide
  Sense strand starting at position 2770 of SEQ ID NO: 317348
uaauucuaguguuugaagu

SEQ ID NO: 483916 - RNA, 19 nt, Artificial Sequence
  Description of Artificial Sequence: Synthetic oligonucleotide
  Antisense Strand to SEQ ID NO: 483915
acuucaaacacuagaauua

SEQ ID NO: 483917 - RNA, 19 nt, Artificial Sequence
  Description of Artificial Sequence: Synthetic oligonucleotide
  Sense strand starting at position 2771 of SEQ ID NO: 317348
aauucuaguguuugaagua

SEQ ID NO: 483918 - RNA, 19 nt, Artificial Sequence
  Description of Artificial Sequence: Synthetic oligonucleotide
  Antisense Strand to SEQ ID NO: 483917
uacuucaaacacuagaauu

SEQ ID NO: 483919 - RNA, 19 nt, Artificial Sequence
  Description of Artificial Sequence: Synthetic oligonucleotide
  Sense strand starting at position 2790 of SEQ ID NO: 317348
auucuaauucuaggguuga

SEQ ID NO: 483920 - RNA, 19 nt, Artificial Sequence
  Description of Artificial Sequence: Synthetic oligonucleotide
  Antisense Strand to SEQ ID NO: 483919
ucaacccuagaauuagaau

SEQ ID NO: 483921 - RNA, 19 nt, Artificial Sequence
  Description of Artificial Sequence: Synthetic oligonucleotide
  Sense strand starting at position 3070 of SEQ ID NO: 317348
gugaguuauuaucucacca

SEQ ID NO: 483922 - RNA, 19 nt, Artificial Sequence
  Description of Artificial Sequence: Synthetic oligonucleotide
  Antisense Strand to SEQ ID NO: 483921
uggugagauaauaacucac

SEQ ID NO: 483923 - RNA, 19 nt, Artificial Sequence
  Description of Artificial Sequence: Synthetic oligonucleotide
  Sense strand starting at position 3074 of SEQ ID NO: 317348
guuauuaucucaccacugu

SEQ ID NO: 483924 - RNA, 19 nt, Artificial Sequence
  Description of Artificial Sequence: Synthetic oligonucleotide
  Antisense Strand to SEQ ID NO: 483923
acaguggugagauaauaac

SEQ ID NO: 483925 - RNA, 19 nt, Artificial Sequence
  Description of Artificial Sequence: Synthetic oligonucleotide
  Sense strand starting at position 3612 of SEQ ID NO: 317348
acgucuagccuguacauaa

SEQ ID NO: 483926 - RNA, 19 nt, Artificial Sequence
  Description of Artificial Sequence: Synthetic oligonucleotide
  Antisense Strand to SEQ ID NO: 483925
uuauguacaggcuagacgu

SEQ ID NO: 483927 - RNA, 19 nt, Artificial Sequence
  Description of Artificial Sequence: Synthetic oligonucleotide
  Sense strand starting at position 3665 of SEQ ID NO: 317348
uuaauauaucguggagauc

SEQ ID NO: 483928 - RNA, 19 nt, Artificial Sequence
  Description of Artificial Sequence: Synthetic oligonucleotide
  Antisense Strand to SEQ ID NO: 483927
gaucuccacgauauauuaa

SEQ ID NO: 483929 - RNA, 19 nt, Artificial Sequence
  Description of Artificial Sequence: Synthetic oligonucleotide
  Sense strand starting at position 3832 of SEQ ID NO: 317348
uuugaauguuagguucuaa

SEQ ID NO: 483930 - RNA, 19 nt, Artificial Sequence
  Description of Artificial Sequence: Synthetic oligonucleotide
  Antisense Strand to SEQ ID NO: 483929
uuagaaccuaacauucaaa

SEQ ID NO: 483931 - RNA, 19 nt, Artificial Sequence
  Description of Artificial Sequence: Synthetic oligonucleotide
  Sense strand starting at position 3887 of SEQ ID NO: 317348
aguacuugucacuaguaaa

SEQ ID NO: 483932 - RNA, 19 nt, Artificial Sequence
  Description of Artificial Sequence: Synthetic oligonucleotide
  Antisense Strand to SEQ ID NO: 483931
uuuacuagugacaaguacu

SEQ ID NO: 483933 - RNA, 19 nt, Artificial Sequence
  Description of Artificial Sequence: Synthetic oligonucleotide
  Sense strand starting at position 3909 of SEQ ID NO: 317348
ccauuuaggucagaaggau

SEQ ID NO: 483934 - RNA, 19 nt, Artificial Sequence
  Description of Artificial Sequence: Synthetic oligonucleotide
  Antisense Strand to SEQ ID NO: 483933
auccuucugaccuaaaugg

SEQ ID NO: 483935 - RNA, 19 nt, Artificial Sequence
  Description of Artificial Sequence: Synthetic oligonucleotide
  Sense strand starting at position 3934 of SEQ ID NO: 317348
ccaggaauguugucaauau

SEQ ID NO: 483936 - RNA, 19 nt, Artificial Sequence
  Description of Artificial Sequence: Synthetic oligonucleotide
  Antisense Strand to SEQ ID NO: 483935
auauugacaacauuccugg

SEQ ID NO: 483937 - RNA, 19 nt, Artificial Sequence
  Description of Artificial Sequence: Synthetic oligonucleotide
  Sense strand starting at position 629 of SEQ ID NO: 317349
ggauacugaggacguguaa

SEQ ID NO: 483938 - RNA, 19 nt, Artificial Sequence
  Description of Artificial Sequence: Synthetic oligonucleotide
  Antisense Strand to SEQ ID NO: 483937
uuacacguccucaguaucc

SEQ ID NO: 483939 - RNA, 19 nt, Artificial Sequence
  Description of Artificial Sequence: Synthetic oligonucleotide
  Sense strand starting at position 638 of SEQ ID NO: 317349
ggacguguaaauggauacu

SEQ ID NO: 483940 - RNA, 19 nt, Artificial Sequence
  Description of Artificial Sequence: Synthetic oligonucleotide
  Antisense Strand to SEQ ID NO: 483939
aguauccauuuacacgucc

SEQ ID NO: 483941 - RNA, 19 nt, Artificial Sequence
  Description of Artificial Sequence: Synthetic oligonucleotide
  Sense strand starting at position 641 of SEQ ID NO: 317349
cguguaaauggauacuguu

SEQ ID NO: 483942 - RNA, 19 nt, Artificial Sequence
  Description of Artificial Sequence: Synthetic oligonucleotide
  Antisense Strand to SEQ ID NO: 483941
aacaguauccauuuacacg

SEQ ID NO: 483943 - RNA, 19 nt, Artificial Sequence
  Description of Artificial Sequence: Synthetic oligonucleotide
  Sense strand starting at position 649 of SEQ ID NO: 317349
uggauacuguuauccaugu

SEQ ID NO: 483944 - RNA, 19 nt, Artificial Sequence
  Description of Artificial Sequence: Synthetic oligonucleotide
  Antisense Strand to SEQ ID NO: 483943
acauggauaacaguaucca

SEQ ID NO: 483945 - RNA, 19 nt, Artificial Sequence
  Description of Artificial Sequence: Synthetic oligonucleotide
  Sense strand starting at position 650 of SEQ ID NO: 317349
ggauacuguuauccauguu

SEQ ID NO: 483946 - RNA, 19 nt, Artificial Sequence
  Description of Artificial Sequence: Synthetic oligonucleotide
  Antisense Strand to SEQ ID NO: 483945
aacauggauaacaguaucc

SEQ ID NO: 483947 - RNA, 19 nt, Artificial Sequence
  Description of Artificial Sequence: Synthetic oligonucleotide
  Sense strand starting at position 653 of SEQ ID NO: 317349
uacuguuauccauguuagu

SEQ ID NO: 483948 - RNA, 19 nt, Artificial Sequence
  Description of Artificial Sequence: Synthetic oligonucleotide
  Antisense Strand to SEQ ID NO: 483947
acuaacauggauaacagua

SEQ ID NO: 483949 - RNA, 19 nt, Artificial Sequence
  Description of Artificial Sequence: Synthetic oligonucleotide
  Sense strand starting at position 662 of SEQ ID NO: 317349
ccauguuaguuacuggaua

SEQ ID NO: 483950 - RNA, 19 nt, Artificial Sequence
  Description of Artificial Sequence: Synthetic oligonucleotide
  Antisense Strand to SEQ ID NO: 483949
uauccaguaacuaacaugg

SEQ ID NO: 483951 - RNA, 19 nt, Artificial Sequence
  Description of Artificial Sequence: Synthetic oligonucleotide
  Sense strand starting at position 809 of SEQ ID NO: 317349
agguuugagaacuguauga

SEQ ID NO: 483952 - RNA, 19 nt, Artificial Sequence
  Description of Artificial Sequence: Synthetic oligonucleotide
  Antisense Strand to SEQ ID NO: 483951
ucauacaguucucaaaccu

SEQ ID NO: 483953 - RNA, 19 nt, Artificial Sequence
  Description of Artificial Sequence: Synthetic oligonucleotide
  Sense strand starting at position 915 of SEQ ID NO: 317349
uucucagugucacucugau

SEQ ID NO: 483954 - RNA, 19 nt, Artificial Sequence
  Description of Artificial Sequence: Synthetic oligonucleotide
  Antisense Strand to SEQ ID NO: 483953
aucagagugacacugagaa

SEQ ID NO: 483955 - RNA, 19 nt, Artificial Sequence
  Description of Artificial Sequence: Synthetic oligonucleotide
  Sense strand starting at position 927 of SEQ ID NO: 317349
cucugaucacccuggagau

SEQ ID NO: 483956 - RNA, 19 nt, Artificial Sequence
  Description of Artificial Sequence: Synthetic oligonucleotide
  Antisense Strand to SEQ ID NO: 483955
aucuccagggugaucagag

SEQ ID NO: 483957 - RNA, 19 nt, Artificial Sequence
  Description of Artificial Sequence: Synthetic oligonucleotide
  Sense strand starting at position 996 of SEQ ID NO: 317349
acauuaggccuccaaaguu

SEQ ID NO: 483958 - RNA, 19 nt, Artificial Sequence
  Description of Artificial Sequence: Synthetic oligonucleotide
  Antisense Strand to SEQ ID NO: 483957
aacuuuggaggccuaaugu

SEQ ID NO: 483959 - RNA, 19 nt, Artificial Sequence
  Description of Artificial Sequence: Synthetic oligonucleotide
  Sense strand starting at position 1110 of SEQ ID NO: 317349
uugggcucuuccucauuga

SEQ ID NO: 483960 - RNA, 19 nt, Artificial Sequence
  Description of Artificial Sequence: Synthetic oligonucleotide
  Antisense Strand to SEQ ID NO: 483959
ucaaugaggaagagcccaa

SEQ ID NO: 483961 - RNA, 19 nt, Artificial Sequence
  Description of Artificial Sequence: Synthetic oligonucleotide
  Sense strand starting at position 1225 of SEQ ID NO: 317349
aucugaguuuauuccgaaa

SEQ ID NO: 483962 - RNA, 19 nt, Artificial Sequence
  Description of Artificial Sequence: Synthetic oligonucleotide
  Antisense Strand to SEQ ID NO: 483961
uuucggaauaaacucagau

SEQ ID NO: 483963 - RNA, 19 nt, Artificial Sequence
  Description of Artificial Sequence: Synthetic oligonucleotide
  Sense strand starting at position 1342 of SEQ ID NO: 317349
uacagcauugugcaugaga

SEQ ID NO: 483964 - RNA, 19 nt, Artificial Sequence
  Description of Artificial Sequence: Synthetic oligonucleotide
  Antisense Strand to SEQ ID NO: 483963
ucucaugcacaaugcugua

SEQ ID NO: 483965 - RNA, 19 nt, Artificial Sequence
  Description of Artificial Sequence: Synthetic oligonucleotide
  Sense strand starting at position 1344 of SEQ ID NO: 317349
cagcauugugcaugagaua

SEQ ID NO: 483966 - RNA, 19 nt, Artificial Sequence
  Description of Artificial Sequence: Synthetic oligonucleotide
  Antisense Strand to SEQ ID NO: 483965
uaucucaugcacaaugcug

SEQ ID NO: 483967 - RNA, 19 nt, Artificial Sequence
  Description of Artificial Sequence: Synthetic oligonucleotide
  Sense strand starting at position 1345 of SEQ ID NO: 317349
agcauugugcaugagauac

SEQ ID NO: 483968 - RNA, 19 nt, Artificial Sequence
  Description of Artificial Sequence: Synthetic oligonucleotide
  Antisense Strand to SEQ ID NO: 483967
guaucucaugcacaaugcu

SEQ ID NO: 483969 - RNA, 19 nt, Artificial Sequence
  Description of Artificial Sequence: Synthetic oligonucleotide
  Sense strand starting at position 1349 of SEQ ID NO: 317349
uugugcaugagauacgaua

SEQ ID NO: 483970 - RNA, 19 nt, Artificial Sequence
  Description of Artificial Sequence: Synthetic oligonucleotide
  Antisense Strand to SEQ ID NO: 483969
uaucguaucucaugcacaa

SEQ ID NO: 483971 - RNA, 19 nt, Artificial Sequence
  Description of Artificial Sequence: Synthetic oligonucleotide
  Sense strand starting at position 1367 of SEQ ID NO: 317349
aagggaauucuugggugau

SEQ ID NO: 483972 - RNA, 19 nt, Artificial Sequence
  Description of Artificial Sequence: Synthetic oligonucleotide
  Antisense Strand to SEQ ID NO: 483971
aucacccaagaauucccuu

SEQ ID NO: 483973 - RNA, 19 nt, Artificial Sequence
  Description of Artificial Sequence: Synthetic oligonucleotide
  Sense strand starting at position 1369 of SEQ ID NO: 317349
gggaauucuugggugauga

SEQ ID NO: 483974 - RNA, 19 nt, Artificial Sequence
  Description of Artificial Sequence: Synthetic oligonucleotide
  Antisense Strand to SEQ ID NO: 483973
ucaucacccaagaauuccc

SEQ ID NO: 483975 - RNA, 19 nt, Artificial Sequence
  Description of Artificial Sequence: Synthetic oligonucleotide
  Sense strand starting at position 1370 of SEQ ID NO: 317349
ggaauucuugggugaugau

SEQ ID NO: 483976 - RNA, 19 nt, Artificial Sequence
  Description of Artificial Sequence: Synthetic oligonucleotide
  Antisense Strand to SEQ ID NO: 483975
aucaucacccaagaauucc

SEQ ID NO: 483977 - RNA, 19 nt, Artificial Sequence
  Description of Artificial Sequence: Synthetic oligonucleotide
  Sense strand starting at position 1524 of SEQ ID NO: 317349
ccggguggguuuccauaua

SEQ ID NO: 483978 - RNA, 19 nt, Artificial Sequence
  Description of Artificial Sequence: Synthetic oligonucleotide
  Antisense Strand to SEQ ID NO: 483977
uauauggaaacccacccgg

SEQ ID NO: 483979 - RNA, 19 nt, Artificial Sequence
  Description of Artificial Sequence: Synthetic oligonucleotide
  Sense strand starting at position 2430 of SEQ ID NO: 317349
agagcucacugccuggaua

SEQ ID NO: 483980 - RNA, 19 nt, Artificial Sequence
  Description of Artificial Sequence: Synthetic oligonucleotide
  Antisense Strand to SEQ ID NO: 483979
uauccaggcagugagcucu

SEQ ID NO: 483981 - RNA, 19 nt, Artificial Sequence
  Description of Artificial Sequence: Synthetic oligonucleotide
  Sense strand starting at position 2431 of SEQ ID NO: 317349
gagcucacugccuggauau

SEQ ID NO: 483982 - RNA, 19 nt, Artificial Sequence
  Description of Artificial Sequence: Synthetic oligonucleotide
  Antisense Strand to SEQ ID NO: 483981
auauccaggcagugagcuc

SEQ ID NO: 483983 - RNA, 19 nt, Artificial Sequence
  Description of Artificial Sequence: Synthetic oligonucleotide
  Sense strand starting at position 2466 of SEQ ID NO: 317349
gugcgcucccgagaauaaa

SEQ ID NO: 483984 - RNA, 19 nt, Artificial Sequence
  Description of Artificial Sequence: Synthetic oligonucleotide
  Antisense Strand to SEQ ID NO: 483983
uuuauucucgggagcgcac

SEQ ID NO: 483985 - RNA, 19 nt, Artificial Sequence
  Description of Artificial Sequence: Synthetic oligonucleotide
  Sense strand starting at position 2611 of SEQ ID NO: 317349
uauugaugugucuggcacu

SEQ ID NO: 483986 - RNA, 19 nt, Artificial Sequence
  Description of Artificial Sequence: Synthetic oligonucleotide
  Antisense Strand to SEQ ID NO: 483985
agugccagacacaucaaua

SEQ ID NO: 483987 - RNA, 19 nt, Artificial Sequence
  Description of Artificial Sequence: Synthetic oligonucleotide
  Sense strand starting at position 2757 of SEQ ID NO: 317349
ucugcucucagcggaauuu

SEQ ID NO: 483988 - RNA, 19 nt, Artificial Sequence
  Description of Artificial Sequence: Synthetic oligonucleotide
  Antisense Strand to SEQ ID NO: 483987
aaauuccgcugagagcaga

SEQ ID NO: 483989 - RNA, 19 nt, Artificial Sequence
  Description of Artificial Sequence: Synthetic oligonucleotide
  Sense strand starting at position 2781 of SEQ ID NO: 317349
cauauuagggcagaauguu

SEQ ID NO: 483990 - RNA, 19 nt, Artificial Sequence
  Description of Artificial Sequence: Synthetic oligonucleotide
  Antisense Strand to SEQ ID NO: 483989
aacauucugcccuaauaug

SEQ ID NO: 483991 - RNA, 19 nt, Artificial Sequence
  Description of Artificial Sequence: Synthetic oligonucleotide
  Sense strand starting at position 2907 of SEQ ID NO: 317349
gcuauuuaaucccaggaaa

SEQ ID NO: 483992 - RNA, 19 nt, Artificial Sequence
  Description of Artificial Sequence: Synthetic oligonucleotide
  Antisense Strand to SEQ ID NO: 483991
uuuccugggauuaaauagc

SEQ ID NO: 483993 - RNA, 19 nt, Artificial Sequence
  Description of Artificial Sequence: Synthetic oligonucleotide
  Sense strand starting at position 2918 of SEQ ID NO: 317349
ccaggaaauuaauugcaau

SEQ ID NO: 483994 - RNA, 19 nt, Artificial Sequence
  Description of Artificial Sequence: Synthetic oligonucleotide
  Antisense Strand to SEQ ID NO: 483993
auugcaauuaauuuccugg

SEQ ID NO: 483995 - RNA, 19 nt, Artificial Sequence
  Description of Artificial Sequence: Synthetic oligonucleotide
  Sense strand starting at position 3228 of SEQ ID NO: 317349
uuugguauagcagaaguca

SEQ ID NO: 483996 - RNA, 19 nt, Artificial Sequence
  Description of Artificial Sequence: Synthetic oligonucleotide
  Antisense Strand to SEQ ID NO: 483995
ugacuucugcuauaccaaa

SEQ ID NO: 483997 - RNA, 19 nt, Artificial Sequence
  Description of Artificial Sequence: Synthetic oligonucleotide
  Sense strand starting at position 3236 of SEQ ID NO: 317349
agcagaagucacuaagguu

SEQ ID NO: 483998 - RNA, 19 nt, Artificial Sequence
  Description of Artificial Sequence: Synthetic oligonucleotide
  Antisense Strand to SEQ ID NO: 483997
aaccuuagugacuucugcu

SEQ ID NO: 483999 - RNA, 19 nt, Artificial Sequence
  Description of Artificial Sequence: Synthetic oligonucleotide
  Sense strand starting at position 3267 of SEQ ID NO: 317349
agggcaugcguuuaucuaa

SEQ ID NO: 484000 - RNA, 19 nt, Artificial Sequence
  Description of Artificial Sequence: Synthetic oligonucleotide
  Antisense Strand to SEQ ID NO: 483999
uuagauaaacgcaugcccu

SEQ ID NO: 484001 - RNA, 19 nt, Artificial Sequence
  Description of Artificial Sequence: Synthetic oligonucleotide
  Sense strand starting at position 3398 of SEQ ID NO: 317349
acagauaaaccauguaugu

SEQ ID NO: 484002 - RNA, 19 nt, Artificial Sequence
  Description of Artificial Sequence: Synthetic oligonucleotide
  Antisense Strand to SEQ ID NO: 484001
acauacaugguuuaucugu

SEQ ID NO: 484003 - RNA, 19 nt, Artificial Sequence
  Description of Artificial Sequence: Synthetic oligonucleotide
  Sense strand starting at position 3400 of SEQ ID NO: 317349
agauaaaccauguaugugu

SEQ ID NO: 484004 - RNA, 19 nt, Artificial Sequence
  Description of Artificial Sequence: Synthetic oligonucleotide
  Antisense Strand to SEQ ID NO: 484003
acacauacaugguuuaucu

SEQ ID NO: 484005 - RNA, 19 nt, Artificial Sequence
  Description of Artificial Sequence: Synthetic oligonucleotide
  Sense strand starting at position 3429 of SEQ ID NO: 317349
gacucuugcugagcaugua

SEQ ID NO: 484006 - RNA, 19 nt, Artificial Sequence
  Description of Artificial Sequence: Synthetic oligonucleotide
  Antisense Strand to SEQ ID NO: 484005
uacaugcucagcaagaguc

SEQ ID NO: 484007 - RNA, 19 nt, Artificial Sequence
  Description of Artificial Sequence: Synthetic oligonucleotide
  Sense strand starting at position 3470 of SEQ ID NO: 317349
agcccuguggauugaauau

SEQ ID NO: 484008 - RNA, 19 nt, Artificial Sequence
  Description of Artificial Sequence: Synthetic oligonucleotide
  Antisense Strand to SEQ ID NO: 484007
auauucaauccacagggcu

SEQ ID NO: 484009 - RNA, 19 nt, Artificial Sequence
  Description of Artificial Sequence: Synthetic oligonucleotide
  Sense strand starting at position 3564 of SEQ ID NO: 317349
cuuacugauuuccauggau

SEQ ID NO: 484010 - RNA, 19 nt, Artificial Sequence
  Description of Artificial Sequence: Synthetic oligonucleotide
  Antisense Strand to SEQ ID NO: 484009
auccauggaaaucaguaag

SEQ ID NO: 484011 - RNA, 19 nt, Artificial Sequence
  Description of Artificial Sequence: Synthetic oligonucleotide
  Sense strand starting at position 3573 of SEQ ID NO: 317349
uuccauggaucagcauaau

SEQ ID NO: 484012 - RNA, 19 nt, Artificial Sequence
  Description of Artificial Sequence: Synthetic oligonucleotide
  Antisense Strand to SEQ ID NO: 484011
auuaugcugauccauggaa

SEQ ID NO: 484013 - RNA, 19 nt, Artificial Sequence
  Description of Artificial Sequence: Synthetic oligonucleotide
  Sense strand starting at position 3912 of SEQ ID NO: 317349
ggcagaggucauggugauc

SEQ ID NO: 484014 - RNA, 19 nt, Artificial Sequence
  Description of Artificial Sequence: Synthetic oligonucleotide
  Antisense Strand to SEQ ID NO: 484013
gaucaccaugaccucugcc

SEQ ID NO: 484015 - RNA, 19 nt, Artificial Sequence
  Description of Artificial Sequence: Synthetic oligonucleotide
  Sense strand starting at position 3917 of SEQ ID NO: 317349
aggucauggugaucugaga

SEQ ID NO: 484016 - RNA, 19 nt, Artificial Sequence
  Description of Artificial Sequence: Synthetic oligonucleotide
  Antisense Strand to SEQ ID NO: 484015
ucucagaucaccaugaccu

SEQ ID NO: 484017 - RNA, 19 nt, Artificial Sequence
  Description of Artificial Sequence: Synthetic oligonucleotide
  Sense strand starting at position 486 of SEQ ID NO: 317350
agaauccaucgugagguga

SEQ ID NO: 484018 - RNA, 19 nt, Artificial Sequence
  Description of Artificial Sequence: Synthetic oligonucleotide
  Antisense Strand to SEQ ID NO: 484017
ucaccucacgauggauucu

SEQ ID NO: 484019 - RNA, 19 nt, Artificial Sequence
  Description of Artificial Sequence: Synthetic oligonucleotide
  Sense strand starting at position 488 of SEQ ID NO: 317350
aauccaucgugaggugaga

SEQ ID NO: 484020 - RNA, 19 nt, Artificial Sequence
  Description of Artificial Sequence: Synthetic oligonucleotide
  Antisense Strand to SEQ ID NO: 484019
ucucaccucacgauggauu

SEQ ID NO: 484021 - RNA, 19 nt, Artificial Sequence
  Description of Artificial Sequence: Synthetic oligonucleotide
  Sense strand starting at position 923 of SEQ ID NO: 317350
gcggaagucucaggaagag

SEQ ID NO: 484022 - RNA, 19 nt, Artificial Sequence
  Description of Artificial Sequence: Synthetic oligonucleotide
  Antisense Strand to SEQ ID NO: 484021
cucuuccugagacuuccgc

SEQ ID NO: 484023 - RNA, 19 nt, Artificial Sequence
  Description of Artificial Sequence: Synthetic oligonucleotide
  Sense strand starting at position 1039 of SEQ ID NO: 317350
gggacagaauucugagaau

SEQ ID NO: 484024 - RNA, 19 nt, Artificial Sequence
  Description of Artificial Sequence: Synthetic oligonucleotide
  Antisense Strand to SEQ ID NO: 484023
auucucagaauucuguccc

SEQ ID NO: 484025 - RNA, 19 nt, Artificial Sequence
  Description of Artificial Sequence: Synthetic oligonucleotide
  Sense strand starting at position 1042 of SEQ ID NO: 317350
acagaauucugagaauaug

SEQ ID NO: 484026 - RNA, 19 nt, Artificial Sequence
  Description of Artificial Sequence: Synthetic oligonucleotide
  Antisense Strand to SEQ ID NO: 484025
cauauucucagaauucugu

SEQ ID NO: 484027 - RNA, 19 nt, Artificial Sequence
  Description of Artificial Sequence: Synthetic oligonucleotide
  Sense strand starting at position 1370 of SEQ ID NO: 317350
guuugcagacuccaaugua

SEQ ID NO: 484028 - RNA, 19 nt, Artificial Sequence
  Description of Artificial Sequence: Synthetic oligonucleotide
  Antisense Strand to SEQ ID NO: 484027
uacauuggagucugcaaac

SEQ ID NO: 484029 - RNA, 19 nt, Artificial Sequence
  Description of Artificial Sequence: Synthetic oligonucleotide
  Sense strand starting at position 1402 of SEQ ID NO: 317350
cauucuucucagcgacguu

SEQ ID NO: 484030 - RNA, 19 nt, Artificial Sequence
  Description of Artificial Sequence: Synthetic oligonucleotide
  Antisense Strand to SEQ ID NO: 484029
aacgucgcugagaagaaug

SEQ ID NO: 484031 - RNA, 19 nt, Artificial Sequence
  Description of Artificial Sequence: Synthetic oligonucleotide
  Sense strand starting at position 1403 of SEQ ID NO: 317350
auucuucucagcgacguua

SEQ ID NO: 484032 - RNA, 19 nt, Artificial Sequence
  Description of Artificial Sequence: Synthetic oligonucleotide
  Antisense Strand to SEQ ID NO: 484031
uaacgucgcugagaagaau

SEQ ID NO: 484033 - RNA, 19 nt, Artificial Sequence
  Description of Artificial Sequence: Synthetic oligonucleotide
  Sense strand starting at position 1427 of SEQ ID NO: 317350
agacuuugcucccaggaca

SEQ ID NO: 484034 - RNA, 19 nt, Artificial Sequence
  Description of Artificial Sequence: Synthetic oligonucleotide
  Antisense Strand to SEQ ID NO: 484033
uguccugggagcaaagucu

SEQ ID NO: 484035 - RNA, 19 nt, Artificial Sequence
  Description of Artificial Sequence: Synthetic oligonucleotide
  Sense strand starting at position 1625 of SEQ ID NO: 317350
gcaacauugcaagaguugu

SEQ ID NO: 484036 - RNA, 19 nt, Artificial Sequence
  Description of Artificial Sequence: Synthetic oligonucleotide
  Antisense Strand to SEQ ID NO: 484035
acaacucuugcaauguugc

SEQ ID NO: 484037 - RNA, 19 nt, Artificial Sequence
  Description of Artificial Sequence: Synthetic oligonucleotide
  Sense strand starting at position 1846 of SEQ ID NO: 317350
caggaugguucuuaccuga

SEQ ID NO: 484038 - RNA, 19 nt, Artificial Sequence
  Description of Artificial Sequence: Synthetic oligonucleotide
  Antisense Strand to SEQ ID NO: 484037
ucagguaagaaccauccug

SEQ ID NO: 484039 - RNA, 19 nt, Artificial Sequence
  Description of Artificial Sequence: Synthetic oligonucleotide
  Sense strand starting at position 1850 of SEQ ID NO: 317350
augguucuuaccugaggga

SEQ ID NO: 484040 - RNA, 19 nt, Artificial Sequence
  Description of Artificial Sequence: Synthetic oligonucleotide
  Antisense Strand to SEQ ID NO: 484039
ucccucagguaagaaccau

SEQ ID NO: 484041 - RNA, 19 nt, Artificial Sequence
  Description of Artificial Sequence: Synthetic oligonucleotide
  Sense strand starting at position 2029 of SEQ ID NO: 317350
ccuacagauugcugaguca

SEQ ID NO: 484042 - RNA, 19 nt, Artificial Sequence
  Description of Artificial Sequence: Synthetic oligonucleotide
  Antisense Strand to SEQ ID NO: 484041
ugacucagcaaucuguagg

SEQ ID NO: 484043 - RNA, 19 nt, Artificial Sequence
  Description of Artificial Sequence: Synthetic oligonucleotide
  Sense strand starting at position 2036 of SEQ ID NO: 317350
auugcugagucauggguuu

SEQ ID NO: 484044 - RNA, 19 nt, Artificial Sequence
  Description of Artificial Sequence: Synthetic oligonucleotide
  Antisense Strand to SEQ ID NO: 484043
aaacccaugacucagcaau

SEQ ID NO: 484045 - RNA, 19 nt, Artificial Sequence
  Description of Artificial Sequence: Synthetic oligonucleotide
  Sense strand starting at position 2038 of SEQ ID NO: 317350
ugcugagucauggguuucu

SEQ ID NO: 484046 - RNA, 19 nt, Artificial Sequence
  Description of Artificial Sequence: Synthetic oligonucleotide
  Antisense Strand to SEQ ID NO: 484045
agaaacccaugacucagca

SEQ ID NO: 484047 - RNA, 19 nt, Artificial Sequence
  Description of Artificial Sequence: Synthetic oligonucleotide
  Sense strand starting at position 2075 of SEQ ID NO: 317350
cggcugauccgggaguuga

SEQ ID NO: 484048 - RNA, 19 nt, Artificial Sequence
  Description of Artificial Sequence: Synthetic oligonucleotide
  Antisense Strand to SEQ ID NO: 484047
ucaacucccggaucagccg

SEQ ID NO: 484049 - RNA, 19 nt, Artificial Sequence
  Description of Artificial Sequence: Synthetic oligonucleotide
  Sense strand starting at position 2107 of SEQ ID NO: 317350
gcuuguaggaguuagagcu

SEQ ID NO: 484050 - RNA, 19 nt, Artificial Sequence
  Description of Artificial Sequence: Synthetic oligonucleotide
  Antisense Strand to SEQ ID NO: 484049
agcucuaacuccuacaagc

SEQ ID NO: 484051 - RNA, 19 nt, Artificial Sequence
  Description of Artificial Sequence: Synthetic oligonucleotide
  Sense strand starting at position 2431 of SEQ ID NO: 317350
augcgugugugcucgcgua

SEQ ID NO: 484052 - RNA, 19 nt, Artificial Sequence
  Description of Artificial Sequence: Synthetic oligonucleotide
  Antisense Strand to SEQ ID NO: 484051
uacgcgagcacacacgcau

SEQ ID NO: 484053 - RNA, 19 nt, Artificial Sequence
  Description of Artificial Sequence: Synthetic oligonucleotide
  Sense strand starting at position 2432 of SEQ ID NO: 317350
ugcgugugugcucgcguaa

SEQ ID NO: 484054 - RNA, 19 nt, Artificial Sequence
  Description of Artificial Sequence: Synthetic oligonucleotide
  Antisense Strand to SEQ ID NO: 484053
uuacgcgagcacacacgca

SEQ ID NO: 484055 - RNA, 19 nt, Artificial Sequence
  Description of Artificial Sequence: Synthetic oligonucleotide
  Sense strand starting at position 2433 of SEQ ID NO: 317350
gcgugugugcucgcguaag

SEQ ID NO: 484056 - RNA, 19 nt, Artificial Sequence
  Description of Artificial Sequence: Synthetic oligonucleotide
  Antisense Strand to SEQ ID NO: 484055
cuuacgcgagcacacacgc

SEQ ID NO: 484057 - RNA, 19 nt, Artificial Sequence
  Description of Artificial Sequence: Synthetic oligonucleotide
  Sense strand starting at position 2708 of SEQ ID NO: 317350
aggaauuauuagccaggca

SEQ ID NO: 484058 - RNA, 19 nt, Artificial Sequence
  Description of Artificial Sequence: Synthetic oligonucleotide
  Antisense Strand to SEQ ID NO: 484057
ugccuggcuaauaauuccu

SEQ ID NO: 484059 - RNA, 19 nt, Artificial Sequence
  Description of Artificial Sequence: Synthetic oligonucleotide
  Sense strand starting at position 3430 of SEQ ID NO: 317350
gagguaugauuaggccacu

SEQ ID NO: 484060 - RNA, 19 nt, Artificial Sequence
  Description of Artificial Sequence: Synthetic oligonucleotide
  Antisense Strand to SEQ ID NO: 484059
aguggccuaaucauaccuc

SEQ ID NO: 484061 - RNA, 19 nt, Artificial Sequence
  Description of Artificial Sequence: Synthetic oligonucleotide
  Sense strand starting at position 3433 of SEQ ID NO: 317350
guaugauuaggccacugca

SEQ ID NO: 484062 - RNA, 19 nt, Artificial Sequence
  Description of Artificial Sequence: Synthetic oligonucleotide
  Antisense Strand to SEQ ID NO: 484061
ugcaguggccuaaucauac

SEQ ID NO: 484063 - RNA, 19 nt, Artificial Sequence
  Description of Artificial Sequence: Synthetic oligonucleotide
  Sense strand starting at position 3569 of SEQ ID NO: 317350
gagguauguuuguagcgcu

SEQ ID NO: 484064 - RNA, 19 nt, Artificial Sequence
  Description of Artificial Sequence: Synthetic oligonucleotide
  Antisense Strand to SEQ ID NO: 484063
agcgcuacaaacauaccuc

SEQ ID NO: 484065 - RNA, 19 nt, Artificial Sequence
  Description of Artificial Sequence: Synthetic oligonucleotide
  Sense strand starting at position 3572 of SEQ ID NO: 317350
guauguuuguagcgcuuca

SEQ ID NO: 484066 - RNA, 19 nt, Artificial Sequence
  Description of Artificial Sequence: Synthetic oligonucleotide
  Antisense Strand to SEQ ID NO: 484065
ugaagcgcuacaaacauac

SEQ ID NO: 484067 - RNA, 19 nt, Artificial Sequence
  Description of Artificial Sequence: Synthetic oligonucleotide
  Sense strand starting at position 3954 of SEQ ID NO: 317350
cgacuuugacagugaguac

SEQ ID NO: 484068 - RNA, 19 nt, Artificial Sequence
  Description of Artificial Sequence: Synthetic oligonucleotide
  Antisense Strand to SEQ ID NO: 484067
guacucacugucaaagucg

SEQ ID NO: 484069 - RNA, 19 nt, Artificial Sequence
  Description of Artificial Sequence: Synthetic oligonucleotide
  Sense strand starting at position 373 of SEQ ID NO: 317351
auggaacuacugugucaaa

SEQ ID NO: 484070 - RNA, 19 nt, Artificial Sequence
  Description of Artificial Sequence: Synthetic oligonucleotide
  Antisense Strand to SEQ ID NO: 484069
uuugacacaguaguuccau

SEQ ID NO: 484071 - RNA, 19 nt, Artificial Sequence
  Description of Artificial Sequence: Synthetic oligonucleotide
  Sense strand starting at position 374 of SEQ ID NO: 317351
uggaacuacugugucaaau

SEQ ID NO: 484072 - RNA, 19 nt, Artificial Sequence
  Description of Artificial Sequence: Synthetic oligonucleotide
  Antisense Strand to SEQ ID NO: 484071
auuugacacaguaguucca

SEQ ID NO: 484073 - RNA, 19 nt, Artificial Sequence
  Description of Artificial Sequence: Synthetic oligonucleotide
  Sense strand starting at position 538 of SEQ ID NO: 317351
cuugauucuuaggcaugga

SEQ ID NO: 484074 - RNA, 19 nt, Artificial Sequence
  Description of Artificial Sequence: Synthetic oligonucleotide
  Antisense Strand to SEQ ID NO: 484073
uccaugccuaagaaucaag

SEQ ID NO: 484075 - RNA, 19 nt, Artificial Sequence
  Description of Artificial Sequence: Synthetic oligonucleotide
  Sense strand starting at position 662 of SEQ ID NO: 317351
agggcuagguggcuaaaua

SEQ ID NO: 484076 - RNA, 19 nt, Artificial Sequence
  Description of Artificial Sequence: Synthetic oligonucleotide
  Antisense Strand to SEQ ID NO: 484075
uauuuagccaccuagcccu

SEQ ID NO: 484077 - RNA, 19 nt, Artificial Sequence
  Description of Artificial Sequence: Synthetic oligonucleotide
  Sense strand starting at position 749 of SEQ ID NO: 317351
cguagacaaugguuaaaca

SEQ ID NO: 484078 - RNA, 19 nt, Artificial Sequence
  Description of Artificial Sequence: Synthetic oligonucleotide
  Antisense Strand to SEQ ID NO: 484077
uguuuaaccauugucuacg

SEQ ID NO: 484079 - RNA, 19 nt, Artificial Sequence
  Description of Artificial Sequence: Synthetic oligonucleotide
  Sense strand starting at position 762 of SEQ ID NO: 317351
uaaacagaugugcaugauu

SEQ ID NO: 484080 - RNA, 19 nt, Artificial Sequence
  Description of Artificial Sequence: Synthetic oligonucleotide
  Antisense Strand to SEQ ID NO: 484079
aaucaugcacaucuguuua

SEQ ID NO: 484081 - RNA, 19 nt, Artificial Sequence
  Description of Artificial Sequence: Synthetic oligonucleotide
  Sense strand starting at position 869 of SEQ ID NO: 317351
augugagcucaaugaaucu

SEQ ID NO: 484082 - RNA, 19 nt, Artificial Sequence
  Description of Artificial Sequence: Synthetic oligonucleotide
  Antisense Strand to SEQ ID NO: 484081
agauucauugagcucacau

SEQ ID NO: 484083 - RNA, 19 nt, Artificial Sequence
  Description of Artificial Sequence: Synthetic oligonucleotide
  Sense strand starting at position 876 of SEQ ID NO: 317351
cucaaugaaucuccgacuu

SEQ ID NO: 484084 - RNA, 19 nt, Artificial Sequence
  Description of Artificial Sequence: Synthetic oligonucleotide
  Antisense Strand to SEQ ID NO: 484083
aagucggagauucauugag

SEQ ID NO: 484085 - RNA, 19 nt, Artificial Sequence
  Description of Artificial Sequence: Synthetic oligonucleotide
  Sense strand starting at position 916 of SEQ ID NO: 317351
ccuggaaugucccuuaaca

SEQ ID NO: 484086 - RNA, 19 nt, Artificial Sequence
  Description of Artificial Sequence: Synthetic oligonucleotide
  Antisense Strand to SEQ ID NO: 484085
uguuaagggacauuccagg

SEQ ID NO: 484087 - RNA, 19 nt, Artificial Sequence
  Description of Artificial Sequence: Synthetic oligonucleotide
  Sense strand starting at position 918 of SEQ ID NO: 317351
uggaaugucccuuaacagu

SEQ ID NO: 484088 - RNA, 19 nt, Artificial Sequence
  Description of Artificial Sequence: Synthetic oligonucleotide
  Antisense Strand to SEQ ID NO: 484087
acuguuaagggacauucca

SEQ ID NO: 484089 - RNA, 19 nt, Artificial Sequence
  Description of Artificial Sequence: Synthetic oligonucleotide
  Sense strand starting at position 944 of SEQ ID NO: 317351
agaacugccuuacucagaa

SEQ ID NO: 484090 - RNA, 19 nt, Artificial Sequence
  Description of Artificial Sequence: Synthetic oligonucleotide
  Antisense Strand to SEQ ID NO: 484089
uucugaguaaggcaguucu

SEQ ID NO: 484091 - RNA, 19 nt, Artificial Sequence
  Description of Artificial Sequence: Synthetic oligonucleotide
  Sense strand starting at position 1179 of SEQ ID NO: 317351
accuguaguuucccaugaa

SEQ ID NO: 484092 - RNA, 19 nt, Artificial Sequence
  Description of Artificial Sequence: Synthetic oligonucleotide
  Antisense Strand to SEQ ID NO: 484091
uucaugggaaacuacaggu

SEQ ID NO: 484093 - RNA, 19 nt, Artificial Sequence
  Description of Artificial Sequence: Synthetic oligonucleotide
  Sense strand starting at position 1183 of SEQ ID NO: 317351
guaguuucccaugaaguga

SEQ ID NO: 484094 - RNA, 19 nt, Artificial Sequence
  Description of Artificial Sequence: Synthetic oligonucleotide
  Antisense Strand to SEQ ID NO: 484093
ucacuucaugggaaacuac

SEQ ID NO: 484095 - RNA, 19 nt, Artificial Sequence
  Description of Artificial Sequence: Synthetic oligonucleotide
  Sense strand starting at position 1286 of SEQ ID NO: 317351
cuaggugacgccuaaauaa

SEQ ID NO: 484096 - RNA, 19 nt, Artificial Sequence
  Description of Artificial Sequence: Synthetic oligonucleotide
  Antisense Strand to SEQ ID NO: 484095
uuauuuaggcgucaccuag

SEQ ID NO: 484097 - RNA, 19 nt, Artificial Sequence
  Description of Artificial Sequence: Synthetic oligonucleotide
  Sense strand starting at position 1356 of SEQ ID NO: 317351
ggguucuaucucugaagau

SEQ ID NO: 484098 - RNA, 19 nt, Artificial Sequence
  Description of Artificial Sequence: Synthetic oligonucleotide
  Antisense Strand to SEQ ID NO: 484097
aucuucagagauagaaccc

SEQ ID NO: 484099 - RNA, 19 nt, Artificial Sequence
  Description of Artificial Sequence: Synthetic oligonucleotide
  Sense strand starting at position 1365 of SEQ ID NO: 317351
cucugaagaugguucuaac

SEQ ID NO: 484100 - RNA, 19 nt, Artificial Sequence
  Description of Artificial Sequence: Synthetic oligonucleotide
  Antisense Strand to SEQ ID NO: 484099
guuagaaccaucuucagag

SEQ ID NO: 484101 - RNA, 19 nt, Artificial Sequence
  Description of Artificial Sequence: Synthetic oligonucleotide
  Sense strand starting at position 1507 of SEQ ID NO: 317351
acagcaucccuggagucau

SEQ ID NO: 484102 - RNA, 19 nt, Artificial Sequence
  Description of Artificial Sequence: Synthetic oligonucleotide
  Antisense Strand to SEQ ID NO: 484101
augacuccagggaugcugu

SEQ ID NO: 484103 - RNA, 19 nt, Artificial Sequence
  Description of Artificial Sequence: Synthetic oligonucleotide
  Sense strand starting at position 1587 of SEQ ID NO: 317351
ugcucaguucuagauuaag

SEQ ID NO: 484104 - RNA, 19 nt, Artificial Sequence
  Description of Artificial Sequence: Synthetic oligonucleotide
  Antisense Strand to SEQ ID NO: 484103
cuuaaucuagaacugagca

SEQ ID NO: 484105 - RNA, 19 nt, Artificial Sequence
  Description of Artificial Sequence: Synthetic oligonucleotide
  Sense strand starting at position 1950 of SEQ ID NO: 317351
uggaguccagaauguuuaa

SEQ ID NO: 484106 - RNA, 19 nt, Artificial Sequence
  Description of Artificial Sequence: Synthetic oligonucleotide
  Antisense Strand to SEQ ID NO: 484105
uuaaacauucuggacucca

SEQ ID NO: 484107 - RNA, 19 nt, Artificial Sequence
  Description of Artificial Sequence: Synthetic oligonucleotide
  Sense strand starting at position 2041 of SEQ ID NO: 317351
uucuauuugugagaacuga

SEQ ID NO: 484108 - RNA, 19 nt, Artificial Sequence
  Description of Artificial Sequence: Synthetic oligonucleotide
  Antisense Strand to SEQ ID NO: 484107
ucaguucucacaaauagaa

SEQ ID NO: 484109 - RNA, 19 nt, Artificial Sequence
  Description of Artificial Sequence: Synthetic oligonucleotide
  Sense strand starting at position 2054 of SEQ ID NO: 317351
aacugauguugaccaaguu

SEQ ID NO: 484110 - RNA, 19 nt, Artificial Sequence
  Description of Artificial Sequence: Synthetic oligonucleotide
  Antisense Strand to SEQ ID NO: 484109
aacuuggucaacaucaguu

SEQ ID NO: 484111 - RNA, 19 nt, Artificial Sequence
  Description of Artificial Sequence: Synthetic oligonucleotide
  Sense strand starting at position 2153 of SEQ ID NO: 317351
ugcgcuaugccauuaagua

SEQ ID NO: 484112 - RNA, 19 nt, Artificial Sequence
  Description of Artificial Sequence: Synthetic oligonucleotide
  Antisense Strand to SEQ ID NO: 484111
uacuuaauggcauagcgca

SEQ ID NO: 484113 - RNA, 19 nt, Artificial Sequence
  Description of Artificial Sequence: Synthetic oligonucleotide
  Sense strand starting at position 2234 of SEQ ID NO: 317351
guguaagugcuuucuacgu

SEQ ID NO: 484114 - RNA, 19 nt, Artificial Sequence
  Description of Artificial Sequence: Synthetic oligonucleotide
  Antisense Strand to SEQ ID NO: 484113
acguagaaagcacuuacac

SEQ ID NO: 484115 - RNA, 19 nt, Artificial Sequence
  Description of Artificial Sequence: Synthetic oligonucleotide
  Sense strand starting at position 2247 of SEQ ID NO: 317351
cuacguguugucuugugua

SEQ ID NO: 484116 - RNA, 19 nt, Artificial Sequence
  Description of Artificial Sequence: Synthetic oligonucleotide
  Antisense Strand to SEQ ID NO: 484115
uacacaagacaacacguag

SEQ ID NO: 484117 - RNA, 19 nt, Artificial Sequence
  Description of Artificial Sequence: Synthetic oligonucleotide
  Sense strand starting at position 2249 of SEQ ID NO: 317351
acguguugucuuguguacu

SEQ ID NO: 484118 - RNA, 19 nt, Artificial Sequence
  Description of Artificial Sequence: Synthetic oligonucleotide
  Antisense Strand to SEQ ID NO: 484117
aguacacaagacaacacgu

SEQ ID NO: 484119 - RNA, 19 nt, Artificial Sequence
  Description of Artificial Sequence: Synthetic oligonucleotide
  Sense strand starting at position 2512 of SEQ ID NO: 317351
cugugagagcugggaagua

SEQ ID NO: 484120 - RNA, 19 nt, Artificial Sequence
  Description of Artificial Sequence: Synthetic oligonucleotide
  Antisense Strand to SEQ ID NO: 484119
uacuucccagcucucacag

SEQ ID NO: 484121 - RNA, 19 nt, Artificial Sequence
  Description of Artificial Sequence: Synthetic oligonucleotide
  Sense strand starting at position 2572 of SEQ ID NO: 317351
agauucgaauguccaaaga

SEQ ID NO: 484122 - RNA, 19 nt, Artificial Sequence
  Description of Artificial Sequence: Synthetic oligonucleotide
  Antisense Strand to SEQ ID NO: 484121
ucuuuggacauucgaaucu

SEQ ID NO: 484123 - RNA, 19 nt, Artificial Sequence
  Description of Artificial Sequence: Synthetic oligonucleotide
  Sense strand starting at position 2618 of SEQ ID NO: 317351
guaucagaagccuggagau

SEQ ID NO: 484124 - RNA, 19 nt, Artificial Sequence
  Description of Artificial Sequence: Synthetic oligonucleotide
  Antisense Strand to SEQ ID NO: 484123
aucuccaggcuucugauac

SEQ ID NO: 484125 - RNA, 19 nt, Artificial Sequence
  Description of Artificial Sequence: Synthetic oligonucleotide
  Sense strand starting at position 2628 of SEQ ID NO: 317351
ccuggagauuaguuccacu

SEQ ID NO: 484126 - RNA, 19 nt, Artificial Sequence
  Description of Artificial Sequence: Synthetic oligonucleotide
  Antisense Strand to SEQ ID NO: 484125
aguggaacuaaucuccagg

SEQ ID NO: 484127 - RNA, 19 nt, Artificial Sequence
  Description of Artificial Sequence: Synthetic oligonucleotide
  Sense strand starting at position 2687 of SEQ ID NO: 317351
ggcaucuugccugacauac

SEQ ID NO: 484128 - RNA, 19 nt, Artificial Sequence
  Description of Artificial Sequence: Synthetic oligonucleotide
  Antisense Strand to SEQ ID NO: 484127
guaugucaggcaagaugcc

SEQ ID NO: 484129 - RNA, 19 nt, Artificial Sequence
  Description of Artificial Sequence: Synthetic oligonucleotide
  Sense strand starting at position 2699 of SEQ ID NO: 317351
gacauacaguaucugauga

SEQ ID NO: 484130 - RNA, 19 nt, Artificial Sequence
  Description of Artificial Sequence: Synthetic oligonucleotide
  Antisense Strand to SEQ ID NO: 484129
ucaucagauacuguauguc

SEQ ID NO: 484131 - RNA, 19 nt, Artificial Sequence
  Description of Artificial Sequence: Synthetic oligonucleotide
  Sense strand starting at position 2844 of SEQ ID NO: 317351
cagggagugucaccuuaac

SEQ ID NO: 484132 - RNA, 19 nt, Artificial Sequence
  Description of Artificial Sequence: Synthetic oligonucleotide
  Antisense Strand to SEQ ID NO: 484131
guuaaggugacacucccug

SEQ ID NO: 484133 - RNA, 19 nt, Artificial Sequence
  Description of Artificial Sequence: Synthetic oligonucleotide
  Sense strand starting at position 2909 of SEQ ID NO: 317351
ugugcugaagaaugaagua

SEQ ID NO: 484134 - RNA, 19 nt, Artificial Sequence
  Description of Artificial Sequence: Synthetic oligonucleotide
  Antisense Strand to SEQ ID NO: 484133
uacuucauucuucagcaca

SEQ ID NO: 484135 - RNA, 19 nt, Artificial Sequence
  Description of Artificial Sequence: Synthetic oligonucleotide
  Sense strand starting at position 3071 of SEQ ID NO: 317351
ugggucuucucauuacaac

SEQ ID NO: 484136 - RNA, 19 nt, Artificial Sequence
  Description of Artificial Sequence: Synthetic oligonucleotide
  Antisense Strand to SEQ ID NO: 484135
guuguaaugagaagaccca

SEQ ID NO: 484137 - RNA, 19 nt, Artificial Sequence
  Description of Artificial Sequence: Synthetic oligonucleotide
  Sense strand starting at position 3224 of SEQ ID NO: 317351
gccagaaggccauagaauu

SEQ ID NO: 484138 - RNA, 19 nt, Artificial Sequence
  Description of Artificial Sequence: Synthetic oligonucleotide
  Antisense Strand to SEQ ID NO: 484137
aauucuauggccuucuggc

SEQ ID NO: 484139 - RNA, 19 nt, Artificial Sequence
  Description of Artificial Sequence: Synthetic oligonucleotide
  Sense strand starting at position 3251 of SEQ ID NO: 317351
acugaacaauuugaguaaa

SEQ ID NO: 484140 - RNA, 19 nt, Artificial Sequence
  Description of Artificial Sequence: Synthetic oligonucleotide
  Antisense Strand to SEQ ID NO: 484139
uuuacucaaauuguucagu

SEQ ID NO: 484141 - RNA, 19 nt, Artificial Sequence
  Description of Artificial Sequence: Synthetic oligonucleotide
  Sense strand starting at position 3292 of SEQ ID NO: 317351
ucuucuugccaagaacagu

SEQ ID NO: 484142 - RNA, 19 nt, Artificial Sequence
  Description of Artificial Sequence: Synthetic oligonucleotide
  Antisense Strand to SEQ ID NO: 484141
acuguucuuggcaagaaga

SEQ ID NO: 484143 - RNA, 19 nt, Artificial Sequence
  Description of Artificial Sequence: Synthetic oligonucleotide
  Sense strand starting at position 3321 of SEQ ID NO: 317351
uaaauaucugcagggucau

SEQ ID NO: 484144 - RNA, 19 nt, Artificial Sequence
  Description of Artificial Sequence: Synthetic oligonucleotide
  Antisense Strand to SEQ ID NO: 484143
augacccugcagauauuua

SEQ ID NO: 484145 - RNA, 19 nt, Artificial Sequence
  Description of Artificial Sequence: Synthetic oligonucleotide
  Sense strand starting at position 3331 of SEQ ID NO: 317351
cagggucaugacugaagua

SEQ ID NO: 484146 - RNA, 19 nt, Artificial Sequence
  Description of Artificial Sequence: Synthetic oligonucleotide
  Antisense Strand to SEQ ID NO: 484145
uacuucagucaugacccug

SEQ ID NO: 484147 - RNA, 19 nt, Artificial Sequence
  Description of Artificial Sequence: Synthetic oligonucleotide
  Sense strand starting at position 3395 of SEQ ID NO: 317351
gccaaagugcuugauaaau

SEQ ID NO: 484148 - RNA, 19 nt, Artificial Sequence
  Description of Artificial Sequence: Synthetic oligonucleotide
  Antisense Strand to SEQ ID NO: 484147
auuuaucaagcacuuuggc

SEQ ID NO: 484149 - RNA, 19 nt, Artificial Sequence
  Description of Artificial Sequence: Synthetic oligonucleotide
  Sense strand starting at position 8 of SEQ ID NO: 317352
agugcuguuauguccugua

SEQ ID NO: 484150 - RNA, 19 nt, Artificial Sequence
  Description of Artificial Sequence: Synthetic oligonucleotide
  Antisense Strand to SEQ ID NO: 484149
uacaggacauaacagcacu

SEQ ID NO: 484151 - RNA, 19 nt, Artificial Sequence
  Description of Artificial Sequence: Synthetic oligonucleotide
  Sense strand starting at position 10 of SEQ ID NO: 317352
ugcuguuauguccuguauu

SEQ ID NO: 484152 - RNA, 19 nt, Artificial Sequence
  Description of Artificial Sequence: Synthetic oligonucleotide
  Antisense Strand to SEQ ID NO: 484151
aauacaggacauaacagca

SEQ ID NO: 484153 - RNA, 19 nt, Artificial Sequence
  Description of Artificial Sequence: Synthetic oligonucleotide
  Sense strand starting at position 13 of SEQ ID NO: 317352
uguuauguccuguauuaca

SEQ ID NO: 484154 - RNA, 19 nt, Artificial Sequence
  Description of Artificial Sequence: Synthetic oligonucleotide
  Antisense Strand to SEQ ID NO: 484153
uguaauacaggacauaaca

SEQ ID NO: 484155 - RNA, 19 nt, Artificial Sequence
  Description of Artificial Sequence: Synthetic oligonucleotide
  Sense strand starting at position 654 of SEQ ID NO: 317352
ggacccauaucagucaaau

SEQ ID NO: 484156 - RNA, 19 nt, Artificial Sequence
  Description of Artificial Sequence: Synthetic oligonucleotide
  Antisense Strand to SEQ ID NO: 484155
auuugacugauaugggucc

SEQ ID NO: 484157 - RNA, 19 nt, Artificial Sequence
  Description of Artificial Sequence: Synthetic oligonucleotide
  Sense strand starting at position 825 of SEQ ID NO: 317352
guaggagucugagcaagug

SEQ ID NO: 484158 - RNA, 19 nt, Artificial Sequence
  Description of Artificial Sequence: Synthetic oligonucleotide
  Antisense Strand to SEQ ID NO: 484157
cacuugcucagacuccuac

SEQ ID NO: 484159 - RNA, 19 nt, Artificial Sequence
  Description of Artificial Sequence: Synthetic oligonucleotide
  Sense strand starting at position 906 of SEQ ID NO: 317352
ccacauauguuguugagga

SEQ ID NO: 484160 - RNA, 19 nt, Artificial Sequence
  Description of Artificial Sequence: Synthetic oligonucleotide
  Antisense Strand to SEQ ID NO: 484159
uccucaacaacauaugugg

SEQ ID NO: 484161 - RNA, 19 nt, Artificial Sequence
  Description of Artificial Sequence: Synthetic oligonucleotide
  Sense strand starting at position 1051 of SEQ ID NO: 317352
agaggagcuugagcugaau

SEQ ID NO: 484162 - RNA, 19 nt, Artificial Sequence
  Description of Artificial Sequence: Synthetic oligonucleotide
  Antisense Strand to SEQ ID NO: 484161
auucagcucaagcuccucu

SEQ ID NO: 484163 - RNA, 19 nt, Artificial Sequence
  Description of Artificial Sequence: Synthetic oligonucleotide
  Sense strand starting at position 1899 of SEQ ID NO: 317352
aggcccaguuccuuggaau

SEQ ID NO: 484164 - RNA, 19 nt, Artificial Sequence
  Description of Artificial Sequence: Synthetic oligonucleotide
  Antisense Strand to SEQ ID NO: 484163
auuccaaggaacugggccu

SEQ ID NO: 484165 - RNA, 19 nt, Artificial Sequence
  Description of Artificial Sequence: Synthetic oligonucleotide
  Sense strand starting at position 1991 of SEQ ID NO: 317352
aaggcauuuccgugaguga

SEQ ID NO: 484166 - RNA, 19 nt, Artificial Sequence
  Description of Artificial Sequence: Synthetic oligonucleotide
  Antisense Strand to SEQ ID NO: 484165
ucacucacggaaaugccuu

SEQ ID NO: 484167 - RNA, 19 nt, Artificial Sequence
  Description of Artificial Sequence: Synthetic oligonucleotide
  Sense strand starting at position 1994 of SEQ ID NO: 317352
gcauuuccgugagugagga

SEQ ID NO: 484168 - RNA, 19 nt, Artificial Sequence
  Description of Artificial Sequence: Synthetic oligonucleotide
  Antisense Strand to SEQ ID NO: 484167
uccucacucacggaaaugc

SEQ ID NO: 484169 - RNA, 19 nt, Artificial Sequence
  Description of Artificial Sequence: Synthetic oligonucleotide
  Sense strand starting at position 2035 of SEQ ID NO: 317352
gcgggaguuccugacagga

SEQ ID NO: 484170 - RNA, 19 nt, Artificial Sequence
  Description of Artificial Sequence: Synthetic oligonucleotide
  Antisense Strand to SEQ ID NO: 484169
uccugucaggaacucccgc

SEQ ID NO: 484171 - RNA, 19 nt, Artificial Sequence
  Description of Artificial Sequence: Synthetic oligonucleotide
  Sense strand starting at position 2064 of SEQ ID NO: 317352
uuugaucaugccugaacag

SEQ ID NO: 484172 - RNA, 19 nt, Artificial Sequence
  Description of Artificial Sequence: Synthetic oligonucleotide
  Antisense Strand to SEQ ID NO: 484171
cuguucaggcaugaucaaa

SEQ ID NO: 484173 - RNA, 19 nt, Artificial Sequence
  Description of Artificial Sequence: Synthetic oligonucleotide
  Sense strand starting at position 2146 of SEQ ID NO: 317352
ggaaaucuguccucuccag

SEQ ID NO: 484174 - RNA, 19 nt, Artificial Sequence
  Description of Artificial Sequence: Synthetic oligonucleotide
  Antisense Strand to SEQ ID NO: 484173
cuggagaggacagauuucc

SEQ ID NO: 484175 - RNA, 19 nt, Artificial Sequence
  Description of Artificial Sequence: Synthetic oligonucleotide
  Sense strand starting at position 2150 of SEQ ID NO: 317352
aucuguccucuccaggauu

SEQ ID NO: 484176 - RNA, 19 nt, Artificial Sequence
  Description of Artificial Sequence: Synthetic oligonucleotide
  Antisense Strand to SEQ ID NO: 484175
aauccuggagaggacagau

SEQ ID NO: 484177 - RNA, 19 nt, Artificial Sequence
  Description of Artificial Sequence: Synthetic oligonucleotide
  Sense strand starting at position 2245 of SEQ ID NO: 317352
ggugacugccauuaaccua

SEQ ID NO: 484178 - RNA, 19 nt, Artificial Sequence
  Description of Artificial Sequence: Synthetic oligonucleotide
  Antisense Strand to SEQ ID NO: 484177
uagguuaauggcagucacc

SEQ ID NO: 484179 - RNA, 19 nt, Artificial Sequence
  Description of Artificial Sequence: Synthetic oligonucleotide
  Sense strand starting at position 2263 of SEQ ID NO: 317352
aggauaccucccuaaugcu

SEQ ID NO: 484180 - RNA, 19 nt, Artificial Sequence
  Description of Artificial Sequence: Synthetic oligonucleotide
  Antisense Strand to SEQ ID NO: 484179
agcauuagggagguauccu

SEQ ID NO: 484181 - RNA, 19 nt, Artificial Sequence
  Description of Artificial Sequence: Synthetic oligonucleotide
  Sense strand starting at position 2270 of SEQ ID NO: 317352
cucccuaaugcuuggaaca

SEQ ID NO: 484182 - RNA, 19 nt, Artificial Sequence
  Description of Artificial Sequence: Synthetic oligonucleotide
  Antisense Strand to SEQ ID NO: 484181
uguuccaagcauuagggag

SEQ ID NO: 484183 - RNA, 19 nt, Artificial Sequence
  Description of Artificial Sequence: Synthetic oligonucleotide
  Sense strand starting at position 2292 of SEQ ID NO: 317352
uggagagguggcugacuuu

SEQ ID NO: 484184 - RNA, 19 nt, Artificial Sequence
  Description of Artificial Sequence: Synthetic oligonucleotide
  Antisense Strand to SEQ ID NO: 484183
aaagucagccaccucucca

SEQ ID NO: 484185 - RNA, 19 nt, Artificial Sequence
  Description of Artificial Sequence: Synthetic oligonucleotide
  Sense strand starting at position 2301 of SEQ ID NO: 317352
ggcugacuuugacucagaa

SEQ ID NO: 484186 - RNA, 19 nt, Artificial Sequence
  Description of Artificial Sequence: Synthetic oligonucleotide
  Antisense Strand to SEQ ID NO: 484185
uucugagucaaagucagcc

SEQ ID NO: 484187 - RNA, 19 nt, Artificial Sequence
  Description of Artificial Sequence: Synthetic oligonucleotide
  Sense strand starting at position 2677 of SEQ ID NO: 317352
ucaggcaagucacuuuauu

SEQ ID NO: 484188 - RNA, 19 nt, Artificial Sequence
  Description of Artificial Sequence: Synthetic oligonucleotide
  Antisense Strand to SEQ ID NO: 484187
aauaaagugacuugccuga

SEQ ID NO: 484189 - RNA, 19 nt, Artificial Sequence
  Description of Artificial Sequence: Synthetic oligonucleotide
  Sense strand starting at position 2744 of SEQ ID NO: 317352
cugacuguccugcagacuu

SEQ ID NO: 484190 - RNA, 19 nt, Artificial Sequence
  Description of Artificial Sequence: Synthetic oligonucleotide
  Antisense Strand to SEQ ID NO: 484189
aagucugcaggacagucag

SEQ ID NO: 484191 - RNA, 19 nt, Artificial Sequence
  Description of Artificial Sequence: Synthetic oligonucleotide
  Sense strand starting at position 2746 of SEQ ID NO: 317352
gacuguccugcagacuuau

SEQ ID NO: 484192 - RNA, 19 nt, Artificial Sequence
  Description of Artificial Sequence: Synthetic oligonucleotide
  Antisense Strand to SEQ ID NO: 484191
auaagucugcaggacaguc

SEQ ID NO: 484193 - RNA, 19 nt, Artificial Sequence
  Description of Artificial Sequence: Synthetic oligonucleotide
  Sense strand starting at position 2794 of SEQ ID NO: 317352
ccaaguggcgugcuguaaa

SEQ ID NO: 484194 - RNA, 19 nt, Artificial Sequence
  Description of Artificial Sequence: Synthetic oligonucleotide
  Antisense Strand to SEQ ID NO: 484193
uuuacagcacgccacuugg

SEQ ID NO: 484195 - RNA, 19 nt, Artificial Sequence
  Description of Artificial Sequence: Synthetic oligonucleotide
  Sense strand starting at position 2799 of SEQ ID NO: 317352
uggcgugcuguaaaugagu

SEQ ID NO: 484196 - RNA, 19 nt, Artificial Sequence
  Description of Artificial Sequence: Synthetic oligonucleotide
  Antisense Strand to SEQ ID NO: 484195
acucauuuacagcacgcca

SEQ ID NO: 484197 - RNA, 19 nt, Artificial Sequence
  Description of Artificial Sequence: Synthetic oligonucleotide
  Sense strand starting at position 2824 of SEQ ID NO: 317352
ucuccuguagccuagaaca

SEQ ID NO: 484198 - RNA, 19 nt, Artificial Sequence
  Description of Artificial Sequence: Synthetic oligonucleotide
  Antisense Strand to SEQ ID NO: 484197
uguucuaggcuacaggaga

SEQ ID NO: 484199 - RNA, 19 nt, Artificial Sequence
  Description of Artificial Sequence: Synthetic oligonucleotide
  Sense strand starting at position 2826 of SEQ ID NO: 317352
uccuguagccuagaacaaa

SEQ ID NO: 484200 - RNA, 19 nt, Artificial Sequence
  Description of Artificial Sequence: Synthetic oligonucleotide
  Antisense Strand to SEQ ID NO: 484199
uuuguucuaggcuacagga

SEQ ID NO: 484201 - RNA, 19 nt, Artificial Sequence
  Description of Artificial Sequence: Synthetic oligonucleotide
  Sense strand starting at position 2850 of SEQ ID NO: 317352
gggcuguggguuuggaaga

SEQ ID NO: 484202 - RNA, 19 nt, Artificial Sequence
  Description of Artificial Sequence: Synthetic oligonucleotide
  Antisense Strand to SEQ ID NO: 484201
ucuuccaaacccacagccc

SEQ ID NO: 484203 - RNA, 19 nt, Artificial Sequence
  Description of Artificial Sequence: Synthetic oligonucleotide
  Sense strand starting at position 2925 of SEQ ID NO: 317352
ggacauguccuguauucca

SEQ ID NO: 484204 - RNA, 19 nt, Artificial Sequence
  Description of Artificial Sequence: Synthetic oligonucleotide
  Antisense Strand to SEQ ID NO: 484203
uggaauacaggacaugucc

SEQ ID NO: 484205 - RNA, 19 nt, Artificial Sequence
  Description of Artificial Sequence: Synthetic oligonucleotide
  Sense strand starting at position 3071 of SEQ ID NO: 317352
agaacaguuugcucccaga

SEQ ID NO: 484206 - RNA, 19 nt, Artificial Sequence
  Description of Artificial Sequence: Synthetic oligonucleotide
  Antisense Strand to SEQ ID NO: 484205
ucugggagcaaacuguucu

SEQ ID NO: 484207 - RNA, 19 nt, Artificial Sequence
  Description of Artificial Sequence: Synthetic oligonucleotide
  Sense strand starting at position 3123 of SEQ ID NO: 317352
agggacaggcuuggugaau

SEQ ID NO: 484208 - RNA, 19 nt, Artificial Sequence
  Description of Artificial Sequence: Synthetic oligonucleotide
  Antisense Strand to SEQ ID NO: 484207
auucaccaagccugucccu

SEQ ID NO: 484209 - RNA, 19 nt, Artificial Sequence
  Description of Artificial Sequence: Synthetic oligonucleotide
  Sense strand starting at position 3129 of SEQ ID NO: 317352
aggcuuggugaaugcagaa

SEQ ID NO: 484210 - RNA, 19 nt, Artificial Sequence
  Description of Artificial Sequence: Synthetic oligonucleotide
  Antisense Strand to SEQ ID NO: 484209
uucugcauucaccaagccu

SEQ ID NO: 484211 - RNA, 19 nt, Artificial Sequence
  Description of Artificial Sequence: Synthetic oligonucleotide
  Sense strand starting at position 3395 of SEQ ID NO: 317352
ggauguauugagcacgcca

SEQ ID NO: 484212 - RNA, 19 nt, Artificial Sequence
  Description of Artificial Sequence: Synthetic oligonucleotide
  Antisense Strand to SEQ ID NO: 484211
uggcgugcucaauacaucc

SEQ ID NO: 484213 - RNA, 19 nt, Artificial Sequence
  Description of Artificial Sequence: Synthetic oligonucleotide
  Sense strand starting at position 3421 of SEQ ID NO: 317352
agugcaaucguccuucugu

SEQ ID NO: 484214 - RNA, 19 nt, Artificial Sequence
  Description of Artificial Sequence: Synthetic oligonucleotide
  Antisense Strand to SEQ ID NO: 484213
acagaaggacgauugcacu

SEQ ID NO: 484215 - RNA, 19 nt, Artificial Sequence
  Description of Artificial Sequence: Synthetic oligonucleotide
  Sense strand starting at position 3440 of SEQ ID NO: 317352
guguuaaucagucaggcau

SEQ ID NO: 484216 - RNA, 19 nt, Artificial Sequence
  Description of Artificial Sequence: Synthetic oligonucleotide
  Antisense Strand to SEQ ID NO: 484215
augccugacugauuaacac

SEQ ID NO: 484217 - RNA, 19 nt, Artificial Sequence
  Description of Artificial Sequence: Synthetic oligonucleotide
  Sense strand starting at position 3464 of SEQ ID NO: 317352
gggagaaguggcuguuucu

SEQ ID NO: 484218 - RNA, 19 nt, Artificial Sequence
  Description of Artificial Sequence: Synthetic oligonucleotide
  Antisense Strand to SEQ ID NO: 484217
agaaacagccacuucuccc

SEQ ID NO: 484219 - RNA, 19 nt, Artificial Sequence
  Description of Artificial Sequence: Synthetic oligonucleotide
  Sense strand starting at position 3467 of SEQ ID NO: 317352
agaaguggcuguuucuuga

SEQ ID NO: 484220 - RNA, 19 nt, Artificial Sequence
  Description of Artificial Sequence: Synthetic oligonucleotide
  Antisense Strand to SEQ ID NO: 484219
ucaagaaacagccacuucu

SEQ ID NO: 484221 - RNA, 19 nt, Artificial Sequence
  Description of Artificial Sequence: Synthetic oligonucleotide
  Sense strand starting at position 3507 of SEQ ID NO: 317352
cugguuuccucauugagug

SEQ ID NO: 484222 - RNA, 19 nt, Artificial Sequence
  Description of Artificial Sequence: Synthetic oligonucleotide
  Antisense Strand to SEQ ID NO: 484221
cacucaaugaggaaaccag

SEQ ID NO: 484223 - RNA, 19 nt, Artificial Sequence
  Description of Artificial Sequence: Synthetic oligonucleotide
  Sense strand starting at position 3620 of SEQ ID NO: 317352
acaucaaucucagcuggau

SEQ ID NO: 484224 - RNA, 19 nt, Artificial Sequence
  Description of Artificial Sequence: Synthetic oligonucleotide
  Antisense Strand to SEQ ID NO: 484223
auccagcugagauugaugu

SEQ ID NO: 484225 - RNA, 19 nt, Artificial Sequence
  Description of Artificial Sequence: Synthetic oligonucleotide
  Sense strand starting at position 3751 of SEQ ID NO: 317352
gugaaauugucagugaagc

SEQ ID NO: 484226 - RNA, 19 nt, Artificial Sequence
  Description of Artificial Sequence: Synthetic oligonucleotide
  Antisense Strand to SEQ ID NO: 484225
gcuucacugacaauuucac

SEQ ID NO: 484227 - RNA, 19 nt, Artificial Sequence
  Description of Artificial Sequence: Synthetic oligonucleotide
  Sense strand starting at position 3752 of SEQ ID NO: 317352
ugaaauugucagugaagca

SEQ ID NO: 484228 - RNA, 19 nt, Artificial Sequence
  Description of Artificial Sequence: Synthetic oligonucleotide
  Antisense Strand to SEQ ID NO: 484227
ugcuucacugacaauuuca

SEQ ID NO: 484229 - RNA, 19 nt, Artificial Sequence
  Description of Artificial Sequence: Synthetic oligonucleotide
  Sense strand starting at position 63 of SEQ ID NO: 317353
uugcuuggucaauagaaac

SEQ ID NO: 484230 - RNA, 19 nt, Artificial Sequence
  Description of Artificial Sequence: Synthetic oligonucleotide
  Antisense Strand to SEQ ID NO: 484229
guuucuauugaccaagcaa

SEQ ID NO: 484231 - RNA, 19 nt, Artificial Sequence
  Description of Artificial Sequence: Synthetic oligonucleotide
  Sense strand starting at position 272 of SEQ ID NO: 317353
cugaguacaggcuaggauu

SEQ ID NO: 484232 - RNA, 19 nt, Artificial Sequence
  Description of Artificial Sequence: Synthetic oligonucleotide
  Antisense Strand to SEQ ID NO: 484231
aauccuagccuguacucag

SEQ ID NO: 484233 - RNA, 19 nt, Artificial Sequence
  Description of Artificial Sequence: Synthetic oligonucleotide
  Sense strand starting at position 407 of SEQ ID NO: 317353
gguuuacaaucuuccugag

SEQ ID NO: 484234 - RNA, 19 nt, Artificial Sequence
  Description of Artificial Sequence: Synthetic oligonucleotide
  Antisense Strand to SEQ ID NO: 484233
cucaggaagauuguaaacc

SEQ ID NO: 484235 - RNA, 19 nt, Artificial Sequence
  Description of Artificial Sequence: Synthetic oligonucleotide
  Sense strand starting at position 409 of SEQ ID NO: 317353
uuuacaaucuuccugagga

SEQ ID NO: 484236 - RNA, 19 nt, Artificial Sequence
  Description of Artificial Sequence: Synthetic oligonucleotide
  Antisense Strand to SEQ ID NO: 484235
uccucaggaagauuguaaa

SEQ ID NO: 484237 - RNA, 19 nt, Artificial Sequence
  Description of Artificial Sequence: Synthetic oligonucleotide
  Sense strand starting at position 485 of SEQ ID NO: 317353
ggcaguauauugccaauau

SEQ ID NO: 484238 - RNA, 19 nt, Artificial Sequence
  Description of Artificial Sequence: Synthetic oligonucleotide
  Antisense Strand to SEQ ID NO: 484237
auauuggcaauauacugcc

SEQ ID NO: 484239 - RNA, 19 nt, Artificial Sequence
  Description of Artificial Sequence: Synthetic oligonucleotide
  Sense strand starting at position 489 of SEQ ID NO: 317353
guauauugccaauauggaa

SEQ ID NO: 484240 - RNA, 19 nt, Artificial Sequence
  Description of Artificial Sequence: Synthetic oligonucleotide
  Antisense Strand to SEQ ID NO: 484239
uuccauauuggcaauauac

SEQ ID NO: 484241 - RNA, 19 nt, Artificial Sequence
  Description of Artificial Sequence: Synthetic oligonucleotide
  Sense strand starting at position 714 of SEQ ID NO: 317353
ggaggucacgaacauguua

SEQ ID NO: 484242 - RNA, 19 nt, Artificial Sequence
  Description of Artificial Sequence: Synthetic oligonucleotide
  Antisense Strand to SEQ ID NO: 484241
uaacauguucgugaccucc

SEQ ID NO: 484243 - RNA, 19 nt, Artificial Sequence
  Description of Artificial Sequence: Synthetic oligonucleotide
  Sense strand starting at position 758 of SEQ ID NO: 317353
acagacagcucacuauguu

SEQ ID NO: 484244 - RNA, 19 nt, Artificial Sequence
  Description of Artificial Sequence: Synthetic oligonucleotide
  Antisense Strand to SEQ ID NO: 484243
aacauagugagcugucugu

SEQ ID NO: 484245 - RNA, 19 nt, Artificial Sequence
  Description of Artificial Sequence: Synthetic oligonucleotide
  Sense strand starting at position 864 of SEQ ID NO: 317353
ccuggcuucgaacaugaau

SEQ ID NO: 484246 - RNA, 19 nt, Artificial Sequence
  Description of Artificial Sequence: Synthetic oligonucleotide
  Antisense Strand to SEQ ID NO: 484245
auucauguucgaagccagg

SEQ ID NO: 484247 - RNA, 19 nt, Artificial Sequence
  Description of Artificial Sequence: Synthetic oligonucleotide
  Sense strand starting at position 866 of SEQ ID NO: 317353
uggcuucgaacaugaaugu

SEQ ID NO: 484248 - RNA, 19 nt, Artificial Sequence
  Description of Artificial Sequence: Synthetic oligonucleotide
  Antisense Strand to SEQ ID NO: 484247
acauucauguucgaagcca

SEQ ID NO: 484249 - RNA, 19 nt, Artificial Sequence
  Description of Artificial Sequence: Synthetic oligonucleotide
  Sense strand starting at position 867 of SEQ ID NO: 317353
ggcuucgaacaugaauguu

SEQ ID NO: 484250 - RNA, 19 nt, Artificial Sequence
  Description of Artificial Sequence: Synthetic oligonucleotide
  Antisense Strand to SEQ ID NO: 484249
aacauucauguucgaagcc

SEQ ID NO: 484251 - RNA, 19 nt, Artificial Sequence
  Description of Artificial Sequence: Synthetic oligonucleotide
  Sense strand starting at position 873 of SEQ ID NO: 317353
gaacaugaauguuucggua

SEQ ID NO: 484252 - RNA, 19 nt, Artificial Sequence
  Description of Artificial Sequence: Synthetic oligonucleotide
  Antisense Strand to SEQ ID NO: 484251
uaccgaaacauucauguuc

SEQ ID NO: 484253 - RNA, 19 nt, Artificial Sequence
  Description of Artificial Sequence: Synthetic oligonucleotide
  Sense strand starting at position 877 of SEQ ID NO: 317353
augaauguuucgguaaaua

SEQ ID NO: 484254 - RNA, 19 nt, Artificial Sequence
  Description of Artificial Sequence: Synthetic oligonucleotide
  Antisense Strand to SEQ ID NO: 484253
uauuuaccgaaacauucau

SEQ ID NO: 484255 - RNA, 19 nt, Artificial Sequence
  Description of Artificial Sequence: Synthetic oligonucleotide
  Sense strand starting at position 888 of SEQ ID NO: 317353
gguaaauacucucugcauc

SEQ ID NO: 484256 - RNA, 19 nt, Artificial Sequence
  Description of Artificial Sequence: Synthetic oligonucleotide
  Antisense Strand to SEQ ID NO: 484255
gaugcagagaguauuuacc

SEQ ID NO: 484257 - RNA, 19 nt, Artificial Sequence
  Description of Artificial Sequence: Synthetic oligonucleotide
  Sense strand starting at position 923 of SEQ ID NO: 317353
uagguuaaggguggacuua

SEQ ID NO: 484258 - RNA, 19 nt, Artificial Sequence
  Description of Artificial Sequence: Synthetic oligonucleotide
  Antisense Strand to SEQ ID NO: 484257
uaaguccacccuuaaccua

SEQ ID NO: 484259 - RNA, 19 nt, Artificial Sequence
  Description of Artificial Sequence: Synthetic oligonucleotide
  Sense strand starting at position 946 of SEQ ID NO: 317353
ugucuucucccucagagau

SEQ ID NO: 484260 - RNA, 19 nt, Artificial Sequence
  Description of Artificial Sequence: Synthetic oligonucleotide
  Antisense Strand to SEQ ID NO: 484259
aucucugagggagaagaca

SEQ ID NO: 484261 - RNA, 19 nt, Artificial Sequence
  Description of Artificial Sequence: Synthetic oligonucleotide
  Sense strand starting at position 968 of SEQ ID NO: 317353
aucaguucucagugucaag

SEQ ID NO: 484262 - RNA, 19 nt, Artificial Sequence
  Description of Artificial Sequence: Synthetic oligonucleotide
  Antisense Strand to SEQ ID NO: 484261
cuugacacugagaacugau

SEQ ID NO: 484263 - RNA, 19 nt, Artificial Sequence
  Description of Artificial Sequence: Synthetic oligonucleotide
  Sense strand starting at position 1014 of SEQ ID NO: 317353
gaagguaagccugauuagu

SEQ ID NO: 484264 - RNA, 19 nt, Artificial Sequence
  Description of Artificial Sequence: Synthetic oligonucleotide
  Antisense Strand to SEQ ID NO: 484263
acuaaucaggcuuaccuuc

SEQ ID NO: 484265 - RNA, 19 nt, Artificial Sequence
  Description of Artificial Sequence: Synthetic oligonucleotide
  Sense strand starting at position 1016 of SEQ ID NO: 317353
agguaagccugauuaguuc

SEQ ID NO: 484266 - RNA, 19 nt, Artificial Sequence
  Description of Artificial Sequence: Synthetic oligonucleotide
  Antisense Strand to SEQ ID NO: 484265
gaacuaaucaggcuuaccu

SEQ ID NO: 484267 - RNA, 19 nt, Artificial Sequence
  Description of Artificial Sequence: Synthetic oligonucleotide
  Sense strand starting at position 1125 of SEQ ID NO: 317353
cuggguuaccacuacaacu

SEQ ID NO: 484268 - RNA, 19 nt, Artificial Sequence
  Description of Artificial Sequence: Synthetic oligonucleotide
  Antisense Strand to SEQ ID NO: 484267
aguuguagugguaacccag

SEQ ID NO: 484269 - RNA, 19 nt, Artificial Sequence
  Description of Artificial Sequence: Synthetic oligonucleotide
  Sense strand starting at position 1177 of SEQ ID NO: 317353
acugaagaguuucuuuguu

SEQ ID NO: 484270 - RNA, 19 nt, Artificial Sequence
  Description of Artificial Sequence: Synthetic oligonucleotide
  Antisense Strand to SEQ ID NO: 484269
aacaaagaaacucuucagu

SEQ ID NO: 484271 - RNA, 19 nt, Artificial Sequence
  Description of Artificial Sequence: Synthetic oligonucleotide
  Sense strand starting at position 2177 of SEQ ID NO: 317353
acguaaacuguuuacaucu

SEQ ID NO: 484272 - RNA, 19 nt, Artificial Sequence
  Description of Artificial Sequence: Synthetic oligonucleotide
  Antisense Strand to SEQ ID NO: 484271
agauguaaacaguuuacgu

SEQ ID NO: 484273 - RNA, 19 nt, Artificial Sequence
  Description of Artificial Sequence: Synthetic oligonucleotide
  Sense strand starting at position 2420 of SEQ ID NO: 317353
guguguauccaguaucaua

SEQ ID NO: 484274 - RNA, 19 nt, Artificial Sequence
  Description of Artificial Sequence: Synthetic oligonucleotide
  Antisense Strand to SEQ ID NO: 484273
uaugauacuggauacacac

SEQ ID NO: 484275 - RNA, 19 nt, Artificial Sequence
  Description of Artificial Sequence: Synthetic oligonucleotide
  Sense strand starting at position 2551 of SEQ ID NO: 317353
guaugcagacuucgaaaca

SEQ ID NO: 484276 - RNA, 19 nt, Artificial Sequence
  Description of Artificial Sequence: Synthetic oligonucleotide
  Antisense Strand to SEQ ID NO: 484275
uguuucgaagucugcauac

SEQ ID NO: 484277 - RNA, 19 nt, Artificial Sequence
  Description of Artificial Sequence: Synthetic oligonucleotide
  Sense strand starting at position 2805 of SEQ ID NO: 317353
gcuggaaucuugucuauuu

SEQ ID NO: 484278 - RNA, 19 nt, Artificial Sequence
  Description of Artificial Sequence: Synthetic oligonucleotide
  Antisense Strand to SEQ ID NO: 484277
aaauagacaagauuccagc

SEQ ID NO: 484279 - RNA, 19 nt, Artificial Sequence
  Description of Artificial Sequence: Synthetic oligonucleotide
  Sense strand starting at position 2907 of SEQ ID NO: 317353
aucugagucgcuuaucuau

SEQ ID NO: 484280 - RNA, 19 nt, Artificial Sequence
  Description of Artificial Sequence: Synthetic oligonucleotide
  Antisense Strand to SEQ ID NO: 484279
auagauaagcgacucagau

SEQ ID NO: 484281 - RNA, 19 nt, Artificial Sequence
  Description of Artificial Sequence: Synthetic oligonucleotide
  Sense strand starting at position 3037 of SEQ ID NO: 317353
uaucguuaagaaugguaag

SEQ ID NO: 484282 - RNA, 19 nt, Artificial Sequence
  Description of Artificial Sequence: Synthetic oligonucleotide
  Antisense Strand to SEQ ID NO: 484281
cuuaccauucuuaacgaua

SEQ ID NO: 484283 - RNA, 19 nt, Artificial Sequence
  Description of Artificial Sequence: Synthetic oligonucleotide
  Sense strand starting at position 3123 of SEQ ID NO: 317353
ccauaaauguaggcucaau

SEQ ID NO: 484284 - RNA, 19 nt, Artificial Sequence
  Description of Artificial Sequence: Synthetic oligonucleotide
  Antisense Strand to SEQ ID NO: 484283
auugagccuacauuuaugg

SEQ ID NO: 484285 - RNA, 19 nt, Artificial Sequence
  Description of Artificial Sequence: Synthetic oligonucleotide
  Sense strand starting at position 3358 of SEQ ID NO: 317353
uuaggcaagccugaucaaa

SEQ ID NO: 484286 - RNA, 19 nt, Artificial Sequence
  Description of Artificial Sequence: Synthetic oligonucleotide
  Antisense Strand to SEQ ID NO: 484285
uuugaucaggcuugccuaa

SEQ ID NO: 484287 - RNA, 19 nt, Artificial Sequence
  Description of Artificial Sequence: Synthetic oligonucleotide
  Sense strand starting at position 3402 of SEQ ID NO: 317353
gugcgauaggauuauuauu

SEQ ID NO: 484288 - RNA, 19 nt, Artificial Sequence
  Description of Artificial Sequence: Synthetic oligonucleotide
  Antisense Strand to SEQ ID NO: 484287
aauaauaauccuaucgcac

SEQ ID NO: 484289 - RNA, 19 nt, Artificial Sequence
  Description of Artificial Sequence: Synthetic oligonucleotide
  Sense strand starting at position 3426 of SEQ ID NO: 317353
uuuguuuagcuguacuaau

SEQ ID NO: 484290 - RNA, 19 nt, Artificial Sequence
  Description of Artificial Sequence: Synthetic oligonucleotide
  Antisense Strand to SEQ ID NO: 484289
auuaguacagcuaaacaaa

SEQ ID NO: 484291 - RNA, 19 nt, Artificial Sequence
  Description of Artificial Sequence: Synthetic oligonucleotide
  Sense strand starting at position 3500 of SEQ ID NO: 317353
ugugcagaguucuuaauuu

SEQ ID NO: 484292 - RNA, 19 nt, Artificial Sequence
  Description of Artificial Sequence: Synthetic oligonucleotide
  Antisense Strand to SEQ ID NO: 484291
aaauuaagaacucugcaca

SEQ ID NO: 484293 - RNA, 19 nt, Artificial Sequence
  Description of Artificial Sequence: Synthetic oligonucleotide
  Sense strand starting at position 3546 of SEQ ID NO: 317353
uauguuggugcacaguaaa

SEQ ID NO: 484294 - RNA, 19 nt, Artificial Sequence
  Description of Artificial Sequence: Synthetic oligonucleotide
  Antisense Strand to SEQ ID NO: 484293
uuuacugugcaccaacaua

SEQ ID NO: 484295 - RNA, 19 nt, Artificial Sequence
  Description of Artificial Sequence: Synthetic oligonucleotide
  Sense strand starting at position 3613 of SEQ ID NO: 317353
gguguaacuugacuuagac

SEQ ID NO: 484296 - RNA, 19 nt, Artificial Sequence
  Description of Artificial Sequence: Synthetic oligonucleotide
  Antisense Strand to SEQ ID NO: 484295
gucuaagucaaguuacacc

SEQ ID NO: 484297 - RNA, 19 nt, Artificial Sequence
  Description of Artificial Sequence: Synthetic oligonucleotide
  Sense strand starting at position 3669 of SEQ ID NO: 317353
gccaaauaaguuugaagaa

SEQ ID NO: 484298 - RNA, 19 nt, Artificial Sequence
  Description of Artificial Sequence: Synthetic oligonucleotide
  Antisense Strand to SEQ ID NO: 484297
uucuucaaacuuauuuggc

SEQ ID NO: 484299 - RNA, 19 nt, Artificial Sequence
  Description of Artificial Sequence: Synthetic oligonucleotide
  Sense strand starting at position 3773 of SEQ ID NO: 317353
ugcaguugucuugguauuu

SEQ ID NO: 484300 - RNA, 19 nt, Artificial Sequence
  Description of Artificial Sequence: Synthetic oligonucleotide
  Antisense Strand to SEQ ID NO: 484299
aaauaccaagacaacugca

SEQ ID NO: 484301 - RNA, 19 nt, Artificial Sequence
  Description of Artificial Sequence: Synthetic oligonucleotide
  Sense strand starting at position 3774 of SEQ ID NO: 317353
gcaguugucuugguauuua

SEQ ID NO: 484302 - RNA, 19 nt, Artificial Sequence
  Description of Artificial Sequence: Synthetic oligonucleotide
  Antisense Strand to SEQ ID NO: 484301
uaaauaccaagacaacugc

SEQ ID NO: 484303 - RNA, 19 nt, Artificial Sequence
  Description of Artificial Sequence: Synthetic oligonucleotide
  Sense strand starting at position 3821 of SEQ ID NO: 317353
uuuggaaagucuuugaaac

SEQ ID NO: 484304 - RNA, 19 nt, Artificial Sequence
  Description of Artificial Sequence: Synthetic oligonucleotide
  Antisense Strand to SEQ ID NO: 484303
guuucaaagacuuuccaaa

SEQ ID NO: 484305 - RNA, 19 nt, Artificial Sequence
  Description of Artificial Sequence: Synthetic oligonucleotide
  Sense strand starting at position 3822 of SEQ ID NO: 317353
uuggaaagucuuugaaacu

SEQ ID NO: 484306 - RNA, 19 nt, Artificial Sequence
  Description of Artificial Sequence: Synthetic oligonucleotide
  Antisense Strand to SEQ ID NO: 484305
aguuucaaagacuuuccaa

SEQ ID NO: 484307 - RNA, 19 nt, Artificial Sequence
  Description of Artificial Sequence: Synthetic oligonucleotide
  Sense strand starting at position 3890 of SEQ ID NO: 317353
ggaauuuccuuugacccua

SEQ ID NO: 484308 - RNA, 19 nt, Artificial Sequence
  Description of Artificial Sequence: Synthetic oligonucleotide
  Antisense Strand to SEQ ID NO: 484307
uagggucaaaggaaauucc

SEQ ID NO: 484309 - RNA, 19 nt, Artificial Sequence
  Description of Artificial Sequence: Synthetic oligonucleotide
  Sense strand starting at position 26 of SEQ ID NO: 317354
agacccugucccuacauua

SEQ ID NO: 484310 - RNA, 19 nt, Artificial Sequence
  Description of Artificial Sequence: Synthetic oligonucleotide
  Antisense Strand to SEQ ID NO: 484309
uaauguagggacagggucu

SEQ ID NO: 484311 - RNA, 19 nt, Artificial Sequence
  Description of Artificial Sequence: Synthetic oligonucleotide
  Sense strand starting at position 114 of SEQ ID NO: 317354
ugggccucacauugauaga

SEQ ID NO: 484312 - RNA, 19 nt, Artificial Sequence
  Description of Artificial Sequence: Synthetic oligonucleotide
  Antisense Strand to SEQ ID NO: 484311
ucuaucaaugugaggccca

SEQ ID NO: 484313 - RNA, 19 nt, Artificial Sequence
  Description of Artificial Sequence: Synthetic oligonucleotide
  Sense strand starting at position 150 of SEQ ID NO: 317354
uuugauguggcacacuaau

SEQ ID NO: 484314 - RNA, 19 nt, Artificial Sequence
  Description of Artificial Sequence: Synthetic oligonucleotide
  Antisense Strand to SEQ ID NO: 484313
auuagugugccacaucaaa

SEQ ID NO: 484315 - RNA, 19 nt, Artificial Sequence
  Description of Artificial Sequence: Synthetic oligonucleotide
  Sense strand starting at position 172 of SEQ ID NO: 317354
cuuuaaacuugggccauau

SEQ ID NO: 484316 - RNA, 19 nt, Artificial Sequence
  Description of Artificial Sequence: Synthetic oligonucleotide
  Antisense Strand to SEQ ID NO: 484315
auauggcccaaguuuaaag

SEQ ID NO: 484317 - RNA, 19 nt, Artificial Sequence
  Description of Artificial Sequence: Synthetic oligonucleotide
  Sense strand starting at position 406 of SEQ ID NO: 317354
aauaaauucccugggaugu

SEQ ID NO: 484318 - RNA, 19 nt, Artificial Sequence
  Description of Artificial Sequence: Synthetic oligonucleotide
  Antisense Strand to SEQ ID NO: 484317
acaucccagggaauuuauu

SEQ ID NO: 484319 - RNA, 19 nt, Artificial Sequence
  Description of Artificial Sequence: Synthetic oligonucleotide
  Sense strand starting at position 407 of SEQ ID NO: 317354
auaaauucccugggauguc

SEQ ID NO: 484320 - RNA, 19 nt, Artificial Sequence
  Description of Artificial Sequence: Synthetic oligonucleotide
  Antisense Strand to SEQ ID NO: 484319
gacaucccagggaauuuau

SEQ ID NO: 484321 - RNA, 19 nt, Artificial Sequence
  Description of Artificial Sequence: Synthetic oligonucleotide
  Sense strand starting at position 416 of SEQ ID NO: 317354
cugggauguccugauugcu

SEQ ID NO: 484322 - RNA, 19 nt, Artificial Sequence
  Description of Artificial Sequence: Synthetic oligonucleotide
  Antisense Strand to SEQ ID NO: 484321
agcaaucaggacaucccag

SEQ ID NO: 484323 - RNA, 19 nt, Artificial Sequence
  Description of Artificial Sequence: Synthetic oligonucleotide
  Sense strand starting at position 483 of SEQ ID NO: 317354
guggaagaugccugaaacu

SEQ ID NO: 484324 - RNA, 19 nt, Artificial Sequence
  Description of Artificial Sequence: Synthetic oligonucleotide
  Antisense Strand to SEQ ID NO: 484323
aguuucaggcaucuuccac

SEQ ID NO: 484325 - RNA, 19 nt, Artificial Sequence
  Description of Artificial Sequence: Synthetic oligonucleotide
  Sense strand starting at position 492 of SEQ ID NO: 317354
gccugaaacugguuacuaa

SEQ ID NO: 484326 - RNA, 19 nt, Artificial Sequence
  Description of Artificial Sequence: Synthetic oligonucleotide
  Antisense Strand to SEQ ID NO: 484325
uuaguaaccaguuucaggc

SEQ ID NO: 484327 - RNA, 19 nt, Artificial Sequence
  Description of Artificial Sequence: Synthetic oligonucleotide
  Sense strand starting at position 503 of SEQ ID NO: 317354
guuacuaaagcccaguuua

SEQ ID NO: 484328 - RNA, 19 nt, Artificial Sequence
  Description of Artificial Sequence: Synthetic oligonucleotide
  Antisense Strand to SEQ ID NO: 484327
uaaacugggcuuuaguaac

SEQ ID NO: 484329 - RNA, 19 nt, Artificial Sequence
  Description of Artificial Sequence: Synthetic oligonucleotide
  Sense strand starting at position 594 of SEQ ID NO: 317354
ugugucuaacagcaacaau

SEQ ID NO: 484330 - RNA, 19 nt, Artificial Sequence
  Description of Artificial Sequence: Synthetic oligonucleotide
  Antisense Strand to SEQ ID NO: 484329
auuguugcuguuagacaca

SEQ ID NO: 484331 - RNA, 19 nt, Artificial Sequence
  Description of Artificial Sequence: Synthetic oligonucleotide
  Sense strand starting at position 687 of SEQ ID NO: 317354
gcaauuuguuuagcaucca

SEQ ID NO: 484332 - RNA, 19 nt, Artificial Sequence
  Description of Artificial Sequence: Synthetic oligonucleotide
  Antisense Strand to SEQ ID NO: 484331
uggaugcuaaacaaauugc

SEQ ID NO: 484333 - RNA, 19 nt, Artificial Sequence
  Description of Artificial Sequence: Synthetic oligonucleotide
  Sense strand starting at position 1021 of SEQ ID NO: 317354
agcugcuuccaugaaauca

SEQ ID NO: 484334 - RNA, 19 nt, Artificial Sequence
  Description of Artificial Sequence: Synthetic oligonucleotide
  Antisense Strand to SEQ ID NO: 484333
ugauuucauggaagcagcu

SEQ ID NO: 484335 - RNA, 19 nt, Artificial Sequence
  Description of Artificial Sequence: Synthetic oligonucleotide
  Sense strand starting at position 1164 of SEQ ID NO: 317354
aacuuucuggccugaggau

SEQ ID NO: 484336 - RNA, 19 nt, Artificial Sequence
  Description of Artificial Sequence: Synthetic oligonucleotide
  Antisense Strand to SEQ ID NO: 484335
auccucaggccagaaaguu

SEQ ID NO: 484337 - RNA, 19 nt, Artificial Sequence
  Description of Artificial Sequence: Synthetic oligonucleotide
  Sense strand starting at position 1542 of SEQ ID NO: 317354
cguugucacauggcuaguu

SEQ ID NO: 484338 - RNA, 19 nt, Artificial Sequence
  Description of Artificial Sequence: Synthetic oligonucleotide
  Antisense Strand to SEQ ID NO: 484337
aacuagccaugugacaacg

SEQ ID NO: 484339 - RNA, 19 nt, Artificial Sequence
  Description of Artificial Sequence: Synthetic oligonucleotide
  Sense strand starting at position 1571 of SEQ ID NO: 317354
ccacaaagagccuagcuau

SEQ ID NO: 484340 - RNA, 19 nt, Artificial Sequence
  Description of Artificial Sequence: Synthetic oligonucleotide
  Antisense Strand to SEQ ID NO: 484339
auagcuaggcucuuugugg

SEQ ID NO: 484341 - RNA, 19 nt, Artificial Sequence
  Description of Artificial Sequence: Synthetic oligonucleotide
  Sense strand starting at position 1589 of SEQ ID NO: 317354
uccugauuccuagguggag

SEQ ID NO: 484342 - RNA, 19 nt, Artificial Sequence
  Description of Artificial Sequence: Synthetic oligonucleotide
  Antisense Strand to SEQ ID NO: 484341
cuccaccuaggaaucagga

SEQ ID NO: 484343 - RNA, 19 nt, Artificial Sequence
  Description of Artificial Sequence: Synthetic oligonucleotide
  Sense strand starting at position 1590 of SEQ ID NO: 317354
ccugauuccuagguggaga

SEQ ID NO: 484344 - RNA, 19 nt, Artificial Sequence
  Description of Artificial Sequence: Synthetic oligonucleotide
  Antisense Strand to SEQ ID NO: 484343
ucuccaccuaggaaucagg

SEQ ID NO: 484345 - RNA, 19 nt, Artificial Sequence
  Description of Artificial Sequence: Synthetic oligonucleotide
  Sense strand starting at position 1591 of SEQ ID NO: 317354
cugauuccuagguggagau

SEQ ID NO: 484346 - RNA, 19 nt, Artificial Sequence
  Description of Artificial Sequence: Synthetic oligonucleotide
  Antisense Strand to SEQ ID NO: 484345
aucuccaccuaggaaucag

SEQ ID NO: 484347 - RNA, 19 nt, Artificial Sequence
  Description of Artificial Sequence: Synthetic oligonucleotide
  Sense strand starting at position 1592 of SEQ ID NO: 317354
ugauuccuagguggagauu

SEQ ID NO: 484348 - RNA, 19 nt, Artificial Sequence
  Description of Artificial Sequence: Synthetic oligonucleotide
  Antisense Strand to SEQ ID NO: 484347
aaucuccaccuaggaauca

SEQ ID NO: 484349 - RNA, 19 nt, Artificial Sequence
  Description of Artificial Sequence: Synthetic oligonucleotide
  Sense strand starting at position 1675 of SEQ ID NO: 317354
acaaguguggcugauuaau

SEQ ID NO: 484350 - RNA, 19 nt, Artificial Sequence
  Description of Artificial Sequence: Synthetic oligonucleotide
  Antisense Strand to SEQ ID NO: 484349
auuaaucagccacacuugu

SEQ ID NO: 484351 - RNA, 19 nt, Artificial Sequence
  Description of Artificial Sequence: Synthetic oligonucleotide
  Sense strand starting at position 1677 of SEQ ID NO: 317354
aaguguggcugauuaauaa

SEQ ID NO: 484352 - RNA, 19 nt, Artificial Sequence
  Description of Artificial Sequence: Synthetic oligonucleotide
  Antisense Strand to SEQ ID NO: 484351
uuauuaaucagccacacuu

SEQ ID NO: 484353 - RNA, 19 nt, Artificial Sequence
  Description of Artificial Sequence: Synthetic oligonucleotide
  Sense strand starting at position 1687 of SEQ ID NO: 317354
gauuaauaacacugucgau

SEQ ID NO: 484354 - RNA, 19 nt, Artificial Sequence
  Description of Artificial Sequence: Synthetic oligonucleotide
  Antisense Strand to SEQ ID NO: 484353
aucgacaguguuauuaauc

SEQ ID NO: 484355 - RNA, 19 nt, Artificial Sequence
  Description of Artificial Sequence: Synthetic oligonucleotide
  Sense strand starting at position 1772 of SEQ ID NO: 317354
gaacauuguggagagcuuu

SEQ ID NO: 484356 - RNA, 19 nt, Artificial Sequence
  Description of Artificial Sequence: Synthetic oligonucleotide
  Antisense Strand to SEQ ID NO: 484355
aaagcucuccacaauguuc

SEQ ID NO: 484357 - RNA, 19 nt, Artificial Sequence
  Description of Artificial Sequence: Synthetic oligonucleotide
  Sense strand starting at position 2420 of SEQ ID NO: 317354
ggauaaagcccuuggaaac

SEQ ID NO: 484358 - RNA, 19 nt, Artificial Sequence
  Description of Artificial Sequence: Synthetic oligonucleotide
  Antisense Strand to SEQ ID NO: 484357
guuuccaagggcuuuaucc

SEQ ID NO: 484359 - RNA, 19 nt, Artificial Sequence
  Description of Artificial Sequence: Synthetic oligonucleotide
  Sense strand starting at position 2434 of SEQ ID NO: 317354
gaaacaaagccuggauugu

SEQ ID NO: 484360 - RNA, 19 nt, Artificial Sequence
  Description of Artificial Sequence: Synthetic oligonucleotide
  Antisense Strand to SEQ ID NO: 484359
acaauccaggcuuuguuuc

SEQ ID NO: 484361 - RNA, 19 nt, Artificial Sequence
  Description of Artificial Sequence: Synthetic oligonucleotide
  Sense strand starting at position 2435 of SEQ ID NO: 317354
aaacaaagccuggauuguu

SEQ ID NO: 484362 - RNA, 19 nt, Artificial Sequence
  Description of Artificial Sequence: Synthetic oligonucleotide
  Antisense Strand to SEQ ID NO: 484361
aacaauccaggcuuuguuu

SEQ ID NO: 484363 - RNA, 19 nt, Artificial Sequence
  Description of Artificial Sequence: Synthetic oligonucleotide
  Sense strand starting at position 2526 of SEQ ID NO: 317354
gaccgucaagcugaggaaa

SEQ ID NO: 484364 - RNA, 19 nt, Artificial Sequence
  Description of Artificial Sequence: Synthetic oligonucleotide
  Antisense Strand to SEQ ID NO: 484363
uuuccucagcuugacgguc

SEQ ID NO: 484365 - RNA, 19 nt, Artificial Sequence
  Description of Artificial Sequence: Synthetic oligonucleotide
  Sense strand starting at position 2661 of SEQ ID NO: 317354
uccaaacugcugugagaua

SEQ ID NO: 484366 - RNA, 19 nt, Artificial Sequence
  Description of Artificial Sequence: Synthetic oligonucleotide
  Antisense Strand to SEQ ID NO: 484365
uaucucacagcaguuugga

SEQ ID NO: 484367 - RNA, 19 nt, Artificial Sequence
  Description of Artificial Sequence: Synthetic oligonucleotide
  Sense strand starting at position 2673 of SEQ ID NO: 317354
ugagauaggaucuguccca

SEQ ID NO: 484368 - RNA, 19 nt, Artificial Sequence
  Description of Artificial Sequence: Synthetic oligonucleotide
  Antisense Strand to SEQ ID NO: 484367
ugggacagauccuaucuca

SEQ ID NO: 484369 - RNA, 19 nt, Artificial Sequence
  Description of Artificial Sequence: Synthetic oligonucleotide
  Sense strand starting at position 2680 of SEQ ID NO: 317354
ggaucugucccagggagag

SEQ ID NO: 484370 - RNA, 19 nt, Artificial Sequence
  Description of Artificial Sequence: Synthetic oligonucleotide
  Antisense Strand to SEQ ID NO: 484369
cucucccugggacagaucc

SEQ ID NO: 484371 - RNA, 19 nt, Artificial Sequence
  Description of Artificial Sequence: Synthetic oligonucleotide
  Sense strand starting at position 2764 of SEQ ID NO: 317354
cuccaaugugcacacgaaa

SEQ ID NO: 484372 - RNA, 19 nt, Artificial Sequence
  Description of Artificial Sequence: Synthetic oligonucleotide
  Antisense Strand to SEQ ID NO: 484371
uuucgugugcacauuggag

SEQ ID NO: 484373 - RNA, 19 nt, Artificial Sequence
  Description of Artificial Sequence: Synthetic oligonucleotide
  Sense strand starting at position 3268 of SEQ ID NO: 317354
ugguacuuggcacauaaau

SEQ ID NO: 484374 - RNA, 19 nt, Artificial Sequence
  Description of Artificial Sequence: Synthetic oligonucleotide
  Antisense Strand to SEQ ID NO: 484373
auuuaugugccaaguacca

SEQ ID NO: 484375 - RNA, 19 nt, Artificial Sequence
  Description of Artificial Sequence: Synthetic oligonucleotide
  Sense strand starting at position 3351 of SEQ ID NO: 317354
gugggaagccuugauuaga

SEQ ID NO: 484376 - RNA, 19 nt, Artificial Sequence
  Description of Artificial Sequence: Synthetic oligonucleotide
  Antisense Strand to SEQ ID NO: 484375
ucuaaucaaggcuucccac

SEQ ID NO: 484377 - RNA, 19 nt, Artificial Sequence
  Description of Artificial Sequence: Synthetic oligonucleotide
  Sense strand starting at position 3414 of SEQ ID NO: 317354
cuguuauuacagggaugau

SEQ ID NO: 484378 - RNA, 19 nt, Artificial Sequence
  Description of Artificial Sequence: Synthetic oligonucleotide
  Antisense Strand to SEQ ID NO: 484377
aucaucccuguaauaacag

SEQ ID NO: 484379 - RNA, 19 nt, Artificial Sequence
  Description of Artificial Sequence: Synthetic oligonucleotide
  Sense strand starting at position 3514 of SEQ ID NO: 317354
agcauaguccacugaugac

SEQ ID NO: 484380 - RNA, 19 nt, Artificial Sequence
  Description of Artificial Sequence: Synthetic oligonucleotide
  Antisense Strand to SEQ ID NO: 484379
gucaucaguggacuaugcu

SEQ ID NO: 484381 - RNA, 19 nt, Artificial Sequence
  Description of Artificial Sequence: Synthetic oligonucleotide
  Sense strand starting at position 3607 of SEQ ID NO: 317354
uuggcuuuacaaugaggaa

SEQ ID NO: 484382 - RNA, 19 nt, Artificial Sequence
  Description of Artificial Sequence: Synthetic oligonucleotide
  Antisense Strand to SEQ ID NO: 484381
uuccucauuguaaagccaa

SEQ ID NO: 484383 - RNA, 19 nt, Artificial Sequence
  Description of Artificial Sequence: Synthetic oligonucleotide
  Sense strand starting at position 3767 of SEQ ID NO: 317354
acaggacagucaccucaau

SEQ ID NO: 484384 - RNA, 19 nt, Artificial Sequence
  Description of Artificial Sequence: Synthetic oligonucleotide
  Antisense Strand to SEQ ID NO: 484383
auugaggugacuguccugu

SEQ ID NO: 484385 - RNA, 19 nt, Artificial Sequence
  Description of Artificial Sequence: Synthetic oligonucleotide
  Sense strand starting at position 3966 of SEQ ID NO: 317354
ucucuuaauguguauagau

SEQ ID NO: 484386 - RNA, 19 nt, Artificial Sequence
  Description of Artificial Sequence: Synthetic oligonucleotide
  Antisense Strand to SEQ ID NO: 484385
aucuauacacauuaagaga

SEQ ID NO: 484387 - RNA, 19 nt, Artificial Sequence
  Description of Artificial Sequence: Synthetic oligonucleotide
  Sense strand starting at position 3968 of SEQ ID NO: 317354
ucuuaauguguauagaucu

SEQ ID NO: 484388 - RNA, 19 nt, Artificial Sequence
  Description of Artificial Sequence: Synthetic oligonucleotide
  Antisense Strand to SEQ ID NO: 484387
agaucuauacacauuaaga

SEQ ID NO: 484389 - RNA, 19 nt, Artificial Sequence
  Description of Artificial Sequence: Synthetic oligonucleotide
  Sense strand starting at position 253 of SEQ ID NO: 317355
ugcaaauuggugcacaaau

SEQ ID NO: 484390 - RNA, 19 nt, Artificial Sequence
  Description of Artificial Sequence: Synthetic oligonucleotide
  Antisense Strand to SEQ ID NO: 484389
auuugugcaccaauuugca

SEQ ID NO: 484391 - RNA, 19 nt, Artificial Sequence
  Description of Artificial Sequence: Synthetic oligonucleotide
  Sense strand starting at position 286 of SEQ ID NO: 317355
ucauguaucuauguaaacu

SEQ ID NO: 484392 - RNA, 19 nt, Artificial Sequence
  Description of Artificial Sequence: Synthetic oligonucleotide
  Antisense Strand to SEQ ID NO: 484391
aguuuacauagauacauga

SEQ ID NO: 484393 - RNA, 19 nt, Artificial Sequence
  Description of Artificial Sequence: Synthetic oligonucleotide
  Sense strand starting at position 460 of SEQ ID NO: 317355
uuucuuguacuuugaaaga

SEQ ID NO: 484394 - RNA, 19 nt, Artificial Sequence
  Description of Artificial Sequence: Synthetic oligonucleotide
  Antisense Strand to SEQ ID NO: 484393
ucuuucaaaguacaagaaa

SEQ ID NO: 484395 - RNA, 19 nt, Artificial Sequence
  Description of Artificial Sequence: Synthetic oligonucleotide
  Sense strand starting at position 677 of SEQ ID NO: 317355
agacccugucccuacauua

SEQ ID NO: 484396 - RNA, 19 nt, Artificial Sequence
  Description of Artificial Sequence: Synthetic oligonucleotide
  Antisense Strand to SEQ ID NO: 484395
uaauguagggacagggucu

SEQ ID NO: 484397 - RNA, 19 nt, Artificial Sequence
  Description of Artificial Sequence: Synthetic oligonucleotide
  Sense strand starting at position 765 of SEQ ID NO: 317355
ugggccucacauugauaga

SEQ ID NO: 484398 - RNA, 19 nt, Artificial Sequence
  Description of Artificial Sequence: Synthetic oligonucleotide
  Antisense Strand to SEQ ID NO: 484397
ucuaucaaugugaggccca

SEQ ID NO: 484399 - RNA, 19 nt, Artificial Sequence
  Description of Artificial Sequence: Synthetic oligonucleotide
  Sense strand starting at position 801 of SEQ ID NO: 317355
uuugauguggcacacuaau

SEQ ID NO: 484400 - RNA, 19 nt, Artificial Sequence
  Description of Artificial Sequence: Synthetic oligonucleotide
  Antisense Strand to SEQ ID NO: 484399
auuagugugccacaucaaa

SEQ ID NO: 484401 - RNA, 19 nt, Artificial Sequence
  Description of Artificial Sequence: Synthetic oligonucleotide
  Sense strand starting at position 823 of SEQ ID NO: 317355
cuuuaaacuugggccauau

SEQ ID NO: 484402 - RNA, 19 nt, Artificial Sequence
  Description of Artificial Sequence: Synthetic oligonucleotide
  Antisense Strand to SEQ ID NO: 484401
auauggcccaaguuuaaag

SEQ ID NO: 484403 - RNA, 19 nt, Artificial Sequence
  Description of Artificial Sequence: Synthetic oligonucleotide
  Sense strand starting at position 1057 of SEQ ID NO: 317355
aauaaauucccugggaugu

SEQ ID NO: 484404 - RNA, 19 nt, Artificial Sequence
  Description of Artificial Sequence: Synthetic oligonucleotide
  Antisense Strand to SEQ ID NO: 484403
acaucccagggaauuuauu

SEQ ID NO: 484405 - RNA, 19 nt, Artificial Sequence
  Description of Artificial Sequence: Synthetic oligonucleotide
  Sense strand starting at position 1058 of SEQ ID NO: 317355
auaaauucccugggauguc

SEQ ID NO: 484406 - RNA, 19 nt, Artificial Sequence
  Description of Artificial Sequence: Synthetic oligonucleotide
  Antisense Strand to SEQ ID NO: 484405
gacaucccagggaauuuau

SEQ ID NO: 484407 - RNA, 19 nt, Artificial Sequence
  Description of Artificial Sequence: Synthetic oligonucleotide
  Sense strand starting at position 1067 of SEQ ID NO: 317355
cugggauguccugauugcu

SEQ ID NO: 484408 - RNA, 19 nt, Artificial Sequence
  Description of Artificial Sequence: Synthetic oligonucleotide
  Antisense Strand to SEQ ID NO: 484407
agcaaucaggacaucccag

SEQ ID NO: 484409 - RNA, 19 nt, Artificial Sequence
  Description of Artificial Sequence: Synthetic oligonucleotide
  Sense strand starting at position 1134 of SEQ ID NO: 317355
guggaagaugccugaaacu

SEQ ID NO: 484410 - RNA, 19 nt, Artificial Sequence
  Description of Artificial Sequence: Synthetic oligonucleotide
  Antisense Strand to SEQ ID NO: 484409
aguuucaggcaucuuccac

SEQ ID NO: 484411 - RNA, 19 nt, Artificial Sequence
  Description of Artificial Sequence: Synthetic oligonucleotide
  Sense strand starting at position 1143 of SEQ ID NO: 317355
gccugaaacugguuacuaa

SEQ ID NO: 484412 - RNA, 19 nt, Artificial Sequence
  Description of Artificial Sequence: Synthetic oligonucleotide
  Antisense Strand to SEQ ID NO: 484411
uuaguaaccaguuucaggc

SEQ ID NO: 484413 - RNA, 19 nt, Artificial Sequence
  Description of Artificial Sequence: Synthetic oligonucleotide
  Sense strand starting at position 1154 of SEQ ID NO: 317355
guuacuaaagcccaguuua

SEQ ID NO: 484414 - RNA, 19 nt, Artificial Sequence
  Description of Artificial Sequence: Synthetic oligonucleotide
  Antisense Strand to SEQ ID NO: 484413
uaaacugggcuuuaguaac

SEQ ID NO: 484415 - RNA, 19 nt, Artificial Sequence
  Description of Artificial Sequence: Synthetic oligonucleotide
  Sense strand starting at position 1245 of SEQ ID NO: 317355
ugugucuaacagcaacaau

SEQ ID NO: 484416 - RNA, 19 nt, Artificial Sequence
  Description of Artificial Sequence: Synthetic oligonucleotide
  Antisense Strand to SEQ ID NO: 484415
auuguugcuguuagacaca

SEQ ID NO: 484417 - RNA, 19 nt, Artificial Sequence
  Description of Artificial Sequence: Synthetic oligonucleotide
  Sense strand starting at position 1338 of SEQ ID NO: 317355
gcaauuuguuuagcaucca

SEQ ID NO: 484418 - RNA, 19 nt, Artificial Sequence
  Description of Artificial Sequence: Synthetic oligonucleotide
  Antisense Strand to SEQ ID NO: 484417
uggaugcuaaacaaauugc

SEQ ID NO: 484419 - RNA, 19 nt, Artificial Sequence
  Description of Artificial Sequence: Synthetic oligonucleotide
  Sense strand starting at position 1672 of SEQ ID NO: 317355
agcugcuuccaugaaauca

SEQ ID NO: 484420 - RNA, 19 nt, Artificial Sequence
  Description of Artificial Sequence: Synthetic oligonucleotide
  Antisense Strand to SEQ ID NO: 484419
ugauuucauggaagcagcu

SEQ ID NO: 484421 - RNA, 19 nt, Artificial Sequence
  Description of Artificial Sequence: Synthetic oligonucleotide
  Sense strand starting at position 1815 of SEQ ID NO: 317355
aacuuucuggccugaggau

SEQ ID NO: 484422 - RNA, 19 nt, Artificial Sequence
  Description of Artificial Sequence: Synthetic oligonucleotide
  Antisense Strand to SEQ ID NO: 484421
auccucaggccagaaaguu

SEQ ID NO: 484423 - RNA, 19 nt, Artificial Sequence
  Description of Artificial Sequence: Synthetic oligonucleotide
  Sense strand starting at position 2193 of SEQ ID NO: 317355
cguugucacauggcuaguu

SEQ ID NO: 484424 - RNA, 19 nt, Artificial Sequence
  Description of Artificial Sequence: Synthetic oligonucleotide
  Antisense Strand to SEQ ID NO: 484423
aacuagccaugugacaacg

SEQ ID NO: 484425 - RNA, 19 nt, Artificial Sequence
  Description of Artificial Sequence: Synthetic oligonucleotide
  Sense strand starting at position 2222 of SEQ ID NO: 317355
ccacaaagagccuagcuau

SEQ ID NO: 484426 - RNA, 19 nt, Artificial Sequence
  Description of Artificial Sequence: Synthetic oligonucleotide
  Antisense Strand to SEQ ID NO: 484425
auagcuaggcucuuugugg

SEQ ID NO: 484427 - RNA, 19 nt, Artificial Sequence
  Description of Artificial Sequence: Synthetic oligonucleotide
  Sense strand starting at position 2240 of SEQ ID NO: 317355
uccugauuccuagguggag

SEQ ID NO: 484428 - RNA, 19 nt, Artificial Sequence
  Description of Artificial Sequence: Synthetic oligonucleotide
  Antisense Strand to SEQ ID NO: 484427
cuccaccuaggaaucagga

SEQ ID NO: 484429 - RNA, 19 nt, Artificial Sequence
  Description of Artificial Sequence: Synthetic oligonucleotide
  Sense strand starting at position 2241 of SEQ ID NO: 317355
ccugauuccuagguggaga

SEQ ID NO: 484430 - RNA, 19 nt, Artificial Sequence
  Description of Artificial Sequence: Synthetic oligonucleotide
  Antisense Strand to SEQ ID NO: 484429
ucuccaccuaggaaucagg

SEQ ID NO: 484431 - RNA, 19 nt, Artificial Sequence
  Description of Artificial Sequence: Synthetic oligonucleotide
  Sense strand starting at position 2242 of SEQ ID NO: 317355
cugauuccuagguggagau

SEQ ID NO: 484432 - RNA, 19 nt, Artificial Sequence
  Description of Artificial Sequence: Synthetic oligonucleotide
  Antisense Strand to SEQ ID NO: 484431
aucuccaccuaggaaucag

SEQ ID NO: 484433 - RNA, 19 nt, Artificial Sequence
  Description of Artificial Sequence: Synthetic oligonucleotide
  Sense strand starting at position 2243 of SEQ ID NO: 317355
ugauuccuagguggagauu

SEQ ID NO: 484434 - RNA, 19 nt, Artificial Sequence
  Description of Artificial Sequence: Synthetic oligonucleotide
  Antisense Strand to SEQ ID NO: 484433
aaucuccaccuaggaauca

SEQ ID NO: 484435 - RNA, 19 nt, Artificial Sequence
  Description of Artificial Sequence: Synthetic oligonucleotide
  Sense strand starting at position 2326 of SEQ ID NO: 317355
acaaguguggcugauuaau

SEQ ID NO: 484436 - RNA, 19 nt, Artificial Sequence
  Description of Artificial Sequence: Synthetic oligonucleotide
  Antisense Strand to SEQ ID NO: 484435
auuaaucagccacacuugu

SEQ ID NO: 484437 - RNA, 19 nt, Artificial Sequence
  Description of Artificial Sequence: Synthetic oligonucleotide
  Sense strand starting at position 2328 of SEQ ID NO: 317355
aaguguggcugauuaauaa

SEQ ID NO: 484438 - RNA, 19 nt, Artificial Sequence
  Description of Artificial Sequence: Synthetic oligonucleotide
  Antisense Strand to SEQ ID NO: 484437
uuauuaaucagccacacuu

SEQ ID NO: 484439 - RNA, 19 nt, Artificial Sequence
  Description of Artificial Sequence: Synthetic oligonucleotide
  Sense strand starting at position 2338 of SEQ ID NO: 317355
gauuaauaacacugucgau

SEQ ID NO: 484440 - RNA, 19 nt, Artificial Sequence
  Description of Artificial Sequence: Synthetic oligonucleotide
  Antisense Strand to SEQ ID NO: 484439
aucgacaguguuauuaauc

SEQ ID NO: 484441 - RNA, 19 nt, Artificial Sequence
  Description of Artificial Sequence: Synthetic oligonucleotide
  Sense strand starting at position 2423 of SEQ ID NO: 317355
gaacauuguggagagcuuu

SEQ ID NO: 484442 - RNA, 19 nt, Artificial Sequence
  Description of Artificial Sequence: Synthetic oligonucleotide
  Antisense Strand to SEQ ID NO: 484441
aaagcucuccacaauguuc

SEQ ID NO: 484443 - RNA, 19 nt, Artificial Sequence
  Description of Artificial Sequence: Synthetic oligonucleotide
  Sense strand starting at position 2647 of SEQ ID NO: 317355
gaagguguugcgcaaagag

SEQ ID NO: 484444 - RNA, 19 nt, Artificial Sequence
  Description of Artificial Sequence: Synthetic oligonucleotide
  Antisense Strand to SEQ ID NO: 484443
cucuuugcgcaacaccuuc

SEQ ID NO: 484445 - RNA, 19 nt, Artificial Sequence
  Description of Artificial Sequence: Synthetic oligonucleotide
  Sense strand starting at position 3071 of SEQ ID NO: 317355
ggauaaagcccuuggaaac

SEQ ID NO: 484446 - RNA, 19 nt, Artificial Sequence
  Description of Artificial Sequence: Synthetic oligonucleotide
  Antisense Strand to SEQ ID NO: 484445
guuuccaagggcuuuaucc

SEQ ID NO: 484447 - RNA, 19 nt, Artificial Sequence
  Description of Artificial Sequence: Synthetic oligonucleotide
  Sense strand starting at position 3085 of SEQ ID NO: 317355
gaaacaaagccuggauugu

SEQ ID NO: 484448 - RNA, 19 nt, Artificial Sequence
  Description of Artificial Sequence: Synthetic oligonucleotide
  Antisense Strand to SEQ ID NO: 484447
acaauccaggcuuuguuuc

SEQ ID NO: 484449 - RNA, 19 nt, Artificial Sequence
  Description of Artificial Sequence: Synthetic oligonucleotide
  Sense strand starting at position 3086 of SEQ ID NO: 317355
aaacaaagccuggauuguu

SEQ ID NO: 484450 - RNA, 19 nt, Artificial Sequence
  Description of Artificial Sequence: Synthetic oligonucleotide
  Antisense Strand to SEQ ID NO: 484449
aacaauccaggcuuuguuu

SEQ ID NO: 484451 - RNA, 19 nt, Artificial Sequence
  Description of Artificial Sequence: Synthetic oligonucleotide
  Sense strand starting at position 3152 of SEQ ID NO: 317355
cuagguccgcaaugggaaa

SEQ ID NO: 484452 - RNA, 19 nt, Artificial Sequence
  Description of Artificial Sequence: Synthetic oligonucleotide
  Antisense Strand to SEQ ID NO: 484451
uuucccauugcggaccuag

SEQ ID NO: 484453 - RNA, 19 nt, Artificial Sequence
  Description of Artificial Sequence: Synthetic oligonucleotide
  Sense strand starting at position 3177 of SEQ ID NO: 317355
gaccgucaagcugaggaaa

SEQ ID NO: 484454 - RNA, 19 nt, Artificial Sequence
  Description of Artificial Sequence: Synthetic oligonucleotide
  Antisense Strand to SEQ ID NO: 484453
uuuccucagcuugacgguc

SEQ ID NO: 484455 - RNA, 19 nt, Artificial Sequence
  Description of Artificial Sequence: Synthetic oligonucleotide
  Sense strand starting at position 3312 of SEQ ID NO: 317355
uccaaacugcugugagaua

SEQ ID NO: 484456 - RNA, 19 nt, Artificial Sequence
  Description of Artificial Sequence: Synthetic oligonucleotide
  Antisense Strand to SEQ ID NO: 484455
uaucucacagcaguuugga

SEQ ID NO: 484457 - RNA, 19 nt, Artificial Sequence
  Description of Artificial Sequence: Synthetic oligonucleotide
  Sense strand starting at position 3324 of SEQ ID NO: 317355
ugagauaggaucuguccca

SEQ ID NO: 484458 - RNA, 19 nt, Artificial Sequence
  Description of Artificial Sequence: Synthetic oligonucleotide
  Antisense Strand to SEQ ID NO: 484457
ugggacagauccuaucuca

SEQ ID NO: 484459 - RNA, 19 nt, Artificial Sequence
  Description of Artificial Sequence: Synthetic oligonucleotide
  Sense strand starting at position 3331 of SEQ ID NO: 317355
ggaucugucccagggagag

SEQ ID NO: 484460 - RNA, 19 nt, Artificial Sequence
  Description of Artificial Sequence: Synthetic oligonucleotide
  Antisense Strand to SEQ ID NO: 484459
cucucccugggacagaucc

SEQ ID NO: 484461 - RNA, 19 nt, Artificial Sequence
  Description of Artificial Sequence: Synthetic oligonucleotide
  Sense strand starting at position 3415 of SEQ ID NO: 317355
cuccaaugugcacacgaaa

SEQ ID NO: 484462 - RNA, 19 nt, Artificial Sequence
  Description of Artificial Sequence: Synthetic oligonucleotide
  Antisense Strand to SEQ ID NO: 484461
uuucgugugcacauuggag

SEQ ID NO: 484463 - RNA, 19 nt, Artificial Sequence
  Description of Artificial Sequence: Synthetic oligonucleotide
  Sense strand starting at position 3790 of SEQ ID NO: 317355
gccgaaacuccgggaaauc

SEQ ID NO: 484464 - RNA, 19 nt, Artificial Sequence
  Description of Artificial Sequence: Synthetic oligonucleotide
  Antisense Strand to SEQ ID NO: 484463
gauuucccggaguuucggc

SEQ ID NO: 484465 - RNA, 19 nt, Artificial Sequence
  Description of Artificial Sequence: Synthetic oligonucleotide
  Sense strand starting at position 3919 of SEQ ID NO: 317355
ugguacuuggcacauaaau

SEQ ID NO: 484466 - RNA, 19 nt, Artificial Sequence
  Description of Artificial Sequence: Synthetic oligonucleotide
  Antisense Strand to SEQ ID NO: 484465
auuuaugugccaaguacca

SEQ ID NO: 484467 - RNA, 19 nt, Artificial Sequence
  Description of Artificial Sequence: Synthetic oligonucleotide
  Sense strand starting at position 3949 of SEQ ID NO: 317355
cgaguuaaccaugaucguu

SEQ ID NO: 484468 - RNA, 19 nt, Artificial Sequence
  Description of Artificial Sequence: Synthetic oligonucleotide
  Antisense Strand to SEQ ID NO: 484467
aacgaucaugguuaacucg

SEQ ID NO: 484469 - RNA, 19 nt, Artificial Sequence
  Description of Artificial Sequence: Synthetic oligonucleotide
  Sense strand starting at position 41 of SEQ ID NO: 317356
aagucaaagcacugaguua

SEQ ID NO: 484470 - RNA, 19 nt, Artificial Sequence
  Description of Artificial Sequence: Synthetic oligonucleotide
  Antisense Strand to SEQ ID NO: 484469
uaacucagugcuuugacuu

SEQ ID NO: 484471 - RNA, 19 nt, Artificial Sequence
  Description of Artificial Sequence: Synthetic oligonucleotide
  Sense strand starting at position 194 of SEQ ID NO: 317356
uacaaagagguaugauguu

SEQ ID NO: 484472 - RNA, 19 nt, Artificial Sequence
  Description of Artificial Sequence: Synthetic oligonucleotide
  Antisense Strand to SEQ ID NO: 484471
aacaucauaccucuuugua

SEQ ID NO: 484473 - RNA, 19 nt, Artificial Sequence
  Description of Artificial Sequence: Synthetic oligonucleotide
  Sense strand starting at position 200 of SEQ ID NO: 317356
gagguaugauguuuaacug

SEQ ID NO: 484474 - RNA, 19 nt, Artificial Sequence
  Description of Artificial Sequence: Synthetic oligonucleotide
  Antisense Strand to SEQ ID NO: 484473
caguuaaacaucauaccuc

SEQ ID NO: 484475 - RNA, 19 nt, Artificial Sequence
  Description of Artificial Sequence: Synthetic oligonucleotide
  Sense strand starting at position 230 of SEQ ID NO: 317356
uuugaagcuuguucuuaaa

SEQ ID NO: 484476 - RNA, 19 nt, Artificial Sequence
  Description of Artificial Sequence: Synthetic oligonucleotide
  Antisense Strand to SEQ ID NO: 484475
uuuaagaacaagcuucaaa

SEQ ID NO: 484477 - RNA, 19 nt, Artificial Sequence
  Description of Artificial Sequence: Synthetic oligonucleotide
  Sense strand starting at position 403 of SEQ ID NO: 317356
uuagaaucuuagucucaag

SEQ ID NO: 484478 - RNA, 19 nt, Artificial Sequence
  Description of Artificial Sequence: Synthetic oligonucleotide
  Antisense Strand to SEQ ID NO: 484477
cuugagacuaagauucuaa

SEQ ID NO: 484479 - RNA, 19 nt, Artificial Sequence
  Description of Artificial Sequence: Synthetic oligonucleotide
  Sense strand starting at position 438 of SEQ ID NO: 317356
cccugaaugccucauguaa

SEQ ID NO: 484480 - RNA, 19 nt, Artificial Sequence
  Description of Artificial Sequence: Synthetic oligonucleotide
  Antisense Strand to SEQ ID NO: 484479
uuacaugaggcauucaggg

SEQ ID NO: 484481 - RNA, 19 nt, Artificial Sequence
  Description of Artificial Sequence: Synthetic oligonucleotide
  Sense strand starting at position 530 of SEQ ID NO: 317356
caggguggcaugugauaau

SEQ ID NO: 484482 - RNA, 19 nt, Artificial Sequence
  Description of Artificial Sequence: Synthetic oligonucleotide
  Antisense Strand to SEQ ID NO: 484481
auuaucacaugccacccug

SEQ ID NO: 484483 - RNA, 19 nt, Artificial Sequence
  Description of Artificial Sequence: Synthetic oligonucleotide
  Sense strand starting at position 568 of SEQ ID NO: 317356
ggaagugugcgagccguua

SEQ ID NO: 484484 - RNA, 19 nt, Artificial Sequence
  Description of Artificial Sequence: Synthetic oligonucleotide
  Antisense Strand to SEQ ID NO: 484483
uaacggcucgcacacuucc

SEQ ID NO: 484485 - RNA, 19 nt, Artificial Sequence
  Description of Artificial Sequence: Synthetic oligonucleotide
  Sense strand starting at position 579 of SEQ ID NO: 317356
agccguuaucuuucuggca

SEQ ID NO: 484486 - RNA, 19 nt, Artificial Sequence
  Description of Artificial Sequence: Synthetic oligonucleotide
  Antisense Strand to SEQ ID NO: 484485
ugccagaaagauaacggcu

SEQ ID NO: 484487 - RNA, 19 nt, Artificial Sequence
  Description of Artificial Sequence: Synthetic oligonucleotide
  Sense strand starting at position 730 of SEQ ID NO: 317356
ugcaguuuccggcugccaa

SEQ ID NO: 484488 - RNA, 19 nt, Artificial Sequence
  Description of Artificial Sequence: Synthetic oligonucleotide
  Antisense Strand to SEQ ID NO: 484487
uuggcagccggaaacugca

SEQ ID NO: 484489 - RNA, 19 nt, Artificial Sequence
  Description of Artificial Sequence: Synthetic oligonucleotide
  Sense strand starting at position 797 of SEQ ID NO: 317356
aagcaagugucaccagaua

SEQ ID NO: 484490 - RNA, 19 nt, Artificial Sequence
  Description of Artificial Sequence: Synthetic oligonucleotide
  Antisense Strand to SEQ ID NO: 484489
uaucuggugacacuugcuu

SEQ ID NO: 484491 - RNA, 19 nt, Artificial Sequence
  Description of Artificial Sequence: Synthetic oligonucleotide
  Sense strand starting at position 815 of SEQ ID NO: 317356
accgccuucuacuugagaa

SEQ ID NO: 484492 - RNA, 19 nt, Artificial Sequence
  Description of Artificial Sequence: Synthetic oligonucleotide
  Antisense Strand to SEQ ID NO: 484491
uucucaaguagaaggcggu

SEQ ID NO: 484493 - RNA, 19 nt, Artificial Sequence
  Description of Artificial Sequence: Synthetic oligonucleotide
  Sense strand starting at position 817 of SEQ ID NO: 317356
cgccuucuacuugagaaau

SEQ ID NO: 484494 - RNA, 19 nt, Artificial Sequence
  Description of Artificial Sequence: Synthetic oligonucleotide
  Antisense Strand to SEQ ID NO: 484493
auuucucaaguagaaggcg

SEQ ID NO: 484495 - RNA, 19 nt, Artificial Sequence
  Description of Artificial Sequence: Synthetic oligonucleotide
  Sense strand starting at position 1040 of SEQ ID NO: 317356
cucagauucgcgccgaaca

SEQ ID NO: 484496 - RNA, 19 nt, Artificial Sequence
  Description of Artificial Sequence: Synthetic oligonucleotide
  Antisense Strand to SEQ ID NO: 484495
uguucggcgcgaaucugag

SEQ ID NO: 484497 - RNA, 19 nt, Artificial Sequence
  Description of Artificial Sequence: Synthetic oligonucleotide
  Sense strand starting at position 1579 of SEQ ID NO: 317356
augcuccucccggauauaa

SEQ ID NO: 484498 - RNA, 19 nt, Artificial Sequence
  Description of Artificial Sequence: Synthetic oligonucleotide
  Antisense Strand to SEQ ID NO: 484497
uuauauccgggaggagcau

SEQ ID NO: 484499 - RNA, 19 nt, Artificial Sequence
  Description of Artificial Sequence: Synthetic oligonucleotide
  Sense strand starting at position 1581 of SEQ ID NO: 317356
gcuccucccggauauaaag

SEQ ID NO: 484500 - RNA, 19 nt, Artificial Sequence
  Description of Artificial Sequence: Synthetic oligonucleotide
  Antisense Strand to SEQ ID NO: 484499
cuuuauauccgggaggagc

SEQ ID NO: 484501 - RNA, 19 nt, Artificial Sequence
  Description of Artificial Sequence: Synthetic oligonucleotide
  Sense strand starting at position 1680 of SEQ ID NO: 317356
uuauucucuccgccgcaaa

SEQ ID NO: 484502 - RNA, 19 nt, Artificial Sequence
  Description of Artificial Sequence: Synthetic oligonucleotide
  Antisense Strand to SEQ ID NO: 484501
uuugcggcggagagaauaa

SEQ ID NO: 484503 - RNA, 19 nt, Artificial Sequence
  Description of Artificial Sequence: Synthetic oligonucleotide
  Sense strand starting at position 2249 of SEQ ID NO: 317356
uuucgugaucuugaugaaa

SEQ ID NO: 484504 - RNA, 19 nt, Artificial Sequence
  Description of Artificial Sequence: Synthetic oligonucleotide
  Antisense Strand to SEQ ID NO: 484503
uuucaucaagaucacgaaa

SEQ ID NO: 484505 - RNA, 19 nt, Artificial Sequence
  Description of Artificial Sequence: Synthetic oligonucleotide
  Sense strand starting at position 2252 of SEQ ID NO: 317356
cgugaucuugaugaaacca

SEQ ID NO: 484506 - RNA, 19 nt, Artificial Sequence
  Description of Artificial Sequence: Synthetic oligonucleotide
  Antisense Strand to SEQ ID NO: 484505
ugguuucaucaagaucacg

SEQ ID NO: 484507 - RNA, 19 nt, Artificial Sequence
  Description of Artificial Sequence: Synthetic oligonucleotide
  Sense strand starting at position 2438 of SEQ ID NO: 317356
cgcagaucagaggaauguu

SEQ ID NO: 484508 - RNA, 19 nt, Artificial Sequence
  Description of Artificial Sequence: Synthetic oligonucleotide
  Antisense Strand to SEQ ID NO: 484507
aacauuccucugaucugcg

SEQ ID NO: 484509 - RNA, 19 nt, Artificial Sequence
  Description of Artificial Sequence: Synthetic oligonucleotide
  Sense strand starting at position 2495 of SEQ ID NO: 317356
gugugaugucaacagguuu

SEQ ID NO: 484510 - RNA, 19 nt, Artificial Sequence
  Description of Artificial Sequence: Synthetic oligonucleotide
  Antisense Strand to SEQ ID NO: 484509
aaaccuguugacaucacac

SEQ ID NO: 484511 - RNA, 19 nt, Artificial Sequence
  Description of Artificial Sequence: Synthetic oligonucleotide
  Sense strand starting at position 2528 of SEQ ID NO: 317356
ugguguuugaggcaaaguu

SEQ ID NO: 484512 - RNA, 19 nt, Artificial Sequence
  Description of Artificial Sequence: Synthetic oligonucleotide
  Antisense Strand to SEQ ID NO: 484511
aacuuugccucaaacacca

SEQ ID NO: 484513 - RNA, 19 nt, Artificial Sequence
  Description of Artificial Sequence: Synthetic oligonucleotide
  Sense strand starting at position 2541 of SEQ ID NO: 317356
aaaguuuguaucuggugga

SEQ ID NO: 484514 - RNA, 19 nt, Artificial Sequence
  Description of Artificial Sequence: Synthetic oligonucleotide
  Antisense Strand to SEQ ID NO: 484513
uccaccagauacaaacuuu

SEQ ID NO: 484515 - RNA, 19 nt, Artificial Sequence
  Description of Artificial Sequence: Synthetic oligonucleotide
  Sense strand starting at position 2545 of SEQ ID NO: 317356
uuuguaucugguggauaua

SEQ ID NO: 484516 - RNA, 19 nt, Artificial Sequence
  Description of Artificial Sequence: Synthetic oligonucleotide
  Antisense Strand to SEQ ID NO: 484515
uauauccaccagauacaaa

SEQ ID NO: 484517 - RNA, 19 nt, Artificial Sequence
  Description of Artificial Sequence: Synthetic oligonucleotide
  Sense strand starting at position 2556 of SEQ ID NO: 317356
uggauauagugguucaagu

SEQ ID NO: 484518 - RNA, 19 nt, Artificial Sequence
  Description of Artificial Sequence: Synthetic oligonucleotide
  Antisense Strand to SEQ ID NO: 484517
acuugaaccacuauaucca

SEQ ID NO: 484519 - RNA, 19 nt, Artificial Sequence
  Description of Artificial Sequence: Synthetic oligonucleotide
  Sense strand starting at position 2595 of SEQ ID NO: 317356
acuguuagauggcugugaa

SEQ ID NO: 484520 - RNA, 19 nt, Artificial Sequence
  Description of Artificial Sequence: Synthetic oligonucleotide
  Antisense Strand to SEQ ID NO: 484519
uucacagccaucuaacagu

SEQ ID NO: 484521 - RNA, 19 nt, Artificial Sequence
  Description of Artificial Sequence: Synthetic oligonucleotide
  Sense strand starting at position 2598 of SEQ ID NO: 317356
guuagauggcugugaaagg

SEQ ID NO: 484522 - RNA, 19 nt, Artificial Sequence
  Description of Artificial Sequence: Synthetic oligonucleotide
  Antisense Strand to SEQ ID NO: 484521
ccuuucacagccaucuaac

SEQ ID NO: 484523 - RNA, 19 nt, Artificial Sequence
  Description of Artificial Sequence: Synthetic oligonucleotide
  Sense strand starting at position 2801 of SEQ ID NO: 317356
agacuaaacugucuauuga

SEQ ID NO: 484524 - RNA, 19 nt, Artificial Sequence
  Description of Artificial Sequence: Synthetic oligonucleotide
  Antisense Strand to SEQ ID NO: 484523
ucaauagacaguuuagucu

SEQ ID NO: 484525 - RNA, 19 nt, Artificial Sequence
  Description of Artificial Sequence: Synthetic oligonucleotide
  Sense strand starting at position 2826 of SEQ ID NO: 317356
ggcugaucauggccucaaa

SEQ ID NO: 484526 - RNA, 19 nt, Artificial Sequence
  Description of Artificial Sequence: Synthetic oligonucleotide
  Antisense Strand to SEQ ID NO: 484525
uuugaggccaugaucagcc

SEQ ID NO: 484527 - RNA, 19 nt, Artificial Sequence
  Description of Artificial Sequence: Synthetic oligonucleotide
  Sense strand starting at position 2858 of SEQ ID NO: 317356
uugucucuugucuauuaua

SEQ ID NO: 484528 - RNA, 19 nt, Artificial Sequence
  Description of Artificial Sequence: Synthetic oligonucleotide
  Antisense Strand to SEQ ID NO: 484527
uauaauagacaagagacaa

SEQ ID NO: 484529 - RNA, 19 nt, Artificial Sequence
  Description of Artificial Sequence: Synthetic oligonucleotide
  Sense strand starting at position 3111 of SEQ ID NO: 317356
gcauucacgugacuaagga

SEQ ID NO: 484530 - RNA, 19 nt, Artificial Sequence
  Description of Artificial Sequence: Synthetic oligonucleotide
  Antisense Strand to SEQ ID NO: 484529
uccuuagucacgugaaugc

SEQ ID NO: 484531 - RNA, 19 nt, Artificial Sequence
  Description of Artificial Sequence: Synthetic oligonucleotide
  Sense strand starting at position 3348 of SEQ ID NO: 317356
gcugaaggauugucauaug

SEQ ID NO: 484532 - RNA, 19 nt, Artificial Sequence
  Description of Artificial Sequence: Synthetic oligonucleotide
  Antisense Strand to SEQ ID NO: 484531
cauaugacaauccuucagc

SEQ ID NO: 484533 - RNA, 19 nt, Artificial Sequence
  Description of Artificial Sequence: Synthetic oligonucleotide
  Sense strand starting at position 3437 of SEQ ID NO: 317356
agaggaagguuucugugga

SEQ ID NO: 484534 - RNA, 19 nt, Artificial Sequence
  Description of Artificial Sequence: Synthetic oligonucleotide
  Antisense Strand to SEQ ID NO: 484533
uccacagaaaccuuccucu

SEQ ID NO: 484535 - RNA, 19 nt, Artificial Sequence
  Description of Artificial Sequence: Synthetic oligonucleotide
  Sense strand starting at position 3442 of SEQ ID NO: 317356
aagguuucuguggaauuau

SEQ ID NO: 484536 - RNA, 19 nt, Artificial Sequence
  Description of Artificial Sequence: Synthetic oligonucleotide
  Antisense Strand to SEQ ID NO: 484535
auaauuccacagaaaccuu

SEQ ID NO: 484537 - RNA, 19 nt, Artificial Sequence
  Description of Artificial Sequence: Synthetic oligonucleotide
  Sense strand starting at position 3465 of SEQ ID NO: 317356
cauggcugccuuggaagau

SEQ ID NO: 484538 - RNA, 19 nt, Artificial Sequence
  Description of Artificial Sequence: Synthetic oligonucleotide
  Antisense Strand to SEQ ID NO: 484537
aucuuccaaggcagccaug

SEQ ID NO: 484539 - RNA, 19 nt, Artificial Sequence
  Description of Artificial Sequence: Synthetic oligonucleotide
  Sense strand starting at position 3471 of SEQ ID NO: 317356
ugccuuggaagauagugau

SEQ ID NO: 484540 - RNA, 19 nt, Artificial Sequence
  Description of Artificial Sequence: Synthetic oligonucleotide
  Antisense Strand to SEQ ID NO: 484539
aucacuaucuuccaaggca

SEQ ID NO: 484541 - RNA, 19 nt, Artificial Sequence
  Description of Artificial Sequence: Synthetic oligonucleotide
  Sense strand starting at position 3646 of SEQ ID NO: 317356
cagaauuauguugaugcua

SEQ ID NO: 484542 - RNA, 19 nt, Artificial Sequence
  Description of Artificial Sequence: Synthetic oligonucleotide
  Antisense Strand to SEQ ID NO: 484541
uagcaucaacauaauucug

SEQ ID NO: 484543 - RNA, 19 nt, Artificial Sequence
  Description of Artificial Sequence: Synthetic oligonucleotide
  Sense strand starting at position 3839 of SEQ ID NO: 317356
gcucuaaauggcuaaucua

SEQ ID NO: 484544 - RNA, 19 nt, Artificial Sequence
  Description of Artificial Sequence: Synthetic oligonucleotide
  Antisense Strand to SEQ ID NO: 484543
uagauuagccauuuagagc

SEQ ID NO: 484545 - RNA, 19 nt, Artificial Sequence
  Description of Artificial Sequence: Synthetic oligonucleotide
  Sense strand starting at position 3860 of SEQ ID NO: 317356
cccagcaaguuguuuauuu

SEQ ID NO: 484546 - RNA, 19 nt, Artificial Sequence
  Description of Artificial Sequence: Synthetic oligonucleotide
  Antisense Strand to SEQ ID NO: 484545
aaauaaacaacuugcuggg

SEQ ID NO: 484547 - RNA, 19 nt, Artificial Sequence
  Description of Artificial Sequence: Synthetic oligonucleotide
  Sense strand starting at position 3900 of SEQ ID NO: 317356
uuguccauaaaguguuaga

SEQ ID NO: 484548 - RNA, 19 nt, Artificial Sequence
  Description of Artificial Sequence: Synthetic oligonucleotide
  Antisense Strand to SEQ ID NO: 484547
ucuaacacuuuauggacaa

SEQ ID NO: 484549 - RNA, 19 nt, Artificial Sequence
  Description of Artificial Sequence: Synthetic oligonucleotide
  Sense strand starting at position 30 of SEQ ID NO: 317357
agaucaaucuacguauaau

SEQ ID NO: 484550 - RNA, 19 nt, Artificial Sequence
  Description of Artificial Sequence: Synthetic oligonucleotide
  Antisense Strand to SEQ ID NO: 484549
auuauacguagauugaucu

SEQ ID NO: 484551 - RNA, 19 nt, Artificial Sequence
  Description of Artificial Sequence: Synthetic oligonucleotide
  Sense strand starting at position 33 of SEQ ID NO: 317357
ucaaucuacguauaauguu

SEQ ID NO: 484552 - RNA, 19 nt, Artificial Sequence
  Description of Artificial Sequence: Synthetic oligonucleotide
  Antisense Strand to SEQ ID NO: 484551
aacauuauacguagauuga

SEQ ID NO: 484553 - RNA, 19 nt, Artificial Sequence
  Description of Artificial Sequence: Synthetic oligonucleotide
  Sense strand starting at position 286 of SEQ ID NO: 317357
aagucaaagcacugaguua

SEQ ID NO: 484554 - RNA, 19 nt, Artificial Sequence
  Description of Artificial Sequence: Synthetic oligonucleotide
  Antisense Strand to SEQ ID NO: 484553
uaacucagugcuuugacuu

SEQ ID NO: 484555 - RNA, 19 nt, Artificial Sequence
  Description of Artificial Sequence: Synthetic oligonucleotide
  Sense strand starting at position 439 of SEQ ID NO: 317357
uacaaagagguaugauguu

SEQ ID NO: 484556 - RNA, 19 nt, Artificial Sequence
  Description of Artificial Sequence: Synthetic oligonucleotide
  Antisense Strand to SEQ ID NO: 484555
aacaucauaccucuuugua

SEQ ID NO: 484557 - RNA, 19 nt, Artificial Sequence
  Description of Artificial Sequence: Synthetic oligonucleotide
  Sense strand starting at position 445 of SEQ ID NO: 317357
gagguaugauguuuaacug

SEQ ID NO: 484558 - RNA, 19 nt, Artificial Sequence
  Description of Artificial Sequence: Synthetic oligonucleotide
  Antisense Strand to SEQ ID NO: 484557
caguuaaacaucauaccuc

SEQ ID NO: 484559 - RNA, 19 nt, Artificial Sequence
  Description of Artificial Sequence: Synthetic oligonucleotide
  Sense strand starting at position 475 of SEQ ID NO: 317357
uuugaagcuuguucuuaaa

SEQ ID NO: 484560 - RNA, 19 nt, Artificial Sequence
  Description of Artificial Sequence: Synthetic oligonucleotide
  Antisense Strand to SEQ ID NO: 484559
uuuaagaacaagcuucaaa

SEQ ID NO: 484561 - RNA, 19 nt, Artificial Sequence
  Description of Artificial Sequence: Synthetic oligonucleotide
  Sense strand starting at position 648 of SEQ ID NO: 317357
uuagaaucuuagucucaag

SEQ ID NO: 484562 - RNA, 19 nt, Artificial Sequence
  Description of Artificial Sequence: Synthetic oligonucleotide
  Antisense Strand to SEQ ID NO: 484561
cuugagacuaagauucuaa

SEQ ID NO: 484563 - RNA, 19 nt, Artificial Sequence
  Description of Artificial Sequence: Synthetic oligonucleotide
  Sense strand starting at position 683 of SEQ ID NO: 317357
cccugaaugccucauguaa

SEQ ID NO: 484564 - RNA, 19 nt, Artificial Sequence
  Description of Artificial Sequence: Synthetic oligonucleotide
  Antisense Strand to SEQ ID NO: 484563
uuacaugaggcauucaggg

SEQ ID NO: 484565 - RNA, 19 nt, Artificial Sequence
  Description of Artificial Sequence: Synthetic oligonucleotide
  Sense strand starting at position 775 of SEQ ID NO: 317357
caggguggcaugugauaau

SEQ ID NO: 484566 - RNA, 19 nt, Artificial Sequence
  Description of Artificial Sequence: Synthetic oligonucleotide
  Antisense Strand to SEQ ID NO: 484565
auuaucacaugccacccug

SEQ ID NO: 484567 - RNA, 19 nt, Artificial Sequence
  Description of Artificial Sequence: Synthetic oligonucleotide
  Sense strand starting at position 813 of SEQ ID NO: 317357
ggaagugugcgagccguua

SEQ ID NO: 484568 - RNA, 19 nt, Artificial Sequence
  Description of Artificial Sequence: Synthetic oligonucleotide
  Antisense Strand to SEQ ID NO: 484567
uaacggcucgcacacuucc

SEQ ID NO: 484569 - RNA, 19 nt, Artificial Sequence
  Description of Artificial Sequence: Synthetic oligonucleotide
  Sense strand starting at position 817 of SEQ ID NO: 317357
gugugcgagccguuaucuu

SEQ ID NO: 484570 - RNA, 19 nt, Artificial Sequence
  Description of Artificial Sequence: Synthetic oligonucleotide
  Antisense Strand to SEQ ID NO: 484569
aagauaacggcucgcacac

SEQ ID NO: 484571 - RNA, 19 nt, Artificial Sequence
  Description of Artificial Sequence: Synthetic oligonucleotide
  Sense strand starting at position 824 of SEQ ID NO: 317357
agccguuaucuuucuggca

SEQ ID NO: 484572 - RNA, 19 nt, Artificial Sequence
  Description of Artificial Sequence: Synthetic oligonucleotide
  Antisense Strand to SEQ ID NO: 484571
ugccagaaagauaacggcu

SEQ ID NO: 484573 - RNA, 19 nt, Artificial Sequence
  Description of Artificial Sequence: Synthetic oligonucleotide
  Sense strand starting at position 975 of SEQ ID NO: 317357
ugcaguuuccggcugccaa

SEQ ID NO: 484574 - RNA, 19 nt, Artificial Sequence
  Description of Artificial Sequence: Synthetic oligonucleotide
  Antisense Strand to SEQ ID NO: 484573
uuggcagccggaaacugca

SEQ ID NO: 484575 - RNA, 19 nt, Artificial Sequence
  Description of Artificial Sequence: Synthetic oligonucleotide
  Sense strand starting at position 1042 of SEQ ID NO: 317357
aagcaagugucaccagaua

SEQ ID NO: 484576 - RNA, 19 nt, Artificial Sequence
  Description of Artificial Sequence: Synthetic oligonucleotide
  Antisense Strand to SEQ ID NO: 484575
uaucuggugacacuugcuu

SEQ ID NO: 484577 - RNA, 19 nt, Artificial Sequence
  Description of Artificial Sequence: Synthetic oligonucleotide
  Sense strand starting at position 1060 of SEQ ID NO: 317357
accgccuucuacuugagaa

SEQ ID NO: 484578 - RNA, 19 nt, Artificial Sequence
  Description of Artificial Sequence: Synthetic oligonucleotide
  Antisense Strand to SEQ ID NO: 484577
uucucaaguagaaggcggu

SEQ ID NO: 484579 - RNA, 19 nt, Artificial Sequence
  Description of Artificial Sequence: Synthetic oligonucleotide
  Sense strand starting at position 1062 of SEQ ID NO: 317357
cgccuucuacuugagaaau

SEQ ID NO: 484580 - RNA, 19 nt, Artificial Sequence
  Description of Artificial Sequence: Synthetic oligonucleotide
  Antisense Strand to SEQ ID NO: 484579
auuucucaaguagaaggcg

SEQ ID NO: 484581 - RNA, 19 nt, Artificial Sequence
  Description of Artificial Sequence: Synthetic oligonucleotide
  Sense strand starting at position 1285 of SEQ ID NO: 317357
cucagauucgcgccgaaca

SEQ ID NO: 484582 - RNA, 19 nt, Artificial Sequence
  Description of Artificial Sequence: Synthetic oligonucleotide
  Antisense Strand to SEQ ID NO: 484581
uguucggcgcgaaucugag

SEQ ID NO: 484583 - RNA, 19 nt, Artificial Sequence
  Description of Artificial Sequence: Synthetic oligonucleotide
  Sense strand starting at position 1824 of SEQ ID NO: 317357
augcuccucccggauauaa

SEQ ID NO: 484584 - RNA, 19 nt, Artificial Sequence
  Description of Artificial Sequence: Synthetic oligonucleotide
  Antisense Strand to SEQ ID NO: 484583
uuauauccgggaggagcau

SEQ ID NO: 484585 - RNA, 19 nt, Artificial Sequence
  Description of Artificial Sequence: Synthetic oligonucleotide
  Sense strand starting at position 1826 of SEQ ID NO: 317357
gcuccucccggauauaaag

SEQ ID NO: 484586 - RNA, 19 nt, Artificial Sequence
  Description of Artificial Sequence: Synthetic oligonucleotide
  Antisense Strand to SEQ ID NO: 484585
cuuuauauccgggaggagc

SEQ ID NO: 484587 - RNA, 19 nt, Artificial Sequence
  Description of Artificial Sequence: Synthetic oligonucleotide
  Sense strand starting at position 1925 of SEQ ID NO: 317357
uuauucucuccgccgcaaa

SEQ ID NO: 484588 - RNA, 19 nt, Artificial Sequence
  Description of Artificial Sequence: Synthetic oligonucleotide
  Antisense Strand to SEQ ID NO: 484587
uuugcggcggagagaauaa

SEQ ID NO: 484589 - RNA, 19 nt, Artificial Sequence
  Description of Artificial Sequence: Synthetic oligonucleotide
  Sense strand starting at position 2494 of SEQ ID NO: 317357
uuucgugaucuugaugaaa

SEQ ID NO: 484590 - RNA, 19 nt, Artificial Sequence
  Description of Artificial Sequence: Synthetic oligonucleotide
  Antisense Strand to SEQ ID NO: 484589
uuucaucaagaucacgaaa

SEQ ID NO: 484591 - RNA, 19 nt, Artificial Sequence
  Description of Artificial Sequence: Synthetic oligonucleotide
  Sense strand starting at position 2497 of SEQ ID NO: 317357
cgugaucuugaugaaacca

SEQ ID NO: 484592 - RNA, 19 nt, Artificial Sequence
  Description of Artificial Sequence: Synthetic oligonucleotide
  Antisense Strand to SEQ ID NO: 484591
ugguuucaucaagaucacg

SEQ ID NO: 484593 - RNA, 19 nt, Artificial Sequence
  Description of Artificial Sequence: Synthetic oligonucleotide
  Sense strand starting at position 2683 of SEQ ID NO: 317357
cgcagaucagaggaauguu

SEQ ID NO: 484594 - RNA, 19 nt, Artificial Sequence
  Description of Artificial Sequence: Synthetic oligonucleotide
  Antisense Strand to SEQ ID NO: 484593
aacauuccucugaucugcg

SEQ ID NO: 484595 - RNA, 19 nt, Artificial Sequence
  Description of Artificial Sequence: Synthetic oligonucleotide
  Sense strand starting at position 2740 of SEQ ID NO: 317357
gugugaugucaacagguuu

SEQ ID NO: 484596 - RNA, 19 nt, Artificial Sequence
  Description of Artificial Sequence: Synthetic oligonucleotide
  Antisense Strand to SEQ ID NO: 484595
aaaccuguugacaucacac

SEQ ID NO: 484597 - RNA, 19 nt, Artificial Sequence
  Description of Artificial Sequence: Synthetic oligonucleotide
  Sense strand starting at position 2773 of SEQ ID NO: 317357
ugguguuugaggcaaaguu

SEQ ID NO: 484598 - RNA, 19 nt, Artificial Sequence
  Description of Artificial Sequence: Synthetic oligonucleotide
  Antisense Strand to SEQ ID NO: 484597
aacuuugccucaaacacca

SEQ ID NO: 484599 - RNA, 19 nt, Artificial Sequence
  Description of Artificial Sequence: Synthetic oligonucleotide
  Sense strand starting at position 2786 of SEQ ID NO: 317357
aaaguuuguaucuggugga

SEQ ID NO: 484600 - RNA, 19 nt, Artificial Sequence
  Description of Artificial Sequence: Synthetic oligonucleotide
  Antisense Strand to SEQ ID NO: 484599
uccaccagauacaaacuuu

SEQ ID NO: 484601 - RNA, 19 nt, Artificial Sequence
  Description of Artificial Sequence: Synthetic oligonucleotide
  Sense strand starting at position 2790 of SEQ ID NO: 317357
uuuguaucugguggauaua

SEQ ID NO: 484602 - RNA, 19 nt, Artificial Sequence
  Description of Artificial Sequence: Synthetic oligonucleotide
  Antisense Strand to SEQ ID NO: 484601
uauauccaccagauacaaa

SEQ ID NO: 484603 - RNA, 19 nt, Artificial Sequence
  Description of Artificial Sequence: Synthetic oligonucleotide
  Sense strand starting at position 2801 of SEQ ID NO: 317357
uggauauagugguucaagu

SEQ ID NO: 484604 - RNA, 19 nt, Artificial Sequence
  Description of Artificial Sequence: Synthetic oligonucleotide
  Antisense Strand to SEQ ID NO: 484603
acuugaaccacuauaucca

SEQ ID NO: 484605 - RNA, 19 nt, Artificial Sequence
  Description of Artificial Sequence: Synthetic oligonucleotide
  Sense strand starting at position 2840 of SEQ ID NO: 317357
acuguuagauggcugugaa

SEQ ID NO: 484606 - RNA, 19 nt, Artificial Sequence
  Description of Artificial Sequence: Synthetic oligonucleotide
  Antisense Strand to SEQ ID NO: 484605
uucacagccaucuaacagu

SEQ ID NO: 484607 - RNA, 19 nt, Artificial Sequence
  Description of Artificial Sequence: Synthetic oligonucleotide
  Sense strand starting at position 2843 of SEQ ID NO: 317357
guuagauggcugugaaagg

SEQ ID NO: 484608 - RNA, 19 nt, Artificial Sequence
  Description of Artificial Sequence: Synthetic oligonucleotide
  Antisense Strand to SEQ ID NO: 484607
ccuuucacagccaucuaac

SEQ ID NO: 484609 - RNA, 19 nt, Artificial Sequence
  Description of Artificial Sequence: Synthetic oligonucleotide
  Sense strand starting at position 3046 of SEQ ID NO: 317357
agacuaaacugucuauuga

SEQ ID NO: 484610 - RNA, 19 nt, Artificial Sequence
  Description of Artificial Sequence: Synthetic oligonucleotide
  Antisense Strand to SEQ ID NO: 484609
ucaauagacaguuuagucu

SEQ ID NO: 484611 - RNA, 19 nt, Artificial Sequence
  Description of Artificial Sequence: Synthetic oligonucleotide
  Sense strand starting at position 3071 of SEQ ID NO: 317357
ggcugaucauggccucaaa

SEQ ID NO: 484612 - RNA, 19 nt, Artificial Sequence
  Description of Artificial Sequence: Synthetic oligonucleotide
  Antisense Strand to SEQ ID NO: 484611
uuugaggccaugaucagcc

SEQ ID NO: 484613 - RNA, 19 nt, Artificial Sequence
  Description of Artificial Sequence: Synthetic oligonucleotide
  Sense strand starting at position 3103 of SEQ ID NO: 317357
uugucucuugucuauuaua

SEQ ID NO: 484614 - RNA, 19 nt, Artificial Sequence
  Description of Artificial Sequence: Synthetic oligonucleotide
  Antisense Strand to SEQ ID NO: 484613
uauaauagacaagagacaa

SEQ ID NO: 484615 - RNA, 19 nt, Artificial Sequence
  Description of Artificial Sequence: Synthetic oligonucleotide
  Sense strand starting at position 3356 of SEQ ID NO: 317357
gcauucacgugacuaagga

SEQ ID NO: 484616 - RNA, 19 nt, Artificial Sequence
  Description of Artificial Sequence: Synthetic oligonucleotide
  Antisense Strand to SEQ ID NO: 484615
uccuuagucacgugaaugc

SEQ ID NO: 484617 - RNA, 19 nt, Artificial Sequence
  Description of Artificial Sequence: Synthetic oligonucleotide
  Sense strand starting at position 3593 of SEQ ID NO: 317357
gcugaaggauugucauaug

SEQ ID NO: 484618 - RNA, 19 nt, Artificial Sequence
  Description of Artificial Sequence: Synthetic oligonucleotide
  Antisense Strand to SEQ ID NO: 484617
cauaugacaauccuucagc

SEQ ID NO: 484619 - RNA, 19 nt, Artificial Sequence
  Description of Artificial Sequence: Synthetic oligonucleotide
  Sense strand starting at position 3682 of SEQ ID NO: 317357
agaggaagguuucugugga

SEQ ID NO: 484620 - RNA, 19 nt, Artificial Sequence
  Description of Artificial Sequence: Synthetic oligonucleotide
  Antisense Strand to SEQ ID NO: 484619
uccacagaaaccuuccucu

SEQ ID NO: 484621 - RNA, 19 nt, Artificial Sequence
  Description of Artificial Sequence: Synthetic oligonucleotide
  Sense strand starting at position 3687 of SEQ ID NO: 317357
aagguuucuguggaauuau

SEQ ID NO: 484622 - RNA, 19 nt, Artificial Sequence
  Description of Artificial Sequence: Synthetic oligonucleotide
  Antisense Strand to SEQ ID NO: 484621
auaauuccacagaaaccuu

SEQ ID NO: 484623 - RNA, 19 nt, Artificial Sequence
  Description of Artificial Sequence: Synthetic oligonucleotide
  Sense strand starting at position 3710 of SEQ ID NO: 317357
cauggcugccuuggaagau

SEQ ID NO: 484624 - RNA, 19 nt, Artificial Sequence
  Description of Artificial Sequence: Synthetic oligonucleotide
  Antisense Strand to SEQ ID NO: 484623
aucuuccaaggcagccaug

SEQ ID NO: 484625 - RNA, 19 nt, Artificial Sequence
  Description of Artificial Sequence: Synthetic oligonucleotide
  Sense strand starting at position 3716 of SEQ ID NO: 317357
ugccuuggaagauagugau

SEQ ID NO: 484626 - RNA, 19 nt, Artificial Sequence
  Description of Artificial Sequence: Synthetic oligonucleotide
  Antisense Strand to SEQ ID NO: 484625
aucacuaucuuccaaggca

SEQ ID NO: 484627 - RNA, 19 nt, Artificial Sequence
  Description of Artificial Sequence: Synthetic oligonucleotide
  Sense strand starting at position 3891 of SEQ ID NO: 317357
cagaauuauguugaugcua

SEQ ID NO: 484628 - RNA, 19 nt, Artificial Sequence
  Description of Artificial Sequence: Synthetic oligonucleotide
  Antisense Strand to SEQ ID NO: 484627
uagcaucaacauaauucug

SEQ ID NO: 484629 - RNA, 19 nt, Artificial Sequence
  Description of Artificial Sequence: Synthetic oligonucleotide
  Sense strand starting at position 19 of SEQ ID NO: 317358
aguuaugugggccaaugaa

SEQ ID NO: 484630 - RNA, 19 nt, Artificial Sequence
  Description of Artificial Sequence: Synthetic oligonucleotide
  Antisense Strand to SEQ ID NO: 484629
uucauuggcccacauaacu

SEQ ID NO: 484631 - RNA, 19 nt, Artificial Sequence
  Description of Artificial Sequence: Synthetic oligonucleotide
  Sense strand starting at position 271 of SEQ ID NO: 317358
aguggcacccauuaaauaa

SEQ ID NO: 484632 - RNA, 19 nt, Artificial Sequence
  Description of Artificial Sequence: Synthetic oligonucleotide
  Antisense Strand to SEQ ID NO: 484631
uuauuuaaugggugccacu

SEQ ID NO: 484633 - RNA, 19 nt, Artificial Sequence
  Description of Artificial Sequence: Synthetic oligonucleotide
  Sense strand starting at position 405 of SEQ ID NO: 317358
uuugcaauagauugagauu

SEQ ID NO: 484634 - RNA, 19 nt, Artificial Sequence
  Description of Artificial Sequence: Synthetic oligonucleotide
  Antisense Strand to SEQ ID NO: 484633
aaucucaaucuauugcaaa

SEQ ID NO: 484635 - RNA, 19 nt, Artificial Sequence
  Description of Artificial Sequence: Synthetic oligonucleotide
  Sense strand starting at position 414 of SEQ ID NO: 317358
gauugagauucugugggag

SEQ ID NO: 484636 - RNA, 19 nt, Artificial Sequence
  Description of Artificial Sequence: Synthetic oligonucleotide
  Antisense Strand to SEQ ID NO: 484635
cucccacagaaucucaauc

SEQ ID NO: 484637 - RNA, 19 nt, Artificial Sequence
  Description of Artificial Sequence: Synthetic oligonucleotide
  Sense strand starting at position 463 of SEQ ID NO: 317358
gugcuaggugugguuguau

SEQ ID NO: 484638 - RNA, 19 nt, Artificial Sequence
  Description of Artificial Sequence: Synthetic oligonucleotide
  Antisense Strand to SEQ ID NO: 484637
auacaaccacaccuagcac

SEQ ID NO: 484639 - RNA, 19 nt, Artificial Sequence
  Description of Artificial Sequence: Synthetic oligonucleotide
  Sense strand starting at position 613 of SEQ ID NO: 317358
cugaaagagcucugucuag

SEQ ID NO: 484640 - RNA, 19 nt, Artificial Sequence
  Description of Artificial Sequence: Synthetic oligonucleotide
  Antisense Strand to SEQ ID NO: 484639
cuagacagagcucuuucag

SEQ ID NO: 484641 - RNA, 19 nt, Artificial Sequence
  Description of Artificial Sequence: Synthetic oligonucleotide
  Sense strand starting at position 721 of SEQ ID NO: 317358
ugaaauuugccauguaugc

SEQ ID NO: 484642 - RNA, 19 nt, Artificial Sequence
  Description of Artificial Sequence: Synthetic oligonucleotide
  Antisense Strand to SEQ ID NO: 484641
gcauacauggcaaauuuca

SEQ ID NO: 484643 - RNA, 19 nt, Artificial Sequence
  Description of Artificial Sequence: Synthetic oligonucleotide
  Sense strand starting at position 794 of SEQ ID NO: 317358
ucuccuguucuuuaaagag

SEQ ID NO: 484644 - RNA, 19 nt, Artificial Sequence
  Description of Artificial Sequence: Synthetic oligonucleotide
  Antisense Strand to SEQ ID NO: 484643
cucuuuaaagaacaggaga

SEQ ID NO: 484645 - RNA, 19 nt, Artificial Sequence
  Description of Artificial Sequence: Synthetic oligonucleotide
  Sense strand starting at position 959 of SEQ ID NO: 317358
ccaguagguguugagaaua

SEQ ID NO: 484646 - RNA, 19 nt, Artificial Sequence
  Description of Artificial Sequence: Synthetic oligonucleotide
  Antisense Strand to SEQ ID NO: 484645
uauucucaacaccuacugg

SEQ ID NO: 484647 - RNA, 19 nt, Artificial Sequence
  Description of Artificial Sequence: Synthetic oligonucleotide
  Sense strand starting at position 1111 of SEQ ID NO: 317358
ggaggagauacaugugcua

SEQ ID NO: 484648 - RNA, 19 nt, Artificial Sequence
  Description of Artificial Sequence: Synthetic oligonucleotide
  Antisense Strand to SEQ ID NO: 484647
uagcacauguaucuccucc

SEQ ID NO: 484649 - RNA, 19 nt, Artificial Sequence
  Description of Artificial Sequence: Synthetic oligonucleotide
  Sense strand starting at position 1113 of SEQ ID NO: 317358
aggagauacaugugcuaag

SEQ ID NO: 484650 - RNA, 19 nt, Artificial Sequence
  Description of Artificial Sequence: Synthetic oligonucleotide
  Antisense Strand to SEQ ID NO: 484649
cuuagcacauguaucuccu

SEQ ID NO: 484651 - RNA, 19 nt, Artificial Sequence
  Description of Artificial Sequence: Synthetic oligonucleotide
  Sense strand starting at position 1114 of SEQ ID NO: 317358
ggagauacaugugcuaagu

SEQ ID NO: 484652 - RNA, 19 nt, Artificial Sequence
  Description of Artificial Sequence: Synthetic oligonucleotide
  Antisense Strand to SEQ ID NO: 484651
acuuagcacauguaucucc

SEQ ID NO: 484653 - RNA, 19 nt, Artificial Sequence
  Description of Artificial Sequence: Synthetic oligonucleotide
  Sense strand starting at position 1192 of SEQ ID NO: 317358
uggagagaucaguaacgca

SEQ ID NO: 484654 - RNA, 19 nt, Artificial Sequence
  Description of Artificial Sequence: Synthetic oligonucleotide
  Antisense Strand to SEQ ID NO: 484653
ugcguuacugaucucucca

SEQ ID NO: 484655 - RNA, 19 nt, Artificial Sequence
  Description of Artificial Sequence: Synthetic oligonucleotide
  Sense strand starting at position 1197 of SEQ ID NO: 317358
agaucaguaacgcaaauga

SEQ ID NO: 484656 - RNA, 19 nt, Artificial Sequence
  Description of Artificial Sequence: Synthetic oligonucleotide
  Antisense Strand to SEQ ID NO: 484655
ucauuugcguuacugaucu

SEQ ID NO: 484657 - RNA, 19 nt, Artificial Sequence
  Description of Artificial Sequence: Synthetic oligonucleotide
  Sense strand starting at position 1205 of SEQ ID NO: 317358
aacgcaaaugaguaugcaa

SEQ ID NO: 484658 - RNA, 19 nt, Artificial Sequence
  Description of Artificial Sequence: Synthetic oligonucleotide
  Antisense Strand to SEQ ID NO: 484657
uugcauacucauuugcguu

SEQ ID NO: 484659 - RNA, 19 nt, Artificial Sequence
  Description of Artificial Sequence: Synthetic oligonucleotide
  Sense strand starting at position 1260 of SEQ ID NO: 317358
auaagaguucugggaagca

SEQ ID NO: 484660 - RNA, 19 nt, Artificial Sequence
  Description of Artificial Sequence: Synthetic oligonucleotide
  Antisense Strand to SEQ ID NO: 484659
ugcuucccagaacucuuau

SEQ ID NO: 484661 - RNA, 19 nt, Artificial Sequence
  Description of Artificial Sequence: Synthetic oligonucleotide
  Sense strand starting at position 1359 of SEQ ID NO: 317358
agguuaaauuuggaugaag

SEQ ID NO: 484662 - RNA, 19 nt, Artificial Sequence
  Description of Artificial Sequence: Synthetic oligonucleotide
  Antisense Strand to SEQ ID NO: 484661
cuucauccaaauuuaaccu

SEQ ID NO: 484663 - RNA, 19 nt, Artificial Sequence
  Description of Artificial Sequence: Synthetic oligonucleotide
  Sense strand starting at position 1400 of SEQ ID NO: 317358
uuucuaacgguacaagauu

SEQ ID NO: 484664 - RNA, 19 nt, Artificial Sequence
  Description of Artificial Sequence: Synthetic oligonucleotide
  Antisense Strand to SEQ ID NO: 484663
aaucuuguaccguuagaaa

SEQ ID NO: 484665 - RNA, 19 nt, Artificial Sequence
  Description of Artificial Sequence: Synthetic oligonucleotide
  Sense strand starting at position 1450 of SEQ ID NO: 317358
agauauauguguucucaug

SEQ ID NO: 484666 - RNA, 19 nt, Artificial Sequence
  Description of Artificial Sequence: Synthetic oligonucleotide
  Antisense Strand to SEQ ID NO: 484665
caugagaacacauauaucu

SEQ ID NO: 484667 - RNA, 19 nt, Artificial Sequence
  Description of Artificial Sequence: Synthetic oligonucleotide
  Sense strand starting at position 1484 of SEQ ID NO: 317358
gccaguauucuggcugcua

SEQ ID NO: 484668 - RNA, 19 nt, Artificial Sequence
  Description of Artificial Sequence: Synthetic oligonucleotide
  Antisense Strand to SEQ ID NO: 484667
uagcagccagaauacuggc

SEQ ID NO: 484669 - RNA, 19 nt, Artificial Sequence
  Description of Artificial Sequence: Synthetic oligonucleotide
  Sense strand starting at position 1576 of SEQ ID NO: 317358
cccuaauagugaguugaaa

SEQ ID NO: 484670 - RNA, 19 nt, Artificial Sequence
  Description of Artificial Sequence: Synthetic oligonucleotide
  Antisense Strand to SEQ ID NO: 484669
uuucaacucacuauuaggg

SEQ ID NO: 484671 - RNA, 19 nt, Artificial Sequence
  Description of Artificial Sequence: Synthetic oligonucleotide
  Sense strand starting at position 2127 of SEQ ID NO: 317358
uucucaccagagugagaau

SEQ ID NO: 484672 - RNA, 19 nt, Artificial Sequence
  Description of Artificial Sequence: Synthetic oligonucleotide
  Antisense Strand to SEQ ID NO: 484671
auucucacucuggugagaa

SEQ ID NO: 484673 - RNA, 19 nt, Artificial Sequence
  Description of Artificial Sequence: Synthetic oligonucleotide
  Sense strand starting at position 2151 of SEQ ID NO: 317358
guauacuucgcuuucugca

SEQ ID NO: 484674 - RNA, 19 nt, Artificial Sequence
  Description of Artificial Sequence: Synthetic oligonucleotide
  Antisense Strand to SEQ ID NO: 484673
ugcagaaagcgaaguauac

SEQ ID NO: 484675 - RNA, 19 nt, Artificial Sequence
  Description of Artificial Sequence: Synthetic oligonucleotide
  Sense strand starting at position 2335 of SEQ ID NO: 317358
gguacauagcaauauuagu

SEQ ID NO: 484676 - RNA, 19 nt, Artificial Sequence
  Description of Artificial Sequence: Synthetic oligonucleotide
  Antisense Strand to SEQ ID NO: 484675
acuaauauugcuauguacc

SEQ ID NO: 484677 - RNA, 19 nt, Artificial Sequence
  Description of Artificial Sequence: Synthetic oligonucleotide
  Sense strand starting at position 2399 of SEQ ID NO: 317358
agagguuucuuucccauua

SEQ ID NO: 484678 - RNA, 19 nt, Artificial Sequence
  Description of Artificial Sequence: Synthetic oligonucleotide
  Antisense Strand to SEQ ID NO: 484677
uaaugggaaagaaaccucu

SEQ ID NO: 484679 - RNA, 19 nt, Artificial Sequence
  Description of Artificial Sequence: Synthetic oligonucleotide
  Sense strand starting at position 2599 of SEQ ID NO: 317358
uggaauuggugacuuacau

SEQ ID NO: 484680 - RNA, 19 nt, Artificial Sequence
  Description of Artificial Sequence: Synthetic oligonucleotide
  Antisense Strand to SEQ ID NO: 484679
auguaagucaccaauucca

SEQ ID NO: 484681 - RNA, 19 nt, Artificial Sequence
  Description of Artificial Sequence: Synthetic oligonucleotide
  Sense strand starting at position 2647 of SEQ ID NO: 317358
gcacgagugacugaggaaa

SEQ ID NO: 484682 - RNA, 19 nt, Artificial Sequence
  Description of Artificial Sequence: Synthetic oligonucleotide
  Antisense Strand to SEQ ID NO: 484681
uuuccucagucacucgugc

SEQ ID NO: 484683 - RNA, 19 nt, Artificial Sequence
  Description of Artificial Sequence: Synthetic oligonucleotide
  Sense strand starting at position 2658 of SEQ ID NO: 317358
ugaggaaauugcuuccaga

SEQ ID NO: 484684 - RNA, 19 nt, Artificial Sequence
  Description of Artificial Sequence: Synthetic oligonucleotide
  Antisense Strand to SEQ ID NO: 484683
ucuggaagcaauuuccuca

SEQ ID NO: 484685 - RNA, 19 nt, Artificial Sequence
  Description of Artificial Sequence: Synthetic oligonucleotide
  Sense strand starting at position 2904 of SEQ ID NO: 317358
gguuuaagccaagaacacu

SEQ ID NO: 484686 - RNA, 19 nt, Artificial Sequence
  Description of Artificial Sequence: Synthetic oligonucleotide
  Antisense Strand to SEQ ID NO: 484685
aguguucuuggcuuaaacc

SEQ ID NO: 484687 - RNA, 19 nt, Artificial Sequence
  Description of Artificial Sequence: Synthetic oligonucleotide
  Sense strand starting at position 3210 of SEQ ID NO: 317358
ggauaaagaugccuuguuu

SEQ ID NO: 484688 - RNA, 19 nt, Artificial Sequence
  Description of Artificial Sequence: Synthetic oligonucleotide
  Antisense Strand to SEQ ID NO: 484687
aaacaaggcaucuuuaucc

SEQ ID NO: 484689 - RNA, 19 nt, Artificial Sequence
  Description of Artificial Sequence: Synthetic oligonucleotide
  Sense strand starting at position 3232 of SEQ ID NO: 317358
gaugcacugcuagggauaa

SEQ ID NO: 484690 - RNA, 19 nt, Artificial Sequence
  Description of Artificial Sequence: Synthetic oligonucleotide
  Antisense Strand to SEQ ID NO: 484689
uuaucccuagcagugcauc

SEQ ID NO: 484691 - RNA, 19 nt, Artificial Sequence
  Description of Artificial Sequence: Synthetic oligonucleotide
  Sense strand starting at position 3295 of SEQ ID NO: 317358
aggauaaaucugugcucca

SEQ ID NO: 484692 - RNA, 19 nt, Artificial Sequence
  Description of Artificial Sequence: Synthetic oligonucleotide
  Antisense Strand to SEQ ID NO: 484691
uggagcacagauuuauccu

SEQ ID NO: 484693 - RNA, 19 nt, Artificial Sequence
  Description of Artificial Sequence: Synthetic oligonucleotide
  Sense strand starting at position 3296 of SEQ ID NO: 317358
ggauaaaucugugcuccaa

SEQ ID NO: 484694 - RNA, 19 nt, Artificial Sequence
  Description of Artificial Sequence: Synthetic oligonucleotide
  Antisense Strand to SEQ ID NO: 484693
uuggagcacagauuuaucc

SEQ ID NO: 484695 - RNA, 19 nt, Artificial Sequence
  Description of Artificial Sequence: Synthetic oligonucleotide
  Sense strand starting at position 3327 of SEQ ID NO: 317358
uuuaucucugagugguaaa

SEQ ID NO: 484696 - RNA, 19 nt, Artificial Sequence
  Description of Artificial Sequence: Synthetic oligonucleotide
  Antisense Strand to SEQ ID NO: 484695
uuuaccacucagagauaaa

SEQ ID NO: 484697 - RNA, 19 nt, Artificial Sequence
  Description of Artificial Sequence: Synthetic oligonucleotide
  Sense strand starting at position 3506 of SEQ ID NO: 317358
cuggaauucuuagagauuu

SEQ ID NO: 484698 - RNA, 19 nt, Artificial Sequence
  Description of Artificial Sequence: Synthetic oligonucleotide
  Antisense Strand to SEQ ID NO: 484697
aaaucucuaagaauuccag

SEQ ID NO: 484699 - RNA, 19 nt, Artificial Sequence
  Description of Artificial Sequence: Synthetic oligonucleotide
  Sense strand starting at position 3545 of SEQ ID NO: 317358
uguugaaagcuacaacaau

SEQ ID NO: 484700 - RNA, 19 nt, Artificial Sequence
  Description of Artificial Sequence: Synthetic oligonucleotide
  Antisense Strand to SEQ ID NO: 484699
auuguuguagcuuucaaca

SEQ ID NO: 484701 - RNA, 19 nt, Artificial Sequence
  Description of Artificial Sequence: Synthetic oligonucleotide
  Sense strand starting at position 3599 of SEQ ID NO: 317358
gucauagugauggacaagu

SEQ ID NO: 484702 - RNA, 19 nt, Artificial Sequence
  Description of Artificial Sequence: Synthetic oligonucleotide
  Antisense Strand to SEQ ID NO: 484701
acuuguccaucacuaugac

SEQ ID NO: 484703 - RNA, 19 nt, Artificial Sequence
  Description of Artificial Sequence: Synthetic oligonucleotide
  Sense strand starting at position 3802 of SEQ ID NO: 317358
uagggaaucccaugggcau

SEQ ID NO: 484704 - RNA, 19 nt, Artificial Sequence
  Description of Artificial Sequence: Synthetic oligonucleotide
  Antisense Strand to SEQ ID NO: 484703
augcccaugggauucccua

SEQ ID NO: 484705 - RNA, 19 nt, Artificial Sequence
  Description of Artificial Sequence: Synthetic oligonucleotide
  Sense strand starting at position 3803 of SEQ ID NO: 317358
agggaaucccaugggcauu

SEQ ID NO: 484706 - RNA, 19 nt, Artificial Sequence
  Description of Artificial Sequence: Synthetic oligonucleotide
  Antisense Strand to SEQ ID NO: 484705
aaugcccaugggauucccu

SEQ ID NO: 484707 - RNA, 19 nt, Artificial Sequence
  Description of Artificial Sequence: Synthetic oligonucleotide
  Sense strand starting at position 3804 of SEQ ID NO: 317358
gggaaucccaugggcauua

SEQ ID NO: 484708 - RNA, 19 nt, Artificial Sequence
  Description of Artificial Sequence: Synthetic oligonucleotide
  Antisense Strand to SEQ ID NO: 484707
uaaugcccaugggauuccc

SEQ ID NO: 484709 - RNA, 19 nt, Artificial Sequence
  Description of Artificial Sequence: Synthetic oligonucleotide
  Sense strand starting at position 92 of SEQ ID NO: 317359
agaucaaucuacguauaau

SEQ ID NO: 484710 - RNA, 19 nt, Artificial Sequence
  Description of Artificial Sequence: Synthetic oligonucleotide
  Antisense Strand to SEQ ID NO: 484709
auuauacguagauugaucu

SEQ ID NO: 484711 - RNA, 19 nt, Artificial Sequence
  Description of Artificial Sequence: Synthetic oligonucleotide
  Sense strand starting at position 95 of SEQ ID NO: 317359
ucaaucuacguauaauguu

SEQ ID NO: 484712 - RNA, 19 nt, Artificial Sequence
  Description of Artificial Sequence: Synthetic oligonucleotide
  Antisense Strand to SEQ ID NO: 484711
aacauuauacguagauuga

SEQ ID NO: 484713 - RNA, 19 nt, Artificial Sequence
  Description of Artificial Sequence: Synthetic oligonucleotide
  Sense strand starting at position 348 of SEQ ID NO: 317359
aagucaaagcacugaguua

SEQ ID NO: 484714 - RNA, 19 nt, Artificial Sequence
  Description of Artificial Sequence: Synthetic oligonucleotide
  Antisense Strand to SEQ ID NO: 484713
uaacucagugcuuugacuu

SEQ ID NO: 484715 - RNA, 19 nt, Artificial Sequence
  Description of Artificial Sequence: Synthetic oligonucleotide
  Sense strand starting at position 501 of SEQ ID NO: 317359
uacaaagagguaugauguu

SEQ ID NO: 484716 - RNA, 19 nt, Artificial Sequence
  Description of Artificial Sequence: Synthetic oligonucleotide
  Antisense Strand to SEQ ID NO: 484715
aacaucauaccucuuugua

SEQ ID NO: 484717 - RNA, 19 nt, Artificial Sequence
  Description of Artificial Sequence: Synthetic oligonucleotide
  Sense strand starting at position 507 of SEQ ID NO: 317359
gagguaugauguuuaacug

SEQ ID NO: 484718 - RNA, 19 nt, Artificial Sequence
  Description of Artificial Sequence: Synthetic oligonucleotide
  Antisense Strand to SEQ ID NO: 484717
caguuaaacaucauaccuc

SEQ ID NO: 484719 - RNA, 19 nt, Artificial Sequence
  Description of Artificial Sequence: Synthetic oligonucleotide
  Sense strand starting at position 537 of SEQ ID NO: 317359
uuugaagcuuguucuuaaa

SEQ ID NO: 484720 - RNA, 19 nt, Artificial Sequence
  Description of Artificial Sequence: Synthetic oligonucleotide
  Antisense Strand to SEQ ID NO: 484719
uuuaagaacaagcuucaaa

SEQ ID NO: 484721 - RNA, 19 nt, Artificial Sequence
  Description of Artificial Sequence: Synthetic oligonucleotide
  Sense strand starting at position 710 of SEQ ID NO: 317359
uuagaaucuuagucucaag

SEQ ID NO: 484722 - RNA, 19 nt, Artificial Sequence
  Description of Artificial Sequence: Synthetic oligonucleotide
  Antisense Strand to SEQ ID NO: 484721
cuugagacuaagauucuaa

SEQ ID NO: 484723 - RNA, 19 nt, Artificial Sequence
  Description of Artificial Sequence: Synthetic oligonucleotide
  Sense strand starting at position 745 of SEQ ID NO: 317359
cccugaaugccucauguaa

SEQ ID NO: 484724 - RNA, 19 nt, Artificial Sequence
  Description of Artificial Sequence: Synthetic oligonucleotide
  Antisense Strand to SEQ ID NO: 484723
uuacaugaggcauucaggg

SEQ ID NO: 484725 - RNA, 19 nt, Artificial Sequence
  Description of Artificial Sequence: Synthetic oligonucleotide
  Sense strand starting at position 837 of SEQ ID NO: 317359
caggguggcaugugauaau

SEQ ID NO: 484726 - RNA, 19 nt, Artificial Sequence
  Description of Artificial Sequence: Synthetic oligonucleotide
  Antisense Strand to SEQ ID NO: 484725
auuaucacaugccacccug

SEQ ID NO: 484727 - RNA, 19 nt, Artificial Sequence
  Description of Artificial Sequence: Synthetic oligonucleotide
  Sense strand starting at position 875 of SEQ ID NO: 317359
ggaagugugcgagccguua

SEQ ID NO: 484728 - RNA, 19 nt, Artificial Sequence
  Description of Artificial Sequence: Synthetic oligonucleotide
  Antisense Strand to SEQ ID NO: 484727
uaacggcucgcacacuucc

SEQ ID NO: 484729 - RNA, 19 nt, Artificial Sequence
  Description of Artificial Sequence: Synthetic oligonucleotide
  Sense strand starting at position 879 of SEQ ID NO: 317359
gugugcgagccguuaucuu

SEQ ID NO: 484730 - RNA, 19 nt, Artificial Sequence
  Description of Artificial Sequence: Synthetic oligonucleotide
  Antisense Strand to SEQ ID NO: 484729
aagauaacggcucgcacac

SEQ ID NO: 484731 - RNA, 19 nt, Artificial Sequence
  Description of Artificial Sequence: Synthetic oligonucleotide
  Sense strand starting at position 886 of SEQ ID NO: 317359
agccguuaucuuucuggca

SEQ ID NO: 484732 - RNA, 19 nt, Artificial Sequence
  Description of Artificial Sequence: Synthetic oligonucleotide
  Antisense Strand to SEQ ID NO: 484731
ugccagaaagauaacggcu

SEQ ID NO: 484733 - RNA, 19 nt, Artificial Sequence
  Description of Artificial Sequence: Synthetic oligonucleotide
  Sense strand starting at position 1037 of SEQ ID NO: 317359
ugcaguuuccggcugccaa

SEQ ID NO: 484734 - RNA, 19 nt, Artificial Sequence
  Description of Artificial Sequence: Synthetic oligonucleotide
  Antisense Strand to SEQ ID NO: 484733
uuggcagccggaaacugca

SEQ ID NO: 484735 - RNA, 19 nt, Artificial Sequence
  Description of Artificial Sequence: Synthetic oligonucleotide
  Sense strand starting at position 1104 of SEQ ID NO: 317359
aagcaagugucaccagaua

SEQ ID NO: 484736 - RNA, 19 nt, Artificial Sequence
  Description of Artificial Sequence: Synthetic oligonucleotide
  Antisense Strand to SEQ ID NO: 484735
uaucuggugacacuugcuu

SEQ ID NO: 484737 - RNA, 19 nt, Artificial Sequence
  Description of Artificial Sequence: Synthetic oligonucleotide
  Sense strand starting at position 1122 of SEQ ID NO: 317359
accgccuucuacuugagaa

SEQ ID NO: 484738 - RNA, 19 nt, Artificial Sequence
  Description of Artificial Sequence: Synthetic oligonucleotide
  Antisense Strand to SEQ ID NO: 484737
uucucaaguagaaggcggu

SEQ ID NO: 484739 - RNA, 19 nt, Artificial Sequence
  Description of Artificial Sequence: Synthetic oligonucleotide
  Sense strand starting at position 1124 of SEQ ID NO: 317359
cgccuucuacuugagaaau

SEQ ID NO: 484740 - RNA, 19 nt, Artificial Sequence
  Description of Artificial Sequence: Synthetic oligonucleotide
  Antisense Strand to SEQ ID NO: 484739
auuucucaaguagaaggcg

SEQ ID NO: 484741 - RNA, 19 nt, Artificial Sequence
  Description of Artificial Sequence: Synthetic oligonucleotide
  Sense strand starting at position 1347 of SEQ ID NO: 317359
cucagauucgcgccgaaca

SEQ ID NO: 484742 - RNA, 19 nt, Artificial Sequence
  Description of Artificial Sequence: Synthetic oligonucleotide
  Antisense Strand to SEQ ID NO: 484741
uguucggcgcgaaucugag

SEQ ID NO: 484743 - RNA, 19 nt, Artificial Sequence
  Description of Artificial Sequence: Synthetic oligonucleotide
  Sense strand starting at position 1886 of SEQ ID NO: 317359
augcuccucccggauauaa

SEQ ID NO: 484744 - RNA, 19 nt, Artificial Sequence
  Description of Artificial Sequence: Synthetic oligonucleotide
  Antisense Strand to SEQ ID NO: 484743
uuauauccgggaggagcau

SEQ ID NO: 484745 - RNA, 19 nt, Artificial Sequence
  Description of Artificial Sequence: Synthetic oligonucleotide
  Sense strand starting at position 1888 of SEQ ID NO: 317359
gcuccucccggauauaaag

SEQ ID NO: 484746 - RNA, 19 nt, Artificial Sequence
  Description of Artificial Sequence: Synthetic oligonucleotide
  Antisense Strand to SEQ ID NO: 484745
cuuuauauccgggaggagc

SEQ ID NO: 484747 - RNA, 19 nt, Artificial Sequence
  Description of Artificial Sequence: Synthetic oligonucleotide
  Sense strand starting at position 1987 of SEQ ID NO: 317359
uuauucucuccgccgcaaa

SEQ ID NO: 484748 - RNA, 19 nt, Artificial Sequence
  Description of Artificial Sequence: Synthetic oligonucleotide
  Antisense Strand to SEQ ID NO: 484747
uuugcggcggagagaauaa

SEQ ID NO: 484749 - RNA, 19 nt, Artificial Sequence
  Description of Artificial Sequence: Synthetic oligonucleotide
  Sense strand starting at position 2556 of SEQ ID NO: 317359
uuucgugaucuugaugaaa

SEQ ID NO: 484750 - RNA, 19 nt, Artificial Sequence
  Description of Artificial Sequence: Synthetic oligonucleotide
  Antisense Strand to SEQ ID NO: 484749
uuucaucaagaucacgaaa

SEQ ID NO: 484751 - RNA, 19 nt, Artificial Sequence
  Description of Artificial Sequence: Synthetic oligonucleotide
  Sense strand starting at position 2559 of SEQ ID NO: 317359
cgugaucuugaugaaacca

SEQ ID NO: 484752 - RNA, 19 nt, Artificial Sequence
  Description of Artificial Sequence: Synthetic oligonucleotide
  Antisense Strand to SEQ ID NO: 484751
ugguuucaucaagaucacg

SEQ ID NO: 484753 - RNA, 19 nt, Artificial Sequence
  Description of Artificial Sequence: Synthetic oligonucleotide
  Sense strand starting at position 2745 of SEQ ID NO: 317359
cgcagaucagaggaauguu

SEQ ID NO: 484754 - RNA, 19 nt, Artificial Sequence
  Description of Artificial Sequence: Synthetic oligonucleotide
  Antisense Strand to SEQ ID NO: 484753
aacauuccucugaucugcg

SEQ ID NO: 484755 - RNA, 19 nt, Artificial Sequence
  Description of Artificial Sequence: Synthetic oligonucleotide
  Sense strand starting at position 2802 of SEQ ID NO: 317359
gugugaugucaacagguuu

SEQ ID NO: 484756 - RNA, 19 nt, Artificial Sequence
  Description of Artificial Sequence: Synthetic oligonucleotide
  Antisense Strand to SEQ ID NO: 484755
aaaccuguugacaucacac

SEQ ID NO: 484757 - RNA, 19 nt, Artificial Sequence
  Description of Artificial Sequence: Synthetic oligonucleotide
  Sense strand starting at position 2835 of SEQ ID NO: 317359
ugguguuugaggcaaaguu

SEQ ID NO: 484758 - RNA, 19 nt, Artificial Sequence
  Description of Artificial Sequence: Synthetic oligonucleotide
  Antisense Strand to SEQ ID NO: 484757
aacuuugccucaaacacca

SEQ ID NO: 484759 - RNA, 19 nt, Artificial Sequence
  Description of Artificial Sequence: Synthetic oligonucleotide
  Sense strand starting at position 2848 of SEQ ID NO: 317359
aaaguuuguaucuggugga

SEQ ID NO: 484760 - RNA, 19 nt, Artificial Sequence
  Description of Artificial Sequence: Synthetic oligonucleotide
  Antisense Strand to SEQ ID NO: 484759
uccaccagauacaaacuuu

SEQ ID NO: 484761 - RNA, 19 nt, Artificial Sequence
  Description of Artificial Sequence: Synthetic oligonucleotide
  Sense strand starting at position 2852 of SEQ ID NO: 317359
uuuguaucugguggauaua

SEQ ID NO: 484762 - RNA, 19 nt, Artificial Sequence
  Description of Artificial Sequence: Synthetic oligonucleotide
  Antisense Strand to SEQ ID NO: 484761
uauauccaccagauacaaa

SEQ ID NO: 484763 - RNA, 19 nt, Artificial Sequence
  Description of Artificial Sequence: Synthetic oligonucleotide
  Sense strand starting at position 2863 of SEQ ID NO: 317359
uggauauagugguucaagu

SEQ ID NO: 484764 - RNA, 19 nt, Artificial Sequence
  Description of Artificial Sequence: Synthetic oligonucleotide
  Antisense Strand to SEQ ID NO: 484763
acuugaaccacuauaucca

SEQ ID NO: 484765 - RNA, 19 nt, Artificial Sequence
  Description of Artificial Sequence: Synthetic oligonucleotide
  Sense strand starting at position 2902 of SEQ ID NO: 317359
acuguuagauggcugugaa

SEQ ID NO: 484766 - RNA, 19 nt, Artificial Sequence
  Description of Artificial Sequence: Synthetic oligonucleotide
  Antisense Strand to SEQ ID NO: 484765
uucacagccaucuaacagu

SEQ ID NO: 484767 - RNA, 19 nt, Artificial Sequence
  Description of Artificial Sequence: Synthetic oligonucleotide
  Sense strand starting at position 2905 of SEQ ID NO: 317359
guuagauggcugugaaagg

SEQ ID NO: 484768 - RNA, 19 nt, Artificial Sequence
  Description of Artificial Sequence: Synthetic oligonucleotide
  Antisense Strand to SEQ ID NO: 484767
ccuuucacagccaucuaac

SEQ ID NO: 484769 - RNA, 19 nt, Artificial Sequence
  Description of Artificial Sequence: Synthetic oligonucleotide
  Sense strand starting at position 3108 of SEQ ID NO: 317359
agacuaaacugucuauuga

SEQ ID NO: 484770 - RNA, 19 nt, Artificial Sequence
  Description of Artificial Sequence: Synthetic oligonucleotide
  Antisense Strand to SEQ ID NO: 484769
ucaauagacaguuuagucu

SEQ ID NO: 484771 - RNA, 19 nt, Artificial Sequence
  Description of Artificial Sequence: Synthetic oligonucleotide
  Sense strand starting at position 3133 of SEQ ID NO: 317359
ggcugaucauggccucaaa

SEQ ID NO: 484772 - RNA, 19 nt, Artificial Sequence
  Description of Artificial Sequence: Synthetic oligonucleotide
  Antisense Strand to SEQ ID NO: 484771
uuugaggccaugaucagcc

SEQ ID NO: 484773 - RNA, 19 nt, Artificial Sequence
  Description of Artificial Sequence: Synthetic oligonucleotide
  Sense strand starting at position 3165 of SEQ ID NO: 317359
uugucucuugucuauuaua

SEQ ID NO: 484774 - RNA, 19 nt, Artificial Sequence
  Description of Artificial Sequence: Synthetic oligonucleotide
  Antisense Strand to SEQ ID NO: 484773
uauaauagacaagagacaa

SEQ ID NO: 484775 - RNA, 19 nt, Artificial Sequence
  Description of Artificial Sequence: Synthetic oligonucleotide
  Sense strand starting at position 3418 of SEQ ID NO: 317359
gcauucacgugacuaagga

SEQ ID NO: 484776 - RNA, 19 nt, Artificial Sequence
  Description of Artificial Sequence: Synthetic oligonucleotide
  Antisense Strand to SEQ ID NO: 484775
uccuuagucacgugaaugc

SEQ ID NO: 484777 - RNA, 19 nt, Artificial Sequence
  Description of Artificial Sequence: Synthetic oligonucleotide
  Sense strand starting at position 3655 of SEQ ID NO: 317359
gcugaaggauugucauaug

SEQ ID NO: 484778 - RNA, 19 nt, Artificial Sequence
  Description of Artificial Sequence: Synthetic oligonucleotide
  Antisense Strand to SEQ ID NO: 484777
cauaugacaauccuucagc

SEQ ID NO: 484779 - RNA, 19 nt, Artificial Sequence
  Description of Artificial Sequence: Synthetic oligonucleotide
  Sense strand starting at position 3744 of SEQ ID NO: 317359
agaggaagguuucugugga

SEQ ID NO: 484780 - RNA, 19 nt, Artificial Sequence
  Description of Artificial Sequence: Synthetic oligonucleotide
  Antisense Strand to SEQ ID NO: 484779
uccacagaaaccuuccucu

SEQ ID NO: 484781 - RNA, 19 nt, Artificial Sequence
  Description of Artificial Sequence: Synthetic oligonucleotide
  Sense strand starting at position 3749 of SEQ ID NO: 317359
aagguuucuguggaauuau

SEQ ID NO: 484782 - RNA, 19 nt, Artificial Sequence
  Description of Artificial Sequence: Synthetic oligonucleotide
  Antisense Strand to SEQ ID NO: 484781
auaauuccacagaaaccuu

SEQ ID NO: 484783 - RNA, 19 nt, Artificial Sequence
  Description of Artificial Sequence: Synthetic oligonucleotide
  Sense strand starting at position 3772 of SEQ ID NO: 317359
cauggcugccuuggaagau

SEQ ID NO: 484784 - RNA, 19 nt, Artificial Sequence
  Description of Artificial Sequence: Synthetic oligonucleotide
  Antisense Strand to SEQ ID NO: 484783
aucuuccaaggcagccaug

SEQ ID NO: 484785 - RNA, 19 nt, Artificial Sequence
  Description of Artificial Sequence: Synthetic oligonucleotide
  Sense strand starting at position 3778 of SEQ ID NO: 317359
ugccuuggaagauagugau

SEQ ID NO: 484786 - RNA, 19 nt, Artificial Sequence
  Description of Artificial Sequence: Synthetic oligonucleotide
  Antisense Strand to SEQ ID NO: 484785
aucacuaucuuccaaggca

SEQ ID NO: 484787 - RNA, 19 nt, Artificial Sequence
  Description of Artificial Sequence: Synthetic oligonucleotide
  Sense strand starting at position 3953 of SEQ ID NO: 317359
cagaauuauguugaugcua

SEQ ID NO: 484788 - RNA, 19 nt, Artificial Sequence
  Description of Artificial Sequence: Synthetic oligonucleotide
  Antisense Strand to SEQ ID NO: 484787
uagcaucaacauaauucug

SEQ ID NO: 484789 - RNA, 19 nt, Artificial Sequence
  Description of Artificial Sequence: Synthetic oligonucleotide
  Sense strand starting at position 1 of SEQ ID NO: 317360
gucaaucucauuggguaag

SEQ ID NO: 484790 - RNA, 19 nt, Artificial Sequence
  Description of Artificial Sequence: Synthetic oligonucleotide
  Antisense Strand to SEQ ID NO: 484789
cuuacccaaugagauugac

SEQ ID NO: 484791 - RNA, 19 nt, Artificial Sequence
  Description of Artificial Sequence: Synthetic oligonucleotide
  Sense strand starting at position 13 of SEQ ID NO: 317360
ggguaaggugucuaaugua

SEQ ID NO: 484792 - RNA, 19 nt, Artificial Sequence
  Description of Artificial Sequence: Synthetic oligonucleotide
  Antisense Strand to SEQ ID NO: 484791
uacauuagacaccuuaccc

SEQ ID NO: 484793 - RNA, 19 nt, Artificial Sequence
  Description of Artificial Sequence: Synthetic oligonucleotide
  Sense strand starting at position 141 of SEQ ID NO: 317360
uuaacauggcugggacuau

SEQ ID NO: 484794 - RNA, 19 nt, Artificial Sequence
  Description of Artificial Sequence: Synthetic oligonucleotide
  Antisense Strand to SEQ ID NO: 484793
auagucccagccauguuaa

SEQ ID NO: 484795 - RNA, 19 nt, Artificial Sequence
  Description of Artificial Sequence: Synthetic oligonucleotide
  Sense strand starting at position 263 of SEQ ID NO: 317360
augagaguuucucugucau

SEQ ID NO: 484796 - RNA, 19 nt, Artificial Sequence
  Description of Artificial Sequence: Synthetic oligonucleotide
  Antisense Strand to SEQ ID NO: 484795
augacagagaaacucucau

SEQ ID NO: 484797 - RNA, 19 nt, Artificial Sequence
  Description of Artificial Sequence: Synthetic oligonucleotide
  Sense strand starting at position 274 of SEQ ID NO: 317360
ucugucaucuuacuugaca

SEQ ID NO: 484798 - RNA, 19 nt, Artificial Sequence
  Description of Artificial Sequence: Synthetic oligonucleotide
  Antisense Strand to SEQ ID NO: 484797
ugucaaguaagaugacaga

SEQ ID NO: 484799 - RNA, 19 nt, Artificial Sequence
  Description of Artificial Sequence: Synthetic oligonucleotide
  Sense strand starting at position 289 of SEQ ID NO: 317360
gacagugugggauacaguu

SEQ ID NO: 484800 - RNA, 19 nt, Artificial Sequence
  Description of Artificial Sequence: Synthetic oligonucleotide
  Antisense Strand to SEQ ID NO: 484799
aacuguaucccacacuguc

SEQ ID NO: 484801 - RNA, 19 nt, Artificial Sequence
  Description of Artificial Sequence: Synthetic oligonucleotide
  Sense strand starting at position 291 of SEQ ID NO: 317360
cagugugggauacaguuaa

SEQ ID NO: 484802 - RNA, 19 nt, Artificial Sequence
  Description of Artificial Sequence: Synthetic oligonucleotide
  Antisense Strand to SEQ ID NO: 484801
uuaacuguaucccacacug

SEQ ID NO: 484803 - RNA, 19 nt, Artificial Sequence
  Description of Artificial Sequence: Synthetic oligonucleotide
  Sense strand starting at position 425 of SEQ ID NO: 317360
aggcacacuuccuuugaau

SEQ ID NO: 484804 - RNA, 19 nt, Artificial Sequence
  Description of Artificial Sequence: Synthetic oligonucleotide
  Antisense Strand to SEQ ID NO: 484803
auucaaaggaagugugccu

SEQ ID NO: 484805 - RNA, 19 nt, Artificial Sequence
  Description of Artificial Sequence: Synthetic oligonucleotide
  Sense strand starting at position 427 of SEQ ID NO: 317360
gcacacuuccuuugaauga

SEQ ID NO: 484806 - RNA, 19 nt, Artificial Sequence
  Description of Artificial Sequence: Synthetic oligonucleotide
  Antisense Strand to SEQ ID NO: 484805
ucauucaaaggaagugugc

SEQ ID NO: 484807 - RNA, 19 nt, Artificial Sequence
  Description of Artificial Sequence: Synthetic oligonucleotide
  Sense strand starting at position 431 of SEQ ID NO: 317360
acuuccuuugaaugaaguu

SEQ ID NO: 484808 - RNA, 19 nt, Artificial Sequence
  Description of Artificial Sequence: Synthetic oligonucleotide
  Antisense Strand to SEQ ID NO: 484807
aacuucauucaaaggaagu

SEQ ID NO: 484809 - RNA, 19 nt, Artificial Sequence
  Description of Artificial Sequence: Synthetic oligonucleotide
  Sense strand starting at position 525 of SEQ ID NO: 317360
gagagcuguagucagaaac

SEQ ID NO: 484810 - RNA, 19 nt, Artificial Sequence
  Description of Artificial Sequence: Synthetic oligonucleotide
  Antisense Strand to SEQ ID NO: 484809
guuucugacuacagcucuc

SEQ ID NO: 484811 - RNA, 19 nt, Artificial Sequence
  Description of Artificial Sequence: Synthetic oligonucleotide
  Sense strand starting at position 579 of SEQ ID NO: 317360
acugaauauuguucuaaug

SEQ ID NO: 484812 - RNA, 19 nt, Artificial Sequence
  Description of Artificial Sequence: Synthetic oligonucleotide
  Antisense Strand to SEQ ID NO: 484811
cauuagaacaauauucagu

SEQ ID NO: 484813 - RNA, 19 nt, Artificial Sequence
  Description of Artificial Sequence: Synthetic oligonucleotide
  Sense strand starting at position 590 of SEQ ID NO: 317360
uucuaauggcauugacgaa

SEQ ID NO: 484814 - RNA, 19 nt, Artificial Sequence
  Description of Artificial Sequence: Synthetic oligonucleotide
  Antisense Strand to SEQ ID NO: 484813
uucgucaaugccauuagaa

SEQ ID NO: 484815 - RNA, 19 nt, Artificial Sequence
  Description of Artificial Sequence: Synthetic oligonucleotide
  Sense strand starting at position 594 of SEQ ID NO: 317360
aauggcauugacgaaucua

SEQ ID NO: 484816 - RNA, 19 nt, Artificial Sequence
  Description of Artificial Sequence: Synthetic oligonucleotide
  Antisense Strand to SEQ ID NO: 484815
uagauucgucaaugccauu

SEQ ID NO: 484817 - RNA, 19 nt, Artificial Sequence
  Description of Artificial Sequence: Synthetic oligonucleotide
  Sense strand starting at position 636 of SEQ ID NO: 317360
agcccaaaugagcaaugua

SEQ ID NO: 484818 - RNA, 19 nt, Artificial Sequence
  Description of Artificial Sequence: Synthetic oligonucleotide
  Antisense Strand to SEQ ID NO: 484817
uacauugcucauuugggcu

SEQ ID NO: 484819 - RNA, 19 nt, Artificial Sequence
  Description of Artificial Sequence: Synthetic oligonucleotide
  Sense strand starting at position 790 of SEQ ID NO: 317360
agcccaguguucuugauuu

SEQ ID NO: 484820 - RNA, 19 nt, Artificial Sequence
  Description of Artificial Sequence: Synthetic oligonucleotide
  Antisense Strand to SEQ ID NO: 484819
aaaucaagaacacugggcu

SEQ ID NO: 484821 - RNA, 19 nt, Artificial Sequence
  Description of Artificial Sequence: Synthetic oligonucleotide
  Sense strand starting at position 891 of SEQ ID NO: 317360
cagugucaaguuggaaaga

SEQ ID NO: 484822 - RNA, 19 nt, Artificial Sequence
  Description of Artificial Sequence: Synthetic oligonucleotide
  Antisense Strand to SEQ ID NO: 484821
ucuuuccaacuugacacug

SEQ ID NO: 484823 - RNA, 19 nt, Artificial Sequence
  Description of Artificial Sequence: Synthetic oligonucleotide
  Sense strand starting at position 1128 of SEQ ID NO: 317360
uuccucuggugacuuauua

SEQ ID NO: 484824 - RNA, 19 nt, Artificial Sequence
  Description of Artificial Sequence: Synthetic oligonucleotide
  Antisense Strand to SEQ ID NO: 484823
uaauaagucaccagaggaa

SEQ ID NO: 484825 - RNA, 19 nt, Artificial Sequence
  Description of Artificial Sequence: Synthetic oligonucleotide
  Sense strand starting at position 1248 of SEQ ID NO: 317360
gucgcuggccaagagaaau

SEQ ID NO: 484826 - RNA, 19 nt, Artificial Sequence
  Description of Artificial Sequence: Synthetic oligonucleotide
  Antisense Strand to SEQ ID NO: 484825
auuucucuuggccagcgac

SEQ ID NO: 484827 - RNA, 19 nt, Artificial Sequence
  Description of Artificial Sequence: Synthetic oligonucleotide
  Sense strand starting at position 1331 of SEQ ID NO: 317360
agagaaucugccugacuca

SEQ ID NO: 484828 - RNA, 19 nt, Artificial Sequence
  Description of Artificial Sequence: Synthetic oligonucleotide
  Antisense Strand to SEQ ID NO: 484827
ugagucaggcagauucucu

SEQ ID NO: 484829 - RNA, 19 nt, Artificial Sequence
  Description of Artificial Sequence: Synthetic oligonucleotide
  Sense strand starting at position 1457 of SEQ ID NO: 317360
cugugauggguuuagggau

SEQ ID NO: 484830 - RNA, 19 nt, Artificial Sequence
  Description of Artificial Sequence: Synthetic oligonucleotide
  Antisense Strand to SEQ ID NO: 484829
aucccuaaacccaucacag

SEQ ID NO: 484831 - RNA, 19 nt, Artificial Sequence
  Description of Artificial Sequence: Synthetic oligonucleotide
  Sense strand starting at position 1470 of SEQ ID NO: 317360
agggauguguuccucucaa

SEQ ID NO: 484832 - RNA, 19 nt, Artificial Sequence
  Description of Artificial Sequence: Synthetic oligonucleotide
  Antisense Strand to SEQ ID NO: 484831
uugagaggaacacaucccu

SEQ ID NO: 484833 - RNA, 19 nt, Artificial Sequence
  Description of Artificial Sequence: Synthetic oligonucleotide
  Sense strand starting at position 1611 of SEQ ID NO: 317360
gggacuuagcagugaggga

SEQ ID NO: 484834 - RNA, 19 nt, Artificial Sequence
  Description of Artificial Sequence: Synthetic oligonucleotide
  Antisense Strand to SEQ ID NO: 484833
ucccucacugcuaaguccc

SEQ ID NO: 484835 - RNA, 19 nt, Artificial Sequence
  Description of Artificial Sequence: Synthetic oligonucleotide
  Sense strand starting at position 2382 of SEQ ID NO: 317360
gcagcuccugcauauuuau

SEQ ID NO: 484836 - RNA, 19 nt, Artificial Sequence
  Description of Artificial Sequence: Synthetic oligonucleotide
  Antisense Strand to SEQ ID NO: 484835
auaaauaugcaggagcugc

SEQ ID NO: 484837 - RNA, 19 nt, Artificial Sequence
  Description of Artificial Sequence: Synthetic oligonucleotide
  Sense strand starting at position 2529 of SEQ ID NO: 317360
gcgagccugcgauccauau

SEQ ID NO: 484838 - RNA, 19 nt, Artificial Sequence
  Description of Artificial Sequence: Synthetic oligonucleotide
  Antisense Strand to SEQ ID NO: 484837
auauggaucgcaggcucgc

SEQ ID NO: 484839 - RNA, 19 nt, Artificial Sequence
  Description of Artificial Sequence: Synthetic oligonucleotide
  Sense strand starting at position 2948 of SEQ ID NO: 317360
gccauaacacaguauuaag

SEQ ID NO: 484840 - RNA, 19 nt, Artificial Sequence
  Description of Artificial Sequence: Synthetic oligonucleotide
  Antisense Strand to SEQ ID NO: 484839
cuuaauacuguguuauggc

SEQ ID NO: 484841 - RNA, 19 nt, Artificial Sequence
  Description of Artificial Sequence: Synthetic oligonucleotide
  Sense strand starting at position 2997 of SEQ ID NO: 317360
aagauaacgugguugucaa

SEQ ID NO: 484842 - RNA, 19 nt, Artificial Sequence
  Description of Artificial Sequence: Synthetic oligonucleotide
  Antisense Strand to SEQ ID NO: 484841
uugacaaccacguuaucuu

SEQ ID NO: 484843 - RNA, 19 nt, Artificial Sequence
  Description of Artificial Sequence: Synthetic oligonucleotide
  Sense strand starting at position 3095 of SEQ ID NO: 317360
uguauuuauucuguuccua

SEQ ID NO: 484844 - RNA, 19 nt, Artificial Sequence
  Description of Artificial Sequence: Synthetic oligonucleotide
  Antisense Strand to SEQ ID NO: 484843
uaggaacagaauaaauaca

SEQ ID NO: 484845 - RNA, 19 nt, Artificial Sequence
  Description of Artificial Sequence: Synthetic oligonucleotide
  Sense strand starting at position 3155 of SEQ ID NO: 317360
auauaucagugauccagca

SEQ ID NO: 484846 - RNA, 19 nt, Artificial Sequence
  Description of Artificial Sequence: Synthetic oligonucleotide
  Antisense Strand to SEQ ID NO: 484845
ugcuggaucacugauauau

SEQ ID NO: 484847 - RNA, 19 nt, Artificial Sequence
  Description of Artificial Sequence: Synthetic oligonucleotide
  Sense strand starting at position 3259 of SEQ ID NO: 317360
uggguacugcuagagagua

SEQ ID NO: 484848 - RNA, 19 nt, Artificial Sequence
  Description of Artificial Sequence: Synthetic oligonucleotide
  Antisense Strand to SEQ ID NO: 484847
uacucucuagcaguaccca

SEQ ID NO: 484849 - RNA, 19 nt, Artificial Sequence
  Description of Artificial Sequence: Synthetic oligonucleotide
  Sense strand starting at position 3261 of SEQ ID NO: 317360
gguacugcuagagaguagu

SEQ ID NO: 484850 - RNA, 19 nt, Artificial Sequence
  Description of Artificial Sequence: Synthetic oligonucleotide
  Antisense Strand to SEQ ID NO: 484849
acuacucucuagcaguacc

SEQ ID NO: 484851 - RNA, 19 nt, Artificial Sequence
  Description of Artificial Sequence: Synthetic oligonucleotide
  Sense strand starting at position 3267 of SEQ ID NO: 317360
gcuagagaguagucacuua

SEQ ID NO: 484852 - RNA, 19 nt, Artificial Sequence
  Description of Artificial Sequence: Synthetic oligonucleotide
  Antisense Strand to SEQ ID NO: 484851
uaagugacuacucucuagc

SEQ ID NO: 484853 - RNA, 19 nt, Artificial Sequence
  Description of Artificial Sequence: Synthetic oligonucleotide
  Sense strand starting at position 3360 of SEQ ID NO: 317360
uguggacaucacugaccaa

SEQ ID NO: 484854 - RNA, 19 nt, Artificial Sequence
  Description of Artificial Sequence: Synthetic oligonucleotide
  Antisense Strand to SEQ ID NO: 484853
uuggucagugauguccaca

SEQ ID NO: 484855 - RNA, 19 nt, Artificial Sequence
  Description of Artificial Sequence: Synthetic oligonucleotide
  Sense strand starting at position 3526 of SEQ ID NO: 317360
gaaauaauuugaggacaga

SEQ ID NO: 484856 - RNA, 19 nt, Artificial Sequence
  Description of Artificial Sequence: Synthetic oligonucleotide
  Antisense Strand to SEQ ID NO: 484855
ucuguccucaaauuauuuc

SEQ ID NO: 484857 - RNA, 19 nt, Artificial Sequence
  Description of Artificial Sequence: Synthetic oligonucleotide
  Sense strand starting at position 3596 of SEQ ID NO: 317360
ccucaccagugcuuggaaa

SEQ ID NO: 484858 - RNA, 19 nt, Artificial Sequence
  Description of Artificial Sequence: Synthetic oligonucleotide
  Antisense Strand to SEQ ID NO: 484857
uuuccaagcacuggugagg

SEQ ID NO: 484859 - RNA, 19 nt, Artificial Sequence
  Description of Artificial Sequence: Synthetic oligonucleotide
  Sense strand starting at position 3662 of SEQ ID NO: 317360
cuuaguuaaugcucagaag

SEQ ID NO: 484860 - RNA, 19 nt, Artificial Sequence
  Description of Artificial Sequence: Synthetic oligonucleotide
  Antisense Strand to SEQ ID NO: 484859
cuucugagcauuaacuaag

SEQ ID NO: 484861 - RNA, 19 nt, Artificial Sequence
  Description of Artificial Sequence: Synthetic oligonucleotide
  Sense strand starting at position 3696 of SEQ ID NO: 317360
ccaaucugaugucugaaau

SEQ ID NO: 484862 - RNA, 19 nt, Artificial Sequence
  Description of Artificial Sequence: Synthetic oligonucleotide
  Antisense Strand to SEQ ID NO: 484861
auuucagacaucagauugg

SEQ ID NO: 484863 - RNA, 19 nt, Artificial Sequence
  Description of Artificial Sequence: Synthetic oligonucleotide
  Sense strand starting at position 3779 of SEQ ID NO: 317360
aacccagugcagugauaua

SEQ ID NO: 484864 - RNA, 19 nt, Artificial Sequence
  Description of Artificial Sequence: Synthetic oligonucleotide
  Antisense Strand to SEQ ID NO: 484863
uauaucacugcacuggguu

SEQ ID NO: 484865 - RNA, 19 nt, Artificial Sequence
  Description of Artificial Sequence: Synthetic oligonucleotide
  Sense strand starting at position 3790 of SEQ ID NO: 317360
gugauauaucacugggaau

SEQ ID NO: 484866 - RNA, 19 nt, Artificial Sequence
  Description of Artificial Sequence: Synthetic oligonucleotide
  Antisense Strand to SEQ ID NO: 484865
auucccagugauauaucac

SEQ ID NO: 484867 - RNA, 19 nt, Artificial Sequence
  Description of Artificial Sequence: Synthetic oligonucleotide
  Sense strand starting at position 3926 of SEQ ID NO: 317360
ggcaguuagcaagaaucag

SEQ ID NO: 484868 - RNA, 19 nt, Artificial Sequence
  Description of Artificial Sequence: Synthetic oligonucleotide
  Antisense Strand to SEQ ID NO: 484867
cugauucuugcuaacugcc

SEQ ID NO: 484869 - RNA, 19 nt, Artificial Sequence
  Description of Artificial Sequence: Synthetic oligonucleotide
  Sense strand starting at position 91 of SEQ ID NO: 317361
aucucugaaucuguaugua

SEQ ID NO: 484870 - RNA, 19 nt, Artificial Sequence
  Description of Artificial Sequence: Synthetic oligonucleotide
  Antisense Strand to SEQ ID NO: 484869
uacauacagauucagagau

SEQ ID NO: 484871 - RNA, 19 nt, Artificial Sequence
  Description of Artificial Sequence: Synthetic oligonucleotide
  Sense strand starting at position 144 of SEQ ID NO: 317361
cagguauuuguguaaugcu

SEQ ID NO: 484872 - RNA, 19 nt, Artificial Sequence
  Description of Artificial Sequence: Synthetic oligonucleotide
  Antisense Strand to SEQ ID NO: 484871
agcauuacacaaauaccug

SEQ ID NO: 484873 - RNA, 19 nt, Artificial Sequence
  Description of Artificial Sequence: Synthetic oligonucleotide
  Sense strand starting at position 151 of SEQ ID NO: 317361
uuguguaaugcuuaacaau

SEQ ID NO: 484874 - RNA, 19 nt, Artificial Sequence
  Description of Artificial Sequence: Synthetic oligonucleotide
  Antisense Strand to SEQ ID NO: 484873
auuguuaagcauuacacaa

SEQ ID NO: 484875 - RNA, 19 nt, Artificial Sequence
  Description of Artificial Sequence: Synthetic oligonucleotide
  Sense strand starting at position 205 of SEQ ID NO: 317361
guauguauauaugugacau

SEQ ID NO: 484876 - RNA, 19 nt, Artificial Sequence
  Description of Artificial Sequence: Synthetic oligonucleotide
  Antisense Strand to SEQ ID NO: 484875
augucacauauauacauac

SEQ ID NO: 484877 - RNA, 19 nt, Artificial Sequence
  Description of Artificial Sequence: Synthetic oligonucleotide
  Sense strand starting at position 283 of SEQ ID NO: 317361
uguaauaggcauuauuauc

SEQ ID NO: 484878 - RNA, 19 nt, Artificial Sequence
  Description of Artificial Sequence: Synthetic oligonucleotide
  Antisense Strand to SEQ ID NO: 484877
gauaauaaugccuauuaca

SEQ ID NO: 484879 - RNA, 19 nt, Artificial Sequence
  Description of Artificial Sequence: Synthetic oligonucleotide
  Sense strand starting at position 322 of SEQ ID NO: 317361
accaaagcucuaggaaauc

SEQ ID NO: 484880 - RNA, 19 nt, Artificial Sequence
  Description of Artificial Sequence: Synthetic oligonucleotide
  Antisense Strand to SEQ ID NO: 484879
gauuuccuagagcuuuggu

SEQ ID NO: 484881 - RNA, 19 nt, Artificial Sequence
  Description of Artificial Sequence: Synthetic oligonucleotide
  Sense strand starting at position 332 of SEQ ID NO: 317361
uaggaaaucgagugucuug

SEQ ID NO: 484882 - RNA, 19 nt, Artificial Sequence
  Description of Artificial Sequence: Synthetic oligonucleotide
  Antisense Strand to SEQ ID NO: 484881
caagacacucgauuuccua

SEQ ID NO: 484883 - RNA, 19 nt, Artificial Sequence
  Description of Artificial Sequence: Synthetic oligonucleotide
  Sense strand starting at position 335 of SEQ ID NO: 317361
gaaaucgagugucuuguca

SEQ ID NO: 484884 - RNA, 19 nt, Artificial Sequence
  Description of Artificial Sequence: Synthetic oligonucleotide
  Antisense Strand to SEQ ID NO: 484883
ugacaagacacucgauuuc

SEQ ID NO: 484885 - RNA, 19 nt, Artificial Sequence
  Description of Artificial Sequence: Synthetic oligonucleotide
  Sense strand starting at position 343 of SEQ ID NO: 317361
gugucuugucacuaagagg

SEQ ID NO: 484886 - RNA, 19 nt, Artificial Sequence
  Description of Artificial Sequence: Synthetic oligonucleotide
  Antisense Strand to SEQ ID NO: 484885
ccucuuagugacaagacac

SEQ ID NO: 484887 - RNA, 19 nt, Artificial Sequence
  Description of Artificial Sequence: Synthetic oligonucleotide
  Sense strand starting at position 443 of SEQ ID NO: 317361
acagguuuauacuugaaau

SEQ ID NO: 484888 - RNA, 19 nt, Artificial Sequence
  Description of Artificial Sequence: Synthetic oligonucleotide
  Antisense Strand to SEQ ID NO: 484887
auuucaaguauaaaccugu

SEQ ID NO: 484889 - RNA, 19 nt, Artificial Sequence
  Description of Artificial Sequence: Synthetic oligonucleotide
  Sense strand starting at position 504 of SEQ ID NO: 317361
cagugaauuccugaaggca

SEQ ID NO: 484890 - RNA, 19 nt, Artificial Sequence
  Description of Artificial Sequence: Synthetic oligonucleotide
  Antisense Strand to SEQ ID NO: 484889
ugccuucaggaauucacug

SEQ ID NO: 484891 - RNA, 19 nt, Artificial Sequence
  Description of Artificial Sequence: Synthetic oligonucleotide
  Sense strand starting at position 512 of SEQ ID NO: 317361
uccugaaggcauggauagu

SEQ ID NO: 484892 - RNA, 19 nt, Artificial Sequence
  Description of Artificial Sequence: Synthetic oligonucleotide
  Antisense Strand to SEQ ID NO: 484891
acuauccaugccuucagga

SEQ ID NO: 484893 - RNA, 19 nt, Artificial Sequence
  Description of Artificial Sequence: Synthetic oligonucleotide
  Sense strand starting at position 670 of SEQ ID NO: 317361
guuauauaaguguggcaac

SEQ ID NO: 484894 - RNA, 19 nt, Artificial Sequence
  Description of Artificial Sequence: Synthetic oligonucleotide
  Antisense Strand to SEQ ID NO: 484893
guugccacacuuauauaac

SEQ ID NO: 484895 - RNA, 19 nt, Artificial Sequence
  Description of Artificial Sequence: Synthetic oligonucleotide
  Sense strand starting at position 707 of SEQ ID NO: 317361
uguacuguacagugaguaa

SEQ ID NO: 484896 - RNA, 19 nt, Artificial Sequence
  Description of Artificial Sequence: Synthetic oligonucleotide
  Antisense Strand to SEQ ID NO: 484895
uuacucacuguacaguaca

SEQ ID NO: 484897 - RNA, 19 nt, Artificial Sequence
  Description of Artificial Sequence: Synthetic oligonucleotide
  Sense strand starting at position 853 of SEQ ID NO: 317361
cccagauugaagugcagua

SEQ ID NO: 484898 - RNA, 19 nt, Artificial Sequence
  Description of Artificial Sequence: Synthetic oligonucleotide
  Antisense Strand to SEQ ID NO: 484897
uacugcacuucaaucuggg

SEQ ID NO: 484899 - RNA, 19 nt, Artificial Sequence
  Description of Artificial Sequence: Synthetic oligonucleotide
  Sense strand starting at position 866 of SEQ ID NO: 317361
gcaguaacaugaucagaga

SEQ ID NO: 484900 - RNA, 19 nt, Artificial Sequence
  Description of Artificial Sequence: Synthetic oligonucleotide
  Antisense Strand to SEQ ID NO: 484899
ucucugaucauguuacugc

SEQ ID NO: 484901 - RNA, 19 nt, Artificial Sequence
  Description of Artificial Sequence: Synthetic oligonucleotide
  Sense strand starting at position 1167 of SEQ ID NO: 317361
acaagagaucuuggcaugu

SEQ ID NO: 484902 - RNA, 19 nt, Artificial Sequence
  Description of Artificial Sequence: Synthetic oligonucleotide
  Antisense Strand to SEQ ID NO: 484901
acaugccaagaucucuugu

SEQ ID NO: 484903 - RNA, 19 nt, Artificial Sequence
  Description of Artificial Sequence: Synthetic oligonucleotide
  Sense strand starting at position 1201 of SEQ ID NO: 317361
auaucucuuggcugucauu

SEQ ID NO: 484904 - RNA, 19 nt, Artificial Sequence
  Description of Artificial Sequence: Synthetic oligonucleotide
  Antisense Strand to SEQ ID NO: 484903
aaugacagccaagagauau

SEQ ID NO: 484905 - RNA, 19 nt, Artificial Sequence
  Description of Artificial Sequence: Synthetic oligonucleotide
  Sense strand starting at position 1221 of SEQ ID NO: 317361
uuggguaccugaguuuauu

SEQ ID NO: 484906 - RNA, 19 nt, Artificial Sequence
  Description of Artificial Sequence: Synthetic oligonucleotide
  Antisense Strand to SEQ ID NO: 484905
aauaaacucagguacccaa

SEQ ID NO: 484907 - RNA, 19 nt, Artificial Sequence
  Description of Artificial Sequence: Synthetic oligonucleotide
  Sense strand starting at position 1453 of SEQ ID NO: 317361
aagugcuaaggcuaaagaa

SEQ ID NO: 484908 - RNA, 19 nt, Artificial Sequence
  Description of Artificial Sequence: Synthetic oligonucleotide
  Antisense Strand to SEQ ID NO: 484907
uucuuuagccuuagcacuu

SEQ ID NO: 484909 - RNA, 19 nt, Artificial Sequence
  Description of Artificial Sequence: Synthetic oligonucleotide
  Sense strand starting at position 2231 of SEQ ID NO: 317361
gggcccucuucuuuacaga

SEQ ID NO: 484910 - RNA, 19 nt, Artificial Sequence
  Description of Artificial Sequence: Synthetic oligonucleotide
  Antisense Strand to SEQ ID NO: 484909
ucuguaaagaagagggccc

SEQ ID NO: 484911 - RNA, 19 nt, Artificial Sequence
  Description of Artificial Sequence: Synthetic oligonucleotide
  Sense strand starting at position 2232 of SEQ ID NO: 317361
ggcccucuucuuuacagaa

SEQ ID NO: 484912 - RNA, 19 nt, Artificial Sequence
  Description of Artificial Sequence: Synthetic oligonucleotide
  Antisense Strand to SEQ ID NO: 484911
uucuguaaagaagagggcc

SEQ ID NO: 484913 - RNA, 19 nt, Artificial Sequence
  Description of Artificial Sequence: Synthetic oligonucleotide
  Sense strand starting at position 2239 of SEQ ID NO: 317361
uucuuuacagaaugguagu

SEQ ID NO: 484914 - RNA, 19 nt, Artificial Sequence
  Description of Artificial Sequence: Synthetic oligonucleotide
  Antisense Strand to SEQ ID NO: 484913
acuaccauucuguaaagaa

SEQ ID NO: 484915 - RNA, 19 nt, Artificial Sequence
  Description of Artificial Sequence: Synthetic oligonucleotide
  Sense strand starting at position 2561 of SEQ ID NO: 317361
uuggaaauugauggucaug

SEQ ID NO: 484916 - RNA, 19 nt, Artificial Sequence
  Description of Artificial Sequence: Synthetic oligonucleotide
  Antisense Strand to SEQ ID NO: 484915
caugaccaucaauuuccaa

SEQ ID NO: 484917 - RNA, 19 nt, Artificial Sequence
  Description of Artificial Sequence: Synthetic oligonucleotide
  Sense strand starting at position 2563 of SEQ ID NO: 317361
ggaaauugauggucauguu

SEQ ID NO: 484918 - RNA, 19 nt, Artificial Sequence
  Description of Artificial Sequence: Synthetic oligonucleotide
  Antisense Strand to SEQ ID NO: 484917
aacaugaccaucaauuucc

SEQ ID NO: 484919 - RNA, 19 nt, Artificial Sequence
  Description of Artificial Sequence: Synthetic oligonucleotide
  Sense strand starting at position 2571 of SEQ ID NO: 317361
auggucauguuacaaauuu

SEQ ID NO: 484920 - RNA, 19 nt, Artificial Sequence
  Description of Artificial Sequence: Synthetic oligonucleotide
  Antisense Strand to SEQ ID NO: 484919
aaauuuguaacaugaccau

SEQ ID NO: 484921 - RNA, 19 nt, Artificial Sequence
  Description of Artificial Sequence: Synthetic oligonucleotide
  Sense strand starting at position 2639 of SEQ ID NO: 317361
uauacaugugaaugcaguu

SEQ ID NO: 484922 - RNA, 19 nt, Artificial Sequence
  Description of Artificial Sequence: Synthetic oligonucleotide
  Antisense Strand to SEQ ID NO: 484921
aacugcauucacauguaua

SEQ ID NO: 484923 - RNA, 19 nt, Artificial Sequence
  Description of Artificial Sequence: Synthetic oligonucleotide
  Sense strand starting at position 2720 of SEQ ID NO: 317361
guagaaauauauguacaca

SEQ ID NO: 484924 - RNA, 19 nt, Artificial Sequence
  Description of Artificial Sequence: Synthetic oligonucleotide
  Antisense Strand to SEQ ID NO: 484923
uguguacauauauuucuac

SEQ ID NO: 484925 - RNA, 19 nt, Artificial Sequence
  Description of Artificial Sequence: Synthetic oligonucleotide
  Sense strand starting at position 3299 of SEQ ID NO: 317361
agcacuucuugauuuaugu

SEQ ID NO: 484926 - RNA, 19 nt, Artificial Sequence
  Description of Artificial Sequence: Synthetic oligonucleotide
  Antisense Strand to SEQ ID NO: 484925
acauaaaucaagaagugcu

SEQ ID NO: 484927 - RNA, 19 nt, Artificial Sequence
  Description of Artificial Sequence: Synthetic oligonucleotide
  Sense strand starting at position 3407 of SEQ ID NO: 317361
uaguguauauauccuguga

SEQ ID NO: 484928 - RNA, 19 nt, Artificial Sequence
  Description of Artificial Sequence: Synthetic oligonucleotide
  Antisense Strand to SEQ ID NO: 484927
ucacaggauauauacacua

SEQ ID NO: 484929 - RNA, 19 nt, Artificial Sequence
  Description of Artificial Sequence: Synthetic oligonucleotide
  Sense strand starting at position 3411 of SEQ ID NO: 317361
guauauauccugugagcca

SEQ ID NO: 484930 - RNA, 19 nt, Artificial Sequence
  Description of Artificial Sequence: Synthetic oligonucleotide
  Antisense Strand to SEQ ID NO: 484929
uggcucacaggauauauac

SEQ ID NO: 484931 - RNA, 19 nt, Artificial Sequence
  Description of Artificial Sequence: Synthetic oligonucleotide
  Sense strand starting at position 3484 of SEQ ID NO: 317361
gguuuagugacagagguga

SEQ ID NO: 484932 - RNA, 19 nt, Artificial Sequence
  Description of Artificial Sequence: Synthetic oligonucleotide
  Antisense Strand to SEQ ID NO: 484931
ucaccucugucacuaaacc

SEQ ID NO: 484933 - RNA, 19 nt, Artificial Sequence
  Description of Artificial Sequence: Synthetic oligonucleotide
  Sense strand starting at position 3488 of SEQ ID NO: 317361
uagugacagaggugaucau

SEQ ID NO: 484934 - RNA, 19 nt, Artificial Sequence
  Description of Artificial Sequence: Synthetic oligonucleotide
  Antisense Strand to SEQ ID NO: 484933
augaucaccucugucacua

SEQ ID NO: 484935 - RNA, 19 nt, Artificial Sequence
  Description of Artificial Sequence: Synthetic oligonucleotide
  Sense strand starting at position 3773 of SEQ ID NO: 317361
ucagucugauauguguaca

SEQ ID NO: 484936 - RNA, 19 nt, Artificial Sequence
  Description of Artificial Sequence: Synthetic oligonucleotide
  Antisense Strand to SEQ ID NO: 484935
uguacacauaucagacuga

SEQ ID NO: 484937 - RNA, 19 nt, Artificial Sequence
  Description of Artificial Sequence: Synthetic oligonucleotide
  Sense strand starting at position 3911 of SEQ ID NO: 317361
guccauaaaucacuacgua

SEQ ID NO: 484938 - RNA, 19 nt, Artificial Sequence
  Description of Artificial Sequence: Synthetic oligonucleotide
  Antisense Strand to SEQ ID NO: 484937
uacguagugauuuauggac

SEQ ID NO: 484939 - RNA, 19 nt, Artificial Sequence
  Description of Artificial Sequence: Synthetic oligonucleotide
  Sense strand starting at position 3930 of SEQ ID NO: 317361
acuaacaugugugcauaau

SEQ ID NO: 484940 - RNA, 19 nt, Artificial Sequence
  Description of Artificial Sequence: Synthetic oligonucleotide
  Antisense Strand to SEQ ID NO: 484939
auuaugcacacauguuagu

SEQ ID NO: 484941 - RNA, 19 nt, Artificial Sequence
  Description of Artificial Sequence: Synthetic oligonucleotide
  Sense strand starting at position 3931 of SEQ ID NO: 317361
cuaacaugugugcauaaug

SEQ ID NO: 484942 - RNA, 19 nt, Artificial Sequence
  Description of Artificial Sequence: Synthetic oligonucleotide
  Antisense Strand to SEQ ID NO: 484941
cauuaugcacacauguuag

SEQ ID NO: 484943 - RNA, 19 nt, Artificial Sequence
  Description of Artificial Sequence: Synthetic oligonucleotide
  Sense strand starting at position 3939 of SEQ ID NO: 317361
ugugcauaaugaucauuga

SEQ ID NO: 484944 - RNA, 19 nt, Artificial Sequence
  Description of Artificial Sequence: Synthetic oligonucleotide
  Antisense Strand to SEQ ID NO: 484943
ucaaugaucauuaugcaca

SEQ ID NO: 484945 - RNA, 19 nt, Artificial Sequence
  Description of Artificial Sequence: Synthetic oligonucleotide
  Sense strand starting at position 3942 of SEQ ID NO: 317361
gcauaaugaucauugacca

SEQ ID NO: 484946 - RNA, 19 nt, Artificial Sequence
  Description of Artificial Sequence: Synthetic oligonucleotide
  Antisense Strand to SEQ ID NO: 484945
uggucaaugaucauuaugc

SEQ ID NO: 484947 - RNA, 19 nt, Artificial Sequence
  Description of Artificial Sequence: Synthetic oligonucleotide
  Sense strand starting at position 3982 of SEQ ID NO: 317361
auaugucagugauugauca

SEQ ID NO: 484948 - RNA, 19 nt, Artificial Sequence
  Description of Artificial Sequence: Synthetic oligonucleotide
  Antisense Strand to SEQ ID NO: 484947
ugaucaaucacugacauau

SEQ ID NO: 484949 - RNA, 19 nt, Artificial Sequence
  Description of Artificial Sequence: Synthetic oligonucleotide
  Sense strand starting at position 239 of SEQ ID NO: 317362
uugaguucucuagaugagu

SEQ ID NO: 484950 - RNA, 19 nt, Artificial Sequence
  Description of Artificial Sequence: Synthetic oligonucleotide
  Antisense Strand to SEQ ID NO: 484949
acucaucuagagaacucaa

SEQ ID NO: 484951 - RNA, 19 nt, Artificial Sequence
  Description of Artificial Sequence: Synthetic oligonucleotide
  Sense strand starting at position 244 of SEQ ID NO: 317362
uucucuagaugagugucaa

SEQ ID NO: 484952 - RNA, 19 nt, Artificial Sequence
  Description of Artificial Sequence: Synthetic oligonucleotide
  Antisense Strand to SEQ ID NO: 484951
uugacacucaucuagagaa

SEQ ID NO: 484953 - RNA, 19 nt, Artificial Sequence
  Description of Artificial Sequence: Synthetic oligonucleotide
  Sense strand starting at position 245 of SEQ ID NO: 317362
ucucuagaugagugucaaa

SEQ ID NO: 484954 - RNA, 19 nt, Artificial Sequence
  Description of Artificial Sequence: Synthetic oligonucleotide
  Antisense Strand to SEQ ID NO: 484953
uuugacacucaucuagaga

SEQ ID NO: 484955 - RNA, 19 nt, Artificial Sequence
  Description of Artificial Sequence: Synthetic oligonucleotide
  Sense strand starting at position 302 of SEQ ID NO: 317362
augaauugauugguacaca

SEQ ID NO: 484956 - RNA, 19 nt, Artificial Sequence
  Description of Artificial Sequence: Synthetic oligonucleotide
  Antisense Strand to SEQ ID NO: 484955
uguguaccaaucaauucau

SEQ ID NO: 484957 - RNA, 19 nt, Artificial Sequence
  Description of Artificial Sequence: Synthetic oligonucleotide
  Sense strand starting at position 328 of SEQ ID NO: 317362
aggaguuaguacuuguuaa

SEQ ID NO: 484958 - RNA, 19 nt, Artificial Sequence
  Description of Artificial Sequence: Synthetic oligonucleotide
  Antisense Strand to SEQ ID NO: 484957
uuaacaaguacuaacuccu

SEQ ID NO: 484959 - RNA, 19 nt, Artificial Sequence
  Description of Artificial Sequence: Synthetic oligonucleotide
  Sense strand starting at position 339 of SEQ ID NO: 317362
cuuguuaauuaguccuaga

SEQ ID NO: 484960 - RNA, 19 nt, Artificial Sequence
  Description of Artificial Sequence: Synthetic oligonucleotide
  Antisense Strand to SEQ ID NO: 484959
ucuaggacuaauuaacaag

SEQ ID NO: 484961 - RNA, 19 nt, Artificial Sequence
  Description of Artificial Sequence: Synthetic oligonucleotide
  Sense strand starting at position 344 of SEQ ID NO: 317362
uaauuaguccuagaguuag

SEQ ID NO: 484962 - RNA, 19 nt, Artificial Sequence
  Description of Artificial Sequence: Synthetic oligonucleotide
  Antisense Strand to SEQ ID NO: 484961
cuaacucuaggacuaauua

SEQ ID NO: 484963 - RNA, 19 nt, Artificial Sequence
  Description of Artificial Sequence: Synthetic oligonucleotide
  Sense strand starting at position 362 of SEQ ID NO: 317362
gcguuaguacuuguuaguu

SEQ ID NO: 484964 - RNA, 19 nt, Artificial Sequence
  Description of Artificial Sequence: Synthetic oligonucleotide
  Antisense Strand to SEQ ID NO: 484963
aacuaacaaguacuaacgc

SEQ ID NO: 484965 - RNA, 19 nt, Artificial Sequence
  Description of Artificial Sequence: Synthetic oligonucleotide
  Sense strand starting at position 382 of SEQ ID NO: 317362
guguuagucccagaguuaa

SEQ ID NO: 484966 - RNA, 19 nt, Artificial Sequence
  Description of Artificial Sequence: Synthetic oligonucleotide
  Antisense Strand to SEQ ID NO: 484965
uuaacucugggacuaacac

SEQ ID NO: 484967 - RNA, 19 nt, Artificial Sequence
  Description of Artificial Sequence: Synthetic oligonucleotide
  Sense strand starting at position 519 of SEQ ID NO: 317362
cagguagcucucuaguaau

SEQ ID NO: 484968 - RNA, 19 nt, Artificial Sequence
  Description of Artificial Sequence: Synthetic oligonucleotide
  Antisense Strand to SEQ ID NO: 484967
auuacuagagagcuaccug

SEQ ID NO: 484969 - RNA, 19 nt, Artificial Sequence
  Description of Artificial Sequence: Synthetic oligonucleotide
  Sense strand starting at position 653 of SEQ ID NO: 317362
agauuaauuuagugaacag

SEQ ID NO: 484970 - RNA, 19 nt, Artificial Sequence
  Description of Artificial Sequence: Synthetic oligonucleotide
  Antisense Strand to SEQ ID NO: 484969
cuguucacuaaauuaaucu

SEQ ID NO: 484971 - RNA, 19 nt, Artificial Sequence
  Description of Artificial Sequence: Synthetic oligonucleotide
  Sense strand starting at position 827 of SEQ ID NO: 317362
uugaaauaugcucaggcca

SEQ ID NO: 484972 - RNA, 19 nt, Artificial Sequence
  Description of Artificial Sequence: Synthetic oligonucleotide
  Antisense Strand to SEQ ID NO: 484971
uggccugagcauauuucaa

SEQ ID NO: 484973 - RNA, 19 nt, Artificial Sequence
  Description of Artificial Sequence: Synthetic oligonucleotide
  Sense strand starting at position 979 of SEQ ID NO: 317362
cccauuuguuuggcuaaua

SEQ ID NO: 484974 - RNA, 19 nt, Artificial Sequence
  Description of Artificial Sequence: Synthetic oligonucleotide
  Antisense Strand to SEQ ID NO: 484973
uauuagccaaacaaauggg

SEQ ID NO: 484975 - RNA, 19 nt, Artificial Sequence
  Description of Artificial Sequence: Synthetic oligonucleotide
  Sense strand starting at position 1027 of SEQ ID NO: 317362
ccguucuaugucuaaauag

SEQ ID NO: 484976 - RNA, 19 nt, Artificial Sequence
  Description of Artificial Sequence: Synthetic oligonucleotide
  Antisense Strand to SEQ ID NO: 484975
cuauuuagacauagaacgg

SEQ ID NO: 484977 - RNA, 19 nt, Artificial Sequence
  Description of Artificial Sequence: Synthetic oligonucleotide
  Sense strand starting at position 1129 of SEQ ID NO: 317362
acagaaagugugcauguuu

SEQ ID NO: 484978 - RNA, 19 nt, Artificial Sequence
  Description of Artificial Sequence: Synthetic oligonucleotide
  Antisense Strand to SEQ ID NO: 484977
aaacaugcacacuuucugu

SEQ ID NO: 484979 - RNA, 19 nt, Artificial Sequence
  Description of Artificial Sequence: Synthetic oligonucleotide
  Sense strand starting at position 1155 of SEQ ID NO: 317362
ggucaugaaaguuagccuu

SEQ ID NO: 484980 - RNA, 19 nt, Artificial Sequence
  Description of Artificial Sequence: Synthetic oligonucleotide
  Antisense Strand to SEQ ID NO: 484979
aaggcuaacuuucaugacc

SEQ ID NO: 484981 - RNA, 19 nt, Artificial Sequence
  Description of Artificial Sequence: Synthetic oligonucleotide
  Sense strand starting at position 1208 of SEQ ID NO: 317362
gccugucuuagucaggaaa

SEQ ID NO: 484982 - RNA, 19 nt, Artificial Sequence
  Description of Artificial Sequence: Synthetic oligonucleotide
  Antisense Strand to SEQ ID NO: 484981
uuuccugacuaagacaggc

SEQ ID NO: 484983 - RNA, 19 nt, Artificial Sequence
  Description of Artificial Sequence: Synthetic oligonucleotide
  Sense strand starting at position 1248 of SEQ ID NO: 317362
gcaauuugaggguguucca

SEQ ID NO: 484984 - RNA, 19 nt, Artificial Sequence
  Description of Artificial Sequence: Synthetic oligonucleotide
  Antisense Strand to SEQ ID NO: 484983
uggaacacccucaaauugc

SEQ ID NO: 484985 - RNA, 19 nt, Artificial Sequence
  Description of Artificial Sequence: Synthetic oligonucleotide
  Sense strand starting at position 1255 of SEQ ID NO: 317362
gaggguguuccagaucaca

SEQ ID NO: 484986 - RNA, 19 nt, Artificial Sequence
  Description of Artificial Sequence: Synthetic oligonucleotide
  Antisense Strand to SEQ ID NO: 484985
ugugaucuggaacacccuc

SEQ ID NO: 484987 - RNA, 19 nt, Artificial Sequence
  Description of Artificial Sequence: Synthetic oligonucleotide
  Sense strand starting at position 1374 of SEQ ID NO: 317362
uuugcuuucccagaaagca

SEQ ID NO: 484988 - RNA, 19 nt, Artificial Sequence
  Description of Artificial Sequence: Synthetic oligonucleotide
  Antisense Strand to SEQ ID NO: 484987
ugcuuucugggaaagcaaa

SEQ ID NO: 484989 - RNA, 19 nt, Artificial Sequence
  Description of Artificial Sequence: Synthetic oligonucleotide
  Sense strand starting at position 1534 of SEQ ID NO: 317362
agauuccugcuccaaugau

SEQ ID NO: 484990 - RNA, 19 nt, Artificial Sequence
  Description of Artificial Sequence: Synthetic oligonucleotide
  Antisense Strand to SEQ ID NO: 484989
aucauuggagcaggaaucu

SEQ ID NO: 484991 - RNA, 19 nt, Artificial Sequence
  Description of Artificial Sequence: Synthetic oligonucleotide
  Sense strand starting at position 1628 of SEQ ID NO: 317362
cuccuuguugcccagggaa

SEQ ID NO: 484992 - RNA, 19 nt, Artificial Sequence
  Description of Artificial Sequence: Synthetic oligonucleotide
  Antisense Strand to SEQ ID NO: 484991
uucccugggcaacaaggag

SEQ ID NO: 484993 - RNA, 19 nt, Artificial Sequence
  Description of Artificial Sequence: Synthetic oligonucleotide
  Sense strand starting at position 1659 of SEQ ID NO: 317362
uuaacauuucccugcaggu

SEQ ID NO: 484994 - RNA, 19 nt, Artificial Sequence
  Description of Artificial Sequence: Synthetic oligonucleotide
  Antisense Strand to SEQ ID NO: 484993
accugcagggaaauguuaa

SEQ ID NO: 484995 - RNA, 19 nt, Artificial Sequence
  Description of Artificial Sequence: Synthetic oligonucleotide
  Sense strand starting at position 1675 of SEQ ID NO: 317362
gguaaccuccuuuggagau

SEQ ID NO: 484996 - RNA, 19 nt, Artificial Sequence
  Description of Artificial Sequence: Synthetic oligonucleotide
  Antisense Strand to SEQ ID NO: 484995
aucuccaaaggagguuacc

SEQ ID NO: 484997 - RNA, 19 nt, Artificial Sequence
  Description of Artificial Sequence: Synthetic oligonucleotide
  Sense strand starting at position 1706 of SEQ ID NO: 317362
aggcuuucugaccauagua

SEQ ID NO: 484998 - RNA, 19 nt, Artificial Sequence
  Description of Artificial Sequence: Synthetic oligonucleotide
  Antisense Strand to SEQ ID NO: 484997
uacuauggucagaaagccu

SEQ ID NO: 484999 - RNA, 19 nt, Artificial Sequence
  Description of Artificial Sequence: Synthetic oligonucleotide
  Sense strand starting at position 1907 of SEQ ID NO: 317362
gaaacaccuguguaugcau

SEQ ID NO: 485000 - RNA, 19 nt, Artificial Sequence
  Description of Artificial Sequence: Synthetic oligonucleotide
  Antisense Strand to SEQ ID NO: 484999
augcauacacagguguuuc

SEQ ID NO: 485001 - RNA, 19 nt, Artificial Sequence
  Description of Artificial Sequence: Synthetic oligonucleotide
  Sense strand starting at position 1918 of SEQ ID NO: 317362
guaugcaucgugcucucaa

SEQ ID NO: 485002 - RNA, 19 nt, Artificial Sequence
  Description of Artificial Sequence: Synthetic oligonucleotide
  Antisense Strand to SEQ ID NO: 485001
uugagagcacgaugcauac

SEQ ID NO: 485003 - RNA, 19 nt, Artificial Sequence
  Description of Artificial Sequence: Synthetic oligonucleotide
  Sense strand starting at position 2010 of SEQ ID NO: 317362
uccucaugggcuuguauuu

SEQ ID NO: 485004 - RNA, 19 nt, Artificial Sequence
  Description of Artificial Sequence: Synthetic oligonucleotide
  Antisense Strand to SEQ ID NO: 485003
aaauacaagcccaugagga

SEQ ID NO: 485005 - RNA, 19 nt, Artificial Sequence
  Description of Artificial Sequence: Synthetic oligonucleotide
  Sense strand starting at position 2070 of SEQ ID NO: 317362
gaugcaaauucuccagguu

SEQ ID NO: 485006 - RNA, 19 nt, Artificial Sequence
  Description of Artificial Sequence: Synthetic oligonucleotide
  Antisense Strand to SEQ ID NO: 485005
aaccuggagaauuugcauc

SEQ ID NO: 485007 - RNA, 19 nt, Artificial Sequence
  Description of Artificial Sequence: Synthetic oligonucleotide
  Sense strand starting at position 2071 of SEQ ID NO: 317362
augcaaauucuccagguuu

SEQ ID NO: 485008 - RNA, 19 nt, Artificial Sequence
  Description of Artificial Sequence: Synthetic oligonucleotide
  Antisense Strand to SEQ ID NO: 485007
aaaccuggagaauuugcau

SEQ ID NO: 485009 - RNA, 19 nt, Artificial Sequence
  Description of Artificial Sequence: Synthetic oligonucleotide
  Sense strand starting at position 2088 of SEQ ID NO: 317362
uugcaucagccacaugaga

SEQ ID NO: 485010 - RNA, 19 nt, Artificial Sequence
  Description of Artificial Sequence: Synthetic oligonucleotide
  Antisense Strand to SEQ ID NO: 485009
ucucauguggcugaugcaa

SEQ ID NO: 485011 - RNA, 19 nt, Artificial Sequence
  Description of Artificial Sequence: Synthetic oligonucleotide
  Sense strand starting at position 2090 of SEQ ID NO: 317362
gcaucagccacaugagaag

SEQ ID NO: 485012 - RNA, 19 nt, Artificial Sequence
  Description of Artificial Sequence: Synthetic oligonucleotide
  Antisense Strand to SEQ ID NO: 485011
cuucucauguggcugaugc

SEQ ID NO: 485013 - RNA, 19 nt, Artificial Sequence
  Description of Artificial Sequence: Synthetic oligonucleotide
  Sense strand starting at position 2101 of SEQ ID NO: 317362
augagaagccuccagcauu

SEQ ID NO: 485014 - RNA, 19 nt, Artificial Sequence
  Description of Artificial Sequence: Synthetic oligonucleotide
  Antisense Strand to SEQ ID NO: 485013
aaugcuggaggcuucucau

SEQ ID NO: 485015 - RNA, 19 nt, Artificial Sequence
  Description of Artificial Sequence: Synthetic oligonucleotide
  Sense strand starting at position 2274 of SEQ ID NO: 317362
acucguagugagcaacaaa

SEQ ID NO: 485016 - RNA, 19 nt, Artificial Sequence
  Description of Artificial Sequence: Synthetic oligonucleotide
  Antisense Strand to SEQ ID NO: 485015
uuuguugcucacuacgagu

SEQ ID NO: 485017 - RNA, 19 nt, Artificial Sequence
  Description of Artificial Sequence: Synthetic oligonucleotide
  Sense strand starting at position 2392 of SEQ ID NO: 317362
gugaguagaauguauccua

SEQ ID NO: 485018 - RNA, 19 nt, Artificial Sequence
  Description of Artificial Sequence: Synthetic oligonucleotide
  Antisense Strand to SEQ ID NO: 485017
uaggauacauucuacucac

SEQ ID NO: 485019 - RNA, 19 nt, Artificial Sequence
  Description of Artificial Sequence: Synthetic oligonucleotide
  Sense strand starting at position 2395 of SEQ ID NO: 317362
aguagaauguauccuaaag

SEQ ID NO: 485020 - RNA, 19 nt, Artificial Sequence
  Description of Artificial Sequence: Synthetic oligonucleotide
  Antisense Strand to SEQ ID NO: 485019
cuuuaggauacauucuacu

SEQ ID NO: 485021 - RNA, 19 nt, Artificial Sequence
  Description of Artificial Sequence: Synthetic oligonucleotide
  Sense strand starting at position 2698 of SEQ ID NO: 317362
ucucauuagcacuagguga

SEQ ID NO: 485022 - RNA, 19 nt, Artificial Sequence
  Description of Artificial Sequence: Synthetic oligonucleotide
  Antisense Strand to SEQ ID NO: 485021
ucaccuagugcuaaugaga

SEQ ID NO: 485023 - RNA, 19 nt, Artificial Sequence
  Description of Artificial Sequence: Synthetic oligonucleotide
  Sense strand starting at position 2856 of SEQ ID NO: 317362
acagaaugguaguuauaga

SEQ ID NO: 485024 - RNA, 19 nt, Artificial Sequence
  Description of Artificial Sequence: Synthetic oligonucleotide
  Antisense Strand to SEQ ID NO: 485023
ucuauaacuaccauucugu

SEQ ID NO: 485025 - RNA, 19 nt, Artificial Sequence
  Description of Artificial Sequence: Synthetic oligonucleotide
  Sense strand starting at position 3665 of SEQ ID NO: 317362
cuucuuucccaguaagaga

SEQ ID NO: 485026 - RNA, 19 nt, Artificial Sequence
  Description of Artificial Sequence: Synthetic oligonucleotide
  Antisense Strand to SEQ ID NO: 485025
ucucuuacugggaaagaag

SEQ ID NO: 485027 - RNA, 19 nt, Artificial Sequence
  Description of Artificial Sequence: Synthetic oligonucleotide
  Sense strand starting at position 3685 of SEQ ID NO: 317362
acauauuagcucugaagaa

SEQ ID NO: 485028 - RNA, 19 nt, Artificial Sequence
  Description of Artificial Sequence: Synthetic oligonucleotide
  Antisense Strand to SEQ ID NO: 485027
uucuucagagcuaauaugu

SEQ ID NO: 485029 - RNA, 19 nt, Artificial Sequence
  Description of Artificial Sequence: Synthetic oligonucleotide
  Sense strand starting at position 7 of SEQ ID NO: 317363
gcucauauaguuuaccuau

SEQ ID NO: 485030 - RNA, 19 nt, Artificial Sequence
  Description of Artificial Sequence: Synthetic oligonucleotide
  Antisense Strand to SEQ ID NO: 485029
auagguaaacuauaugagc

SEQ ID NO: 485031 - RNA, 19 nt, Artificial Sequence
  Description of Artificial Sequence: Synthetic oligonucleotide
  Sense strand starting at position 57 of SEQ ID NO: 317363
ucauaagaacagcgaucuu

SEQ ID NO: 485032 - RNA, 19 nt, Artificial Sequence
  Description of Artificial Sequence: Synthetic oligonucleotide
  Antisense Strand to SEQ ID NO: 485031
aagaucgcuguucuuauga

SEQ ID NO: 485033 - RNA, 19 nt, Artificial Sequence
  Description of Artificial Sequence: Synthetic oligonucleotide
  Sense strand starting at position 404 of SEQ ID NO: 317363
guguuuaaacaggaugagu

SEQ ID NO: 485034 - RNA, 19 nt, Artificial Sequence
  Description of Artificial Sequence: Synthetic oligonucleotide
  Antisense Strand to SEQ ID NO: 485033
acucauccuguuuaaacac

SEQ ID NO: 485035 - RNA, 19 nt, Artificial Sequence
  Description of Artificial Sequence: Synthetic oligonucleotide
  Sense strand starting at position 494 of SEQ ID NO: 317363
auuuccuugugucuaguaa

SEQ ID NO: 485036 - RNA, 19 nt, Artificial Sequence
  Description of Artificial Sequence: Synthetic oligonucleotide
  Antisense Strand to SEQ ID NO: 485035
uuacuagacacaaggaaau

SEQ ID NO: 485037 - RNA, 19 nt, Artificial Sequence
  Description of Artificial Sequence: Synthetic oligonucleotide
  Sense strand starting at position 495 of SEQ ID NO: 317363
uuuccuugugucuaguaau

SEQ ID NO: 485038 - RNA, 19 nt, Artificial Sequence
  Description of Artificial Sequence: Synthetic oligonucleotide
  Antisense Strand to SEQ ID NO: 485037
auuacuagacacaaggaaa

SEQ ID NO: 485039 - RNA, 19 nt, Artificial Sequence
  Description of Artificial Sequence: Synthetic oligonucleotide
  Sense strand starting at position 507 of SEQ ID NO: 317363
uaguaauuggcaggaccuu

SEQ ID NO: 485040 - RNA, 19 nt, Artificial Sequence
  Description of Artificial Sequence: Synthetic oligonucleotide
  Antisense Strand to SEQ ID NO: 485039
aagguccugccaauuacua

SEQ ID NO: 485041 - RNA, 19 nt, Artificial Sequence
  Description of Artificial Sequence: Synthetic oligonucleotide
  Sense strand starting at position 688 of SEQ ID NO: 317363
ggacaauaccuaugaaugc

SEQ ID NO: 485042 - RNA, 19 nt, Artificial Sequence
  Description of Artificial Sequence: Synthetic oligonucleotide
  Antisense Strand to SEQ ID NO: 485041
gcauucauagguauugucc

SEQ ID NO: 485043 - RNA, 19 nt, Artificial Sequence
  Description of Artificial Sequence: Synthetic oligonucleotide
  Sense strand starting at position 761 of SEQ ID NO: 317363
ugacaauaauaagugucau

SEQ ID NO: 485044 - RNA, 19 nt, Artificial Sequence
  Description of Artificial Sequence: Synthetic oligonucleotide
  Antisense Strand to SEQ ID NO: 485043
augacacuuauuauuguca

SEQ ID NO: 485045 - RNA, 19 nt, Artificial Sequence
  Description of Artificial Sequence: Synthetic oligonucleotide
  Sense strand starting at position 787 of SEQ ID NO: 317363
gcuucuguugcacacauaa

SEQ ID NO: 485046 - RNA, 19 nt, Artificial Sequence
  Description of Artificial Sequence: Synthetic oligonucleotide
  Antisense Strand to SEQ ID NO: 485045
uuaugugugcaacagaagc

SEQ ID NO: 485047 - RNA, 19 nt, Artificial Sequence
  Description of Artificial Sequence: Synthetic oligonucleotide
  Sense strand starting at position 1126 of SEQ ID NO: 317363
agaggauuaugccugagcu

SEQ ID NO: 485048 - RNA, 19 nt, Artificial Sequence
  Description of Artificial Sequence: Synthetic oligonucleotide
  Antisense Strand to SEQ ID NO: 485047
agcucaggcauaauccucu

SEQ ID NO: 485049 - RNA, 19 nt, Artificial Sequence
  Description of Artificial Sequence: Synthetic oligonucleotide
  Sense strand starting at position 1127 of SEQ ID NO: 317363
gaggauuaugccugagcuc

SEQ ID NO: 485050 - RNA, 19 nt, Artificial Sequence
  Description of Artificial Sequence: Synthetic oligonucleotide
  Antisense Strand to SEQ ID NO: 485049
gagcucaggcauaauccuc

SEQ ID NO: 485051 - RNA, 19 nt, Artificial Sequence
  Description of Artificial Sequence: Synthetic oligonucleotide
  Sense strand starting at position 1161 of SEQ ID NO: 317363
gagcaaaggcauuagauuc

SEQ ID NO: 485052 - RNA, 19 nt, Artificial Sequence
  Description of Artificial Sequence: Synthetic oligonucleotide
  Antisense Strand to SEQ ID NO: 485051
gaaucuaaugccuuugcuc

SEQ ID NO: 485053 - RNA, 19 nt, Artificial Sequence
  Description of Artificial Sequence: Synthetic oligonucleotide
  Sense strand starting at position 1185 of SEQ ID NO: 317363
ggagcacagaccugauuau

SEQ ID NO: 485054 - RNA, 19 nt, Artificial Sequence
  Description of Artificial Sequence: Synthetic oligonucleotide
  Antisense Strand to SEQ ID NO: 485053
auaaucaggucugugcucc

SEQ ID NO: 485055 - RNA, 19 nt, Artificial Sequence
  Description of Artificial Sequence: Synthetic oligonucleotide
  Sense strand starting at position 1231 of SEQ ID NO: 317363
gcgccuucucaagagaauc

SEQ ID NO: 485056 - RNA, 19 nt, Artificial Sequence
  Description of Artificial Sequence: Synthetic oligonucleotide
  Antisense Strand to SEQ ID NO: 485055
gauucucuugagaaggcgc

SEQ ID NO: 485057 - RNA, 19 nt, Artificial Sequence
  Description of Artificial Sequence: Synthetic oligonucleotide
  Sense strand starting at position 1266 of SEQ ID NO: 317363
gagauagaagagugucauc

SEQ ID NO: 485058 - RNA, 19 nt, Artificial Sequence
  Description of Artificial Sequence: Synthetic oligonucleotide
  Antisense Strand to SEQ ID NO: 485057
gaugacacucuucuaucuc

SEQ ID NO: 485059 - RNA, 19 nt, Artificial Sequence
  Description of Artificial Sequence: Synthetic oligonucleotide
  Sense strand starting at position 1271 of SEQ ID NO: 317363
agaagagugucaucccauc

SEQ ID NO: 485060 - RNA, 19 nt, Artificial Sequence
  Description of Artificial Sequence: Synthetic oligonucleotide
  Antisense Strand to SEQ ID NO: 485059
gaugggaugacacucuucu

SEQ ID NO: 485061 - RNA, 19 nt, Artificial Sequence
  Description of Artificial Sequence: Synthetic oligonucleotide
  Sense strand starting at position 1494 of SEQ ID NO: 317363
aagguuuauuugcagggau

SEQ ID NO: 485062 - RNA, 19 nt, Artificial Sequence
  Description of Artificial Sequence: Synthetic oligonucleotide
  Antisense Strand to SEQ ID NO: 485061
aucccugcaaauaaaccuu

SEQ ID NO: 485063 - RNA, 19 nt, Artificial Sequence
  Description of Artificial Sequence: Synthetic oligonucleotide
  Sense strand starting at position 1527 of SEQ ID NO: 317363
auaguacacgcuuaauaaa

SEQ ID NO: 485064 - RNA, 19 nt, Artificial Sequence
  Description of Artificial Sequence: Synthetic oligonucleotide
  Antisense Strand to SEQ ID NO: 485063
uuuauuaagcguguacuau

SEQ ID NO: 485065 - RNA, 19 nt, Artificial Sequence
  Description of Artificial Sequence: Synthetic oligonucleotide
  Sense strand starting at position 1590 of SEQ ID NO: 317363
acuggcgaguauuuguaaa

SEQ ID NO: 485066 - RNA, 19 nt, Artificial Sequence
  Description of Artificial Sequence: Synthetic oligonucleotide
  Antisense Strand to SEQ ID NO: 485065
uuuacaaauacucgccagu

SEQ ID NO: 485067 - RNA, 19 nt, Artificial Sequence
  Description of Artificial Sequence: Synthetic oligonucleotide
  Sense strand starting at position 2120 of SEQ ID NO: 317363
gucucuucugaauauugac

SEQ ID NO: 485068 - RNA, 19 nt, Artificial Sequence
  Description of Artificial Sequence: Synthetic oligonucleotide
  Antisense Strand to SEQ ID NO: 485067
gucaauauucagaagagac

SEQ ID NO: 485069 - RNA, 19 nt, Artificial Sequence
  Description of Artificial Sequence: Synthetic oligonucleotide
  Sense strand starting at position 2130 of SEQ ID NO: 317363
aauauugacucaucggguu

SEQ ID NO: 485070 - RNA, 19 nt, Artificial Sequence
  Description of Artificial Sequence: Synthetic oligonucleotide
  Antisense Strand to SEQ ID NO: 485069
aacccgaugagucaauauu

SEQ ID NO: 485071 - RNA, 19 nt, Artificial Sequence
  Description of Artificial Sequence: Synthetic oligonucleotide
  Sense strand starting at position 2136 of SEQ ID NO: 317363
gacucaucggguuguagaa

SEQ ID NO: 485072 - RNA, 19 nt, Artificial Sequence
  Description of Artificial Sequence: Synthetic oligonucleotide
  Antisense Strand to SEQ ID NO: 485071
uucuacaacccgaugaguc

SEQ ID NO: 485073 - RNA, 19 nt, Artificial Sequence
  Description of Artificial Sequence: Synthetic oligonucleotide
  Sense strand starting at position 2211 of SEQ ID NO: 317363
cugcaugugccagaaguaa

SEQ ID NO: 485074 - RNA, 19 nt, Artificial Sequence
  Description of Artificial Sequence: Synthetic oligonucleotide
  Antisense Strand to SEQ ID NO: 485073
uuacuucuggcacaugcag

SEQ ID NO: 485075 - RNA, 19 nt, Artificial Sequence
  Description of Artificial Sequence: Synthetic oligonucleotide
  Sense strand starting at position 2268 of SEQ ID NO: 317363
cuuaaagugcaaugguaga

SEQ ID NO: 485076 - RNA, 19 nt, Artificial Sequence
  Description of Artificial Sequence: Synthetic oligonucleotide
  Antisense Strand to SEQ ID NO: 485075
ucuaccauugcacuuuaag

SEQ ID NO: 485077 - RNA, 19 nt, Artificial Sequence
  Description of Artificial Sequence: Synthetic oligonucleotide
  Sense strand starting at position 2436 of SEQ ID NO: 317363
auggcaagugucuggaaca

SEQ ID NO: 485078 - RNA, 19 nt, Artificial Sequence
  Description of Artificial Sequence: Synthetic oligonucleotide
  Antisense Strand to SEQ ID NO: 485077
uguuccagacacuugccau

SEQ ID NO: 485079 - RNA, 19 nt, Artificial Sequence
  Description of Artificial Sequence: Synthetic oligonucleotide
  Sense strand starting at position 2546 of SEQ ID NO: 317363
uggaaaguuguaugugaaa

SEQ ID NO: 485080 - RNA, 19 nt, Artificial Sequence
  Description of Artificial Sequence: Synthetic oligonucleotide
  Antisense Strand to SEQ ID NO: 485079
uuucacauacaacuuucca

SEQ ID NO: 485081 - RNA, 19 nt, Artificial Sequence
  Description of Artificial Sequence: Synthetic oligonucleotide
  Sense strand starting at position 2548 of SEQ ID NO: 317363
gaaaguuguaugugaaaga

SEQ ID NO: 485082 - RNA, 19 nt, Artificial Sequence
  Description of Artificial Sequence: Synthetic oligonucleotide
  Antisense Strand to SEQ ID NO: 485081
ucuuucacauacaacuuuc

SEQ ID NO: 485083 - RNA, 19 nt, Artificial Sequence
  Description of Artificial Sequence: Synthetic oligonucleotide
  Sense strand starting at position 2617 of SEQ ID NO: 317363
gucccaaaguuuccaguaa

SEQ ID NO: 485084 - RNA, 19 nt, Artificial Sequence
  Description of Artificial Sequence: Synthetic oligonucleotide
  Antisense Strand to SEQ ID NO: 485083
uuacuggaaacuuugggac

SEQ ID NO: 485085 - RNA, 19 nt, Artificial Sequence
  Description of Artificial Sequence: Synthetic oligonucleotide
  Sense strand starting at position 2684 of SEQ ID NO: 317363
aguguaaacuucuuagaaa

SEQ ID NO: 485086 - RNA, 19 nt, Artificial Sequence
  Description of Artificial Sequence: Synthetic oligonucleotide
  Antisense Strand to SEQ ID NO: 485085
uuucuaagaaguuuacacu

SEQ ID NO: 485087 - RNA, 19 nt, Artificial Sequence
  Description of Artificial Sequence: Synthetic oligonucleotide
  Sense strand starting at position 2775 of SEQ ID NO: 317363
ugccucagugcguucugua

SEQ ID NO: 485088 - RNA, 19 nt, Artificial Sequence
  Description of Artificial Sequence: Synthetic oligonucleotide
  Antisense Strand to SEQ ID NO: 485087
uacagaacgcacugaggca

SEQ ID NO: 485089 - RNA, 19 nt, Artificial Sequence
  Description of Artificial Sequence: Synthetic oligonucleotide
  Sense strand starting at position 2776 of SEQ ID NO: 317363
gccucagugcguucuguaa

SEQ ID NO: 485090 - RNA, 19 nt, Artificial Sequence
  Description of Artificial Sequence: Synthetic oligonucleotide
  Antisense Strand to SEQ ID NO: 485089
uuacagaacgcacugaggc

SEQ ID NO: 485091 - RNA, 19 nt, Artificial Sequence
  Description of Artificial Sequence: Synthetic oligonucleotide
  Sense strand starting at position 2795 of SEQ ID NO: 317363
aguuaauuccucuaccgga

SEQ ID NO: 485092 - RNA, 19 nt, Artificial Sequence
  Description of Artificial Sequence: Synthetic oligonucleotide
  Antisense Strand to SEQ ID NO: 485091
uccgguagaggaauuaacu

SEQ ID NO: 485093 - RNA, 19 nt, Artificial Sequence
  Description of Artificial Sequence: Synthetic oligonucleotide
  Sense strand starting at position 2860 of SEQ ID NO: 317363
uuccuucuuggguaacuua

SEQ ID NO: 485094 - RNA, 19 nt, Artificial Sequence
  Description of Artificial Sequence: Synthetic oligonucleotide
  Antisense Strand to SEQ ID NO: 485093
uaaguuacccaagaaggaa

SEQ ID NO: 485095 - RNA, 19 nt, Artificial Sequence
  Description of Artificial Sequence: Synthetic oligonucleotide
  Sense strand starting at position 2863 of SEQ ID NO: 317363
cuucuuggguaacuuaaau

SEQ ID NO: 485096 - RNA, 19 nt, Artificial Sequence
  Description of Artificial Sequence: Synthetic oligonucleotide
  Antisense Strand to SEQ ID NO: 485095
auuuaaguuacccaagaag

SEQ ID NO: 485097 - RNA, 19 nt, Artificial Sequence
  Description of Artificial Sequence: Synthetic oligonucleotide
  Sense strand starting at position 3262 of SEQ ID NO: 317363
cucguuucaggagaguaga

SEQ ID NO: 485098 - RNA, 19 nt, Artificial Sequence
  Description of Artificial Sequence: Synthetic oligonucleotide
  Antisense Strand to SEQ ID NO: 485097
ucuacucuccugaaacgag

SEQ ID NO: 485099 - RNA, 19 nt, Artificial Sequence
  Description of Artificial Sequence: Synthetic oligonucleotide
  Sense strand starting at position 3356 of SEQ ID NO: 317363
gcagguagaucccuaaaga

SEQ ID NO: 485100 - RNA, 19 nt, Artificial Sequence
  Description of Artificial Sequence: Synthetic oligonucleotide
  Antisense Strand to SEQ ID NO: 485099
ucuuuagggaucuaccugc

SEQ ID NO: 485101 - RNA, 19 nt, Artificial Sequence
  Description of Artificial Sequence: Synthetic oligonucleotide
  Sense strand starting at position 3478 of SEQ ID NO: 317363
uggagagguaagugcuuua

SEQ ID NO: 485102 - RNA, 19 nt, Artificial Sequence
  Description of Artificial Sequence: Synthetic oligonucleotide
  Antisense Strand to SEQ ID NO: 485101
uaaagcacuuaccucucca

SEQ ID NO: 485103 - RNA, 19 nt, Artificial Sequence
  Description of Artificial Sequence: Synthetic oligonucleotide
  Sense strand starting at position 3542 of SEQ ID NO: 317363
uggaauucucaccaggcca

SEQ ID NO: 485104 - RNA, 19 nt, Artificial Sequence
  Description of Artificial Sequence: Synthetic oligonucleotide
  Antisense Strand to SEQ ID NO: 485103
uggccuggugagaauucca

SEQ ID NO: 485105 - RNA, 19 nt, Artificial Sequence
  Description of Artificial Sequence: Synthetic oligonucleotide
  Sense strand starting at position 3637 of SEQ ID NO: 317363
ccacuuguuacagagaggu

SEQ ID NO: 485106 - RNA, 19 nt, Artificial Sequence
  Description of Artificial Sequence: Synthetic oligonucleotide
  Antisense Strand to SEQ ID NO: 485105
accucucuguaacaagugg

SEQ ID NO: 485107 - RNA, 19 nt, Artificial Sequence
  Description of Artificial Sequence: Synthetic oligonucleotide
  Sense strand starting at position 3641 of SEQ ID NO: 317363
uuguuacagagagguacau

SEQ ID NO: 485108 - RNA, 19 nt, Artificial Sequence
  Description of Artificial Sequence: Synthetic oligonucleotide
  Antisense Strand to SEQ ID NO: 485107
auguaccucucuguaacaa

SEQ ID NO: 485109 - RNA, 19 nt, Artificial Sequence
  Description of Artificial Sequence: Synthetic oligonucleotide
  Sense strand starting at position 59 of SEQ ID NO: 317364
uggugugauaggcacaaga

SEQ ID NO: 485110 - RNA, 19 nt, Artificial Sequence
  Description of Artificial Sequence: Synthetic oligonucleotide
  Antisense Strand to SEQ ID NO: 485109
ucuugugccuaucacacca

SEQ ID NO: 485111 - RNA, 19 nt, Artificial Sequence
  Description of Artificial Sequence: Synthetic oligonucleotide
  Sense strand starting at position 61 of SEQ ID NO: 317364
gugugauaggcacaagagu

SEQ ID NO: 485112 - RNA, 19 nt, Artificial Sequence
  Description of Artificial Sequence: Synthetic oligonucleotide
  Antisense Strand to SEQ ID NO: 485111
acucuugugccuaucacac

SEQ ID NO: 485113 - RNA, 19 nt, Artificial Sequence
  Description of Artificial Sequence: Synthetic oligonucleotide
  Sense strand starting at position 107 of SEQ ID NO: 317364
ccuuuaagggauggucaga

SEQ ID NO: 485114 - RNA, 19 nt, Artificial Sequence
  Description of Artificial Sequence: Synthetic oligonucleotide
  Antisense Strand to SEQ ID NO: 485113
ucugaccaucccuuaaagg

SEQ ID NO: 485115 - RNA, 19 nt, Artificial Sequence
  Description of Artificial Sequence: Synthetic oligonucleotide
  Sense strand starting at position 118 of SEQ ID NO: 317364
uggucagagacugauaugu

SEQ ID NO: 485116 - RNA, 19 nt, Artificial Sequence
  Description of Artificial Sequence: Synthetic oligonucleotide
  Antisense Strand to SEQ ID NO: 485115
acauaucagucucugacca

SEQ ID NO: 485117 - RNA, 19 nt, Artificial Sequence
  Description of Artificial Sequence: Synthetic oligonucleotide
  Sense strand starting at position 123 of SEQ ID NO: 317364
agagacugauauguguuua

SEQ ID NO: 485118 - RNA, 19 nt, Artificial Sequence
  Description of Artificial Sequence: Synthetic oligonucleotide
  Antisense Strand to SEQ ID NO: 485117
uaaacacauaucagucucu

SEQ ID NO: 485119 - RNA, 19 nt, Artificial Sequence
  Description of Artificial Sequence: Synthetic oligonucleotide
  Sense strand starting at position 127 of SEQ ID NO: 317364
acugauauguguuuaccaa

SEQ ID NO: 485120 - RNA, 19 nt, Artificial Sequence
  Description of Artificial Sequence: Synthetic oligonucleotide
  Antisense Strand to SEQ ID NO: 485119
uugguaaacacauaucagu

SEQ ID NO: 485121 - RNA, 19 nt, Artificial Sequence
  Description of Artificial Sequence: Synthetic oligonucleotide
  Sense strand starting at position 128 of SEQ ID NO: 317364
cugauauguguuuaccaaa

SEQ ID NO: 485122 - RNA, 19 nt, Artificial Sequence
  Description of Artificial Sequence: Synthetic oligonucleotide
  Antisense Strand to SEQ ID NO: 485121
uuugguaaacacauaucag

SEQ ID NO: 485123 - RNA, 19 nt, Artificial Sequence
  Description of Artificial Sequence: Synthetic oligonucleotide
  Sense strand starting at position 337 of SEQ ID NO: 317364
uaaggacuccaaggucuua

SEQ ID NO: 485124 - RNA, 19 nt, Artificial Sequence
  Description of Artificial Sequence: Synthetic oligonucleotide
  Antisense Strand to SEQ ID NO: 485123
uaagaccuuggaguccuua

SEQ ID NO: 485125 - RNA, 19 nt, Artificial Sequence
  Description of Artificial Sequence: Synthetic oligonucleotide
  Sense strand starting at position 383 of SEQ ID NO: 317364
gaguuuggguuccugaaua

SEQ ID NO: 485126 - RNA, 19 nt, Artificial Sequence
  Description of Artificial Sequence: Synthetic oligonucleotide
  Antisense Strand to SEQ ID NO: 485125
uauucaggaacccaaacuc

SEQ ID NO: 485127 - RNA, 19 nt, Artificial Sequence
  Description of Artificial Sequence: Synthetic oligonucleotide
  Sense strand starting at position 391 of SEQ ID NO: 317364
guuccugaauaauugagua

SEQ ID NO: 485128 - RNA, 19 nt, Artificial Sequence
  Description of Artificial Sequence: Synthetic oligonucleotide
  Antisense Strand to SEQ ID NO: 485127
uacucaauuauucaggaac

SEQ ID NO: 485129 - RNA, 19 nt, Artificial Sequence
  Description of Artificial Sequence: Synthetic oligonucleotide
  Sense strand starting at position 429 of SEQ ID NO: 317364
cgugaauggacuugacaug

SEQ ID NO: 485130 - RNA, 19 nt, Artificial Sequence
  Description of Artificial Sequence: Synthetic oligonucleotide
  Antisense Strand to SEQ ID NO: 485129
caugucaaguccauucacg

SEQ ID NO: 485131 - RNA, 19 nt, Artificial Sequence
  Description of Artificial Sequence: Synthetic oligonucleotide
  Sense strand starting at position 468 of SEQ ID NO: 317364
uauguuuaguuacugagau

SEQ ID NO: 485132 - RNA, 19 nt, Artificial Sequence
  Description of Artificial Sequence: Synthetic oligonucleotide
  Antisense Strand to SEQ ID NO: 485131
aucucaguaacuaaacaua

SEQ ID NO: 485133 - RNA, 19 nt, Artificial Sequence
  Description of Artificial Sequence: Synthetic oligonucleotide
  Sense strand starting at position 470 of SEQ ID NO: 317364
uguuuaguuacugagaugu

SEQ ID NO: 485134 - RNA, 19 nt, Artificial Sequence
  Description of Artificial Sequence: Synthetic oligonucleotide
  Antisense Strand to SEQ ID NO: 485133
acaucucaguaacuaaaca

SEQ ID NO: 485135 - RNA, 19 nt, Artificial Sequence
  Description of Artificial Sequence: Synthetic oligonucleotide
  Sense strand starting at position 604 of SEQ ID NO: 317364
cccucugguuaaucugaga

SEQ ID NO: 485136 - RNA, 19 nt, Artificial Sequence
  Description of Artificial Sequence: Synthetic oligonucleotide
  Antisense Strand to SEQ ID NO: 485135
ucucagauuaaccagaggg

SEQ ID NO: 485137 - RNA, 19 nt, Artificial Sequence
  Description of Artificial Sequence: Synthetic oligonucleotide
  Sense strand starting at position 1257 of SEQ ID NO: 317364
gcggucuuucagcugcuua

SEQ ID NO: 485138 - RNA, 19 nt, Artificial Sequence
  Description of Artificial Sequence: Synthetic oligonucleotide
  Antisense Strand to SEQ ID NO: 485137
uaagcagcugaaagaccgc

SEQ ID NO: 485139 - RNA, 19 nt, Artificial Sequence
  Description of Artificial Sequence: Synthetic oligonucleotide
  Sense strand starting at position 1326 of SEQ ID NO: 317364
cgggaaagcuucccggaaa

SEQ ID NO: 485140 - RNA, 19 nt, Artificial Sequence
  Description of Artificial Sequence: Synthetic oligonucleotide
  Antisense Strand to SEQ ID NO: 485139
uuuccgggaagcuuucccg

SEQ ID NO: 485141 - RNA, 19 nt, Artificial Sequence
  Description of Artificial Sequence: Synthetic oligonucleotide
  Sense strand starting at position 1329 of SEQ ID NO: 317364
gaaagcuucccggaaagcu

SEQ ID NO: 485142 - RNA, 19 nt, Artificial Sequence
  Description of Artificial Sequence: Synthetic oligonucleotide
  Antisense Strand to SEQ ID NO: 485141
agcuuuccgggaagcuuuc

SEQ ID NO: 485143 - RNA, 19 nt, Artificial Sequence
  Description of Artificial Sequence: Synthetic oligonucleotide
  Sense strand starting at position 1339 of SEQ ID NO: 317364
cggaaagcuuacccagaga

SEQ ID NO: 485144 - RNA, 19 nt, Artificial Sequence
  Description of Artificial Sequence: Synthetic oligonucleotide
  Antisense Strand to SEQ ID NO: 485143
ucucuggguaagcuuuccg

SEQ ID NO: 485145 - RNA, 19 nt, Artificial Sequence
  Description of Artificial Sequence: Synthetic oligonucleotide
  Sense strand starting at position 1374 of SEQ ID NO: 317364
cgagucuucccggagauga

SEQ ID NO: 485146 - RNA, 19 nt, Artificial Sequence
  Description of Artificial Sequence: Synthetic oligonucleotide
  Antisense Strand to SEQ ID NO: 485145
ucaucuccgggaagacucg

SEQ ID NO: 485147 - RNA, 19 nt, Artificial Sequence
  Description of Artificial Sequence: Synthetic oligonucleotide
  Sense strand starting at position 1561 of SEQ ID NO: 317364
auaggauucuuucuuaagg

SEQ ID NO: 485148 - RNA, 19 nt, Artificial Sequence
  Description of Artificial Sequence: Synthetic oligonucleotide
  Antisense Strand to SEQ ID NO: 485147
ccuuaagaaagaauccuau

SEQ ID NO: 485149 - RNA, 19 nt, Artificial Sequence
  Description of Artificial Sequence: Synthetic oligonucleotide
  Sense strand starting at position 1562 of SEQ ID NO: 317364
uaggauucuuucuuaaggu

SEQ ID NO: 485150 - RNA, 19 nt, Artificial Sequence
  Description of Artificial Sequence: Synthetic oligonucleotide
  Antisense Strand to SEQ ID NO: 485149
accuuaagaaagaauccua

SEQ ID NO: 485151 - RNA, 19 nt, Artificial Sequence
  Description of Artificial Sequence: Synthetic oligonucleotide
  Sense strand starting at position 1569 of SEQ ID NO: 317364
cuuucuuaaggugaccaau

SEQ ID NO: 485152 - RNA, 19 nt, Artificial Sequence
  Description of Artificial Sequence: Synthetic oligonucleotide
  Antisense Strand to SEQ ID NO: 485151
auuggucaccuuaagaaag

SEQ ID NO: 485153 - RNA, 19 nt, Artificial Sequence
  Description of Artificial Sequence: Synthetic oligonucleotide
  Sense strand starting at position 1571 of SEQ ID NO: 317364
uucuuaaggugaccaauua

SEQ ID NO: 485154 - RNA, 19 nt, Artificial Sequence
  Description of Artificial Sequence: Synthetic oligonucleotide
  Antisense Strand to SEQ ID NO: 485153
uaauuggucaccuuaagaa

SEQ ID NO: 485155 - RNA, 19 nt, Artificial Sequence
  Description of Artificial Sequence: Synthetic oligonucleotide
  Sense strand starting at position 1583 of SEQ ID NO: 317364
ccaauuaaauggccggaua

SEQ ID NO: 485156 - RNA, 19 nt, Artificial Sequence
  Description of Artificial Sequence: Synthetic oligonucleotide
  Antisense Strand to SEQ ID NO: 485155
uauccggccauuuaauugg

SEQ ID NO: 485157 - RNA, 19 nt, Artificial Sequence
  Description of Artificial Sequence: Synthetic oligonucleotide
  Sense strand starting at position 1584 of SEQ ID NO: 317364
caauuaaauggccggauaa

SEQ ID NO: 485158 - RNA, 19 nt, Artificial Sequence
  Description of Artificial Sequence: Synthetic oligonucleotide
  Antisense Strand to SEQ ID NO: 485157
uuauccggccauuuaauug

SEQ ID NO: 485159 - RNA, 19 nt, Artificial Sequence
  Description of Artificial Sequence: Synthetic oligonucleotide
  Sense strand starting at position 1585 of SEQ ID NO: 317364
aauuaaauggccggauaaa

SEQ ID NO: 485160 - RNA, 19 nt, Artificial Sequence
  Description of Artificial Sequence: Synthetic oligonucleotide
  Antisense Strand to SEQ ID NO: 485159
uuuauccggccauuuaauu

SEQ ID NO: 485161 - RNA, 19 nt, Artificial Sequence
  Description of Artificial Sequence: Synthetic oligonucleotide
  Sense strand starting at position 2086 of SEQ ID NO: 317364
ugauuugauuaacaugacu

SEQ ID NO: 485162 - RNA, 19 nt, Artificial Sequence
  Description of Artificial Sequence: Synthetic oligonucleotide
  Antisense Strand to SEQ ID NO: 485161
agucauguuaaucaaauca

SEQ ID NO: 485163 - RNA, 19 nt, Artificial Sequence
  Description of Artificial Sequence: Synthetic oligonucleotide
  Sense strand starting at position 2243 of SEQ ID NO: 317364
agaauucguugugcauuua

SEQ ID NO: 485164 - RNA, 19 nt, Artificial Sequence
  Description of Artificial Sequence: Synthetic oligonucleotide
  Antisense Strand to SEQ ID NO: 485163
uaaaugcacaacgaauucu

SEQ ID NO: 485165 - RNA, 19 nt, Artificial Sequence
  Description of Artificial Sequence: Synthetic oligonucleotide
  Sense strand starting at position 2244 of SEQ ID NO: 317364
gaauucguugugcauuuau

SEQ ID NO: 485166 - RNA, 19 nt, Artificial Sequence
  Description of Artificial Sequence: Synthetic oligonucleotide
  Antisense Strand to SEQ ID NO: 485165
auaaaugcacaacgaauuc

SEQ ID NO: 485167 - RNA, 19 nt, Artificial Sequence
  Description of Artificial Sequence: Synthetic oligonucleotide
  Sense strand starting at position 2345 of SEQ ID NO: 317364
aagagucaguguucuauga

SEQ ID NO: 485168 - RNA, 19 nt, Artificial Sequence
  Description of Artificial Sequence: Synthetic oligonucleotide
  Antisense Strand to SEQ ID NO: 485167
ucauagaacacugacucuu

SEQ ID NO: 485169 - RNA, 19 nt, Artificial Sequence
  Description of Artificial Sequence: Synthetic oligonucleotide
  Sense strand starting at position 2473 of SEQ ID NO: 317364
uugggugacuuggucuaga

SEQ ID NO: 485170 - RNA, 19 nt, Artificial Sequence
  Description of Artificial Sequence: Synthetic oligonucleotide
  Antisense Strand to SEQ ID NO: 485169
ucuagaccaagucacccaa

SEQ ID NO: 485171 - RNA, 19 nt, Artificial Sequence
  Description of Artificial Sequence: Synthetic oligonucleotide
  Sense strand starting at position 2476 of SEQ ID NO: 317364
ggugacuuggucuagauca

SEQ ID NO: 485172 - RNA, 19 nt, Artificial Sequence
  Description of Artificial Sequence: Synthetic oligonucleotide
  Antisense Strand to SEQ ID NO: 485171
ugaucuagaccaagucacc

SEQ ID NO: 485173 - RNA, 19 nt, Artificial Sequence
  Description of Artificial Sequence: Synthetic oligonucleotide
  Sense strand starting at position 2620 of SEQ ID NO: 317364
cgucaucaacugcaugaua

SEQ ID NO: 485174 - RNA, 19 nt, Artificial Sequence
  Description of Artificial Sequence: Synthetic oligonucleotide
  Antisense Strand to SEQ ID NO: 485173
uaucaugcaguugaugacg

SEQ ID NO: 485175 - RNA, 19 nt, Artificial Sequence
  Description of Artificial Sequence: Synthetic oligonucleotide
  Sense strand starting at position 2720 of SEQ ID NO: 317364
ggcuaagaaucacugcaca

SEQ ID NO: 485176 - RNA, 19 nt, Artificial Sequence
  Description of Artificial Sequence: Synthetic oligonucleotide
  Antisense Strand to SEQ ID NO: 485175
ugugcagugauucuuagcc

SEQ ID NO: 485177 - RNA, 19 nt, Artificial Sequence
  Description of Artificial Sequence: Synthetic oligonucleotide
  Sense strand starting at position 2994 of SEQ ID NO: 317364
ucuguuauccuggaguuug

SEQ ID NO: 485178 - RNA, 19 nt, Artificial Sequence
  Description of Artificial Sequence: Synthetic oligonucleotide
  Antisense Strand to SEQ ID NO: 485177
caaacuccaggauaacaga

SEQ ID NO: 485179 - RNA, 19 nt, Artificial Sequence
  Description of Artificial Sequence: Synthetic oligonucleotide
  Sense strand starting at position 3012 of SEQ ID NO: 317364
ggugaagaaaucuguacuu

SEQ ID NO: 485180 - RNA, 19 nt, Artificial Sequence
  Description of Artificial Sequence: Synthetic oligonucleotide
  Antisense Strand to SEQ ID NO: 485179
aaguacagauuucuucacc

SEQ ID NO: 485181 - RNA, 19 nt, Artificial Sequence
  Description of Artificial Sequence: Synthetic oligonucleotide
  Sense strand starting at position 3121 of SEQ ID NO: 317364
aaagauuguuuaguuagac

SEQ ID NO: 485182 - RNA, 19 nt, Artificial Sequence
  Description of Artificial Sequence: Synthetic oligonucleotide
  Antisense Strand to SEQ ID NO: 485181
gucuaacuaaacaaucuuu

SEQ ID NO: 485183 - RNA, 19 nt, Artificial Sequence
  Description of Artificial Sequence: Synthetic oligonucleotide
  Sense strand starting at position 3122 of SEQ ID NO: 317364
aagauuguuuaguuagacu

SEQ ID NO: 485184 - RNA, 19 nt, Artificial Sequence
  Description of Artificial Sequence: Synthetic oligonucleotide
  Antisense Strand to SEQ ID NO: 485183
agucuaacuaaacaaucuu

SEQ ID NO: 485185 - RNA, 19 nt, Artificial Sequence
  Description of Artificial Sequence: Synthetic oligonucleotide
  Sense strand starting at position 3597 of SEQ ID NO: 317364
augccuaguccugaaauua

SEQ ID NO: 485186 - RNA, 19 nt, Artificial Sequence
  Description of Artificial Sequence: Synthetic oligonucleotide
  Antisense Strand to SEQ ID NO: 485185
uaauuucaggacuaggcau

SEQ ID NO: 485187 - RNA, 19 nt, Artificial Sequence
  Description of Artificial Sequence: Synthetic oligonucleotide
  Sense strand starting at position 3699 of SEQ ID NO: 317364
gcugcaauggccuauuugu

SEQ ID NO: 485188 - RNA, 19 nt, Artificial Sequence
  Description of Artificial Sequence: Synthetic oligonucleotide
  Antisense Strand to SEQ ID NO: 485187
acaaauaggccauugcagc

SEQ ID NO: 485189 - RNA, 19 nt, Artificial Sequence
  Description of Artificial Sequence: Synthetic oligonucleotide
  Sense strand starting at position 185 of SEQ ID NO: 317365
gcucuuguuacgucccagu

SEQ ID NO: 485190 - RNA, 19 nt, Artificial Sequence
  Description of Artificial Sequence: Synthetic oligonucleotide
  Antisense Strand to SEQ ID NO: 485189
acugggacguaacaagagc

SEQ ID NO: 485191 - RNA, 19 nt, Artificial Sequence
  Description of Artificial Sequence: Synthetic oligonucleotide
  Sense strand starting at position 201 of SEQ ID NO: 317365
aguccuugagcugaggauu

SEQ ID NO: 485192 - RNA, 19 nt, Artificial Sequence
  Description of Artificial Sequence: Synthetic oligonucleotide
  Antisense Strand to SEQ ID NO: 485191
aauccucagcucaaggacu

SEQ ID NO: 485193 - RNA, 19 nt, Artificial Sequence
  Description of Artificial Sequence: Synthetic oligonucleotide
  Sense strand starting at position 258 of SEQ ID NO: 317365
cuuguaaucuaguuacagg

SEQ ID NO: 485194 - RNA, 19 nt, Artificial Sequence
  Description of Artificial Sequence: Synthetic oligonucleotide
  Antisense Strand to SEQ ID NO: 485193
ccuguaacuagauuacaag

SEQ ID NO: 485195 - RNA, 19 nt, Artificial Sequence
  Description of Artificial Sequence: Synthetic oligonucleotide
  Sense strand starting at position 279 of SEQ ID NO: 317365
gauaaaggaugauaaauga

SEQ ID NO: 485196 - RNA, 19 nt, Artificial Sequence
  Description of Artificial Sequence: Synthetic oligonucleotide
  Antisense Strand to SEQ ID NO: 485195
ucauuuaucauccuuuauc

SEQ ID NO: 485197 - RNA, 19 nt, Artificial Sequence
  Description of Artificial Sequence: Synthetic oligonucleotide
  Sense strand starting at position 657 of SEQ ID NO: 317365
uggugugauaggcacaaga

SEQ ID NO: 485198 - RNA, 19 nt, Artificial Sequence
  Description of Artificial Sequence: Synthetic oligonucleotide
  Antisense Strand to SEQ ID NO: 485197
ucuugugccuaucacacca

SEQ ID NO: 485199 - RNA, 19 nt, Artificial Sequence
  Description of Artificial Sequence: Synthetic oligonucleotide
  Sense strand starting at position 659 of SEQ ID NO: 317365
gugugauaggcacaagagu

SEQ ID NO: 485200 - RNA, 19 nt, Artificial Sequence
  Description of Artificial Sequence: Synthetic oligonucleotide
  Antisense Strand to SEQ ID NO: 485199
acucuugugccuaucacac

SEQ ID NO: 485201 - RNA, 19 nt, Artificial Sequence
  Description of Artificial Sequence: Synthetic oligonucleotide
  Sense strand starting at position 705 of SEQ ID NO: 317365
ccuuuaagggauggucaga

SEQ ID NO: 485202 - RNA, 19 nt, Artificial Sequence
  Description of Artificial Sequence: Synthetic oligonucleotide
  Antisense Strand to SEQ ID NO: 485201
ucugaccaucccuuaaagg

SEQ ID NO: 485203 - RNA, 19 nt, Artificial Sequence
  Description of Artificial Sequence: Synthetic oligonucleotide
  Sense strand starting at position 716 of SEQ ID NO: 317365
uggucagagacugauaugu

SEQ ID NO: 485204 - RNA, 19 nt, Artificial Sequence
  Description of Artificial Sequence: Synthetic oligonucleotide
  Antisense Strand to SEQ ID NO: 485203
acauaucagucucugacca

SEQ ID NO: 485205 - RNA, 19 nt, Artificial Sequence
  Description of Artificial Sequence: Synthetic oligonucleotide
  Sense strand starting at position 721 of SEQ ID NO: 317365
agagacugauauguguuua

SEQ ID NO: 485206 - RNA, 19 nt, Artificial Sequence
  Description of Artificial Sequence: Synthetic oligonucleotide
  Antisense Strand to SEQ ID NO: 485205
uaaacacauaucagucucu

SEQ ID NO: 485207 - RNA, 19 nt, Artificial Sequence
  Description of Artificial Sequence: Synthetic oligonucleotide
  Sense strand starting at position 725 of SEQ ID NO: 317365
acugauauguguuuaccaa

SEQ ID NO: 485208 - RNA, 19 nt, Artificial Sequence
  Description of Artificial Sequence: Synthetic oligonucleotide
  Antisense Strand to SEQ ID NO: 485207
uugguaaacacauaucagu

SEQ ID NO: 485209 - RNA, 19 nt, Artificial Sequence
  Description of Artificial Sequence: Synthetic oligonucleotide
  Sense strand starting at position 726 of SEQ ID NO: 317365
cugauauguguuuaccaaa

SEQ ID NO: 485210 - RNA, 19 nt, Artificial Sequence
  Description of Artificial Sequence: Synthetic oligonucleotide
  Antisense Strand to SEQ ID NO: 485209
uuugguaaacacauaucag

SEQ ID NO: 485211 - RNA, 19 nt, Artificial Sequence
  Description of Artificial Sequence: Synthetic oligonucleotide
  Sense strand starting at position 935 of SEQ ID NO: 317365
uaaggacuccaaggucuua

SEQ ID NO: 485212 - RNA, 19 nt, Artificial Sequence
  Description of Artificial Sequence: Synthetic oligonucleotide
  Antisense Strand to SEQ ID NO: 485211
uaagaccuuggaguccuua

SEQ ID NO: 485213 - RNA, 19 nt, Artificial Sequence
  Description of Artificial Sequence: Synthetic oligonucleotide
  Sense strand starting at position 981 of SEQ ID NO: 317365
gaguuuggguuccugaaua

SEQ ID NO: 485214 - RNA, 19 nt, Artificial Sequence
  Description of Artificial Sequence: Synthetic oligonucleotide
  Antisense Strand to SEQ ID NO: 485213
uauucaggaacccaaacuc

SEQ ID NO: 485215 - RNA, 19 nt, Artificial Sequence
  Description of Artificial Sequence: Synthetic oligonucleotide
  Sense strand starting at position 989 of SEQ ID NO: 317365
guuccugaauaauugagua

SEQ ID NO: 485216 - RNA, 19 nt, Artificial Sequence
  Description of Artificial Sequence: Synthetic oligonucleotide
  Antisense Strand to SEQ ID NO: 485215
uacucaauuauucaggaac

SEQ ID NO: 485217 - RNA, 19 nt, Artificial Sequence
  Description of Artificial Sequence: Synthetic oligonucleotide
  Sense strand starting at position 1027 of SEQ ID NO: 317365
cgugaauggacuugacaug

SEQ ID NO: 485218 - RNA, 19 nt, Artificial Sequence
  Description of Artificial Sequence: Synthetic oligonucleotide
  Antisense Strand to SEQ ID NO: 485217
caugucaaguccauucacg

SEQ ID NO: 485219 - RNA, 19 nt, Artificial Sequence
  Description of Artificial Sequence: Synthetic oligonucleotide
  Sense strand starting at position 1066 of SEQ ID NO: 317365
uauguuuaguuacugagau

SEQ ID NO: 485220 - RNA, 19 nt, Artificial Sequence
  Description of Artificial Sequence: Synthetic oligonucleotide
  Antisense Strand to SEQ ID NO: 485219
aucucaguaacuaaacaua

SEQ ID NO: 485221 - RNA, 19 nt, Artificial Sequence
  Description of Artificial Sequence: Synthetic oligonucleotide
  Sense strand starting at position 1068 of SEQ ID NO: 317365
uguuuaguuacugagaugu

SEQ ID NO: 485222 - RNA, 19 nt, Artificial Sequence
  Description of Artificial Sequence: Synthetic oligonucleotide
  Antisense Strand to SEQ ID NO: 485221
acaucucaguaacuaaaca

SEQ ID NO: 485223 - RNA, 19 nt, Artificial Sequence
  Description of Artificial Sequence: Synthetic oligonucleotide
  Sense strand starting at position 1202 of SEQ ID NO: 317365
cccucugguuaaucugaga

SEQ ID NO: 485224 - RNA, 19 nt, Artificial Sequence
  Description of Artificial Sequence: Synthetic oligonucleotide
  Antisense Strand to SEQ ID NO: 485223
ucucagauuaaccagaggg

SEQ ID NO: 485225 - RNA, 19 nt, Artificial Sequence
  Description of Artificial Sequence: Synthetic oligonucleotide
  Sense strand starting at position 1855 of SEQ ID NO: 317365
gcggucuuucagcugcuua

SEQ ID NO: 485226 - RNA, 19 nt, Artificial Sequence
  Description of Artificial Sequence: Synthetic oligonucleotide
  Antisense Strand to SEQ ID NO: 485225
uaagcagcugaaagaccgc

SEQ ID NO: 485227 - RNA, 19 nt, Artificial Sequence
  Description of Artificial Sequence: Synthetic oligonucleotide
  Sense strand starting at position 1927 of SEQ ID NO: 317365
gaaagcuucccggaaagcu

SEQ ID NO: 485228 - RNA, 19 nt, Artificial Sequence
  Description of Artificial Sequence: Synthetic oligonucleotide
  Antisense Strand to SEQ ID NO: 485227
agcuuuccgggaagcuuuc

SEQ ID NO: 485229 - RNA, 19 nt, Artificial Sequence
  Description of Artificial Sequence: Synthetic oligonucleotide
  Sense strand starting at position 1937 of SEQ ID NO: 317365
cggaaagcuuacccagaga

SEQ ID NO: 485230 - RNA, 19 nt, Artificial Sequence
  Description of Artificial Sequence: Synthetic oligonucleotide
  Antisense Strand to SEQ ID NO: 485229
ucucuggguaagcuuuccg

SEQ ID NO: 485231 - RNA, 19 nt, Artificial Sequence
  Description of Artificial Sequence: Synthetic oligonucleotide
  Sense strand starting at position 1972 of SEQ ID NO: 317365
cgagucuucccggagauga

SEQ ID NO: 485232 - RNA, 19 nt, Artificial Sequence
  Description of Artificial Sequence: Synthetic oligonucleotide
  Antisense Strand to SEQ ID NO: 485231
ucaucuccgggaagacucg

SEQ ID NO: 485233 - RNA, 19 nt, Artificial Sequence
  Description of Artificial Sequence: Synthetic oligonucleotide
  Sense strand starting at position 2159 of SEQ ID NO: 317365
auaggauucuuucuuaagg

SEQ ID NO: 485234 - RNA, 19 nt, Artificial Sequence
  Description of Artificial Sequence: Synthetic oligonucleotide
  Antisense Strand to SEQ ID NO: 485233
ccuuaagaaagaauccuau

SEQ ID NO: 485235 - RNA, 19 nt, Artificial Sequence
  Description of Artificial Sequence: Synthetic oligonucleotide
  Sense strand starting at position 2160 of SEQ ID NO: 317365
uaggauucuuucuuaaggu

SEQ ID NO: 485236 - RNA, 19 nt, Artificial Sequence
  Description of Artificial Sequence: Synthetic oligonucleotide
  Antisense Strand to SEQ ID NO: 485235
accuuaagaaagaauccua

SEQ ID NO: 485237 - RNA, 19 nt, Artificial Sequence
  Description of Artificial Sequence: Synthetic oligonucleotide
  Sense strand starting at position 2167 of SEQ ID NO: 317365
cuuucuuaaggugaccaau

SEQ ID NO: 485238 - RNA, 19 nt, Artificial Sequence
  Description of Artificial Sequence: Synthetic oligonucleotide
  Antisense Strand to SEQ ID NO: 485237
auuggucaccuuaagaaag

SEQ ID NO: 485239 - RNA, 19 nt, Artificial Sequence
  Description of Artificial Sequence: Synthetic oligonucleotide
  Sense strand starting at position 2169 of SEQ ID NO: 317365
uucuuaaggugaccaauua

SEQ ID NO: 485240 - RNA, 19 nt, Artificial Sequence
  Description of Artificial Sequence: Synthetic oligonucleotide
  Antisense Strand to SEQ ID NO: 485239
uaauuggucaccuuaagaa

SEQ ID NO: 485241 - RNA, 19 nt, Artificial Sequence
  Description of Artificial Sequence: Synthetic oligonucleotide
  Sense strand starting at position 2181 of SEQ ID NO: 317365
ccaauuaaauggccggaua

SEQ ID NO: 485242 - RNA, 19 nt, Artificial Sequence
  Description of Artificial Sequence: Synthetic oligonucleotide
  Antisense Strand to SEQ ID NO: 485241
uauccggccauuuaauugg

SEQ ID NO: 485243 - RNA, 19 nt, Artificial Sequence
  Description of Artificial Sequence: Synthetic oligonucleotide
  Sense strand starting at position 2182 of SEQ ID NO: 317365
caauuaaauggccggauaa

SEQ ID NO: 485244 - RNA, 19 nt, Artificial Sequence
  Description of Artificial Sequence: Synthetic oligonucleotide
  Antisense Strand to SEQ ID NO: 485243
uuauccggccauuuaauug

SEQ ID NO: 485245 - RNA, 19 nt, Artificial Sequence
  Description of Artificial Sequence: Synthetic oligonucleotide
  Sense strand starting at position 2183 of SEQ ID NO: 317365
aauuaaauggccggauaaa

SEQ ID NO: 485246 - RNA, 19 nt, Artificial Sequence
  Description of Artificial Sequence: Synthetic oligonucleotide
  Antisense Strand to SEQ ID NO: 485245
uuuauccggccauuuaauu

SEQ ID NO: 485247 - RNA, 19 nt, Artificial Sequence
  Description of Artificial Sequence: Synthetic oligonucleotide
  Sense strand starting at position 2684 of SEQ ID NO: 317365
ugauuugauuaacaugacu

SEQ ID NO: 485248 - RNA, 19 nt, Artificial Sequence
  Description of Artificial Sequence: Synthetic oligonucleotide
  Antisense Strand to SEQ ID NO: 485247
agucauguuaaucaaauca

SEQ ID NO: 485249 - RNA, 19 nt, Artificial Sequence
  Description of Artificial Sequence: Synthetic oligonucleotide
  Sense strand starting at position 2841 of SEQ ID NO: 317365
agaauucguugugcauuua

SEQ ID NO: 485250 - RNA, 19 nt, Artificial Sequence
  Description of Artificial Sequence: Synthetic oligonucleotide
  Antisense Strand to SEQ ID NO: 485249
uaaaugcacaacgaauucu

SEQ ID NO: 485251 - RNA, 19 nt, Artificial Sequence
  Description of Artificial Sequence: Synthetic oligonucleotide
  Sense strand starting at position 2842 of SEQ ID NO: 317365
gaauucguugugcauuuau

SEQ ID NO: 485252 - RNA, 19 nt, Artificial Sequence
  Description of Artificial Sequence: Synthetic oligonucleotide
  Antisense Strand to SEQ ID NO: 485251
auaaaugcacaacgaauuc

SEQ ID NO: 485253 - RNA, 19 nt, Artificial Sequence
  Description of Artificial Sequence: Synthetic oligonucleotide
  Sense strand starting at position 3071 of SEQ ID NO: 317365
uugggugacuuggucuaga

SEQ ID NO: 485254 - RNA, 19 nt, Artificial Sequence
  Description of Artificial Sequence: Synthetic oligonucleotide
  Antisense Strand to SEQ ID NO: 485253
ucuagaccaagucacccaa

SEQ ID NO: 485255 - RNA, 19 nt, Artificial Sequence
  Description of Artificial Sequence: Synthetic oligonucleotide
  Sense strand starting at position 3074 of SEQ ID NO: 317365
ggugacuuggucuagauca

SEQ ID NO: 485256 - RNA, 19 nt, Artificial Sequence
  Description of Artificial Sequence: Synthetic oligonucleotide
  Antisense Strand to SEQ ID NO: 485255
ugaucuagaccaagucacc

SEQ ID NO: 485257 - RNA, 19 nt, Artificial Sequence
  Description of Artificial Sequence: Synthetic oligonucleotide
  Sense strand starting at position 3218 of SEQ ID NO: 317365
cgucaucaacugcaugaua

SEQ ID NO: 485258 - RNA, 19 nt, Artificial Sequence
  Description of Artificial Sequence: Synthetic oligonucleotide
  Antisense Strand to SEQ ID NO: 485257
uaucaugcaguugaugacg

SEQ ID NO: 485259 - RNA, 19 nt, Artificial Sequence
  Description of Artificial Sequence: Synthetic oligonucleotide
  Sense strand starting at position 3318 of SEQ ID NO: 317365
ggcuaagaaucacugcaca

SEQ ID NO: 485260 - RNA, 19 nt, Artificial Sequence
  Description of Artificial Sequence: Synthetic oligonucleotide
  Antisense Strand to SEQ ID NO: 485259
ugugcagugauucuuagcc

SEQ ID NO: 485261 - RNA, 19 nt, Artificial Sequence
  Description of Artificial Sequence: Synthetic oligonucleotide
  Sense strand starting at position 3592 of SEQ ID NO: 317365
ucuguuauccuggaguuug

SEQ ID NO: 485262 - RNA, 19 nt, Artificial Sequence
  Description of Artificial Sequence: Synthetic oligonucleotide
  Antisense Strand to SEQ ID NO: 485261
caaacuccaggauaacaga

SEQ ID NO: 485263 - RNA, 19 nt, Artificial Sequence
  Description of Artificial Sequence: Synthetic oligonucleotide
  Sense strand starting at position 3610 of SEQ ID NO: 317365
ggugaagaaaucuguacuu

SEQ ID NO: 485264 - RNA, 19 nt, Artificial Sequence
  Description of Artificial Sequence: Synthetic oligonucleotide
  Antisense Strand to SEQ ID NO: 485263
aaguacagauuucuucacc

SEQ ID NO: 485265 - RNA, 19 nt, Artificial Sequence
  Description of Artificial Sequence: Synthetic oligonucleotide
  Sense strand starting at position 3719 of SEQ ID NO: 317365
aaagauuguuuaguuagac

SEQ ID NO: 485266 - RNA, 19 nt, Artificial Sequence
  Description of Artificial Sequence: Synthetic oligonucleotide
  Antisense Strand to SEQ ID NO: 485265
gucuaacuaaacaaucuuu

SEQ ID NO: 485267 - RNA, 19 nt, Artificial Sequence
  Description of Artificial Sequence: Synthetic oligonucleotide
  Sense strand starting at position 3720 of SEQ ID NO: 317365
aagauuguuuaguuagacu

SEQ ID NO: 485268 - RNA, 19 nt, Artificial Sequence
  Description of Artificial Sequence: Synthetic oligonucleotide
  Antisense Strand to SEQ ID NO: 485267
agucuaacuaaacaaucuu

SEQ ID NO: 485269 - RNA, 19 nt, Artificial Sequence
  Description of Artificial Sequence: Synthetic oligonucleotide
  Sense strand starting at position 70 of SEQ ID NO: 317366
ugggcuauucgauauaaca

SEQ ID NO: 485270 - RNA, 19 nt, Artificial Sequence
  Description of Artificial Sequence: Synthetic oligonucleotide
  Antisense Strand to SEQ ID NO: 485269
uguuauaucgaauagccca

SEQ ID NO: 485271 - RNA, 19 nt, Artificial Sequence
  Description of Artificial Sequence: Synthetic oligonucleotide
  Sense strand starting at position 275 of SEQ ID NO: 317366
agaaauggguuggauaaga

SEQ ID NO: 485272 - RNA, 19 nt, Artificial Sequence
  Description of Artificial Sequence: Synthetic oligonucleotide
  Antisense Strand to SEQ ID NO: 485271
ucuuauccaacccauuucu

SEQ ID NO: 485273 - RNA, 19 nt, Artificial Sequence
  Description of Artificial Sequence: Synthetic oligonucleotide
  Sense strand starting at position 628 of SEQ ID NO: 317366
ucauuagagacucgcaaag

SEQ ID NO: 485274 - RNA, 19 nt, Artificial Sequence
  Description of Artificial Sequence: Synthetic oligonucleotide
  Antisense Strand to SEQ ID NO: 485273
cuuugcgagucucuaauga

SEQ ID NO: 485275 - RNA, 19 nt, Artificial Sequence
  Description of Artificial Sequence: Synthetic oligonucleotide
  Sense strand starting at position 828 of SEQ ID NO: 317366
ggcugguuugcgcuggaga

SEQ ID NO: 485276 - RNA, 19 nt, Artificial Sequence
  Description of Artificial Sequence: Synthetic oligonucleotide
  Antisense Strand to SEQ ID NO: 485275
ucuccagcgcaaaccagcc

SEQ ID NO: 485277 - RNA, 19 nt, Artificial Sequence
  Description of Artificial Sequence: Synthetic oligonucleotide
  Sense strand starting at position 829 of SEQ ID NO: 317366
gcugguuugcgcuggagaa

SEQ ID NO: 485278 - RNA, 19 nt, Artificial Sequence
  Description of Artificial Sequence: Synthetic oligonucleotide
  Antisense Strand to SEQ ID NO: 485277
uucuccagcgcaaaccagc

SEQ ID NO: 485279 - RNA, 19 nt, Artificial Sequence
  Description of Artificial Sequence: Synthetic oligonucleotide
  Sense strand starting at position 830 of SEQ ID NO: 317366
cugguuugcgcuggagaac

SEQ ID NO: 485280 - RNA, 19 nt, Artificial Sequence
  Description of Artificial Sequence: Synthetic oligonucleotide
  Antisense Strand to SEQ ID NO: 485279
guucuccagcgcaaaccag

SEQ ID NO: 485281 - RNA, 19 nt, Artificial Sequence
  Description of Artificial Sequence: Synthetic oligonucleotide
  Sense strand starting at position 849 of SEQ ID NO: 317366
cagugcuaacuucgcuuaa

SEQ ID NO: 485282 - RNA, 19 nt, Artificial Sequence
  Description of Artificial Sequence: Synthetic oligonucleotide
  Antisense Strand to SEQ ID NO: 485281
uuaagcgaaguuagcacug

SEQ ID NO: 485283 - RNA, 19 nt, Artificial Sequence
  Description of Artificial Sequence: Synthetic oligonucleotide
  Sense strand starting at position 850 of SEQ ID NO: 317366
agugcuaacuucgcuuaac

SEQ ID NO: 485284 - RNA, 19 nt, Artificial Sequence
  Description of Artificial Sequence: Synthetic oligonucleotide
  Antisense Strand to SEQ ID NO: 485283
guuaagcgaaguuagcacu

SEQ ID NO: 485285 - RNA, 19 nt, Artificial Sequence
  Description of Artificial Sequence: Synthetic oligonucleotide
  Sense strand starting at position 853 of SEQ ID NO: 317366
gcuaacuucgcuuaacgga

SEQ ID NO: 485286 - RNA, 19 nt, Artificial Sequence
  Description of Artificial Sequence: Synthetic oligonucleotide
  Antisense Strand to SEQ ID NO: 485285
uccguuaagcgaaguuagc

SEQ ID NO: 485287 - RNA, 19 nt, Artificial Sequence
  Description of Artificial Sequence: Synthetic oligonucleotide
  Sense strand starting at position 860 of SEQ ID NO: 317366
ucgcuuaacggaugggaca

SEQ ID NO: 485288 - RNA, 19 nt, Artificial Sequence
  Description of Artificial Sequence: Synthetic oligonucleotide
  Antisense Strand to SEQ ID NO: 485287
ugucccauccguuaagcga

SEQ ID NO: 485289 - RNA, 19 nt, Artificial Sequence
  Description of Artificial Sequence: Synthetic oligonucleotide
  Sense strand starting at position 1204 of SEQ ID NO: 317366
caaggugacuccguuuaug

SEQ ID NO: 485290 - RNA, 19 nt, Artificial Sequence
  Description of Artificial Sequence: Synthetic oligonucleotide
  Antisense Strand to SEQ ID NO: 485289
cauaaacggagucaccuug

SEQ ID NO: 485291 - RNA, 19 nt, Artificial Sequence
  Description of Artificial Sequence: Synthetic oligonucleotide
  Sense strand starting at position 1216 of SEQ ID NO: 317366
guuuauggacucuggagaa

SEQ ID NO: 485292 - RNA, 19 nt, Artificial Sequence
  Description of Artificial Sequence: Synthetic oligonucleotide
  Antisense Strand to SEQ ID NO: 485291
uucuccagaguccauaaac

SEQ ID NO: 485293 - RNA, 19 nt, Artificial Sequence
  Description of Artificial Sequence: Synthetic oligonucleotide
  Sense strand starting at position 2054 of SEQ ID NO: 317366
ucuucugucucccaaggau

SEQ ID NO: 485294 - RNA, 19 nt, Artificial Sequence
  Description of Artificial Sequence: Synthetic oligonucleotide
  Antisense Strand to SEQ ID NO: 485293
auccuugggagacagaaga

SEQ ID NO: 485295 - RNA, 19 nt, Artificial Sequence
  Description of Artificial Sequence: Synthetic oligonucleotide
  Sense strand starting at position 2057 of SEQ ID NO: 317366
ucugucucccaaggaugaa

SEQ ID NO: 485296 - RNA, 19 nt, Artificial Sequence
  Description of Artificial Sequence: Synthetic oligonucleotide
  Antisense Strand to SEQ ID NO: 485295
uucauccuugggagacaga

SEQ ID NO: 485297 - RNA, 19 nt, Artificial Sequence
  Description of Artificial Sequence: Synthetic oligonucleotide
  Sense strand starting at position 2069 of SEQ ID NO: 317366
ggaugaacuuggcgguaaa

SEQ ID NO: 485298 - RNA, 19 nt, Artificial Sequence
  Description of Artificial Sequence: Synthetic oligonucleotide
  Antisense Strand to SEQ ID NO: 485297
uuuaccgccaaguucaucc

SEQ ID NO: 485299 - RNA, 19 nt, Artificial Sequence
  Description of Artificial Sequence: Synthetic oligonucleotide
  Sense strand starting at position 2158 of SEQ ID NO: 317366
cacgcacgcuucugcaaau

SEQ ID NO: 485300 - RNA, 19 nt, Artificial Sequence
  Description of Artificial Sequence: Synthetic oligonucleotide
  Antisense Strand to SEQ ID NO: 485299
auuugcagaagcgugcgug

SEQ ID NO: 485301 - RNA, 19 nt, Artificial Sequence
  Description of Artificial Sequence: Synthetic oligonucleotide
  Sense strand starting at position 2211 of SEQ ID NO: 317366
gggaucucaauagguauua

SEQ ID NO: 485302 - RNA, 19 nt, Artificial Sequence
  Description of Artificial Sequence: Synthetic oligonucleotide
  Antisense Strand to SEQ ID NO: 485301
uaauaccuauugagauccc

SEQ ID NO: 485303 - RNA, 19 nt, Artificial Sequence
  Description of Artificial Sequence: Synthetic oligonucleotide
  Sense strand starting at position 2212 of SEQ ID NO: 317366
ggaucucaauagguauuau

SEQ ID NO: 485304 - RNA, 19 nt, Artificial Sequence
  Description of Artificial Sequence: Synthetic oligonucleotide
  Antisense Strand to SEQ ID NO: 485303
auaauaccuauugagaucc

SEQ ID NO: 485305 - RNA, 19 nt, Artificial Sequence
  Description of Artificial Sequence: Synthetic oligonucleotide
  Sense strand starting at position 2470 of SEQ ID NO: 317366
augcacuucgcugaaggau

SEQ ID NO: 485306 - RNA, 19 nt, Artificial Sequence
  Description of Artificial Sequence: Synthetic oligonucleotide
  Antisense Strand to SEQ ID NO: 485305
auccuucagcgaagugcau

SEQ ID NO: 485307 - RNA, 19 nt, Artificial Sequence
  Description of Artificial Sequence: Synthetic oligonucleotide
  Sense strand starting at position 2482 of SEQ ID NO: 317366
gaaggaugucugggcaauc

SEQ ID NO: 485308 - RNA, 19 nt, Artificial Sequence
  Description of Artificial Sequence: Synthetic oligonucleotide
  Antisense Strand to SEQ ID NO: 485307
gauugcccagacauccuuc

SEQ ID NO: 485309 - RNA, 19 nt, Artificial Sequence
  Description of Artificial Sequence: Synthetic oligonucleotide
  Sense strand starting at position 2877 of SEQ ID NO: 317366
ccgcucgucucccagauaa

SEQ ID NO: 485310 - RNA, 19 nt, Artificial Sequence
  Description of Artificial Sequence: Synthetic oligonucleotide
  Antisense Strand to SEQ ID NO: 485309
uuaucugggagacgagcgg

SEQ ID NO: 485311 - RNA, 19 nt, Artificial Sequence
  Description of Artificial Sequence: Synthetic oligonucleotide
  Sense strand starting at position 2910 of SEQ ID NO: 317366
gcagacaccugauggcaaa

SEQ ID NO: 485312 - RNA, 19 nt, Artificial Sequence
  Description of Artificial Sequence: Synthetic oligonucleotide
  Antisense Strand to SEQ ID NO: 485311
uuugccaucaggugucugc

SEQ ID NO: 485313 - RNA, 19 nt, Artificial Sequence
  Description of Artificial Sequence: Synthetic oligonucleotide
  Sense strand starting at position 2997 of SEQ ID NO: 317366
agugguucguccuucucaa

SEQ ID NO: 485314 - RNA, 19 nt, Artificial Sequence
  Description of Artificial Sequence: Synthetic oligonucleotide
  Antisense Strand to SEQ ID NO: 485313
uugagaaggacgaaccacu

SEQ ID NO: 485315 - RNA, 19 nt, Artificial Sequence
  Description of Artificial Sequence: Synthetic oligonucleotide
  Sense strand starting at position 3139 of SEQ ID NO: 317366
gguaguccuucuccuucua

SEQ ID NO: 485316 - RNA, 19 nt, Artificial Sequence
  Description of Artificial Sequence: Synthetic oligonucleotide
  Antisense Strand to SEQ ID NO: 485315
uagaaggagaaggacuacc

SEQ ID NO: 485317 - RNA, 19 nt, Artificial Sequence
  Description of Artificial Sequence: Synthetic oligonucleotide
  Sense strand starting at position 3272 of SEQ ID NO: 317366
ccuggcaagugucuaaaca

SEQ ID NO: 485318 - RNA, 19 nt, Artificial Sequence
  Description of Artificial Sequence: Synthetic oligonucleotide
  Antisense Strand to SEQ ID NO: 485317
uguuuagacacuugccagg

SEQ ID NO: 485319 - RNA, 19 nt, Artificial Sequence
  Description of Artificial Sequence: Synthetic oligonucleotide
  Sense strand starting at position 3273 of SEQ ID NO: 317366
cuggcaagugucuaaacaa

SEQ ID NO: 485320 - RNA, 19 nt, Artificial Sequence
  Description of Artificial Sequence: Synthetic oligonucleotide
  Antisense Strand to SEQ ID NO: 485319
uuguuuagacacuugccag

SEQ ID NO: 485321 - RNA, 19 nt, Artificial Sequence
  Description of Artificial Sequence: Synthetic oligonucleotide
  Sense strand starting at position 3316 of SEQ ID NO: 317366
cucgcuugucuggaaggaa

SEQ ID NO: 485322 - RNA, 19 nt, Artificial Sequence
  Description of Artificial Sequence: Synthetic oligonucleotide
  Antisense Strand to SEQ ID NO: 485321
uuccuuccagacaagcgag

SEQ ID NO: 485323 - RNA, 19 nt, Artificial Sequence
  Description of Artificial Sequence: Synthetic oligonucleotide
  Sense strand starting at position 3335 of SEQ ID NO: 317366
gguggguuguugucguaac

SEQ ID NO: 485324 - RNA, 19 nt, Artificial Sequence
  Description of Artificial Sequence: Synthetic oligonucleotide
  Antisense Strand to SEQ ID NO: 485323
guuacgacaacaacccacc

SEQ ID NO: 485325 - RNA, 19 nt, Artificial Sequence
  Description of Artificial Sequence: Synthetic oligonucleotide
  Sense strand starting at position 3336 of SEQ ID NO: 317366
guggguuguugucguaacu

SEQ ID NO: 485326 - RNA, 19 nt, Artificial Sequence
  Description of Artificial Sequence: Synthetic oligonucleotide
  Antisense Strand to SEQ ID NO: 485325
aguuacgacaacaacccac

SEQ ID NO: 485327 - RNA, 19 nt, Artificial Sequence
  Description of Artificial Sequence: Synthetic oligonucleotide
  Sense strand starting at position 3345 of SEQ ID NO: 317366
ugucguaacuggaguuguu

SEQ ID NO: 485328 - RNA, 19 nt, Artificial Sequence
  Description of Artificial Sequence: Synthetic oligonucleotide
  Antisense Strand to SEQ ID NO: 485327
aacaacuccaguuacgaca

SEQ ID NO: 485329 - RNA, 19 nt, Artificial Sequence
  Description of Artificial Sequence: Synthetic oligonucleotide
  Sense strand starting at position 3882 of SEQ ID NO: 317366
gcaaacuuggcccgaagaa

SEQ ID NO: 485330 - RNA, 19 nt, Artificial Sequence
  Description of Artificial Sequence: Synthetic oligonucleotide
  Antisense Strand to SEQ ID NO: 485329
uucuucgggccaaguuugc

SEQ ID NO: 485331 - RNA, 19 nt, Artificial Sequence
  Description of Artificial Sequence: Synthetic oligonucleotide
  Sense strand starting at position 3944 of SEQ ID NO: 317366
ugaccugggcucggagaua

SEQ ID NO: 485332 - RNA, 19 nt, Artificial Sequence
  Description of Artificial Sequence: Synthetic oligonucleotide
  Antisense Strand to SEQ ID NO: 485331
uaucuccgagcccagguca

SEQ ID NO: 485333 - RNA, 19 nt, Artificial Sequence
  Description of Artificial Sequence: Synthetic oligonucleotide
  Sense strand starting at position 3955 of SEQ ID NO: 317366
cggagauagucguuugcag

SEQ ID NO: 485334 - RNA, 19 nt, Artificial Sequence
  Description of Artificial Sequence: Synthetic oligonucleotide
  Antisense Strand to SEQ ID NO: 485333
cugcaaacgacuaucuccg

SEQ ID NO: 485335 - RNA, 19 nt, Artificial Sequence
  Description of Artificial Sequence: Synthetic oligonucleotide
  Sense strand starting at position 3957 of SEQ ID NO: 317366
gagauagucguuugcagug

SEQ ID NO: 485336 - RNA, 19 nt, Artificial Sequence
  Description of Artificial Sequence: Synthetic oligonucleotide
  Antisense Strand to SEQ ID NO: 485335
cacugcaaacgacuaucuc

SEQ ID NO: 485337 - RNA, 19 nt, Artificial Sequence
  Description of Artificial Sequence: Synthetic oligonucleotide
  Sense strand starting at position 3962 of SEQ ID NO: 317366
agucguuugcagugggaga

SEQ ID NO: 485338 - RNA, 19 nt, Artificial Sequence
  Description of Artificial Sequence: Synthetic oligonucleotide
  Antisense Strand to SEQ ID NO: 485337
ucucccacugcaaacgacu

SEQ ID NO: 485339 - RNA, 19 nt, Artificial Sequence
  Description of Artificial Sequence: Synthetic oligonucleotide
  Sense strand starting at position 3963 of SEQ ID NO: 317366
gucguuugcagugggagaa

SEQ ID NO: 485340 - RNA, 19 nt, Artificial Sequence
  Description of Artificial Sequence: Synthetic oligonucleotide
  Antisense Strand to SEQ ID NO: 485339
uucucccacugcaaacgac

SEQ ID NO: 485341 - RNA, 19 nt, Artificial Sequence
  Description of Artificial Sequence: Synthetic oligonucleotide
  Sense strand starting at position 3964 of SEQ ID NO: 317366
ucguuugcagugggagaau

SEQ ID NO: 485342 - RNA, 19 nt, Artificial Sequence
  Description of Artificial Sequence: Synthetic oligonucleotide
  Antisense Strand to SEQ ID NO: 485341
auucucccacugcaaacga

SEQ ID NO: 485343 - RNA, 19 nt, Artificial Sequence
  Description of Artificial Sequence: Synthetic oligonucleotide
  Sense strand starting at position 3983 of SEQ ID NO: 317366
gggaagaggucggcuuuga

SEQ ID NO: 485344 - RNA, 19 nt, Artificial Sequence
  Description of Artificial Sequence: Synthetic oligonucleotide
  Antisense Strand to SEQ ID NO: 485343
ucaaagccgaccucuuccc

SEQ ID NO: 485345 - RNA, 19 nt, Artificial Sequence
  Description of Artificial Sequence: Synthetic oligonucleotide
  Sense strand starting at position 318 of SEQ ID NO: 317367
ccuguaauaugguuuaauu

SEQ ID NO: 485346 - RNA, 19 nt, Artificial Sequence
  Description of Artificial Sequence: Synthetic oligonucleotide
  Antisense Strand to SEQ ID NO: 485345
aauuaaaccauauuacagg

SEQ ID NO: 485347 - RNA, 19 nt, Artificial Sequence
  Description of Artificial Sequence: Synthetic oligonucleotide
  Sense strand starting at position 386 of SEQ ID NO: 317367
ccaugucauccugauguau

SEQ ID NO: 485348 - RNA, 19 nt, Artificial Sequence
  Description of Artificial Sequence: Synthetic oligonucleotide
  Antisense Strand to SEQ ID NO: 485347
auacaucaggaugacaugg

SEQ ID NO: 485349 - RNA, 19 nt, Artificial Sequence
  Description of Artificial Sequence: Synthetic oligonucleotide
  Sense strand starting at position 523 of SEQ ID NO: 317367
uuuauaaagccucagugau

SEQ ID NO: 485350 - RNA, 19 nt, Artificial Sequence
  Description of Artificial Sequence: Synthetic oligonucleotide
  Antisense Strand to SEQ ID NO: 485349
aucacugaggcuuuauaaa

SEQ ID NO: 485351 - RNA, 19 nt, Artificial Sequence
  Description of Artificial Sequence: Synthetic oligonucleotide
  Sense strand starting at position 613 of SEQ ID NO: 317367
gcuacugcagcuuaaacau

SEQ ID NO: 485352 - RNA, 19 nt, Artificial Sequence
  Description of Artificial Sequence: Synthetic oligonucleotide
  Antisense Strand to SEQ ID NO: 485351
auguuuaagcugcaguagc

SEQ ID NO: 485353 - RNA, 19 nt, Artificial Sequence
  Description of Artificial Sequence: Synthetic oligonucleotide
  Sense strand starting at position 672 of SEQ ID NO: 317367
ucuacuagguuauuagauu

SEQ ID NO: 485354 - RNA, 19 nt, Artificial Sequence
  Description of Artificial Sequence: Synthetic oligonucleotide
  Antisense Strand to SEQ ID NO: 485353
aaucuaauaaccuaguaga

SEQ ID NO: 485355 - RNA, 19 nt, Artificial Sequence
  Description of Artificial Sequence: Synthetic oligonucleotide
  Sense strand starting at position 673 of SEQ ID NO: 317367
cuacuagguuauuagauuu

SEQ ID NO: 485356 - RNA, 19 nt, Artificial Sequence
  Description of Artificial Sequence: Synthetic oligonucleotide
  Antisense Strand to SEQ ID NO: 485355
aaaucuaauaaccuaguag

SEQ ID NO: 485357 - RNA, 19 nt, Artificial Sequence
  Description of Artificial Sequence: Synthetic oligonucleotide
  Sense strand starting at position 756 of SEQ ID NO: 317367
auguaauaaacguaguuga

SEQ ID NO: 485358 - RNA, 19 nt, Artificial Sequence
  Description of Artificial Sequence: Synthetic oligonucleotide
  Antisense Strand to SEQ ID NO: 485357
ucaacuacguuuauuacau

SEQ ID NO: 485359 - RNA, 19 nt, Artificial Sequence
  Description of Artificial Sequence: Synthetic oligonucleotide
  Sense strand starting at position 759 of SEQ ID NO: 317367
uaauaaacguaguugagaa

SEQ ID NO: 485360 - RNA, 19 nt, Artificial Sequence
  Description of Artificial Sequence: Synthetic oligonucleotide
  Antisense Strand to SEQ ID NO: 485359
uucucaacuacguuuauua

SEQ ID NO: 485361 - RNA, 19 nt, Artificial Sequence
  Description of Artificial Sequence: Synthetic oligonucleotide
  Sense strand starting at position 837 of SEQ ID NO: 317367
agaaguguaagaggccaau

SEQ ID NO: 485362 - RNA, 19 nt, Artificial Sequence
  Description of Artificial Sequence: Synthetic oligonucleotide
  Antisense Strand to SEQ ID NO: 485361
auuggccucuuacacuucu

SEQ ID NO: 485363 - RNA, 19 nt, Artificial Sequence
  Description of Artificial Sequence: Synthetic oligonucleotide
  Sense strand starting at position 846 of SEQ ID NO: 317367
agaggccaaugucuuuaau

SEQ ID NO: 485364 - RNA, 19 nt, Artificial Sequence
  Description of Artificial Sequence: Synthetic oligonucleotide
  Antisense Strand to SEQ ID NO: 485363
auuaaagacauuggccucu

SEQ ID NO: 485365 - RNA, 19 nt, Artificial Sequence
  Description of Artificial Sequence: Synthetic oligonucleotide
  Sense strand starting at position 848 of SEQ ID NO: 317367
aggccaaugucuuuaauug

SEQ ID NO: 485366 - RNA, 19 nt, Artificial Sequence
  Description of Artificial Sequence: Synthetic oligonucleotide
  Antisense Strand to SEQ ID NO: 485365
caauuaaagacauuggccu

SEQ ID NO: 485367 - RNA, 19 nt, Artificial Sequence
  Description of Artificial Sequence: Synthetic oligonucleotide
  Sense strand starting at position 1104 of SEQ ID NO: 317367
uccuaagaacugcaguauu

SEQ ID NO: 485368 - RNA, 19 nt, Artificial Sequence
  Description of Artificial Sequence: Synthetic oligonucleotide
  Antisense Strand to SEQ ID NO: 485367
aauacugcaguucuuagga

SEQ ID NO: 485369 - RNA, 19 nt, Artificial Sequence
  Description of Artificial Sequence: Synthetic oligonucleotide
  Sense strand starting at position 1115 of SEQ ID NO: 317367
gcaguauuacaccaaugau

SEQ ID NO: 485370 - RNA, 19 nt, Artificial Sequence
  Description of Artificial Sequence: Synthetic oligonucleotide
  Antisense Strand to SEQ ID NO: 485369
aucauugguguaauacugc

SEQ ID NO: 485371 - RNA, 19 nt, Artificial Sequence
  Description of Artificial Sequence: Synthetic oligonucleotide
  Sense strand starting at position 1240 of SEQ ID NO: 317367
ucagaauaacacugaugca

SEQ ID NO: 485372 - RNA, 19 nt, Artificial Sequence
  Description of Artificial Sequence: Synthetic oligonucleotide
  Antisense Strand to SEQ ID NO: 485371
ugcaucaguguuauucuga

SEQ ID NO: 485373 - RNA, 19 nt, Artificial Sequence
  Description of Artificial Sequence: Synthetic oligonucleotide
  Sense strand starting at position 1419 of SEQ ID NO: 317367
gugggcaaguuauccacaa

SEQ ID NO: 485374 - RNA, 19 nt, Artificial Sequence
  Description of Artificial Sequence: Synthetic oligonucleotide
  Antisense Strand to SEQ ID NO: 485373
uuguggauaacuugcccac

SEQ ID NO: 485375 - RNA, 19 nt, Artificial Sequence
  Description of Artificial Sequence: Synthetic oligonucleotide
  Sense strand starting at position 1423 of SEQ ID NO: 317367
gcaaguuauccacaacagg

SEQ ID NO: 485376 - RNA, 19 nt, Artificial Sequence
  Description of Artificial Sequence: Synthetic oligonucleotide
  Antisense Strand to SEQ ID NO: 485375
ccuguuguggauaacuugc

SEQ ID NO: 485377 - RNA, 19 nt, Artificial Sequence
  Description of Artificial Sequence: Synthetic oligonucleotide
  Sense strand starting at position 1470 of SEQ ID NO: 317367
gaggcauucugagauuuag

SEQ ID NO: 485378 - RNA, 19 nt, Artificial Sequence
  Description of Artificial Sequence: Synthetic oligonucleotide
  Antisense Strand to SEQ ID NO: 485377
cuaaaucucagaaugccuc

SEQ ID NO: 485379 - RNA, 19 nt, Artificial Sequence
  Description of Artificial Sequence: Synthetic oligonucleotide
  Sense strand starting at position 1481 of SEQ ID NO: 317367
agauuuagcggcugagagu

SEQ ID NO: 485380 - RNA, 19 nt, Artificial Sequence
  Description of Artificial Sequence: Synthetic oligonucleotide
  Antisense Strand to SEQ ID NO: 485379
acucucagccgcuaaaucu

SEQ ID NO: 485381 - RNA, 19 nt, Artificial Sequence
  Description of Artificial Sequence: Synthetic oligonucleotide
  Sense strand starting at position 1632 of SEQ ID NO: 317367
aaaggaugcuuucucagga

SEQ ID NO: 485382 - RNA, 19 nt, Artificial Sequence
  Description of Artificial Sequence: Synthetic oligonucleotide
  Antisense Strand to SEQ ID NO: 485381
uccugagaaagcauccuuu

SEQ ID NO: 485383 - RNA, 19 nt, Artificial Sequence
  Description of Artificial Sequence: Synthetic oligonucleotide
  Sense strand starting at position 1639 of SEQ ID NO: 317367
gcuuucucaggagaugguu

SEQ ID NO: 485384 - RNA, 19 nt, Artificial Sequence
  Description of Artificial Sequence: Synthetic oligonucleotide
  Antisense Strand to SEQ ID NO: 485383
aaccaucuccugagaaagc

SEQ ID NO: 485385 - RNA, 19 nt, Artificial Sequence
  Description of Artificial Sequence: Synthetic oligonucleotide
  Sense strand starting at position 1699 of SEQ ID NO: 317367
gguuaucuugcaccgugua

SEQ ID NO: 485386 - RNA, 19 nt, Artificial Sequence
  Description of Artificial Sequence: Synthetic oligonucleotide
  Antisense Strand to SEQ ID NO: 485385
uacacggugcaagauaacc

SEQ ID NO: 485387 - RNA, 19 nt, Artificial Sequence
  Description of Artificial Sequence: Synthetic oligonucleotide
  Sense strand starting at position 1702 of SEQ ID NO: 317367
uaucuugcaccguguauuu

SEQ ID NO: 485388 - RNA, 19 nt, Artificial Sequence
  Description of Artificial Sequence: Synthetic oligonucleotide
  Antisense Strand to SEQ ID NO: 485387
aaauacacggugcaagaua

SEQ ID NO: 485389 - RNA, 19 nt, Artificial Sequence
  Description of Artificial Sequence: Synthetic oligonucleotide
  Sense strand starting at position 1704 of SEQ ID NO: 317367
ucuugcaccguguauuuaa

SEQ ID NO: 485390 - RNA, 19 nt, Artificial Sequence
  Description of Artificial Sequence: Synthetic oligonucleotide
  Antisense Strand to SEQ ID NO: 485389
uuaaauacacggugcaaga

SEQ ID NO: 485391 - RNA, 19 nt, Artificial Sequence
  Description of Artificial Sequence: Synthetic oligonucleotide
  Sense strand starting at position 2090 of SEQ ID NO: 317367
ccgccaaaccuuugaauaa

SEQ ID NO: 485392 - RNA, 19 nt, Artificial Sequence
  Description of Artificial Sequence: Synthetic oligonucleotide
  Antisense Strand to SEQ ID NO: 485391
uuauucaaagguuuggcgg

SEQ ID NO: 485393 - RNA, 19 nt, Artificial Sequence
  Description of Artificial Sequence: Synthetic oligonucleotide
  Sense strand starting at position 3204 of SEQ ID NO: 317367
ccguuucuuccuggagaaa

SEQ ID NO: 485394 - RNA, 19 nt, Artificial Sequence
  Description of Artificial Sequence: Synthetic oligonucleotide
  Antisense Strand to SEQ ID NO: 485393
uuucuccaggaagaaacgg

SEQ ID NO: 485395 - RNA, 19 nt, Artificial Sequence
  Description of Artificial Sequence: Synthetic oligonucleotide
  Sense strand starting at position 3287 of SEQ ID NO: 317367
guccauuaucugcaaguga

SEQ ID NO: 485396 - RNA, 19 nt, Artificial Sequence
  Description of Artificial Sequence: Synthetic oligonucleotide
  Antisense Strand to SEQ ID NO: 485395
ucacuugcagauaauggac

SEQ ID NO: 485397 - RNA, 19 nt, Artificial Sequence
  Description of Artificial Sequence: Synthetic oligonucleotide
  Sense strand starting at position 3361 of SEQ ID NO: 317367
cccacugaaucguucuaua

SEQ ID NO: 485398 - RNA, 19 nt, Artificial Sequence
  Description of Artificial Sequence: Synthetic oligonucleotide
  Antisense Strand to SEQ ID NO: 485397
uauagaacgauucaguggg

SEQ ID NO: 485399 - RNA, 19 nt, Artificial Sequence
  Description of Artificial Sequence: Synthetic oligonucleotide
  Sense strand starting at position 3366 of SEQ ID NO: 317367
ugaaucguucuauaaacgu

SEQ ID NO: 485400 - RNA, 19 nt, Artificial Sequence
  Description of Artificial Sequence: Synthetic oligonucleotide
  Antisense Strand to SEQ ID NO: 485399
acguuuauagaacgauuca

SEQ ID NO: 485401 - RNA, 19 nt, Artificial Sequence
  Description of Artificial Sequence: Synthetic oligonucleotide
  Sense strand starting at position 3481 of SEQ ID NO: 317367
guuguacguacccagaauu

SEQ ID NO: 485402 - RNA, 19 nt, Artificial Sequence
  Description of Artificial Sequence: Synthetic oligonucleotide
  Antisense Strand to SEQ ID NO: 485401
aauucuggguacguacaac

SEQ ID NO: 485403 - RNA, 19 nt, Artificial Sequence
  Description of Artificial Sequence: Synthetic oligonucleotide
  Sense strand starting at position 3494 of SEQ ID NO: 317367
agaauuggauagccuagua

SEQ ID NO: 485404 - RNA, 19 nt, Artificial Sequence
  Description of Artificial Sequence: Synthetic oligonucleotide
  Antisense Strand to SEQ ID NO: 485403
uacuaggcuauccaauucu

SEQ ID NO: 485405 - RNA, 19 nt, Artificial Sequence
  Description of Artificial Sequence: Synthetic oligonucleotide
  Sense strand starting at position 3567 of SEQ ID NO: 317367
ucaggauccagugauucga

SEQ ID NO: 485406 - RNA, 19 nt, Artificial Sequence
  Description of Artificial Sequence: Synthetic oligonucleotide
  Antisense Strand to SEQ ID NO: 485405
ucgaaucacuggauccuga

SEQ ID NO: 485407 - RNA, 19 nt, Artificial Sequence
  Description of Artificial Sequence: Synthetic oligonucleotide
  Sense strand starting at position 3571 of SEQ ID NO: 317367
gauccagugauucgaguag

SEQ ID NO: 485408 - RNA, 19 nt, Artificial Sequence
  Description of Artificial Sequence: Synthetic oligonucleotide
  Antisense Strand to SEQ ID NO: 485407
cuacucgaaucacuggauc

SEQ ID NO: 485409 - RNA, 19 nt, Artificial Sequence
  Description of Artificial Sequence: Synthetic oligonucleotide
  Sense strand starting at position 3575 of SEQ ID NO: 317367
cagugauucgaguagguaa

SEQ ID NO: 485410 - RNA, 19 nt, Artificial Sequence
  Description of Artificial Sequence: Synthetic oligonucleotide
  Antisense Strand to SEQ ID NO: 485409
uuaccuacucgaaucacug

SEQ ID NO: 485411 - RNA, 19 nt, Artificial Sequence
  Description of Artificial Sequence: Synthetic oligonucleotide
  Sense strand starting at position 3624 of SEQ ID NO: 317367
aggagauacugcuuuagaa

SEQ ID NO: 485412 - RNA, 19 nt, Artificial Sequence
  Description of Artificial Sequence: Synthetic oligonucleotide
  Antisense Strand to SEQ ID NO: 485411
uucuaaagcaguaucuccu

SEQ ID NO: 485413 - RNA, 19 nt, Artificial Sequence
  Description of Artificial Sequence: Synthetic oligonucleotide
  Sense strand starting at position 3710 of SEQ ID NO: 317367
ccuaccugaucugcauaga

SEQ ID NO: 485414 - RNA, 19 nt, Artificial Sequence
  Description of Artificial Sequence: Synthetic oligonucleotide
  Antisense Strand to SEQ ID NO: 485413
ucuaugcagaucagguagg

SEQ ID NO: 485415 - RNA, 19 nt, Artificial Sequence
  Description of Artificial Sequence: Synthetic oligonucleotide
  Sense strand starting at position 3713 of SEQ ID NO: 317367
accugaucugcauagacau

SEQ ID NO: 485416 - RNA, 19 nt, Artificial Sequence
  Description of Artificial Sequence: Synthetic oligonucleotide
  Antisense Strand to SEQ ID NO: 485415
augucuaugcagaucaggu

SEQ ID NO: 485417 - RNA, 19 nt, Artificial Sequence
  Description of Artificial Sequence: Synthetic oligonucleotide
  Sense strand starting at position 3739 of SEQ ID NO: 317367
aucuucuugcaagagucaa

SEQ ID NO: 485418 - RNA, 19 nt, Artificial Sequence
  Description of Artificial Sequence: Synthetic oligonucleotide
  Antisense Strand to SEQ ID NO: 485417
uugacucuugcaagaagau

SEQ ID NO: 485419 - RNA, 19 nt, Artificial Sequence
  Description of Artificial Sequence: Synthetic oligonucleotide
  Sense strand starting at position 3894 of SEQ ID NO: 317367
cccagcaauguauaucaga

SEQ ID NO: 485420 - RNA, 19 nt, Artificial Sequence
  Description of Artificial Sequence: Synthetic oligonucleotide
  Antisense Strand to SEQ ID NO: 485419
ucugauauacauugcuggg

SEQ ID NO: 485421 - RNA, 19 nt, Artificial Sequence
  Description of Artificial Sequence: Synthetic oligonucleotide
  Sense strand starting at position 3902 of SEQ ID NO: 317367
uguauaucagaauaugucu

SEQ ID NO: 485422 - RNA, 19 nt, Artificial Sequence
  Description of Artificial Sequence: Synthetic oligonucleotide
  Antisense Strand to SEQ ID NO: 485421
agacauauucugauauaca

SEQ ID NO: 485423 - RNA, 19 nt, Artificial Sequence
  Description of Artificial Sequence: Synthetic oligonucleotide
  Sense strand starting at position 3955 of SEQ ID NO: 317367
agcacuuacuggucaauuc

SEQ ID NO: 485424 - RNA, 19 nt, Artificial Sequence
  Description of Artificial Sequence: Synthetic oligonucleotide
  Antisense Strand to SEQ ID NO: 485423
gaauugaccaguaagugcu

SEQ ID NO: 485425 - RNA, 19 nt, Artificial Sequence
  Description of Artificial Sequence: Synthetic oligonucleotide
  Sense strand starting at position 98 of SEQ ID NO: 317368
uccuaagaacugcaguauu

SEQ ID NO: 485426 - RNA, 19 nt, Artificial Sequence
  Description of Artificial Sequence: Synthetic oligonucleotide
  Antisense Strand to SEQ ID NO: 485425
aauacugcaguucuuagga

SEQ ID NO: 485427 - RNA, 19 nt, Artificial Sequence
  Description of Artificial Sequence: Synthetic oligonucleotide
  Sense strand starting at position 109 of SEQ ID NO: 317368
gcaguauuacaccaaugau

SEQ ID NO: 485428 - RNA, 19 nt, Artificial Sequence
  Description of Artificial Sequence: Synthetic oligonucleotide
  Antisense Strand to SEQ ID NO: 485427
aucauugguguaauacugc

SEQ ID NO: 485429 - RNA, 19 nt, Artificial Sequence
  Description of Artificial Sequence: Synthetic oligonucleotide
  Sense strand starting at position 234 of SEQ ID NO: 317368
ucagaauaacacugaugca

SEQ ID NO: 485430 - RNA, 19 nt, Artificial Sequence
  Description of Artificial Sequence: Synthetic oligonucleotide
  Antisense Strand to SEQ ID NO: 485429
ugcaucaguguuauucuga

SEQ ID NO: 485431 - RNA, 19 nt, Artificial Sequence
  Description of Artificial Sequence: Synthetic oligonucleotide
  Sense strand starting at position 288 of SEQ ID NO: 317368
gaacacuucuguuccgauu

SEQ ID NO: 485432 - RNA, 19 nt, Artificial Sequence
  Description of Artificial Sequence: Synthetic oligonucleotide
  Antisense Strand to SEQ ID NO: 485431
aaucggaacagaaguguuc

SEQ ID NO: 485433 - RNA, 19 nt, Artificial Sequence
  Description of Artificial Sequence: Synthetic oligonucleotide
  Sense strand starting at position 396 of SEQ ID NO: 317368
cauuguguuacugaggugu

SEQ ID NO: 485434 - RNA, 19 nt, Artificial Sequence
  Description of Artificial Sequence: Synthetic oligonucleotide
  Antisense Strand to SEQ ID NO: 485433
acaccucaguaacacaaug

SEQ ID NO: 485435 - RNA, 19 nt, Artificial Sequence
  Description of Artificial Sequence: Synthetic oligonucleotide
  Sense strand starting at position 413 of SEQ ID NO: 317368
gugggcaaguuauccacaa

SEQ ID NO: 485436 - RNA, 19 nt, Artificial Sequence
  Description of Artificial Sequence: Synthetic oligonucleotide
  Antisense Strand to SEQ ID NO: 485435
uuguggauaacuugcccac

SEQ ID NO: 485437 - RNA, 19 nt, Artificial Sequence
  Description of Artificial Sequence: Synthetic oligonucleotide
  Sense strand starting at position 417 of SEQ ID NO: 317368
gcaaguuauccacaacagg

SEQ ID NO: 485438 - RNA, 19 nt, Artificial Sequence
  Description of Artificial Sequence: Synthetic oligonucleotide
  Antisense Strand to SEQ ID NO: 485437
ccuguuguggauaacuugc

SEQ ID NO: 485439 - RNA, 19 nt, Artificial Sequence
  Description of Artificial Sequence: Synthetic oligonucleotide
  Sense strand starting at position 464 of SEQ ID NO: 317368
gaggcauucugagauuuag

SEQ ID NO: 485440 - RNA, 19 nt, Artificial Sequence
  Description of Artificial Sequence: Synthetic oligonucleotide
  Antisense Strand to SEQ ID NO: 485439
cuaaaucucagaaugccuc

SEQ ID NO: 485441 - RNA, 19 nt, Artificial Sequence
  Description of Artificial Sequence: Synthetic oligonucleotide
  Sense strand starting at position 475 of SEQ ID NO: 317368
agauuuagcggcugagagu

SEQ ID NO: 485442 - RNA, 19 nt, Artificial Sequence
  Description of Artificial Sequence: Synthetic oligonucleotide
  Antisense Strand to SEQ ID NO: 485441
acucucagccgcuaaaucu

SEQ ID NO: 485443 - RNA, 19 nt, Artificial Sequence
  Description of Artificial Sequence: Synthetic oligonucleotide
  Sense strand starting at position 626 of SEQ ID NO: 317368
aaaggaugcuuucucagga

SEQ ID NO: 485444 - RNA, 19 nt, Artificial Sequence
  Description of Artificial Sequence: Synthetic oligonucleotide
  Antisense Strand to SEQ ID NO: 485443
uccugagaaagcauccuuu

SEQ ID NO: 485445 - RNA, 19 nt, Artificial Sequence
  Description of Artificial Sequence: Synthetic oligonucleotide
  Sense strand starting at position 633 of SEQ ID NO: 317368
gcuuucucaggagaugguu

SEQ ID NO: 485446 - RNA, 19 nt, Artificial Sequence
  Description of Artificial Sequence: Synthetic oligonucleotide
  Antisense Strand to SEQ ID NO: 485445
aaccaucuccugagaaagc

SEQ ID NO: 485447 - RNA, 19 nt, Artificial Sequence
  Description of Artificial Sequence: Synthetic oligonucleotide
  Sense strand starting at position 693 of SEQ ID NO: 317368
gguuaucuugcaccgugua

SEQ ID NO: 485448 - RNA, 19 nt, Artificial Sequence
  Description of Artificial Sequence: Synthetic oligonucleotide
  Antisense Strand to SEQ ID NO: 485447
uacacggugcaagauaacc

SEQ ID NO: 485449 - RNA, 19 nt, Artificial Sequence
  Description of Artificial Sequence: Synthetic oligonucleotide
  Sense strand starting at position 696 of SEQ ID NO: 317368
uaucuugcaccguguauuu

SEQ ID NO: 485450 - RNA, 19 nt, Artificial Sequence
  Description of Artificial Sequence: Synthetic oligonucleotide
  Antisense Strand to SEQ ID NO: 485449
aaauacacggugcaagaua

SEQ ID NO: 485451 - RNA, 19 nt, Artificial Sequence
  Description of Artificial Sequence: Synthetic oligonucleotide
  Sense strand starting at position 698 of SEQ ID NO: 317368
ucuugcaccguguauuuaa

SEQ ID NO: 485452 - RNA, 19 nt, Artificial Sequence
  Description of Artificial Sequence: Synthetic oligonucleotide
  Antisense Strand to SEQ ID NO: 485451
uuaaauacacggugcaaga

SEQ ID NO: 485453 - RNA, 19 nt, Artificial Sequence
  Description of Artificial Sequence: Synthetic oligonucleotide
  Sense strand starting at position 1084 of SEQ ID NO: 317368
ccgccaaaccuuugaauaa

SEQ ID NO: 485454 - RNA, 19 nt, Artificial Sequence
  Description of Artificial Sequence: Synthetic oligonucleotide
  Antisense Strand to SEQ ID NO: 485453
uuauucaaagguuuggcgg

SEQ ID NO: 485455 - RNA, 19 nt, Artificial Sequence
  Description of Artificial Sequence: Synthetic oligonucleotide
  Sense strand starting at position 2198 of SEQ ID NO: 317368
ccguuucuuccuggagaaa

SEQ ID NO: 485456 - RNA, 19 nt, Artificial Sequence
  Description of Artificial Sequence: Synthetic oligonucleotide
  Antisense Strand to SEQ ID NO: 485455
uuucuccaggaagaaacgg

SEQ ID NO: 485457 - RNA, 19 nt, Artificial Sequence
  Description of Artificial Sequence: Synthetic oligonucleotide
  Sense strand starting at position 2281 of SEQ ID NO: 317368
guccauuaucugcaaguga

SEQ ID NO: 485458 - RNA, 19 nt, Artificial Sequence
  Description of Artificial Sequence: Synthetic oligonucleotide
  Antisense Strand to SEQ ID NO: 485457
ucacuugcagauaauggac

SEQ ID NO: 485459 - RNA, 19 nt, Artificial Sequence
  Description of Artificial Sequence: Synthetic oligonucleotide
  Sense strand starting at position 2355 of SEQ ID NO: 317368
cccacugaaucguucuaua

SEQ ID NO: 485460 - RNA, 19 nt, Artificial Sequence
  Description of Artificial Sequence: Synthetic oligonucleotide
  Antisense Strand to SEQ ID NO: 485459
uauagaacgauucaguggg

SEQ ID NO: 485461 - RNA, 19 nt, Artificial Sequence
  Description of Artificial Sequence: Synthetic oligonucleotide
  Sense strand starting at position 2360 of SEQ ID NO: 317368
ugaaucguucuauaaacgu

SEQ ID NO: 485462 - RNA, 19 nt, Artificial Sequence
  Description of Artificial Sequence: Synthetic oligonucleotide
  Antisense Strand to SEQ ID NO: 485461
acguuuauagaacgauuca

SEQ ID NO: 485463 - RNA, 19 nt, Artificial Sequence
  Description of Artificial Sequence: Synthetic oligonucleotide
  Sense strand starting at position 2475 of SEQ ID NO: 317368
guuguacguacccagaauu

SEQ ID NO: 485464 - RNA, 19 nt, Artificial Sequence
  Description of Artificial Sequence: Synthetic oligonucleotide
  Antisense Strand to SEQ ID NO: 485463
aauucuggguacguacaac

SEQ ID NO: 485465 - RNA, 19 nt, Artificial Sequence
  Description of Artificial Sequence: Synthetic oligonucleotide
  Sense strand starting at position 2488 of SEQ ID NO: 317368
agaauuggauagccuagua

SEQ ID NO: 485466 - RNA, 19 nt, Artificial Sequence
  Description of Artificial Sequence: Synthetic oligonucleotide
  Antisense Strand to SEQ ID NO: 485465
uacuaggcuauccaauucu

SEQ ID NO: 485467 - RNA, 19 nt, Artificial Sequence
  Description of Artificial Sequence: Synthetic oligonucleotide
  Sense strand starting at position 2561 of SEQ ID NO: 317368
ucaggauccagugauucga

SEQ ID NO: 485468 - RNA, 19 nt, Artificial Sequence
  Description of Artificial Sequence: Synthetic oligonucleotide
  Antisense Strand to SEQ ID NO: 485467
ucgaaucacuggauccuga

SEQ ID NO: 485469 - RNA, 19 nt, Artificial Sequence
  Description of Artificial Sequence: Synthetic oligonucleotide
  Sense strand starting at position 2565 of SEQ ID NO: 317368
gauccagugauucgaguag

SEQ ID NO: 485470 - RNA, 19 nt, Artificial Sequence
  Description of Artificial Sequence: Synthetic oligonucleotide
  Antisense Strand to SEQ ID NO: 485469
cuacucgaaucacuggauc

SEQ ID NO: 485471 - RNA, 19 nt, Artificial Sequence
  Description of Artificial Sequence: Synthetic oligonucleotide
  Sense strand starting at position 2569 of SEQ ID NO: 317368
cagugauucgaguagguaa

SEQ ID NO: 485472 - RNA, 19 nt, Artificial Sequence
  Description of Artificial Sequence: Synthetic oligonucleotide
  Antisense Strand to SEQ ID NO: 485471
uuaccuacucgaaucacug

SEQ ID NO: 485473 - RNA, 19 nt, Artificial Sequence
  Description of Artificial Sequence: Synthetic oligonucleotide
  Sense strand starting at position 2618 of SEQ ID NO: 317368
aggagauacugcuuuagaa

SEQ ID NO: 485474 - RNA, 19 nt, Artificial Sequence
  Description of Artificial Sequence: Synthetic oligonucleotide
  Antisense Strand to SEQ ID NO: 485473
uucuaaagcaguaucuccu

SEQ ID NO: 485475 - RNA, 19 nt, Artificial Sequence
  Description of Artificial Sequence: Synthetic oligonucleotide
  Sense strand starting at position 2704 of SEQ ID NO: 317368
ccuaccugaucugcauaga

SEQ ID NO: 485476 - RNA, 19 nt, Artificial Sequence
  Description of Artificial Sequence: Synthetic oligonucleotide
  Antisense Strand to SEQ ID NO: 485475
ucuaugcagaucagguagg

SEQ ID NO: 485477 - RNA, 19 nt, Artificial Sequence
  Description of Artificial Sequence: Synthetic oligonucleotide
  Sense strand starting at position 2707 of SEQ ID NO: 317368
accugaucugcauagacau

SEQ ID NO: 485478 - RNA, 19 nt, Artificial Sequence
  Description of Artificial Sequence: Synthetic oligonucleotide
  Antisense Strand to SEQ ID NO: 485477
augucuaugcagaucaggu

SEQ ID NO: 485479 - RNA, 19 nt, Artificial Sequence
  Description of Artificial Sequence: Synthetic oligonucleotide
  Sense strand starting at position 2733 of SEQ ID NO: 317368
aucuucuugcaagagucaa

SEQ ID NO: 485480 - RNA, 19 nt, Artificial Sequence
  Description of Artificial Sequence: Synthetic oligonucleotide
  Antisense Strand to SEQ ID NO: 485479
uugacucuugcaagaagau

SEQ ID NO: 485481 - RNA, 19 nt, Artificial Sequence
  Description of Artificial Sequence: Synthetic oligonucleotide
  Sense strand starting at position 2888 of SEQ ID NO: 317368
cccagcaauguauaucaga

SEQ ID NO: 485482 - RNA, 19 nt, Artificial Sequence
  Description of Artificial Sequence: Synthetic oligonucleotide
  Antisense Strand to SEQ ID NO: 485481
ucugauauacauugcuggg

SEQ ID NO: 485483 - RNA, 19 nt, Artificial Sequence
  Description of Artificial Sequence: Synthetic oligonucleotide
  Sense strand starting at position 2896 of SEQ ID NO: 317368
uguauaucagaauaugucu

SEQ ID NO: 485484 - RNA, 19 nt, Artificial Sequence
  Description of Artificial Sequence: Synthetic oligonucleotide
  Antisense Strand to SEQ ID NO: 485483
agacauauucugauauaca

SEQ ID NO: 485485 - RNA, 19 nt, Artificial Sequence
  Description of Artificial Sequence: Synthetic oligonucleotide
  Sense strand starting at position 2949 of SEQ ID NO: 317368
agcacuuacuggucaauuc

SEQ ID NO: 485486 - RNA, 19 nt, Artificial Sequence
  Description of Artificial Sequence: Synthetic oligonucleotide
  Antisense Strand to SEQ ID NO: 485485
gaauugaccaguaagugcu

SEQ ID NO: 485487 - RNA, 19 nt, Artificial Sequence
  Description of Artificial Sequence: Synthetic oligonucleotide
  Sense strand starting at position 2997 of SEQ ID NO: 317368
agcguuugacgcaguugau

SEQ ID NO: 485488 - RNA, 19 nt, Artificial Sequence
  Description of Artificial Sequence: Synthetic oligonucleotide
  Antisense Strand to SEQ ID NO: 485487
aucaacugcgucaaacgcu

SEQ ID NO: 485489 - RNA, 19 nt, Artificial Sequence
  Description of Artificial Sequence: Synthetic oligonucleotide
  Sense strand starting at position 3041 of SEQ ID NO: 317368
gaaagugaaccuuguuaaa

SEQ ID NO: 485490 - RNA, 19 nt, Artificial Sequence
  Description of Artificial Sequence: Synthetic oligonucleotide
  Antisense Strand to SEQ ID NO: 485489
uuuaacaagguucacuuuc

SEQ ID NO: 485491 - RNA, 19 nt, Artificial Sequence
  Description of Artificial Sequence: Synthetic oligonucleotide
  Sense strand starting at position 3043 of SEQ ID NO: 317368
aagugaaccuuguuaaaug

SEQ ID NO: 485492 - RNA, 19 nt, Artificial Sequence
  Description of Artificial Sequence: Synthetic oligonucleotide
  Antisense Strand to SEQ ID NO: 485491
cauuuaacaagguucacuu

SEQ ID NO: 485493 - RNA, 19 nt, Artificial Sequence
  Description of Artificial Sequence: Synthetic oligonucleotide
  Sense strand starting at position 3074 of SEQ ID NO: 317368
ggccacuccucuguugaaa

SEQ ID NO: 485494 - RNA, 19 nt, Artificial Sequence
  Description of Artificial Sequence: Synthetic oligonucleotide
  Antisense Strand to SEQ ID NO: 485493
uuucaacagaggaguggcc

SEQ ID NO: 485495 - RNA, 19 nt, Artificial Sequence
  Description of Artificial Sequence: Synthetic oligonucleotide
  Sense strand starting at position 3168 of SEQ ID NO: 317368
gauacugaugcaugcuaca

SEQ ID NO: 485496 - RNA, 19 nt, Artificial Sequence
  Description of Artificial Sequence: Synthetic oligonucleotide
  Antisense Strand to SEQ ID NO: 485495
uguagcaugcaucaguauc

SEQ ID NO: 485497 - RNA, 19 nt, Artificial Sequence
  Description of Artificial Sequence: Synthetic oligonucleotide
  Sense strand starting at position 3248 of SEQ ID NO: 317368
augugaaaugcucagagua

SEQ ID NO: 485498 - RNA, 19 nt, Artificial Sequence
  Description of Artificial Sequence: Synthetic oligonucleotide
  Antisense Strand to SEQ ID NO: 485497
uacucugagcauuucacau

SEQ ID NO: 485499 - RNA, 19 nt, Artificial Sequence
  Description of Artificial Sequence: Synthetic oligonucleotide
  Sense strand starting at position 3377 of SEQ ID NO: 317368
cuaguuucuggugaugguu

SEQ ID NO: 485500 - RNA, 19 nt, Artificial Sequence
  Description of Artificial Sequence: Synthetic oligonucleotide
  Antisense Strand to SEQ ID NO: 485499
aaccaucaccagaaacuag

SEQ ID NO: 485501 - RNA, 19 nt, Artificial Sequence
  Description of Artificial Sequence: Synthetic oligonucleotide
  Sense strand starting at position 3508 of SEQ ID NO: 317368
ugcaguauaugaccuugau

SEQ ID NO: 485502 - RNA, 19 nt, Artificial Sequence
  Description of Artificial Sequence: Synthetic oligonucleotide
  Antisense Strand to SEQ ID NO: 485501
aucaaggucauauacugca

SEQ ID NO: 485503 - RNA, 19 nt, Artificial Sequence
  Description of Artificial Sequence: Synthetic oligonucleotide
  Sense strand starting at position 3964 of SEQ ID NO: 317368
uugcccauugugcaaauua

SEQ ID NO: 485504 - RNA, 19 nt, Artificial Sequence
  Description of Artificial Sequence: Synthetic oligonucleotide
  Antisense Strand to SEQ ID NO: 485503
uaauuugcacaaugggcaa

SEQ ID NO: 485505 - RNA, 19 nt, Artificial Sequence
  Description of Artificial Sequence: Synthetic oligonucleotide
  Sense strand starting at position 28 of SEQ ID NO: 317369
guuaaagagcccuaguaac

SEQ ID NO: 485506 - RNA, 19 nt, Artificial Sequence
  Description of Artificial Sequence: Synthetic oligonucleotide
  Antisense Strand to SEQ ID NO: 485505
guuacuagggcucuuuaac

SEQ ID NO: 485507 - RNA, 19 nt, Artificial Sequence
  Description of Artificial Sequence: Synthetic oligonucleotide
  Sense strand starting at position 145 of SEQ ID NO: 317369
aggaguuccuaugucacua

SEQ ID NO: 485508 - RNA, 19 nt, Artificial Sequence
  Description of Artificial Sequence: Synthetic oligonucleotide
  Antisense Strand to SEQ ID NO: 485507
uagugacauaggaacuccu

SEQ ID NO: 485509 - RNA, 19 nt, Artificial Sequence
  Description of Artificial Sequence: Synthetic oligonucleotide
  Sense strand starting at position 263 of SEQ ID NO: 317369
gguaaauuacgcuaccauu

SEQ ID NO: 485510 - RNA, 19 nt, Artificial Sequence
  Description of Artificial Sequence: Synthetic oligonucleotide
  Antisense Strand to SEQ ID NO: 485509
aaugguagcguaauuuacc

SEQ ID NO: 485511 - RNA, 19 nt, Artificial Sequence
  Description of Artificial Sequence: Synthetic oligonucleotide
  Sense strand starting at position 295 of SEQ ID NO: 317369
augauucugcaucaagacu

SEQ ID NO: 485512 - RNA, 19 nt, Artificial Sequence
  Description of Artificial Sequence: Synthetic oligonucleotide
  Antisense Strand to SEQ ID NO: 485511
agucuugaugcagaaucau

SEQ ID NO: 485513 - RNA, 19 nt, Artificial Sequence
  Description of Artificial Sequence: Synthetic oligonucleotide
  Sense strand starting at position 313 of SEQ ID NO: 317369
ucaucuucggagcaguauu

SEQ ID NO: 485514 - RNA, 19 nt, Artificial Sequence
  Description of Artificial Sequence: Synthetic oligonucleotide
  Antisense Strand to SEQ ID NO: 485513
aauacugcuccgaagauga

SEQ ID NO: 485515 - RNA, 19 nt, Artificial Sequence
  Description of Artificial Sequence: Synthetic oligonucleotide
  Sense strand starting at position 364 of SEQ ID NO: 317369
agaaaucuuugggcuccga

SEQ ID NO: 485516 - RNA, 19 nt, Artificial Sequence
  Description of Artificial Sequence: Synthetic oligonucleotide
  Antisense Strand to SEQ ID NO: 485515
ucggagcccaaagauuucu

SEQ ID NO: 485517 - RNA, 19 nt, Artificial Sequence
  Description of Artificial Sequence: Synthetic oligonucleotide
  Sense strand starting at position 440 of SEQ ID NO: 317369
auuacuuuguucccagaug

SEQ ID NO: 485518 - RNA, 19 nt, Artificial Sequence
  Description of Artificial Sequence: Synthetic oligonucleotide
  Antisense Strand to SEQ ID NO: 485517
caucugggaacaaaguaau

SEQ ID NO: 485519 - RNA, 19 nt, Artificial Sequence
  Description of Artificial Sequence: Synthetic oligonucleotide
  Sense strand starting at position 734 of SEQ ID NO: 317369
cuucccuuccaguggaaua

SEQ ID NO: 485520 - RNA, 19 nt, Artificial Sequence
  Description of Artificial Sequence: Synthetic oligonucleotide
  Antisense Strand to SEQ ID NO: 485519
uauuccacuggaagggaag

SEQ ID NO: 485521 - RNA, 19 nt, Artificial Sequence
  Description of Artificial Sequence: Synthetic oligonucleotide
  Sense strand starting at position 841 of SEQ ID NO: 317369
uguuucugcccacaacaga

SEQ ID NO: 485522 - RNA, 19 nt, Artificial Sequence
  Description of Artificial Sequence: Synthetic oligonucleotide
  Antisense Strand to SEQ ID NO: 485521
ucuguugugggcagaaaca

SEQ ID NO: 485523 - RNA, 19 nt, Artificial Sequence
  Description of Artificial Sequence: Synthetic oligonucleotide
  Sense strand starting at position 985 of SEQ ID NO: 317369
cgaaguuugguggaaacua

SEQ ID NO: 485524 - RNA, 19 nt, Artificial Sequence
  Description of Artificial Sequence: Synthetic oligonucleotide
  Antisense Strand to SEQ ID NO: 485523
uaguuuccaccaaacuucg

SEQ ID NO: 485525 - RNA, 19 nt, Artificial Sequence
  Description of Artificial Sequence: Synthetic oligonucleotide
  Sense strand starting at position 1027 of SEQ ID NO: 317369
agggaauuaugggagucua

SEQ ID NO: 485526 - RNA, 19 nt, Artificial Sequence
  Description of Artificial Sequence: Synthetic oligonucleotide
  Antisense Strand to SEQ ID NO: 485525
uagacucccauaauucccu

SEQ ID NO: 485527 - RNA, 19 nt, Artificial Sequence
  Description of Artificial Sequence: Synthetic oligonucleotide
  Sense strand starting at position 1110 of SEQ ID NO: 317369
ucaaauauuugucaggauu

SEQ ID NO: 485528 - RNA, 19 nt, Artificial Sequence
  Description of Artificial Sequence: Synthetic oligonucleotide
  Antisense Strand to SEQ ID NO: 485527
aauccugacaaauauuuga

SEQ ID NO: 485529 - RNA, 19 nt, Artificial Sequence
  Description of Artificial Sequence: Synthetic oligonucleotide
  Sense strand starting at position 1213 of SEQ ID NO: 317369
gugagagcaucauuucgua

SEQ ID NO: 485530 - RNA, 19 nt, Artificial Sequence
  Description of Artificial Sequence: Synthetic oligonucleotide
  Antisense Strand to SEQ ID NO: 485529
uacgaaaugaugcucucac

SEQ ID NO: 485531 - RNA, 19 nt, Artificial Sequence
  Description of Artificial Sequence: Synthetic oligonucleotide
  Sense strand starting at position 1217 of SEQ ID NO: 317369
gagcaucauuucguaucca

SEQ ID NO: 485532 - RNA, 19 nt, Artificial Sequence
  Description of Artificial Sequence: Synthetic oligonucleotide
  Antisense Strand to SEQ ID NO: 485531
uggauacgaaaugaugcuc

SEQ ID NO: 485533 - RNA, 19 nt, Artificial Sequence
  Description of Artificial Sequence: Synthetic oligonucleotide
  Sense strand starting at position 2170 of SEQ ID NO: 317369
ggacgcgagcucaguguuu

SEQ ID NO: 485534 - RNA, 19 nt, Artificial Sequence
  Description of Artificial Sequence: Synthetic oligonucleotide
  Antisense Strand to SEQ ID NO: 485533
aaacacugagcucgcgucc

SEQ ID NO: 485535 - RNA, 19 nt, Artificial Sequence
  Description of Artificial Sequence: Synthetic oligonucleotide
  Sense strand starting at position 2483 of SEQ ID NO: 317369
cugcgucgguuauuucuaa

SEQ ID NO: 485536 - RNA, 19 nt, Artificial Sequence
  Description of Artificial Sequence: Synthetic oligonucleotide
  Antisense Strand to SEQ ID NO: 485535
uuagaaauaaccgacgcag

SEQ ID NO: 485537 - RNA, 19 nt, Artificial Sequence
  Description of Artificial Sequence: Synthetic oligonucleotide
  Sense strand starting at position 2484 of SEQ ID NO: 317369
ugcgucgguuauuucuaaa

SEQ ID NO: 485538 - RNA, 19 nt, Artificial Sequence
  Description of Artificial Sequence: Synthetic oligonucleotide
  Antisense Strand to SEQ ID NO: 485537
uuuagaaauaaccgacgca

SEQ ID NO: 485539 - RNA, 19 nt, Artificial Sequence
  Description of Artificial Sequence: Synthetic oligonucleotide
  Sense strand starting at position 2487 of SEQ ID NO: 317369
gucgguuauuucuaaauac

SEQ ID NO: 485540 - RNA, 19 nt, Artificial Sequence
  Description of Artificial Sequence: Synthetic oligonucleotide
  Antisense Strand to SEQ ID NO: 485539
guauuuagaaauaaccgac

SEQ ID NO: 485541 - RNA, 19 nt, Artificial Sequence
  Description of Artificial Sequence: Synthetic oligonucleotide
  Sense strand starting at position 2550 of SEQ ID NO: 317369
ugccaaaguuaagcaaaua

SEQ ID NO: 485542 - RNA, 19 nt, Artificial Sequence
  Description of Artificial Sequence: Synthetic oligonucleotide
  Antisense Strand to SEQ ID NO: 485541
uauuugcuuaacuuuggca

SEQ ID NO: 485543 - RNA, 19 nt, Artificial Sequence
  Description of Artificial Sequence: Synthetic oligonucleotide
  Sense strand starting at position 2562 of SEQ ID NO: 317369
gcaaauaacgugcacacua

SEQ ID NO: 485544 - RNA, 19 nt, Artificial Sequence
  Description of Artificial Sequence: Synthetic oligonucleotide
  Antisense Strand to SEQ ID NO: 485543
uagugugcacguuauuugc

SEQ ID NO: 485545 - RNA, 19 nt, Artificial Sequence
  Description of Artificial Sequence: Synthetic oligonucleotide
  Sense strand starting at position 2620 of SEQ ID NO: 317369
agauagguggugcgaugua

SEQ ID NO: 485546 - RNA, 19 nt, Artificial Sequence
  Description of Artificial Sequence: Synthetic oligonucleotide
  Antisense Strand to SEQ ID NO: 485545
uacaucgcaccaccuaucu

SEQ ID NO: 485547 - RNA, 19 nt, Artificial Sequence
  Description of Artificial Sequence: Synthetic oligonucleotide
  Sense strand starting at position 2625 of SEQ ID NO: 317369
gguggugcgauguaaucuu

SEQ ID NO: 485548 - RNA, 19 nt, Artificial Sequence
  Description of Artificial Sequence: Synthetic oligonucleotide
  Antisense Strand to SEQ ID NO: 485547
aagauuacaucgcaccacc

SEQ ID NO: 485549 - RNA, 19 nt, Artificial Sequence
  Description of Artificial Sequence: Synthetic oligonucleotide
  Sense strand starting at position 2674 of SEQ ID NO: 317369
cguacauucuccuuaagug

SEQ ID NO: 485550 - RNA, 19 nt, Artificial Sequence
  Description of Artificial Sequence: Synthetic oligonucleotide
  Antisense Strand to SEQ ID NO: 485549
cacuuaaggagaauguacg

SEQ ID NO: 485551 - RNA, 19 nt, Artificial Sequence
  Description of Artificial Sequence: Synthetic oligonucleotide
  Sense strand starting at position 2675 of SEQ ID NO: 317369
guacauucuccuuaagugu

SEQ ID NO: 485552 - RNA, 19 nt, Artificial Sequence
  Description of Artificial Sequence: Synthetic oligonucleotide
  Antisense Strand to SEQ ID NO: 485551
acacuuaaggagaauguac

SEQ ID NO: 485553 - RNA, 19 nt, Artificial Sequence
  Description of Artificial Sequence: Synthetic oligonucleotide
  Sense strand starting at position 2787 of SEQ ID NO: 317369
uacauuguagucuguuuga

SEQ ID NO: 485554 - RNA, 19 nt, Artificial Sequence
  Description of Artificial Sequence: Synthetic oligonucleotide
  Antisense Strand to SEQ ID NO: 485553
ucaaacagacuacaaugua

SEQ ID NO: 485555 - RNA, 19 nt, Artificial Sequence
  Description of Artificial Sequence: Synthetic oligonucleotide
  Sense strand starting at position 2790 of SEQ ID NO: 317369
auuguagucuguuugauaa

SEQ ID NO: 485556 - RNA, 19 nt, Artificial Sequence
  Description of Artificial Sequence: Synthetic oligonucleotide
  Antisense Strand to SEQ ID NO: 485555
uuaucaaacagacuacaau

SEQ ID NO: 485557 - RNA, 19 nt, Artificial Sequence
  Description of Artificial Sequence: Synthetic oligonucleotide
  Sense strand starting at position 2815 of SEQ ID NO: 317369
ugcauacuacaguagauua

SEQ ID NO: 485558 - RNA, 19 nt, Artificial Sequence
  Description of Artificial Sequence: Synthetic oligonucleotide
  Antisense Strand to SEQ ID NO: 485557
uaaucuacuguaguaugca

SEQ ID NO: 485559 - RNA, 19 nt, Artificial Sequence
  Description of Artificial Sequence: Synthetic oligonucleotide
  Sense strand starting at position 2885 of SEQ ID NO: 317369
uucucuaaauguuuguuga

SEQ ID NO: 485560 - RNA, 19 nt, Artificial Sequence
  Description of Artificial Sequence: Synthetic oligonucleotide
  Antisense Strand to SEQ ID NO: 485559
ucaacaaacauuuagagaa

SEQ ID NO: 485561 - RNA, 19 nt, Artificial Sequence
  Description of Artificial Sequence: Synthetic oligonucleotide
  Sense strand starting at position 2888 of SEQ ID NO: 317369
ucuaaauguuuguugagua

SEQ ID NO: 485562 - RNA, 19 nt, Artificial Sequence
  Description of Artificial Sequence: Synthetic oligonucleotide
  Antisense Strand to SEQ ID NO: 485561
uacucaacaaacauuuaga

SEQ ID NO: 485563 - RNA, 19 nt, Artificial Sequence
  Description of Artificial Sequence: Synthetic oligonucleotide
  Sense strand starting at position 2925 of SEQ ID NO: 317369
agaguugagguuugagcua

SEQ ID NO: 485564 - RNA, 19 nt, Artificial Sequence
  Description of Artificial Sequence: Synthetic oligonucleotide
  Antisense Strand to SEQ ID NO: 485563
uagcucaaaccucaacucu

SEQ ID NO: 485565 - RNA, 19 nt, Artificial Sequence
  Description of Artificial Sequence: Synthetic oligonucleotide
  Sense strand starting at position 2934 of SEQ ID NO: 317369
guuugagcuaacugguuau

SEQ ID NO: 485566 - RNA, 19 nt, Artificial Sequence
  Description of Artificial Sequence: Synthetic oligonucleotide
  Antisense Strand to SEQ ID NO: 485565
auaaccaguuagcucaaac

SEQ ID NO: 485567 - RNA, 19 nt, Artificial Sequence
  Description of Artificial Sequence: Synthetic oligonucleotide
  Sense strand starting at position 2937 of SEQ ID NO: 317369
ugagcuaacugguuauguu

SEQ ID NO: 485568 - RNA, 19 nt, Artificial Sequence
  Description of Artificial Sequence: Synthetic oligonucleotide
  Antisense Strand to SEQ ID NO: 485567
aacauaaccaguuagcuca

SEQ ID NO: 485569 - RNA, 19 nt, Artificial Sequence
  Description of Artificial Sequence: Synthetic oligonucleotide
  Sense strand starting at position 2938 of SEQ ID NO: 317369
gagcuaacugguuauguug

SEQ ID NO: 485570 - RNA, 19 nt, Artificial Sequence
  Description of Artificial Sequence: Synthetic oligonucleotide
  Antisense Strand to SEQ ID NO: 485569
caacauaaccaguuagcuc

SEQ ID NO: 485571 - RNA, 19 nt, Artificial Sequence
  Description of Artificial Sequence: Synthetic oligonucleotide
  Sense strand starting at position 2941 of SEQ ID NO: 317369
cuaacugguuauguugaau

SEQ ID NO: 485572 - RNA, 19 nt, Artificial Sequence
  Description of Artificial Sequence: Synthetic oligonucleotide
  Antisense Strand to SEQ ID NO: 485571
auucaacauaaccaguuag

SEQ ID NO: 485573 - RNA, 19 nt, Artificial Sequence
  Description of Artificial Sequence: Synthetic oligonucleotide
  Sense strand starting at position 3062 of SEQ ID NO: 317369
uagaaaugcuaguucuuag

SEQ ID NO: 485574 - RNA, 19 nt, Artificial Sequence
  Description of Artificial Sequence: Synthetic oligonucleotide
  Antisense Strand to SEQ ID NO: 485573
cuaagaacuagcauuucua

SEQ ID NO: 485575 - RNA, 19 nt, Artificial Sequence
  Description of Artificial Sequence: Synthetic oligonucleotide
  Sense strand starting at position 3175 of SEQ ID NO: 317369
guaggcugaauccaguauu

SEQ ID NO: 485576 - RNA, 19 nt, Artificial Sequence
  Description of Artificial Sequence: Synthetic oligonucleotide
  Antisense Strand to SEQ ID NO: 485575
aauacuggauucagccuac

SEQ ID NO: 485577 - RNA, 19 nt, Artificial Sequence
  Description of Artificial Sequence: Synthetic oligonucleotide
  Sense strand starting at position 3178 of SEQ ID NO: 317369
ggcugaauccaguauuaaa

SEQ ID NO: 485578 - RNA, 19 nt, Artificial Sequence
  Description of Artificial Sequence: Synthetic oligonucleotide
  Antisense Strand to SEQ ID NO: 485577
uuuaauacuggauucagcc

SEQ ID NO: 485579 - RNA, 19 nt, Artificial Sequence
  Description of Artificial Sequence: Synthetic oligonucleotide
  Sense strand starting at position 3565 of SEQ ID NO: 317369
cuagccaaagaauguuaau

SEQ ID NO: 485580 - RNA, 19 nt, Artificial Sequence
  Description of Artificial Sequence: Synthetic oligonucleotide
  Antisense Strand to SEQ ID NO: 485579
auuaacauucuuuggcuag

SEQ ID NO: 485581 - RNA, 19 nt, Artificial Sequence
  Description of Artificial Sequence: Synthetic oligonucleotide
  Sense strand starting at position 3568 of SEQ ID NO: 317369
gccaaagaauguuaauuua

SEQ ID NO: 485582 - RNA, 19 nt, Artificial Sequence
  Description of Artificial Sequence: Synthetic oligonucleotide
  Antisense Strand to SEQ ID NO: 485581
uaaauuaacauucuuuggc

SEQ ID NO: 485583 - RNA, 19 nt, Artificial Sequence
  Description of Artificial Sequence: Synthetic oligonucleotide
  Sense strand starting at position 3658 of SEQ ID NO: 317369
aguauugaaacugaucguu

SEQ ID NO: 485584 - RNA, 19 nt, Artificial Sequence
  Description of Artificial Sequence: Synthetic oligonucleotide
  Antisense Strand to SEQ ID NO: 485583
aacgaucaguuucaauacu

SEQ ID NO: 485585 - RNA, 19 nt, Artificial Sequence
  Description of Artificial Sequence: Synthetic oligonucleotide
  Sense strand starting at position 75 of SEQ ID NO: 317370
ucaguuguucccuauagca

SEQ ID NO: 485586 - RNA, 19 nt, Artificial Sequence
  Description of Artificial Sequence: Synthetic oligonucleotide
  Antisense Strand to SEQ ID NO: 485585
ugcuauagggaacaacuga

SEQ ID NO: 485587 - RNA, 19 nt, Artificial Sequence
  Description of Artificial Sequence: Synthetic oligonucleotide
  Sense strand starting at position 77 of SEQ ID NO: 317370
aguuguucccuauagcauu

SEQ ID NO: 485588 - RNA, 19 nt, Artificial Sequence
  Description of Artificial Sequence: Synthetic oligonucleotide
  Antisense Strand to SEQ ID NO: 485587
aaugcuauagggaacaacu

SEQ ID NO: 485589 - RNA, 19 nt, Artificial Sequence
  Description of Artificial Sequence: Synthetic oligonucleotide
  Sense strand starting at position 113 of SEQ ID NO: 317370
agacaaagccuuuguaaau

SEQ ID NO: 485590 - RNA, 19 nt, Artificial Sequence
  Description of Artificial Sequence: Synthetic oligonucleotide
  Antisense Strand to SEQ ID NO: 485589
auuuacaaaggcuuugucu

SEQ ID NO: 485591 - RNA, 19 nt, Artificial Sequence
  Description of Artificial Sequence: Synthetic oligonucleotide
  Sense strand starting at position 221 of SEQ ID NO: 317370
aggaucugccaucauuauu

SEQ ID NO: 485592 - RNA, 19 nt, Artificial Sequence
  Description of Artificial Sequence: Synthetic oligonucleotide
  Antisense Strand to SEQ ID NO: 485591
aauaaugauggcagauccu

SEQ ID NO: 485593 - RNA, 19 nt, Artificial Sequence
  Description of Artificial Sequence: Synthetic oligonucleotide
  Sense strand starting at position 277 of SEQ ID NO: 317370
aggauaaacauguguguua

SEQ ID NO: 485594 - RNA, 19 nt, Artificial Sequence
  Description of Artificial Sequence: Synthetic oligonucleotide
  Antisense Strand to SEQ ID NO: 485593
uaacacacauguuuauccu

SEQ ID NO: 485595 - RNA, 19 nt, Artificial Sequence
  Description of Artificial Sequence: Synthetic oligonucleotide
  Sense strand starting at position 278 of SEQ ID NO: 317370
ggauaaacauguguguuac

SEQ ID NO: 485596 - RNA, 19 nt, Artificial Sequence
  Description of Artificial Sequence: Synthetic oligonucleotide
  Antisense Strand to SEQ ID NO: 485595
guaacacacauguuuaucc

SEQ ID NO: 485597 - RNA, 19 nt, Artificial Sequence
  Description of Artificial Sequence: Synthetic oligonucleotide
  Sense strand starting at position 326 of SEQ ID NO: 317370
cuguuuacgaaacagaguu

SEQ ID NO: 485598 - RNA, 19 nt, Artificial Sequence
  Description of Artificial Sequence: Synthetic oligonucleotide
  Antisense Strand to SEQ ID NO: 485597
aacucuguuucguaaacag

SEQ ID NO: 485599 - RNA, 19 nt, Artificial Sequence
  Description of Artificial Sequence: Synthetic oligonucleotide
  Sense strand starting at position 427 of SEQ ID NO: 317370
auuaguuuaugcucaggaa

SEQ ID NO: 485600 - RNA, 19 nt, Artificial Sequence
  Description of Artificial Sequence: Synthetic oligonucleotide
  Antisense Strand to SEQ ID NO: 485599
uuccugagcauaaacuaau

SEQ ID NO: 485601 - RNA, 19 nt, Artificial Sequence
  Description of Artificial Sequence: Synthetic oligonucleotide
  Sense strand starting at position 428 of SEQ ID NO: 317370
uuaguuuaugcucaggaau

SEQ ID NO: 485602 - RNA, 19 nt, Artificial Sequence
  Description of Artificial Sequence: Synthetic oligonucleotide
  Antisense Strand to SEQ ID NO: 485601
auuccugagcauaaacuaa

SEQ ID NO: 485603 - RNA, 19 nt, Artificial Sequence
  Description of Artificial Sequence: Synthetic oligonucleotide
  Sense strand starting at position 431 of SEQ ID NO: 317370
guuuaugcucaggaaucau

SEQ ID NO: 485604 - RNA, 19 nt, Artificial Sequence
  Description of Artificial Sequence: Synthetic oligonucleotide
  Antisense Strand to SEQ ID NO: 485603
augauuccugagcauaaac

SEQ ID NO: 485605 - RNA, 19 nt, Artificial Sequence
  Description of Artificial Sequence: Synthetic oligonucleotide
  Sense strand starting at position 517 of SEQ ID NO: 317370
accucuaugucaguaauau

SEQ ID NO: 485606 - RNA, 19 nt, Artificial Sequence
  Description of Artificial Sequence: Synthetic oligonucleotide
  Antisense Strand to SEQ ID NO: 485605
auauuacugacauagaggu

SEQ ID NO: 485607 - RNA, 19 nt, Artificial Sequence
  Description of Artificial Sequence: Synthetic oligonucleotide
  Sense strand starting at position 518 of SEQ ID NO: 317370
ccucuaugucaguaauauc

SEQ ID NO: 485608 - RNA, 19 nt, Artificial Sequence
  Description of Artificial Sequence: Synthetic oligonucleotide
  Antisense Strand to SEQ ID NO: 485607
gauauuacugacauagagg

SEQ ID NO: 485609 - RNA, 19 nt, Artificial Sequence
  Description of Artificial Sequence: Synthetic oligonucleotide
  Sense strand starting at position 528 of SEQ ID NO: 317370
aguaauaucuaccuuguag

SEQ ID NO: 485610 - RNA, 19 nt, Artificial Sequence
  Description of Artificial Sequence: Synthetic oligonucleotide
  Antisense Strand to SEQ ID NO: 485609
cuacaagguagauauuacu

SEQ ID NO: 485611 - RNA, 19 nt, Artificial Sequence
  Description of Artificial Sequence: Synthetic oligonucleotide
  Sense strand starting at position 544 of SEQ ID NO: 317370
uaggauuauugugcaaauu

SEQ ID NO: 485612 - RNA, 19 nt, Artificial Sequence
  Description of Artificial Sequence: Synthetic oligonucleotide
  Antisense Strand to SEQ ID NO: 485611
aauuugcacaauaauccua

SEQ ID NO: 485613 - RNA, 19 nt, Artificial Sequence
  Description of Artificial Sequence: Synthetic oligonucleotide
  Sense strand starting at position 545 of SEQ ID NO: 317370
aggauuauugugcaaauua

SEQ ID NO: 485614 - RNA, 19 nt, Artificial Sequence
  Description of Artificial Sequence: Synthetic oligonucleotide
  Antisense Strand to SEQ ID NO: 485613
uaauuugcacaauaauccu

SEQ ID NO: 485615 - RNA, 19 nt, Artificial Sequence
  Description of Artificial Sequence: Synthetic oligonucleotide
  Sense strand starting at position 651 of SEQ ID NO: 317370
cauagauucgaguggaaau

SEQ ID NO: 485616 - RNA, 19 nt, Artificial Sequence
  Description of Artificial Sequence: Synthetic oligonucleotide
  Antisense Strand to SEQ ID NO: 485615
auuuccacucgaaucuaug

SEQ ID NO: 485617 - RNA, 19 nt, Artificial Sequence
  Description of Artificial Sequence: Synthetic oligonucleotide
  Sense strand starting at position 652 of SEQ ID NO: 317370
auagauucgaguggaaauc

SEQ ID NO: 485618 - RNA, 19 nt, Artificial Sequence
  Description of Artificial Sequence: Synthetic oligonucleotide
  Antisense Strand to SEQ ID NO: 485617
gauuuccacucgaaucuau

SEQ ID NO: 485619 - RNA, 19 nt, Artificial Sequence
  Description of Artificial Sequence: Synthetic oligonucleotide
  Sense strand starting at position 988 of SEQ ID NO: 317370
accguucugaccuauggau

SEQ ID NO: 485620 - RNA, 19 nt, Artificial Sequence
  Description of Artificial Sequence: Synthetic oligonucleotide
  Antisense Strand to SEQ ID NO: 485619
auccauaggucagaacggu

SEQ ID NO: 485621 - RNA, 19 nt, Artificial Sequence
  Description of Artificial Sequence: Synthetic oligonucleotide
  Sense strand starting at position 997 of SEQ ID NO: 317370
accuauggaugcccuaaau

SEQ ID NO: 485622 - RNA, 19 nt, Artificial Sequence
  Description of Artificial Sequence: Synthetic oligonucleotide
  Antisense Strand to SEQ ID NO: 485621
auuuagggcauccauaggu

SEQ ID NO: 485623 - RNA, 19 nt, Artificial Sequence
  Description of Artificial Sequence: Synthetic oligonucleotide
  Sense strand starting at position 1040 of SEQ ID NO: 317370
gccauauucgaagaacuca

SEQ ID NO: 485624 - RNA, 19 nt, Artificial Sequence
  Description of Artificial Sequence: Synthetic oligonucleotide
  Antisense Strand to SEQ ID NO: 485623
ugaguucuucgaauauggc

SEQ ID NO: 485625 - RNA, 19 nt, Artificial Sequence
  Description of Artificial Sequence: Synthetic oligonucleotide
  Sense strand starting at position 1567 of SEQ ID NO: 317370
guuuauucccaaggcaaua

SEQ ID NO: 485626 - RNA, 19 nt, Artificial Sequence
  Description of Artificial Sequence: Synthetic oligonucleotide
  Antisense Strand to SEQ ID NO: 485625
uauugccuugggaauaaac

SEQ ID NO: 485627 - RNA, 19 nt, Artificial Sequence
  Description of Artificial Sequence: Synthetic oligonucleotide
  Sense strand starting at position 2071 of SEQ ID NO: 317370
guucaaucgcucgcuuguu

SEQ ID NO: 485628 - RNA, 19 nt, Artificial Sequence
  Description of Artificial Sequence: Synthetic oligonucleotide
  Antisense Strand to SEQ ID NO: 485627
aacaagcgagcgauugaac

SEQ ID NO: 485629 - RNA, 19 nt, Artificial Sequence
  Description of Artificial Sequence: Synthetic oligonucleotide
  Sense strand starting at position 2342 of SEQ ID NO: 317370
uuguaagggccagauuguu

SEQ ID NO: 485630 - RNA, 19 nt, Artificial Sequence
  Description of Artificial Sequence: Synthetic oligonucleotide
  Antisense Strand to SEQ ID NO: 485629
aacaaucuggcccuuacaa

SEQ ID NO: 485631 - RNA, 19 nt, Artificial Sequence
  Description of Artificial Sequence: Synthetic oligonucleotide
  Sense strand starting at position 2373 of SEQ ID NO: 317370
ccuguuaaauuaucuagag

SEQ ID NO: 485632 - RNA, 19 nt, Artificial Sequence
  Description of Artificial Sequence: Synthetic oligonucleotide
  Antisense Strand to SEQ ID NO: 485631
cucuagauaauuuaacagg

SEQ ID NO: 485633 - RNA, 19 nt, Artificial Sequence
  Description of Artificial Sequence: Synthetic oligonucleotide
  Sense strand starting at position 2374 of SEQ ID NO: 317370
cuguuaaauuaucuagaga

SEQ ID NO: 485634 - RNA, 19 nt, Artificial Sequence
  Description of Artificial Sequence: Synthetic oligonucleotide
  Antisense Strand to SEQ ID NO: 485633
ucucuagauaauuuaacag

SEQ ID NO: 485635 - RNA, 19 nt, Artificial Sequence
  Description of Artificial Sequence: Synthetic oligonucleotide
  Sense strand starting at position 2520 of SEQ ID NO: 317370
guaauaauacugugcuaag

SEQ ID NO: 485636 - RNA, 19 nt, Artificial Sequence
  Description of Artificial Sequence: Synthetic oligonucleotide
  Antisense Strand to SEQ ID NO: 485635
cuuagcacaguauuauuac

SEQ ID NO: 485637 - RNA, 19 nt, Artificial Sequence
  Description of Artificial Sequence: Synthetic oligonucleotide
  Sense strand starting at position 2564 of SEQ ID NO: 317370
uuacaagaagccuauguuu

SEQ ID NO: 485638 - RNA, 19 nt, Artificial Sequence
  Description of Artificial Sequence: Synthetic oligonucleotide
  Antisense Strand to SEQ ID NO: 485637
aaacauaggcuucuuguaa

SEQ ID NO: 485639 - RNA, 19 nt, Artificial Sequence
  Description of Artificial Sequence: Synthetic oligonucleotide
  Sense strand starting at position 2566 of SEQ ID NO: 317370
acaagaagccuauguuuac

SEQ ID NO: 485640 - RNA, 19 nt, Artificial Sequence
  Description of Artificial Sequence: Synthetic oligonucleotide
  Antisense Strand to SEQ ID NO: 485639
guaaacauaggcuucuugu

SEQ ID NO: 485641 - RNA, 19 nt, Artificial Sequence
  Description of Artificial Sequence: Synthetic oligonucleotide
  Sense strand starting at position 2569 of SEQ ID NO: 317370
agaagccuauguuuacaaa

SEQ ID NO: 485642 - RNA, 19 nt, Artificial Sequence
  Description of Artificial Sequence: Synthetic oligonucleotide
  Antisense Strand to SEQ ID NO: 485641
uuuguaaacauaggcuucu

SEQ ID NO: 485643 - RNA, 19 nt, Artificial Sequence
  Description of Artificial Sequence: Synthetic oligonucleotide
  Sense strand starting at position 2595 of SEQ ID NO: 317370
aacugagaccugcaaaugu

SEQ ID NO: 485644 - RNA, 19 nt, Artificial Sequence
  Description of Artificial Sequence: Synthetic oligonucleotide
  Antisense Strand to SEQ ID NO: 485643
acauuugcaggucucaguu

SEQ ID NO: 485645 - RNA, 19 nt, Artificial Sequence
  Description of Artificial Sequence: Synthetic oligonucleotide
  Sense strand starting at position 2603 of SEQ ID NO: 317370
ccugcaaauguauagguaa

SEQ ID NO: 485646 - RNA, 19 nt, Artificial Sequence
  Description of Artificial Sequence: Synthetic oligonucleotide
  Antisense Strand to SEQ ID NO: 485645
uuaccuauacauuugcagg

SEQ ID NO: 485647 - RNA, 19 nt, Artificial Sequence
  Description of Artificial Sequence: Synthetic oligonucleotide
  Sense strand starting at position 2606 of SEQ ID NO: 317370
gcaaauguauagguaauua

SEQ ID NO: 485648 - RNA, 19 nt, Artificial Sequence
  Description of Artificial Sequence: Synthetic oligonucleotide
  Antisense Strand to SEQ ID NO: 485647
uaauuaccuauacauuugc

SEQ ID NO: 485649 - RNA, 19 nt, Artificial Sequence
  Description of Artificial Sequence: Synthetic oligonucleotide
  Sense strand starting at position 2610 of SEQ ID NO: 317370
auguauagguaauuaguga

SEQ ID NO: 485650 - RNA, 19 nt, Artificial Sequence
  Description of Artificial Sequence: Synthetic oligonucleotide
  Antisense Strand to SEQ ID NO: 485649
ucacuaauuaccuauacau

SEQ ID NO: 485651 - RNA, 19 nt, Artificial Sequence
  Description of Artificial Sequence: Synthetic oligonucleotide
  Sense strand starting at position 2615 of SEQ ID NO: 317370
uagguaauuagugacggau

SEQ ID NO: 485652 - RNA, 19 nt, Artificial Sequence
  Description of Artificial Sequence: Synthetic oligonucleotide
  Antisense Strand to SEQ ID NO: 485651
auccgucacuaauuaccua

SEQ ID NO: 485653 - RNA, 19 nt, Artificial Sequence
  Description of Artificial Sequence: Synthetic oligonucleotide
  Sense strand starting at position 2618 of SEQ ID NO: 317370
guaauuagugacggauaag

SEQ ID NO: 485654 - RNA, 19 nt, Artificial Sequence
  Description of Artificial Sequence: Synthetic oligonucleotide
  Antisense Strand to SEQ ID NO: 485653
cuuauccgucacuaauuac

SEQ ID NO: 485655 - RNA, 19 nt, Artificial Sequence
  Description of Artificial Sequence: Synthetic oligonucleotide
  Sense strand starting at position 2687 of SEQ ID NO: 317370
gcuugauuguucuuagaau

SEQ ID NO: 485656 - RNA, 19 nt, Artificial Sequence
  Description of Artificial Sequence: Synthetic oligonucleotide
  Antisense Strand to SEQ ID NO: 485655
auucuaagaacaaucaagc

SEQ ID NO: 485657 - RNA, 19 nt, Artificial Sequence
  Description of Artificial Sequence: Synthetic oligonucleotide
  Sense strand starting at position 2693 of SEQ ID NO: 317370
uuguucuuagaauggaauu

SEQ ID NO: 485658 - RNA, 19 nt, Artificial Sequence
  Description of Artificial Sequence: Synthetic oligonucleotide
  Antisense Strand to SEQ ID NO: 485657
aauuccauucuaagaacaa

SEQ ID NO: 485659 - RNA, 19 nt, Artificial Sequence
  Description of Artificial Sequence: Synthetic oligonucleotide
  Sense strand starting at position 3662 of SEQ ID NO: 317370
agauaucauuucgauacac

SEQ ID NO: 485660 - RNA, 19 nt, Artificial Sequence
  Description of Artificial Sequence: Synthetic oligonucleotide
  Antisense Strand to SEQ ID NO: 485659
guguaucgaaaugauaucu

SEQ ID NO: 485661 - RNA, 19 nt, Artificial Sequence
  Description of Artificial Sequence: Synthetic oligonucleotide
  Sense strand starting at position 3718 of SEQ ID NO: 317370
auggaaauguuagcuuaag

SEQ ID NO: 485662 - RNA, 19 nt, Artificial Sequence
  Description of Artificial Sequence: Synthetic oligonucleotide
  Antisense Strand to SEQ ID NO: 485661
cuuaagcuaacauuuccau

SEQ ID NO: 485663 - RNA, 19 nt, Artificial Sequence
  Description of Artificial Sequence: Synthetic oligonucleotide
  Sense strand starting at position 3719 of SEQ ID NO: 317370
uggaaauguuagcuuaaga

SEQ ID NO: 485664 - RNA, 19 nt, Artificial Sequence
  Description of Artificial Sequence: Synthetic oligonucleotide
  Antisense Strand to SEQ ID NO: 485663
ucuuaagcuaacauuucca

SEQ ID NO: 485665 - RNA, 19 nt, Artificial Sequence
  Description of Artificial Sequence: Synthetic oligonucleotide
  Sense strand starting at position 40 of SEQ ID NO: 317371
aggauaaacauguguguua

SEQ ID NO: 485666 - RNA, 19 nt, Artificial Sequence
  Description of Artificial Sequence: Synthetic oligonucleotide
  Antisense Strand to SEQ ID NO: 485665
uaacacacauguuuauccu

SEQ ID NO: 485667 - RNA, 19 nt, Artificial Sequence
  Description of Artificial Sequence: Synthetic oligonucleotide
  Sense strand starting at position 41 of SEQ ID NO: 317371
ggauaaacauguguguuac

SEQ ID NO: 485668 - RNA, 19 nt, Artificial Sequence
  Description of Artificial Sequence: Synthetic oligonucleotide
  Antisense Strand to SEQ ID NO: 485667
guaacacacauguuuaucc

SEQ ID NO: 485669 - RNA, 19 nt, Artificial Sequence
  Description of Artificial Sequence: Synthetic oligonucleotide
  Sense strand starting at position 47 of SEQ ID NO: 317371
acauguguguuaccaaucu

SEQ ID NO: 485670 - RNA, 19 nt, Artificial Sequence
  Description of Artificial Sequence: Synthetic oligonucleotide
  Antisense Strand to SEQ ID NO: 485669
agauugguaacacacaugu

SEQ ID NO: 485671 - RNA, 19 nt, Artificial Sequence
  Description of Artificial Sequence: Synthetic oligonucleotide
  Sense strand starting at position 89 of SEQ ID NO: 317371
cuguuuacgaaacagaguu

SEQ ID NO: 485672 - RNA, 19 nt, Artificial Sequence
  Description of Artificial Sequence: Synthetic oligonucleotide
  Antisense Strand to SEQ ID NO: 485671
aacucuguuucguaaacag

SEQ ID NO: 485673 - RNA, 19 nt, Artificial Sequence
  Description of Artificial Sequence: Synthetic oligonucleotide
  Sense strand starting at position 190 of SEQ ID NO: 317371
auuaguuuaugcucaggaa

SEQ ID NO: 485674 - RNA, 19 nt, Artificial Sequence
  Description of Artificial Sequence: Synthetic oligonucleotide
  Antisense Strand to SEQ ID NO: 485673
uuccugagcauaaacuaau

SEQ ID NO: 485675 - RNA, 19 nt, Artificial Sequence
  Description of Artificial Sequence: Synthetic oligonucleotide
  Sense strand starting at position 191 of SEQ ID NO: 317371
uuaguuuaugcucaggaau

SEQ ID NO: 485676 - RNA, 19 nt, Artificial Sequence
  Description of Artificial Sequence: Synthetic oligonucleotide
  Antisense Strand to SEQ ID NO: 485675
auuccugagcauaaacuaa

SEQ ID NO: 485677 - RNA, 19 nt, Artificial Sequence
  Description of Artificial Sequence: Synthetic oligonucleotide
  Sense strand starting at position 194 of SEQ ID NO: 317371
guuuaugcucaggaaucau

SEQ ID NO: 485678 - RNA, 19 nt, Artificial Sequence
  Description of Artificial Sequence: Synthetic oligonucleotide
  Antisense Strand to SEQ ID NO: 485677
augauuccugagcauaaac

SEQ ID NO: 485679 - RNA, 19 nt, Artificial Sequence
  Description of Artificial Sequence: Synthetic oligonucleotide
  Sense strand starting at position 280 of SEQ ID NO: 317371
accucuaugucaguaauau

SEQ ID NO: 485680 - RNA, 19 nt, Artificial Sequence
  Description of Artificial Sequence: Synthetic oligonucleotide
  Antisense Strand to SEQ ID NO: 485679
auauuacugacauagaggu

SEQ ID NO: 485681 - RNA, 19 nt, Artificial Sequence
  Description of Artificial Sequence: Synthetic oligonucleotide
  Sense strand starting at position 281 of SEQ ID NO: 317371
ccucuaugucaguaauauc

SEQ ID NO: 485682 - RNA, 19 nt, Artificial Sequence
  Description of Artificial Sequence: Synthetic oligonucleotide
  Antisense Strand to SEQ ID NO: 485681
gauauuacugacauagagg

SEQ ID NO: 485683 - RNA, 19 nt, Artificial Sequence
  Description of Artificial Sequence: Synthetic oligonucleotide
  Sense strand starting at position 291 of SEQ ID NO: 317371
aguaauaucuaccuuguag

SEQ ID NO: 485684 - RNA, 19 nt, Artificial Sequence
  Description of Artificial Sequence: Synthetic oligonucleotide
  Antisense Strand to SEQ ID NO: 485683
cuacaagguagauauuacu

SEQ ID NO: 485685 - RNA, 19 nt, Artificial Sequence
  Description of Artificial Sequence: Synthetic oligonucleotide
  Sense strand starting at position 307 of SEQ ID NO: 317371
uaggauuauugugcaaauu

SEQ ID NO: 485686 - RNA, 19 nt, Artificial Sequence
  Description of Artificial Sequence: Synthetic oligonucleotide
  Antisense Strand to SEQ ID NO: 485685
aauuugcacaauaauccua

SEQ ID NO: 485687 - RNA, 19 nt, Artificial Sequence
  Description of Artificial Sequence: Synthetic oligonucleotide
  Sense strand starting at position 308 of SEQ ID NO: 317371
aggauuauugugcaaauua

SEQ ID NO: 485688 - RNA, 19 nt, Artificial Sequence
  Description of Artificial Sequence: Synthetic oligonucleotide
  Antisense Strand to SEQ ID NO: 485687
uaauuugcacaauaauccu

SEQ ID NO: 485689 - RNA, 19 nt, Artificial Sequence
  Description of Artificial Sequence: Synthetic oligonucleotide
  Sense strand starting at position 414 of SEQ ID NO: 317371
cauagauucgaguggaaau

SEQ ID NO: 485690 - RNA, 19 nt, Artificial Sequence
  Description of Artificial Sequence: Synthetic oligonucleotide
  Antisense Strand to SEQ ID NO: 485689
auuuccacucgaaucuaug

SEQ ID NO: 485691 - RNA, 19 nt, Artificial Sequence
  Description of Artificial Sequence: Synthetic oligonucleotide
  Sense strand starting at position 415 of SEQ ID NO: 317371
auagauucgaguggaaauc

SEQ ID NO: 485692 - RNA, 19 nt, Artificial Sequence
  Description of Artificial Sequence: Synthetic oligonucleotide
  Antisense Strand to SEQ ID NO: 485691
gauuuccacucgaaucuau

SEQ ID NO: 485693 - RNA, 19 nt, Artificial Sequence
  Description of Artificial Sequence: Synthetic oligonucleotide
  Sense strand starting at position 729 of SEQ ID NO: 317371
ugacaucgcucuuccaaua

SEQ ID NO: 485694 - RNA, 19 nt, Artificial Sequence
  Description of Artificial Sequence: Synthetic oligonucleotide
  Antisense Strand to SEQ ID NO: 485693
uauuggaagagcgauguca

SEQ ID NO: 485695 - RNA, 19 nt, Artificial Sequence
  Description of Artificial Sequence: Synthetic oligonucleotide
  Sense strand starting at position 751 of SEQ ID NO: 317371
accguucugaccuauggau

SEQ ID NO: 485696 - RNA, 19 nt, Artificial Sequence
  Description of Artificial Sequence: Synthetic oligonucleotide
  Antisense Strand to SEQ ID NO: 485695
auccauaggucagaacggu

SEQ ID NO: 485697 - RNA, 19 nt, Artificial Sequence
  Description of Artificial Sequence: Synthetic oligonucleotide
  Sense strand starting at position 760 of SEQ ID NO: 317371
accuauggaugcccuaaau

SEQ ID NO: 485698 - RNA, 19 nt, Artificial Sequence
  Description of Artificial Sequence: Synthetic oligonucleotide
  Antisense Strand to SEQ ID NO: 485697
auuuagggcauccauaggu

SEQ ID NO: 485699 - RNA, 19 nt, Artificial Sequence
  Description of Artificial Sequence: Synthetic oligonucleotide
  Sense strand starting at position 803 of SEQ ID NO: 317371
gccauauucgaagaacuca

SEQ ID NO: 485700 - RNA, 19 nt, Artificial Sequence
  Description of Artificial Sequence: Synthetic oligonucleotide
  Antisense Strand to SEQ ID NO: 485699
ugaguucuucgaauauggc

SEQ ID NO: 485701 - RNA, 19 nt, Artificial Sequence
  Description of Artificial Sequence: Synthetic oligonucleotide
  Sense strand starting at position 1330 of SEQ ID NO: 317371
guuuauucccaaggcaaua

SEQ ID NO: 485702 - RNA, 19 nt, Artificial Sequence
  Description of Artificial Sequence: Synthetic oligonucleotide
  Antisense Strand to SEQ ID NO: 485701
uauugccuugggaauaaac

SEQ ID NO: 485703 - RNA, 19 nt, Artificial Sequence
  Description of Artificial Sequence: Synthetic oligonucleotide
  Sense strand starting at position 1834 of SEQ ID NO: 317371
guucaaucgcucgcuuguu

SEQ ID NO: 485704 - RNA, 19 nt, Artificial Sequence
  Description of Artificial Sequence: Synthetic oligonucleotide
  Antisense Strand to SEQ ID NO: 485703
aacaagcgagcgauugaac

SEQ ID NO: 485705 - RNA, 19 nt, Artificial Sequence
  Description of Artificial Sequence: Synthetic oligonucleotide
  Sense strand starting at position 2105 of SEQ ID NO: 317371
uuguaagggccagauuguu

SEQ ID NO: 485706 - RNA, 19 nt, Artificial Sequence
  Description of Artificial Sequence: Synthetic oligonucleotide
  Antisense Strand to SEQ ID NO: 485705
aacaaucuggcccuuacaa

SEQ ID NO: 485707 - RNA, 19 nt, Artificial Sequence
  Description of Artificial Sequence: Synthetic oligonucleotide
  Sense strand starting at position 2114 of SEQ ID NO: 317371
ccagauuguucuguaccuu

SEQ ID NO: 485708 - RNA, 19 nt, Artificial Sequence
  Description of Artificial Sequence: Synthetic oligonucleotide
  Antisense Strand to SEQ ID NO: 485707
aagguacagaacaaucugg

SEQ ID NO: 485709 - RNA, 19 nt, Artificial Sequence
  Description of Artificial Sequence: Synthetic oligonucleotide
  Sense strand starting at position 2136 of SEQ ID NO: 317371
ccuguuaaauuaucuagag

SEQ ID NO: 485710 - RNA, 19 nt, Artificial Sequence
  Description of Artificial Sequence: Synthetic oligonucleotide
  Antisense Strand to SEQ ID NO: 485709
cucuagauaauuuaacagg

SEQ ID NO: 485711 - RNA, 19 nt, Artificial Sequence
  Description of Artificial Sequence: Synthetic oligonucleotide
  Sense strand starting at position 2137 of SEQ ID NO: 317371
cuguuaaauuaucuagaga

SEQ ID NO: 485712 - RNA, 19 nt, Artificial Sequence
  Description of Artificial Sequence: Synthetic oligonucleotide
  Antisense Strand to SEQ ID NO: 485711
ucucuagauaauuuaacag

SEQ ID NO: 485713 - RNA, 19 nt, Artificial Sequence
  Description of Artificial Sequence: Synthetic oligonucleotide
  Sense strand starting at position 2231 of SEQ ID NO: 317371
uguauuauaaucuguagug

SEQ ID NO: 485714 - RNA, 19 nt, Artificial Sequence
  Description of Artificial Sequence: Synthetic oligonucleotide
  Antisense Strand to SEQ ID NO: 485713
cacuacagauuauaauaca

SEQ ID NO: 485715 - RNA, 19 nt, Artificial Sequence
  Description of Artificial Sequence: Synthetic oligonucleotide
  Sense strand starting at position 2283 of SEQ ID NO: 317371
guaauaauacugugcuaag

SEQ ID NO: 485716 - RNA, 19 nt, Artificial Sequence
  Description of Artificial Sequence: Synthetic oligonucleotide
  Antisense Strand to SEQ ID NO: 485715
cuuagcacaguauuauuac

SEQ ID NO: 485717 - RNA, 19 nt, Artificial Sequence
  Description of Artificial Sequence: Synthetic oligonucleotide
  Sense strand starting at position 2327 of SEQ ID NO: 317371
uuacaagaagccuauguuu

SEQ ID NO: 485718 - RNA, 19 nt, Artificial Sequence
  Description of Artificial Sequence: Synthetic oligonucleotide
  Antisense Strand to SEQ ID NO: 485717
aaacauaggcuucuuguaa

SEQ ID NO: 485719 - RNA, 19 nt, Artificial Sequence
  Description of Artificial Sequence: Synthetic oligonucleotide
  Sense strand starting at position 2329 of SEQ ID NO: 317371
acaagaagccuauguuuac

SEQ ID NO: 485720 - RNA, 19 nt, Artificial Sequence
  Description of Artificial Sequence: Synthetic oligonucleotide
  Antisense Strand to SEQ ID NO: 485719
guaaacauaggcuucuugu

SEQ ID NO: 485721 - RNA, 19 nt, Artificial Sequence
  Description of Artificial Sequence: Synthetic oligonucleotide
  Sense strand starting at position 2332 of SEQ ID NO: 317371
agaagccuauguuuacaaa

SEQ ID NO: 485722 - RNA, 19 nt, Artificial Sequence
  Description of Artificial Sequence: Synthetic oligonucleotide
  Antisense Strand to SEQ ID NO: 485721
uuuguaaacauaggcuucu

SEQ ID NO: 485723 - RNA, 19 nt, Artificial Sequence
  Description of Artificial Sequence: Synthetic oligonucleotide
  Sense strand starting at position 2358 of SEQ ID NO: 317371
aacugagaccugcaaaugu

SEQ ID NO: 485724 - RNA, 19 nt, Artificial Sequence
  Description of Artificial Sequence: Synthetic oligonucleotide
  Antisense Strand to SEQ ID NO: 485723
acauuugcaggucucaguu

SEQ ID NO: 485725 - RNA, 19 nt, Artificial Sequence
  Description of Artificial Sequence: Synthetic oligonucleotide
  Sense strand starting at position 2366 of SEQ ID NO: 317371
ccugcaaauguauagguaa

SEQ ID NO: 485726 - RNA, 19 nt, Artificial Sequence
  Description of Artificial Sequence: Synthetic oligonucleotide
  Antisense Strand to SEQ ID NO: 485725
uuaccuauacauuugcagg

SEQ ID NO: 485727 - RNA, 19 nt, Artificial Sequence
  Description of Artificial Sequence: Synthetic oligonucleotide
  Sense strand starting at position 2369 of SEQ ID NO: 317371
gcaaauguauagguaauua

SEQ ID NO: 485728 - RNA, 19 nt, Artificial Sequence
  Description of Artificial Sequence: Synthetic oligonucleotide
  Antisense Strand to SEQ ID NO: 485727
uaauuaccuauacauuugc

SEQ ID NO: 485729 - RNA, 19 nt, Artificial Sequence
  Description of Artificial Sequence: Synthetic oligonucleotide
  Sense strand starting at position 2373 of SEQ ID NO: 317371
auguauagguaauuaguga

SEQ ID NO: 485730 - RNA, 19 nt, Artificial Sequence
  Description of Artificial Sequence: Synthetic oligonucleotide
  Antisense Strand to SEQ ID NO: 485729
ucacuaauuaccuauacau

SEQ ID NO: 485731 - RNA, 19 nt, Artificial Sequence
  Description of Artificial Sequence: Synthetic oligonucleotide
  Sense strand starting at position 2378 of SEQ ID NO: 317371
uagguaauuagugacggau

SEQ ID NO: 485732 - RNA, 19 nt, Artificial Sequence
  Description of Artificial Sequence: Synthetic oligonucleotide
  Antisense Strand to SEQ ID NO: 485731
auccgucacuaauuaccua

SEQ ID NO: 485733 - RNA, 19 nt, Artificial Sequence
  Description of Artificial Sequence: Synthetic oligonucleotide
  Sense strand starting at position 2381 of SEQ ID NO: 317371
guaauuagugacggauaag

SEQ ID NO: 485734 - RNA, 19 nt, Artificial Sequence
  Description of Artificial Sequence: Synthetic oligonucleotide
  Antisense Strand to SEQ ID NO: 485733
cuuauccgucacuaauuac

SEQ ID NO: 485735 - RNA, 19 nt, Artificial Sequence
  Description of Artificial Sequence: Synthetic oligonucleotide
  Sense strand starting at position 2450 of SEQ ID NO: 317371
gcuugauuguucuuagaau

SEQ ID NO: 485736 - RNA, 19 nt, Artificial Sequence
  Description of Artificial Sequence: Synthetic oligonucleotide
  Antisense Strand to SEQ ID NO: 485735
auucuaagaacaaucaagc

SEQ ID NO: 485737 - RNA, 19 nt, Artificial Sequence
  Description of Artificial Sequence: Synthetic oligonucleotide
  Sense strand starting at position 2456 of SEQ ID NO: 317371
uuguucuuagaauggaauu

SEQ ID NO: 485738 - RNA, 19 nt, Artificial Sequence
  Description of Artificial Sequence: Synthetic oligonucleotide
  Antisense Strand to SEQ ID NO: 485737
aauuccauucuaagaacaa

SEQ ID NO: 485739 - RNA, 19 nt, Artificial Sequence
  Description of Artificial Sequence: Synthetic oligonucleotide
  Sense strand starting at position 3425 of SEQ ID NO: 317371
agauaucauuucgauacac

SEQ ID NO: 485740 - RNA, 19 nt, Artificial Sequence
  Description of Artificial Sequence: Synthetic oligonucleotide
  Antisense Strand to SEQ ID NO: 485739
guguaucgaaaugauaucu

SEQ ID NO: 485741 - RNA, 19 nt, Artificial Sequence
  Description of Artificial Sequence: Synthetic oligonucleotide
  Sense strand starting at position 3481 of SEQ ID NO: 317371
auggaaauguuagcuuaag

SEQ ID NO: 485742 - RNA, 19 nt, Artificial Sequence
  Description of Artificial Sequence: Synthetic oligonucleotide
  Antisense Strand to SEQ ID NO: 485741
cuuaagcuaacauuuccau

SEQ ID NO: 485743 - RNA, 19 nt, Artificial Sequence
  Description of Artificial Sequence: Synthetic oligonucleotide
  Sense strand starting at position 3482 of SEQ ID NO: 317371
uggaaauguuagcuuaaga

SEQ ID NO: 485744 - RNA, 19 nt, Artificial Sequence
  Description of Artificial Sequence: Synthetic oligonucleotide
  Antisense Strand to SEQ ID NO: 485743
ucuuaagcuaacauuucca

SEQ ID NO: 485745 - RNA, 19 nt, Artificial Sequence
  Description of Artificial Sequence: Synthetic oligonucleotide
  Sense strand starting at position 76 of SEQ ID NO: 317372
gacuauuuguuagcagguu

SEQ ID NO: 485746 - RNA, 19 nt, Artificial Sequence
  Description of Artificial Sequence: Synthetic oligonucleotide
  Antisense Strand to SEQ ID NO: 485745
aaccugcuaacaaauaguc

SEQ ID NO: 485747 - RNA, 19 nt, Artificial Sequence
  Description of Artificial Sequence: Synthetic oligonucleotide
  Sense strand starting at position 84 of SEQ ID NO: 317372
guuagcagguuguucuuaa

SEQ ID NO: 485748 - RNA, 19 nt, Artificial Sequence
  Description of Artificial Sequence: Synthetic oligonucleotide
  Antisense Strand to SEQ ID NO: 485747
uuaagaacaaccugcuaac

SEQ ID NO: 485749 - RNA, 19 nt, Artificial Sequence
  Description of Artificial Sequence: Synthetic oligonucleotide
  Sense strand starting at position 85 of SEQ ID NO: 317372
uuagcagguuguucuuaau

SEQ ID NO: 485750 - RNA, 19 nt, Artificial Sequence
  Description of Artificial Sequence: Synthetic oligonucleotide
  Antisense Strand to SEQ ID NO: 485749
auuaagaacaaccugcuaa

SEQ ID NO: 485751 - RNA, 19 nt, Artificial Sequence
  Description of Artificial Sequence: Synthetic oligonucleotide
  Sense strand starting at position 234 of SEQ ID NO: 317372
uuugaaguuguuuagaggu

SEQ ID NO: 485752 - RNA, 19 nt, Artificial Sequence
  Description of Artificial Sequence: Synthetic oligonucleotide
  Antisense Strand to SEQ ID NO: 485751
accucuaaacaacuucaaa

SEQ ID NO: 485753 - RNA, 19 nt, Artificial Sequence
  Description of Artificial Sequence: Synthetic oligonucleotide
  Sense strand starting at position 240 of SEQ ID NO: 317372
guuguuuagagguacauua

SEQ ID NO: 485754 - RNA, 19 nt, Artificial Sequence
  Description of Artificial Sequence: Synthetic oligonucleotide
  Antisense Strand to SEQ ID NO: 485753
uaauguaccucuaaacaac

SEQ ID NO: 485755 - RNA, 19 nt, Artificial Sequence
  Description of Artificial Sequence: Synthetic oligonucleotide
  Sense strand starting at position 353 of SEQ ID NO: 317372
uuaaaucugcucuagggua

SEQ ID NO: 485756 - RNA, 19 nt, Artificial Sequence
  Description of Artificial Sequence: Synthetic oligonucleotide
  Antisense Strand to SEQ ID NO: 485755
uacccuagagcagauuuaa

SEQ ID NO: 485757 - RNA, 19 nt, Artificial Sequence
  Description of Artificial Sequence: Synthetic oligonucleotide
  Sense strand starting at position 610 of SEQ ID NO: 317372
gauggaugguuagaacaaa

SEQ ID NO: 485758 - RNA, 19 nt, Artificial Sequence
  Description of Artificial Sequence: Synthetic oligonucleotide
  Antisense Strand to SEQ ID NO: 485757
uuuguucuaaccauccauc

SEQ ID NO: 485759 - RNA, 19 nt, Artificial Sequence
  Description of Artificial Sequence: Synthetic oligonucleotide
  Sense strand starting at position 677 of SEQ ID NO: 317372
gguuuaaguaaguaaugca

SEQ ID NO: 485760 - RNA, 19 nt, Artificial Sequence
  Description of Artificial Sequence: Synthetic oligonucleotide
  Antisense Strand to SEQ ID NO: 485759
ugcauuacuuacuuaaacc

SEQ ID NO: 485761 - RNA, 19 nt, Artificial Sequence
  Description of Artificial Sequence: Synthetic oligonucleotide
  Sense strand starting at position 684 of SEQ ID NO: 317372
guaaguaaugcauaaucuc

SEQ ID NO: 485762 - RNA, 19 nt, Artificial Sequence
  Description of Artificial Sequence: Synthetic oligonucleotide
  Antisense Strand to SEQ ID NO: 485761
gagauuaugcauuacuuac

SEQ ID NO: 485763 - RNA, 19 nt, Artificial Sequence
  Description of Artificial Sequence: Synthetic oligonucleotide
  Sense strand starting at position 766 of SEQ ID NO: 317372
cauguuaaguugcugaaua

SEQ ID NO: 485764 - RNA, 19 nt, Artificial Sequence
  Description of Artificial Sequence: Synthetic oligonucleotide
  Antisense Strand to SEQ ID NO: 485763
uauucagcaacuuaacaug

SEQ ID NO: 485765 - RNA, 19 nt, Artificial Sequence
  Description of Artificial Sequence: Synthetic oligonucleotide
  Sense strand starting at position 768 of SEQ ID NO: 317372
uguuaaguugcugaauauu

SEQ ID NO: 485766 - RNA, 19 nt, Artificial Sequence
  Description of Artificial Sequence: Synthetic oligonucleotide
  Antisense Strand to SEQ ID NO: 485765
aauauucagcaacuuaaca

SEQ ID NO: 485767 - RNA, 19 nt, Artificial Sequence
  Description of Artificial Sequence: Synthetic oligonucleotide
  Sense strand starting at position 845 of SEQ ID NO: 317372
aagauauucgggcaaguau

SEQ ID NO: 485768 - RNA, 19 nt, Artificial Sequence
  Description of Artificial Sequence: Synthetic oligonucleotide
  Antisense Strand to SEQ ID NO: 485767
auacuugcccgaauaucuu

SEQ ID NO: 485769 - RNA, 19 nt, Artificial Sequence
  Description of Artificial Sequence: Synthetic oligonucleotide
  Sense strand starting at position 1087 of SEQ ID NO: 317372
gacagauguucucuggaaa

SEQ ID NO: 485770 - RNA, 19 nt, Artificial Sequence
  Description of Artificial Sequence: Synthetic oligonucleotide
  Antisense Strand to SEQ ID NO: 485769
uuuccagagaacaucuguc

SEQ ID NO: 485771 - RNA, 19 nt, Artificial Sequence
  Description of Artificial Sequence: Synthetic oligonucleotide
  Sense strand starting at position 1364 of SEQ ID NO: 317372
uuuauaaagcaucaagagu

SEQ ID NO: 485772 - RNA, 19 nt, Artificial Sequence
  Description of Artificial Sequence: Synthetic oligonucleotide
  Antisense Strand to SEQ ID NO: 485771
acucuugaugcuuuauaaa

SEQ ID NO: 485773 - RNA, 19 nt, Artificial Sequence
  Description of Artificial Sequence: Synthetic oligonucleotide
  Sense strand starting at position 1372 of SEQ ID NO: 317372
gcaucaagagucgcugcau

SEQ ID NO: 485774 - RNA, 19 nt, Artificial Sequence
  Description of Artificial Sequence: Synthetic oligonucleotide
  Antisense Strand to SEQ ID NO: 485773
augcagcgacucuugaugc

SEQ ID NO: 485775 - RNA, 19 nt, Artificial Sequence
  Description of Artificial Sequence: Synthetic oligonucleotide
  Sense strand starting at position 1510 of SEQ ID NO: 317372
ugaauaagauuugaugacu

SEQ ID NO: 485776 - RNA, 19 nt, Artificial Sequence
  Description of Artificial Sequence: Synthetic oligonucleotide
  Antisense Strand to SEQ ID NO: 485775
agucaucaaaucuuauuca

SEQ ID NO: 485777 - RNA, 19 nt, Artificial Sequence
  Description of Artificial Sequence: Synthetic oligonucleotide
  Sense strand starting at position 1553 of SEQ ID NO: 317372
gcagguauucuguauacaa

SEQ ID NO: 485778 - RNA, 19 nt, Artificial Sequence
  Description of Artificial Sequence: Synthetic oligonucleotide
  Antisense Strand to SEQ ID NO: 485777
uuguauacagaauaccugc

SEQ ID NO: 485779 - RNA, 19 nt, Artificial Sequence
  Description of Artificial Sequence: Synthetic oligonucleotide
  Sense strand starting at position 1615 of SEQ ID NO: 317372
uguacuuaccagugcuuau

SEQ ID NO: 485780 - RNA, 19 nt, Artificial Sequence
  Description of Artificial Sequence: Synthetic oligonucleotide
  Antisense Strand to SEQ ID NO: 485779
auaagcacugguaaguaca

SEQ ID NO: 485781 - RNA, 19 nt, Artificial Sequence
  Description of Artificial Sequence: Synthetic oligonucleotide
  Sense strand starting at position 1999 of SEQ ID NO: 317372
cuucuucugcagugaaaug

SEQ ID NO: 485782 - RNA, 19 nt, Artificial Sequence
  Description of Artificial Sequence: Synthetic oligonucleotide
  Antisense Strand to SEQ ID NO: 485781
cauuucacugcagaagaag

SEQ ID NO: 485783 - RNA, 19 nt, Artificial Sequence
  Description of Artificial Sequence: Synthetic oligonucleotide
  Sense strand starting at position 2036 of SEQ ID NO: 317372
aggaaugagugacaguauu

SEQ ID NO: 485784 - RNA, 19 nt, Artificial Sequence
  Description of Artificial Sequence: Synthetic oligonucleotide
  Antisense Strand to SEQ ID NO: 485783
aauacugucacucauuccu

SEQ ID NO: 485785 - RNA, 19 nt, Artificial Sequence
  Description of Artificial Sequence: Synthetic oligonucleotide
  Sense strand starting at position 2134 of SEQ ID NO: 317372
auacuauuggcuuacaaug

SEQ ID NO: 485786 - RNA, 19 nt, Artificial Sequence
  Description of Artificial Sequence: Synthetic oligonucleotide
  Antisense Strand to SEQ ID NO: 485785
cauuguaagccaauaguau

SEQ ID NO: 485787 - RNA, 19 nt, Artificial Sequence
  Description of Artificial Sequence: Synthetic oligonucleotide
  Sense strand starting at position 2139 of SEQ ID NO: 317372
auuggcuuacaaugaaagu

SEQ ID NO: 485788 - RNA, 19 nt, Artificial Sequence
  Description of Artificial Sequence: Synthetic oligonucleotide
  Antisense Strand to SEQ ID NO: 485787
acuuucauuguaagccaau

SEQ ID NO: 485789 - RNA, 19 nt, Artificial Sequence
  Description of Artificial Sequence: Synthetic oligonucleotide
  Sense strand starting at position 2155 of SEQ ID NO: 317372
aguaauguuugacuuuaca

SEQ ID NO: 485790 - RNA, 19 nt, Artificial Sequence
  Description of Artificial Sequence: Synthetic oligonucleotide
  Antisense Strand to SEQ ID NO: 485789
uguaaagucaaacauuacu

SEQ ID NO: 485791 - RNA, 19 nt, Artificial Sequence
  Description of Artificial Sequence: Synthetic oligonucleotide
  Sense strand starting at position 2956 of SEQ ID NO: 317372
ucuguaugaugucucagau

SEQ ID NO: 485792 - RNA, 19 nt, Artificial Sequence
  Description of Artificial Sequence: Synthetic oligonucleotide
  Antisense Strand to SEQ ID NO: 485791
aucugagacaucauacaga

SEQ ID NO: 485793 - RNA, 19 nt, Artificial Sequence
  Description of Artificial Sequence: Synthetic oligonucleotide
  Sense strand starting at position 3019 of SEQ ID NO: 317372
gcagaaugaugcuuacacu

SEQ ID NO: 485794 - RNA, 19 nt, Artificial Sequence
  Description of Artificial Sequence: Synthetic oligonucleotide
  Antisense Strand to SEQ ID NO: 485793
aguguaagcaucauucugc

SEQ ID NO: 485795 - RNA, 19 nt, Artificial Sequence
  Description of Artificial Sequence: Synthetic oligonucleotide
  Sense strand starting at position 3111 of SEQ ID NO: 317372
uaaguugcaucguuacuua

SEQ ID NO: 485796 - RNA, 19 nt, Artificial Sequence
  Description of Artificial Sequence: Synthetic oligonucleotide
  Antisense Strand to SEQ ID NO: 485795
uaaguaacgaugcaacuua

SEQ ID NO: 485797 - RNA, 19 nt, Artificial Sequence
  Description of Artificial Sequence: Synthetic oligonucleotide
  Sense strand starting at position 3504 of SEQ ID NO: 317372
uuuacagaauucuaagaug

SEQ ID NO: 485798 - RNA, 19 nt, Artificial Sequence
  Description of Artificial Sequence: Synthetic oligonucleotide
  Antisense Strand to SEQ ID NO: 485797
caucuuagaauucuguaaa

SEQ ID NO: 485799 - RNA, 19 nt, Artificial Sequence
  Description of Artificial Sequence: Synthetic oligonucleotide
  Sense strand starting at position 3513 of SEQ ID NO: 317372
uucuaagaugccugugaau

SEQ ID NO: 485800 - RNA, 19 nt, Artificial Sequence
  Description of Artificial Sequence: Synthetic oligonucleotide
  Antisense Strand to SEQ ID NO: 485799
auucacaggcaucuuagaa

SEQ ID NO: 485801 - RNA, 19 nt, Artificial Sequence
  Description of Artificial Sequence: Synthetic oligonucleotide
  Sense strand starting at position 3692 of SEQ ID NO: 317372
uggcuaaaguauuccucaa

SEQ ID NO: 485802 - RNA, 19 nt, Artificial Sequence
  Description of Artificial Sequence: Synthetic oligonucleotide
  Antisense Strand to SEQ ID NO: 485801
uugaggaauacuuuagcca

SEQ ID NO: 485803 - RNA, 19 nt, Artificial Sequence
  Description of Artificial Sequence: Synthetic oligonucleotide
  Sense strand starting at position 3731 of SEQ ID NO: 317372
uggcucuucugacucauuu

SEQ ID NO: 485804 - RNA, 19 nt, Artificial Sequence
  Description of Artificial Sequence: Synthetic oligonucleotide
  Antisense Strand to SEQ ID NO: 485803
aaaugagucagaagagcca

SEQ ID NO: 485805 - RNA, 19 nt, Artificial Sequence
  Description of Artificial Sequence: Synthetic oligonucleotide
  Sense strand starting at position 3798 of SEQ ID NO: 317372
cugugccaucaacaguauu

SEQ ID NO: 485806 - RNA, 19 nt, Artificial Sequence
  Description of Artificial Sequence: Synthetic oligonucleotide
  Antisense Strand to SEQ ID NO: 485805
aauacuguugauggcacag

SEQ ID NO: 485807 - RNA, 19 nt, Artificial Sequence
  Description of Artificial Sequence: Synthetic oligonucleotide
  Sense strand starting at position 3806 of SEQ ID NO: 317372
ucaacaguauugguaguau

SEQ ID NO: 485808 - RNA, 19 nt, Artificial Sequence
  Description of Artificial Sequence: Synthetic oligonucleotide
  Antisense Strand to SEQ ID NO: 485807
auacuaccaauacuguuga

SEQ ID NO: 485809 - RNA, 19 nt, Artificial Sequence
  Description of Artificial Sequence: Synthetic oligonucleotide
  Sense strand starting at position 3897 of SEQ ID NO: 317372
uggguuugcaauuaugaag

SEQ ID NO: 485810 - RNA, 19 nt, Artificial Sequence
  Description of Artificial Sequence: Synthetic oligonucleotide
  Antisense Strand to SEQ ID NO: 485809
cuucauaauugcaaaccca

SEQ ID NO: 485811 - RNA, 19 nt, Artificial Sequence
  Description of Artificial Sequence: Synthetic oligonucleotide
  Sense strand starting at position 3915 of SEQ ID NO: 317372
gagcuagucuacuugauuc

SEQ ID NO: 485812 - RNA, 19 nt, Artificial Sequence
  Description of Artificial Sequence: Synthetic oligonucleotide
  Antisense Strand to SEQ ID NO: 485811
gaaucaaguagacuagcuc

SEQ ID NO: 485813 - RNA, 19 nt, Artificial Sequence
  Description of Artificial Sequence: Synthetic oligonucleotide
  Sense strand starting at position 3917 of SEQ ID NO: 317372
gcuagucuacuugauucuu

SEQ ID NO: 485814 - RNA, 19 nt, Artificial Sequence
  Description of Artificial Sequence: Synthetic oligonucleotide
  Antisense Strand to SEQ ID NO: 485813
aagaaucaaguagacuagc

SEQ ID NO: 485815 - RNA, 19 nt, Artificial Sequence
  Description of Artificial Sequence: Synthetic oligonucleotide
  Sense strand starting at position 3925 of SEQ ID NO: 317372
acuugauucuuccuuaggu

SEQ ID NO: 485816 - RNA, 19 nt, Artificial Sequence
  Description of Artificial Sequence: Synthetic oligonucleotide
  Antisense Strand to SEQ ID NO: 485815
accuaaggaagaaucaagu

SEQ ID NO: 485817 - RNA, 19 nt, Artificial Sequence
  Description of Artificial Sequence: Synthetic oligonucleotide
  Sense strand starting at position 3926 of SEQ ID NO: 317372
cuugauucuuccuuaggua

SEQ ID NO: 485818 - RNA, 19 nt, Artificial Sequence
  Description of Artificial Sequence: Synthetic oligonucleotide
  Antisense Strand to SEQ ID NO: 485817
uaccuaaggaagaaucaag

SEQ ID NO: 485819 - RNA, 19 nt, Artificial Sequence
  Description of Artificial Sequence: Synthetic oligonucleotide
  Sense strand starting at position 3927 of SEQ ID NO: 317372
uugauucuuccuuagguau

SEQ ID NO: 485820 - RNA, 19 nt, Artificial Sequence
  Description of Artificial Sequence: Synthetic oligonucleotide
  Antisense Strand to SEQ ID NO: 485819
auaccuaaggaagaaucaa

SEQ ID NO: 485821 - RNA, 19 nt, Artificial Sequence
  Description of Artificial Sequence: Synthetic oligonucleotide
  Sense strand starting at position 3934 of SEQ ID NO: 317372
uuccuuagguauguuacua

SEQ ID NO: 485822 - RNA, 19 nt, Artificial Sequence
  Description of Artificial Sequence: Synthetic oligonucleotide
  Antisense Strand to SEQ ID NO: 485821
uaguaacauaccuaaggaa

SEQ ID NO: 485823 - RNA, 19 nt, Artificial Sequence
  Description of Artificial Sequence: Synthetic oligonucleotide
  Sense strand starting at position 3938 of SEQ ID NO: 317372
uuagguauguuacuaaaca

SEQ ID NO: 485824 - RNA, 19 nt, Artificial Sequence
  Description of Artificial Sequence: Synthetic oligonucleotide
  Antisense Strand to SEQ ID NO: 485823
uguuuaguaacauaccuaa

SEQ ID NO: 485825 - RNA, 19 nt, Artificial Sequence
  Description of Artificial Sequence: Synthetic oligonucleotide
  Sense strand starting at position 117 of SEQ ID NO: 317373
ggcacuacuguguagugaa

SEQ ID NO: 485826 - RNA, 19 nt, Artificial Sequence
  Description of Artificial Sequence: Synthetic oligonucleotide
  Antisense Strand to SEQ ID NO: 485825
uucacuacacaguagugcc

SEQ ID NO: 485827 - RNA, 19 nt, Artificial Sequence
  Description of Artificial Sequence: Synthetic oligonucleotide
  Sense strand starting at position 154 of SEQ ID NO: 317373
guccaaaguccaugucuga

SEQ ID NO: 485828 - RNA, 19 nt, Artificial Sequence
  Description of Artificial Sequence: Synthetic oligonucleotide
  Antisense Strand to SEQ ID NO: 485827
ucagacauggacuuuggac

SEQ ID NO: 485829 - RNA, 19 nt, Artificial Sequence
  Description of Artificial Sequence: Synthetic oligonucleotide
  Sense strand starting at position 244 of SEQ ID NO: 317373
gugguaugauaccauauuu

SEQ ID NO: 485830 - RNA, 19 nt, Artificial Sequence
  Description of Artificial Sequence: Synthetic oligonucleotide
  Antisense Strand to SEQ ID NO: 485829
aaauaugguaucauaccac

SEQ ID NO: 485831 - RNA, 19 nt, Artificial Sequence
  Description of Artificial Sequence: Synthetic oligonucleotide
  Sense strand starting at position 287 of SEQ ID NO: 317373
aguaguuuagaaggguaua

SEQ ID NO: 485832 - RNA, 19 nt, Artificial Sequence
  Description of Artificial Sequence: Synthetic oligonucleotide
  Antisense Strand to SEQ ID NO: 485831
uauacccuucuaaacuacu

SEQ ID NO: 485833 - RNA, 19 nt, Artificial Sequence
  Description of Artificial Sequence: Synthetic oligonucleotide
  Sense strand starting at position 288 of SEQ ID NO: 317373
guaguuuagaaggguauaa

SEQ ID NO: 485834 - RNA, 19 nt, Artificial Sequence
  Description of Artificial Sequence: Synthetic oligonucleotide
  Antisense Strand to SEQ ID NO: 485833
uuauacccuucuaaacuac

SEQ ID NO: 485835 - RNA, 19 nt, Artificial Sequence
  Description of Artificial Sequence: Synthetic oligonucleotide
  Sense strand starting at position 415 of SEQ ID NO: 317373
uuaguuauaggcuagcaua

SEQ ID NO: 485836 - RNA, 19 nt, Artificial Sequence
  Description of Artificial Sequence: Synthetic oligonucleotide
  Antisense Strand to SEQ ID NO: 485835
uaugcuagccuauaacuaa

SEQ ID NO: 485837 - RNA, 19 nt, Artificial Sequence
  Description of Artificial Sequence: Synthetic oligonucleotide
  Sense strand starting at position 606 of SEQ ID NO: 317373
ucauaacucuuccuggguu

SEQ ID NO: 485838 - RNA, 19 nt, Artificial Sequence
  Description of Artificial Sequence: Synthetic oligonucleotide
  Antisense Strand to SEQ ID NO: 485837
aacccaggaagaguuauga

SEQ ID NO: 485839 - RNA, 19 nt, Artificial Sequence
  Description of Artificial Sequence: Synthetic oligonucleotide
  Sense strand starting at position 609 of SEQ ID NO: 317373
uaacucuuccuggguuuga

SEQ ID NO: 485840 - RNA, 19 nt, Artificial Sequence
  Description of Artificial Sequence: Synthetic oligonucleotide
  Antisense Strand to SEQ ID NO: 485839
ucaaacccaggaagaguua

SEQ ID NO: 485841 - RNA, 19 nt, Artificial Sequence
  Description of Artificial Sequence: Synthetic oligonucleotide
  Sense strand starting at position 610 of SEQ ID NO: 317373
aacucuuccuggguuugau

SEQ ID NO: 485842 - RNA, 19 nt, Artificial Sequence
  Description of Artificial Sequence: Synthetic oligonucleotide
  Antisense Strand to SEQ ID NO: 485841
aucaaacccaggaagaguu

SEQ ID NO: 485843 - RNA, 19 nt, Artificial Sequence
  Description of Artificial Sequence: Synthetic oligonucleotide
  Sense strand starting at position 667 of SEQ ID NO: 317373
gcuguuaaccacugaaaca

SEQ ID NO: 485844 - RNA, 19 nt, Artificial Sequence
  Description of Artificial Sequence: Synthetic oligonucleotide
  Antisense Strand to SEQ ID NO: 485843
uguuucagugguuaacagc

SEQ ID NO: 485845 - RNA, 19 nt, Artificial Sequence
  Description of Artificial Sequence: Synthetic oligonucleotide
  Sense strand starting at position 1017 of SEQ ID NO: 317373
aaggucucuucugcaaaug

SEQ ID NO: 485846 - RNA, 19 nt, Artificial Sequence
  Description of Artificial Sequence: Synthetic oligonucleotide
  Antisense Strand to SEQ ID NO: 485845
cauuugcagaagagaccuu

SEQ ID NO: 485847 - RNA, 19 nt, Artificial Sequence
  Description of Artificial Sequence: Synthetic oligonucleotide
  Sense strand starting at position 1018 of SEQ ID NO: 317373
aggucucuucugcaaaugu

SEQ ID NO: 485848 - RNA, 19 nt, Artificial Sequence
  Description of Artificial Sequence: Synthetic oligonucleotide
  Antisense Strand to SEQ ID NO: 485847
acauuugcagaagagaccu

SEQ ID NO: 485849 - RNA, 19 nt, Artificial Sequence
  Description of Artificial Sequence: Synthetic oligonucleotide
  Sense strand starting at position 1207 of SEQ ID NO: 317373
ggugaagucugccuuuaaa

SEQ ID NO: 485850 - RNA, 19 nt, Artificial Sequence
  Description of Artificial Sequence: Synthetic oligonucleotide
  Antisense Strand to SEQ ID NO: 485849
uuuaaaggcagacuucacc

SEQ ID NO: 485851 - RNA, 19 nt, Artificial Sequence
  Description of Artificial Sequence: Synthetic oligonucleotide
  Sense strand starting at position 1210 of SEQ ID NO: 317373
gaagucugccuuuaaacag

SEQ ID NO: 485852 - RNA, 19 nt, Artificial Sequence
  Description of Artificial Sequence: Synthetic oligonucleotide
  Antisense Strand to SEQ ID NO: 485851
cuguuuaaaggcagacuuc

SEQ ID NO: 485853 - RNA, 19 nt, Artificial Sequence
  Description of Artificial Sequence: Synthetic oligonucleotide
  Sense strand starting at position 1252 of SEQ ID NO: 317373
cgguaaccaguuuaucaca

SEQ ID NO: 485854 - RNA, 19 nt, Artificial Sequence
  Description of Artificial Sequence: Synthetic oligonucleotide
  Antisense Strand to SEQ ID NO: 485853
ugugauaaacugguuaccg

SEQ ID NO: 485855 - RNA, 19 nt, Artificial Sequence
  Description of Artificial Sequence: Synthetic oligonucleotide
  Sense strand starting at position 1254 of SEQ ID NO: 317373
guaaccaguuuaucacaca

SEQ ID NO: 485856 - RNA, 19 nt, Artificial Sequence
  Description of Artificial Sequence: Synthetic oligonucleotide
  Antisense Strand to SEQ ID NO: 485855
ugugugauaaacugguuac

SEQ ID NO: 485857 - RNA, 19 nt, Artificial Sequence
  Description of Artificial Sequence: Synthetic oligonucleotide
  Sense strand starting at position 1355 of SEQ ID NO: 317373
cuuuaaauucgcgacacaa

SEQ ID NO: 485858 - RNA, 19 nt, Artificial Sequence
  Description of Artificial Sequence: Synthetic oligonucleotide
  Antisense Strand to SEQ ID NO: 485857
uugugucgcgaauuuaaag

SEQ ID NO: 485859 - RNA, 19 nt, Artificial Sequence
  Description of Artificial Sequence: Synthetic oligonucleotide
  Sense strand starting at position 1357 of SEQ ID NO: 317373
uuaaauucgcgacacaaua

SEQ ID NO: 485860 - RNA, 19 nt, Artificial Sequence
  Description of Artificial Sequence: Synthetic oligonucleotide
  Antisense Strand to SEQ ID NO: 485859
uauugugucgcgaauuuaa

SEQ ID NO: 485861 - RNA, 19 nt, Artificial Sequence
  Description of Artificial Sequence: Synthetic oligonucleotide
  Sense strand starting at position 1572 of SEQ ID NO: 317373
ucgacaaucugauccuaaa

SEQ ID NO: 485862 - RNA, 19 nt, Artificial Sequence
  Description of Artificial Sequence: Synthetic oligonucleotide
  Antisense Strand to SEQ ID NO: 485861
uuuaggaucagauugucga

SEQ ID NO: 485863 - RNA, 19 nt, Artificial Sequence
  Description of Artificial Sequence: Synthetic oligonucleotide
  Sense strand starting at position 2355 of SEQ ID NO: 317373
gacaguguucuguaaugug

SEQ ID NO: 485864 - RNA, 19 nt, Artificial Sequence
  Description of Artificial Sequence: Synthetic oligonucleotide
  Antisense Strand to SEQ ID NO: 485863
cacauuacagaacacuguc

SEQ ID NO: 485865 - RNA, 19 nt, Artificial Sequence
  Description of Artificial Sequence: Synthetic oligonucleotide
  Sense strand starting at position 2364 of SEQ ID NO: 317373
cuguaaugugucucccguu

SEQ ID NO: 485866 - RNA, 19 nt, Artificial Sequence
  Description of Artificial Sequence: Synthetic oligonucleotide
  Antisense Strand to SEQ ID NO: 485865
aacgggagacacauuacag

SEQ ID NO: 485867 - RNA, 19 nt, Artificial Sequence
  Description of Artificial Sequence: Synthetic oligonucleotide
  Sense strand starting at position 2414 of SEQ ID NO: 317373
uuuagaauaccgugguaga

SEQ ID NO: 485868 - RNA, 19 nt, Artificial Sequence
  Description of Artificial Sequence: Synthetic oligonucleotide
  Antisense Strand to SEQ ID NO: 485867
ucuaccacgguauucuaaa

SEQ ID NO: 485869 - RNA, 19 nt, Artificial Sequence
  Description of Artificial Sequence: Synthetic oligonucleotide
  Sense strand starting at position 2415 of SEQ ID NO: 317373
uuagaauaccgugguagag

SEQ ID NO: 485870 - RNA, 19 nt, Artificial Sequence
  Description of Artificial Sequence: Synthetic oligonucleotide
  Antisense Strand to SEQ ID NO: 485869
cucuaccacgguauucuaa

SEQ ID NO: 485871 - RNA, 19 nt, Artificial Sequence
  Description of Artificial Sequence: Synthetic oligonucleotide
  Sense strand starting at position 2433 of SEQ ID NO: 317373
gguagacgcgguuacaaau

SEQ ID NO: 485872 - RNA, 19 nt, Artificial Sequence
  Description of Artificial Sequence: Synthetic oligonucleotide
  Antisense Strand to SEQ ID NO: 485871
auuuguaaccgcgucuacc

SEQ ID NO: 485873 - RNA, 19 nt, Artificial Sequence
  Description of Artificial Sequence: Synthetic oligonucleotide
  Sense strand starting at position 2446 of SEQ ID NO: 317373
acaaauugaugucuguuga

SEQ ID NO: 485874 - RNA, 19 nt, Artificial Sequence
  Description of Artificial Sequence: Synthetic oligonucleotide
  Antisense Strand to SEQ ID NO: 485873
ucaacagacaucaauuugu

SEQ ID NO: 485875 - RNA, 19 nt, Artificial Sequence
  Description of Artificial Sequence: Synthetic oligonucleotide
  Sense strand starting at position 2447 of SEQ ID NO: 317373
caaauugaugucuguugag

SEQ ID NO: 485876 - RNA, 19 nt, Artificial Sequence
  Description of Artificial Sequence: Synthetic oligonucleotide
  Antisense Strand to SEQ ID NO: 485875
cucaacagacaucaauuug

SEQ ID NO: 485877 - RNA, 19 nt, Artificial Sequence
  Description of Artificial Sequence: Synthetic oligonucleotide
  Sense strand starting at position 2950 of SEQ ID NO: 317373
ugacuugcuggucaggaga

SEQ ID NO: 485878 - RNA, 19 nt, Artificial Sequence
  Description of Artificial Sequence: Synthetic oligonucleotide
  Antisense Strand to SEQ ID NO: 485877
ucuccugaccagcaaguca

SEQ ID NO: 485879 - RNA, 19 nt, Artificial Sequence
  Description of Artificial Sequence: Synthetic oligonucleotide
  Sense strand starting at position 2953 of SEQ ID NO: 317373
cuugcuggucaggagauaa

SEQ ID NO: 485880 - RNA, 19 nt, Artificial Sequence
  Description of Artificial Sequence: Synthetic oligonucleotide
  Antisense Strand to SEQ ID NO: 485879
uuaucuccugaccagcaag

SEQ ID NO: 485881 - RNA, 19 nt, Artificial Sequence
  Description of Artificial Sequence: Synthetic oligonucleotide
  Sense strand starting at position 3033 of SEQ ID NO: 317373
gguuguagagcuggaauaa

SEQ ID NO: 485882 - RNA, 19 nt, Artificial Sequence
  Description of Artificial Sequence: Synthetic oligonucleotide
  Antisense Strand to SEQ ID NO: 485881
uuauuccagcucuacaacc

SEQ ID NO: 485883 - RNA, 19 nt, Artificial Sequence
  Description of Artificial Sequence: Synthetic oligonucleotide
  Sense strand starting at position 3034 of SEQ ID NO: 317373
guuguagagcuggaauaag

SEQ ID NO: 485884 - RNA, 19 nt, Artificial Sequence
  Description of Artificial Sequence: Synthetic oligonucleotide
  Antisense Strand to SEQ ID NO: 485883
cuuauuccagcucuacaac

SEQ ID NO: 485885 - RNA, 19 nt, Artificial Sequence
  Description of Artificial Sequence: Synthetic oligonucleotide
  Sense strand starting at position 3104 of SEQ ID NO: 317373
cucccauucuagucucuga

SEQ ID NO: 485886 - RNA, 19 nt, Artificial Sequence
  Description of Artificial Sequence: Synthetic oligonucleotide
  Antisense Strand to SEQ ID NO: 485885
ucagagacuagaaugggag

SEQ ID NO: 485887 - RNA, 19 nt, Artificial Sequence
  Description of Artificial Sequence: Synthetic oligonucleotide
  Sense strand starting at position 3205 of SEQ ID NO: 317373
guuggcaagcuuuaauuaa

SEQ ID NO: 485888 - RNA, 19 nt, Artificial Sequence
  Description of Artificial Sequence: Synthetic oligonucleotide
  Antisense Strand to SEQ ID NO: 485887
uuaauuaaagcuugccaac

SEQ ID NO: 485889 - RNA, 19 nt, Artificial Sequence
  Description of Artificial Sequence: Synthetic oligonucleotide
  Sense strand starting at position 3227 of SEQ ID NO: 317373
gggacaaguggcgaaguaa

SEQ ID NO: 485890 - RNA, 19 nt, Artificial Sequence
  Description of Artificial Sequence: Synthetic oligonucleotide
  Antisense Strand to SEQ ID NO: 485889
uuacuucgccacuuguccc

SEQ ID NO: 485891 - RNA, 19 nt, Artificial Sequence
  Description of Artificial Sequence: Synthetic oligonucleotide
  Sense strand starting at position 3302 of SEQ ID NO: 317373
aggugaaagcugcaagcuu

SEQ ID NO: 485892 - RNA, 19 nt, Artificial Sequence
  Description of Artificial Sequence: Synthetic oligonucleotide
  Antisense Strand to SEQ ID NO: 485891
aagcuugcagcuuucaccu

SEQ ID NO: 485893 - RNA, 19 nt, Artificial Sequence
  Description of Artificial Sequence: Synthetic oligonucleotide
  Sense strand starting at position 3463 of SEQ ID NO: 317373
agguaaagguuucuagaaa

SEQ ID NO: 485894 - RNA, 19 nt, Artificial Sequence
  Description of Artificial Sequence: Synthetic oligonucleotide
  Antisense Strand to SEQ ID NO: 485893
uuucuagaaaccuuuaccu

SEQ ID NO: 485895 - RNA, 19 nt, Artificial Sequence
  Description of Artificial Sequence: Synthetic oligonucleotide
  Sense strand starting at position 3481 of SEQ ID NO: 317373
aauuaaagguuucugguaa

SEQ ID NO: 485896 - RNA, 19 nt, Artificial Sequence
  Description of Artificial Sequence: Synthetic oligonucleotide
  Antisense Strand to SEQ ID NO: 485895
uuaccagaaaccuuuaauu

SEQ ID NO: 485897 - RNA, 19 nt, Artificial Sequence
  Description of Artificial Sequence: Synthetic oligonucleotide
  Sense strand starting at position 3648 of SEQ ID NO: 317373
gggucuuuaauuugugcaa

SEQ ID NO: 485898 - RNA, 19 nt, Artificial Sequence
  Description of Artificial Sequence: Synthetic oligonucleotide
  Antisense Strand to SEQ ID NO: 485897
uugcacaaauuaaagaccc

SEQ ID NO: 485899 - RNA, 19 nt, Artificial Sequence
  Description of Artificial Sequence: Synthetic oligonucleotide
  Sense strand starting at position 3718 of SEQ ID NO: 317373
ugagaacacagcuguguuu

SEQ ID NO: 485900 - RNA, 19 nt, Artificial Sequence
  Description of Artificial Sequence: Synthetic oligonucleotide
  Antisense Strand to SEQ ID NO: 485899
aaacacagcuguguucuca

SEQ ID NO: 485901 - RNA, 19 nt, Artificial Sequence
  Description of Artificial Sequence: Synthetic oligonucleotide
  Sense strand starting at position 3720 of SEQ ID NO: 317373
agaacacagcuguguuuaa

SEQ ID NO: 485902 - RNA, 19 nt, Artificial Sequence
  Description of Artificial Sequence: Synthetic oligonucleotide
  Antisense Strand to SEQ ID NO: 485901
uuaaacacagcuguguucu

SEQ ID NO: 485903 - RNA, 19 nt, Artificial Sequence
  Description of Artificial Sequence: Synthetic oligonucleotide
  Sense strand starting at position 3724 of SEQ ID NO: 317373
cacagcuguguuuaagaga

SEQ ID NO: 485904 - RNA, 19 nt, Artificial Sequence
  Description of Artificial Sequence: Synthetic oligonucleotide
  Antisense Strand to SEQ ID NO: 485903
ucucuuaaacacagcugug

SEQ ID NO: 485905 - RNA, 19 nt, Artificial Sequence
  Description of Artificial Sequence: Synthetic oligonucleotide
  Sense strand starting at position 74 of SEQ ID NO: 317374
accugauuugucugucuca

SEQ ID NO: 485906 - RNA, 19 nt, Artificial Sequence
  Description of Artificial Sequence: Synthetic oligonucleotide
  Antisense Strand to SEQ ID NO: 485905
ugagacagacaaaucaggu

SEQ ID NO: 485907 - RNA, 19 nt, Artificial Sequence
  Description of Artificial Sequence: Synthetic oligonucleotide
  Sense strand starting at position 75 of SEQ ID NO: 317374
ccugauuugucugucucaa

SEQ ID NO: 485908 - RNA, 19 nt, Artificial Sequence
  Description of Artificial Sequence: Synthetic oligonucleotide
  Antisense Strand to SEQ ID NO: 485907
uugagacagacaaaucagg

SEQ ID NO: 485909 - RNA, 19 nt, Artificial Sequence
  Description of Artificial Sequence: Synthetic oligonucleotide
  Sense strand starting at position 365 of SEQ ID NO: 317374
ucuccagauugagccaaau

SEQ ID NO: 485910 - RNA, 19 nt, Artificial Sequence
  Description of Artificial Sequence: Synthetic oligonucleotide
  Antisense Strand to SEQ ID NO: 485909
auuuggcucaaucuggaga

SEQ ID NO: 485911 - RNA, 19 nt, Artificial Sequence
  Description of Artificial Sequence: Synthetic oligonucleotide
  Sense strand starting at position 478 of SEQ ID NO: 317374
aaguucuaguggccucaau

SEQ ID NO: 485912 - RNA, 19 nt, Artificial Sequence
  Description of Artificial Sequence: Synthetic oligonucleotide
  Antisense Strand to SEQ ID NO: 485911
auugaggccacuagaacuu

SEQ ID NO: 485913 - RNA, 19 nt, Artificial Sequence
  Description of Artificial Sequence: Synthetic oligonucleotide
  Sense strand starting at position 654 of SEQ ID NO: 317374
aaggaaaucugagugugca

SEQ ID NO: 485914 - RNA, 19 nt, Artificial Sequence
  Description of Artificial Sequence: Synthetic oligonucleotide
  Antisense Strand to SEQ ID NO: 485913
ugcacacucagauuuccuu

SEQ ID NO: 485915 - RNA, 19 nt, Artificial Sequence
  Description of Artificial Sequence: Synthetic oligonucleotide
  Sense strand starting at position 655 of SEQ ID NO: 317374
aggaaaucugagugugcac

SEQ ID NO: 485916 - RNA, 19 nt, Artificial Sequence
  Description of Artificial Sequence: Synthetic oligonucleotide
  Antisense Strand to SEQ ID NO: 485915
gugcacacucagauuuccu

SEQ ID NO: 485917 - RNA, 19 nt, Artificial Sequence
  Description of Artificial Sequence: Synthetic oligonucleotide
  Sense strand starting at position 657 of SEQ ID NO: 317374
gaaaucugagugugcacuu

SEQ ID NO: 485918 - RNA, 19 nt, Artificial Sequence
  Description of Artificial Sequence: Synthetic oligonucleotide
  Antisense Strand to SEQ ID NO: 485917
aagugcacacucagauuuc

SEQ ID NO: 485919 - RNA, 19 nt, Artificial Sequence
  Description of Artificial Sequence: Synthetic oligonucleotide
  Sense strand starting at position 658 of SEQ ID NO: 317374
aaaucugagugugcacuua

SEQ ID NO: 485920 - RNA, 19 nt, Artificial Sequence
  Description of Artificial Sequence: Synthetic oligonucleotide
  Antisense Strand to SEQ ID NO: 485919
uaagugcacacucagauuu

SEQ ID NO: 485921 - RNA, 19 nt, Artificial Sequence
  Description of Artificial Sequence: Synthetic oligonucleotide
  Sense strand starting at position 679 of SEQ ID NO: 317374
acgcucugccuccagaaau

SEQ ID NO: 485922 - RNA, 19 nt, Artificial Sequence
  Description of Artificial Sequence: Synthetic oligonucleotide
  Antisense Strand to SEQ ID NO: 485921
auuucuggaggcagagcgu

SEQ ID NO: 485923 - RNA, 19 nt, Artificial Sequence
  Description of Artificial Sequence: Synthetic oligonucleotide
  Sense strand starting at position 690 of SEQ ID NO: 317374
ccagaaaucgacugcugca

SEQ ID NO: 485924 - RNA, 19 nt, Artificial Sequence
  Description of Artificial Sequence: Synthetic oligonucleotide
  Antisense Strand to SEQ ID NO: 485923
ugcagcagucgauuucugg

SEQ ID NO: 485925 - RNA, 19 nt, Artificial Sequence
  Description of Artificial Sequence: Synthetic oligonucleotide
  Sense strand starting at position 713 of SEQ ID NO: 317374
uuguaaugggcagaacauu

SEQ ID NO: 485926 - RNA, 19 nt, Artificial Sequence
  Description of Artificial Sequence: Synthetic oligonucleotide
  Antisense Strand to SEQ ID NO: 485925
aauguucugcccauuacaa

SEQ ID NO: 485927 - RNA, 19 nt, Artificial Sequence
  Description of Artificial Sequence: Synthetic oligonucleotide
  Sense strand starting at position 827 of SEQ ID NO: 317374
ggguuuccuggugaacaaa

SEQ ID NO: 485928 - RNA, 19 nt, Artificial Sequence
  Description of Artificial Sequence: Synthetic oligonucleotide
  Antisense Strand to SEQ ID NO: 485927
uuuguucaccaggaaaccc

SEQ ID NO: 485929 - RNA, 19 nt, Artificial Sequence
  Description of Artificial Sequence: Synthetic oligonucleotide
  Sense strand starting at position 869 of SEQ ID NO: 317374
uucugucugacagaugguu

SEQ ID NO: 485930 - RNA, 19 nt, Artificial Sequence
  Description of Artificial Sequence: Synthetic oligonucleotide
  Antisense Strand to SEQ ID NO: 485929
aaccaucugucagacagaa

SEQ ID NO: 485931 - RNA, 19 nt, Artificial Sequence
  Description of Artificial Sequence: Synthetic oligonucleotide
  Sense strand starting at position 905 of SEQ ID NO: 317374
cuaauccuugcugagguau

SEQ ID NO: 485932 - RNA, 19 nt, Artificial Sequence
  Description of Artificial Sequence: Synthetic oligonucleotide
  Antisense Strand to SEQ ID NO: 485931
auaccucagcaaggauuag

SEQ ID NO: 485933 - RNA, 19 nt, Artificial Sequence
  Description of Artificial Sequence: Synthetic oligonucleotide
  Sense strand starting at position 933 of SEQ ID NO: 317374
ggaagaagaguuuggcuuu

SEQ ID NO: 485934 - RNA, 19 nt, Artificial Sequence
  Description of Artificial Sequence: Synthetic oligonucleotide
  Antisense Strand to SEQ ID NO: 485933
aaagccaaacucuucuucc

SEQ ID NO: 485935 - RNA, 19 nt, Artificial Sequence
  Description of Artificial Sequence: Synthetic oligonucleotide
  Sense strand starting at position 966 of SEQ ID NO: 317374
uggaaugauuaagaaggaa

SEQ ID NO: 485936 - RNA, 19 nt, Artificial Sequence
  Description of Artificial Sequence: Synthetic oligonucleotide
  Antisense Strand to SEQ ID NO: 485935
uuccuucuuaaucauucca

SEQ ID NO: 485937 - RNA, 19 nt, Artificial Sequence
  Description of Artificial Sequence: Synthetic oligonucleotide
  Sense strand starting at position 1101 of SEQ ID NO: 317374
uuaacaguuuggguuugaa

SEQ ID NO: 485938 - RNA, 19 nt, Artificial Sequence
  Description of Artificial Sequence: Synthetic oligonucleotide
  Antisense Strand to SEQ ID NO: 485937
uucaaacccaaacuguuaa

SEQ ID NO: 485939 - RNA, 19 nt, Artificial Sequence
  Description of Artificial Sequence: Synthetic oligonucleotide
  Sense strand starting at position 1104 of SEQ ID NO: 317374
acaguuuggguuugaaaca

SEQ ID NO: 485940 - RNA, 19 nt, Artificial Sequence
  Description of Artificial Sequence: Synthetic oligonucleotide
  Antisense Strand to SEQ ID NO: 485939
uguuucaaacccaaacugu

SEQ ID NO: 485941 - RNA, 19 nt, Artificial Sequence
  Description of Artificial Sequence: Synthetic oligonucleotide
  Sense strand starting at position 1149 of SEQ ID NO: 317374
guggaaaugaagugcagua

SEQ ID NO: 485942 - RNA, 19 nt, Artificial Sequence
  Description of Artificial Sequence: Synthetic oligonucleotide
  Antisense Strand to SEQ ID NO: 485941
uacugcacuucauuuccac

SEQ ID NO: 485943 - RNA, 19 nt, Artificial Sequence
  Description of Artificial Sequence: Synthetic oligonucleotide
  Sense strand starting at position 1275 of SEQ ID NO: 317374
auauuugccuugucacuua

SEQ ID NO: 485944 - RNA, 19 nt, Artificial Sequence
  Description of Artificial Sequence: Synthetic oligonucleotide
  Antisense Strand to SEQ ID NO: 485943
uaagugacaaggcaaauau

SEQ ID NO: 485945 - RNA, 19 nt, Artificial Sequence
  Description of Artificial Sequence: Synthetic oligonucleotide
  Sense strand starting at position 1486 of SEQ ID NO: 317374
gacuuaugugaggacugcu

SEQ ID NO: 485946 - RNA, 19 nt, Artificial Sequence
  Description of Artificial Sequence: Synthetic oligonucleotide
  Antisense Strand to SEQ ID NO: 485945
agcaguccucacauaaguc

SEQ ID NO: 485947 - RNA, 19 nt, Artificial Sequence
  Description of Artificial Sequence: Synthetic oligonucleotide
  Sense strand starting at position 1591 of SEQ ID NO: 317374
cugagaguccuagagguug

SEQ ID NO: 485948 - RNA, 19 nt, Artificial Sequence
  Description of Artificial Sequence: Synthetic oligonucleotide
  Antisense Strand to SEQ ID NO: 485947
caaccucuaggacucucag

SEQ ID NO: 485949 - RNA, 19 nt, Artificial Sequence
  Description of Artificial Sequence: Synthetic oligonucleotide
  Sense strand starting at position 1596 of SEQ ID NO: 317374
aguccuagagguugagcaa

SEQ ID NO: 485950 - RNA, 19 nt, Artificial Sequence
  Description of Artificial Sequence: Synthetic oligonucleotide
  Antisense Strand to SEQ ID NO: 485949
uugcucaaccucuaggacu

SEQ ID NO: 485951 - RNA, 19 nt, Artificial Sequence
  Description of Artificial Sequence: Synthetic oligonucleotide
  Sense strand starting at position 1612 of SEQ ID NO: 317374
caacuuguccacggucaca

SEQ ID NO: 485952 - RNA, 19 nt, Artificial Sequence
  Description of Artificial Sequence: Synthetic oligonucleotide
  Antisense Strand to SEQ ID NO: 485951
ugugaccguggacaaguug

SEQ ID NO: 485953 - RNA, 19 nt, Artificial Sequence
  Description of Artificial Sequence: Synthetic oligonucleotide
  Sense strand starting at position 1758 of SEQ ID NO: 317374
agagaucacucacuguacu

SEQ ID NO: 485954 - RNA, 19 nt, Artificial Sequence
  Description of Artificial Sequence: Synthetic oligonucleotide
  Antisense Strand to SEQ ID NO: 485953
aguacagugagugaucucu

SEQ ID NO: 485955 - RNA, 19 nt, Artificial Sequence
  Description of Artificial Sequence: Synthetic oligonucleotide
  Sense strand starting at position 2470 of SEQ ID NO: 317374
ugagggagguuuguacgua

SEQ ID NO: 485956 - RNA, 19 nt, Artificial Sequence
  Description of Artificial Sequence: Synthetic oligonucleotide
  Antisense Strand to SEQ ID NO: 485955
uacguacaaaccucccuca

SEQ ID NO: 485957 - RNA, 19 nt, Artificial Sequence
  Description of Artificial Sequence: Synthetic oligonucleotide
  Sense strand starting at position 2474 of SEQ ID NO: 317374
ggagguuuguacguaucag

SEQ ID NO: 485958 - RNA, 19 nt, Artificial Sequence
  Description of Artificial Sequence: Synthetic oligonucleotide
  Antisense Strand to SEQ ID NO: 485957
cugauacguacaaaccucc

SEQ ID NO: 485959 - RNA, 19 nt, Artificial Sequence
  Description of Artificial Sequence: Synthetic oligonucleotide
  Sense strand starting at position 2475 of SEQ ID NO: 317374
gagguuuguacguaucaga

SEQ ID NO: 485960 - RNA, 19 nt, Artificial Sequence
  Description of Artificial Sequence: Synthetic oligonucleotide
  Antisense Strand to SEQ ID NO: 485959
ucugauacguacaaaccuc

SEQ ID NO: 485961 - RNA, 19 nt, Artificial Sequence
  Description of Artificial Sequence: Synthetic oligonucleotide
  Sense strand starting at position 2503 of SEQ ID NO: 317374
gcaaaucucuggcccgaga

SEQ ID NO: 485962 - RNA, 19 nt, Artificial Sequence
  Description of Artificial Sequence: Synthetic oligonucleotide
  Antisense Strand to SEQ ID NO: 485961
ucucgggccagagauuugc

SEQ ID NO: 485963 - RNA, 19 nt, Artificial Sequence
  Description of Artificial Sequence: Synthetic oligonucleotide
  Sense strand starting at position 2556 of SEQ ID NO: 317374
gggcuucugcaccaagacu

SEQ ID NO: 485964 - RNA, 19 nt, Artificial Sequence
  Description of Artificial Sequence: Synthetic oligonucleotide
  Antisense Strand to SEQ ID NO: 485963
agucuuggugcagaagccc

SEQ ID NO: 485965 - RNA, 19 nt, Artificial Sequence
  Description of Artificial Sequence: Synthetic oligonucleotide
  Sense strand starting at position 2948 of SEQ ID NO: 317374
gaggauaucugucuugacc

SEQ ID NO: 485966 - RNA, 19 nt, Artificial Sequence
  Description of Artificial Sequence: Synthetic oligonucleotide
  Antisense Strand to SEQ ID NO: 485965
ggucaagacagauauccuc

SEQ ID NO: 485967 - RNA, 19 nt, Artificial Sequence
  Description of Artificial Sequence: Synthetic oligonucleotide
  Sense strand starting at position 3022 of SEQ ID NO: 317374
gaggacagguuuccucuuu

SEQ ID NO: 485968 - RNA, 19 nt, Artificial Sequence
  Description of Artificial Sequence: Synthetic oligonucleotide
  Antisense Strand to SEQ ID NO: 485967
aaagaggaaaccuguccuc

SEQ ID NO: 485969 - RNA, 19 nt, Artificial Sequence
  Description of Artificial Sequence: Synthetic oligonucleotide
  Sense strand starting at position 3085 of SEQ ID NO: 317374
gcucuagaagcauguaaau

SEQ ID NO: 485970 - RNA, 19 nt, Artificial Sequence
  Description of Artificial Sequence: Synthetic oligonucleotide
  Antisense Strand to SEQ ID NO: 485969
auuuacaugcuucuagagc

SEQ ID NO: 485971 - RNA, 19 nt, Artificial Sequence
  Description of Artificial Sequence: Synthetic oligonucleotide
  Sense strand starting at position 3094 of SEQ ID NO: 317374
gcauguaaaucaguuauuc

SEQ ID NO: 485972 - RNA, 19 nt, Artificial Sequence
  Description of Artificial Sequence: Synthetic oligonucleotide
  Antisense Strand to SEQ ID NO: 485971
gaauaacugauuuacaugc

SEQ ID NO: 485973 - RNA, 19 nt, Artificial Sequence
  Description of Artificial Sequence: Synthetic oligonucleotide
  Sense strand starting at position 3213 of SEQ ID NO: 317374
gauccugucgcauagauga

SEQ ID NO: 485974 - RNA, 19 nt, Artificial Sequence
  Description of Artificial Sequence: Synthetic oligonucleotide
  Antisense Strand to SEQ ID NO: 485973
ucaucuaugcgacaggauc

SEQ ID NO: 485975 - RNA, 19 nt, Artificial Sequence
  Description of Artificial Sequence: Synthetic oligonucleotide
  Sense strand starting at position 3257 of SEQ ID NO: 317374
auaacuaaugaccgacauu

SEQ ID NO: 485976 - RNA, 19 nt, Artificial Sequence
  Description of Artificial Sequence: Synthetic oligonucleotide
  Antisense Strand to SEQ ID NO: 485975
aaugucggucauuaguuau

SEQ ID NO: 485977 - RNA, 19 nt, Artificial Sequence
  Description of Artificial Sequence: Synthetic oligonucleotide
  Sense strand starting at position 3377 of SEQ ID NO: 317374
gcuuguuaggaugaggaca

SEQ ID NO: 485978 - RNA, 19 nt, Artificial Sequence
  Description of Artificial Sequence: Synthetic oligonucleotide
  Antisense Strand to SEQ ID NO: 485977
uguccucauccuaacaagc

SEQ ID NO: 485979 - RNA, 19 nt, Artificial Sequence
  Description of Artificial Sequence: Synthetic oligonucleotide
  Sense strand starting at position 3852 of SEQ ID NO: 317374
aguaucuuucugggaccca

SEQ ID NO: 485980 - RNA, 19 nt, Artificial Sequence
  Description of Artificial Sequence: Synthetic oligonucleotide
  Antisense Strand to SEQ ID NO: 485979
ugggucccagaaagauacu

SEQ ID NO: 485981 - RNA, 19 nt, Artificial Sequence
  Description of Artificial Sequence: Synthetic oligonucleotide
  Sense strand starting at position 3879 of SEQ ID NO: 317374
ccacucuugguccaugaga

SEQ ID NO: 485982 - RNA, 19 nt, Artificial Sequence
  Description of Artificial Sequence: Synthetic oligonucleotide
  Antisense Strand to SEQ ID NO: 485981
ucucauggaccaagagugg

SEQ ID NO: 485983 - RNA, 19 nt, Artificial Sequence
  Description of Artificial Sequence: Synthetic oligonucleotide
  Sense strand starting at position 3881 of SEQ ID NO: 317374
acucuugguccaugagaua

SEQ ID NO: 485984 - RNA, 19 nt, Artificial Sequence
  Description of Artificial Sequence: Synthetic oligonucleotide
  Antisense Strand to SEQ ID NO: 485983
uaucucauggaccaagagu

SEQ ID NO: 485985 - RNA, 19 nt, Artificial Sequence
  Description of Artificial Sequence: Synthetic oligonucleotide
  Sense strand starting at position 7 of SEQ ID NO: 317375
uguugaaauugaguaucau

SEQ ID NO: 485986 - RNA, 19 nt, Artificial Sequence
  Description of Artificial Sequence: Synthetic oligonucleotide
  Antisense Strand to SEQ ID NO: 485985
augauacucaauuucaaca

SEQ ID NO: 485987 - RNA, 19 nt, Artificial Sequence
  Description of Artificial Sequence: Synthetic oligonucleotide
  Sense strand starting at position 8 of SEQ ID NO: 317375
guugaaauugaguaucauu

SEQ ID NO: 485988 - RNA, 19 nt, Artificial Sequence
  Description of Artificial Sequence: Synthetic oligonucleotide
  Antisense Strand to SEQ ID NO: 485987
aaugauacucaauuucaac

SEQ ID NO: 485989 - RNA, 19 nt, Artificial Sequence
  Description of Artificial Sequence: Synthetic oligonucleotide
  Sense strand starting at position 257 of SEQ ID NO: 317375
ugaguuaggugacuccaua

SEQ ID NO: 485990 - RNA, 19 nt, Artificial Sequence
  Description of Artificial Sequence: Synthetic oligonucleotide
  Antisense Strand to SEQ ID NO: 485989
uauggagucaccuaacuca

SEQ ID NO: 485991 - RNA, 19 nt, Artificial Sequence
  Description of Artificial Sequence: Synthetic oligonucleotide
  Sense strand starting at position 491 of SEQ ID NO: 317375
aacgguuaauaguuacuaa

SEQ ID NO: 485992 - RNA, 19 nt, Artificial Sequence
  Description of Artificial Sequence: Synthetic oligonucleotide
  Antisense Strand to SEQ ID NO: 485991
uuaguaacuauuaaccguu

SEQ ID NO: 485993 - RNA, 19 nt, Artificial Sequence
  Description of Artificial Sequence: Synthetic oligonucleotide
  Sense strand starting at position 571 of SEQ ID NO: 317375
aguauaaagaugugugauc

SEQ ID NO: 485994 - RNA, 19 nt, Artificial Sequence
  Description of Artificial Sequence: Synthetic oligonucleotide
  Antisense Strand to SEQ ID NO: 485993
gaucacacaucuuuauacu

SEQ ID NO: 485995 - RNA, 19 nt, Artificial Sequence
  Description of Artificial Sequence: Synthetic oligonucleotide
  Sense strand starting at position 739 of SEQ ID NO: 317375
gucucaacacauggauaua

SEQ ID NO: 485996 - RNA, 19 nt, Artificial Sequence
  Description of Artificial Sequence: Synthetic oligonucleotide
  Antisense Strand to SEQ ID NO: 485995
uauauccauguguugagac

SEQ ID NO: 485997 - RNA, 19 nt, Artificial Sequence
  Description of Artificial Sequence: Synthetic oligonucleotide
  Sense strand starting at position 818 of SEQ ID NO: 317375
ucaguauuacugugggaca

SEQ ID NO: 485998 - RNA, 19 nt, Artificial Sequence
  Description of Artificial Sequence: Synthetic oligonucleotide
  Antisense Strand to SEQ ID NO: 485997
ugucccacaguaauacuga

SEQ ID NO: 485999 - RNA, 19 nt, Artificial Sequence
  Description of Artificial Sequence: Synthetic oligonucleotide
  Sense strand starting at position 820 of SEQ ID NO: 317375
aguauuacugugggacaac

SEQ ID NO: 486000 - RNA, 19 nt, Artificial Sequence
  Description of Artificial Sequence: Synthetic oligonucleotide
  Antisense Strand to SEQ ID NO: 485999
guugucccacaguaauacu

SEQ ID NO: 486001 - RNA, 19 nt, Artificial Sequence
  Description of Artificial Sequence: Synthetic oligonucleotide
  Sense strand starting at position 834 of SEQ ID NO: 317375
acaacauuaguaggcuuau

SEQ ID NO: 486002 - RNA, 19 nt, Artificial Sequence
  Description of Artificial Sequence: Synthetic oligonucleotide
  Antisense Strand to SEQ ID NO: 486001
auaagccuacuaauguugu

SEQ ID NO: 486003 - RNA, 19 nt, Artificial Sequence
  Description of Artificial Sequence: Synthetic oligonucleotide
  Sense strand starting at position 983 of SEQ ID NO: 317375
agagguaacuacuuugaca

SEQ ID NO: 486004 - RNA, 19 nt, Artificial Sequence
  Description of Artificial Sequence: Synthetic oligonucleotide
  Antisense Strand to SEQ ID NO: 486003
ugucaaaguaguuaccucu

SEQ ID NO: 486005 - RNA, 19 nt, Artificial Sequence
  Description of Artificial Sequence: Synthetic oligonucleotide
  Sense strand starting at position 985 of SEQ ID NO: 317375
agguaacuacuuugacaug

SEQ ID NO: 486006 - RNA, 19 nt, Artificial Sequence
  Description of Artificial Sequence: Synthetic oligonucleotide
  Antisense Strand to SEQ ID NO: 486005
caugucaaaguaguuaccu

SEQ ID NO: 486007 - RNA, 19 nt, Artificial Sequence
  Description of Artificial Sequence: Synthetic oligonucleotide
  Sense strand starting at position 1071 of SEQ ID NO: 317375
uaggcuuggguuugaaaua

SEQ ID NO: 486008 - RNA, 19 nt, Artificial Sequence
  Description of Artificial Sequence: Synthetic oligonucleotide
  Antisense Strand to SEQ ID NO: 486007
uauuucaaacccaagccua

SEQ ID NO: 486009 - RNA, 19 nt, Artificial Sequence
  Description of Artificial Sequence: Synthetic oligonucleotide
  Sense strand starting at position 1116 of SEQ ID NO: 317375
aguguaauuccuugggaua

SEQ ID NO: 486010 - RNA, 19 nt, Artificial Sequence
  Description of Artificial Sequence: Synthetic oligonucleotide
  Antisense Strand to SEQ ID NO: 486009
uaucccaaggaauuacacu

SEQ ID NO: 486011 - RNA, 19 nt, Artificial Sequence
  Description of Artificial Sequence: Synthetic oligonucleotide
  Sense strand starting at position 1156 of SEQ ID NO: 317375
agaaaucacucuguuugau

SEQ ID NO: 486012 - RNA, 19 nt, Artificial Sequence
  Description of Artificial Sequence: Synthetic oligonucleotide
  Antisense Strand to SEQ ID NO: 486011
aucaaacagagugauuucu

SEQ ID NO: 486013 - RNA, 19 nt, Artificial Sequence
  Description of Artificial Sequence: Synthetic oligonucleotide
  Sense strand starting at position 1169 of SEQ ID NO: 317375
uuugauguaguguaagaaa

SEQ ID NO: 486014 - RNA, 19 nt, Artificial Sequence
  Description of Artificial Sequence: Synthetic oligonucleotide
  Antisense Strand to SEQ ID NO: 486013
uuucuuacacuacaucaaa

SEQ ID NO: 486015 - RNA, 19 nt, Artificial Sequence
  Description of Artificial Sequence: Synthetic oligonucleotide
  Sense strand starting at position 1236 of SEQ ID NO: 317375
uuaauuuagucugugaugu

SEQ ID NO: 486016 - RNA, 19 nt, Artificial Sequence
  Description of Artificial Sequence: Synthetic oligonucleotide
  Antisense Strand to SEQ ID NO: 486015
acaucacagacuaaauuaa

SEQ ID NO: 486017 - RNA, 19 nt, Artificial Sequence
  Description of Artificial Sequence: Synthetic oligonucleotide
  Sense strand starting at position 1237 of SEQ ID NO: 317375
uaauuuagucugugaugug

SEQ ID NO: 486018 - RNA, 19 nt, Artificial Sequence
  Description of Artificial Sequence: Synthetic oligonucleotide
  Antisense Strand to SEQ ID NO: 486017
cacaucacagacuaaauua

SEQ ID NO: 486019 - RNA, 19 nt, Artificial Sequence
  Description of Artificial Sequence: Synthetic oligonucleotide
  Sense strand starting at position 1280 of SEQ ID NO: 317375
ccguauaugguagaucaaa

SEQ ID NO: 486020 - RNA, 19 nt, Artificial Sequence
  Description of Artificial Sequence: Synthetic oligonucleotide
  Antisense Strand to SEQ ID NO: 486019
uuugaucuaccauauacgg

SEQ ID NO: 486021 - RNA, 19 nt, Artificial Sequence
  Description of Artificial Sequence: Synthetic oligonucleotide
  Sense strand starting at position 1374 of SEQ ID NO: 317375
accugauagcuugaguucu

SEQ ID NO: 486022 - RNA, 19 nt, Artificial Sequence
  Description of Artificial Sequence: Synthetic oligonucleotide
  Antisense Strand to SEQ ID NO: 486021
agaacucaagcuaucaggu

SEQ ID NO: 486023 - RNA, 19 nt, Artificial Sequence
  Description of Artificial Sequence: Synthetic oligonucleotide
  Sense strand starting at position 1537 of SEQ ID NO: 317375
uggcuauucccuuaaggau

SEQ ID NO: 486024 - RNA, 19 nt, Artificial Sequence
  Description of Artificial Sequence: Synthetic oligonucleotide
  Antisense Strand to SEQ ID NO: 486023
auccuuaagggaauagcca

SEQ ID NO: 486025 - RNA, 19 nt, Artificial Sequence
  Description of Artificial Sequence: Synthetic oligonucleotide
  Sense strand starting at position 1565 of SEQ ID NO: 317375
caggauccguucuuauaag

SEQ ID NO: 486026 - RNA, 19 nt, Artificial Sequence
  Description of Artificial Sequence: Synthetic oligonucleotide
  Antisense Strand to SEQ ID NO: 486025
cuuauaagaacggauccug

SEQ ID NO: 486027 - RNA, 19 nt, Artificial Sequence
  Description of Artificial Sequence: Synthetic oligonucleotide
  Sense strand starting at position 1721 of SEQ ID NO: 317375
uguacuuggguggacuaau

SEQ ID NO: 486028 - RNA, 19 nt, Artificial Sequence
  Description of Artificial Sequence: Synthetic oligonucleotide
  Antisense Strand to SEQ ID NO: 486027
auuaguccacccaaguaca

SEQ ID NO: 486029 - RNA, 19 nt, Artificial Sequence
  Description of Artificial Sequence: Synthetic oligonucleotide
  Sense strand starting at position 1730 of SEQ ID NO: 317375
guggacuaauuguccucaa

SEQ ID NO: 486030 - RNA, 19 nt, Artificial Sequence
  Description of Artificial Sequence: Synthetic oligonucleotide
  Antisense Strand to SEQ ID NO: 486029
uugaggacaauuaguccac

SEQ ID NO: 486031 - RNA, 19 nt, Artificial Sequence
  Description of Artificial Sequence: Synthetic oligonucleotide
  Sense strand starting at position 1731 of SEQ ID NO: 317375
uggacuaauuguccucaau

SEQ ID NO: 486032 - RNA, 19 nt, Artificial Sequence
  Description of Artificial Sequence: Synthetic oligonucleotide
  Antisense Strand to SEQ ID NO: 486031
auugaggacaauuagucca

SEQ ID NO: 486033 - RNA, 19 nt, Artificial Sequence
  Description of Artificial Sequence: Synthetic oligonucleotide
  Sense strand starting at position 1856 of SEQ ID NO: 317375
ggugauaaugaauguccua

SEQ ID NO: 486034 - RNA, 19 nt, Artificial Sequence
  Description of Artificial Sequence: Synthetic oligonucleotide
  Antisense Strand to SEQ ID NO: 486033
uaggacauucauuaucacc

SEQ ID NO: 486035 - RNA, 19 nt, Artificial Sequence
  Description of Artificial Sequence: Synthetic oligonucleotide
  Sense strand starting at position 2471 of SEQ ID NO: 317375
uguuguuauuaacuugaga

SEQ ID NO: 486036 - RNA, 19 nt, Artificial Sequence
  Description of Artificial Sequence: Synthetic oligonucleotide
  Antisense Strand to SEQ ID NO: 486035
ucucaaguuaauaacaaca

SEQ ID NO: 486037 - RNA, 19 nt, Artificial Sequence
  Description of Artificial Sequence: Synthetic oligonucleotide
  Sense strand starting at position 2517 of SEQ ID NO: 317375
augcaaagauuugauuaug

SEQ ID NO: 486038 - RNA, 19 nt, Artificial Sequence
  Description of Artificial Sequence: Synthetic oligonucleotide
  Antisense Strand to SEQ ID NO: 486037
cauaaucaaaucuuugcau

SEQ ID NO: 486039 - RNA, 19 nt, Artificial Sequence
  Description of Artificial Sequence: Synthetic oligonucleotide
  Sense strand starting at position 2522 of SEQ ID NO: 317375
aagauuugauuaugggaaa

SEQ ID NO: 486040 - RNA, 19 nt, Artificial Sequence
  Description of Artificial Sequence: Synthetic oligonucleotide
  Antisense Strand to SEQ ID NO: 486039
uuucccauaaucaaaucuu

SEQ ID NO: 486041 - RNA, 19 nt, Artificial Sequence
  Description of Artificial Sequence: Synthetic oligonucleotide
  Sense strand starting at position 2602 of SEQ ID NO: 317375
ugauaaaucuaggcacuga

SEQ ID NO: 486042 - RNA, 19 nt, Artificial Sequence
  Description of Artificial Sequence: Synthetic oligonucleotide
  Antisense Strand to SEQ ID NO: 486041
ucagugccuagauuuauca

SEQ ID NO: 486043 - RNA, 19 nt, Artificial Sequence
  Description of Artificial Sequence: Synthetic oligonucleotide
  Sense strand starting at position 2634 of SEQ ID NO: 317375
uaugcuggaugaucuuaua

SEQ ID NO: 486044 - RNA, 19 nt, Artificial Sequence
  Description of Artificial Sequence: Synthetic oligonucleotide
  Antisense Strand to SEQ ID NO: 486043
uauaagaucauccagcaua

SEQ ID NO: 486045 - RNA, 19 nt, Artificial Sequence
  Description of Artificial Sequence: Synthetic oligonucleotide
  Sense strand starting at position 2894 of SEQ ID NO: 317375
uguguuacaguacaucaga

SEQ ID NO: 486046 - RNA, 19 nt, Artificial Sequence
  Description of Artificial Sequence: Synthetic oligonucleotide
  Antisense Strand to SEQ ID NO: 486045
ucugauguacuguaacaca

SEQ ID NO: 486047 - RNA, 19 nt, Artificial Sequence
  Description of Artificial Sequence: Synthetic oligonucleotide
  Sense strand starting at position 3063 of SEQ ID NO: 317375
uuucuaagucauggagauu

SEQ ID NO: 486048 - RNA, 19 nt, Artificial Sequence
  Description of Artificial Sequence: Synthetic oligonucleotide
  Antisense Strand to SEQ ID NO: 486047
aaucuccaugacuuagaaa

SEQ ID NO: 486049 - RNA, 19 nt, Artificial Sequence
  Description of Artificial Sequence: Synthetic oligonucleotide
  Sense strand starting at position 3624 of SEQ ID NO: 317375
cgaggugugaucuacauug

SEQ ID NO: 486050 - RNA, 19 nt, Artificial Sequence
  Description of Artificial Sequence: Synthetic oligonucleotide
  Antisense Strand to SEQ ID NO: 486049
caauguagaucacaccucg

SEQ ID NO: 486051 - RNA, 19 nt, Artificial Sequence
  Description of Artificial Sequence: Synthetic oligonucleotide
  Sense strand starting at position 3626 of SEQ ID NO: 317375
aggugugaucuacauugua

SEQ ID NO: 486052 - RNA, 19 nt, Artificial Sequence
  Description of Artificial Sequence: Synthetic oligonucleotide
  Antisense Strand to SEQ ID NO: 486051
uacaauguagaucacaccu

SEQ ID NO: 486053 - RNA, 19 nt, Artificial Sequence
  Description of Artificial Sequence: Synthetic oligonucleotide
  Sense strand starting at position 3707 of SEQ ID NO: 317375
guggguugugaccaacaaa

SEQ ID NO: 486054 - RNA, 19 nt, Artificial Sequence
  Description of Artificial Sequence: Synthetic oligonucleotide
  Antisense Strand to SEQ ID NO: 486053
uuuguuggucacaacccac

SEQ ID NO: 486055 - RNA, 19 nt, Artificial Sequence
  Description of Artificial Sequence: Synthetic oligonucleotide
  Sense strand starting at position 3819 of SEQ ID NO: 317375
aaagaucuugacugaguac

SEQ ID NO: 486056 - RNA, 19 nt, Artificial Sequence
  Description of Artificial Sequence: Synthetic oligonucleotide
  Antisense Strand to SEQ ID NO: 486055
guacucagucaagaucuuu

SEQ ID NO: 486057 - RNA, 19 nt, Artificial Sequence
  Description of Artificial Sequence: Synthetic oligonucleotide
  Sense strand starting at position 3822 of SEQ ID NO: 317375
gaucuugacugaguacuua

SEQ ID NO: 486058 - RNA, 19 nt, Artificial Sequence
  Description of Artificial Sequence: Synthetic oligonucleotide
  Antisense Strand to SEQ ID NO: 486057
uaaguacucagucaagauc

SEQ ID NO: 486059 - RNA, 19 nt, Artificial Sequence
  Description of Artificial Sequence: Synthetic oligonucleotide
  Sense strand starting at position 3921 of SEQ ID NO: 317375
agagauuuaugugacagau

SEQ ID NO: 486060 - RNA, 19 nt, Artificial Sequence
  Description of Artificial Sequence: Synthetic oligonucleotide
  Antisense Strand to SEQ ID NO: 486059
aucugucacauaaaucucu

SEQ ID NO: 486061 - RNA, 19 nt, Artificial Sequence
  Description of Artificial Sequence: Synthetic oligonucleotide
  Sense strand starting at position 3950 of SEQ ID NO: 317375
ucccuaauauagguagacu

SEQ ID NO: 486062 - RNA, 19 nt, Artificial Sequence
  Description of Artificial Sequence: Synthetic oligonucleotide
  Antisense Strand to SEQ ID NO: 486061
agucuaccuauauuaggga

SEQ ID NO: 486063 - RNA, 19 nt, Artificial Sequence
  Description of Artificial Sequence: Synthetic oligonucleotide
  Sense strand starting at position 3982 of SEQ ID NO: 317375
ugagucaugcagcaacaua

SEQ ID NO: 486064 - RNA, 19 nt, Artificial Sequence
  Description of Artificial Sequence: Synthetic oligonucleotide
  Antisense Strand to SEQ ID NO: 486063
uauguugcugcaugacuca

SEQ ID NO: 486065 - RNA, 19 nt, Artificial Sequence
  Description of Artificial Sequence: Synthetic oligonucleotide
  Sense strand starting at position 39 of SEQ ID NO: 317376
augcaaagauacuuguaga

SEQ ID NO: 486066 - RNA, 19 nt, Artificial Sequence
  Description of Artificial Sequence: Synthetic oligonucleotide
  Antisense Strand to SEQ ID NO: 486065
ucuacaaguaucuuugcau

SEQ ID NO: 486067 - RNA, 19 nt, Artificial Sequence
  Description of Artificial Sequence: Synthetic oligonucleotide
  Sense strand starting at position 49 of SEQ ID NO: 317376
acuuguagauccuuaguaa

SEQ ID NO: 486068 - RNA, 19 nt, Artificial Sequence
  Description of Artificial Sequence: Synthetic oligonucleotide
  Antisense Strand to SEQ ID NO: 486067
uuacuaaggaucuacaagu

SEQ ID NO: 486069 - RNA, 19 nt, Artificial Sequence
  Description of Artificial Sequence: Synthetic oligonucleotide
  Sense strand starting at position 50 of SEQ ID NO: 317376
cuuguagauccuuaguaaa

SEQ ID NO: 486070 - RNA, 19 nt, Artificial Sequence
  Description of Artificial Sequence: Synthetic oligonucleotide
  Antisense Strand to SEQ ID NO: 486069
uuuacuaaggaucuacaag

SEQ ID NO: 486071 - RNA, 19 nt, Artificial Sequence
  Description of Artificial Sequence: Synthetic oligonucleotide
  Sense strand starting at position 101 of SEQ ID NO: 317376
cuuauugaagcuuggauga

SEQ ID NO: 486072 - RNA, 19 nt, Artificial Sequence
  Description of Artificial Sequence: Synthetic oligonucleotide
  Antisense Strand to SEQ ID NO: 486071
ucauccaagcuucaauaag

SEQ ID NO: 486073 - RNA, 19 nt, Artificial Sequence
  Description of Artificial Sequence: Synthetic oligonucleotide
  Sense strand starting at position 152 of SEQ ID NO: 317376
gugacucugguguaaauga

SEQ ID NO: 486074 - RNA, 19 nt, Artificial Sequence
  Description of Artificial Sequence: Synthetic oligonucleotide
  Antisense Strand to SEQ ID NO: 486073
ucauuuacaccagagucac

SEQ ID NO: 486075 - RNA, 19 nt, Artificial Sequence
  Description of Artificial Sequence: Synthetic oligonucleotide
  Sense strand starting at position 159 of SEQ ID NO: 317376
ugguguaaaugauccauaa

SEQ ID NO: 486076 - RNA, 19 nt, Artificial Sequence
  Description of Artificial Sequence: Synthetic oligonucleotide
  Antisense Strand to SEQ ID NO: 486075
uuauggaucauuuacacca

SEQ ID NO: 486077 - RNA, 19 nt, Artificial Sequence
  Description of Artificial Sequence: Synthetic oligonucleotide
  Sense strand starting at position 237 of SEQ ID NO: 317376
uguguaacugacuagagua

SEQ ID NO: 486078 - RNA, 19 nt, Artificial Sequence
  Description of Artificial Sequence: Synthetic oligonucleotide
  Antisense Strand to SEQ ID NO: 486077
uacucuagucaguuacaca

SEQ ID NO: 486079 - RNA, 19 nt, Artificial Sequence
  Description of Artificial Sequence: Synthetic oligonucleotide
  Sense strand starting at position 255 of SEQ ID NO: 317376
augggaacuuaacauuuau

SEQ ID NO: 486080 - RNA, 19 nt, Artificial Sequence
  Description of Artificial Sequence: Synthetic oligonucleotide
  Antisense Strand to SEQ ID NO: 486079
auaaauguuaaguucccau

SEQ ID NO: 486081 - RNA, 19 nt, Artificial Sequence
  Description of Artificial Sequence: Synthetic oligonucleotide
  Sense strand starting at position 487 of SEQ ID NO: 317376
aagugugaucgugauuaau

SEQ ID NO: 486082 - RNA, 19 nt, Artificial Sequence
  Description of Artificial Sequence: Synthetic oligonucleotide
  Antisense Strand to SEQ ID NO: 486081
auuaaucacgaucacacuu

SEQ ID NO: 486083 - RNA, 19 nt, Artificial Sequence
  Description of Artificial Sequence: Synthetic oligonucleotide
  Sense strand starting at position 646 of SEQ ID NO: 317376
gucucaacacuuggauaua

SEQ ID NO: 486084 - RNA, 19 nt, Artificial Sequence
  Description of Artificial Sequence: Synthetic oligonucleotide
  Antisense Strand to SEQ ID NO: 486083
uauauccaaguguugagac

SEQ ID NO: 486085 - RNA, 19 nt, Artificial Sequence
  Description of Artificial Sequence: Synthetic oligonucleotide
  Sense strand starting at position 973 of SEQ ID NO: 317376
uauggauggguuugagaua

SEQ ID NO: 486086 - RNA, 19 nt, Artificial Sequence
  Description of Artificial Sequence: Synthetic oligonucleotide
  Antisense Strand to SEQ ID NO: 486085
uaucucaaacccauccaua

SEQ ID NO: 486087 - RNA, 19 nt, Artificial Sequence
  Description of Artificial Sequence: Synthetic oligonucleotide
  Sense strand starting at position 1062 of SEQ ID NO: 317376
aaggaaucacccuguugga

SEQ ID NO: 486088 - RNA, 19 nt, Artificial Sequence
  Description of Artificial Sequence: Synthetic oligonucleotide
  Antisense Strand to SEQ ID NO: 486087
uccaacagggugauuccuu

SEQ ID NO: 486089 - RNA, 19 nt, Artificial Sequence
  Description of Artificial Sequence: Synthetic oligonucleotide
  Sense strand starting at position 1210 of SEQ ID NO: 317376
cauggagauguccagguau

SEQ ID NO: 486090 - RNA, 19 nt, Artificial Sequence
  Description of Artificial Sequence: Synthetic oligonucleotide
  Antisense Strand to SEQ ID NO: 486089
auaccuggacaucuccaug

SEQ ID NO: 486091 - RNA, 19 nt, Artificial Sequence
  Description of Artificial Sequence: Synthetic oligonucleotide
  Sense strand starting at position 1212 of SEQ ID NO: 317376
uggagauguccagguauuc

SEQ ID NO: 486092 - RNA, 19 nt, Artificial Sequence
  Description of Artificial Sequence: Synthetic oligonucleotide
  Antisense Strand to SEQ ID NO: 486091
gaauaccuggacaucucca

SEQ ID NO: 486093 - RNA, 19 nt, Artificial Sequence
  Description of Artificial Sequence: Synthetic oligonucleotide
  Sense strand starting at position 1232 of SEQ ID NO: 317376
acucucaauugggucaaau

SEQ ID NO: 486094 - RNA, 19 nt, Artificial Sequence
  Description of Artificial Sequence: Synthetic oligonucleotide
  Antisense Strand to SEQ ID NO: 486093
auuugacccaauugagagu

SEQ ID NO: 486095 - RNA, 19 nt, Artificial Sequence
  Description of Artificial Sequence: Synthetic oligonucleotide
  Sense strand starting at position 1267 of SEQ ID NO: 317376
aguacaugauagcuugauu

SEQ ID NO: 486096 - RNA, 19 nt, Artificial Sequence
  Description of Artificial Sequence: Synthetic oligonucleotide
  Antisense Strand to SEQ ID NO: 486095
aaucaagcuaucauguacu

SEQ ID NO: 486097 - RNA, 19 nt, Artificial Sequence
  Description of Artificial Sequence: Synthetic oligonucleotide
  Sense strand starting at position 1356 of SEQ ID NO: 317376
guguguggucugagcaaug

SEQ ID NO: 486098 - RNA, 19 nt, Artificial Sequence
  Description of Artificial Sequence: Synthetic oligonucleotide
  Antisense Strand to SEQ ID NO: 486097
cauugcucagaccacacac

SEQ ID NO: 486099 - RNA, 19 nt, Artificial Sequence
  Description of Artificial Sequence: Synthetic oligonucleotide
  Sense strand starting at position 1438 of SEQ ID NO: 317376
uggcuauuccuuuaacuag

SEQ ID NO: 486100 - RNA, 19 nt, Artificial Sequence
  Description of Artificial Sequence: Synthetic oligonucleotide
  Antisense Strand to SEQ ID NO: 486099
cuaguuaaaggaauagcca

SEQ ID NO: 486101 - RNA, 19 nt, Artificial Sequence
  Description of Artificial Sequence: Synthetic oligonucleotide
  Sense strand starting at position 1616 of SEQ ID NO: 317376
aauuguguacuuggaugga

SEQ ID NO: 486102 - RNA, 19 nt, Artificial Sequence
  Description of Artificial Sequence: Synthetic oligonucleotide
  Antisense Strand to SEQ ID NO: 486101
uccauccaaguacacaauu

SEQ ID NO: 486103 - RNA, 19 nt, Artificial Sequence
  Description of Artificial Sequence: Synthetic oligonucleotide
  Sense strand starting at position 1750 of SEQ ID NO: 317376
gcugauaaugaauguucua

SEQ ID NO: 486104 - RNA, 19 nt, Artificial Sequence
  Description of Artificial Sequence: Synthetic oligonucleotide
  Antisense Strand to SEQ ID NO: 486103
uagaacauucauuaucagc

SEQ ID NO: 486105 - RNA, 19 nt, Artificial Sequence
  Description of Artificial Sequence: Synthetic oligonucleotide
  Sense strand starting at position 1992 of SEQ ID NO: 317376
uucuguuggcaauaagaga

SEQ ID NO: 486106 - RNA, 19 nt, Artificial Sequence
  Description of Artificial Sequence: Synthetic oligonucleotide
  Antisense Strand to SEQ ID NO: 486105
ucucuuauugccaacagaa

SEQ ID NO: 486107 - RNA, 19 nt, Artificial Sequence
  Description of Artificial Sequence: Synthetic oligonucleotide
  Sense strand starting at position 2007 of SEQ ID NO: 317376
gagaaaggcuauucggaaa

SEQ ID NO: 486108 - RNA, 19 nt, Artificial Sequence
  Description of Artificial Sequence: Synthetic oligonucleotide
  Antisense Strand to SEQ ID NO: 486107
uuuccgaauagccuuucuc

SEQ ID NO: 486109 - RNA, 19 nt, Artificial Sequence
  Description of Artificial Sequence: Synthetic oligonucleotide
  Sense strand starting at position 2294 of SEQ ID NO: 317376
guuauuugcuagucucauc

SEQ ID NO: 486110 - RNA, 19 nt, Artificial Sequence
  Description of Artificial Sequence: Synthetic oligonucleotide
  Antisense Strand to SEQ ID NO: 486109
gaugagacuagcaaauaac

SEQ ID NO: 486111 - RNA, 19 nt, Artificial Sequence
  Description of Artificial Sequence: Synthetic oligonucleotide
  Sense strand starting at position 2625 of SEQ ID NO: 317376
guauauaucuuauccuaug

SEQ ID NO: 486112 - RNA, 19 nt, Artificial Sequence
  Description of Artificial Sequence: Synthetic oligonucleotide
  Antisense Strand to SEQ ID NO: 486111
cauaggauaagauauauac

SEQ ID NO: 486113 - RNA, 19 nt, Artificial Sequence
  Description of Artificial Sequence: Synthetic oligonucleotide
  Sense strand starting at position 2668 of SEQ ID NO: 317376
uugaguagauguuucugaa

SEQ ID NO: 486114 - RNA, 19 nt, Artificial Sequence
  Description of Artificial Sequence: Synthetic oligonucleotide
  Antisense Strand to SEQ ID NO: 486113
uucagaaacaucuacucaa

SEQ ID NO: 486115 - RNA, 19 nt, Artificial Sequence
  Description of Artificial Sequence: Synthetic oligonucleotide
  Sense strand starting at position 2675 of SEQ ID NO: 317376
gauguuucugaaggaugau

SEQ ID NO: 486116 - RNA, 19 nt, Artificial Sequence
  Description of Artificial Sequence: Synthetic oligonucleotide
  Antisense Strand to SEQ ID NO: 486115
aucauccuucagaaacauc

SEQ ID NO: 486117 - RNA, 19 nt, Artificial Sequence
  Description of Artificial Sequence: Synthetic oligonucleotide
  Sense strand starting at position 2939 of SEQ ID NO: 317376
gguccuugccauuauuaac

SEQ ID NO: 486118 - RNA, 19 nt, Artificial Sequence
  Description of Artificial Sequence: Synthetic oligonucleotide
  Antisense Strand to SEQ ID NO: 486117
guuaauaauggcaaggacc

SEQ ID NO: 486119 - RNA, 19 nt, Artificial Sequence
  Description of Artificial Sequence: Synthetic oligonucleotide
  Sense strand starting at position 2945 of SEQ ID NO: 317376
ugccauuauuaacuugaga

SEQ ID NO: 486120 - RNA, 19 nt, Artificial Sequence
  Description of Artificial Sequence: Synthetic oligonucleotide
  Antisense Strand to SEQ ID NO: 486119
ucucaaguuaauaauggca

SEQ ID NO: 486121 - RNA, 19 nt, Artificial Sequence
  Description of Artificial Sequence: Synthetic oligonucleotide
  Sense strand starting at position 3022 of SEQ ID NO: 317376
cggauaucuugacuuugaa

SEQ ID NO: 486122 - RNA, 19 nt, Artificial Sequence
  Description of Artificial Sequence: Synthetic oligonucleotide
  Antisense Strand to SEQ ID NO: 486121
uucaaagucaagauauccg

SEQ ID NO: 486123 - RNA, 19 nt, Artificial Sequence
  Description of Artificial Sequence: Synthetic oligonucleotide
  Sense strand starting at position 3076 of SEQ ID NO: 317376
uugauaaaucuaggcuuug

SEQ ID NO: 486124 - RNA, 19 nt, Artificial Sequence
  Description of Artificial Sequence: Synthetic oligonucleotide
  Antisense Strand to SEQ ID NO: 486123
caaagccuagauuuaucaa

SEQ ID NO: 486125 - RNA, 19 nt, Artificial Sequence
  Description of Artificial Sequence: Synthetic oligonucleotide
  Sense strand starting at position 3077 of SEQ ID NO: 317376
ugauaaaucuaggcuuuga

SEQ ID NO: 486126 - RNA, 19 nt, Artificial Sequence
  Description of Artificial Sequence: Synthetic oligonucleotide
  Antisense Strand to SEQ ID NO: 486125
ucaaagccuagauuuauca

SEQ ID NO: 486127 - RNA, 19 nt, Artificial Sequence
  Description of Artificial Sequence: Synthetic oligonucleotide
  Sense strand starting at position 3085 of SEQ ID NO: 317376
cuaggcuuugagcauaauu

SEQ ID NO: 486128 - RNA, 19 nt, Artificial Sequence
  Description of Artificial Sequence: Synthetic oligonucleotide
  Antisense Strand to SEQ ID NO: 486127
aauuaugcucaaagccuag

SEQ ID NO: 486129 - RNA, 19 nt, Artificial Sequence
  Description of Artificial Sequence: Synthetic oligonucleotide
  Sense strand starting at position 3283 of SEQ ID NO: 317376
aagucuucccacugaguga

SEQ ID NO: 486130 - RNA, 19 nt, Artificial Sequence
  Description of Artificial Sequence: Synthetic oligonucleotide
  Antisense Strand to SEQ ID NO: 486129
ucacucagugggaagacuu

SEQ ID NO: 486131 - RNA, 19 nt, Artificial Sequence
  Description of Artificial Sequence: Synthetic oligonucleotide
  Sense strand starting at position 3430 of SEQ ID NO: 317376
ugaacuuaauagucaggua

SEQ ID NO: 486132 - RNA, 19 nt, Artificial Sequence
  Description of Artificial Sequence: Synthetic oligonucleotide
  Antisense Strand to SEQ ID NO: 486131
uaccugacuauuaaguuca

SEQ ID NO: 486133 - RNA, 19 nt, Artificial Sequence
  Description of Artificial Sequence: Synthetic oligonucleotide
  Sense strand starting at position 3693 of SEQ ID NO: 317376
ugaauaucugcuggguaca

SEQ ID NO: 486134 - RNA, 19 nt, Artificial Sequence
  Description of Artificial Sequence: Synthetic oligonucleotide
  Antisense Strand to SEQ ID NO: 486133
uguacccagcagauauuca

SEQ ID NO: 486135 - RNA, 19 nt, Artificial Sequence
  Description of Artificial Sequence: Synthetic oligonucleotide
  Sense strand starting at position 3694 of SEQ ID NO: 317376
gaauaucugcuggguacaa

SEQ ID NO: 486136 - RNA, 19 nt, Artificial Sequence
  Description of Artificial Sequence: Synthetic oligonucleotide
  Antisense Strand to SEQ ID NO: 486135
uuguacccagcagauauuc

SEQ ID NO: 486137 - RNA, 19 nt, Artificial Sequence
  Description of Artificial Sequence: Synthetic oligonucleotide
  Sense strand starting at position 3696 of SEQ ID NO: 317376
auaucugcuggguacaaga

SEQ ID NO: 486138 - RNA, 19 nt, Artificial Sequence
  Description of Artificial Sequence: Synthetic oligonucleotide
  Antisense Strand to SEQ ID NO: 486137
ucuuguacccagcagauau

SEQ ID NO: 486139 - RNA, 19 nt, Artificial Sequence
  Description of Artificial Sequence: Synthetic oligonucleotide
  Sense strand starting at position 3769 of SEQ ID NO: 317376
uccuuugugaggugggaua

SEQ ID NO: 486140 - RNA, 19 nt, Artificial Sequence
  Description of Artificial Sequence: Synthetic oligonucleotide
  Antisense Strand to SEQ ID NO: 486139
uaucccaccucacaaagga

SEQ ID NO: 486141 - RNA, 19 nt, Artificial Sequence
  Description of Artificial Sequence: Synthetic oligonucleotide
  Sense strand starting at position 3973 of SEQ ID NO: 317376
aucagugaagaugguucua

SEQ ID NO: 486142 - RNA, 19 nt, Artificial Sequence
  Description of Artificial Sequence: Synthetic oligonucleotide
  Antisense Strand to SEQ ID NO: 486141
uagaaccaucuucacugau

SEQ ID NO: 486143 - RNA, 19 nt, Artificial Sequence
  Description of Artificial Sequence: Synthetic oligonucleotide
  Sense strand starting at position 3975 of SEQ ID NO: 317376
cagugaagaugguucuauu

SEQ ID NO: 486144 - RNA, 19 nt, Artificial Sequence
  Description of Artificial Sequence: Synthetic oligonucleotide
  Antisense Strand to SEQ ID NO: 486143
aauagaaccaucuucacug

SEQ ID NO: 486145 - RNA, 19 nt, Artificial Sequence
  Description of Artificial Sequence: Synthetic oligonucleotide
  Sense strand starting at position 70 of SEQ ID NO: 317377
agaauuauguagguacaga

SEQ ID NO: 486146 - RNA, 19 nt, Artificial Sequence
  Description of Artificial Sequence: Synthetic oligonucleotide
  Antisense Strand to SEQ ID NO: 486145
ucuguaccuacauaauucu

SEQ ID NO: 486147 - RNA, 19 nt, Artificial Sequence
  Description of Artificial Sequence: Synthetic oligonucleotide
  Sense strand starting at position 336 of SEQ ID NO: 317377
ggguuuaccuaccuacaua

SEQ ID NO: 486148 - RNA, 19 nt, Artificial Sequence
  Description of Artificial Sequence: Synthetic oligonucleotide
  Antisense Strand to SEQ ID NO: 486147
uauguagguagguaaaccc

SEQ ID NO: 486149 - RNA, 19 nt, Artificial Sequence
  Description of Artificial Sequence: Synthetic oligonucleotide
  Sense strand starting at position 456 of SEQ ID NO: 317377
ugaauacauccauggcuaa

SEQ ID NO: 486150 - RNA, 19 nt, Artificial Sequence
  Description of Artificial Sequence: Synthetic oligonucleotide
  Antisense Strand to SEQ ID NO: 486149
uuagccauggauguauuca

SEQ ID NO: 486151 - RNA, 19 nt, Artificial Sequence
  Description of Artificial Sequence: Synthetic oligonucleotide
  Sense strand starting at position 665 of SEQ ID NO: 317377
ccauccaucuuggcuagua

SEQ ID NO: 486152 - RNA, 19 nt, Artificial Sequence
  Description of Artificial Sequence: Synthetic oligonucleotide
  Antisense Strand to SEQ ID NO: 486151
uacuagccaagauggaugg

SEQ ID NO: 486153 - RNA, 19 nt, Artificial Sequence
  Description of Artificial Sequence: Synthetic oligonucleotide
  Sense strand starting at position 667 of SEQ ID NO: 317377
auccaucuuggcuaguaaa

SEQ ID NO: 486154 - RNA, 19 nt, Artificial Sequence
  Description of Artificial Sequence: Synthetic oligonucleotide
  Antisense Strand to SEQ ID NO: 486153
uuuacuagccaagauggau

SEQ ID NO: 486155 - RNA, 19 nt, Artificial Sequence
  Description of Artificial Sequence: Synthetic oligonucleotide
  Sense strand starting at position 709 of SEQ ID NO: 317377
uaggaugaauccucugagu

SEQ ID NO: 486156 - RNA, 19 nt, Artificial Sequence
  Description of Artificial Sequence: Synthetic oligonucleotide
  Antisense Strand to SEQ ID NO: 486155
acucagaggauucauccua

SEQ ID NO: 486157 - RNA, 19 nt, Artificial Sequence
  Description of Artificial Sequence: Synthetic oligonucleotide
  Sense strand starting at position 711 of SEQ ID NO: 317377
ggaugaauccucugaguug

SEQ ID NO: 486158 - RNA, 19 nt, Artificial Sequence
  Description of Artificial Sequence: Synthetic oligonucleotide
  Antisense Strand to SEQ ID NO: 486157
caacucagaggauucaucc

SEQ ID NO: 486159 - RNA, 19 nt, Artificial Sequence
  Description of Artificial Sequence: Synthetic oligonucleotide
  Sense strand starting at position 714 of SEQ ID NO: 317377
ugaauccucugaguuguua

SEQ ID NO: 486160 - RNA, 19 nt, Artificial Sequence
  Description of Artificial Sequence: Synthetic oligonucleotide
  Antisense Strand to SEQ ID NO: 486159
uaacaacucagaggauuca

SEQ ID NO: 486161 - RNA, 19 nt, Artificial Sequence
  Description of Artificial Sequence: Synthetic oligonucleotide
  Sense strand starting at position 799 of SEQ ID NO: 317377
aggguaacaguaugaguua

SEQ ID NO: 486162 - RNA, 19 nt, Artificial Sequence
  Description of Artificial Sequence: Synthetic oligonucleotide
  Antisense Strand to SEQ ID NO: 486161
uaacucauacuguuacccu

SEQ ID NO: 486163 - RNA, 19 nt, Artificial Sequence
  Description of Artificial Sequence: Synthetic oligonucleotide
  Sense strand starting at position 802 of SEQ ID NO: 317377
guaacaguaugaguuagaa

SEQ ID NO: 486164 - RNA, 19 nt, Artificial Sequence
  Description of Artificial Sequence: Synthetic oligonucleotide
  Antisense Strand to SEQ ID NO: 486163
uucuaacucauacuguuac

SEQ ID NO: 486165 - RNA, 19 nt, Artificial Sequence
  Description of Artificial Sequence: Synthetic oligonucleotide
  Sense strand starting at position 1756 of SEQ ID NO: 317377
cgcuaaccugucgucgaau

SEQ ID NO: 486166 - RNA, 19 nt, Artificial Sequence
  Description of Artificial Sequence: Synthetic oligonucleotide
  Antisense Strand to SEQ ID NO: 486165
auucgacgacagguuagcg

SEQ ID NO: 486167 - RNA, 19 nt, Artificial Sequence
  Description of Artificial Sequence: Synthetic oligonucleotide
  Sense strand starting at position 2019 of SEQ ID NO: 317377
gcugauuugucagcgcuuc

SEQ ID NO: 486168 - RNA, 19 nt, Artificial Sequence
  Description of Artificial Sequence: Synthetic oligonucleotide
  Antisense Strand to SEQ ID NO: 486167
gaagcgcugacaaaucagc

SEQ ID NO: 486169 - RNA, 19 nt, Artificial Sequence
  Description of Artificial Sequence: Synthetic oligonucleotide
  Sense strand starting at position 2020 of SEQ ID NO: 317377
cugauuugucagcgcuucu

SEQ ID NO: 486170 - RNA, 19 nt, Artificial Sequence
  Description of Artificial Sequence: Synthetic oligonucleotide
  Antisense Strand to SEQ ID NO: 486169
agaagcgcugacaaaucag

SEQ ID NO: 486171 - RNA, 19 nt, Artificial Sequence
  Description of Artificial Sequence: Synthetic oligonucleotide
  Sense strand starting at position 2469 of SEQ ID NO: 317377
ccucgcaucgcugaaauuu

SEQ ID NO: 486172 - RNA, 19 nt, Artificial Sequence
  Description of Artificial Sequence: Synthetic oligonucleotide
  Antisense Strand to SEQ ID NO: 486171
aaauuucagcgaugcgagg

SEQ ID NO: 486173 - RNA, 19 nt, Artificial Sequence
  Description of Artificial Sequence: Synthetic oligonucleotide
  Sense strand starting at position 2481 of SEQ ID NO: 317377
gaaauuuaaucacggucac

SEQ ID NO: 486174 - RNA, 19 nt, Artificial Sequence
  Description of Artificial Sequence: Synthetic oligonucleotide
  Antisense Strand to SEQ ID NO: 486173
gugaccgugauuaaauuuc

SEQ ID NO: 486175 - RNA, 19 nt, Artificial Sequence
  Description of Artificial Sequence: Synthetic oligonucleotide
  Sense strand starting at position 2549 of SEQ ID NO: 317377
guuugcucuuaaucuagga

SEQ ID NO: 486176 - RNA, 19 nt, Artificial Sequence
  Description of Artificial Sequence: Synthetic oligonucleotide
  Antisense Strand to SEQ ID NO: 486175
uccuagauuaagagcaaac

SEQ ID NO: 486177 - RNA, 19 nt, Artificial Sequence
  Description of Artificial Sequence: Synthetic oligonucleotide
  Sense strand starting at position 2553 of SEQ ID NO: 317377
gcucuuaaucuaggaagag

SEQ ID NO: 486178 - RNA, 19 nt, Artificial Sequence
  Description of Artificial Sequence: Synthetic oligonucleotide
  Antisense Strand to SEQ ID NO: 486177
cucuuccuagauuaagagc

SEQ ID NO: 486179 - RNA, 19 nt, Artificial Sequence
  Description of Artificial Sequence: Synthetic oligonucleotide
  Sense strand starting at position 2577 of SEQ ID NO: 317377
aaggguccugagggugaaa

SEQ ID NO: 486180 - RNA, 19 nt, Artificial Sequence
  Description of Artificial Sequence: Synthetic oligonucleotide
  Antisense Strand to SEQ ID NO: 486179
uuucacccucaggacccuu

SEQ ID NO: 486181 - RNA, 19 nt, Artificial Sequence
  Description of Artificial Sequence: Synthetic oligonucleotide
  Sense strand starting at position 2594 of SEQ ID NO: 317377
aagggagacuacuaaggaa

SEQ ID NO: 486182 - RNA, 19 nt, Artificial Sequence
  Description of Artificial Sequence: Synthetic oligonucleotide
  Antisense Strand to SEQ ID NO: 486181
uuccuuaguagucucccuu

SEQ ID NO: 486183 - RNA, 19 nt, Artificial Sequence
  Description of Artificial Sequence: Synthetic oligonucleotide
  Sense strand starting at position 2609 of SEQ ID NO: 317377
ggaagagucacagguugag

SEQ ID NO: 486184 - RNA, 19 nt, Artificial Sequence
  Description of Artificial Sequence: Synthetic oligonucleotide
  Antisense Strand to SEQ ID NO: 486183
cucaaccugugacucuucc

SEQ ID NO: 486185 - RNA, 19 nt, Artificial Sequence
  Description of Artificial Sequence: Synthetic oligonucleotide
  Sense strand starting at position 2634 of SEQ ID NO: 317377
ggagaaggcucagcaaauc

SEQ ID NO: 486186 - RNA, 19 nt, Artificial Sequence
  Description of Artificial Sequence: Synthetic oligonucleotide
  Antisense Strand to SEQ ID NO: 486185
gauuugcugagccuucucc

SEQ ID NO: 486187 - RNA, 19 nt, Artificial Sequence
  Description of Artificial Sequence: Synthetic oligonucleotide
  Sense strand starting at position 2782 of SEQ ID NO: 317377
gcucuagaaaugggacuua

SEQ ID NO: 486188 - RNA, 19 nt, Artificial Sequence
  Description of Artificial Sequence: Synthetic oligonucleotide
  Antisense Strand to SEQ ID NO: 486187
uaagucccauuucuagagc

SEQ ID NO: 486189 - RNA, 19 nt, Artificial Sequence
  Description of Artificial Sequence: Synthetic oligonucleotide
  Sense strand starting at position 2812 of SEQ ID NO: 317377
ucccuuuaucugggagaca

SEQ ID NO: 486190 - RNA, 19 nt, Artificial Sequence
  Description of Artificial Sequence: Synthetic oligonucleotide
  Antisense Strand to SEQ ID NO: 486189
ugucucccagauaaaggga

SEQ ID NO: 486191 - RNA, 19 nt, Artificial Sequence
  Description of Artificial Sequence: Synthetic oligonucleotide
  Sense strand starting at position 2826 of SEQ ID NO: 317377
agacaaauccagcgugauu

SEQ ID NO: 486192 - RNA, 19 nt, Artificial Sequence
  Description of Artificial Sequence: Synthetic oligonucleotide
  Antisense Strand to SEQ ID NO: 486191
aaucacgcuggauuugucu

SEQ ID NO: 486193 - RNA, 19 nt, Artificial Sequence
  Description of Artificial Sequence: Synthetic oligonucleotide
  Sense strand starting at position 2838 of SEQ ID NO: 317377
cgugauuuagccuaccgga

SEQ ID NO: 486194 - RNA, 19 nt, Artificial Sequence
  Description of Artificial Sequence: Synthetic oligonucleotide
  Antisense Strand to SEQ ID NO: 486193
uccgguaggcuaaaucacg

SEQ ID NO: 486195 - RNA, 19 nt, Artificial Sequence
  Description of Artificial Sequence: Synthetic oligonucleotide
  Sense strand starting at position 2930 of SEQ ID NO: 317377
gauucucguugcccucaga

SEQ ID NO: 486196 - RNA, 19 nt, Artificial Sequence
  Description of Artificial Sequence: Synthetic oligonucleotide
  Antisense Strand to SEQ ID NO: 486195
ucugagggcaacgagaauc

SEQ ID NO: 486197 - RNA, 19 nt, Artificial Sequence
  Description of Artificial Sequence: Synthetic oligonucleotide
  Sense strand starting at position 2933 of SEQ ID NO: 317377
ucucguugcccucagaauu

SEQ ID NO: 486198 - RNA, 19 nt, Artificial Sequence
  Description of Artificial Sequence: Synthetic oligonucleotide
  Antisense Strand to SEQ ID NO: 486197
aauucugagggcaacgaga

SEQ ID NO: 486199 - RNA, 19 nt, Artificial Sequence
  Description of Artificial Sequence: Synthetic oligonucleotide
  Sense strand starting at position 3243 of SEQ ID NO: 317377
aaaguuaugcuuugucuga

SEQ ID NO: 486200 - RNA, 19 nt, Artificial Sequence
  Description of Artificial Sequence: Synthetic oligonucleotide
  Antisense Strand to SEQ ID NO: 486199
ucagacaaagcauaacuuu

SEQ ID NO: 486201 - RNA, 19 nt, Artificial Sequence
  Description of Artificial Sequence: Synthetic oligonucleotide
  Sense strand starting at position 3244 of SEQ ID NO: 317377
aaguuaugcuuugucugau

SEQ ID NO: 486202 - RNA, 19 nt, Artificial Sequence
  Description of Artificial Sequence: Synthetic oligonucleotide
  Antisense Strand to SEQ ID NO: 486201
aucagacaaagcauaacuu

SEQ ID NO: 486203 - RNA, 19 nt, Artificial Sequence
  Description of Artificial Sequence: Synthetic oligonucleotide
  Sense strand starting at position 3245 of SEQ ID NO: 317377
aguuaugcuuugucugauu

SEQ ID NO: 486204 - RNA, 19 nt, Artificial Sequence
  Description of Artificial Sequence: Synthetic oligonucleotide
  Antisense Strand to SEQ ID NO: 486203
aaucagacaaagcauaacu

SEQ ID NO: 486205 - RNA, 19 nt, Artificial Sequence
  Description of Artificial Sequence: Synthetic oligonucleotide
  Sense strand starting at position 3247 of SEQ ID NO: 317377
uuaugcuuugucugauucu

SEQ ID NO: 486206 - RNA, 19 nt, Artificial Sequence
  Description of Artificial Sequence: Synthetic oligonucleotide
  Antisense Strand to SEQ ID NO: 486205
agaaucagacaaagcauaa

SEQ ID NO: 486207 - RNA, 19 nt, Artificial Sequence
  Description of Artificial Sequence: Synthetic oligonucleotide
  Sense strand starting at position 3267 of SEQ ID NO: 317377
gcgcuaauuuggguucuga

SEQ ID NO: 486208 - RNA, 19 nt, Artificial Sequence
  Description of Artificial Sequence: Synthetic oligonucleotide
  Antisense Strand to SEQ ID NO: 486207
ucagaacccaaauuagcgc

SEQ ID NO: 486209 - RNA, 19 nt, Artificial Sequence
  Description of Artificial Sequence: Synthetic oligonucleotide
  Sense strand starting at position 3271 of SEQ ID NO: 317377
uaauuuggguucugaaauu

SEQ ID NO: 486210 - RNA, 19 nt, Artificial Sequence
  Description of Artificial Sequence: Synthetic oligonucleotide
  Antisense Strand to SEQ ID NO: 486209
aauuucagaacccaaauua

SEQ ID NO: 486211 - RNA, 19 nt, Artificial Sequence
  Description of Artificial Sequence: Synthetic oligonucleotide
  Sense strand starting at position 3374 of SEQ ID NO: 317377
gaagauaaugcauaugugu

SEQ ID NO: 486212 - RNA, 19 nt, Artificial Sequence
  Description of Artificial Sequence: Synthetic oligonucleotide
  Antisense Strand to SEQ ID NO: 486211
acacauaugcauuaucuuc

SEQ ID NO: 486213 - RNA, 19 nt, Artificial Sequence
  Description of Artificial Sequence: Synthetic oligonucleotide
  Sense strand starting at position 3382 of SEQ ID NO: 317377
ugcauauguguucagugga

SEQ ID NO: 486214 - RNA, 19 nt, Artificial Sequence
  Description of Artificial Sequence: Synthetic oligonucleotide
  Antisense Strand to SEQ ID NO: 486213
uccacugaacacauaugca

SEQ ID NO: 486215 - RNA, 19 nt, Artificial Sequence
  Description of Artificial Sequence: Synthetic oligonucleotide
  Sense strand starting at position 3456 of SEQ ID NO: 317377
gaacuauuggucugcccuu

SEQ ID NO: 486216 - RNA, 19 nt, Artificial Sequence
  Description of Artificial Sequence: Synthetic oligonucleotide
  Antisense Strand to SEQ ID NO: 486215
aagggcagaccaauaguuc

SEQ ID NO: 486217 - RNA, 19 nt, Artificial Sequence
  Description of Artificial Sequence: Synthetic oligonucleotide
  Sense strand starting at position 3482 of SEQ ID NO: 317377
gcagacuuuccuuaaugca

SEQ ID NO: 486218 - RNA, 19 nt, Artificial Sequence
  Description of Artificial Sequence: Synthetic oligonucleotide
  Antisense Strand to SEQ ID NO: 486217
ugcauuaaggaaagucugc

SEQ ID NO: 486219 - RNA, 19 nt, Artificial Sequence
  Description of Artificial Sequence: Synthetic oligonucleotide
  Sense strand starting at position 3565 of SEQ ID NO: 317377
guuugcugucuggcuuuga

SEQ ID NO: 486220 - RNA, 19 nt, Artificial Sequence
  Description of Artificial Sequence: Synthetic oligonucleotide
  Antisense Strand to SEQ ID NO: 486219
ucaaagccagacagcaaac

SEQ ID NO: 486221 - RNA, 19 nt, Artificial Sequence
  Description of Artificial Sequence: Synthetic oligonucleotide
  Sense strand starting at position 3721 of SEQ ID NO: 317377
aggacucucaugugaagau

SEQ ID NO: 486222 - RNA, 19 nt, Artificial Sequence
  Description of Artificial Sequence: Synthetic oligonucleotide
  Antisense Strand to SEQ ID NO: 486221
aucuucacaugagaguccu

SEQ ID NO: 486223 - RNA, 19 nt, Artificial Sequence
  Description of Artificial Sequence: Synthetic oligonucleotide
  Sense strand starting at position 3730 of SEQ ID NO: 317377
augugaagaucauccaacu

SEQ ID NO: 486224 - RNA, 19 nt, Artificial Sequence
  Description of Artificial Sequence: Synthetic oligonucleotide
  Antisense Strand to SEQ ID NO: 486223
aguuggaugaucuucacau

SEQ ID NO: 486225 - RNA, 19 nt, Artificial Sequence
  Description of Artificial Sequence: Synthetic oligonucleotide
  Sense strand starting at position 40 of SEQ ID NO: 317378
accaaaugaucacaugaag

SEQ ID NO: 486226 - RNA, 19 nt, Artificial Sequence
  Description of Artificial Sequence: Synthetic oligonucleotide
  Antisense Strand to SEQ ID NO: 486225
cuucaugugaucauuuggu

SEQ ID NO: 486227 - RNA, 19 nt, Artificial Sequence
  Description of Artificial Sequence: Synthetic oligonucleotide
  Sense strand starting at position 293 of SEQ ID NO: 317378
agaauuauguagguacaga

SEQ ID NO: 486228 - RNA, 19 nt, Artificial Sequence
  Description of Artificial Sequence: Synthetic oligonucleotide
  Antisense Strand to SEQ ID NO: 486227
ucuguaccuacauaauucu

SEQ ID NO: 486229 - RNA, 19 nt, Artificial Sequence
  Description of Artificial Sequence: Synthetic oligonucleotide
  Sense strand starting at position 559 of SEQ ID NO: 317378
ggguuuaccuaccuacaua

SEQ ID NO: 486230 - RNA, 19 nt, Artificial Sequence
  Description of Artificial Sequence: Synthetic oligonucleotide
  Antisense Strand to SEQ ID NO: 486229
uauguagguagguaaaccc

SEQ ID NO: 486231 - RNA, 19 nt, Artificial Sequence
  Description of Artificial Sequence: Synthetic oligonucleotide
  Sense strand starting at position 679 of SEQ ID NO: 317378
ugaauacauccauggcuaa

SEQ ID NO: 486232 - RNA, 19 nt, Artificial Sequence
  Description of Artificial Sequence: Synthetic oligonucleotide
  Antisense Strand to SEQ ID NO: 486231
uuagccauggauguauuca

SEQ ID NO: 486233 - RNA, 19 nt, Artificial Sequence
  Description of Artificial Sequence: Synthetic oligonucleotide
  Sense strand starting at position 888 of SEQ ID NO: 317378
ccauccaucuuggcuagua

SEQ ID NO: 486234 - RNA, 19 nt, Artificial Sequence
  Description of Artificial Sequence: Synthetic oligonucleotide
  Antisense Strand to SEQ ID NO: 486233
uacuagccaagauggaugg

SEQ ID NO: 486235 - RNA, 19 nt, Artificial Sequence
  Description of Artificial Sequence: Synthetic oligonucleotide
  Sense strand starting at position 890 of SEQ ID NO: 317378
auccaucuuggcuaguaaa

SEQ ID NO: 486236 - RNA, 19 nt, Artificial Sequence
  Description of Artificial Sequence: Synthetic oligonucleotide
  Antisense Strand to SEQ ID NO: 486235
uuuacuagccaagauggau

SEQ ID NO: 486237 - RNA, 19 nt, Artificial Sequence
  Description of Artificial Sequence: Synthetic oligonucleotide
  Sense strand starting at position 932 of SEQ ID NO: 317378
uaggaugaauccucugagu

SEQ ID NO: 486238 - RNA, 19 nt, Artificial Sequence
  Description of Artificial Sequence: Synthetic oligonucleotide
  Antisense Strand to SEQ ID NO: 486237
acucagaggauucauccua

SEQ ID NO: 486239 - RNA, 19 nt, Artificial Sequence
  Description of Artificial Sequence: Synthetic oligonucleotide
  Sense strand starting at position 934 of SEQ ID NO: 317378
ggaugaauccucugaguug

SEQ ID NO: 486240 - RNA, 19 nt, Artificial Sequence
  Description of Artificial Sequence: Synthetic oligonucleotide
  Antisense Strand to SEQ ID NO: 486239
caacucagaggauucaucc

SEQ ID NO: 486241 - RNA, 19 nt, Artificial Sequence
  Description of Artificial Sequence: Synthetic oligonucleotide
  Sense strand starting at position 937 of SEQ ID NO: 317378
ugaauccucugaguuguua

SEQ ID NO: 486242 - RNA, 19 nt, Artificial Sequence
  Description of Artificial Sequence: Synthetic oligonucleotide
  Antisense Strand to SEQ ID NO: 486241
uaacaacucagaggauuca

SEQ ID NO: 486243 - RNA, 19 nt, Artificial Sequence
  Description of Artificial Sequence: Synthetic oligonucleotide
  Sense strand starting at position 1022 of SEQ ID NO: 317378
aggguaacaguaugaguua

SEQ ID NO: 486244 - RNA, 19 nt, Artificial Sequence
  Description of Artificial Sequence: Synthetic oligonucleotide
  Antisense Strand to SEQ ID NO: 486243
uaacucauacuguuacccu

SEQ ID NO: 486245 - RNA, 19 nt, Artificial Sequence
  Description of Artificial Sequence: Synthetic oligonucleotide
  Sense strand starting at position 1025 of SEQ ID NO: 317378
guaacaguaugaguuagaa

SEQ ID NO: 486246 - RNA, 19 nt, Artificial Sequence
  Description of Artificial Sequence: Synthetic oligonucleotide
  Antisense Strand to SEQ ID NO: 486245
uucuaacucauacuguuac

SEQ ID NO: 486247 - RNA, 19 nt, Artificial Sequence
  Description of Artificial Sequence: Synthetic oligonucleotide
  Sense strand starting at position 1979 of SEQ ID NO: 317378
cgcuaaccugucgucgaau

SEQ ID NO: 486248 - RNA, 19 nt, Artificial Sequence
  Description of Artificial Sequence: Synthetic oligonucleotide
  Antisense Strand to SEQ ID NO: 486247
auucgacgacagguuagcg

SEQ ID NO: 486249 - RNA, 19 nt, Artificial Sequence
  Description of Artificial Sequence: Synthetic oligonucleotide
  Sense strand starting at position 2242 of SEQ ID NO: 317378
gcugauuugucagcgcuuc

SEQ ID NO: 486250 - RNA, 19 nt, Artificial Sequence
  Description of Artificial Sequence: Synthetic oligonucleotide
  Antisense Strand to SEQ ID NO: 486249
gaagcgcugacaaaucagc

SEQ ID NO: 486251 - RNA, 19 nt, Artificial Sequence
  Description of Artificial Sequence: Synthetic oligonucleotide
  Sense strand starting at position 2243 of SEQ ID NO: 317378
cugauuugucagcgcuucu

SEQ ID NO: 486252 - RNA, 19 nt, Artificial Sequence
  Description of Artificial Sequence: Synthetic oligonucleotide
  Antisense Strand to SEQ ID NO: 486251
agaagcgcugacaaaucag

SEQ ID NO: 486253 - RNA, 19 nt, Artificial Sequence
  Description of Artificial Sequence: Synthetic oligonucleotide
  Sense strand starting at position 2692 of SEQ ID NO: 317378
ccucgcaucgcugaaauuu

SEQ ID NO: 486254 - RNA, 19 nt, Artificial Sequence
  Description of Artificial Sequence: Synthetic oligonucleotide
  Antisense Strand to SEQ ID NO: 486253
aaauuucagcgaugcgagg

SEQ ID NO: 486255 - RNA, 19 nt, Artificial Sequence
  Description of Artificial Sequence: Synthetic oligonucleotide
  Sense strand starting at position 2704 of SEQ ID NO: 317378
gaaauuuaaucacggucac

SEQ ID NO: 486256 - RNA, 19 nt, Artificial Sequence
  Description of Artificial Sequence: Synthetic oligonucleotide
  Antisense Strand to SEQ ID NO: 486255
gugaccgugauuaaauuuc

SEQ ID NO: 486257 - RNA, 19 nt, Artificial Sequence
  Description of Artificial Sequence: Synthetic oligonucleotide
  Sense strand starting at position 2772 of SEQ ID NO: 317378
guuugcucuuaaucuagga

SEQ ID NO: 486258 - RNA, 19 nt, Artificial Sequence
  Description of Artificial Sequence: Synthetic oligonucleotide
  Antisense Strand to SEQ ID NO: 486257
uccuagauuaagagcaaac

SEQ ID NO: 486259 - RNA, 19 nt, Artificial Sequence
  Description of Artificial Sequence: Synthetic oligonucleotide
  Sense strand starting at position 2776 of SEQ ID NO: 317378
gcucuuaaucuaggaagag

SEQ ID NO: 486260 - RNA, 19 nt, Artificial Sequence
  Description of Artificial Sequence: Synthetic oligonucleotide
  Antisense Strand to SEQ ID NO: 486259
cucuuccuagauuaagagc

SEQ ID NO: 486261 - RNA, 19 nt, Artificial Sequence
  Description of Artificial Sequence: Synthetic oligonucleotide
  Sense strand starting at position 2800 of SEQ ID NO: 317378
aaggguccugagggugaaa

SEQ ID NO: 486262 - RNA, 19 nt, Artificial Sequence
  Description of Artificial Sequence: Synthetic oligonucleotide
  Antisense Strand to SEQ ID NO: 486261
uuucacccucaggacccuu

SEQ ID NO: 486263 - RNA, 19 nt, Artificial Sequence
  Description of Artificial Sequence: Synthetic oligonucleotide
  Sense strand starting at position 2817 of SEQ ID NO: 317378
aagggagacuacuaaggaa

SEQ ID NO: 486264 - RNA, 19 nt, Artificial Sequence
  Description of Artificial Sequence: Synthetic oligonucleotide
  Antisense Strand to SEQ ID NO: 486263
uuccuuaguagucucccuu

SEQ ID NO: 486265 - RNA, 19 nt, Artificial Sequence
  Description of Artificial Sequence: Synthetic oligonucleotide
  Sense strand starting at position 2832 of SEQ ID NO: 317378
ggaagagucacagguugag

SEQ ID NO: 486266 - RNA, 19 nt, Artificial Sequence
  Description of Artificial Sequence: Synthetic oligonucleotide
  Antisense Strand to SEQ ID NO: 486265
cucaaccugugacucuucc

SEQ ID NO: 486267 - RNA, 19 nt, Artificial Sequence
  Description of Artificial Sequence: Synthetic oligonucleotide
  Sense strand starting at position 2857 of SEQ ID NO: 317378
ggagaaggcucagcaaauc

SEQ ID NO: 486268 - RNA, 19 nt, Artificial Sequence
  Description of Artificial Sequence: Synthetic oligonucleotide
  Antisense Strand to SEQ ID NO: 486267
gauuugcugagccuucucc

SEQ ID NO: 486269 - RNA, 19 nt, Artificial Sequence
  Description of Artificial Sequence: Synthetic oligonucleotide
  Sense strand starting at position 3005 of SEQ ID NO: 317378
gcucuagaaaugggacuua

SEQ ID NO: 486270 - RNA, 19 nt, Artificial Sequence
  Description of Artificial Sequence: Synthetic oligonucleotide
  Antisense Strand to SEQ ID NO: 486269
uaagucccauuucuagagc

SEQ ID NO: 486271 - RNA, 19 nt, Artificial Sequence
  Description of Artificial Sequence: Synthetic oligonucleotide
  Sense strand starting at position 3035 of SEQ ID NO: 317378
ucccuuuaucugggagaca

SEQ ID NO: 486272 - RNA, 19 nt, Artificial Sequence
  Description of Artificial Sequence: Synthetic oligonucleotide
  Antisense Strand to SEQ ID NO: 486271
ugucucccagauaaaggga

SEQ ID NO: 486273 - RNA, 19 nt, Artificial Sequence
  Description of Artificial Sequence: Synthetic oligonucleotide
  Sense strand starting at position 3049 of SEQ ID NO: 317378
agacaaauccagcgugauu

SEQ ID NO: 486274 - RNA, 19 nt, Artificial Sequence
  Description of Artificial Sequence: Synthetic oligonucleotide
  Antisense Strand to SEQ ID NO: 486273
aaucacgcuggauuugucu

SEQ ID NO: 486275 - RNA, 19 nt, Artificial Sequence
  Description of Artificial Sequence: Synthetic oligonucleotide
  Sense strand starting at position 3061 of SEQ ID NO: 317378
cgugauuuagccuaccgga

SEQ ID NO: 486276 - RNA, 19 nt, Artificial Sequence
  Description of Artificial Sequence: Synthetic oligonucleotide
  Antisense Strand to SEQ ID NO: 486275
uccgguaggcuaaaucacg

SEQ ID NO: 486277 - RNA, 19 nt, Artificial Sequence
  Description of Artificial Sequence: Synthetic oligonucleotide
  Sense strand starting at position 3153 of SEQ ID NO: 317378
gauucucguugcccucaga

SEQ ID NO: 486278 - RNA, 19 nt, Artificial Sequence
  Description of Artificial Sequence: Synthetic oligonucleotide
  Antisense Strand to SEQ ID NO: 486277
ucugagggcaacgagaauc

SEQ ID NO: 486279 - RNA, 19 nt, Artificial Sequence
  Description of Artificial Sequence: Synthetic oligonucleotide
  Sense strand starting at position 3156 of SEQ ID NO: 317378
ucucguugcccucagaauu

SEQ ID NO: 486280 - RNA, 19 nt, Artificial Sequence
  Description of Artificial Sequence: Synthetic oligonucleotide
  Antisense Strand to SEQ ID NO: 486279
aauucugagggcaacgaga

SEQ ID NO: 486281 - RNA, 19 nt, Artificial Sequence
  Description of Artificial Sequence: Synthetic oligonucleotide
  Sense strand starting at position 3466 of SEQ ID NO: 317378
aaaguuaugcuuugucuga

SEQ ID NO: 486282 - RNA, 19 nt, Artificial Sequence
  Description of Artificial Sequence: Synthetic oligonucleotide
  Antisense Strand to SEQ ID NO: 486281
ucagacaaagcauaacuuu

SEQ ID NO: 486283 - RNA, 19 nt, Artificial Sequence
  Description of Artificial Sequence: Synthetic oligonucleotide
  Sense strand starting at position 3467 of SEQ ID NO: 317378
aaguuaugcuuugucugau

SEQ ID NO: 486284 - RNA, 19 nt, Artificial Sequence
  Description of Artificial Sequence: Synthetic oligonucleotide
  Antisense Strand to SEQ ID NO: 486283
aucagacaaagcauaacuu

SEQ ID NO: 486285 - RNA, 19 nt, Artificial Sequence
  Description of Artificial Sequence: Synthetic oligonucleotide
  Sense strand starting at position 3468 of SEQ ID NO: 317378
aguuaugcuuugucugauu

SEQ ID NO: 486286 - RNA, 19 nt, Artificial Sequence
  Description of Artificial Sequence: Synthetic oligonucleotide
  Antisense Strand to SEQ ID NO: 486285
aaucagacaaagcauaacu

SEQ ID NO: 486287 - RNA, 19 nt, Artificial Sequence
  Description of Artificial Sequence: Synthetic oligonucleotide
  Sense strand starting at position 3490 of SEQ ID NO: 317378
gcgcuaauuuggguucuga

SEQ ID NO: 486288 - RNA, 19 nt, Artificial Sequence
  Description of Artificial Sequence: Synthetic oligonucleotide
  Antisense Strand to SEQ ID NO: 486287
ucagaacccaaauuagcgc

SEQ ID NO: 486289 - RNA, 19 nt, Artificial Sequence
  Description of Artificial Sequence: Synthetic oligonucleotide
  Sense strand starting at position 3494 of SEQ ID NO: 317378
uaauuuggguucugaaauu

SEQ ID NO: 486290 - RNA, 19 nt, Artificial Sequence
  Description of Artificial Sequence: Synthetic oligonucleotide
  Antisense Strand to SEQ ID NO: 486289
aauuucagaacccaaauua

SEQ ID NO: 486291 - RNA, 19 nt, Artificial Sequence
  Description of Artificial Sequence: Synthetic oligonucleotide
  Sense strand starting at position 3597 of SEQ ID NO: 317378
gaagauaaugcauaugugu

SEQ ID NO: 486292 - RNA, 19 nt, Artificial Sequence
  Description of Artificial Sequence: Synthetic oligonucleotide
  Antisense Strand to SEQ ID NO: 486291
acacauaugcauuaucuuc

SEQ ID NO: 486293 - RNA, 19 nt, Artificial Sequence
  Description of Artificial Sequence: Synthetic oligonucleotide
  Sense strand starting at position 3605 of SEQ ID NO: 317378
ugcauauguguucagugga

SEQ ID NO: 486294 - RNA, 19 nt, Artificial Sequence
  Description of Artificial Sequence: Synthetic oligonucleotide
  Antisense Strand to SEQ ID NO: 486293
uccacugaacacauaugca

SEQ ID NO: 486295 - RNA, 19 nt, Artificial Sequence
  Description of Artificial Sequence: Synthetic oligonucleotide
  Sense strand starting at position 3679 of SEQ ID NO: 317378
gaacuauuggucugcccuu

SEQ ID NO: 486296 - RNA, 19 nt, Artificial Sequence
  Description of Artificial Sequence: Synthetic oligonucleotide
  Antisense Strand to SEQ ID NO: 486295
aagggcagaccaauaguuc

SEQ ID NO: 486297 - RNA, 19 nt, Artificial Sequence
  Description of Artificial Sequence: Synthetic oligonucleotide
  Sense strand starting at position 3705 of SEQ ID NO: 317378
gcagacuuuccuuaaugca

SEQ ID NO: 486298 - RNA, 19 nt, Artificial Sequence
  Description of Artificial Sequence: Synthetic oligonucleotide
  Antisense Strand to SEQ ID NO: 486297
ugcauuaaggaaagucugc

SEQ ID NO: 486299 - RNA, 19 nt, Artificial Sequence
  Description of Artificial Sequence: Synthetic oligonucleotide
  Sense strand starting at position 3788 of SEQ ID NO: 317378
guuugcugucuggcuuuga

SEQ ID NO: 486300 - RNA, 19 nt, Artificial Sequence
  Description of Artificial Sequence: Synthetic oligonucleotide
  Antisense Strand to SEQ ID NO: 486299
ucaaagccagacagcaaac

SEQ ID NO: 486301 - RNA, 19 nt, Artificial Sequence
  Description of Artificial Sequence: Synthetic oligonucleotide
  Sense strand starting at position 3944 of SEQ ID NO: 317378
aggacucucaugugaagau

SEQ ID NO: 486302 - RNA, 19 nt, Artificial Sequence
  Description of Artificial Sequence: Synthetic oligonucleotide
  Antisense Strand to SEQ ID NO: 486301
aucuucacaugagaguccu

SEQ ID NO: 486303 - RNA, 19 nt, Artificial Sequence
  Description of Artificial Sequence: Synthetic oligonucleotide
  Sense strand starting at position 3953 of SEQ ID NO: 317378
augugaagaucauccaacu

SEQ ID NO: 486304 - RNA, 19 nt, Artificial Sequence
  Description of Artificial Sequence: Synthetic oligonucleotide
  Antisense Strand to SEQ ID NO: 486303
aguuggaugaucuucacau

SEQ ID NO: 486305 - RNA, 19 nt, Artificial Sequence
  Description of Artificial Sequence: Synthetic oligonucleotide
  Sense strand starting at position 659 of SEQ ID NO: 317379
cgcuaaccugucgucgaau

SEQ ID NO: 486306 - RNA, 19 nt, Artificial Sequence
  Description of Artificial Sequence: Synthetic oligonucleotide
  Antisense Strand to SEQ ID NO: 486305
auucgacgacagguuagcg

SEQ ID NO: 486307 - RNA, 19 nt, Artificial Sequence
  Description of Artificial Sequence: Synthetic oligonucleotide
  Sense strand starting at position 923 of SEQ ID NO: 317379
cugauuugucagcgcuucu

SEQ ID NO: 486308 - RNA, 19 nt, Artificial Sequence
  Description of Artificial Sequence: Synthetic oligonucleotide
  Antisense Strand to SEQ ID NO: 486307
agaagcgcugacaaaucag

SEQ ID NO: 486309 - RNA, 19 nt, Artificial Sequence
  Description of Artificial Sequence: Synthetic oligonucleotide
  Sense strand starting at position 1372 of SEQ ID NO: 317379
ccucgcaucgcugaaauuu

SEQ ID NO: 486310 - RNA, 19 nt, Artificial Sequence
  Description of Artificial Sequence: Synthetic oligonucleotide
  Antisense Strand to SEQ ID NO: 486309
aaauuucagcgaugcgagg

SEQ ID NO: 486311 - RNA, 19 nt, Artificial Sequence
  Description of Artificial Sequence: Synthetic oligonucleotide
  Sense strand starting at position 1452 of SEQ ID NO: 317379
guuugcucuuaaucuagga

SEQ ID NO: 486312 - RNA, 19 nt, Artificial Sequence
  Description of Artificial Sequence: Synthetic oligonucleotide
  Antisense Strand to SEQ ID NO: 486311
uccuagauuaagagcaaac

SEQ ID NO: 486313 - RNA, 19 nt, Artificial Sequence
  Description of Artificial Sequence: Synthetic oligonucleotide
  Sense strand starting at position 1456 of SEQ ID NO: 317379
gcucuuaaucuaggaagag

SEQ ID NO: 486314 - RNA, 19 nt, Artificial Sequence
  Description of Artificial Sequence: Synthetic oligonucleotide
  Antisense Strand to SEQ ID NO: 486313
cucuuccuagauuaagagc

SEQ ID NO: 486315 - RNA, 19 nt, Artificial Sequence
  Description of Artificial Sequence: Synthetic oligonucleotide
  Sense strand starting at position 1480 of SEQ ID NO: 317379
aaggguccugagggugaaa

SEQ ID NO: 486316 - RNA, 19 nt, Artificial Sequence
  Description of Artificial Sequence: Synthetic oligonucleotide
  Antisense Strand to SEQ ID NO: 486315
uuucacccucaggacccuu

SEQ ID NO: 486317 - RNA, 19 nt, Artificial Sequence
  Description of Artificial Sequence: Synthetic oligonucleotide
  Sense strand starting at position 1497 of SEQ ID NO: 317379
aagggagacuacuaaggaa

SEQ ID NO: 486318 - RNA, 19 nt, Artificial Sequence
  Description of Artificial Sequence: Synthetic oligonucleotide
  Antisense Strand to SEQ ID NO: 486317
uuccuuaguagucucccuu

SEQ ID NO: 486319 - RNA, 19 nt, Artificial Sequence
  Description of Artificial Sequence: Synthetic oligonucleotide
  Sense strand starting at position 1512 of SEQ ID NO: 317379
ggaagagucacagguugag

SEQ ID NO: 486320 - RNA, 19 nt, Artificial Sequence
  Description of Artificial Sequence: Synthetic oligonucleotide
  Antisense Strand to SEQ ID NO: 486319
cucaaccugugacucuucc

SEQ ID NO: 486321 - RNA, 19 nt, Artificial Sequence
  Description of Artificial Sequence: Synthetic oligonucleotide
  Sense strand starting at position 1537 of SEQ ID NO: 317379
ggagaaggcucagcaaauc

SEQ ID NO: 486322 - RNA, 19 nt, Artificial Sequence
  Description of Artificial Sequence: Synthetic oligonucleotide
  Antisense Strand to SEQ ID NO: 486321
gauuugcugagccuucucc

SEQ ID NO: 486323 - RNA, 19 nt, Artificial Sequence
  Description of Artificial Sequence: Synthetic oligonucleotide
  Sense strand starting at position 1685 of SEQ ID NO: 317379
gcucuagaaaugggacuua

SEQ ID NO: 486324 - RNA, 19 nt, Artificial Sequence
  Description of Artificial Sequence: Synthetic oligonucleotide
  Antisense Strand to SEQ ID NO: 486323
uaagucccauuucuagagc

SEQ ID NO: 486325 - RNA, 19 nt, Artificial Sequence
  Description of Artificial Sequence: Synthetic oligonucleotide
  Sense strand starting at position 1715 of SEQ ID NO: 317379
ucccuuuaucugggagaca

SEQ ID NO: 486326 - RNA, 19 nt, Artificial Sequence
  Description of Artificial Sequence: Synthetic oligonucleotide
  Antisense Strand to SEQ ID NO: 486325
ugucucccagauaaaggga

SEQ ID NO: 486327 - RNA, 19 nt, Artificial Sequence
  Description of Artificial Sequence: Synthetic oligonucleotide
  Sense strand starting at position 1729 of SEQ ID NO: 317379
agacaaauccagcgugauu

SEQ ID NO: 486328 - RNA, 19 nt, Artificial Sequence
  Description of Artificial Sequence: Synthetic oligonucleotide
  Antisense Strand to SEQ ID NO: 486327
aaucacgcuggauuugucu

SEQ ID NO: 486329 - RNA, 19 nt, Artificial Sequence
  Description of Artificial Sequence: Synthetic oligonucleotide
  Sense strand starting at position 1741 of SEQ ID NO: 317379
cgugauuuagccuaccgga

SEQ ID NO: 486330 - RNA, 19 nt, Artificial Sequence
  Description of Artificial Sequence: Synthetic oligonucleotide
  Antisense Strand to SEQ ID NO: 486329
uccgguaggcuaaaucacg

SEQ ID NO: 486331 - RNA, 19 nt, Artificial Sequence
  Description of Artificial Sequence: Synthetic oligonucleotide
  Sense strand starting at position 2170 of SEQ ID NO: 317379
gcgcuaauuuggguucuga

SEQ ID NO: 486332 - RNA, 19 nt, Artificial Sequence
  Description of Artificial Sequence: Synthetic oligonucleotide
  Antisense Strand to SEQ ID NO: 486331
ucagaacccaaauuagcgc

SEQ ID NO: 486333 - RNA, 19 nt, Artificial Sequence
  Description of Artificial Sequence: Synthetic oligonucleotide
  Sense strand starting at position 2277 of SEQ ID NO: 317379
gaagauaaugcauaugugu

SEQ ID NO: 486334 - RNA, 19 nt, Artificial Sequence
  Description of Artificial Sequence: Synthetic oligonucleotide
  Antisense Strand to SEQ ID NO: 486333
acacauaugcauuaucuuc

SEQ ID NO: 486335 - RNA, 19 nt, Artificial Sequence
  Description of Artificial Sequence: Synthetic oligonucleotide
  Sense strand starting at position 2285 of SEQ ID NO: 317379
ugcauauguguucagugga

SEQ ID NO: 486336 - RNA, 19 nt, Artificial Sequence
  Description of Artificial Sequence: Synthetic oligonucleotide
  Antisense Strand to SEQ ID NO: 486335
uccacugaacacauaugca

SEQ ID NO: 486337 - RNA, 19 nt, Artificial Sequence
  Description of Artificial Sequence: Synthetic oligonucleotide
  Sense strand starting at position 2385 of SEQ ID NO: 317379
gcagacuuuccuuaaugca

SEQ ID NO: 486338 - RNA, 19 nt, Artificial Sequence
  Description of Artificial Sequence: Synthetic oligonucleotide
  Antisense Strand to SEQ ID NO: 486337
ugcauuaaggaaagucugc

SEQ ID NO: 486339 - RNA, 19 nt, Artificial Sequence
  Description of Artificial Sequence: Synthetic oligonucleotide
  Sense strand starting at position 2468 of SEQ ID NO: 317379
guuugcugucuggcuuuga

SEQ ID NO: 486340 - RNA, 19 nt, Artificial Sequence
  Description of Artificial Sequence: Synthetic oligonucleotide
  Antisense Strand to SEQ ID NO: 486339
ucaaagccagacagcaaac

SEQ ID NO: 486341 - RNA, 19 nt, Artificial Sequence
  Description of Artificial Sequence: Synthetic oligonucleotide
  Sense strand starting at position 2624 of SEQ ID NO: 317379
aggacucucaugugaagau

SEQ ID NO: 486342 - RNA, 19 nt, Artificial Sequence
  Description of Artificial Sequence: Synthetic oligonucleotide
  Antisense Strand to SEQ ID NO: 486341
aucuucacaugagaguccu

SEQ ID NO: 486343 - RNA, 19 nt, Artificial Sequence
  Description of Artificial Sequence: Synthetic oligonucleotide
  Sense strand starting at position 2633 of SEQ ID NO: 317379
augugaagaucauccaacu

SEQ ID NO: 486344 - RNA, 19 nt, Artificial Sequence
  Description of Artificial Sequence: Synthetic oligonucleotide
  Antisense Strand to SEQ ID NO: 486343
aguuggaugaucuucacau

SEQ ID NO: 486345 - RNA, 19 nt, Artificial Sequence
  Description of Artificial Sequence: Synthetic oligonucleotide
  Sense strand starting at position 2889 of SEQ ID NO: 317379
gauguugugucccuuuaaa

SEQ ID NO: 486346 - RNA, 19 nt, Artificial Sequence
  Description of Artificial Sequence: Synthetic oligonucleotide
  Antisense Strand to SEQ ID NO: 486345
uuuaaagggacacaacauc

SEQ ID NO: 486347 - RNA, 19 nt, Artificial Sequence
  Description of Artificial Sequence: Synthetic oligonucleotide
  Sense strand starting at position 2998 of SEQ ID NO: 317379
ucaugugcauauucuagaa

SEQ ID NO: 486348 - RNA, 19 nt, Artificial Sequence
  Description of Artificial Sequence: Synthetic oligonucleotide
  Antisense Strand to SEQ ID NO: 486347
uucuagaauaugcacauga

SEQ ID NO: 486349 - RNA, 19 nt, Artificial Sequence
  Description of Artificial Sequence: Synthetic oligonucleotide
  Sense strand starting at position 3002 of SEQ ID NO: 317379
gugcauauucuagaauguc

SEQ ID NO: 486350 - RNA, 19 nt, Artificial Sequence
  Description of Artificial Sequence: Synthetic oligonucleotide
  Antisense Strand to SEQ ID NO: 486349
gacauucuagaauaugcac

SEQ ID NO: 486351 - RNA, 19 nt, Artificial Sequence
  Description of Artificial Sequence: Synthetic oligonucleotide
  Sense strand starting at position 3088 of SEQ ID NO: 317379
auuugugagguucguucau

SEQ ID NO: 486352 - RNA, 19 nt, Artificial Sequence
  Description of Artificial Sequence: Synthetic oligonucleotide
  Antisense Strand to SEQ ID NO: 486351
augaacgaaccucacaaau

SEQ ID NO: 486353 - RNA, 19 nt, Artificial Sequence
  Description of Artificial Sequence: Synthetic oligonucleotide
  Sense strand starting at position 3203 of SEQ ID NO: 317379
cuaguaucucaauagagua

SEQ ID NO: 486354 - RNA, 19 nt, Artificial Sequence
  Description of Artificial Sequence: Synthetic oligonucleotide
  Antisense Strand to SEQ ID NO: 486353
uacucuauugagauacuag

SEQ ID NO: 486355 - RNA, 19 nt, Artificial Sequence
  Description of Artificial Sequence: Synthetic oligonucleotide
  Sense strand starting at position 3285 of SEQ ID NO: 317379
gagaccuagugcuuuaagu

SEQ ID NO: 486356 - RNA, 19 nt, Artificial Sequence
  Description of Artificial Sequence: Synthetic oligonucleotide
  Antisense Strand to SEQ ID NO: 486355
acuuaaagcacuaggucuc

SEQ ID NO: 486357 - RNA, 19 nt, Artificial Sequence
  Description of Artificial Sequence: Synthetic oligonucleotide
  Sense strand starting at position 3287 of SEQ ID NO: 317379
gaccuagugcuuuaaguca

SEQ ID NO: 486358 - RNA, 19 nt, Artificial Sequence
  Description of Artificial Sequence: Synthetic oligonucleotide
  Antisense Strand to SEQ ID NO: 486357
ugacuuaaagcacuagguc

SEQ ID NO: 486359 - RNA, 19 nt, Artificial Sequence
  Description of Artificial Sequence: Synthetic oligonucleotide
  Sense strand starting at position 3292 of SEQ ID NO: 317379
agugcuuuaagucaaagag

SEQ ID NO: 486360 - RNA, 19 nt, Artificial Sequence
  Description of Artificial Sequence: Synthetic oligonucleotide
  Antisense Strand to SEQ ID NO: 486359
cucuuugacuuaaagcacu

SEQ ID NO: 486361 - RNA, 19 nt, Artificial Sequence
  Description of Artificial Sequence: Synthetic oligonucleotide
  Sense strand starting at position 3359 of SEQ ID NO: 317379
gagaauuauuucuggacag

SEQ ID NO: 486362 - RNA, 19 nt, Artificial Sequence
  Description of Artificial Sequence: Synthetic oligonucleotide
  Antisense Strand to SEQ ID NO: 486361
cuguccagaaauaauucuc

SEQ ID NO: 486363 - RNA, 19 nt, Artificial Sequence
  Description of Artificial Sequence: Synthetic oligonucleotide
  Sense strand starting at position 3360 of SEQ ID NO: 317379
agaauuauuucuggacagu

SEQ ID NO: 486364 - RNA, 19 nt, Artificial Sequence
  Description of Artificial Sequence: Synthetic oligonucleotide
  Antisense Strand to SEQ ID NO: 486363
acuguccagaaauaauucu

SEQ ID NO: 486365 - RNA, 19 nt, Artificial Sequence
  Description of Artificial Sequence: Synthetic oligonucleotide
  Sense strand starting at position 3386 of SEQ ID NO: 317379
cuuauaaacguuuaacaug

SEQ ID NO: 486366 - RNA, 19 nt, Artificial Sequence
  Description of Artificial Sequence: Synthetic oligonucleotide
  Antisense Strand to SEQ ID NO: 486365
cauguuaaacguuuauaag

SEQ ID NO: 486367 - RNA, 19 nt, Artificial Sequence
  Description of Artificial Sequence: Synthetic oligonucleotide
  Sense strand starting at position 3394 of SEQ ID NO: 317379
cguuuaacaugauuccaaa

SEQ ID NO: 486368 - RNA, 19 nt, Artificial Sequence
  Description of Artificial Sequence: Synthetic oligonucleotide
  Antisense Strand to SEQ ID NO: 486367
uuuggaaucauguuaaacg

SEQ ID NO: 486369 - RNA, 19 nt, Artificial Sequence
  Description of Artificial Sequence: Synthetic oligonucleotide
  Sense strand starting at position 3422 of SEQ ID NO: 317379
gguaauuuguuaguccuuu

SEQ ID NO: 486370 - RNA, 19 nt, Artificial Sequence
  Description of Artificial Sequence: Synthetic oligonucleotide
  Antisense Strand to SEQ ID NO: 486369
aaaggacuaacaaauuacc

SEQ ID NO: 486371 - RNA, 19 nt, Artificial Sequence
  Description of Artificial Sequence: Synthetic oligonucleotide
  Sense strand starting at position 3426 of SEQ ID NO: 317379
auuuguuaguccuuuggca

SEQ ID NO: 486372 - RNA, 19 nt, Artificial Sequence
  Description of Artificial Sequence: Synthetic oligonucleotide
  Antisense Strand to SEQ ID NO: 486371
ugccaaaggacuaacaaau

SEQ ID NO: 486373 - RNA, 19 nt, Artificial Sequence
  Description of Artificial Sequence: Synthetic oligonucleotide
  Sense strand starting at position 3455 of SEQ ID NO: 317379
guacuauguuauuuaguca

SEQ ID NO: 486374 - RNA, 19 nt, Artificial Sequence
  Description of Artificial Sequence: Synthetic oligonucleotide
  Antisense Strand to SEQ ID NO: 486373
ugacuaaauaacauaguac

SEQ ID NO: 486375 - RNA, 19 nt, Artificial Sequence
  Description of Artificial Sequence: Synthetic oligonucleotide
  Sense strand starting at position 3539 of SEQ ID NO: 317379
uggugauaugcugagauca

SEQ ID NO: 486376 - RNA, 19 nt, Artificial Sequence
  Description of Artificial Sequence: Synthetic oligonucleotide
  Antisense Strand to SEQ ID NO: 486375
ugaucucagcauaucacca

SEQ ID NO: 486377 - RNA, 19 nt, Artificial Sequence
  Description of Artificial Sequence: Synthetic oligonucleotide
  Sense strand starting at position 3613 of SEQ ID NO: 317379
gcacaauugucuccugaau

SEQ ID NO: 486378 - RNA, 19 nt, Artificial Sequence
  Description of Artificial Sequence: Synthetic oligonucleotide
  Antisense Strand to SEQ ID NO: 486377
auucaggagacaauugugc

SEQ ID NO: 486379 - RNA, 19 nt, Artificial Sequence
  Description of Artificial Sequence: Synthetic oligonucleotide
  Sense strand starting at position 3655 of SEQ ID NO: 317379
acagauugggugugguaaa

SEQ ID NO: 486380 - RNA, 19 nt, Artificial Sequence
  Description of Artificial Sequence: Synthetic oligonucleotide
  Antisense Strand to SEQ ID NO: 486379
uuuaccacacccaaucugu

SEQ ID NO: 486381 - RNA, 19 nt, Artificial Sequence
  Description of Artificial Sequence: Synthetic oligonucleotide
  Sense strand starting at position 3694 of SEQ ID NO: 317379
gaacccagcuguguuagaa

SEQ ID NO: 486382 - RNA, 19 nt, Artificial Sequence
  Description of Artificial Sequence: Synthetic oligonucleotide
  Antisense Strand to SEQ ID NO: 486381
uucuaacacagcuggguuc

SEQ ID NO: 486383 - RNA, 19 nt, Artificial Sequence
  Description of Artificial Sequence: Synthetic oligonucleotide
  Sense strand starting at position 3981 of SEQ ID NO: 317379
agugauauugcauauguuc

SEQ ID NO: 486384 - RNA, 19 nt, Artificial Sequence
  Description of Artificial Sequence: Synthetic oligonucleotide
  Antisense Strand to SEQ ID NO: 486383
gaacauaugcaauaucacu

SEQ ID NO: 486385 - RNA, 19 nt, Artificial Sequence
  Description of Artificial Sequence: Synthetic oligonucleotide
  Sense strand starting at position 76 of SEQ ID NO: 317380
accugaaaucuucggguag

SEQ ID NO: 486386 - RNA, 19 nt, Artificial Sequence
  Description of Artificial Sequence: Synthetic oligonucleotide
  Antisense Strand to SEQ ID NO: 486385
cuacccgaagauuucaggu

SEQ ID NO: 486387 - RNA, 19 nt, Artificial Sequence
  Description of Artificial Sequence: Synthetic oligonucleotide
  Sense strand starting at position 80 of SEQ ID NO: 317380
gaaaucuucggguaguauu

SEQ ID NO: 486388 - RNA, 19 nt, Artificial Sequence
  Description of Artificial Sequence: Synthetic oligonucleotide
  Antisense Strand to SEQ ID NO: 486387
aauacuacccgaagauuuc

SEQ ID NO: 486389 - RNA, 19 nt, Artificial Sequence
  Description of Artificial Sequence: Synthetic oligonucleotide
  Sense strand starting at position 218 of SEQ ID NO: 317380
gccagugagcugggagauu

SEQ ID NO: 486390 - RNA, 19 nt, Artificial Sequence
  Description of Artificial Sequence: Synthetic oligonucleotide
  Antisense Strand to SEQ ID NO: 486389
aaucucccagcucacuggc

SEQ ID NO: 486391 - RNA, 19 nt, Artificial Sequence
  Description of Artificial Sequence: Synthetic oligonucleotide
  Sense strand starting at position 227 of SEQ ID NO: 317380
cugggagauuugcgggaau

SEQ ID NO: 486392 - RNA, 19 nt, Artificial Sequence
  Description of Artificial Sequence: Synthetic oligonucleotide
  Antisense Strand to SEQ ID NO: 486391
auucccgcaaaucucccag

SEQ ID NO: 486393 - RNA, 19 nt, Artificial Sequence
  Description of Artificial Sequence: Synthetic oligonucleotide
  Sense strand starting at position 299 of SEQ ID NO: 317380
gggagauggucugcaauac

SEQ ID NO: 486394 - RNA, 19 nt, Artificial Sequence
  Description of Artificial Sequence: Synthetic oligonucleotide
  Antisense Strand to SEQ ID NO: 486393
guauugcagaccaucuccc

SEQ ID NO: 486395 - RNA, 19 nt, Artificial Sequence
  Description of Artificial Sequence: Synthetic oligonucleotide
  Sense strand starting at position 314 of SEQ ID NO: 317380
auaccaggacuuugaucuu

SEQ ID NO: 486396 - RNA, 19 nt, Artificial Sequence
  Description of Artificial Sequence: Synthetic oligonucleotide
  Antisense Strand to SEQ ID NO: 486395
aagaucaaaguccugguau

SEQ ID NO: 486397 - RNA, 19 nt, Artificial Sequence
  Description of Artificial Sequence: Synthetic oligonucleotide
  Sense strand starting at position 473 of SEQ ID NO: 317380
ggauauuuauguguccugu

SEQ ID NO: 486398 - RNA, 19 nt, Artificial Sequence
  Description of Artificial Sequence: Synthetic oligonucleotide
  Antisense Strand to SEQ ID NO: 486397
acaggacacauaaauaucc

SEQ ID NO: 486399 - RNA, 19 nt, Artificial Sequence
  Description of Artificial Sequence: Synthetic oligonucleotide
  Sense strand starting at position 553 of SEQ ID NO: 317380
ccgaaugaauuauaacauc

SEQ ID NO: 486400 - RNA, 19 nt, Artificial Sequence
  Description of Artificial Sequence: Synthetic oligonucleotide
  Antisense Strand to SEQ ID NO: 486399
gauguuauaauucauucgg

SEQ ID NO: 486401 - RNA, 19 nt, Artificial Sequence
  Description of Artificial Sequence: Synthetic oligonucleotide
  Sense strand starting at position 637 of SEQ ID NO: 317380
ccuuacuugccaugguaga

SEQ ID NO: 486402 - RNA, 19 nt, Artificial Sequence
  Description of Artificial Sequence: Synthetic oligonucleotide
  Antisense Strand to SEQ ID NO: 486401
ucuaccauggcaaguaagg

SEQ ID NO: 486403 - RNA, 19 nt, Artificial Sequence
  Description of Artificial Sequence: Synthetic oligonucleotide
  Sense strand starting at position 638 of SEQ ID NO: 317380
cuuacuugccaugguagaa

SEQ ID NO: 486404 - RNA, 19 nt, Artificial Sequence
  Description of Artificial Sequence: Synthetic oligonucleotide
  Antisense Strand to SEQ ID NO: 486403
uucuaccauggcaaguaag

SEQ ID NO: 486405 - RNA, 19 nt, Artificial Sequence
  Description of Artificial Sequence: Synthetic oligonucleotide
  Sense strand starting at position 668 of SEQ ID NO: 317380
agacauaucugcuccgcaa

SEQ ID NO: 486406 - RNA, 19 nt, Artificial Sequence
  Description of Artificial Sequence: Synthetic oligonucleotide
  Antisense Strand to SEQ ID NO: 486405
uugcggagcagauaugucu

SEQ ID NO: 486407 - RNA, 19 nt, Artificial Sequence
  Description of Artificial Sequence: Synthetic oligonucleotide
  Sense strand starting at position 689 of SEQ ID NO: 317380
ccugcuaaaugagauauga

SEQ ID NO: 486408 - RNA, 19 nt, Artificial Sequence
  Description of Artificial Sequence: Synthetic oligonucleotide
  Antisense Strand to SEQ ID NO: 486407
ucauaucucauuuagcagg

SEQ ID NO: 486409 - RNA, 19 nt, Artificial Sequence
  Description of Artificial Sequence: Synthetic oligonucleotide
  Sense strand starting at position 781 of SEQ ID NO: 317380
ggaguugccugcuccuuaa

SEQ ID NO: 486410 - RNA, 19 nt, Artificial Sequence
  Description of Artificial Sequence: Synthetic oligonucleotide
  Antisense Strand to SEQ ID NO: 486409
uuaaggagcaggcaacucc

SEQ ID NO: 486411 - RNA, 19 nt, Artificial Sequence
  Description of Artificial Sequence: Synthetic oligonucleotide
  Sense strand starting at position 826 of SEQ ID NO: 317380
gagcgaaaugucuguuacc

SEQ ID NO: 486412 - RNA, 19 nt, Artificial Sequence
  Description of Artificial Sequence: Synthetic oligonucleotide
  Antisense Strand to SEQ ID NO: 486411
gguaacagacauuucgcuc

SEQ ID NO: 486413 - RNA, 19 nt, Artificial Sequence
  Description of Artificial Sequence: Synthetic oligonucleotide
  Sense strand starting at position 827 of SEQ ID NO: 317380
agcgaaaugucuguuaccu

SEQ ID NO: 486414 - RNA, 19 nt, Artificial Sequence
  Description of Artificial Sequence: Synthetic oligonucleotide
  Antisense Strand to SEQ ID NO: 486413
agguaacagacauuucgcu

SEQ ID NO: 486415 - RNA, 19 nt, Artificial Sequence
  Description of Artificial Sequence: Synthetic oligonucleotide
  Sense strand starting at position 894 of SEQ ID NO: 317380
cucagaguaguuuggugaa

SEQ ID NO: 486416 - RNA, 19 nt, Artificial Sequence
  Description of Artificial Sequence: Synthetic oligonucleotide
  Antisense Strand to SEQ ID NO: 486415
uucaccaaacuacucugag

SEQ ID NO: 486417 - RNA, 19 nt, Artificial Sequence
  Description of Artificial Sequence: Synthetic oligonucleotide
  Sense strand starting at position 896 of SEQ ID NO: 317380
cagaguaguuuggugaagu

SEQ ID NO: 486418 - RNA, 19 nt, Artificial Sequence
  Description of Artificial Sequence: Synthetic oligonucleotide
  Antisense Strand to SEQ ID NO: 486417
acuucaccaaacuacucug

SEQ ID NO: 486419 - RNA, 19 nt, Artificial Sequence
  Description of Artificial Sequence: Synthetic oligonucleotide
  Sense strand starting at position 1090 of SEQ ID NO: 317380
gaguguuaagcugggauag

SEQ ID NO: 486420 - RNA, 19 nt, Artificial Sequence
  Description of Artificial Sequence: Synthetic oligonucleotide
  Antisense Strand to SEQ ID NO: 486419
cuaucccagcuuaacacuc

SEQ ID NO: 486421 - RNA, 19 nt, Artificial Sequence
  Description of Artificial Sequence: Synthetic oligonucleotide
  Sense strand starting at position 1091 of SEQ ID NO: 317380
aguguuaagcugggauaga

SEQ ID NO: 486422 - RNA, 19 nt, Artificial Sequence
  Description of Artificial Sequence: Synthetic oligonucleotide
  Antisense Strand to SEQ ID NO: 486421
ucuaucccagcuuaacacu

SEQ ID NO: 486423 - RNA, 19 nt, Artificial Sequence
  Description of Artificial Sequence: Synthetic oligonucleotide
  Sense strand starting at position 1121 of SEQ ID NO: 317380
uuuaaaggauuaugagaag

SEQ ID NO: 486424 - RNA, 19 nt, Artificial Sequence
  Description of Artificial Sequence: Synthetic oligonucleotide
  Antisense Strand to SEQ ID NO: 486423
cuucucauaauccuuuaaa

SEQ ID NO: 486425 - RNA, 19 nt, Artificial Sequence
  Description of Artificial Sequence: Synthetic oligonucleotide
  Sense strand starting at position 1124 of SEQ ID NO: 317380
aaaggauuaugagaaggaa

SEQ ID NO: 486426 - RNA, 19 nt, Artificial Sequence
  Description of Artificial Sequence: Synthetic oligonucleotide
  Antisense Strand to SEQ ID NO: 486425
uuccuucucauaauccuuu

SEQ ID NO: 486427 - RNA, 19 nt, Artificial Sequence
  Description of Artificial Sequence: Synthetic oligonucleotide
  Sense strand starting at position 1164 of SEQ ID NO: 317380
uggguuuggcacugaagaa

SEQ ID NO: 486428 - RNA, 19 nt, Artificial Sequence
  Description of Artificial Sequence: Synthetic oligonucleotide
  Antisense Strand to SEQ ID NO: 486427
uucuucagugccaaaccca

SEQ ID NO: 486429 - RNA, 19 nt, Artificial Sequence
  Description of Artificial Sequence: Synthetic oligonucleotide
  Sense strand starting at position 1273 of SEQ ID NO: 317380
guugcaaaccagugauuuc

SEQ ID NO: 486430 - RNA, 19 nt, Artificial Sequence
  Description of Artificial Sequence: Synthetic oligonucleotide
  Antisense Strand to SEQ ID NO: 486429
gaaaucacugguuugcaac

SEQ ID NO: 486431 - RNA, 19 nt, Artificial Sequence
  Description of Artificial Sequence: Synthetic oligonucleotide
  Sense strand starting at position 1428 of SEQ ID NO: 317380
caaguuuccucaucggcaa

SEQ ID NO: 486432 - RNA, 19 nt, Artificial Sequence
  Description of Artificial Sequence: Synthetic oligonucleotide
  Antisense Strand to SEQ ID NO: 486431
uugccgaugaggaaacuug

SEQ ID NO: 486433 - RNA, 19 nt, Artificial Sequence
  Description of Artificial Sequence: Synthetic oligonucleotide
  Sense strand starting at position 1429 of SEQ ID NO: 317380
aaguuuccucaucggcaaa

SEQ ID NO: 486434 - RNA, 19 nt, Artificial Sequence
  Description of Artificial Sequence: Synthetic oligonucleotide
  Antisense Strand to SEQ ID NO: 486433
uuugccgaugaggaaacuu

SEQ ID NO: 486435 - RNA, 19 nt, Artificial Sequence
  Description of Artificial Sequence: Synthetic oligonucleotide
  Sense strand starting at position 1593 of SEQ ID NO: 317380
uaggguugugacugaggau

SEQ ID NO: 486436 - RNA, 19 nt, Artificial Sequence
  Description of Artificial Sequence: Synthetic oligonucleotide
  Antisense Strand to SEQ ID NO: 486435
auccucagucacaacccua

SEQ ID NO: 486437 - RNA, 19 nt, Artificial Sequence
  Description of Artificial Sequence: Synthetic oligonucleotide
  Sense strand starting at position 1610 of SEQ ID NO: 317380
augguugucgagugacuac

SEQ ID NO: 486438 - RNA, 19 nt, Artificial Sequence
  Description of Artificial Sequence: Synthetic oligonucleotide
  Antisense Strand to SEQ ID NO: 486437
guagucacucgacaaccau

SEQ ID NO: 486439 - RNA, 19 nt, Artificial Sequence
  Description of Artificial Sequence: Synthetic oligonucleotide
  Sense strand starting at position 1761 of SEQ ID NO: 317380
cggcuucccgcuucgacaa

SEQ ID NO: 486440 - RNA, 19 nt, Artificial Sequence
  Description of Artificial Sequence: Synthetic oligonucleotide
  Antisense Strand to SEQ ID NO: 486439
uugucgaagcgggaagccg

SEQ ID NO: 486441 - RNA, 19 nt, Artificial Sequence
  Description of Artificial Sequence: Synthetic oligonucleotide
  Sense strand starting at position 2787 of SEQ ID NO: 317380
cugguaauuccugagcuca

SEQ ID NO: 486442 - RNA, 19 nt, Artificial Sequence
  Description of Artificial Sequence: Synthetic oligonucleotide
  Antisense Strand to SEQ ID NO: 486441
ugagcucaggaauuaccag

SEQ ID NO: 486443 - RNA, 19 nt, Artificial Sequence
  Description of Artificial Sequence: Synthetic oligonucleotide
  Sense strand starting at position 3006 of SEQ ID NO: 317380
guaagugaagccugcaauu

SEQ ID NO: 486444 - RNA, 19 nt, Artificial Sequence
  Description of Artificial Sequence: Synthetic oligonucleotide
  Antisense Strand to SEQ ID NO: 486443
aauugcaggcuucacuuac

SEQ ID NO: 486445 - RNA, 19 nt, Artificial Sequence
  Description of Artificial Sequence: Synthetic oligonucleotide
  Sense strand starting at position 3018 of SEQ ID NO: 317380
ugcaauuccuagcuaugga

SEQ ID NO: 486446 - RNA, 19 nt, Artificial Sequence
  Description of Artificial Sequence: Synthetic oligonucleotide
  Antisense Strand to SEQ ID NO: 486445
uccauagcuaggaauugca

SEQ ID NO: 486447 - RNA, 19 nt, Artificial Sequence
  Description of Artificial Sequence: Synthetic oligonucleotide
  Sense strand starting at position 3178 of SEQ ID NO: 317380
aaaggaacgugguccaaau

SEQ ID NO: 486448 - RNA, 19 nt, Artificial Sequence
  Description of Artificial Sequence: Synthetic oligonucleotide
  Antisense Strand to SEQ ID NO: 486447
auuuggaccacguuccuuu

SEQ ID NO: 486449 - RNA, 19 nt, Artificial Sequence
  Description of Artificial Sequence: Synthetic oligonucleotide
  Sense strand starting at position 3234 of SEQ ID NO: 317380
agucccagccaguaauaua

SEQ ID NO: 486450 - RNA, 19 nt, Artificial Sequence
  Description of Artificial Sequence: Synthetic oligonucleotide
  Antisense Strand to SEQ ID NO: 486449
uauauuacuggcugggacu

SEQ ID NO: 486451 - RNA, 19 nt, Artificial Sequence
  Description of Artificial Sequence: Synthetic oligonucleotide
  Sense strand starting at position 3252 of SEQ ID NO: 317380
acagauaacgcuugcuaag

SEQ ID NO: 486452 - RNA, 19 nt, Artificial Sequence
  Description of Artificial Sequence: Synthetic oligonucleotide
  Antisense Strand to SEQ ID NO: 486451
cuuagcaagcguuaucugu

SEQ ID NO: 486453 - RNA, 19 nt, Artificial Sequence
  Description of Artificial Sequence: Synthetic oligonucleotide
  Sense strand starting at position 3254 of SEQ ID NO: 317380
agauaacgcuugcuaagua

SEQ ID NO: 486454 - RNA, 19 nt, Artificial Sequence
  Description of Artificial Sequence: Synthetic oligonucleotide
  Antisense Strand to SEQ ID NO: 486453
uacuuagcaagcguuaucu

SEQ ID NO: 486455 - RNA, 19 nt, Artificial Sequence
  Description of Artificial Sequence: Synthetic oligonucleotide
  Sense strand starting at position 3269 of SEQ ID NO: 317380
aguagaugccaauaugcua

SEQ ID NO: 486456 - RNA, 19 nt, Artificial Sequence
  Description of Artificial Sequence: Synthetic oligonucleotide
  Antisense Strand to SEQ ID NO: 486455
uagcauauuggcaucuacu

SEQ ID NO: 486457 - RNA, 19 nt, Artificial Sequence
  Description of Artificial Sequence: Synthetic oligonucleotide
  Sense strand starting at position 3704 of SEQ ID NO: 317380
ccuucuaagucagaaauga

SEQ ID NO: 486458 - RNA, 19 nt, Artificial Sequence
  Description of Artificial Sequence: Synthetic oligonucleotide
  Antisense Strand to SEQ ID NO: 486457
ucauuucugacuuagaagg

SEQ ID NO: 486459 - RNA, 19 nt, Artificial Sequence
  Description of Artificial Sequence: Synthetic oligonucleotide
  Sense strand starting at position 3720 of SEQ ID NO: 317380
ugaagagugccucaugcua

SEQ ID NO: 486460 - RNA, 19 nt, Artificial Sequence
  Description of Artificial Sequence: Synthetic oligonucleotide
  Antisense Strand to SEQ ID NO: 486459
uagcaugaggcacucuuca

SEQ ID NO: 486461 - RNA, 19 nt, Artificial Sequence
  Description of Artificial Sequence: Synthetic oligonucleotide
  Sense strand starting at position 3727 of SEQ ID NO: 317380
ugccucaugcuagauguga

SEQ ID NO: 486462 - RNA, 19 nt, Artificial Sequence
  Description of Artificial Sequence: Synthetic oligonucleotide
  Antisense Strand to SEQ ID NO: 486461
ucacaucuagcaugaggca

SEQ ID NO: 486463 - RNA, 19 nt, Artificial Sequence
  Description of Artificial Sequence: Synthetic oligonucleotide
  Sense strand starting at position 3742 of SEQ ID NO: 317380
gugacuuugccaugccaag

SEQ ID NO: 486464 - RNA, 19 nt, Artificial Sequence
  Description of Artificial Sequence: Synthetic oligonucleotide
  Antisense Strand to SEQ ID NO: 486463
cuuggcauggcaaagucac

SEQ ID NO: 486465 - RNA, 19 nt, Artificial Sequence
  Description of Artificial Sequence: Synthetic oligonucleotide
  Sense strand starting at position 75 of SEQ ID NO: 317381
uucuaaaguguaggaaacu

SEQ ID NO: 486466 - RNA, 19 nt, Artificial Sequence
  Description of Artificial Sequence: Synthetic oligonucleotide
  Antisense Strand to SEQ ID NO: 486465
aguuuccuacacuuuagaa

SEQ ID NO: 486467 - RNA, 19 nt, Artificial Sequence
  Description of Artificial Sequence: Synthetic oligonucleotide
  Sense strand starting at position 571 of SEQ ID NO: 317381
ggcucugcugcuuagaaag

SEQ ID NO: 486468 - RNA, 19 nt, Artificial Sequence
  Description of Artificial Sequence: Synthetic oligonucleotide
  Antisense Strand to SEQ ID NO: 486467
cuuucuaagcagcagagcc

SEQ ID NO: 486469 - RNA, 19 nt, Artificial Sequence
  Description of Artificial Sequence: Synthetic oligonucleotide
  Sense strand starting at position 765 of SEQ ID NO: 317381
ggagaaucauuugaguaca

SEQ ID NO: 486470 - RNA, 19 nt, Artificial Sequence
  Description of Artificial Sequence: Synthetic oligonucleotide
  Antisense Strand to SEQ ID NO: 486469
uguacucaaaugauucucc

SEQ ID NO: 486471 - RNA, 19 nt, Artificial Sequence
  Description of Artificial Sequence: Synthetic oligonucleotide
  Sense strand starting at position 1084 of SEQ ID NO: 317381
gguaaacucugacuucuug

SEQ ID NO: 486472 - RNA, 19 nt, Artificial Sequence
  Description of Artificial Sequence: Synthetic oligonucleotide
  Antisense Strand to SEQ ID NO: 486471
caagaagucagaguuuacc

SEQ ID NO: 486473 - RNA, 19 nt, Artificial Sequence
  Description of Artificial Sequence: Synthetic oligonucleotide
  Sense strand starting at position 1091 of SEQ ID NO: 317381
ucugacuucuuguuucuua

SEQ ID NO: 486474 - RNA, 19 nt, Artificial Sequence
  Description of Artificial Sequence: Synthetic oligonucleotide
  Antisense Strand to SEQ ID NO: 486473
uaagaaacaagaagucaga

SEQ ID NO: 486475 - RNA, 19 nt, Artificial Sequence
  Description of Artificial Sequence: Synthetic oligonucleotide
  Sense strand starting at position 1167 of SEQ ID NO: 317381
cucaguuugagcugugaau

SEQ ID NO: 486476 - RNA, 19 nt, Artificial Sequence
  Description of Artificial Sequence: Synthetic oligonucleotide
  Antisense Strand to SEQ ID NO: 486475
auucacagcucaaacugag

SEQ ID NO: 486477 - RNA, 19 nt, Artificial Sequence
  Description of Artificial Sequence: Synthetic oligonucleotide
  Sense strand starting at position 1169 of SEQ ID NO: 317381
caguuugagcugugaauga

SEQ ID NO: 486478 - RNA, 19 nt, Artificial Sequence
  Description of Artificial Sequence: Synthetic oligonucleotide
  Antisense Strand to SEQ ID NO: 486477
ucauucacagcucaaacug

SEQ ID NO: 486479 - RNA, 19 nt, Artificial Sequence
  Description of Artificial Sequence: Synthetic oligonucleotide
  Sense strand starting at position 1173 of SEQ ID NO: 317381
uugagcugugaaugaccaa

SEQ ID NO: 486480 - RNA, 19 nt, Artificial Sequence
  Description of Artificial Sequence: Synthetic oligonucleotide
  Antisense Strand to SEQ ID NO: 486479
uuggucauucacagcucaa

SEQ ID NO: 486481 - RNA, 19 nt, Artificial Sequence
  Description of Artificial Sequence: Synthetic oligonucleotide
  Sense strand starting at position 1251 of SEQ ID NO: 317381
gaaagaggacaguguuauc

SEQ ID NO: 486482 - RNA, 19 nt, Artificial Sequence
  Description of Artificial Sequence: Synthetic oligonucleotide
  Antisense Strand to SEQ ID NO: 486481
gauaacacuguccucuuuc

SEQ ID NO: 486483 - RNA, 19 nt, Artificial Sequence
  Description of Artificial Sequence: Synthetic oligonucleotide
  Sense strand starting at position 1256 of SEQ ID NO: 317381
aggacaguguuaucagaga

SEQ ID NO: 486484 - RNA, 19 nt, Artificial Sequence
  Description of Artificial Sequence: Synthetic oligonucleotide
  Antisense Strand to SEQ ID NO: 486483
ucucugauaacacuguccu

SEQ ID NO: 486485 - RNA, 19 nt, Artificial Sequence
  Description of Artificial Sequence: Synthetic oligonucleotide
  Sense strand starting at position 1286 of SEQ ID NO: 317381
ggcccuuauccugaaccaa

SEQ ID NO: 486486 - RNA, 19 nt, Artificial Sequence
  Description of Artificial Sequence: Synthetic oligonucleotide
  Antisense Strand to SEQ ID NO: 486485
uugguucaggauaagggcc

SEQ ID NO: 486487 - RNA, 19 nt, Artificial Sequence
  Description of Artificial Sequence: Synthetic oligonucleotide
  Sense strand starting at position 1441 of SEQ ID NO: 317381
cucucugcuuuccuaagga

SEQ ID NO: 486488 - RNA, 19 nt, Artificial Sequence
  Description of Artificial Sequence: Synthetic oligonucleotide
  Antisense Strand to SEQ ID NO: 486487
uccuuaggaaagcagagag

SEQ ID NO: 486489 - RNA, 19 nt, Artificial Sequence
  Description of Artificial Sequence: Synthetic oligonucleotide
  Sense strand starting at position 1579 of SEQ ID NO: 317381
uuggacuggucuuugcaga

SEQ ID NO: 486490 - RNA, 19 nt, Artificial Sequence
  Description of Artificial Sequence: Synthetic oligonucleotide
  Antisense Strand to SEQ ID NO: 486489
ucugcaaagaccaguccaa

SEQ ID NO: 486491 - RNA, 19 nt, Artificial Sequence
  Description of Artificial Sequence: Synthetic oligonucleotide
  Sense strand starting at position 1580 of SEQ ID NO: 317381
uggacuggucuuugcagau

SEQ ID NO: 486492 - RNA, 19 nt, Artificial Sequence
  Description of Artificial Sequence: Synthetic oligonucleotide
  Antisense Strand to SEQ ID NO: 486491
aucugcaaagaccagucca

SEQ ID NO: 486493 - RNA, 19 nt, Artificial Sequence
  Description of Artificial Sequence: Synthetic oligonucleotide
  Sense strand starting at position 1714 of SEQ ID NO: 317381
ccaauuuguucccaagaag

SEQ ID NO: 486494 - RNA, 19 nt, Artificial Sequence
  Description of Artificial Sequence: Synthetic oligonucleotide
  Antisense Strand to SEQ ID NO: 486493
cuucuugggaacaaauugg

SEQ ID NO: 486495 - RNA, 19 nt, Artificial Sequence
  Description of Artificial Sequence: Synthetic oligonucleotide
  Sense strand starting at position 2098 of SEQ ID NO: 317381
gcgacuucaccggcuugua

SEQ ID NO: 486496 - RNA, 19 nt, Artificial Sequence
  Description of Artificial Sequence: Synthetic oligonucleotide
  Antisense Strand to SEQ ID NO: 486495
uacaagccggugaagucgc

SEQ ID NO: 486497 - RNA, 19 nt, Artificial Sequence
  Description of Artificial Sequence: Synthetic oligonucleotide
  Sense strand starting at position 2167 of SEQ ID NO: 317381
gccuguuuggagaggugua

SEQ ID NO: 486498 - RNA, 19 nt, Artificial Sequence
  Description of Artificial Sequence: Synthetic oligonucleotide
  Antisense Strand to SEQ ID NO: 486497
uacaccucuccaaacaggc

SEQ ID NO: 486499 - RNA, 19 nt, Artificial Sequence
  Description of Artificial Sequence: Synthetic oligonucleotide
  Sense strand starting at position 2284 of SEQ ID NO: 317381
uggcauuugcuccagagcu

SEQ ID NO: 486500 - RNA, 19 nt, Artificial Sequence
  Description of Artificial Sequence: Synthetic oligonucleotide
  Antisense Strand to SEQ ID NO: 486499
agcucuggagcaaaugcca

SEQ ID NO: 486501 - RNA, 19 nt, Artificial Sequence
  Description of Artificial Sequence: Synthetic oligonucleotide
  Sense strand starting at position 2286 of SEQ ID NO: 317381
gcauuugcuccagagcugu

SEQ ID NO: 486502 - RNA, 19 nt, Artificial Sequence
  Description of Artificial Sequence: Synthetic oligonucleotide
  Antisense Strand to SEQ ID NO: 486501
acagcucuggagcaaaugc

SEQ ID NO: 486503 - RNA, 19 nt, Artificial Sequence
  Description of Artificial Sequence: Synthetic oligonucleotide
  Sense strand starting at position 2306 of SEQ ID NO: 317381
cugucauaccuaugagagc

SEQ ID NO: 486504 - RNA, 19 nt, Artificial Sequence
  Description of Artificial Sequence: Synthetic oligonucleotide
  Antisense Strand to SEQ ID NO: 486503
gcucucauagguaugacag

SEQ ID NO: 486505 - RNA, 19 nt, Artificial Sequence
  Description of Artificial Sequence: Synthetic oligonucleotide
  Sense strand starting at position 2550 of SEQ ID NO: 317381
aguaaucaucauugucauu

SEQ ID NO: 486506 - RNA, 19 nt, Artificial Sequence
  Description of Artificial Sequence: Synthetic oligonucleotide
  Antisense Strand to SEQ ID NO: 486505
aaugacaaugaugauuacu

SEQ ID NO: 486507 - RNA, 19 nt, Artificial Sequence
  Description of Artificial Sequence: Synthetic oligonucleotide
  Sense strand starting at position 2566 of SEQ ID NO: 317381
auugucguuaccguuauua

SEQ ID NO: 486508 - RNA, 19 nt, Artificial Sequence
  Description of Artificial Sequence: Synthetic oligonucleotide
  Antisense Strand to SEQ ID NO: 486507
uaauaacgguaacgacaau

SEQ ID NO: 486509 - RNA, 19 nt, Artificial Sequence
  Description of Artificial Sequence: Synthetic oligonucleotide
  Sense strand starting at position 2612 of SEQ ID NO: 317381
aaauguguugucugggaga

SEQ ID NO: 486510 - RNA, 19 nt, Artificial Sequence
  Description of Artificial Sequence: Synthetic oligonucleotide
  Antisense Strand to SEQ ID NO: 486509
ucucccagacaacacauuu

SEQ ID NO: 486511 - RNA, 19 nt, Artificial Sequence
  Description of Artificial Sequence: Synthetic oligonucleotide
  Sense strand starting at position 2614 of SEQ ID NO: 317381
auguguugucugggagaac

SEQ ID NO: 486512 - RNA, 19 nt, Artificial Sequence
  Description of Artificial Sequence: Synthetic oligonucleotide
  Antisense Strand to SEQ ID NO: 486511
guucucccagacaacacau

SEQ ID NO: 486513 - RNA, 19 nt, Artificial Sequence
  Description of Artificial Sequence: Synthetic oligonucleotide
  Sense strand starting at position 2634 of SEQ ID NO: 317381
aggaguguuucccucccga

SEQ ID NO: 486514 - RNA, 19 nt, Artificial Sequence
  Description of Artificial Sequence: Synthetic oligonucleotide
  Antisense Strand to SEQ ID NO: 486513
ucgggagggaaacacuccu

SEQ ID NO: 486515 - RNA, 19 nt, Artificial Sequence
  Description of Artificial Sequence: Synthetic oligonucleotide
  Sense strand starting at position 3037 of SEQ ID NO: 317381
caggaugggugacuuaguu

SEQ ID NO: 486516 - RNA, 19 nt, Artificial Sequence
  Description of Artificial Sequence: Synthetic oligonucleotide
  Antisense Strand to SEQ ID NO: 486515
aacuaagucacccauccug

SEQ ID NO: 486517 - RNA, 19 nt, Artificial Sequence
  Description of Artificial Sequence: Synthetic oligonucleotide
  Sense strand starting at position 3068 of SEQ ID NO: 317381
uuccuagaaucaucuugga

SEQ ID NO: 486518 - RNA, 19 nt, Artificial Sequence
  Description of Artificial Sequence: Synthetic oligonucleotide
  Antisense Strand to SEQ ID NO: 486517
uccaagaugauucuaggaa

SEQ ID NO: 486519 - RNA, 19 nt, Artificial Sequence
  Description of Artificial Sequence: Synthetic oligonucleotide
  Sense strand starting at position 3117 of SEQ ID NO: 317381
acaggcauucugcgagaua

SEQ ID NO: 486520 - RNA, 19 nt, Artificial Sequence
  Description of Artificial Sequence: Synthetic oligonucleotide
  Antisense Strand to SEQ ID NO: 486519
uaucucgcagaaugccugu

SEQ ID NO: 486521 - RNA, 19 nt, Artificial Sequence
  Description of Artificial Sequence: Synthetic oligonucleotide
  Sense strand starting at position 3120 of SEQ ID NO: 317381
ggcauucugcgagauaaga

SEQ ID NO: 486522 - RNA, 19 nt, Artificial Sequence
  Description of Artificial Sequence: Synthetic oligonucleotide
  Antisense Strand to SEQ ID NO: 486521
ucuuaucucgcagaaugcc

SEQ ID NO: 486523 - RNA, 19 nt, Artificial Sequence
  Description of Artificial Sequence: Synthetic oligonucleotide
  Sense strand starting at position 3246 of SEQ ID NO: 317381
guugguaggcguaguuauc

SEQ ID NO: 486524 - RNA, 19 nt, Artificial Sequence
  Description of Artificial Sequence: Synthetic oligonucleotide
  Antisense Strand to SEQ ID NO: 486523
gauaacuacgccuaccaac

SEQ ID NO: 486525 - RNA, 19 nt, Artificial Sequence
  Description of Artificial Sequence: Synthetic oligonucleotide
  Sense strand starting at position 3255 of SEQ ID NO: 317381
cguaguuauccucaacuaa

SEQ ID NO: 486526 - RNA, 19 nt, Artificial Sequence
  Description of Artificial Sequence: Synthetic oligonucleotide
  Antisense Strand to SEQ ID NO: 486525
uuaguugaggauaacuacg

SEQ ID NO: 486527 - RNA, 19 nt, Artificial Sequence
  Description of Artificial Sequence: Synthetic oligonucleotide
  Sense strand starting at position 3328 of SEQ ID NO: 317381
ucuaguuccuuauugugaa

SEQ ID NO: 486528 - RNA, 19 nt, Artificial Sequence
  Description of Artificial Sequence: Synthetic oligonucleotide
  Antisense Strand to SEQ ID NO: 486527
uucacaauaaggaacuaga

SEQ ID NO: 486529 - RNA, 19 nt, Artificial Sequence
  Description of Artificial Sequence: Synthetic oligonucleotide
  Sense strand starting at position 3462 of SEQ ID NO: 317381
ucguuuaagguccaagaaa

SEQ ID NO: 486530 - RNA, 19 nt, Artificial Sequence
  Description of Artificial Sequence: Synthetic oligonucleotide
  Antisense Strand to SEQ ID NO: 486529
uuucuuggaccuuaaacga

SEQ ID NO: 486531 - RNA, 19 nt, Artificial Sequence
  Description of Artificial Sequence: Synthetic oligonucleotide
  Sense strand starting at position 3481 of SEQ ID NO: 317381
gcacgucuccguucuggua

SEQ ID NO: 486532 - RNA, 19 nt, Artificial Sequence
  Description of Artificial Sequence: Synthetic oligonucleotide
  Antisense Strand to SEQ ID NO: 486531
uaccagaacggagacgugc

SEQ ID NO: 486533 - RNA, 19 nt, Artificial Sequence
  Description of Artificial Sequence: Synthetic oligonucleotide
  Sense strand starting at position 3542 of SEQ ID NO: 317381
uggcauucuagaggaaauc

SEQ ID NO: 486534 - RNA, 19 nt, Artificial Sequence
  Description of Artificial Sequence: Synthetic oligonucleotide
  Antisense Strand to SEQ ID NO: 486533
gauuuccucuagaaugcca

SEQ ID NO: 486535 - RNA, 19 nt, Artificial Sequence
  Description of Artificial Sequence: Synthetic oligonucleotide
  Sense strand starting at position 3716 of SEQ ID NO: 317381
guggcuuagguaugauaaa

SEQ ID NO: 486536 - RNA, 19 nt, Artificial Sequence
  Description of Artificial Sequence: Synthetic oligonucleotide
  Antisense Strand to SEQ ID NO: 486535
uuuaucauaccuaagccac

SEQ ID NO: 486537 - RNA, 19 nt, Artificial Sequence
  Description of Artificial Sequence: Synthetic oligonucleotide
  Sense strand starting at position 3816 of SEQ ID NO: 317381
agagaugcauccucucuuu

SEQ ID NO: 486538 - RNA, 19 nt, Artificial Sequence
  Description of Artificial Sequence: Synthetic oligonucleotide
  Antisense Strand to SEQ ID NO: 486537
aaagagaggaugcaucucu

SEQ ID NO: 486539 - RNA, 19 nt, Artificial Sequence
  Description of Artificial Sequence: Synthetic oligonucleotide
  Sense strand starting at position 3897 of SEQ ID NO: 317381
gggagaagcugucugagga

SEQ ID NO: 486540 - RNA, 19 nt, Artificial Sequence
  Description of Artificial Sequence: Synthetic oligonucleotide
  Antisense Strand to SEQ ID NO: 486539
uccucagacagcuucuccc

SEQ ID NO: 486541 - RNA, 19 nt, Artificial Sequence
  Description of Artificial Sequence: Synthetic oligonucleotide
  Sense strand starting at position 3898 of SEQ ID NO: 317381
ggagaagcugucugaggau

SEQ ID NO: 486542 - RNA, 19 nt, Artificial Sequence
  Description of Artificial Sequence: Synthetic oligonucleotide
  Antisense Strand to SEQ ID NO: 486541
auccucagacagcuucucc

SEQ ID NO: 486543 - RNA, 19 nt, Artificial Sequence
  Description of Artificial Sequence: Synthetic oligonucleotide
  Sense strand starting at position 3925 of SEQ ID NO: 317381
ugcagaaggcuguggaaua

SEQ ID NO: 486544 - RNA, 19 nt, Artificial Sequence
  Description of Artificial Sequence: Synthetic oligonucleotide
  Antisense Strand to SEQ ID NO: 486543
uauuccacagccuucugca

SEQ ID NO: 486545 - RNA, 19 nt, Artificial Sequence
  Description of Artificial Sequence: Synthetic oligonucleotide
  Sense strand starting at position 127 of SEQ ID NO: 317382
agacucaugucauccagau

SEQ ID NO: 486546 - RNA, 19 nt, Artificial Sequence
  Description of Artificial Sequence: Synthetic oligonucleotide
  Antisense Strand to SEQ ID NO: 486545
aucuggaugacaugagucu

SEQ ID NO: 486547 - RNA, 19 nt, Artificial Sequence
  Description of Artificial Sequence: Synthetic oligonucleotide
  Sense strand starting at position 190 of SEQ ID NO: 317382
agaucucaguuacuacuua

SEQ ID NO: 486548 - RNA, 19 nt, Artificial Sequence
  Description of Artificial Sequence: Synthetic oligonucleotide
  Antisense Strand to SEQ ID NO: 486547
uaaguaguaacugagaucu

SEQ ID NO: 486549 - RNA, 19 nt, Artificial Sequence
  Description of Artificial Sequence: Synthetic oligonucleotide
  Sense strand starting at position 342 of SEQ ID NO: 317382
aacugacuugaguaaagcu

SEQ ID NO: 486550 - RNA, 19 nt, Artificial Sequence
  Description of Artificial Sequence: Synthetic oligonucleotide
  Antisense Strand to SEQ ID NO: 486549
agcuuuacucaagucaguu

SEQ ID NO: 486551 - RNA, 19 nt, Artificial Sequence
  Description of Artificial Sequence: Synthetic oligonucleotide
  Sense strand starting at position 349 of SEQ ID NO: 317382
uugaguaaagcugaaaugu

SEQ ID NO: 486552 - RNA, 19 nt, Artificial Sequence
  Description of Artificial Sequence: Synthetic oligonucleotide
  Antisense Strand to SEQ ID NO: 486551
acauuucagcuuuacucaa

SEQ ID NO: 486553 - RNA, 19 nt, Artificial Sequence
  Description of Artificial Sequence: Synthetic oligonucleotide
  Sense strand starting at position 366 of SEQ ID NO: 317382
guugcugaaccagaaucua

SEQ ID NO: 486554 - RNA, 19 nt, Artificial Sequence
  Description of Artificial Sequence: Synthetic oligonucleotide
  Antisense Strand to SEQ ID NO: 486553
uagauucugguucagcaac

SEQ ID NO: 486555 - RNA, 19 nt, Artificial Sequence
  Description of Artificial Sequence: Synthetic oligonucleotide
  Sense strand starting at position 449 of SEQ ID NO: 317382
acagcuuuguuccuaagag

SEQ ID NO: 486556 - RNA, 19 nt, Artificial Sequence
  Description of Artificial Sequence: Synthetic oligonucleotide
  Antisense Strand to SEQ ID NO: 486555
cucuuaggaacaaagcugu

SEQ ID NO: 486557 - RNA, 19 nt, Artificial Sequence
  Description of Artificial Sequence: Synthetic oligonucleotide
  Sense strand starting at position 683 of SEQ ID NO: 317382
ucagcuguccuagaacuca

SEQ ID NO: 486558 - RNA, 19 nt, Artificial Sequence
  Description of Artificial Sequence: Synthetic oligonucleotide
  Antisense Strand to SEQ ID NO: 486557
ugaguucuaggacagcuga

SEQ ID NO: 486559 - RNA, 19 nt, Artificial Sequence
  Description of Artificial Sequence: Synthetic oligonucleotide
  Sense strand starting at position 913 of SEQ ID NO: 317382
uggcuauuaugacccacau

SEQ ID NO: 486560 - RNA, 19 nt, Artificial Sequence
  Description of Artificial Sequence: Synthetic oligonucleotide
  Antisense Strand to SEQ ID NO: 486559
augugggucauaauagcca

SEQ ID NO: 486561 - RNA, 19 nt, Artificial Sequence
  Description of Artificial Sequence: Synthetic oligonucleotide
  Sense strand starting at position 1034 of SEQ ID NO: 317382
ucauguaguucucugaaua

SEQ ID NO: 486562 - RNA, 19 nt, Artificial Sequence
  Description of Artificial Sequence: Synthetic oligonucleotide
  Antisense Strand to SEQ ID NO: 486561
uauucagagaacuacauga

SEQ ID NO: 486563 - RNA, 19 nt, Artificial Sequence
  Description of Artificial Sequence: Synthetic oligonucleotide
  Sense strand starting at position 1086 of SEQ ID NO: 317382
guucacaagcgagaaaugu

SEQ ID NO: 486564 - RNA, 19 nt, Artificial Sequence
  Description of Artificial Sequence: Synthetic oligonucleotide
  Antisense Strand to SEQ ID NO: 486563
acauuucucgcuugugaac

SEQ ID NO: 486565 - RNA, 19 nt, Artificial Sequence
  Description of Artificial Sequence: Synthetic oligonucleotide
  Sense strand starting at position 1237 of SEQ ID NO: 317382
acucuaugucucugauacu

SEQ ID NO: 486566 - RNA, 19 nt, Artificial Sequence
  Description of Artificial Sequence: Synthetic oligonucleotide
  Antisense Strand to SEQ ID NO: 486565
aguaucagagacauagagu

SEQ ID NO: 486567 - RNA, 19 nt, Artificial Sequence
  Description of Artificial Sequence: Synthetic oligonucleotide
  Sense strand starting at position 1669 of SEQ ID NO: 317382
uagggagcugcugagauaa

SEQ ID NO: 486568 - RNA, 19 nt, Artificial Sequence
  Description of Artificial Sequence: Synthetic oligonucleotide
  Antisense Strand to SEQ ID NO: 486567
uuaucucagcagcucccua

SEQ ID NO: 486569 - RNA, 19 nt, Artificial Sequence
  Description of Artificial Sequence: Synthetic oligonucleotide
  Sense strand starting at position 1742 of SEQ ID NO: 317382
gcagauaugcagcauuauc

SEQ ID NO: 486570 - RNA, 19 nt, Artificial Sequence
  Description of Artificial Sequence: Synthetic oligonucleotide
  Antisense Strand to SEQ ID NO: 486569
gauaaugcugcauaucugc

SEQ ID NO: 486571 - RNA, 19 nt, Artificial Sequence
  Description of Artificial Sequence: Synthetic oligonucleotide
  Sense strand starting at position 1846 of SEQ ID NO: 317382
gugaucauuguauacuaac

SEQ ID NO: 486572 - RNA, 19 nt, Artificial Sequence
  Description of Artificial Sequence: Synthetic oligonucleotide
  Antisense Strand to SEQ ID NO: 486571
guuaguauacaaugaucac

SEQ ID NO: 486573 - RNA, 19 nt, Artificial Sequence
  Description of Artificial Sequence: Synthetic oligonucleotide
  Sense strand starting at position 1919 of SEQ ID NO: 317382
ggcgaagcucagcagaaua

SEQ ID NO: 486574 - RNA, 19 nt, Artificial Sequence
  Description of Artificial Sequence: Synthetic oligonucleotide
  Antisense Strand to SEQ ID NO: 486573
uauucugcugagcuucgcc

SEQ ID NO: 486575 - RNA, 19 nt, Artificial Sequence
  Description of Artificial Sequence: Synthetic oligonucleotide
  Sense strand starting at position 2230 of SEQ ID NO: 317382
guaugaaaucgaggaagug

SEQ ID NO: 486576 - RNA, 19 nt, Artificial Sequence
  Description of Artificial Sequence: Synthetic oligonucleotide
  Antisense Strand to SEQ ID NO: 486575
cacuuccucgauuucauac

SEQ ID NO: 486577 - RNA, 19 nt, Artificial Sequence
  Description of Artificial Sequence: Synthetic oligonucleotide
  Sense strand starting at position 2262 of SEQ ID NO: 317382
ggcuauccagguuaauaac

SEQ ID NO: 486578 - RNA, 19 nt, Artificial Sequence
  Description of Artificial Sequence: Synthetic oligonucleotide
  Antisense Strand to SEQ ID NO: 486577
guuauuaaccuggauagcc

SEQ ID NO: 486579 - RNA, 19 nt, Artificial Sequence
  Description of Artificial Sequence: Synthetic oligonucleotide
  Sense strand starting at position 2514 of SEQ ID NO: 317382
uggcucaacuuaucugauu

SEQ ID NO: 486580 - RNA, 19 nt, Artificial Sequence
  Description of Artificial Sequence: Synthetic oligonucleotide
  Antisense Strand to SEQ ID NO: 486579
aaucagauaaguugagcca

SEQ ID NO: 486581 - RNA, 19 nt, Artificial Sequence
  Description of Artificial Sequence: Synthetic oligonucleotide
  Sense strand starting at position 2515 of SEQ ID NO: 317382
ggcucaacuuaucugauua

SEQ ID NO: 486582 - RNA, 19 nt, Artificial Sequence
  Description of Artificial Sequence: Synthetic oligonucleotide
  Antisense Strand to SEQ ID NO: 486581
uaaucagauaaguugagcc

SEQ ID NO: 486583 - RNA, 19 nt, Artificial Sequence
  Description of Artificial Sequence: Synthetic oligonucleotide
  Sense strand starting at position 2780 of SEQ ID NO: 317382
ugauuaaugccaugaacaa

SEQ ID NO: 486584 - RNA, 19 nt, Artificial Sequence
  Description of Artificial Sequence: Synthetic oligonucleotide
  Antisense Strand to SEQ ID NO: 486583
uuguucauggcauuaauca

SEQ ID NO: 486585 - RNA, 19 nt, Artificial Sequence
  Description of Artificial Sequence: Synthetic oligonucleotide
  Sense strand starting at position 2787 of SEQ ID NO: 317382
ugccaugaacaacguaaau

SEQ ID NO: 486586 - RNA, 19 nt, Artificial Sequence
  Description of Artificial Sequence: Synthetic oligonucleotide
  Antisense Strand to SEQ ID NO: 486585
auuuacguuguucauggca

SEQ ID NO: 486587 - RNA, 19 nt, Artificial Sequence
  Description of Artificial Sequence: Synthetic oligonucleotide
  Sense strand starting at position 2841 of SEQ ID NO: 317382
ggacucuaucaccagucau

SEQ ID NO: 486588 - RNA, 19 nt, Artificial Sequence
  Description of Artificial Sequence: Synthetic oligonucleotide
  Antisense Strand to SEQ ID NO: 486587
augacuggugauagagucc

SEQ ID NO: 486589 - RNA, 19 nt, Artificial Sequence
  Description of Artificial Sequence: Synthetic oligonucleotide
  Sense strand starting at position 2855 of SEQ ID NO: 317382
gucauauucuaucugauau

SEQ ID NO: 486590 - RNA, 19 nt, Artificial Sequence
  Description of Artificial Sequence: Synthetic oligonucleotide
  Antisense Strand to SEQ ID NO: 486589
auaucagauagaauaugac

SEQ ID NO: 486591 - RNA, 19 nt, Artificial Sequence
  Description of Artificial Sequence: Synthetic oligonucleotide
  Sense strand starting at position 2930 of SEQ ID NO: 317382
auguuaacacuuuggacuu

SEQ ID NO: 486592 - RNA, 19 nt, Artificial Sequence
  Description of Artificial Sequence: Synthetic oligonucleotide
  Antisense Strand to SEQ ID NO: 486591
aaguccaaaguguuaacau

SEQ ID NO: 486593 - RNA, 19 nt, Artificial Sequence
  Description of Artificial Sequence: Synthetic oligonucleotide
  Sense strand starting at position 2958 of SEQ ID NO: 317382
gauguucuauuugcuaagu

SEQ ID NO: 486594 - RNA, 19 nt, Artificial Sequence
  Description of Artificial Sequence: Synthetic oligonucleotide
  Antisense Strand to SEQ ID NO: 486593
acuuagcaaauagaacauc

SEQ ID NO: 486595 - RNA, 19 nt, Artificial Sequence
  Description of Artificial Sequence: Synthetic oligonucleotide
  Sense strand starting at position 2959 of SEQ ID NO: 317382
auguucuauuugcuaagua

SEQ ID NO: 486596 - RNA, 19 nt, Artificial Sequence
  Description of Artificial Sequence: Synthetic oligonucleotide
  Antisense Strand to SEQ ID NO: 486595
uacuuagcaaauagaacau

SEQ ID NO: 486597 - RNA, 19 nt, Artificial Sequence
  Description of Artificial Sequence: Synthetic oligonucleotide
  Sense strand starting at position 2963 of SEQ ID NO: 317382
ucuauuugcuaaguaguca

SEQ ID NO: 486598 - RNA, 19 nt, Artificial Sequence
  Description of Artificial Sequence: Synthetic oligonucleotide
  Antisense Strand to SEQ ID NO: 486597
ugacuacuuagcaaauaga

SEQ ID NO: 486599 - RNA, 19 nt, Artificial Sequence
  Description of Artificial Sequence: Synthetic oligonucleotide
  Sense strand starting at position 2987 of SEQ ID NO: 317382
uuaggauuccgucaguauu

SEQ ID NO: 486600 - RNA, 19 nt, Artificial Sequence
  Description of Artificial Sequence: Synthetic oligonucleotide
  Antisense Strand to SEQ ID NO: 486599
aauacugacggaauccuaa

SEQ ID NO: 486601 - RNA, 19 nt, Artificial Sequence
  Description of Artificial Sequence: Synthetic oligonucleotide
  Sense strand starting at position 2997 of SEQ ID NO: 317382
gucaguauugcguuucccu

SEQ ID NO: 486602 - RNA, 19 nt, Artificial Sequence
  Description of Artificial Sequence: Synthetic oligonucleotide
  Antisense Strand to SEQ ID NO: 486601
agggaaacgcaauacugac

SEQ ID NO: 486603 - RNA, 19 nt, Artificial Sequence
  Description of Artificial Sequence: Synthetic oligonucleotide
  Sense strand starting at position 3066 of SEQ ID NO: 317382
auaggaauccuguggaugu

SEQ ID NO: 486604 - RNA, 19 nt, Artificial Sequence
  Description of Artificial Sequence: Synthetic oligonucleotide
  Antisense Strand to SEQ ID NO: 486603
acauccacaggauuccuau

SEQ ID NO: 486605 - RNA, 19 nt, Artificial Sequence
  Description of Artificial Sequence: Synthetic oligonucleotide
  Sense strand starting at position 3070 of SEQ ID NO: 317382
gaauccuguggauguagau

SEQ ID NO: 486606 - RNA, 19 nt, Artificial Sequence
  Description of Artificial Sequence: Synthetic oligonucleotide
  Antisense Strand to SEQ ID NO: 486605
aucuacauccacaggauuc

SEQ ID NO: 486607 - RNA, 19 nt, Artificial Sequence
  Description of Artificial Sequence: Synthetic oligonucleotide
  Sense strand starting at position 3157 of SEQ ID NO: 317382
agcguauccauggaggaca

SEQ ID NO: 486608 - RNA, 19 nt, Artificial Sequence
  Description of Artificial Sequence: Synthetic oligonucleotide
  Antisense Strand to SEQ ID NO: 486607
uguccuccauggauacgcu

SEQ ID NO: 486609 - RNA, 19 nt, Artificial Sequence
  Description of Artificial Sequence: Synthetic oligonucleotide
  Sense strand starting at position 3183 of SEQ ID NO: 317382
ggcgcuuuccugcuuggga

SEQ ID NO: 486610 - RNA, 19 nt, Artificial Sequence
  Description of Artificial Sequence: Synthetic oligonucleotide
  Antisense Strand to SEQ ID NO: 486609
ucccaagcaggaaagcgcc

SEQ ID NO: 486611 - RNA, 19 nt, Artificial Sequence
  Description of Artificial Sequence: Synthetic oligonucleotide
  Sense strand starting at position 3254 of SEQ ID NO: 317382
guucccuucccugaaguua

SEQ ID NO: 486612 - RNA, 19 nt, Artificial Sequence
  Description of Artificial Sequence: Synthetic oligonucleotide
  Antisense Strand to SEQ ID NO: 486611
uaacuucagggaagggaac

SEQ ID NO: 486613 - RNA, 19 nt, Artificial Sequence
  Description of Artificial Sequence: Synthetic oligonucleotide
  Sense strand starting at position 3626 of SEQ ID NO: 317382
gucugacucccagacuguu

SEQ ID NO: 486614 - RNA, 19 nt, Artificial Sequence
  Description of Artificial Sequence: Synthetic oligonucleotide
  Antisense Strand to SEQ ID NO: 486613
aacagucugggagucagac

SEQ ID NO: 486615 - RNA, 19 nt, Artificial Sequence
  Description of Artificial Sequence: Synthetic oligonucleotide
  Sense strand starting at position 3632 of SEQ ID NO: 317382
cucccagacuguucuauca

SEQ ID NO: 486616 - RNA, 19 nt, Artificial Sequence
  Description of Artificial Sequence: Synthetic oligonucleotide
  Antisense Strand to SEQ ID NO: 486615
ugauagaacagucugggag

SEQ ID NO: 486617 - RNA, 19 nt, Artificial Sequence
  Description of Artificial Sequence: Synthetic oligonucleotide
  Sense strand starting at position 3687 of SEQ ID NO: 317382
cccuccaugcuuggaauau

SEQ ID NO: 486618 - RNA, 19 nt, Artificial Sequence
  Description of Artificial Sequence: Synthetic oligonucleotide
  Antisense Strand to SEQ ID NO: 486617
auauuccaagcauggaggg

SEQ ID NO: 486619 - RNA, 19 nt, Artificial Sequence
  Description of Artificial Sequence: Synthetic oligonucleotide
  Sense strand starting at position 3691 of SEQ ID NO: 317382
ccaugcuuggaauauucua

SEQ ID NO: 486620 - RNA, 19 nt, Artificial Sequence
  Description of Artificial Sequence: Synthetic oligonucleotide
  Antisense Strand to SEQ ID NO: 486619
uagaauauuccaagcaugg

SEQ ID NO: 486621 - RNA, 19 nt, Artificial Sequence
  Description of Artificial Sequence: Synthetic oligonucleotide
  Sense strand starting at position 3967 of SEQ ID NO: 317382
uugauugauugguuggcaa

SEQ ID NO: 486622 - RNA, 19 nt, Artificial Sequence
  Description of Artificial Sequence: Synthetic oligonucleotide
  Antisense Strand to SEQ ID NO: 486621
uugccaaccaaucaaucaa

SEQ ID NO: 486623 - RNA, 19 nt, Artificial Sequence
  Description of Artificial Sequence: Synthetic oligonucleotide
  Sense strand starting at position 3978 of SEQ ID NO: 317382
guuggcaaggcauaagaau

SEQ ID NO: 486624 - RNA, 19 nt, Artificial Sequence
  Description of Artificial Sequence: Synthetic oligonucleotide
  Antisense Strand to SEQ ID NO: 486623
auucuuaugccuugccaac

SEQ ID NO: 486625 - RNA, 19 nt, Artificial Sequence
  Description of Artificial Sequence: Synthetic oligonucleotide
  Sense strand starting at position 67 of SEQ ID NO: 317383
aauauugaagucugagguu

SEQ ID NO: 486626 - RNA, 19 nt, Artificial Sequence
  Description of Artificial Sequence: Synthetic oligonucleotide
  Antisense Strand to SEQ ID NO: 486625
aaccucagacuucaauauu

SEQ ID NO: 486627 - RNA, 19 nt, Artificial Sequence
  Description of Artificial Sequence: Synthetic oligonucleotide
  Sense strand starting at position 273 of SEQ ID NO: 317383
acuugaagggcguaugaaa

SEQ ID NO: 486628 - RNA, 19 nt, Artificial Sequence
  Description of Artificial Sequence: Synthetic oligonucleotide
  Antisense Strand to SEQ ID NO: 486627
uuucauacgcccuucaagu

SEQ ID NO: 486629 - RNA, 19 nt, Artificial Sequence
  Description of Artificial Sequence: Synthetic oligonucleotide
  Sense strand starting at position 414 of SEQ ID NO: 317383
ugauauugccagcagaaga

SEQ ID NO: 486630 - RNA, 19 nt, Artificial Sequence
  Description of Artificial Sequence: Synthetic oligonucleotide
  Antisense Strand to SEQ ID NO: 486629
ucuucugcuggcaauauca

SEQ ID NO: 486631 - RNA, 19 nt, Artificial Sequence
  Description of Artificial Sequence: Synthetic oligonucleotide
  Sense strand starting at position 424 of SEQ ID NO: 317383
agcagaagaguuggaaagu

SEQ ID NO: 486632 - RNA, 19 nt, Artificial Sequence
  Description of Artificial Sequence: Synthetic oligonucleotide
  Antisense Strand to SEQ ID NO: 486631
acuuuccaacucuucugcu

SEQ ID NO: 486633 - RNA, 19 nt, Artificial Sequence
  Description of Artificial Sequence: Synthetic oligonucleotide
  Sense strand starting at position 481 of SEQ ID NO: 317383
gugcaaagucuugaaggau

SEQ ID NO: 486634 - RNA, 19 nt, Artificial Sequence
  Description of Artificial Sequence: Synthetic oligonucleotide
  Antisense Strand to SEQ ID NO: 486633
auccuucaagacuuugcac

SEQ ID NO: 486635 - RNA, 19 nt, Artificial Sequence
  Description of Artificial Sequence: Synthetic oligonucleotide
  Sense strand starting at position 499 of SEQ ID NO: 317383
uagagauuaugucucugaa

SEQ ID NO: 486636 - RNA, 19 nt, Artificial Sequence
  Description of Artificial Sequence: Synthetic oligonucleotide
  Antisense Strand to SEQ ID NO: 486635
uucagagacauaaucucua

SEQ ID NO: 486637 - RNA, 19 nt, Artificial Sequence
  Description of Artificial Sequence: Synthetic oligonucleotide
  Sense strand starting at position 501 of SEQ ID NO: 317383
gagauuaugucucugaacc

SEQ ID NO: 486638 - RNA, 19 nt, Artificial Sequence
  Description of Artificial Sequence: Synthetic oligonucleotide
  Antisense Strand to SEQ ID NO: 486637
gguucagagacauaaucuc

SEQ ID NO: 486639 - RNA, 19 nt, Artificial Sequence
  Description of Artificial Sequence: Synthetic oligonucleotide
  Sense strand starting at position 502 of SEQ ID NO: 317383
agauuaugucucugaaccu

SEQ ID NO: 486640 - RNA, 19 nt, Artificial Sequence
  Description of Artificial Sequence: Synthetic oligonucleotide
  Antisense Strand to SEQ ID NO: 486639
agguucagagacauaaucu

SEQ ID NO: 486641 - RNA, 19 nt, Artificial Sequence
  Description of Artificial Sequence: Synthetic oligonucleotide
  Sense strand starting at position 511 of SEQ ID NO: 317383
cucugaaccugguucucaa

SEQ ID NO: 486642 - RNA, 19 nt, Artificial Sequence
  Description of Artificial Sequence: Synthetic oligonucleotide
  Antisense Strand to SEQ ID NO: 486641
uugagaaccagguucagag

SEQ ID NO: 486643 - RNA, 19 nt, Artificial Sequence
  Description of Artificial Sequence: Synthetic oligonucleotide
  Sense strand starting at position 551 of SEQ ID NO: 317383
ggagaugcgcuguacagaa

SEQ ID NO: 486644 - RNA, 19 nt, Artificial Sequence
  Description of Artificial Sequence: Synthetic oligonucleotide
  Antisense Strand to SEQ ID NO: 486643
uucuguacagcgcaucucc

SEQ ID NO: 486645 - RNA, 19 nt, Artificial Sequence
  Description of Artificial Sequence: Synthetic oligonucleotide
  Sense strand starting at position 580 of SEQ ID NO: 317383
aauggucaucuguguauag

SEQ ID NO: 486646 - RNA, 19 nt, Artificial Sequence
  Description of Artificial Sequence: Synthetic oligonucleotide
  Antisense Strand to SEQ ID NO: 486645
cuauacacagaugaccauu

SEQ ID NO: 486647 - RNA, 19 nt, Artificial Sequence
  Description of Artificial Sequence: Synthetic oligonucleotide
  Sense strand starting at position 832 of SEQ ID NO: 317383
uaagaaauccuuuggcagu

SEQ ID NO: 486648 - RNA, 19 nt, Artificial Sequence
  Description of Artificial Sequence: Synthetic oligonucleotide
  Antisense Strand to SEQ ID NO: 486647
acugccaaaggauuucuua

SEQ ID NO: 486649 - RNA, 19 nt, Artificial Sequence
  Description of Artificial Sequence: Synthetic oligonucleotide
  Sense strand starting at position 1095 of SEQ ID NO: 317383
cugagauucuuagucucua

SEQ ID NO: 486650 - RNA, 19 nt, Artificial Sequence
  Description of Artificial Sequence: Synthetic oligonucleotide
  Antisense Strand to SEQ ID NO: 486649
uagagacuaagaaucucag

SEQ ID NO: 486651 - RNA, 19 nt, Artificial Sequence
  Description of Artificial Sequence: Synthetic oligonucleotide
  Sense strand starting at position 1096 of SEQ ID NO: 317383
ugagauucuuagucucuau

SEQ ID NO: 486652 - RNA, 19 nt, Artificial Sequence
  Description of Artificial Sequence: Synthetic oligonucleotide
  Antisense Strand to SEQ ID NO: 486651
auagagacuaagaaucuca

SEQ ID NO: 486653 - RNA, 19 nt, Artificial Sequence
  Description of Artificial Sequence: Synthetic oligonucleotide
  Sense strand starting at position 1198 of SEQ ID NO: 317383
gcuuaugaacauugcuaca

SEQ ID NO: 486654 - RNA, 19 nt, Artificial Sequence
  Description of Artificial Sequence: Synthetic oligonucleotide
  Antisense Strand to SEQ ID NO: 486653
uguagcaauguucauaagc

SEQ ID NO: 486655 - RNA, 19 nt, Artificial Sequence
  Description of Artificial Sequence: Synthetic oligonucleotide
  Sense strand starting at position 1231 of SEQ ID NO: 317383
gguuccugcccauaucuau

SEQ ID NO: 486656 - RNA, 19 nt, Artificial Sequence
  Description of Artificial Sequence: Synthetic oligonucleotide
  Antisense Strand to SEQ ID NO: 486655
auagauaugggcaggaacc

SEQ ID NO: 486657 - RNA, 19 nt, Artificial Sequence
  Description of Artificial Sequence: Synthetic oligonucleotide
  Sense strand starting at position 1279 of SEQ ID NO: 317383
agacucaugucauccagau

SEQ ID NO: 486658 - RNA, 19 nt, Artificial Sequence
  Description of Artificial Sequence: Synthetic oligonucleotide
  Antisense Strand to SEQ ID NO: 486657
aucuggaugacaugagucu

SEQ ID NO: 486659 - RNA, 19 nt, Artificial Sequence
  Description of Artificial Sequence: Synthetic oligonucleotide
  Sense strand starting at position 1342 of SEQ ID NO: 317383
agaucucaguuacuacuua

SEQ ID NO: 486660 - RNA, 19 nt, Artificial Sequence
  Description of Artificial Sequence: Synthetic oligonucleotide
  Antisense Strand to SEQ ID NO: 486659
uaaguaguaacugagaucu

SEQ ID NO: 486661 - RNA, 19 nt, Artificial Sequence
  Description of Artificial Sequence: Synthetic oligonucleotide
  Sense strand starting at position 1494 of SEQ ID NO: 317383
aacugacuugaguaaagcu

SEQ ID NO: 486662 - RNA, 19 nt, Artificial Sequence
  Description of Artificial Sequence: Synthetic oligonucleotide
  Antisense Strand to SEQ ID NO: 486661
agcuuuacucaagucaguu

SEQ ID NO: 486663 - RNA, 19 nt, Artificial Sequence
  Description of Artificial Sequence: Synthetic oligonucleotide
  Sense strand starting at position 1501 of SEQ ID NO: 317383
uugaguaaagcugaaaugu

SEQ ID NO: 486664 - RNA, 19 nt, Artificial Sequence
  Description of Artificial Sequence: Synthetic oligonucleotide
  Antisense Strand to SEQ ID NO: 486663
acauuucagcuuuacucaa

SEQ ID NO: 486665 - RNA, 19 nt, Artificial Sequence
  Description of Artificial Sequence: Synthetic oligonucleotide
  Sense strand starting at position 1518 of SEQ ID NO: 317383
guugcugaaccagaaucua

SEQ ID NO: 486666 - RNA, 19 nt, Artificial Sequence
  Description of Artificial Sequence: Synthetic oligonucleotide
  Antisense Strand to SEQ ID NO: 486665
uagauucugguucagcaac

SEQ ID NO: 486667 - RNA, 19 nt, Artificial Sequence
  Description of Artificial Sequence: Synthetic oligonucleotide
  Sense strand starting at position 1601 of SEQ ID NO: 317383
acagcuuuguuccuaagag

SEQ ID NO: 486668 - RNA, 19 nt, Artificial Sequence
  Description of Artificial Sequence: Synthetic oligonucleotide
  Antisense Strand to SEQ ID NO: 486667
cucuuaggaacaaagcugu

SEQ ID NO: 486669 - RNA, 19 nt, Artificial Sequence
  Description of Artificial Sequence: Synthetic oligonucleotide
  Sense strand starting at position 1778 of SEQ ID NO: 317383
aaccuaucugcuugugaga

SEQ ID NO: 486670 - RNA, 19 nt, Artificial Sequence
  Description of Artificial Sequence: Synthetic oligonucleotide
  Antisense Strand to SEQ ID NO: 486669
ucucacaagcagauagguu

SEQ ID NO: 486671 - RNA, 19 nt, Artificial Sequence
  Description of Artificial Sequence: Synthetic oligonucleotide
  Sense strand starting at position 1835 of SEQ ID NO: 317383
ucagcuguccuagaacuca

SEQ ID NO: 486672 - RNA, 19 nt, Artificial Sequence
  Description of Artificial Sequence: Synthetic oligonucleotide
  Antisense Strand to SEQ ID NO: 486671
ugaguucuaggacagcuga

SEQ ID NO: 486673 - RNA, 19 nt, Artificial Sequence
  Description of Artificial Sequence: Synthetic oligonucleotide
  Sense strand starting at position 2065 of SEQ ID NO: 317383
uggcuauuaugacccacau

SEQ ID NO: 486674 - RNA, 19 nt, Artificial Sequence
  Description of Artificial Sequence: Synthetic oligonucleotide
  Antisense Strand to SEQ ID NO: 486673
augugggucauaauagcca

SEQ ID NO: 486675 - RNA, 19 nt, Artificial Sequence
  Description of Artificial Sequence: Synthetic oligonucleotide
  Sense strand starting at position 2186 of SEQ ID NO: 317383
ucauguaguucucugaaua

SEQ ID NO: 486676 - RNA, 19 nt, Artificial Sequence
  Description of Artificial Sequence: Synthetic oligonucleotide
  Antisense Strand to SEQ ID NO: 486675
uauucagagaacuacauga

SEQ ID NO: 486677 - RNA, 19 nt, Artificial Sequence
  Description of Artificial Sequence: Synthetic oligonucleotide
  Sense strand starting at position 2238 of SEQ ID NO: 317383
guucacaagcgagaaaugu

SEQ ID NO: 486678 - RNA, 19 nt, Artificial Sequence
  Description of Artificial Sequence: Synthetic oligonucleotide
  Antisense Strand to SEQ ID NO: 486677
acauuucucgcuugugaac

SEQ ID NO: 486679 - RNA, 19 nt, Artificial Sequence
  Description of Artificial Sequence: Synthetic oligonucleotide
  Sense strand starting at position 2331 of SEQ ID NO: 317383
aagcauaucggucauguuu

SEQ ID NO: 486680 - RNA, 19 nt, Artificial Sequence
  Description of Artificial Sequence: Synthetic oligonucleotide
  Antisense Strand to SEQ ID NO: 486679
aaacaugaccgauaugcuu

SEQ ID NO: 486681 - RNA, 19 nt, Artificial Sequence
  Description of Artificial Sequence: Synthetic oligonucleotide
  Sense strand starting at position 2389 of SEQ ID NO: 317383
acucuaugucucugauacu

SEQ ID NO: 486682 - RNA, 19 nt, Artificial Sequence
  Description of Artificial Sequence: Synthetic oligonucleotide
  Antisense Strand to SEQ ID NO: 486681
aguaucagagacauagagu

SEQ ID NO: 486683 - RNA, 19 nt, Artificial Sequence
  Description of Artificial Sequence: Synthetic oligonucleotide
  Sense strand starting at position 2821 of SEQ ID NO: 317383
uagggagcugcugagauaa

SEQ ID NO: 486684 - RNA, 19 nt, Artificial Sequence
  Description of Artificial Sequence: Synthetic oligonucleotide
  Antisense Strand to SEQ ID NO: 486683
uuaucucagcagcucccua

SEQ ID NO: 486685 - RNA, 19 nt, Artificial Sequence
  Description of Artificial Sequence: Synthetic oligonucleotide
  Sense strand starting at position 2894 of SEQ ID NO: 317383
gcagauaugcagcauuauc

SEQ ID NO: 486686 - RNA, 19 nt, Artificial Sequence
  Description of Artificial Sequence: Synthetic oligonucleotide
  Antisense Strand to SEQ ID NO: 486685
gauaaugcugcauaucugc

SEQ ID NO: 486687 - RNA, 19 nt, Artificial Sequence
  Description of Artificial Sequence: Synthetic oligonucleotide
  Sense strand starting at position 2998 of SEQ ID NO: 317383
gugaucauuguauacuaac

SEQ ID NO: 486688 - RNA, 19 nt, Artificial Sequence
  Description of Artificial Sequence: Synthetic oligonucleotide
  Antisense Strand to SEQ ID NO: 486687
guuaguauacaaugaucac

SEQ ID NO: 486689 - RNA, 19 nt, Artificial Sequence
  Description of Artificial Sequence: Synthetic oligonucleotide
  Sense strand starting at position 3071 of SEQ ID NO: 317383
ggcgaagcucagcagaaua

SEQ ID NO: 486690 - RNA, 19 nt, Artificial Sequence
  Description of Artificial Sequence: Synthetic oligonucleotide
  Antisense Strand to SEQ ID NO: 486689
uauucugcugagcuucgcc

SEQ ID NO: 486691 - RNA, 19 nt, Artificial Sequence
  Description of Artificial Sequence: Synthetic oligonucleotide
  Sense strand starting at position 3382 of SEQ ID NO: 317383
guaugaaaucgaggaagug

SEQ ID NO: 486692 - RNA, 19 nt, Artificial Sequence
  Description of Artificial Sequence: Synthetic oligonucleotide
  Antisense Strand to SEQ ID NO: 486691
cacuuccucgauuucauac

SEQ ID NO: 486693 - RNA, 19 nt, Artificial Sequence
  Description of Artificial Sequence: Synthetic oligonucleotide
  Sense strand starting at position 3414 of SEQ ID NO: 317383
ggcuauccagguuaauaac

SEQ ID NO: 486694 - RNA, 19 nt, Artificial Sequence
  Description of Artificial Sequence: Synthetic oligonucleotide
  Antisense Strand to SEQ ID NO: 486693
guuauuaaccuggauagcc

SEQ ID NO: 486695 - RNA, 19 nt, Artificial Sequence
  Description of Artificial Sequence: Synthetic oligonucleotide
  Sense strand starting at position 3582 of SEQ ID NO: 317383
cccugugaauugcuauaua

SEQ ID NO: 486696 - RNA, 19 nt, Artificial Sequence
  Description of Artificial Sequence: Synthetic oligonucleotide
  Antisense Strand to SEQ ID NO: 486695
uauauagcaauucacaggg

SEQ ID NO: 486697 - RNA, 19 nt, Artificial Sequence
  Description of Artificial Sequence: Synthetic oligonucleotide
  Sense strand starting at position 3666 of SEQ ID NO: 317383
uggcucaacuuaucugauu

SEQ ID NO: 486698 - RNA, 19 nt, Artificial Sequence
  Description of Artificial Sequence: Synthetic oligonucleotide
  Antisense Strand to SEQ ID NO: 486697
aaucagauaaguugagcca

SEQ ID NO: 486699 - RNA, 19 nt, Artificial Sequence
  Description of Artificial Sequence: Synthetic oligonucleotide
  Sense strand starting at position 3667 of SEQ ID NO: 317383
ggcucaacuuaucugauua

SEQ ID NO: 486700 - RNA, 19 nt, Artificial Sequence
  Description of Artificial Sequence: Synthetic oligonucleotide
  Antisense Strand to SEQ ID NO: 486699
uaaucagauaaguugagcc

SEQ ID NO: 486701 - RNA, 19 nt, Artificial Sequence
  Description of Artificial Sequence: Synthetic oligonucleotide
  Sense strand starting at position 3932 of SEQ ID NO: 317383
ugauuaaugccaugaacaa

SEQ ID NO: 486702 - RNA, 19 nt, Artificial Sequence
  Description of Artificial Sequence: Synthetic oligonucleotide
  Antisense Strand to SEQ ID NO: 486701
uuguucauggcauuaauca

SEQ ID NO: 486703 - RNA, 19 nt, Artificial Sequence
  Description of Artificial Sequence: Synthetic oligonucleotide
  Sense strand starting at position 3939 of SEQ ID NO: 317383
ugccaugaacaacguaaau

SEQ ID NO: 486704 - RNA, 19 nt, Artificial Sequence
  Description of Artificial Sequence: Synthetic oligonucleotide
  Antisense Strand to SEQ ID NO: 486703
auuuacguuguucauggca

SEQ ID NO: 486705 - RNA, 19 nt, Artificial Sequence
  Description of Artificial Sequence: Synthetic oligonucleotide
  Sense strand starting at position 97 of SEQ ID NO: 317384
uuggauuuauuauaggaca

SEQ ID NO: 486706 - RNA, 19 nt, Artificial Sequence
  Description of Artificial Sequence: Synthetic oligonucleotide
  Antisense Strand to SEQ ID NO: 486705
uguccuauaauaaauccaa

SEQ ID NO: 486707 - RNA, 19 nt, Artificial Sequence
  Description of Artificial Sequence: Synthetic oligonucleotide
  Sense strand starting at position 100 of SEQ ID NO: 317384
gauuuauuauaggacaguu

SEQ ID NO: 486708 - RNA, 19 nt, Artificial Sequence
  Description of Artificial Sequence: Synthetic oligonucleotide
  Antisense Strand to SEQ ID NO: 486707
aacuguccuauaauaaauc

SEQ ID NO: 486709 - RNA, 19 nt, Artificial Sequence
  Description of Artificial Sequence: Synthetic oligonucleotide
  Sense strand starting at position 277 of SEQ ID NO: 317384
aauauugaagucugagguu

SEQ ID NO: 486710 - RNA, 19 nt, Artificial Sequence
  Description of Artificial Sequence: Synthetic oligonucleotide
  Antisense Strand to SEQ ID NO: 486709
aaccucagacuucaauauu

SEQ ID NO: 486711 - RNA, 19 nt, Artificial Sequence
  Description of Artificial Sequence: Synthetic oligonucleotide
  Sense strand starting at position 483 of SEQ ID NO: 317384
acuugaagggcguaugaaa

SEQ ID NO: 486712 - RNA, 19 nt, Artificial Sequence
  Description of Artificial Sequence: Synthetic oligonucleotide
  Antisense Strand to SEQ ID NO: 486711
uuucauacgcccuucaagu

SEQ ID NO: 486713 - RNA, 19 nt, Artificial Sequence
  Description of Artificial Sequence: Synthetic oligonucleotide
  Sense strand starting at position 624 of SEQ ID NO: 317384
ugauauugccagcagaaga

SEQ ID NO: 486714 - RNA, 19 nt, Artificial Sequence
  Description of Artificial Sequence: Synthetic oligonucleotide
  Antisense Strand to SEQ ID NO: 486713
ucuucugcuggcaauauca

SEQ ID NO: 486715 - RNA, 19 nt, Artificial Sequence
  Description of Artificial Sequence: Synthetic oligonucleotide
  Sense strand starting at position 634 of SEQ ID NO: 317384
agcagaagaguuggaaagu

SEQ ID NO: 486716 - RNA, 19 nt, Artificial Sequence
  Description of Artificial Sequence: Synthetic oligonucleotide
  Antisense Strand to SEQ ID NO: 486715
acuuuccaacucuucugcu

SEQ ID NO: 486717 - RNA, 19 nt, Artificial Sequence
  Description of Artificial Sequence: Synthetic oligonucleotide
  Sense strand starting at position 691 of SEQ ID NO: 317384
gugcaaagucuugaaggau

SEQ ID NO: 486718 - RNA, 19 nt, Artificial Sequence
  Description of Artificial Sequence: Synthetic oligonucleotide
  Antisense Strand to SEQ ID NO: 486717
auccuucaagacuuugcac

SEQ ID NO: 486719 - RNA, 19 nt, Artificial Sequence
  Description of Artificial Sequence: Synthetic oligonucleotide
  Sense strand starting at position 709 of SEQ ID NO: 317384
uagagauuaugucucugaa

SEQ ID NO: 486720 - RNA, 19 nt, Artificial Sequence
  Description of Artificial Sequence: Synthetic oligonucleotide
  Antisense Strand to SEQ ID NO: 486719
uucagagacauaaucucua

SEQ ID NO: 486721 - RNA, 19 nt, Artificial Sequence
  Description of Artificial Sequence: Synthetic oligonucleotide
  Sense strand starting at position 711 of SEQ ID NO: 317384
gagauuaugucucugaacc

SEQ ID NO: 486722 - RNA, 19 nt, Artificial Sequence
  Description of Artificial Sequence: Synthetic oligonucleotide
  Antisense Strand to SEQ ID NO: 486721
gguucagagacauaaucuc

SEQ ID NO: 486723 - RNA, 19 nt, Artificial Sequence
  Description of Artificial Sequence: Synthetic oligonucleotide
  Sense strand starting at position 712 of SEQ ID NO: 317384
agauuaugucucugaaccu

SEQ ID NO: 486724 - RNA, 19 nt, Artificial Sequence
  Description of Artificial Sequence: Synthetic oligonucleotide
  Antisense Strand to SEQ ID NO: 486723
agguucagagacauaaucu

SEQ ID NO: 486725 - RNA, 19 nt, Artificial Sequence
  Description of Artificial Sequence: Synthetic oligonucleotide
  Sense strand starting at position 721 of SEQ ID NO: 317384
cucugaaccugguucucaa

SEQ ID NO: 486726 - RNA, 19 nt, Artificial Sequence
  Description of Artificial Sequence: Synthetic oligonucleotide
  Antisense Strand to SEQ ID NO: 486725
uugagaaccagguucagag

SEQ ID NO: 486727 - RNA, 19 nt, Artificial Sequence
  Description of Artificial Sequence: Synthetic oligonucleotide
  Sense strand starting at position 761 of SEQ ID NO: 317384
ggagaugcgcuguacagaa

SEQ ID NO: 486728 - RNA, 19 nt, Artificial Sequence
  Description of Artificial Sequence: Synthetic oligonucleotide
  Antisense Strand to SEQ ID NO: 486727
uucuguacagcgcaucucc

SEQ ID NO: 486729 - RNA, 19 nt, Artificial Sequence
  Description of Artificial Sequence: Synthetic oligonucleotide
  Sense strand starting at position 790 of SEQ ID NO: 317384
aauggucaucuguguauag

SEQ ID NO: 486730 - RNA, 19 nt, Artificial Sequence
  Description of Artificial Sequence: Synthetic oligonucleotide
  Antisense Strand to SEQ ID NO: 486729
cuauacacagaugaccauu

SEQ ID NO: 486731 - RNA, 19 nt, Artificial Sequence
  Description of Artificial Sequence: Synthetic oligonucleotide
  Sense strand starting at position 1042 of SEQ ID NO: 317384
uaagaaauccuuuggcagu

SEQ ID NO: 486732 - RNA, 19 nt, Artificial Sequence
  Description of Artificial Sequence: Synthetic oligonucleotide
  Antisense Strand to SEQ ID NO: 486731
acugccaaaggauuucuua

SEQ ID NO: 486733 - RNA, 19 nt, Artificial Sequence
  Description of Artificial Sequence: Synthetic oligonucleotide
  Sense strand starting at position 1305 of SEQ ID NO: 317384
cugagauucuuagucucua

SEQ ID NO: 486734 - RNA, 19 nt, Artificial Sequence
  Description of Artificial Sequence: Synthetic oligonucleotide
  Antisense Strand to SEQ ID NO: 486733
uagagacuaagaaucucag

SEQ ID NO: 486735 - RNA, 19 nt, Artificial Sequence
  Description of Artificial Sequence: Synthetic oligonucleotide
  Sense strand starting at position 1306 of SEQ ID NO: 317384
ugagauucuuagucucuau

SEQ ID NO: 486736 - RNA, 19 nt, Artificial Sequence
  Description of Artificial Sequence: Synthetic oligonucleotide
  Antisense Strand to SEQ ID NO: 486735
auagagacuaagaaucuca

SEQ ID NO: 486737 - RNA, 19 nt, Artificial Sequence
  Description of Artificial Sequence: Synthetic oligonucleotide
  Sense strand starting at position 1408 of SEQ ID NO: 317384
gcuuaugaacauugcuaca

SEQ ID NO: 486738 - RNA, 19 nt, Artificial Sequence
  Description of Artificial Sequence: Synthetic oligonucleotide
  Antisense Strand to SEQ ID NO: 486737
uguagcaauguucauaagc

SEQ ID NO: 486739 - RNA, 19 nt, Artificial Sequence
  Description of Artificial Sequence: Synthetic oligonucleotide
  Sense strand starting at position 1441 of SEQ ID NO: 317384
gguuccugcccauaucuau

SEQ ID NO: 486740 - RNA, 19 nt, Artificial Sequence
  Description of Artificial Sequence: Synthetic oligonucleotide
  Antisense Strand to SEQ ID NO: 486739
auagauaugggcaggaacc

SEQ ID NO: 486741 - RNA, 19 nt, Artificial Sequence
  Description of Artificial Sequence: Synthetic oligonucleotide
  Sense strand starting at position 1489 of SEQ ID NO: 317384
agacucaugucauccagau

SEQ ID NO: 486742 - RNA, 19 nt, Artificial Sequence
  Description of Artificial Sequence: Synthetic oligonucleotide
  Antisense Strand to SEQ ID NO: 486741
aucuggaugacaugagucu

SEQ ID NO: 486743 - RNA, 19 nt, Artificial Sequence
  Description of Artificial Sequence: Synthetic oligonucleotide
  Sense strand starting at position 1552 of SEQ ID NO: 317384
agaucucaguuacuacuua

SEQ ID NO: 486744 - RNA, 19 nt, Artificial Sequence
  Description of Artificial Sequence: Synthetic oligonucleotide
  Antisense Strand to SEQ ID NO: 486743
uaaguaguaacugagaucu

SEQ ID NO: 486745 - RNA, 19 nt, Artificial Sequence
  Description of Artificial Sequence: Synthetic oligonucleotide
  Sense strand starting at position 1704 of SEQ ID NO: 317384
aacugacuugaguaaagcu

SEQ ID NO: 486746 - RNA, 19 nt, Artificial Sequence
  Description of Artificial Sequence: Synthetic oligonucleotide
  Antisense Strand to SEQ ID NO: 486745
agcuuuacucaagucaguu

SEQ ID NO: 486747 - RNA, 19 nt, Artificial Sequence
  Description of Artificial Sequence: Synthetic oligonucleotide
  Sense strand starting at position 1711 of SEQ ID NO: 317384
uugaguaaagcugaaaugu

SEQ ID NO: 486748 - RNA, 19 nt, Artificial Sequence
  Description of Artificial Sequence: Synthetic oligonucleotide
  Antisense Strand to SEQ ID NO: 486747
acauuucagcuuuacucaa

SEQ ID NO: 486749 - RNA, 19 nt, Artificial Sequence
  Description of Artificial Sequence: Synthetic oligonucleotide
  Sense strand starting at position 1728 of SEQ ID NO: 317384
guugcugaaccagaaucua

SEQ ID NO: 486750 - RNA, 19 nt, Artificial Sequence
  Description of Artificial Sequence: Synthetic oligonucleotide
  Antisense Strand to SEQ ID NO: 486749
uagauucugguucagcaac

SEQ ID NO: 486751 - RNA, 19 nt, Artificial Sequence
  Description of Artificial Sequence: Synthetic oligonucleotide
  Sense strand starting at position 1811 of SEQ ID NO: 317384
acagcuuuguuccuaagag

SEQ ID NO: 486752 - RNA, 19 nt, Artificial Sequence
  Description of Artificial Sequence: Synthetic oligonucleotide
  Antisense Strand to SEQ ID NO: 486751
cucuuaggaacaaagcugu

SEQ ID NO: 486753 - RNA, 19 nt, Artificial Sequence
  Description of Artificial Sequence: Synthetic oligonucleotide
  Sense strand starting at position 1988 of SEQ ID NO: 317384
aaccuaucugcuugugaga

SEQ ID NO: 486754 - RNA, 19 nt, Artificial Sequence
  Description of Artificial Sequence: Synthetic oligonucleotide
  Antisense Strand to SEQ ID NO: 486753
ucucacaagcagauagguu

SEQ ID NO: 486755 - RNA, 19 nt, Artificial Sequence
  Description of Artificial Sequence: Synthetic oligonucleotide
  Sense strand starting at position 2045 of SEQ ID NO: 317384
ucagcuguccuagaacuca

SEQ ID NO: 486756 - RNA, 19 nt, Artificial Sequence
  Description of Artificial Sequence: Synthetic oligonucleotide
  Antisense Strand to SEQ ID NO: 486755
ugaguucuaggacagcuga

SEQ ID NO: 486757 - RNA, 19 nt, Artificial Sequence
  Description of Artificial Sequence: Synthetic oligonucleotide
  Sense strand starting at position 2275 of SEQ ID NO: 317384
uggcuauuaugacccacau

SEQ ID NO: 486758 - RNA, 19 nt, Artificial Sequence
  Description of Artificial Sequence: Synthetic oligonucleotide
  Antisense Strand to SEQ ID NO: 486757
augugggucauaauagcca

SEQ ID NO: 486759 - RNA, 19 nt, Artificial Sequence
  Description of Artificial Sequence: Synthetic oligonucleotide
  Sense strand starting at position 2396 of SEQ ID NO: 317384
ucauguaguucucugaaua

SEQ ID NO: 486760 - RNA, 19 nt, Artificial Sequence
  Description of Artificial Sequence: Synthetic oligonucleotide
  Antisense Strand to SEQ ID NO: 486759
uauucagagaacuacauga

SEQ ID NO: 486761 - RNA, 19 nt, Artificial Sequence
  Description of Artificial Sequence: Synthetic oligonucleotide
  Sense strand starting at position 2448 of SEQ ID NO: 317384
guucacaagcgagaaaugu

SEQ ID NO: 486762 - RNA, 19 nt, Artificial Sequence
  Description of Artificial Sequence: Synthetic oligonucleotide
  Antisense Strand to SEQ ID NO: 486761
acauuucucgcuugugaac

SEQ ID NO: 486763 - RNA, 19 nt, Artificial Sequence
  Description of Artificial Sequence: Synthetic oligonucleotide
  Sense strand starting at position 2541 of SEQ ID NO: 317384
aagcauaucggucauguuu

SEQ ID NO: 486764 - RNA, 19 nt, Artificial Sequence
  Description of Artificial Sequence: Synthetic oligonucleotide
  Antisense Strand to SEQ ID NO: 486763
aaacaugaccgauaugcuu

SEQ ID NO: 486765 - RNA, 19 nt, Artificial Sequence
  Description of Artificial Sequence: Synthetic oligonucleotide
  Sense strand starting at position 2599 of SEQ ID NO: 317384
acucuaugucucugauacu

SEQ ID NO: 486766 - RNA, 19 nt, Artificial Sequence
  Description of Artificial Sequence: Synthetic oligonucleotide
  Antisense Strand to SEQ ID NO: 486765
aguaucagagacauagagu

SEQ ID NO: 486767 - RNA, 19 nt, Artificial Sequence
  Description of Artificial Sequence: Synthetic oligonucleotide
  Sense strand starting at position 3031 of SEQ ID NO: 317384
uagggagcugcugagauaa

SEQ ID NO: 486768 - RNA, 19 nt, Artificial Sequence
  Description of Artificial Sequence: Synthetic oligonucleotide
  Antisense Strand to SEQ ID NO: 486767
uuaucucagcagcucccua

SEQ ID NO: 486769 - RNA, 19 nt, Artificial Sequence
  Description of Artificial Sequence: Synthetic oligonucleotide
  Sense strand starting at position 3104 of SEQ ID NO: 317384
gcagauaugcagcauuauc

SEQ ID NO: 486770 - RNA, 19 nt, Artificial Sequence
  Description of Artificial Sequence: Synthetic oligonucleotide
  Antisense Strand to SEQ ID NO: 486769
gauaaugcugcauaucugc

SEQ ID NO: 486771 - RNA, 19 nt, Artificial Sequence
  Description of Artificial Sequence: Synthetic oligonucleotide
  Sense strand starting at position 3208 of SEQ ID NO: 317384
gugaucauuguauacuaac

SEQ ID NO: 486772 - RNA, 19 nt, Artificial Sequence
  Description of Artificial Sequence: Synthetic oligonucleotide
  Antisense Strand to SEQ ID NO: 486771
guuaguauacaaugaucac

SEQ ID NO: 486773 - RNA, 19 nt, Artificial Sequence
  Description of Artificial Sequence: Synthetic oligonucleotide
  Sense strand starting at position 3281 of SEQ ID NO: 317384
ggcgaagcucagcagaaua

SEQ ID NO: 486774 - RNA, 19 nt, Artificial Sequence
  Description of Artificial Sequence: Synthetic oligonucleotide
  Antisense Strand to SEQ ID NO: 486773
uauucugcugagcuucgcc

SEQ ID NO: 486775 - RNA, 19 nt, Artificial Sequence
  Description of Artificial Sequence: Synthetic oligonucleotide
  Sense strand starting at position 3592 of SEQ ID NO: 317384
guaugaaaucgaggaagug

SEQ ID NO: 486776 - RNA, 19 nt, Artificial Sequence
  Description of Artificial Sequence: Synthetic oligonucleotide
  Antisense Strand to SEQ ID NO: 486775
cacuuccucgauuucauac

SEQ ID NO: 486777 - RNA, 19 nt, Artificial Sequence
  Description of Artificial Sequence: Synthetic oligonucleotide
  Sense strand starting at position 3624 of SEQ ID NO: 317384
ggcuauccagguuaauaac

SEQ ID NO: 486778 - RNA, 19 nt, Artificial Sequence
  Description of Artificial Sequence: Synthetic oligonucleotide
  Antisense Strand to SEQ ID NO: 486777
guuauuaaccuggauagcc

SEQ ID NO: 486779 - RNA, 19 nt, Artificial Sequence
  Description of Artificial Sequence: Synthetic oligonucleotide
  Sense strand starting at position 3792 of SEQ ID NO: 317384
cccugugaauugcuauaua

SEQ ID NO: 486780 - RNA, 19 nt, Artificial Sequence
  Description of Artificial Sequence: Synthetic oligonucleotide
  Antisense Strand to SEQ ID NO: 486779
uauauagcaauucacaggg

SEQ ID NO: 486781 - RNA, 19 nt, Artificial Sequence
  Description of Artificial Sequence: Synthetic oligonucleotide
  Sense strand starting at position 3876 of SEQ ID NO: 317384
uggcucaacuuaucugauu

SEQ ID NO: 486782 - RNA, 19 nt, Artificial Sequence
  Description of Artificial Sequence: Synthetic oligonucleotide
  Antisense Strand to SEQ ID NO: 486781
aaucagauaaguugagcca

SEQ ID NO: 486783 - RNA, 19 nt, Artificial Sequence
  Description of Artificial Sequence: Synthetic oligonucleotide
  Sense strand starting at position 3877 of SEQ ID NO: 317384
ggcucaacuuaucugauua

SEQ ID NO: 486784 - RNA, 19 nt, Artificial Sequence
  Description of Artificial Sequence: Synthetic oligonucleotide
  Antisense Strand to SEQ ID NO: 486783
uaaucagauaaguugagcc

SEQ ID NO: 486785 - RNA, 19 nt, Artificial Sequence
  Description of Artificial Sequence: Synthetic oligonucleotide
  Sense strand starting at position 12 of SEQ ID NO: 317385
acagacuucuggcuacuaa

SEQ ID NO: 486786 - RNA, 19 nt, Artificial Sequence
  Description of Artificial Sequence: Synthetic oligonucleotide
  Antisense Strand to SEQ ID NO: 486785
uuaguagccagaagucugu

SEQ ID NO: 486787 - RNA, 19 nt, Artificial Sequence
  Description of Artificial Sequence: Synthetic oligonucleotide
  Sense strand starting at position 345 of SEQ ID NO: 317385
augaacuguccugaagucu

SEQ ID NO: 486788 - RNA, 19 nt, Artificial Sequence
  Description of Artificial Sequence: Synthetic oligonucleotide
  Antisense Strand to SEQ ID NO: 486787
agacuucaggacaguucau

SEQ ID NO: 486789 - RNA, 19 nt, Artificial Sequence
  Description of Artificial Sequence: Synthetic oligonucleotide
  Sense strand starting at position 822 of SEQ ID NO: 317385
cuaauuccacacgagcaau

SEQ ID NO: 486790 - RNA, 19 nt, Artificial Sequence
  Description of Artificial Sequence: Synthetic oligonucleotide
  Antisense Strand to SEQ ID NO: 486789
auugcucguguggaauuag

SEQ ID NO: 486791 - RNA, 19 nt, Artificial Sequence
  Description of Artificial Sequence: Synthetic oligonucleotide
  Sense strand starting at position 884 of SEQ ID NO: 317385
gcucauugcccuuaaagaa

SEQ ID NO: 486792 - RNA, 19 nt, Artificial Sequence
  Description of Artificial Sequence: Synthetic oligonucleotide
  Antisense Strand to SEQ ID NO: 486791
uucuuuaagggcaaugagc

SEQ ID NO: 486793 - RNA, 19 nt, Artificial Sequence
  Description of Artificial Sequence: Synthetic oligonucleotide
  Sense strand starting at position 916 of SEQ ID NO: 317385
auauuaucuuuacucaggu

SEQ ID NO: 486794 - RNA, 19 nt, Artificial Sequence
  Description of Artificial Sequence: Synthetic oligonucleotide
  Antisense Strand to SEQ ID NO: 486793
accugaguaaagauaauau

SEQ ID NO: 486795 - RNA, 19 nt, Artificial Sequence
  Description of Artificial Sequence: Synthetic oligonucleotide
  Sense strand starting at position 1046 of SEQ ID NO: 317385
ggcaaucaggcuuaauuag

SEQ ID NO: 486796 - RNA, 19 nt, Artificial Sequence
  Description of Artificial Sequence: Synthetic oligonucleotide
  Antisense Strand to SEQ ID NO: 486795
cuaauuaagccugauugcc

SEQ ID NO: 486797 - RNA, 19 nt, Artificial Sequence
  Description of Artificial Sequence: Synthetic oligonucleotide
  Sense strand starting at position 1070 of SEQ ID NO: 317385
ugauccauggcuuagucau

SEQ ID NO: 486798 - RNA, 19 nt, Artificial Sequence
  Description of Artificial Sequence: Synthetic oligonucleotide
  Antisense Strand to SEQ ID NO: 486797
augacuaagccauggauca

SEQ ID NO: 486799 - RNA, 19 nt, Artificial Sequence
  Description of Artificial Sequence: Synthetic oligonucleotide
  Sense strand starting at position 1115 of SEQ ID NO: 317385
uuaugagagcuuuaagcaa

SEQ ID NO: 486800 - RNA, 19 nt, Artificial Sequence
  Description of Artificial Sequence: Synthetic oligonucleotide
  Antisense Strand to SEQ ID NO: 486799
uugcuuaaagcucucauaa

SEQ ID NO: 486801 - RNA, 19 nt, Artificial Sequence
  Description of Artificial Sequence: Synthetic oligonucleotide
  Sense strand starting at position 1340 of SEQ ID NO: 317385
gcucuauacagaggaagua

SEQ ID NO: 486802 - RNA, 19 nt, Artificial Sequence
  Description of Artificial Sequence: Synthetic oligonucleotide
  Antisense Strand to SEQ ID NO: 486801
uacuuccucuguauagagc

SEQ ID NO: 486803 - RNA, 19 nt, Artificial Sequence
  Description of Artificial Sequence: Synthetic oligonucleotide
  Sense strand starting at position 1376 of SEQ ID NO: 317385
acauguagagauuguuuau

SEQ ID NO: 486804 - RNA, 19 nt, Artificial Sequence
  Description of Artificial Sequence: Synthetic oligonucleotide
  Antisense Strand to SEQ ID NO: 486803
auaaacaaucucuacaugu

SEQ ID NO: 486805 - RNA, 19 nt, Artificial Sequence
  Description of Artificial Sequence: Synthetic oligonucleotide
  Sense strand starting at position 1413 of SEQ ID NO: 317385
ucuugaacuccagagguuu

SEQ ID NO: 486806 - RNA, 19 nt, Artificial Sequence
  Description of Artificial Sequence: Synthetic oligonucleotide
  Antisense Strand to SEQ ID NO: 486805
aaaccucuggaguucaaga

SEQ ID NO: 486807 - RNA, 19 nt, Artificial Sequence
  Description of Artificial Sequence: Synthetic oligonucleotide
  Sense strand starting at position 1428 of SEQ ID NO: 317385
guuuaagauuaaguccaau

SEQ ID NO: 486808 - RNA, 19 nt, Artificial Sequence
  Description of Artificial Sequence: Synthetic oligonucleotide
  Antisense Strand to SEQ ID NO: 486807
auuggacuuaaucuuaaac

SEQ ID NO: 486809 - RNA, 19 nt, Artificial Sequence
  Description of Artificial Sequence: Synthetic oligonucleotide
  Sense strand starting at position 1444 of SEQ ID NO: 317385
aauccaagugucugaagga

SEQ ID NO: 486810 - RNA, 19 nt, Artificial Sequence
  Description of Artificial Sequence: Synthetic oligonucleotide
  Antisense Strand to SEQ ID NO: 486809
uccuucagacacuuggauu

SEQ ID NO: 486811 - RNA, 19 nt, Artificial Sequence
  Description of Artificial Sequence: Synthetic oligonucleotide
  Sense strand starting at position 1728 of SEQ ID NO: 317385
acccaaaguugacuggaau

SEQ ID NO: 486812 - RNA, 19 nt, Artificial Sequence
  Description of Artificial Sequence: Synthetic oligonucleotide
  Antisense Strand to SEQ ID NO: 486811
auuccagucaacuuugggu

SEQ ID NO: 486813 - RNA, 19 nt, Artificial Sequence
  Description of Artificial Sequence: Synthetic oligonucleotide
  Sense strand starting at position 1814 of SEQ ID NO: 317385
cuacuuaugcuuuauugag

SEQ ID NO: 486814 - RNA, 19 nt, Artificial Sequence
  Description of Artificial Sequence: Synthetic oligonucleotide
  Antisense Strand to SEQ ID NO: 486813
cucaauaaagcauaaguag

SEQ ID NO: 486815 - RNA, 19 nt, Artificial Sequence
  Description of Artificial Sequence: Synthetic oligonucleotide
  Sense strand starting at position 1816 of SEQ ID NO: 317385
acuuaugcuuuauugagaa

SEQ ID NO: 486816 - RNA, 19 nt, Artificial Sequence
  Description of Artificial Sequence: Synthetic oligonucleotide
  Antisense Strand to SEQ ID NO: 486815
uucucaauaaagcauaagu

SEQ ID NO: 486817 - RNA, 19 nt, Artificial Sequence
  Description of Artificial Sequence: Synthetic oligonucleotide
  Sense strand starting at position 1992 of SEQ ID NO: 317385
uugaaagcuacuggguuaa

SEQ ID NO: 486818 - RNA, 19 nt, Artificial Sequence
  Description of Artificial Sequence: Synthetic oligonucleotide
  Antisense Strand to SEQ ID NO: 486817
uuaacccaguagcuuucaa

SEQ ID NO: 486819 - RNA, 19 nt, Artificial Sequence
  Description of Artificial Sequence: Synthetic oligonucleotide
  Sense strand starting at position 2022 of SEQ ID NO: 317385
ucuuaucuauuggcagaga

SEQ ID NO: 486820 - RNA, 19 nt, Artificial Sequence
  Description of Artificial Sequence: Synthetic oligonucleotide
  Antisense Strand to SEQ ID NO: 486819
ucucugccaauagauaaga

SEQ ID NO: 486821 - RNA, 19 nt, Artificial Sequence
  Description of Artificial Sequence: Synthetic oligonucleotide
  Sense strand starting at position 2044 of SEQ ID NO: 317385
gggaccauucagugacaug

SEQ ID NO: 486822 - RNA, 19 nt, Artificial Sequence
  Description of Artificial Sequence: Synthetic oligonucleotide
  Antisense Strand to SEQ ID NO: 486821
caugucacugaaugguccc

SEQ ID NO: 486823 - RNA, 19 nt, Artificial Sequence
  Description of Artificial Sequence: Synthetic oligonucleotide
  Sense strand starting at position 2130 of SEQ ID NO: 317385
acuggcaaugacugacaaa

SEQ ID NO: 486824 - RNA, 19 nt, Artificial Sequence
  Description of Artificial Sequence: Synthetic oligonucleotide
  Antisense Strand to SEQ ID NO: 486823
uuugucagucauugccagu

SEQ ID NO: 486825 - RNA, 19 nt, Artificial Sequence
  Description of Artificial Sequence: Synthetic oligonucleotide
  Sense strand starting at position 2216 of SEQ ID NO: 317385
auauuuauuuggugagcac

SEQ ID NO: 486826 - RNA, 19 nt, Artificial Sequence
  Description of Artificial Sequence: Synthetic oligonucleotide
  Antisense Strand to SEQ ID NO: 486825
gugcucaccaaauaaauau

SEQ ID NO: 486827 - RNA, 19 nt, Artificial Sequence
  Description of Artificial Sequence: Synthetic oligonucleotide
  Sense strand starting at position 2423 of SEQ ID NO: 317385
uucuauuguggaugaagga

SEQ ID NO: 486828 - RNA, 19 nt, Artificial Sequence
  Description of Artificial Sequence: Synthetic oligonucleotide
  Antisense Strand to SEQ ID NO: 486827
uccuucauccacaauagaa

SEQ ID NO: 486829 - RNA, 19 nt, Artificial Sequence
  Description of Artificial Sequence: Synthetic oligonucleotide
  Sense strand starting at position 2623 of SEQ ID NO: 317385
aagaaugcuuaaguaguca

SEQ ID NO: 486830 - RNA, 19 nt, Artificial Sequence
  Description of Artificial Sequence: Synthetic oligonucleotide
  Antisense Strand to SEQ ID NO: 486829
ugacuacuuaagcauucuu

SEQ ID NO: 486831 - RNA, 19 nt, Artificial Sequence
  Description of Artificial Sequence: Synthetic oligonucleotide
  Sense strand starting at position 2627 of SEQ ID NO: 317385
augcuuaaguagucagaaa

SEQ ID NO: 486832 - RNA, 19 nt, Artificial Sequence
  Description of Artificial Sequence: Synthetic oligonucleotide
  Antisense Strand to SEQ ID NO: 486831
uuucugacuacuuaagcau

SEQ ID NO: 486833 - RNA, 19 nt, Artificial Sequence
  Description of Artificial Sequence: Synthetic oligonucleotide
  Sense strand starting at position 2628 of SEQ ID NO: 317385
ugcuuaaguagucagaaag

SEQ ID NO: 486834 - RNA, 19 nt, Artificial Sequence
  Description of Artificial Sequence: Synthetic oligonucleotide
  Antisense Strand to SEQ ID NO: 486833
cuuucugacuacuuaagca

SEQ ID NO: 486835 - RNA, 19 nt, Artificial Sequence
  Description of Artificial Sequence: Synthetic oligonucleotide
  Sense strand starting at position 2659 of SEQ ID NO: 317385
gcuuuccaucgggagauga

SEQ ID NO: 486836 - RNA, 19 nt, Artificial Sequence
  Description of Artificial Sequence: Synthetic oligonucleotide
  Antisense Strand to SEQ ID NO: 486835
ucaucucccgauggaaagc

SEQ ID NO: 486837 - RNA, 19 nt, Artificial Sequence
  Description of Artificial Sequence: Synthetic oligonucleotide
  Sense strand starting at position 3020 of SEQ ID NO: 317385
uuauaauuaaugugagggu

SEQ ID NO: 486838 - RNA, 19 nt, Artificial Sequence
  Description of Artificial Sequence: Synthetic oligonucleotide
  Antisense Strand to SEQ ID NO: 486837
acccucacauuaauuauaa

SEQ ID NO: 486839 - RNA, 19 nt, Artificial Sequence
  Description of Artificial Sequence: Synthetic oligonucleotide
  Sense strand starting at position 3126 of SEQ ID NO: 317385
aggauuaugccaugugaaa

SEQ ID NO: 486840 - RNA, 19 nt, Artificial Sequence
  Description of Artificial Sequence: Synthetic oligonucleotide
  Antisense Strand to SEQ ID NO: 486839
uuucacauggcauaauccu

SEQ ID NO: 486841 - RNA, 19 nt, Artificial Sequence
  Description of Artificial Sequence: Synthetic oligonucleotide
  Sense strand starting at position 3190 of SEQ ID NO: 317385
ugaaauccuuuggcucaau

SEQ ID NO: 486842 - RNA, 19 nt, Artificial Sequence
  Description of Artificial Sequence: Synthetic oligonucleotide
  Antisense Strand to SEQ ID NO: 486841
auugagccaaaggauuuca

SEQ ID NO: 486843 - RNA, 19 nt, Artificial Sequence
  Description of Artificial Sequence: Synthetic oligonucleotide
  Sense strand starting at position 3435 of SEQ ID NO: 317385
cucaauguggaaugguaau

SEQ ID NO: 486844 - RNA, 19 nt, Artificial Sequence
  Description of Artificial Sequence: Synthetic oligonucleotide
  Antisense Strand to SEQ ID NO: 486843
auuaccauuccacauugag

SEQ ID NO: 486845 - RNA, 19 nt, Artificial Sequence
  Description of Artificial Sequence: Synthetic oligonucleotide
  Sense strand starting at position 3441 of SEQ ID NO: 317385
guggaaugguaauucuacu

SEQ ID NO: 486846 - RNA, 19 nt, Artificial Sequence
  Description of Artificial Sequence: Synthetic oligonucleotide
  Antisense Strand to SEQ ID NO: 486845
aguagaauuaccauuccac

SEQ ID NO: 486847 - RNA, 19 nt, Artificial Sequence
  Description of Artificial Sequence: Synthetic oligonucleotide
  Sense strand starting at position 3566 of SEQ ID NO: 317385
auuggcuuuccuugagaag

SEQ ID NO: 486848 - RNA, 19 nt, Artificial Sequence
  Description of Artificial Sequence: Synthetic oligonucleotide
  Antisense Strand to SEQ ID NO: 486847
cuucucaaggaaagccaau

SEQ ID NO: 486849 - RNA, 19 nt, Artificial Sequence
  Description of Artificial Sequence: Synthetic oligonucleotide
  Sense strand starting at position 3637 of SEQ ID NO: 317385
ggauaauaaugaguuguca

SEQ ID NO: 486850 - RNA, 19 nt, Artificial Sequence
  Description of Artificial Sequence: Synthetic oligonucleotide
  Antisense Strand to SEQ ID NO: 486849
ugacaacucauuauuaucc

SEQ ID NO: 486851 - RNA, 19 nt, Artificial Sequence
  Description of Artificial Sequence: Synthetic oligonucleotide
  Sense strand starting at position 3641 of SEQ ID NO: 317385
aauaaugaguugucauagg

SEQ ID NO: 486852 - RNA, 19 nt, Artificial Sequence
  Description of Artificial Sequence: Synthetic oligonucleotide
  Antisense Strand to SEQ ID NO: 486851
ccuaugacaacucauuauu

SEQ ID NO: 486853 - RNA, 19 nt, Artificial Sequence
  Description of Artificial Sequence: Synthetic oligonucleotide
  Sense strand starting at position 3651 of SEQ ID NO: 317385
ugucauagggcucauagga

SEQ ID NO: 486854 - RNA, 19 nt, Artificial Sequence
  Description of Artificial Sequence: Synthetic oligonucleotide
  Antisense Strand to SEQ ID NO: 486853
uccuaugagcccuaugaca

SEQ ID NO: 486855 - RNA, 19 nt, Artificial Sequence
  Description of Artificial Sequence: Synthetic oligonucleotide
  Sense strand starting at position 3659 of SEQ ID NO: 317385
ggcucauaggaauaaugca

SEQ ID NO: 486856 - RNA, 19 nt, Artificial Sequence
  Description of Artificial Sequence: Synthetic oligonucleotide
  Antisense Strand to SEQ ID NO: 486855
ugcauuauuccuaugagcc

SEQ ID NO: 486857 - RNA, 19 nt, Artificial Sequence
  Description of Artificial Sequence: Synthetic oligonucleotide
  Sense strand starting at position 3692 of SEQ ID NO: 317385
cuggguaaugucugacaca

SEQ ID NO: 486858 - RNA, 19 nt, Artificial Sequence
  Description of Artificial Sequence: Synthetic oligonucleotide
  Antisense Strand to SEQ ID NO: 486857
ugugucagacauuacccag

SEQ ID NO: 486859 - RNA, 19 nt, Artificial Sequence
  Description of Artificial Sequence: Synthetic oligonucleotide
  Sense strand starting at position 3824 of SEQ ID NO: 317385
ugagaugucauauaagugu

SEQ ID NO: 486860 - RNA, 19 nt, Artificial Sequence
  Description of Artificial Sequence: Synthetic oligonucleotide
  Antisense Strand to SEQ ID NO: 486859
acacuuauaugacaucuca

SEQ ID NO: 486861 - RNA, 19 nt, Artificial Sequence
  Description of Artificial Sequence: Synthetic oligonucleotide
  Sense strand starting at position 3827 of SEQ ID NO: 317385
gaugucauauaaguguaaa

SEQ ID NO: 486862 - RNA, 19 nt, Artificial Sequence
  Description of Artificial Sequence: Synthetic oligonucleotide
  Antisense Strand to SEQ ID NO: 486861
uuuacacuuauaugacauc

SEQ ID NO: 486863 - RNA, 19 nt, Artificial Sequence
  Description of Artificial Sequence: Synthetic oligonucleotide
  Sense strand starting at position 3897 of SEQ ID NO: 317385
gaaauuacucaguggguac

SEQ ID NO: 486864 - RNA, 19 nt, Artificial Sequence
  Description of Artificial Sequence: Synthetic oligonucleotide
  Antisense Strand to SEQ ID NO: 486863
guacccacugaguaauuuc

SEQ ID NO: 486865 - RNA, 19 nt, Artificial Sequence
  Description of Artificial Sequence: Synthetic oligonucleotide
  Sense strand starting at position 161 of SEQ ID NO: 317386
auagaugucccaggucaca

SEQ ID NO: 486866 - RNA, 19 nt, Artificial Sequence
  Description of Artificial Sequence: Synthetic oligonucleotide
  Antisense Strand to SEQ ID NO: 486865
ugugaccugggacaucuau

SEQ ID NO: 486867 - RNA, 19 nt, Artificial Sequence
  Description of Artificial Sequence: Synthetic oligonucleotide
  Sense strand starting at position 187 of SEQ ID NO: 317386
gggcaaucuggagagcuga

SEQ ID NO: 486868 - RNA, 19 nt, Artificial Sequence
  Description of Artificial Sequence: Synthetic oligonucleotide
  Antisense Strand to SEQ ID NO: 486867
ucagcucuccagauugccc

SEQ ID NO: 486869 - RNA, 19 nt, Artificial Sequence
  Description of Artificial Sequence: Synthetic oligonucleotide
  Sense strand starting at position 201 of SEQ ID NO: 317386
gcugauucccugcauuaaa

SEQ ID NO: 486870 - RNA, 19 nt, Artificial Sequence
  Description of Artificial Sequence: Synthetic oligonucleotide
  Antisense Strand to SEQ ID NO: 486869
uuuaaugcagggaaucagc

SEQ ID NO: 486871 - RNA, 19 nt, Artificial Sequence
  Description of Artificial Sequence: Synthetic oligonucleotide
  Sense strand starting at position 258 of SEQ ID NO: 317386
agaguuucuggaugacuuu

SEQ ID NO: 486872 - RNA, 19 nt, Artificial Sequence
  Description of Artificial Sequence: Synthetic oligonucleotide
  Antisense Strand to SEQ ID NO: 486871
aaagucauccagaaacucu

SEQ ID NO: 486873 - RNA, 19 nt, Artificial Sequence
  Description of Artificial Sequence: Synthetic oligonucleotide
  Sense strand starting at position 261 of SEQ ID NO: 317386
guuucuggaugacuuuaca

SEQ ID NO: 486874 - RNA, 19 nt, Artificial Sequence
  Description of Artificial Sequence: Synthetic oligonucleotide
  Antisense Strand to SEQ ID NO: 486873
uguaaagucauccagaaac

SEQ ID NO: 486875 - RNA, 19 nt, Artificial Sequence
  Description of Artificial Sequence: Synthetic oligonucleotide
  Sense strand starting at position 536 of SEQ ID NO: 317386
ccuggaccuucuuugucaa

SEQ ID NO: 486876 - RNA, 19 nt, Artificial Sequence
  Description of Artificial Sequence: Synthetic oligonucleotide
  Antisense Strand to SEQ ID NO: 486875
uugacaaagaagguccagg

SEQ ID NO: 486877 - RNA, 19 nt, Artificial Sequence
  Description of Artificial Sequence: Synthetic oligonucleotide
  Sense strand starting at position 810 of SEQ ID NO: 317386
aagucugguuaguuaagga

SEQ ID NO: 486878 - RNA, 19 nt, Artificial Sequence
  Description of Artificial Sequence: Synthetic oligonucleotide
  Antisense Strand to SEQ ID NO: 486877
uccuuaacuaaccagacuu

SEQ ID NO: 486879 - RNA, 19 nt, Artificial Sequence
  Description of Artificial Sequence: Synthetic oligonucleotide
  Sense strand starting at position 866 of SEQ ID NO: 317386
uugcauguccauuauauau

SEQ ID NO: 486880 - RNA, 19 nt, Artificial Sequence
  Description of Artificial Sequence: Synthetic oligonucleotide
  Antisense Strand to SEQ ID NO: 486879
auauauaauggacaugcaa

SEQ ID NO: 486881 - RNA, 19 nt, Artificial Sequence
  Description of Artificial Sequence: Synthetic oligonucleotide
  Sense strand starting at position 1032 of SEQ ID NO: 317386
cugacugucuaucccuaua

SEQ ID NO: 486882 - RNA, 19 nt, Artificial Sequence
  Description of Artificial Sequence: Synthetic oligonucleotide
  Antisense Strand to SEQ ID NO: 486881
uauagggauagacagucag

SEQ ID NO: 486883 - RNA, 19 nt, Artificial Sequence
  Description of Artificial Sequence: Synthetic oligonucleotide
  Sense strand starting at position 1087 of SEQ ID NO: 317386
ucagaaaucuuagaaggga

SEQ ID NO: 486884 - RNA, 19 nt, Artificial Sequence
  Description of Artificial Sequence: Synthetic oligonucleotide
  Antisense Strand to SEQ ID NO: 486883
ucccuucuaagauuucuga

SEQ ID NO: 486885 - RNA, 19 nt, Artificial Sequence
  Description of Artificial Sequence: Synthetic oligonucleotide
  Sense strand starting at position 1163 of SEQ ID NO: 317386
uggucauaaucccugaacu

SEQ ID NO: 486886 - RNA, 19 nt, Artificial Sequence
  Description of Artificial Sequence: Synthetic oligonucleotide
  Antisense Strand to SEQ ID NO: 486885
aguucagggauuaugacca

SEQ ID NO: 486887 - RNA, 19 nt, Artificial Sequence
  Description of Artificial Sequence: Synthetic oligonucleotide
  Sense strand starting at position 1164 of SEQ ID NO: 317386
ggucauaaucccugaacuu

SEQ ID NO: 486888 - RNA, 19 nt, Artificial Sequence
  Description of Artificial Sequence: Synthetic oligonucleotide
  Antisense Strand to SEQ ID NO: 486887
aaguucagggauuaugacc

SEQ ID NO: 486889 - RNA, 19 nt, Artificial Sequence
  Description of Artificial Sequence: Synthetic oligonucleotide
  Sense strand starting at position 1282 of SEQ ID NO: 317386
caguaacugcuguacagau

SEQ ID NO: 486890 - RNA, 19 nt, Artificial Sequence
  Description of Artificial Sequence: Synthetic oligonucleotide
  Antisense Strand to SEQ ID NO: 486889
aucuguacagcaguuacug

SEQ ID NO: 486891 - RNA, 19 nt, Artificial Sequence
  Description of Artificial Sequence: Synthetic oligonucleotide
  Sense strand starting at position 1354 of SEQ ID NO: 317386
cucuucugucuguauauaa

SEQ ID NO: 486892 - RNA, 19 nt, Artificial Sequence
  Description of Artificial Sequence: Synthetic oligonucleotide
  Antisense Strand to SEQ ID NO: 486891
uuauauacagacagaagag

SEQ ID NO: 486893 - RNA, 19 nt, Artificial Sequence
  Description of Artificial Sequence: Synthetic oligonucleotide
  Sense strand starting at position 1425 of SEQ ID NO: 317386
acacuuuaucguuaguucu

SEQ ID NO: 486894 - RNA, 19 nt, Artificial Sequence
  Description of Artificial Sequence: Synthetic oligonucleotide
  Antisense Strand to SEQ ID NO: 486893
agaacuaacgauaaagugu

SEQ ID NO: 486895 - RNA, 19 nt, Artificial Sequence
  Description of Artificial Sequence: Synthetic oligonucleotide
  Sense strand starting at position 1865 of SEQ ID NO: 317386
uuaucaucccaggagagcu

SEQ ID NO: 486896 - RNA, 19 nt, Artificial Sequence
  Description of Artificial Sequence: Synthetic oligonucleotide
  Antisense Strand to SEQ ID NO: 486895
agcucuccugggaugauaa

SEQ ID NO: 486897 - RNA, 19 nt, Artificial Sequence
  Description of Artificial Sequence: Synthetic oligonucleotide
  Sense strand starting at position 2046 of SEQ ID NO: 317386
cgaacacaucacugcuuua

SEQ ID NO: 486898 - RNA, 19 nt, Artificial Sequence
  Description of Artificial Sequence: Synthetic oligonucleotide
  Antisense Strand to SEQ ID NO: 486897
uaaagcagugauguguucg

SEQ ID NO: 486899 - RNA, 19 nt, Artificial Sequence
  Description of Artificial Sequence: Synthetic oligonucleotide
  Sense strand starting at position 2345 of SEQ ID NO: 317386
gggcaauccuccuuauaua

SEQ ID NO: 486900 - RNA, 19 nt, Artificial Sequence
  Description of Artificial Sequence: Synthetic oligonucleotide
  Antisense Strand to SEQ ID NO: 486899
uauauaaggaggauugccc

SEQ ID NO: 486901 - RNA, 19 nt, Artificial Sequence
  Description of Artificial Sequence: Synthetic oligonucleotide
  Sense strand starting at position 2520 of SEQ ID NO: 317386
ugaugacugucacucucuu

SEQ ID NO: 486902 - RNA, 19 nt, Artificial Sequence
  Description of Artificial Sequence: Synthetic oligonucleotide
  Antisense Strand to SEQ ID NO: 486901
aagagagugacagucauca

SEQ ID NO: 486903 - RNA, 19 nt, Artificial Sequence
  Description of Artificial Sequence: Synthetic oligonucleotide
  Sense strand starting at position 2536 of SEQ ID NO: 317386
cuucucuuccucugaggau

SEQ ID NO: 486904 - RNA, 19 nt, Artificial Sequence
  Description of Artificial Sequence: Synthetic oligonucleotide
  Antisense Strand to SEQ ID NO: 486903
auccucagaggaagagaag

SEQ ID NO: 486905 - RNA, 19 nt, Artificial Sequence
  Description of Artificial Sequence: Synthetic oligonucleotide
  Sense strand starting at position 2608 of SEQ ID NO: 317386
gggauaugugucuguggaa

SEQ ID NO: 486906 - RNA, 19 nt, Artificial Sequence
  Description of Artificial Sequence: Synthetic oligonucleotide
  Antisense Strand to SEQ ID NO: 486905
uuccacagacacauauccc

SEQ ID NO: 486907 - RNA, 19 nt, Artificial Sequence
  Description of Artificial Sequence: Synthetic oligonucleotide
  Sense strand starting at position 2609 of SEQ ID NO: 317386
ggauaugugucuguggaau

SEQ ID NO: 486908 - RNA, 19 nt, Artificial Sequence
  Description of Artificial Sequence: Synthetic oligonucleotide
  Antisense Strand to SEQ ID NO: 486907
auuccacagacacauaucc

SEQ ID NO: 486909 - RNA, 19 nt, Artificial Sequence
  Description of Artificial Sequence: Synthetic oligonucleotide
  Sense strand starting at position 2656 of SEQ ID NO: 317386
guauucguugcacagggaa

SEQ ID NO: 486910 - RNA, 19 nt, Artificial Sequence
  Description of Artificial Sequence: Synthetic oligonucleotide
  Antisense Strand to SEQ ID NO: 486909
uucccugugcaacgaauac

SEQ ID NO: 486911 - RNA, 19 nt, Artificial Sequence
  Description of Artificial Sequence: Synthetic oligonucleotide
  Sense strand starting at position 2856 of SEQ ID NO: 317386
aauggcauuuguuaaauga

SEQ ID NO: 486912 - RNA, 19 nt, Artificial Sequence
  Description of Artificial Sequence: Synthetic oligonucleotide
  Antisense Strand to SEQ ID NO: 486911
ucauuuaacaaaugccauu

SEQ ID NO: 486913 - RNA, 19 nt, Artificial Sequence
  Description of Artificial Sequence: Synthetic oligonucleotide
  Sense strand starting at position 2866 of SEQ ID NO: 317386
guuaaaugacuguguggag

SEQ ID NO: 486914 - RNA, 19 nt, Artificial Sequence
  Description of Artificial Sequence: Synthetic oligonucleotide
  Antisense Strand to SEQ ID NO: 486913
cuccacacagucauuuaac

SEQ ID NO: 486915 - RNA, 19 nt, Artificial Sequence
  Description of Artificial Sequence: Synthetic oligonucleotide
  Sense strand starting at position 2890 of SEQ ID NO: 317386
ugaguuaggaagugcucua

SEQ ID NO: 486916 - RNA, 19 nt, Artificial Sequence
  Description of Artificial Sequence: Synthetic oligonucleotide
  Antisense Strand to SEQ ID NO: 486915
uagagcacuuccuaacuca

SEQ ID NO: 486917 - RNA, 19 nt, Artificial Sequence
  Description of Artificial Sequence: Synthetic oligonucleotide
  Sense strand starting at position 2932 of SEQ ID NO: 317386
uccaguaaucuuugaggga

SEQ ID NO: 486918 - RNA, 19 nt, Artificial Sequence
  Description of Artificial Sequence: Synthetic oligonucleotide
  Antisense Strand to SEQ ID NO: 486917
ucccucaaagauuacugga

SEQ ID NO: 486919 - RNA, 19 nt, Artificial Sequence
  Description of Artificial Sequence: Synthetic oligonucleotide
  Sense strand starting at position 3110 of SEQ ID NO: 317386
caugacuguugagucagua

SEQ ID NO: 486920 - RNA, 19 nt, Artificial Sequence
  Description of Artificial Sequence: Synthetic oligonucleotide
  Antisense Strand to SEQ ID NO: 486919
uacugacucaacagucaug

SEQ ID NO: 486921 - RNA, 19 nt, Artificial Sequence
  Description of Artificial Sequence: Synthetic oligonucleotide
  Sense strand starting at position 3240 of SEQ ID NO: 317386
uacgauuuccuaugugcau

SEQ ID NO: 486922 - RNA, 19 nt, Artificial Sequence
  Description of Artificial Sequence: Synthetic oligonucleotide
  Antisense Strand to SEQ ID NO: 486921
augcacauaggaaaucgua

SEQ ID NO: 486923 - RNA, 19 nt, Artificial Sequence
  Description of Artificial Sequence: Synthetic oligonucleotide
  Sense strand starting at position 3241 of SEQ ID NO: 317386
acgauuuccuaugugcauu

SEQ ID NO: 486924 - RNA, 19 nt, Artificial Sequence
  Description of Artificial Sequence: Synthetic oligonucleotide
  Antisense Strand to SEQ ID NO: 486923
aaugcacauaggaaaucgu

SEQ ID NO: 486925 - RNA, 19 nt, Artificial Sequence
  Description of Artificial Sequence: Synthetic oligonucleotide
  Sense strand starting at position 3311 of SEQ ID NO: 317386
cugcccuaaggauauaauu

SEQ ID NO: 486926 - RNA, 19 nt, Artificial Sequence
  Description of Artificial Sequence: Synthetic oligonucleotide
  Antisense Strand to SEQ ID NO: 486925
aauuauauccuuagggcag

SEQ ID NO: 486927 - RNA, 19 nt, Artificial Sequence
  Description of Artificial Sequence: Synthetic oligonucleotide
  Sense strand starting at position 3331 of SEQ ID NO: 317386
agaugaggcuuaucgaguu

SEQ ID NO: 486928 - RNA, 19 nt, Artificial Sequence
  Description of Artificial Sequence: Synthetic oligonucleotide
  Antisense Strand to SEQ ID NO: 486927
aacucgauaagccucaucu

SEQ ID NO: 486929 - RNA, 19 nt, Artificial Sequence
  Description of Artificial Sequence: Synthetic oligonucleotide
  Sense strand starting at position 3393 of SEQ ID NO: 317386
agaguacagacaugcagua

SEQ ID NO: 486930 - RNA, 19 nt, Artificial Sequence
  Description of Artificial Sequence: Synthetic oligonucleotide
  Antisense Strand to SEQ ID NO: 486929
uacugcaugucuguacucu

SEQ ID NO: 486931 - RNA, 19 nt, Artificial Sequence
  Description of Artificial Sequence: Synthetic oligonucleotide
  Sense strand starting at position 3405 of SEQ ID NO: 317386
ugcaguauauaguccauuu

SEQ ID NO: 486932 - RNA, 19 nt, Artificial Sequence
  Description of Artificial Sequence: Synthetic oligonucleotide
  Antisense Strand to SEQ ID NO: 486931
aaauggacuauauacugca

SEQ ID NO: 486933 - RNA, 19 nt, Artificial Sequence
  Description of Artificial Sequence: Synthetic oligonucleotide
  Sense strand starting at position 3467 of SEQ ID NO: 317386
guuccucugguaugauuaa

SEQ ID NO: 486934 - RNA, 19 nt, Artificial Sequence
  Description of Artificial Sequence: Synthetic oligonucleotide
  Antisense Strand to SEQ ID NO: 486933
uuaaucauaccagaggaac

SEQ ID NO: 486935 - RNA, 19 nt, Artificial Sequence
  Description of Artificial Sequence: Synthetic oligonucleotide
  Sense strand starting at position 3559 of SEQ ID NO: 317386
uuuauaucaugguuuguca

SEQ ID NO: 486936 - RNA, 19 nt, Artificial Sequence
  Description of Artificial Sequence: Synthetic oligonucleotide
  Antisense Strand to SEQ ID NO: 486935
ugacaaaccaugauauaaa

SEQ ID NO: 486937 - RNA, 19 nt, Artificial Sequence
  Description of Artificial Sequence: Synthetic oligonucleotide
  Sense strand starting at position 3562 of SEQ ID NO: 317386
auaucaugguuugucagga

SEQ ID NO: 486938 - RNA, 19 nt, Artificial Sequence
  Description of Artificial Sequence: Synthetic oligonucleotide
  Antisense Strand to SEQ ID NO: 486937
uccugacaaaccaugauau

SEQ ID NO: 486939 - RNA, 19 nt, Artificial Sequence
  Description of Artificial Sequence: Synthetic oligonucleotide
  Sense strand starting at position 3587 of SEQ ID NO: 317386
cucagaaaguccuuuaagg

SEQ ID NO: 486940 - RNA, 19 nt, Artificial Sequence
  Description of Artificial Sequence: Synthetic oligonucleotide
  Antisense Strand to SEQ ID NO: 486939
ccuuaaaggacuuucugag

SEQ ID NO: 486941 - RNA, 19 nt, Artificial Sequence
  Description of Artificial Sequence: Synthetic oligonucleotide
  Sense strand starting at position 3594 of SEQ ID NO: 317386
aguccuuuaagguggaaau

SEQ ID NO: 486942 - RNA, 19 nt, Artificial Sequence
  Description of Artificial Sequence: Synthetic oligonucleotide
  Antisense Strand to SEQ ID NO: 486941
auuuccaccuuaaaggacu

SEQ ID NO: 486943 - RNA, 19 nt, Artificial Sequence
  Description of Artificial Sequence: Synthetic oligonucleotide
  Sense strand starting at position 3595 of SEQ ID NO: 317386
guccuuuaagguggaaaug

SEQ ID NO: 486944 - RNA, 19 nt, Artificial Sequence
  Description of Artificial Sequence: Synthetic oligonucleotide
  Antisense Strand to SEQ ID NO: 486943
cauuuccaccuuaaaggac

SEQ ID NO: 486945 - RNA, 19 nt, Artificial Sequence
  Description of Artificial Sequence: Synthetic oligonucleotide
  Sense strand starting at position 155 of SEQ ID NO: 317387
uugcuugaaccagauaagu

SEQ ID NO: 486946 - RNA, 19 nt, Artificial Sequence
  Description of Artificial Sequence: Synthetic oligonucleotide
  Antisense Strand to SEQ ID NO: 486945
acuuaucugguucaagcaa

SEQ ID NO: 486947 - RNA, 19 nt, Artificial Sequence
  Description of Artificial Sequence: Synthetic oligonucleotide
  Sense strand starting at position 397 of SEQ ID NO: 317387
auaauuugcugugacauuu

SEQ ID NO: 486948 - RNA, 19 nt, Artificial Sequence
  Description of Artificial Sequence: Synthetic oligonucleotide
  Antisense Strand to SEQ ID NO: 486947
aaaugucacagcaaauuau

SEQ ID NO: 486949 - RNA, 19 nt, Artificial Sequence
  Description of Artificial Sequence: Synthetic oligonucleotide
  Sense strand starting at position 576 of SEQ ID NO: 317387
gaacaacuucccgggaaau

SEQ ID NO: 486950 - RNA, 19 nt, Artificial Sequence
  Description of Artificial Sequence: Synthetic oligonucleotide
  Antisense Strand to SEQ ID NO: 486949
auuucccgggaaguuguuc

SEQ ID NO: 486951 - RNA, 19 nt, Artificial Sequence
  Description of Artificial Sequence: Synthetic oligonucleotide
  Sense strand starting at position 588 of SEQ ID NO: 317387
gggaaauauuuccauauga

SEQ ID NO: 486952 - RNA, 19 nt, Artificial Sequence
  Description of Artificial Sequence: Synthetic oligonucleotide
  Antisense Strand to SEQ ID NO: 486951
ucauauggaaauauuuccc

SEQ ID NO: 486953 - RNA, 19 nt, Artificial Sequence
  Description of Artificial Sequence: Synthetic oligonucleotide
  Sense strand starting at position 639 of SEQ ID NO: 317387
ucuugccuacuguauagaa

SEQ ID NO: 486954 - RNA, 19 nt, Artificial Sequence
  Description of Artificial Sequence: Synthetic oligonucleotide
  Antisense Strand to SEQ ID NO: 486953
uucuauacaguaggcaaga

SEQ ID NO: 486955 - RNA, 19 nt, Artificial Sequence
  Description of Artificial Sequence: Synthetic oligonucleotide
  Sense strand starting at position 641 of SEQ ID NO: 317387
uugccuacuguauagaaga

SEQ ID NO: 486956 - RNA, 19 nt, Artificial Sequence
  Description of Artificial Sequence: Synthetic oligonucleotide
  Antisense Strand to SEQ ID NO: 486955
ucuucuauacaguaggcaa

SEQ ID NO: 486957 - RNA, 19 nt, Artificial Sequence
  Description of Artificial Sequence: Synthetic oligonucleotide
  Sense strand starting at position 656 of SEQ ID NO: 317387
aagaaacaacuguguuagu

SEQ ID NO: 486958 - RNA, 19 nt, Artificial Sequence
  Description of Artificial Sequence: Synthetic oligonucleotide
  Antisense Strand to SEQ ID NO: 486957
acuaacacaguuguuucuu

SEQ ID NO: 486959 - RNA, 19 nt, Artificial Sequence
  Description of Artificial Sequence: Synthetic oligonucleotide
  Sense strand starting at position 657 of SEQ ID NO: 317387
agaaacaacuguguuaguu

SEQ ID NO: 486960 - RNA, 19 nt, Artificial Sequence
  Description of Artificial Sequence: Synthetic oligonucleotide
  Antisense Strand to SEQ ID NO: 486959
aacuaacacaguuguuucu

SEQ ID NO: 486961 - RNA, 19 nt, Artificial Sequence
  Description of Artificial Sequence: Synthetic oligonucleotide
  Sense strand starting at position 679 of SEQ ID NO: 317387
cugcaugguacaugaugaa

SEQ ID NO: 486962 - RNA, 19 nt, Artificial Sequence
  Description of Artificial Sequence: Synthetic oligonucleotide
  Antisense Strand to SEQ ID NO: 486961
uucaucauguaccaugcag

SEQ ID NO: 486963 - RNA, 19 nt, Artificial Sequence
  Description of Artificial Sequence: Synthetic oligonucleotide
  Sense strand starting at position 692 of SEQ ID NO: 317387
gaugaaagucccuguuaua

SEQ ID NO: 486964 - RNA, 19 nt, Artificial Sequence
  Description of Artificial Sequence: Synthetic oligonucleotide
  Antisense Strand to SEQ ID NO: 486963
uauaacagggacuuucauc

SEQ ID NO: 486965 - RNA, 19 nt, Artificial Sequence
  Description of Artificial Sequence: Synthetic oligonucleotide
  Sense strand starting at position 1021 of SEQ ID NO: 317387
guagaagaauccucauacc

SEQ ID NO: 486966 - RNA, 19 nt, Artificial Sequence
  Description of Artificial Sequence: Synthetic oligonucleotide
  Antisense Strand to SEQ ID NO: 486965
gguaugaggauucuucuac

SEQ ID NO: 486967 - RNA, 19 nt, Artificial Sequence
  Description of Artificial Sequence: Synthetic oligonucleotide
  Sense strand starting at position 1159 of SEQ ID NO: 317387
aggucuccuuaguuauaaa

SEQ ID NO: 486968 - RNA, 19 nt, Artificial Sequence
  Description of Artificial Sequence: Synthetic oligonucleotide
  Antisense Strand to SEQ ID NO: 486967
uuuauaacuaaggagaccu

SEQ ID NO: 486969 - RNA, 19 nt, Artificial Sequence
  Description of Artificial Sequence: Synthetic oligonucleotide
  Sense strand starting at position 1182 of SEQ ID NO: 317387
gcagaaugugaugguugaa

SEQ ID NO: 486970 - RNA, 19 nt, Artificial Sequence
  Description of Artificial Sequence: Synthetic oligonucleotide
  Antisense Strand to SEQ ID NO: 486969
uucaaccaucacauucugc

SEQ ID NO: 486971 - RNA, 19 nt, Artificial Sequence
  Description of Artificial Sequence: Synthetic oligonucleotide
  Sense strand starting at position 1185 of SEQ ID NO: 317387
gaaugugaugguugaaagc

SEQ ID NO: 486972 - RNA, 19 nt, Artificial Sequence
  Description of Artificial Sequence: Synthetic oligonucleotide
  Antisense Strand to SEQ ID NO: 486971
gcuuucaaccaucacauuc

SEQ ID NO: 486973 - RNA, 19 nt, Artificial Sequence
  Description of Artificial Sequence: Synthetic oligonucleotide
  Sense strand starting at position 1192 of SEQ ID NO: 317387
augguugaaagcugcauuu

SEQ ID NO: 486974 - RNA, 19 nt, Artificial Sequence
  Description of Artificial Sequence: Synthetic oligonucleotide
  Antisense Strand to SEQ ID NO: 486973
aaaugcagcuuucaaccau

SEQ ID NO: 486975 - RNA, 19 nt, Artificial Sequence
  Description of Artificial Sequence: Synthetic oligonucleotide
  Sense strand starting at position 1194 of SEQ ID NO: 317387
gguugaaagcugcauuugu

SEQ ID NO: 486976 - RNA, 19 nt, Artificial Sequence
  Description of Artificial Sequence: Synthetic oligonucleotide
  Antisense Strand to SEQ ID NO: 486975
acaaaugcagcuuucaacc

SEQ ID NO: 486977 - RNA, 19 nt, Artificial Sequence
  Description of Artificial Sequence: Synthetic oligonucleotide
  Sense strand starting at position 1357 of SEQ ID NO: 317387
ggcacucagccugagaaca

SEQ ID NO: 486978 - RNA, 19 nt, Artificial Sequence
  Description of Artificial Sequence: Synthetic oligonucleotide
  Antisense Strand to SEQ ID NO: 486977
uguucucaggcugagugcc

SEQ ID NO: 486979 - RNA, 19 nt, Artificial Sequence
  Description of Artificial Sequence: Synthetic oligonucleotide
  Sense strand starting at position 1389 of SEQ ID NO: 317387
acuagaaagcagggaucuu

SEQ ID NO: 486980 - RNA, 19 nt, Artificial Sequence
  Description of Artificial Sequence: Synthetic oligonucleotide
  Antisense Strand to SEQ ID NO: 486979
aagaucccugcuuucuagu

SEQ ID NO: 486981 - RNA, 19 nt, Artificial Sequence
  Description of Artificial Sequence: Synthetic oligonucleotide
  Sense strand starting at position 1398 of SEQ ID NO: 317387
cagggaucuuccuccagga

SEQ ID NO: 486982 - RNA, 19 nt, Artificial Sequence
  Description of Artificial Sequence: Synthetic oligonucleotide
  Antisense Strand to SEQ ID NO: 486981
uccuggaggaagaucccug

SEQ ID NO: 486983 - RNA, 19 nt, Artificial Sequence
  Description of Artificial Sequence: Synthetic oligonucleotide
  Sense strand starting at position 1420 of SEQ ID NO: 317387
gcaucucugcuuuccguaa

SEQ ID NO: 486984 - RNA, 19 nt, Artificial Sequence
  Description of Artificial Sequence: Synthetic oligonucleotide
  Antisense Strand to SEQ ID NO: 486983
uuacggaaagcagagaugc

SEQ ID NO: 486985 - RNA, 19 nt, Artificial Sequence
  Description of Artificial Sequence: Synthetic oligonucleotide
  Sense strand starting at position 1817 of SEQ ID NO: 317387
gaaucaguggcagguuaaa

SEQ ID NO: 486986 - RNA, 19 nt, Artificial Sequence
  Description of Artificial Sequence: Synthetic oligonucleotide
  Antisense Strand to SEQ ID NO: 486985
uuuaaccugccacugauuc

SEQ ID NO: 486987 - RNA, 19 nt, Artificial Sequence
  Description of Artificial Sequence: Synthetic oligonucleotide
  Sense strand starting at position 1870 of SEQ ID NO: 317387
cuaugaagaugucuaaugu

SEQ ID NO: 486988 - RNA, 19 nt, Artificial Sequence
  Description of Artificial Sequence: Synthetic oligonucleotide
  Antisense Strand to SEQ ID NO: 486987
acauuagacaucuucauag

SEQ ID NO: 486989 - RNA, 19 nt, Artificial Sequence
  Description of Artificial Sequence: Synthetic oligonucleotide
  Sense strand starting at position 1871 of SEQ ID NO: 317387
uaugaagaugucuaauguu

SEQ ID NO: 486990 - RNA, 19 nt, Artificial Sequence
  Description of Artificial Sequence: Synthetic oligonucleotide
  Antisense Strand to SEQ ID NO: 486989
aacauuagacaucuucaua

SEQ ID NO: 486991 - RNA, 19 nt, Artificial Sequence
  Description of Artificial Sequence: Synthetic oligonucleotide
  Sense strand starting at position 2121 of SEQ ID NO: 317387
aggagaugcaguugaauaa

SEQ ID NO: 486992 - RNA, 19 nt, Artificial Sequence
  Description of Artificial Sequence: Synthetic oligonucleotide
  Antisense Strand to SEQ ID NO: 486991
uuauucaacugcaucuccu

SEQ ID NO: 486993 - RNA, 19 nt, Artificial Sequence
  Description of Artificial Sequence: Synthetic oligonucleotide
  Sense strand starting at position 2213 of SEQ ID NO: 317387
uuuagauagcucugauaau

SEQ ID NO: 486994 - RNA, 19 nt, Artificial Sequence
  Description of Artificial Sequence: Synthetic oligonucleotide
  Antisense Strand to SEQ ID NO: 486993
auuaucagagcuaucuaaa

SEQ ID NO: 486995 - RNA, 19 nt, Artificial Sequence
  Description of Artificial Sequence: Synthetic oligonucleotide
  Sense strand starting at position 2259 of SEQ ID NO: 317387
aaagguaaagccugacuua

SEQ ID NO: 486996 - RNA, 19 nt, Artificial Sequence
  Description of Artificial Sequence: Synthetic oligonucleotide
  Antisense Strand to SEQ ID NO: 486995
uaagucaggcuuuaccuuu

SEQ ID NO: 486997 - RNA, 19 nt, Artificial Sequence
  Description of Artificial Sequence: Synthetic oligonucleotide
  Sense strand starting at position 2278 of SEQ ID NO: 317387
gcaucucuagaagacaagu

SEQ ID NO: 486998 - RNA, 19 nt, Artificial Sequence
  Description of Artificial Sequence: Synthetic oligonucleotide
  Antisense Strand to SEQ ID NO: 486997
acuugucuucuagagaugc

SEQ ID NO: 486999 - RNA, 19 nt, Artificial Sequence
  Description of Artificial Sequence: Synthetic oligonucleotide
  Sense strand starting at position 3078 of SEQ ID NO: 317387
cccaauaugcucuggaauu

SEQ ID NO: 487000 - RNA, 19 nt, Artificial Sequence
  Description of Artificial Sequence: Synthetic oligonucleotide
  Antisense Strand to SEQ ID NO: 486999
aauuccagagcauauuggg

SEQ ID NO: 487001 - RNA, 19 nt, Artificial Sequence
  Description of Artificial Sequence: Synthetic oligonucleotide
  Sense strand starting at position 3170 of SEQ ID NO: 317387
gcuuauucucuggagagac

SEQ ID NO: 487002 - RNA, 19 nt, Artificial Sequence
  Description of Artificial Sequence: Synthetic oligonucleotide
  Antisense Strand to SEQ ID NO: 487001
gucucuccagagaauaagc

SEQ ID NO: 487003 - RNA, 19 nt, Artificial Sequence
  Description of Artificial Sequence: Synthetic oligonucleotide
  Sense strand starting at position 3206 of SEQ ID NO: 317387
acuggcauggcugggaaua

SEQ ID NO: 487004 - RNA, 19 nt, Artificial Sequence
  Description of Artificial Sequence: Synthetic oligonucleotide
  Antisense Strand to SEQ ID NO: 487003
uauucccagccaugccagu

SEQ ID NO: 487005 - RNA, 19 nt, Artificial Sequence
  Description of Artificial Sequence: Synthetic oligonucleotide
  Sense strand starting at position 3207 of SEQ ID NO: 317387
cuggcauggcugggaauaa

SEQ ID NO: 487006 - RNA, 19 nt, Artificial Sequence
  Description of Artificial Sequence: Synthetic oligonucleotide
  Antisense Strand to SEQ ID NO: 487005
uuauucccagccaugccag

SEQ ID NO: 487007 - RNA, 19 nt, Artificial Sequence
  Description of Artificial Sequence: Synthetic oligonucleotide
  Sense strand starting at position 3419 of SEQ ID NO: 317387
aagauauggcugggcuaga

SEQ ID NO: 487008 - RNA, 19 nt, Artificial Sequence
  Description of Artificial Sequence: Synthetic oligonucleotide
  Antisense Strand to SEQ ID NO: 487007
ucuagcccagccauaucuu

SEQ ID NO: 487009 - RNA, 19 nt, Artificial Sequence
  Description of Artificial Sequence: Synthetic oligonucleotide
  Sense strand starting at position 3420 of SEQ ID NO: 317387
agauauggcugggcuagau

SEQ ID NO: 487010 - RNA, 19 nt, Artificial Sequence
  Description of Artificial Sequence: Synthetic oligonucleotide
  Antisense Strand to SEQ ID NO: 487009
aucuagcccagccauaucu

SEQ ID NO: 487011 - RNA, 19 nt, Artificial Sequence
  Description of Artificial Sequence: Synthetic oligonucleotide
  Sense strand starting at position 3429 of SEQ ID NO: 317387
ugggcuagaucucccagaa

SEQ ID NO: 487012 - RNA, 19 nt, Artificial Sequence
  Description of Artificial Sequence: Synthetic oligonucleotide
  Antisense Strand to SEQ ID NO: 487011
uucugggagaucuagccca

SEQ ID NO: 487013 - RNA, 19 nt, Artificial Sequence
  Description of Artificial Sequence: Synthetic oligonucleotide
  Sense strand starting at position 3433 of SEQ ID NO: 317387
cuagaucucccagaaguuc

SEQ ID NO: 487014 - RNA, 19 nt, Artificial Sequence
  Description of Artificial Sequence: Synthetic oligonucleotide
  Antisense Strand to SEQ ID NO: 487013
gaacuucugggagaucuag

SEQ ID NO: 487015 - RNA, 19 nt, Artificial Sequence
  Description of Artificial Sequence: Synthetic oligonucleotide
  Sense strand starting at position 3673 of SEQ ID NO: 317387
auaagagauguauggcagu

SEQ ID NO: 487016 - RNA, 19 nt, Artificial Sequence
  Description of Artificial Sequence: Synthetic oligonucleotide
  Antisense Strand to SEQ ID NO: 487015
acugccauacaucucuuau

SEQ ID NO: 487017 - RNA, 19 nt, Artificial Sequence
  Description of Artificial Sequence: Synthetic oligonucleotide
  Sense strand starting at position 3794 of SEQ ID NO: 317387
uguuaaccaugagugauua

SEQ ID NO: 487018 - RNA, 19 nt, Artificial Sequence
  Description of Artificial Sequence: Synthetic oligonucleotide
  Antisense Strand to SEQ ID NO: 487017
uaaucacucaugguuaaca

SEQ ID NO: 487019 - RNA, 19 nt, Artificial Sequence
  Description of Artificial Sequence: Synthetic oligonucleotide
  Sense strand starting at position 3795 of SEQ ID NO: 317387
guuaaccaugagugauuau

SEQ ID NO: 487020 - RNA, 19 nt, Artificial Sequence
  Description of Artificial Sequence: Synthetic oligonucleotide
  Antisense Strand to SEQ ID NO: 487019
auaaucacucaugguuaac

SEQ ID NO: 487021 - RNA, 19 nt, Artificial Sequence
  Description of Artificial Sequence: Synthetic oligonucleotide
  Sense strand starting at position 3798 of SEQ ID NO: 317387
aaccaugagugauuaugca

SEQ ID NO: 487022 - RNA, 19 nt, Artificial Sequence
  Description of Artificial Sequence: Synthetic oligonucleotide
  Antisense Strand to SEQ ID NO: 487021
ugcauaaucacucaugguu

SEQ ID NO: 487023 - RNA, 19 nt, Artificial Sequence
  Description of Artificial Sequence: Synthetic oligonucleotide
  Sense strand starting at position 3927 of SEQ ID NO: 317387
gcggcaugccuguuaguca

SEQ ID NO: 487024 - RNA, 19 nt, Artificial Sequence
  Description of Artificial Sequence: Synthetic oligonucleotide
  Antisense Strand to SEQ ID NO: 487023
ugacuaacaggcaugccgc

SEQ ID NO: 487025 - RNA, 19 nt, Artificial Sequence
  Description of Artificial Sequence: Synthetic oligonucleotide
  Sense strand starting at position 134 of SEQ ID NO: 317388
gcaccuguacccugauaga

SEQ ID NO: 487026 - RNA, 19 nt, Artificial Sequence
  Description of Artificial Sequence: Synthetic oligonucleotide
  Antisense Strand to SEQ ID NO: 487025
ucuaucaggguacaggugc

SEQ ID NO: 487027 - RNA, 19 nt, Artificial Sequence
  Description of Artificial Sequence: Synthetic oligonucleotide
  Sense strand starting at position 173 of SEQ ID NO: 317388
gggcucuaggccgacuaaa

SEQ ID NO: 487028 - RNA, 19 nt, Artificial Sequence
  Description of Artificial Sequence: Synthetic oligonucleotide
  Antisense Strand to SEQ ID NO: 487027
uuuagucggccuagagccc

SEQ ID NO: 487029 - RNA, 19 nt, Artificial Sequence
  Description of Artificial Sequence: Synthetic oligonucleotide
  Sense strand starting at position 333 of SEQ ID NO: 317388
gcccuuuccuggcuccaga

SEQ ID NO: 487030 - RNA, 19 nt, Artificial Sequence
  Description of Artificial Sequence: Synthetic oligonucleotide
  Antisense Strand to SEQ ID NO: 487029
ucuggagccaggaaagggc

SEQ ID NO: 487031 - RNA, 19 nt, Artificial Sequence
  Description of Artificial Sequence: Synthetic oligonucleotide
  Sense strand starting at position 1278 of SEQ ID NO: 317388
ucccgaaaucugcgggaau

SEQ ID NO: 487032 - RNA, 19 nt, Artificial Sequence
  Description of Artificial Sequence: Synthetic oligonucleotide
  Antisense Strand to SEQ ID NO: 487031
auucccgcagauuucggga

SEQ ID NO: 487033 - RNA, 19 nt, Artificial Sequence
  Description of Artificial Sequence: Synthetic oligonucleotide
  Sense strand starting at position 1279 of SEQ ID NO: 317388
cccgaaaucugcgggaaug

SEQ ID NO: 487034 - RNA, 19 nt, Artificial Sequence
  Description of Artificial Sequence: Synthetic oligonucleotide
  Antisense Strand to SEQ ID NO: 487033
cauucccgcagauuucggg

SEQ ID NO: 487035 - RNA, 19 nt, Artificial Sequence
  Description of Artificial Sequence: Synthetic oligonucleotide
  Sense strand starting at position 1280 of SEQ ID NO: 317388
ccgaaaucugcgggaaugu

SEQ ID NO: 487036 - RNA, 19 nt, Artificial Sequence
  Description of Artificial Sequence: Synthetic oligonucleotide
  Antisense Strand to SEQ ID NO: 487035
acauucccgcagauuucgg

SEQ ID NO: 487037 - RNA, 19 nt, Artificial Sequence
  Description of Artificial Sequence: Synthetic oligonucleotide
  Sense strand starting at position 1307 of SEQ ID NO: 317388
gugagacaagcguacgaau

SEQ ID NO: 487038 - RNA, 19 nt, Artificial Sequence
  Description of Artificial Sequence: Synthetic oligonucleotide
  Antisense Strand to SEQ ID NO: 487037
auucguacgcuugucucac

SEQ ID NO: 487039 - RNA, 19 nt, Artificial Sequence
  Description of Artificial Sequence: Synthetic oligonucleotide
  Sense strand starting at position 2662 of SEQ ID NO: 317388
aggccucuggcucagacau

SEQ ID NO: 487040 - RNA, 19 nt, Artificial Sequence
  Description of Artificial Sequence: Synthetic oligonucleotide
  Antisense Strand to SEQ ID NO: 487039
augucugagccagaggccu

SEQ ID NO: 487041 - RNA, 19 nt, Artificial Sequence
  Description of Artificial Sequence: Synthetic oligonucleotide
  Sense strand starting at position 3126 of SEQ ID NO: 317388
gggcaaggccucgaacauu

SEQ ID NO: 487042 - RNA, 19 nt, Artificial Sequence
  Description of Artificial Sequence: Synthetic oligonucleotide
  Antisense Strand to SEQ ID NO: 487041
aauguucgaggccuugccc

SEQ ID NO: 487043 - RNA, 19 nt, Artificial Sequence
  Description of Artificial Sequence: Synthetic oligonucleotide
  Sense strand starting at position 3135 of SEQ ID NO: 317388
cucgaacauuugggaaaga

SEQ ID NO: 487044 - RNA, 19 nt, Artificial Sequence
  Description of Artificial Sequence: Synthetic oligonucleotide
  Antisense Strand to SEQ ID NO: 487043
ucuuucccaaauguucgag

SEQ ID NO: 487045 - RNA, 19 nt, Artificial Sequence
  Description of Artificial Sequence: Synthetic oligonucleotide
  Sense strand starting at position 3136 of SEQ ID NO: 317388
ucgaacauuugggaaagau

SEQ ID NO: 487046 - RNA, 19 nt, Artificial Sequence
  Description of Artificial Sequence: Synthetic oligonucleotide
  Antisense Strand to SEQ ID NO: 487045
aucuuucccaaauguucga

SEQ ID NO: 487047 - RNA, 19 nt, Artificial Sequence
  Description of Artificial Sequence: Synthetic oligonucleotide
  Sense strand starting at position 3417 of SEQ ID NO: 317388
gugggaacaucuggucuca

SEQ ID NO: 487048 - RNA, 19 nt, Artificial Sequence
  Description of Artificial Sequence: Synthetic oligonucleotide
  Antisense Strand to SEQ ID NO: 487047
ugagaccagauguucccac

SEQ ID NO: 487049 - RNA, 19 nt, Artificial Sequence
  Description of Artificial Sequence: Synthetic oligonucleotide
  Sense strand starting at position 3419 of SEQ ID NO: 317388
gggaacaucuggucucaca

SEQ ID NO: 487050 - RNA, 19 nt, Artificial Sequence
  Description of Artificial Sequence: Synthetic oligonucleotide
  Antisense Strand to SEQ ID NO: 487049
ugugagaccagauguuccc

SEQ ID NO: 487051 - RNA, 19 nt, Artificial Sequence
  Description of Artificial Sequence: Synthetic oligonucleotide
  Sense strand starting at position 3536 of SEQ ID NO: 317388
gcaggagaucacugaacau

SEQ ID NO: 487052 - RNA, 19 nt, Artificial Sequence
  Description of Artificial Sequence: Synthetic oligonucleotide
  Antisense Strand to SEQ ID NO: 487051
auguucagugaucuccugc

SEQ ID NO: 487053 - RNA, 19 nt, Artificial Sequence
  Description of Artificial Sequence: Synthetic oligonucleotide
  Sense strand starting at position 3897 of SEQ ID NO: 317388
cugggugugguccaaacua

SEQ ID NO: 487054 - RNA, 19 nt, Artificial Sequence
  Description of Artificial Sequence: Synthetic oligonucleotide
  Antisense Strand to SEQ ID NO: 487053
uaguuuggaccacacccag

SEQ ID NO: 487055 - RNA, 19 nt, Artificial Sequence
  Description of Artificial Sequence: Synthetic oligonucleotide
  Sense strand starting at position 3905 of SEQ ID NO: 317388
gguccaaacuacuugggaa

SEQ ID NO: 487056 - RNA, 19 nt, Artificial Sequence
  Description of Artificial Sequence: Synthetic oligonucleotide
  Antisense Strand to SEQ ID NO: 487055
uucccaaguaguuuggacc

SEQ ID NO: 487057 - RNA, 19 nt, Artificial Sequence
  Description of Artificial Sequence: Synthetic oligonucleotide
  Sense strand starting at position 3928 of SEQ ID NO: 317388
agguuaaaggaucgcuuga

SEQ ID NO: 487058 - RNA, 19 nt, Artificial Sequence
  Description of Artificial Sequence: Synthetic oligonucleotide
  Antisense Strand to SEQ ID NO: 487057
ucaagcgauccuuuaaccu

SEQ ID NO: 487059 - RNA, 19 nt, Artificial Sequence
  Description of Artificial Sequence: Synthetic oligonucleotide
  Sense strand starting at position 8 of SEQ ID NO: 317389
cguuuacaucaaggacaau

SEQ ID NO: 487060 - RNA, 19 nt, Artificial Sequence
  Description of Artificial Sequence: Synthetic oligonucleotide
  Antisense Strand to SEQ ID NO: 487059
auuguccuugauguaaacg

SEQ ID NO: 487061 - RNA, 19 nt, Artificial Sequence
  Description of Artificial Sequence: Synthetic oligonucleotide
  Sense strand starting at position 65 of SEQ ID NO: 317389
cccugaggucaccauguuu

SEQ ID NO: 487062 - RNA, 19 nt, Artificial Sequence
  Description of Artificial Sequence: Synthetic oligonucleotide
  Antisense Strand to SEQ ID NO: 487061
aaacauggugaccucaggg

SEQ ID NO: 487063 - RNA, 19 nt, Artificial Sequence
  Description of Artificial Sequence: Synthetic oligonucleotide
  Sense strand starting at position 356 of SEQ ID NO: 317389
gugauaaaccugcaucaac

SEQ ID NO: 487064 - RNA, 19 nt, Artificial Sequence
  Description of Artificial Sequence: Synthetic oligonucleotide
  Antisense Strand to SEQ ID NO: 487063
guugaugcagguuuaucac

SEQ ID NO: 487065 - RNA, 19 nt, Artificial Sequence
  Description of Artificial Sequence: Synthetic oligonucleotide
  Sense strand starting at position 455 of SEQ ID NO: 317389
cgagguacuccucaucaga

SEQ ID NO: 487066 - RNA, 19 nt, Artificial Sequence
  Description of Artificial Sequence: Synthetic oligonucleotide
  Antisense Strand to SEQ ID NO: 487065
ucugaugaggaguaccucg

SEQ ID NO: 487067 - RNA, 19 nt, Artificial Sequence
  Description of Artificial Sequence: Synthetic oligonucleotide
  Sense strand starting at position 595 of SEQ ID NO: 317389
ugcugagagaugugaccau

SEQ ID NO: 487068 - RNA, 19 nt, Artificial Sequence
  Description of Artificial Sequence: Synthetic oligonucleotide
  Antisense Strand to SEQ ID NO: 487067
auggucacaucucucagca

SEQ ID NO: 487069 - RNA, 19 nt, Artificial Sequence
  Description of Artificial Sequence: Synthetic oligonucleotide
  Sense strand starting at position 882 of SEQ ID NO: 317389
ccaggauucccaggacuca

SEQ ID NO: 487070 - RNA, 19 nt, Artificial Sequence
  Description of Artificial Sequence: Synthetic oligonucleotide
  Antisense Strand to SEQ ID NO: 487069
ugaguccugggaauccugg

SEQ ID NO: 487071 - RNA, 19 nt, Artificial Sequence
  Description of Artificial Sequence: Synthetic oligonucleotide
  Sense strand starting at position 891 of SEQ ID NO: 317389
ccaggacucauccggaaca

SEQ ID NO: 487072 - RNA, 19 nt, Artificial Sequence
  Description of Artificial Sequence: Synthetic oligonucleotide
  Antisense Strand to SEQ ID NO: 487071
uguuccggaugaguccugg

SEQ ID NO: 487073 - RNA, 19 nt, Artificial Sequence
  Description of Artificial Sequence: Synthetic oligonucleotide
  Sense strand starting at position 1386 of SEQ ID NO: 317389
cagguuguucuggaggcau

SEQ ID NO: 487074 - RNA, 19 nt, Artificial Sequence
  Description of Artificial Sequence: Synthetic oligonucleotide
  Antisense Strand to SEQ ID NO: 487073
augccuccagaacaaccug

SEQ ID NO: 487075 - RNA, 19 nt, Artificial Sequence
  Description of Artificial Sequence: Synthetic oligonucleotide
  Sense strand starting at position 2277 of SEQ ID NO: 317389
aguccucacagcgaaaguu

SEQ ID NO: 487076 - RNA, 19 nt, Artificial Sequence
  Description of Artificial Sequence: Synthetic oligonucleotide
  Antisense Strand to SEQ ID NO: 487075
aacuuucgcugugaggacu

SEQ ID NO: 487077 - RNA, 19 nt, Artificial Sequence
  Description of Artificial Sequence: Synthetic oligonucleotide
  Sense strand starting at position 2656 of SEQ ID NO: 317389
caggcaaucugaguuaucu

SEQ ID NO: 487078 - RNA, 19 nt, Artificial Sequence
  Description of Artificial Sequence: Synthetic oligonucleotide
  Antisense Strand to SEQ ID NO: 487077
agauaacucagauugccug

SEQ ID NO: 487079 - RNA, 19 nt, Artificial Sequence
  Description of Artificial Sequence: Synthetic oligonucleotide
  Sense strand starting at position 2679 of SEQ ID NO: 317389
uuauuaacgcuguagagga

SEQ ID NO: 487080 - RNA, 19 nt, Artificial Sequence
  Description of Artificial Sequence: Synthetic oligonucleotide
  Antisense Strand to SEQ ID NO: 487079
uccucuacagcguuaauaa

SEQ ID NO: 487081 - RNA, 19 nt, Artificial Sequence
  Description of Artificial Sequence: Synthetic oligonucleotide
  Sense strand starting at position 2704 of SEQ ID NO: 317389
cagauuucucgaggcugua

SEQ ID NO: 487082 - RNA, 19 nt, Artificial Sequence
  Description of Artificial Sequence: Synthetic oligonucleotide
  Antisense Strand to SEQ ID NO: 487081
uacagccucgagaaaucug

SEQ ID NO: 487083 - RNA, 19 nt, Artificial Sequence
  Description of Artificial Sequence: Synthetic oligonucleotide
  Sense strand starting at position 2863 of SEQ ID NO: 317389
auuacuacugggcaauauu

SEQ ID NO: 487084 - RNA, 19 nt, Artificial Sequence
  Description of Artificial Sequence: Synthetic oligonucleotide
  Antisense Strand to SEQ ID NO: 487083
aauauugcccaguaguaau

SEQ ID NO: 487085 - RNA, 19 nt, Artificial Sequence
  Description of Artificial Sequence: Synthetic oligonucleotide
  Sense strand starting at position 2872 of SEQ ID NO: 317389
gggcaauauugguuuggga

SEQ ID NO: 487086 - RNA, 19 nt, Artificial Sequence
  Description of Artificial Sequence: Synthetic oligonucleotide
  Antisense Strand to SEQ ID NO: 487085
ucccaaaccaauauugccc

SEQ ID NO: 487087 - RNA, 19 nt, Artificial Sequence
  Description of Artificial Sequence: Synthetic oligonucleotide
  Sense strand starting at position 2874 of SEQ ID NO: 317389
gcaauauugguuugggacu

SEQ ID NO: 487088 - RNA, 19 nt, Artificial Sequence
  Description of Artificial Sequence: Synthetic oligonucleotide
  Antisense Strand to SEQ ID NO: 487087
agucccaaaccaauauugc

SEQ ID NO: 487089 - RNA, 19 nt, Artificial Sequence
  Description of Artificial Sequence: Synthetic oligonucleotide
  Sense strand starting at position 3018 of SEQ ID NO: 317389
agguauuugauguguagca

SEQ ID NO: 487090 - RNA, 19 nt, Artificial Sequence
  Description of Artificial Sequence: Synthetic oligonucleotide
  Antisense Strand to SEQ ID NO: 487089
ugcuacacaucaaauaccu

SEQ ID NO: 487091 - RNA, 19 nt, Artificial Sequence
  Description of Artificial Sequence: Synthetic oligonucleotide
  Sense strand starting at position 3019 of SEQ ID NO: 317389
gguauuugauguguagcau

SEQ ID NO: 487092 - RNA, 19 nt, Artificial Sequence
  Description of Artificial Sequence: Synthetic oligonucleotide
  Antisense Strand to SEQ ID NO: 487091
augcuacacaucaaauacc

SEQ ID NO: 487093 - RNA, 19 nt, Artificial Sequence
  Description of Artificial Sequence: Synthetic oligonucleotide
  Sense strand starting at position 3020 of SEQ ID NO: 317389
guauuugauguguagcauu

SEQ ID NO: 487094 - RNA, 19 nt, Artificial Sequence
  Description of Artificial Sequence: Synthetic oligonucleotide
  Antisense Strand to SEQ ID NO: 487093
aaugcuacacaucaaauac

SEQ ID NO: 487095 - RNA, 19 nt, Artificial Sequence
  Description of Artificial Sequence: Synthetic oligonucleotide
  Sense strand starting at position 3237 of SEQ ID NO: 317389
augugagauccuggauguc

SEQ ID NO: 487096 - RNA, 19 nt, Artificial Sequence
  Description of Artificial Sequence: Synthetic oligonucleotide
  Antisense Strand to SEQ ID NO: 487095
gacauccaggaucucacau

SEQ ID NO: 487097 - RNA, 19 nt, Artificial Sequence
  Description of Artificial Sequence: Synthetic oligonucleotide
  Sense strand starting at position 3257 of SEQ ID NO: 317389
cucacuguuccuuaucagu

SEQ ID NO: 487098 - RNA, 19 nt, Artificial Sequence
  Description of Artificial Sequence: Synthetic oligonucleotide
  Antisense Strand to SEQ ID NO: 487097
acugauaaggaacagugag

SEQ ID NO: 487099 - RNA, 19 nt, Artificial Sequence
  Description of Artificial Sequence: Synthetic oligonucleotide
  Sense strand starting at position 3278 of SEQ ID NO: 317389
uguugacaugccugagaua

SEQ ID NO: 487100 - RNA, 19 nt, Artificial Sequence
  Description of Artificial Sequence: Synthetic oligonucleotide
  Antisense Strand to SEQ ID NO: 487099
uaucucaggcaugucaaca

SEQ ID NO: 487101 - RNA, 19 nt, Artificial Sequence
  Description of Artificial Sequence: Synthetic oligonucleotide
  Sense strand starting at position 3279 of SEQ ID NO: 317389
guugacaugccugagauag

SEQ ID NO: 487102 - RNA, 19 nt, Artificial Sequence
  Description of Artificial Sequence: Synthetic oligonucleotide
  Antisense Strand to SEQ ID NO: 487101
cuaucucaggcaugucaac

SEQ ID NO: 487103 - RNA, 19 nt, Artificial Sequence
  Description of Artificial Sequence: Synthetic oligonucleotide
  Sense strand starting at position 3421 of SEQ ID NO: 317389
caggaaauaugucuguuuc

SEQ ID NO: 487104 - RNA, 19 nt, Artificial Sequence
  Description of Artificial Sequence: Synthetic oligonucleotide
  Antisense Strand to SEQ ID NO: 487103
gaaacagacauauuuccug

SEQ ID NO: 487105 - RNA, 19 nt, Artificial Sequence
  Description of Artificial Sequence: Synthetic oligonucleotide
  Sense strand starting at position 3422 of SEQ ID NO: 317389
aggaaauaugucuguuucu

SEQ ID NO: 487106 - RNA, 19 nt, Artificial Sequence
  Description of Artificial Sequence: Synthetic oligonucleotide
  Antisense Strand to SEQ ID NO: 487105
agaaacagacauauuuccu

SEQ ID NO: 487107 - RNA, 19 nt, Artificial Sequence
  Description of Artificial Sequence: Synthetic oligonucleotide
  Sense strand starting at position 3423 of SEQ ID NO: 317389
ggaaauaugucuguuucuc

SEQ ID NO: 487108 - RNA, 19 nt, Artificial Sequence
  Description of Artificial Sequence: Synthetic oligonucleotide
  Antisense Strand to SEQ ID NO: 487107
gagaaacagacauauuucc

SEQ ID NO: 487109 - RNA, 19 nt, Artificial Sequence
  Description of Artificial Sequence: Synthetic oligonucleotide
  Sense strand starting at position 3448 of SEQ ID NO: 317389
ucucauguccacuguauuu

SEQ ID NO: 487110 - RNA, 19 nt, Artificial Sequence
  Description of Artificial Sequence: Synthetic oligonucleotide
  Antisense Strand to SEQ ID NO: 487109
aaauacaguggacaugaga

SEQ ID NO: 487111 - RNA, 19 nt, Artificial Sequence
  Description of Artificial Sequence: Synthetic oligonucleotide
  Sense strand starting at position 3582 of SEQ ID NO: 317389
cuauacuucucgccaagaa

SEQ ID NO: 487112 - RNA, 19 nt, Artificial Sequence
  Description of Artificial Sequence: Synthetic oligonucleotide
  Antisense Strand to SEQ ID NO: 487111
uucuuggcgagaaguauag

SEQ ID NO: 487113 - RNA, 19 nt, Artificial Sequence
  Description of Artificial Sequence: Synthetic oligonucleotide
  Sense strand starting at position 3602 of SEQ ID NO: 317389
gaguauugaaaguaugugu

SEQ ID NO: 487114 - RNA, 19 nt, Artificial Sequence
  Description of Artificial Sequence: Synthetic oligonucleotide
  Antisense Strand to SEQ ID NO: 487113
acacauacuuucaauacuc

SEQ ID NO: 487115 - RNA, 19 nt, Artificial Sequence
  Description of Artificial Sequence: Synthetic oligonucleotide
  Sense strand starting at position 3625 of SEQ ID NO: 317389
gcccuacaauuguugacaa

SEQ ID NO: 487116 - RNA, 19 nt, Artificial Sequence
  Description of Artificial Sequence: Synthetic oligonucleotide
  Antisense Strand to SEQ ID NO: 487115
uugucaacaauuguagggc

SEQ ID NO: 487117 - RNA, 19 nt, Artificial Sequence
  Description of Artificial Sequence: Synthetic oligonucleotide
  Sense strand starting at position 3660 of SEQ ID NO: 317389
ggaccaaucuuagugacug

SEQ ID NO: 487118 - RNA, 19 nt, Artificial Sequence
  Description of Artificial Sequence: Synthetic oligonucleotide
  Antisense Strand to SEQ ID NO: 487117
cagucacuaagauuggucc

SEQ ID NO: 487119 - RNA, 19 nt, Artificial Sequence
  Description of Artificial Sequence: Synthetic oligonucleotide
  Sense strand starting at position 3670 of SEQ ID NO: 317389
uagugacugcccuauagac

SEQ ID NO: 487120 - RNA, 19 nt, Artificial Sequence
  Description of Artificial Sequence: Synthetic oligonucleotide
  Antisense Strand to SEQ ID NO: 487119
gucuauagggcagucacua

SEQ ID NO: 487121 - RNA, 19 nt, Artificial Sequence
  Description of Artificial Sequence: Synthetic oligonucleotide
  Sense strand starting at position 3741 of SEQ ID NO: 317389
aggaaugaaucuuugguuu

SEQ ID NO: 487122 - RNA, 19 nt, Artificial Sequence
  Description of Artificial Sequence: Synthetic oligonucleotide
  Antisense Strand to SEQ ID NO: 487121
aaaccaaagauucauuccu

SEQ ID NO: 487123 - RNA, 19 nt, Artificial Sequence
  Description of Artificial Sequence: Synthetic oligonucleotide
  Sense strand starting at position 3759 of SEQ ID NO: 317389
uuacauuaucuaggucaga

SEQ ID NO: 487124 - RNA, 19 nt, Artificial Sequence
  Description of Artificial Sequence: Synthetic oligonucleotide
  Antisense Strand to SEQ ID NO: 487123
ucugaccuagauaauguaa

SEQ ID NO: 487125 - RNA, 19 nt, Artificial Sequence
  Description of Artificial Sequence: Synthetic oligonucleotide
  Sense strand starting at position 3830 of SEQ ID NO: 317389
acccaauacuggguugaga

SEQ ID NO: 487126 - RNA, 19 nt, Artificial Sequence
  Description of Artificial Sequence: Synthetic oligonucleotide
  Antisense Strand to SEQ ID NO: 487125
ucucaacccaguauugggu

SEQ ID NO: 487127 - RNA, 19 nt, Artificial Sequence
  Description of Artificial Sequence: Synthetic oligonucleotide
  Sense strand starting at position 3943 of SEQ ID NO: 317389
uugaguuuauuugcuggua

SEQ ID NO: 487128 - RNA, 19 nt, Artificial Sequence
  Description of Artificial Sequence: Synthetic oligonucleotide
  Antisense Strand to SEQ ID NO: 487127
uaccagcaaauaaacucaa

SEQ ID NO: 487129 - RNA, 19 nt, Artificial Sequence
  Description of Artificial Sequence: Synthetic oligonucleotide
  Sense strand starting at position 3944 of SEQ ID NO: 317389
ugaguuuauuugcugguau

SEQ ID NO: 487130 - RNA, 19 nt, Artificial Sequence
  Description of Artificial Sequence: Synthetic oligonucleotide
  Antisense Strand to SEQ ID NO: 487129
auaccagcaaauaaacuca

SEQ ID NO: 487131 - RNA, 19 nt, Artificial Sequence
  Description of Artificial Sequence: Synthetic oligonucleotide
  Sense strand starting at position 3946 of SEQ ID NO: 317389
aguuuauuugcugguauag

SEQ ID NO: 487132 - RNA, 19 nt, Artificial Sequence
  Description of Artificial Sequence: Synthetic oligonucleotide
  Antisense Strand to SEQ ID NO: 487131
cuauaccagcaaauaaacu

SEQ ID NO: 487133 - RNA, 19 nt, Artificial Sequence
  Description of Artificial Sequence: Synthetic oligonucleotide
  Sense strand starting at position 3960 of SEQ ID NO: 317389
uauagagucuuguugggac

SEQ ID NO: 487134 - RNA, 19 nt, Artificial Sequence
  Description of Artificial Sequence: Synthetic oligonucleotide
  Antisense Strand to SEQ ID NO: 487133
gucccaacaagacucuaua

SEQ ID NO: 487135 - RNA, 19 nt, Artificial Sequence
  Description of Artificial Sequence: Synthetic oligonucleotide
  Sense strand starting at position 3967 of SEQ ID NO: 317389
ucuuguugggacugaguaa

SEQ ID NO: 487136 - RNA, 19 nt, Artificial Sequence
  Description of Artificial Sequence: Synthetic oligonucleotide
  Antisense Strand to SEQ ID NO: 487135
uuacucagucccaacaaga

SEQ ID NO: 487137 - RNA, 19 nt, Artificial Sequence
  Description of Artificial Sequence: Synthetic oligonucleotide
  Sense strand starting at position 3979 of SEQ ID NO: 317389
ugaguaaggugaguccaua

SEQ ID NO: 487138 - RNA, 19 nt, Artificial Sequence
  Description of Artificial Sequence: Synthetic oligonucleotide
  Antisense Strand to SEQ ID NO: 487137
uauggacucaccuuacuca

SEQ ID NO: 487139 - RNA, 19 nt, Artificial Sequence
  Description of Artificial Sequence: Synthetic oligonucleotide
  Sense strand starting at position 78 of SEQ ID NO: 317390
cuuaguugauaugugaauc

SEQ ID NO: 487140 - RNA, 19 nt, Artificial Sequence
  Description of Artificial Sequence: Synthetic oligonucleotide
  Antisense Strand to SEQ ID NO: 487139
gauucacauaucaacuaag

SEQ ID NO: 487141 - RNA, 19 nt, Artificial Sequence
  Description of Artificial Sequence: Synthetic oligonucleotide
  Sense strand starting at position 92 of SEQ ID NO: 317390
gaaucugugccaugaggag

SEQ ID NO: 487142 - RNA, 19 nt, Artificial Sequence
  Description of Artificial Sequence: Synthetic oligonucleotide
  Antisense Strand to SEQ ID NO: 487141
cuccucauggcacagauuc

SEQ ID NO: 487143 - RNA, 19 nt, Artificial Sequence
  Description of Artificial Sequence: Synthetic oligonucleotide
  Sense strand starting at position 143 of SEQ ID NO: 317390
aggaaaugccagcacucua

SEQ ID NO: 487144 - RNA, 19 nt, Artificial Sequence
  Description of Artificial Sequence: Synthetic oligonucleotide
  Antisense Strand to SEQ ID NO: 487143
uagagugcuggcauuuccu

SEQ ID NO: 487145 - RNA, 19 nt, Artificial Sequence
  Description of Artificial Sequence: Synthetic oligonucleotide
  Sense strand starting at position 259 of SEQ ID NO: 317390
aguugauuggacgauaagu

SEQ ID NO: 487146 - RNA, 19 nt, Artificial Sequence
  Description of Artificial Sequence: Synthetic oligonucleotide
  Antisense Strand to SEQ ID NO: 487145
acuuaucguccaaucaacu

SEQ ID NO: 487147 - RNA, 19 nt, Artificial Sequence
  Description of Artificial Sequence: Synthetic oligonucleotide
  Sense strand starting at position 400 of SEQ ID NO: 317390
ucagguuugacugaguaag

SEQ ID NO: 487148 - RNA, 19 nt, Artificial Sequence
  Description of Artificial Sequence: Synthetic oligonucleotide
  Antisense Strand to SEQ ID NO: 487147
cuuacucagucaaaccuga

SEQ ID NO: 487149 - RNA, 19 nt, Artificial Sequence
  Description of Artificial Sequence: Synthetic oligonucleotide
  Sense strand starting at position 432 of SEQ ID NO: 317390
aaagcuggugucuacgaga

SEQ ID NO: 487150 - RNA, 19 nt, Artificial Sequence
  Description of Artificial Sequence: Synthetic oligonucleotide
  Antisense Strand to SEQ ID NO: 487149
ucucguagacaccagcuuu

SEQ ID NO: 487151 - RNA, 19 nt, Artificial Sequence
  Description of Artificial Sequence: Synthetic oligonucleotide
  Sense strand starting at position 481 of SEQ ID NO: 317390
gcugacuuggacugaguga

SEQ ID NO: 487152 - RNA, 19 nt, Artificial Sequence
  Description of Artificial Sequence: Synthetic oligonucleotide
  Antisense Strand to SEQ ID NO: 487151
ucacucaguccaagucagc

SEQ ID NO: 487153 - RNA, 19 nt, Artificial Sequence
  Description of Artificial Sequence: Synthetic oligonucleotide
  Sense strand starting at position 644 of SEQ ID NO: 317390
aguauugaucugcaguuaa

SEQ ID NO: 487154 - RNA, 19 nt, Artificial Sequence
  Description of Artificial Sequence: Synthetic oligonucleotide
  Antisense Strand to SEQ ID NO: 487153
uuaacugcagaucaauacu

SEQ ID NO: 487155 - RNA, 19 nt, Artificial Sequence
  Description of Artificial Sequence: Synthetic oligonucleotide
  Sense strand starting at position 1085 of SEQ ID NO: 317390
ugcuguuaggcucaggaga

SEQ ID NO: 487156 - RNA, 19 nt, Artificial Sequence
  Description of Artificial Sequence: Synthetic oligonucleotide
  Antisense Strand to SEQ ID NO: 487155
ucuccugagccuaacagca

SEQ ID NO: 487157 - RNA, 19 nt, Artificial Sequence
  Description of Artificial Sequence: Synthetic oligonucleotide
  Sense strand starting at position 1202 of SEQ ID NO: 317390
guaauaaaguacuucuaca

SEQ ID NO: 487158 - RNA, 19 nt, Artificial Sequence
  Description of Artificial Sequence: Synthetic oligonucleotide
  Antisense Strand to SEQ ID NO: 487157
uguagaaguacuuuauuac

SEQ ID NO: 487159 - RNA, 19 nt, Artificial Sequence
  Description of Artificial Sequence: Synthetic oligonucleotide
  Sense strand starting at position 1247 of SEQ ID NO: 317390
cuaagaucugaaugcuacu

SEQ ID NO: 487160 - RNA, 19 nt, Artificial Sequence
  Description of Artificial Sequence: Synthetic oligonucleotide
  Antisense Strand to SEQ ID NO: 487159
aguagcauucagaucuuag

SEQ ID NO: 487161 - RNA, 19 nt, Artificial Sequence
  Description of Artificial Sequence: Synthetic oligonucleotide
  Sense strand starting at position 1466 of SEQ ID NO: 317390
uugacagcuuuaucagauc

SEQ ID NO: 487162 - RNA, 19 nt, Artificial Sequence
  Description of Artificial Sequence: Synthetic oligonucleotide
  Antisense Strand to SEQ ID NO: 487161
gaucugauaaagcugucaa

SEQ ID NO: 487163 - RNA, 19 nt, Artificial Sequence
  Description of Artificial Sequence: Synthetic oligonucleotide
  Sense strand starting at position 1486 of SEQ ID NO: 317390
cgcaaaucagcuuaacaaa

SEQ ID NO: 487164 - RNA, 19 nt, Artificial Sequence
  Description of Artificial Sequence: Synthetic oligonucleotide
  Antisense Strand to SEQ ID NO: 487163
uuuguuaagcugauuugcg

SEQ ID NO: 487165 - RNA, 19 nt, Artificial Sequence
  Description of Artificial Sequence: Synthetic oligonucleotide
  Sense strand starting at position 1663 of SEQ ID NO: 317390
ucguuagcucugcuucuuu

SEQ ID NO: 487166 - RNA, 19 nt, Artificial Sequence
  Description of Artificial Sequence: Synthetic oligonucleotide
  Antisense Strand to SEQ ID NO: 487165
aaagaagcagagcuaacga

SEQ ID NO: 487167 - RNA, 19 nt, Artificial Sequence
  Description of Artificial Sequence: Synthetic oligonucleotide
  Sense strand starting at position 1696 of SEQ ID NO: 317390
ucaagucuacuggaguuga

SEQ ID NO: 487168 - RNA, 19 nt, Artificial Sequence
  Description of Artificial Sequence: Synthetic oligonucleotide
  Antisense Strand to SEQ ID NO: 487167
ucaacuccaguagacuuga

SEQ ID NO: 487169 - RNA, 19 nt, Artificial Sequence
  Description of Artificial Sequence: Synthetic oligonucleotide
  Sense strand starting at position 1700 of SEQ ID NO: 317390
gucuacuggaguugaaauu

SEQ ID NO: 487170 - RNA, 19 nt, Artificial Sequence
  Description of Artificial Sequence: Synthetic oligonucleotide
  Antisense Strand to SEQ ID NO: 487169
aauuucaacuccaguagac

SEQ ID NO: 487171 - RNA, 19 nt, Artificial Sequence
  Description of Artificial Sequence: Synthetic oligonucleotide
  Sense strand starting at position 1771 of SEQ ID NO: 317390
guuggcaccagagaguauu

SEQ ID NO: 487172 - RNA, 19 nt, Artificial Sequence
  Description of Artificial Sequence: Synthetic oligonucleotide
  Antisense Strand to SEQ ID NO: 487171
aauacucucuggugccaac

SEQ ID NO: 487173 - RNA, 19 nt, Artificial Sequence
  Description of Artificial Sequence: Synthetic oligonucleotide
  Sense strand starting at position 1953 of SEQ ID NO: 317390
ccucauaacuuggccagaa

SEQ ID NO: 487174 - RNA, 19 nt, Artificial Sequence
  Description of Artificial Sequence: Synthetic oligonucleotide
  Antisense Strand to SEQ ID NO: 487173
uucuggccaaguuaugagg

SEQ ID NO: 487175 - RNA, 19 nt, Artificial Sequence
  Description of Artificial Sequence: Synthetic oligonucleotide
  Sense strand starting at position 1954 of SEQ ID NO: 317390
cucauaacuuggccagaau

SEQ ID NO: 487176 - RNA, 19 nt, Artificial Sequence
  Description of Artificial Sequence: Synthetic oligonucleotide
  Antisense Strand to SEQ ID NO: 487175
auucuggccaaguuaugag

SEQ ID NO: 487177 - RNA, 19 nt, Artificial Sequence
  Description of Artificial Sequence: Synthetic oligonucleotide
  Sense strand starting at position 2178 of SEQ ID NO: 317390
auuggaaauuguucuagca

SEQ ID NO: 487178 - RNA, 19 nt, Artificial Sequence
  Description of Artificial Sequence: Synthetic oligonucleotide
  Antisense Strand to SEQ ID NO: 487177
ugcuagaacaauuuccaau

SEQ ID NO: 487179 - RNA, 19 nt, Artificial Sequence
  Description of Artificial Sequence: Synthetic oligonucleotide
  Sense strand starting at position 2240 of SEQ ID NO: 317390
accuucuuugaaugagauu

SEQ ID NO: 487180 - RNA, 19 nt, Artificial Sequence
  Description of Artificial Sequence: Synthetic oligonucleotide
  Antisense Strand to SEQ ID NO: 487179
aaucucauucaaagaaggu

SEQ ID NO: 487181 - RNA, 19 nt, Artificial Sequence
  Description of Artificial Sequence: Synthetic oligonucleotide
  Sense strand starting at position 2360 of SEQ ID NO: 317390
guaacuccaugguuauaau

SEQ ID NO: 487182 - RNA, 19 nt, Artificial Sequence
  Description of Artificial Sequence: Synthetic oligonucleotide
  Antisense Strand to SEQ ID NO: 487181
auuauaaccauggaguuac

SEQ ID NO: 487183 - RNA, 19 nt, Artificial Sequence
  Description of Artificial Sequence: Synthetic oligonucleotide
  Sense strand starting at position 2372 of SEQ ID NO: 317390
uuauaaugguugguaucua

SEQ ID NO: 487184 - RNA, 19 nt, Artificial Sequence
  Description of Artificial Sequence: Synthetic oligonucleotide
  Antisense Strand to SEQ ID NO: 487183
uagauaccaaccauuauaa

SEQ ID NO: 487185 - RNA, 19 nt, Artificial Sequence
  Description of Artificial Sequence: Synthetic oligonucleotide
  Sense strand starting at position 2376 of SEQ ID NO: 317390
aaugguugguaucuaagaa

SEQ ID NO: 487186 - RNA, 19 nt, Artificial Sequence
  Description of Artificial Sequence: Synthetic oligonucleotide
  Antisense Strand to SEQ ID NO: 487185
uucuuagauaccaaccauu

SEQ ID NO: 487187 - RNA, 19 nt, Artificial Sequence
  Description of Artificial Sequence: Synthetic oligonucleotide
  Sense strand starting at position 2679 of SEQ ID NO: 317390
cuaacuaugacccgggaca

SEQ ID NO: 487188 - RNA, 19 nt, Artificial Sequence
  Description of Artificial Sequence: Synthetic oligonucleotide
  Antisense Strand to SEQ ID NO: 487187
ugucccgggucauaguuag

SEQ ID NO: 487189 - RNA, 19 nt, Artificial Sequence
  Description of Artificial Sequence: Synthetic oligonucleotide
  Sense strand starting at position 2680 of SEQ ID NO: 317390
uaacuaugacccgggacaa

SEQ ID NO: 487190 - RNA, 19 nt, Artificial Sequence
  Description of Artificial Sequence: Synthetic oligonucleotide
  Antisense Strand to SEQ ID NO: 487189
uugucccgggucauaguua

SEQ ID NO: 487191 - RNA, 19 nt, Artificial Sequence
  Description of Artificial Sequence: Synthetic oligonucleotide
  Sense strand starting at position 2921 of SEQ ID NO: 317390
gguauccaacuguaacuua

SEQ ID NO: 487192 - RNA, 19 nt, Artificial Sequence
  Description of Artificial Sequence: Synthetic oligonucleotide
  Antisense Strand to SEQ ID NO: 487191
uaaguuacaguuggauacc

SEQ ID NO: 487193 - RNA, 19 nt, Artificial Sequence
  Description of Artificial Sequence: Synthetic oligonucleotide
  Sense strand starting at position 3048 of SEQ ID NO: 317390
cugagaaagcuguaaacuc

SEQ ID NO: 487194 - RNA, 19 nt, Artificial Sequence
  Description of Artificial Sequence: Synthetic oligonucleotide
  Antisense Strand to SEQ ID NO: 487193
gaguuuacagcuuucucag

SEQ ID NO: 487195 - RNA, 19 nt, Artificial Sequence
  Description of Artificial Sequence: Synthetic oligonucleotide
  Sense strand starting at position 3056 of SEQ ID NO: 317390
gcuguaaacuccuugaagg

SEQ ID NO: 487196 - RNA, 19 nt, Artificial Sequence
  Description of Artificial Sequence: Synthetic oligonucleotide
  Antisense Strand to SEQ ID NO: 487195
ccuucaaggaguuuacagc

SEQ ID NO: 487197 - RNA, 19 nt, Artificial Sequence
  Description of Artificial Sequence: Synthetic oligonucleotide
  Sense strand starting at position 3137 of SEQ ID NO: 317390
guuccauuaucaucagaug

SEQ ID NO: 487198 - RNA, 19 nt, Artificial Sequence
  Description of Artificial Sequence: Synthetic oligonucleotide
  Antisense Strand to SEQ ID NO: 487197
caucugaugauaauggaac

SEQ ID NO: 487199 - RNA, 19 nt, Artificial Sequence
  Description of Artificial Sequence: Synthetic oligonucleotide
  Sense strand starting at position 3395 of SEQ ID NO: 317390
ggagaaauuugggagcaga

SEQ ID NO: 487200 - RNA, 19 nt, Artificial Sequence
  Description of Artificial Sequence: Synthetic oligonucleotide
  Antisense Strand to SEQ ID NO: 487199
ucugcucccaaauuucucc

SEQ ID NO: 487201 - RNA, 19 nt, Artificial Sequence
  Description of Artificial Sequence: Synthetic oligonucleotide
  Sense strand starting at position 3474 of SEQ ID NO: 317390
cgucucuagaaucaggaua

SEQ ID NO: 487202 - RNA, 19 nt, Artificial Sequence
  Description of Artificial Sequence: Synthetic oligonucleotide
  Antisense Strand to SEQ ID NO: 487201
uauccugauucuagagacg

SEQ ID NO: 487203 - RNA, 19 nt, Artificial Sequence
  Description of Artificial Sequence: Synthetic oligonucleotide
  Sense strand starting at position 3487 of SEQ ID NO: 317390
aggauaacuuguuccaaac

SEQ ID NO: 487204 - RNA, 19 nt, Artificial Sequence
  Description of Artificial Sequence: Synthetic oligonucleotide
  Antisense Strand to SEQ ID NO: 487203
guuuggaacaaguuauccu

SEQ ID NO: 487205 - RNA, 19 nt, Artificial Sequence
  Description of Artificial Sequence: Synthetic oligonucleotide
  Sense strand starting at position 3592 of SEQ ID NO: 317390
gagcaaucuccucggagga

SEQ ID NO: 487206 - RNA, 19 nt, Artificial Sequence
  Description of Artificial Sequence: Synthetic oligonucleotide
  Antisense Strand to SEQ ID NO: 487205
uccuccgaggagauugcuc

SEQ ID NO: 487207 - RNA, 19 nt, Artificial Sequence
  Description of Artificial Sequence: Synthetic oligonucleotide
  Sense strand starting at position 3593 of SEQ ID NO: 317390
agcaaucuccucggaggaa

SEQ ID NO: 487208 - RNA, 19 nt, Artificial Sequence
  Description of Artificial Sequence: Synthetic oligonucleotide
  Antisense Strand to SEQ ID NO: 487207
uuccuccgaggagauugcu

SEQ ID NO: 487209 - RNA, 19 nt, Artificial Sequence
  Description of Artificial Sequence: Synthetic oligonucleotide
  Sense strand starting at position 3678 of SEQ ID NO: 317390
cucugagaaguguggaaga

SEQ ID NO: 487210 - RNA, 19 nt, Artificial Sequence
  Description of Artificial Sequence: Synthetic oligonucleotide
  Antisense Strand to SEQ ID NO: 487209
ucuuccacacuucucagag

SEQ ID NO: 487211 - RNA, 19 nt, Artificial Sequence
  Description of Artificial Sequence: Synthetic oligonucleotide
  Sense strand starting at position 3765 of SEQ ID NO: 317390
aagcauuucugaggauuug

SEQ ID NO: 487212 - RNA, 19 nt, Artificial Sequence
  Description of Artificial Sequence: Synthetic oligonucleotide
  Antisense Strand to SEQ ID NO: 487211
caaauccucagaaaugcuu

SEQ ID NO: 487213 - RNA, 19 nt, Artificial Sequence
  Description of Artificial Sequence: Synthetic oligonucleotide
  Sense strand starting at position 3784 of SEQ ID NO: 317390
gccuuaguuggcuaaagaa

SEQ ID NO: 487214 - RNA, 19 nt, Artificial Sequence
  Description of Artificial Sequence: Synthetic oligonucleotide
  Antisense Strand to SEQ ID NO: 487213
uucuuuagccaacuaaggc

SEQ ID NO: 487215 - RNA, 19 nt, Artificial Sequence
  Description of Artificial Sequence: Synthetic oligonucleotide
  Sense strand starting at position 3861 of SEQ ID NO: 317390
uuaagauggcuuuguaaga

SEQ ID NO: 487216 - RNA, 19 nt, Artificial Sequence
  Description of Artificial Sequence: Synthetic oligonucleotide
  Antisense Strand to SEQ ID NO: 487215
ucuuacaaagccaucuuaa

SEQ ID NO: 487217 - RNA, 19 nt, Artificial Sequence
  Description of Artificial Sequence: Synthetic oligonucleotide
  Sense strand starting at position 3862 of SEQ ID NO: 317390
uaagauggcuuuguaagau

SEQ ID NO: 487218 - RNA, 19 nt, Artificial Sequence
  Description of Artificial Sequence: Synthetic oligonucleotide
  Antisense Strand to SEQ ID NO: 487217
aucuuacaaagccaucuua

SEQ ID NO: 487219 - RNA, 19 nt, Artificial Sequence
  Description of Artificial Sequence: Synthetic oligonucleotide
  Sense strand starting at position 144 of SEQ ID NO: 317391
auccuaguguuauuuguaa

SEQ ID NO: 487220 - RNA, 19 nt, Artificial Sequence
  Description of Artificial Sequence: Synthetic oligonucleotide
  Antisense Strand to SEQ ID NO: 487219
uuacaaauaacacuaggau

SEQ ID NO: 487221 - RNA, 19 nt, Artificial Sequence
  Description of Artificial Sequence: Synthetic oligonucleotide
  Sense strand starting at position 158 of SEQ ID NO: 317391
uguaauaaacauugugaca

SEQ ID NO: 487222 - RNA, 19 nt, Artificial Sequence
  Description of Artificial Sequence: Synthetic oligonucleotide
  Antisense Strand to SEQ ID NO: 487221
ugucacaauguuuauuaca

SEQ ID NO: 487223 - RNA, 19 nt, Artificial Sequence
  Description of Artificial Sequence: Synthetic oligonucleotide
  Sense strand starting at position 235 of SEQ ID NO: 317391
guaaauacuguauacaugu

SEQ ID NO: 487224 - RNA, 19 nt, Artificial Sequence
  Description of Artificial Sequence: Synthetic oligonucleotide
  Antisense Strand to SEQ ID NO: 487223
acauguauacaguauuuac

SEQ ID NO: 487225 - RNA, 19 nt, Artificial Sequence
  Description of Artificial Sequence: Synthetic oligonucleotide
  Sense strand starting at position 679 of SEQ ID NO: 317391
cagcuaguucuaugcagag

SEQ ID NO: 487226 - RNA, 19 nt, Artificial Sequence
  Description of Artificial Sequence: Synthetic oligonucleotide
  Antisense Strand to SEQ ID NO: 487225
cucugcauagaacuagcug

SEQ ID NO: 487227 - RNA, 19 nt, Artificial Sequence
  Description of Artificial Sequence: Synthetic oligonucleotide
  Sense strand starting at position 683 of SEQ ID NO: 317391
uaguucuaugcagagccaa

SEQ ID NO: 487228 - RNA, 19 nt, Artificial Sequence
  Description of Artificial Sequence: Synthetic oligonucleotide
  Antisense Strand to SEQ ID NO: 487227
uuggcucugcauagaacua

SEQ ID NO: 487229 - RNA, 19 nt, Artificial Sequence
  Description of Artificial Sequence: Synthetic oligonucleotide
  Sense strand starting at position 691 of SEQ ID NO: 317391
ugcagagccaaauguagaa

SEQ ID NO: 487230 - RNA, 19 nt, Artificial Sequence
  Description of Artificial Sequence: Synthetic oligonucleotide
  Antisense Strand to SEQ ID NO: 487229
uucuacauuuggcucugca

SEQ ID NO: 487231 - RNA, 19 nt, Artificial Sequence
  Description of Artificial Sequence: Synthetic oligonucleotide
  Sense strand starting at position 918 of SEQ ID NO: 317391
acagaauacuggcuucuca

SEQ ID NO: 487232 - RNA, 19 nt, Artificial Sequence
  Description of Artificial Sequence: Synthetic oligonucleotide
  Antisense Strand to SEQ ID NO: 487231
ugagaagccaguauucugu

SEQ ID NO: 487233 - RNA, 19 nt, Artificial Sequence
  Description of Artificial Sequence: Synthetic oligonucleotide
  Sense strand starting at position 973 of SEQ ID NO: 317391
uuggaacugugccucaauu

SEQ ID NO: 487234 - RNA, 19 nt, Artificial Sequence
  Description of Artificial Sequence: Synthetic oligonucleotide
  Antisense Strand to SEQ ID NO: 487233
aauugaggcacaguuccaa

SEQ ID NO: 487235 - RNA, 19 nt, Artificial Sequence
  Description of Artificial Sequence: Synthetic oligonucleotide
  Sense strand starting at position 1011 of SEQ ID NO: 317391
aagugaaacccgcaacguu

SEQ ID NO: 487236 - RNA, 19 nt, Artificial Sequence
  Description of Artificial Sequence: Synthetic oligonucleotide
  Antisense Strand to SEQ ID NO: 487235
aacguugcggguuucacuu

SEQ ID NO: 487237 - RNA, 19 nt, Artificial Sequence
  Description of Artificial Sequence: Synthetic oligonucleotide
  Sense strand starting at position 1037 of SEQ ID NO: 317391
guccguuucgcugauuucu

SEQ ID NO: 487238 - RNA, 19 nt, Artificial Sequence
  Description of Artificial Sequence: Synthetic oligonucleotide
  Antisense Strand to SEQ ID NO: 487237
agaaaucagcgaaacggac

SEQ ID NO: 487239 - RNA, 19 nt, Artificial Sequence
  Description of Artificial Sequence: Synthetic oligonucleotide
  Sense strand starting at position 1045 of SEQ ID NO: 317391
cgcugauuucuggguaaau

SEQ ID NO: 487240 - RNA, 19 nt, Artificial Sequence
  Description of Artificial Sequence: Synthetic oligonucleotide
  Antisense Strand to SEQ ID NO: 487239
auuuacccagaaaucagcg

SEQ ID NO: 487241 - RNA, 19 nt, Artificial Sequence
  Description of Artificial Sequence: Synthetic oligonucleotide
  Sense strand starting at position 1404 of SEQ ID NO: 317391
cugagauccugguuaggaa

SEQ ID NO: 487242 - RNA, 19 nt, Artificial Sequence
  Description of Artificial Sequence: Synthetic oligonucleotide
  Antisense Strand to SEQ ID NO: 487241
uuccuaaccaggaucucag

SEQ ID NO: 487243 - RNA, 19 nt, Artificial Sequence
  Description of Artificial Sequence: Synthetic oligonucleotide
  Sense strand starting at position 2124 of SEQ ID NO: 317391
gaaguuaagucucuauaga

SEQ ID NO: 487244 - RNA, 19 nt, Artificial Sequence
  Description of Artificial Sequence: Synthetic oligonucleotide
  Antisense Strand to SEQ ID NO: 487243
ucuauagagacuuaacuuc

SEQ ID NO: 487245 - RNA, 19 nt, Artificial Sequence
  Description of Artificial Sequence: Synthetic oligonucleotide
  Sense strand starting at position 2330 of SEQ ID NO: 317391
agaguuuagcuccaggaug

SEQ ID NO: 487246 - RNA, 19 nt, Artificial Sequence
  Description of Artificial Sequence: Synthetic oligonucleotide
  Antisense Strand to SEQ ID NO: 487245
cauccuggagcuaaacucu

SEQ ID NO: 487247 - RNA, 19 nt, Artificial Sequence
  Description of Artificial Sequence: Synthetic oligonucleotide
  Sense strand starting at position 2366 of SEQ ID NO: 317391
aucccucagguuuggauaa

SEQ ID NO: 487248 - RNA, 19 nt, Artificial Sequence
  Description of Artificial Sequence: Synthetic oligonucleotide
  Antisense Strand to SEQ ID NO: 487247
uuauccaaaccugagggau

SEQ ID NO: 487249 - RNA, 19 nt, Artificial Sequence
  Description of Artificial Sequence: Synthetic oligonucleotide
  Sense strand starting at position 2420 of SEQ ID NO: 317391
agagucauugagcacucua

SEQ ID NO: 487250 - RNA, 19 nt, Artificial Sequence
  Description of Artificial Sequence: Synthetic oligonucleotide
  Antisense Strand to SEQ ID NO: 487249
uagagugcucaaugacucu

SEQ ID NO: 487251 - RNA, 19 nt, Artificial Sequence
  Description of Artificial Sequence: Synthetic oligonucleotide
  Sense strand starting at position 2455 of SEQ ID NO: 317391
ugaauucucuaauugggac

SEQ ID NO: 487252 - RNA, 19 nt, Artificial Sequence
  Description of Artificial Sequence: Synthetic oligonucleotide
  Antisense Strand to SEQ ID NO: 487251
gucccaauuagagaauuca

SEQ ID NO: 487253 - RNA, 19 nt, Artificial Sequence
  Description of Artificial Sequence: Synthetic oligonucleotide
  Sense strand starting at position 2470 of SEQ ID NO: 317391
ggacuuucuugaccuaguu

SEQ ID NO: 487254 - RNA, 19 nt, Artificial Sequence
  Description of Artificial Sequence: Synthetic oligonucleotide
  Antisense Strand to SEQ ID NO: 487253
aacuaggucaagaaagucc

SEQ ID NO: 487255 - RNA, 19 nt, Artificial Sequence
  Description of Artificial Sequence: Synthetic oligonucleotide
  Sense strand starting at position 2508 of SEQ ID NO: 317391
uguauucugcuacagaaac

SEQ ID NO: 487256 - RNA, 19 nt, Artificial Sequence
  Description of Artificial Sequence: Synthetic oligonucleotide
  Antisense Strand to SEQ ID NO: 487255
guuucuguagcagaauaca

SEQ ID NO: 487257 - RNA, 19 nt, Artificial Sequence
  Description of Artificial Sequence: Synthetic oligonucleotide
  Sense strand starting at position 2717 of SEQ ID NO: 317391
aucugugaacacugcauau

SEQ ID NO: 487258 - RNA, 19 nt, Artificial Sequence
  Description of Artificial Sequence: Synthetic oligonucleotide
  Antisense Strand to SEQ ID NO: 487257
auaugcaguguucacagau

SEQ ID NO: 487259 - RNA, 19 nt, Artificial Sequence
  Description of Artificial Sequence: Synthetic oligonucleotide
  Sense strand starting at position 2719 of SEQ ID NO: 317391
cugugaacacugcauauau

SEQ ID NO: 487260 - RNA, 19 nt, Artificial Sequence
  Description of Artificial Sequence: Synthetic oligonucleotide
  Antisense Strand to SEQ ID NO: 487259
auauaugcaguguucacag

SEQ ID NO: 487261 - RNA, 19 nt, Artificial Sequence
  Description of Artificial Sequence: Synthetic oligonucleotide
  Sense strand starting at position 2891 of SEQ ID NO: 317391
gguauaacauguuauuuga

SEQ ID NO: 487262 - RNA, 19 nt, Artificial Sequence
  Description of Artificial Sequence: Synthetic oligonucleotide
  Antisense Strand to SEQ ID NO: 487261
ucaaauaacauguuauacc

SEQ ID NO: 487263 - RNA, 19 nt, Artificial Sequence
  Description of Artificial Sequence: Synthetic oligonucleotide
  Sense strand starting at position 2901 of SEQ ID NO: 317391
guuauuugauuggaguaga

SEQ ID NO: 487264 - RNA, 19 nt, Artificial Sequence
  Description of Artificial Sequence: Synthetic oligonucleotide
  Antisense Strand to SEQ ID NO: 487263
ucuacuccaaucaaauaac

SEQ ID NO: 487265 - RNA, 19 nt, Artificial Sequence
  Description of Artificial Sequence: Synthetic oligonucleotide
  Sense strand starting at position 2912 of SEQ ID NO: 317391
ggaguagaauaauaauuuc

SEQ ID NO: 487266 - RNA, 19 nt, Artificial Sequence
  Description of Artificial Sequence: Synthetic oligonucleotide
  Antisense Strand to SEQ ID NO: 487265
gaaauuauuauucuacucc

SEQ ID NO: 487267 - RNA, 19 nt, Artificial Sequence
  Description of Artificial Sequence: Synthetic oligonucleotide
  Sense strand starting at position 3146 of SEQ ID NO: 317391
ucagauaaauuagagguaa

SEQ ID NO: 487268 - RNA, 19 nt, Artificial Sequence
  Description of Artificial Sequence: Synthetic oligonucleotide
  Antisense Strand to SEQ ID NO: 487267
uuaccucuaauuuaucuga

SEQ ID NO: 487269 - RNA, 19 nt, Artificial Sequence
  Description of Artificial Sequence: Synthetic oligonucleotide
  Sense strand starting at position 3179 of SEQ ID NO: 317391
cugugagcaccuuaauuag

SEQ ID NO: 487270 - RNA, 19 nt, Artificial Sequence
  Description of Artificial Sequence: Synthetic oligonucleotide
  Antisense Strand to SEQ ID NO: 487269
cuaauuaaggugcucacag

SEQ ID NO: 487271 - RNA, 19 nt, Artificial Sequence
  Description of Artificial Sequence: Synthetic oligonucleotide
  Sense strand starting at position 3276 of SEQ ID NO: 317391
ucauguauuuaguacaaug

SEQ ID NO: 487272 - RNA, 19 nt, Artificial Sequence
  Description of Artificial Sequence: Synthetic oligonucleotide
  Antisense Strand to SEQ ID NO: 487271
cauuguacuaaauacauga

SEQ ID NO: 487273 - RNA, 19 nt, Artificial Sequence
  Description of Artificial Sequence: Synthetic oligonucleotide
  Sense strand starting at position 3379 of SEQ ID NO: 317391
gaauguggauuaguauguu

SEQ ID NO: 487274 - RNA, 19 nt, Artificial Sequence
  Description of Artificial Sequence: Synthetic oligonucleotide
  Antisense Strand to SEQ ID NO: 487273
aacauacuaauccacauuc

SEQ ID NO: 487275 - RNA, 19 nt, Artificial Sequence
  Description of Artificial Sequence: Synthetic oligonucleotide
  Sense strand starting at position 3446 of SEQ ID NO: 317391
uaggguaaugguuaagcaa

SEQ ID NO: 487276 - RNA, 19 nt, Artificial Sequence
  Description of Artificial Sequence: Synthetic oligonucleotide
  Antisense Strand to SEQ ID NO: 487275
uugcuuaaccauuacccua

SEQ ID NO: 487277 - RNA, 19 nt, Artificial Sequence
  Description of Artificial Sequence: Synthetic oligonucleotide
  Sense strand starting at position 3449 of SEQ ID NO: 317391
gguaaugguuaagcaaaua

SEQ ID NO: 487278 - RNA, 19 nt, Artificial Sequence
  Description of Artificial Sequence: Synthetic oligonucleotide
  Antisense Strand to SEQ ID NO: 487277
uauuugcuuaaccauuacc

SEQ ID NO: 487279 - RNA, 19 nt, Artificial Sequence
  Description of Artificial Sequence: Synthetic oligonucleotide
  Sense strand starting at position 3469 of SEQ ID NO: 317391
ugaaauguugcacacuaaa

SEQ ID NO: 487280 - RNA, 19 nt, Artificial Sequence
  Description of Artificial Sequence: Synthetic oligonucleotide
  Antisense Strand to SEQ ID NO: 487279
uuuagugugcaacauuuca

SEQ ID NO: 487281 - RNA, 19 nt, Artificial Sequence
  Description of Artificial Sequence: Synthetic oligonucleotide
  Sense strand starting at position 3491 of SEQ ID NO: 317391
cuuguuguuguagaauaua

SEQ ID NO: 487282 - RNA, 19 nt, Artificial Sequence
  Description of Artificial Sequence: Synthetic oligonucleotide
  Antisense Strand to SEQ ID NO: 487281
uauauucuacaacaacaag

SEQ ID NO: 487283 - RNA, 19 nt, Artificial Sequence
  Description of Artificial Sequence: Synthetic oligonucleotide
  Sense strand starting at position 3494 of SEQ ID NO: 317391
guuguuguagaauauauac

SEQ ID NO: 487284 - RNA, 19 nt, Artificial Sequence
  Description of Artificial Sequence: Synthetic oligonucleotide
  Antisense Strand to SEQ ID NO: 487283
guauauauucuacaacaac

SEQ ID NO: 487285 - RNA, 19 nt, Artificial Sequence
  Description of Artificial Sequence: Synthetic oligonucleotide
  Sense strand starting at position 3556 of SEQ ID NO: 317391
uuguauacacuguguuaaa

SEQ ID NO: 487286 - RNA, 19 nt, Artificial Sequence
  Description of Artificial Sequence: Synthetic oligonucleotide
  Antisense Strand to SEQ ID NO: 487285
uuuaacacaguguauacaa

SEQ ID NO: 487287 - RNA, 19 nt, Artificial Sequence
  Description of Artificial Sequence: Synthetic oligonucleotide
  Sense strand starting at position 3557 of SEQ ID NO: 317391
uguauacacuguguuaaau

SEQ ID NO: 487288 - RNA, 19 nt, Artificial Sequence
  Description of Artificial Sequence: Synthetic oligonucleotide
  Antisense Strand to SEQ ID NO: 487287
auuuaacacaguguauaca

SEQ ID NO: 487289 - RNA, 19 nt, Artificial Sequence
  Description of Artificial Sequence: Synthetic oligonucleotide
  Sense strand starting at position 3582 of SEQ ID NO: 317391
augugaacccaagguauaa

SEQ ID NO: 487290 - RNA, 19 nt, Artificial Sequence
  Description of Artificial Sequence: Synthetic oligonucleotide
  Antisense Strand to SEQ ID NO: 487289
uuauaccuuggguucacau

SEQ ID NO: 487291 - RNA, 19 nt, Artificial Sequence
  Description of Artificial Sequence: Synthetic oligonucleotide
  Sense strand starting at position 3594 of SEQ ID NO: 317391
gguauaauuguggguuauu

SEQ ID NO: 487292 - RNA, 19 nt, Artificial Sequence
  Description of Artificial Sequence: Synthetic oligonucleotide
  Antisense Strand to SEQ ID NO: 487291
aauaacccacaauuauacc

SEQ ID NO: 487293 - RNA, 19 nt, Artificial Sequence
  Description of Artificial Sequence: Synthetic oligonucleotide
  Sense strand starting at position 3777 of SEQ ID NO: 317391
gguccagugagagguaauu

SEQ ID NO: 487294 - RNA, 19 nt, Artificial Sequence
  Description of Artificial Sequence: Synthetic oligonucleotide
  Antisense Strand to SEQ ID NO: 487293
aauuaccucucacuggacc

SEQ ID NO: 487295 - RNA, 19 nt, Artificial Sequence
  Description of Artificial Sequence: Synthetic oligonucleotide
  Sense strand starting at position 3809 of SEQ ID NO: 317391
aggucuuuccuguacuauu

SEQ ID NO: 487296 - RNA, 19 nt, Artificial Sequence
  Description of Artificial Sequence: Synthetic oligonucleotide
  Antisense Strand to SEQ ID NO: 487295
aauaguacaggaaagaccu

SEQ ID NO: 487297 - RNA, 19 nt, Artificial Sequence
  Description of Artificial Sequence: Synthetic oligonucleotide
  Sense strand starting at position 3893 of SEQ ID NO: 317391
gcuugcugccgcccauaua

SEQ ID NO: 487298 - RNA, 19 nt, Artificial Sequence
  Description of Artificial Sequence: Synthetic oligonucleotide
  Antisense Strand to SEQ ID NO: 487297
uauaugggcggcagcaagc

SEQ ID NO: 487299 - RNA, 19 nt, Artificial Sequence
  Description of Artificial Sequence: Synthetic oligonucleotide
  Sense strand starting at position 18 of SEQ ID NO: 317392
aagugaguguuguuggauc

SEQ ID NO: 487300 - RNA, 19 nt, Artificial Sequence
  Description of Artificial Sequence: Synthetic oligonucleotide
  Antisense Strand to SEQ ID NO: 487299
gauccaacaacacucacuu

SEQ ID NO: 487301 - RNA, 19 nt, Artificial Sequence
  Description of Artificial Sequence: Synthetic oligonucleotide
  Sense strand starting at position 48 of SEQ ID NO: 317392
gagaaccuacuguggaauu

SEQ ID NO: 487302 - RNA, 19 nt, Artificial Sequence
  Description of Artificial Sequence: Synthetic oligonucleotide
  Antisense Strand to SEQ ID NO: 487301
aauuccacaguagguucuc

SEQ ID NO: 487303 - RNA, 19 nt, Artificial Sequence
  Description of Artificial Sequence: Synthetic oligonucleotide
  Sense strand starting at position 68 of SEQ ID NO: 317392
ugcuaagauuaucuacguu

SEQ ID NO: 487304 - RNA, 19 nt, Artificial Sequence
  Description of Artificial Sequence: Synthetic oligonucleotide
  Antisense Strand to SEQ ID NO: 487303
aacguagauaaucuuagca

SEQ ID NO: 487305 - RNA, 19 nt, Artificial Sequence
  Description of Artificial Sequence: Synthetic oligonucleotide
  Sense strand starting at position 428 of SEQ ID NO: 317392
ccacguuguagacaucagu

SEQ ID NO: 487306 - RNA, 19 nt, Artificial Sequence
  Description of Artificial Sequence: Synthetic oligonucleotide
  Antisense Strand to SEQ ID NO: 487305
acugaugucuacaacgugg

SEQ ID NO: 487307 - RNA, 19 nt, Artificial Sequence
  Description of Artificial Sequence: Synthetic oligonucleotide
  Sense strand starting at position 595 of SEQ ID NO: 317392
aguuguaagaaugguuaca

SEQ ID NO: 487308 - RNA, 19 nt, Artificial Sequence
  Description of Artificial Sequence: Synthetic oligonucleotide
  Antisense Strand to SEQ ID NO: 487307
uguaaccauucuuacaacu

SEQ ID NO: 487309 - RNA, 19 nt, Artificial Sequence
  Description of Artificial Sequence: Synthetic oligonucleotide
  Sense strand starting at position 597 of SEQ ID NO: 317392
uuguaagaaugguuacaau

SEQ ID NO: 487310 - RNA, 19 nt, Artificial Sequence
  Description of Artificial Sequence: Synthetic oligonucleotide
  Antisense Strand to SEQ ID NO: 487309
auuguaaccauucuuacaa

SEQ ID NO: 487311 - RNA, 19 nt, Artificial Sequence
  Description of Artificial Sequence: Synthetic oligonucleotide
  Sense strand starting at position 608 of SEQ ID NO: 317392
guuacaaugguaggaauga

SEQ ID NO: 487312 - RNA, 19 nt, Artificial Sequence
  Description of Artificial Sequence: Synthetic oligonucleotide
  Antisense Strand to SEQ ID NO: 487311
ucauuccuaccauuguaac

SEQ ID NO: 487313 - RNA, 19 nt, Artificial Sequence
  Description of Artificial Sequence: Synthetic oligonucleotide
  Sense strand starting at position 609 of SEQ ID NO: 317392
uuacaaugguaggaaugaa

SEQ ID NO: 487314 - RNA, 19 nt, Artificial Sequence
  Description of Artificial Sequence: Synthetic oligonucleotide
  Antisense Strand to SEQ ID NO: 487313
uucauuccuaccauuguaa

SEQ ID NO: 487315 - RNA, 19 nt, Artificial Sequence
  Description of Artificial Sequence: Synthetic oligonucleotide
  Sense strand starting at position 619 of SEQ ID NO: 317392
aggaaugaaucauauuccu

SEQ ID NO: 487316 - RNA, 19 nt, Artificial Sequence
  Description of Artificial Sequence: Synthetic oligonucleotide
  Antisense Strand to SEQ ID NO: 487315
aggaauaugauucauuccu

SEQ ID NO: 487317 - RNA, 19 nt, Artificial Sequence
  Description of Artificial Sequence: Synthetic oligonucleotide
  Sense strand starting at position 779 of SEQ ID NO: 317392
uguguucugacagaggguu

SEQ ID NO: 487318 - RNA, 19 nt, Artificial Sequence
  Description of Artificial Sequence: Synthetic oligonucleotide
  Antisense Strand to SEQ ID NO: 487317
aacccucugucagaacaca

SEQ ID NO: 487319 - RNA, 19 nt, Artificial Sequence
  Description of Artificial Sequence: Synthetic oligonucleotide
  Sense strand starting at position 916 of SEQ ID NO: 317392
uuugcauucccagagcaaa

SEQ ID NO: 487320 - RNA, 19 nt, Artificial Sequence
  Description of Artificial Sequence: Synthetic oligonucleotide
  Antisense Strand to SEQ ID NO: 487319
uuugcucugggaaugcaaa

SEQ ID NO: 487321 - RNA, 19 nt, Artificial Sequence
  Description of Artificial Sequence: Synthetic oligonucleotide
  Sense strand starting at position 919 of SEQ ID NO: 317392
gcauucccagagcaaauau

SEQ ID NO: 487322 - RNA, 19 nt, Artificial Sequence
  Description of Artificial Sequence: Synthetic oligonucleotide
  Antisense Strand to SEQ ID NO: 487321
auauuugcucugggaaugc

SEQ ID NO: 487323 - RNA, 19 nt, Artificial Sequence
  Description of Artificial Sequence: Synthetic oligonucleotide
  Sense strand starting at position 988 of SEQ ID NO: 317392
acuuguugguaacucucaa

SEQ ID NO: 487324 - RNA, 19 nt, Artificial Sequence
  Description of Artificial Sequence: Synthetic oligonucleotide
  Antisense Strand to SEQ ID NO: 487323
uugagaguuaccaacaagu

SEQ ID NO: 487325 - RNA, 19 nt, Artificial Sequence
  Description of Artificial Sequence: Synthetic oligonucleotide
  Sense strand starting at position 1028 of SEQ ID NO: 317392
aggguaaacugauccuuac

SEQ ID NO: 487326 - RNA, 19 nt, Artificial Sequence
  Description of Artificial Sequence: Synthetic oligonucleotide
  Antisense Strand to SEQ ID NO: 487325
guaaggaucaguuuacccu

SEQ ID NO: 487327 - RNA, 19 nt, Artificial Sequence
  Description of Artificial Sequence: Synthetic oligonucleotide
  Sense strand starting at position 1265 of SEQ ID NO: 317392
cguguuggucaggcuguua

SEQ ID NO: 487328 - RNA, 19 nt, Artificial Sequence
  Description of Artificial Sequence: Synthetic oligonucleotide
  Antisense Strand to SEQ ID NO: 487327
uaacagccugaccaacacg

SEQ ID NO: 487329 - RNA, 19 nt, Artificial Sequence
  Description of Artificial Sequence: Synthetic oligonucleotide
  Sense strand starting at position 1364 of SEQ ID NO: 317392
cguccuuaccaguauuaau

SEQ ID NO: 487330 - RNA, 19 nt, Artificial Sequence
  Description of Artificial Sequence: Synthetic oligonucleotide
  Antisense Strand to SEQ ID NO: 487329
auuaauacugguaaggacg

SEQ ID NO: 487331 - RNA, 19 nt, Artificial Sequence
  Description of Artificial Sequence: Synthetic oligonucleotide
  Sense strand starting at position 1515 of SEQ ID NO: 317392
agccuuguucccuaauagu

SEQ ID NO: 487332 - RNA, 19 nt, Artificial Sequence
  Description of Artificial Sequence: Synthetic oligonucleotide
  Antisense Strand to SEQ ID NO: 487331
acuauuagggaacaaggcu

SEQ ID NO: 487333 - RNA, 19 nt, Artificial Sequence
  Description of Artificial Sequence: Synthetic oligonucleotide
  Sense strand starting at position 1560 of SEQ ID NO: 317392
gggucuugauuugaaacau

SEQ ID NO: 487334 - RNA, 19 nt, Artificial Sequence
  Description of Artificial Sequence: Synthetic oligonucleotide
  Antisense Strand to SEQ ID NO: 487333
auguuucaaaucaagaccc

SEQ ID NO: 487335 - RNA, 19 nt, Artificial Sequence
  Description of Artificial Sequence: Synthetic oligonucleotide
  Sense strand starting at position 1651 of SEQ ID NO: 317392
cuaggacuggcuuacucaa

SEQ ID NO: 487336 - RNA, 19 nt, Artificial Sequence
  Description of Artificial Sequence: Synthetic oligonucleotide
  Antisense Strand to SEQ ID NO: 487335
uugaguaagccaguccuag

SEQ ID NO: 487337 - RNA, 19 nt, Artificial Sequence
  Description of Artificial Sequence: Synthetic oligonucleotide
  Sense strand starting at position 2026 of SEQ ID NO: 317392
cguacuuccgcuuuacuca

SEQ ID NO: 487338 - RNA, 19 nt, Artificial Sequence
  Description of Artificial Sequence: Synthetic oligonucleotide
  Antisense Strand to SEQ ID NO: 487337
ugaguaaagcggaaguacg

SEQ ID NO: 487339 - RNA, 19 nt, Artificial Sequence
  Description of Artificial Sequence: Synthetic oligonucleotide
  Sense strand starting at position 2259 of SEQ ID NO: 317392
ugaggaguggugugagaag

SEQ ID NO: 487340 - RNA, 19 nt, Artificial Sequence
  Description of Artificial Sequence: Synthetic oligonucleotide
  Antisense Strand to SEQ ID NO: 487339
cuucucacaccacuccuca

SEQ ID NO: 487341 - RNA, 19 nt, Artificial Sequence
  Description of Artificial Sequence: Synthetic oligonucleotide
  Sense strand starting at position 2301 of SEQ ID NO: 317392
uuguuugggaauuggaaga

SEQ ID NO: 487342 - RNA, 19 nt, Artificial Sequence
  Description of Artificial Sequence: Synthetic oligonucleotide
  Antisense Strand to SEQ ID NO: 487341
ucuuccaauucccaaacaa

SEQ ID NO: 487343 - RNA, 19 nt, Artificial Sequence
  Description of Artificial Sequence: Synthetic oligonucleotide
  Sense strand starting at position 2423 of SEQ ID NO: 317392
aaacgauguguagguuaga

SEQ ID NO: 487344 - RNA, 19 nt, Artificial Sequence
  Description of Artificial Sequence: Synthetic oligonucleotide
  Antisense Strand to SEQ ID NO: 487343
ucuaaccuacacaucguuu

SEQ ID NO: 487345 - RNA, 19 nt, Artificial Sequence
  Description of Artificial Sequence: Synthetic oligonucleotide
  Sense strand starting at position 2424 of SEQ ID NO: 317392
aacgauguguagguuagau

SEQ ID NO: 487346 - RNA, 19 nt, Artificial Sequence
  Description of Artificial Sequence: Synthetic oligonucleotide
  Antisense Strand to SEQ ID NO: 487345
aucuaaccuacacaucguu

SEQ ID NO: 487347 - RNA, 19 nt, Artificial Sequence
  Description of Artificial Sequence: Synthetic oligonucleotide
  Sense strand starting at position 2500 of SEQ ID NO: 317392
auguauugaguccauauua

SEQ ID NO: 487348 - RNA, 19 nt, Artificial Sequence
  Description of Artificial Sequence: Synthetic oligonucleotide
  Antisense Strand to SEQ ID NO: 487347
uaauauggacucaauacau

SEQ ID NO: 487349 - RNA, 19 nt, Artificial Sequence
  Description of Artificial Sequence: Synthetic oligonucleotide
  Sense strand starting at position 2796 of SEQ ID NO: 317392
gagagacuuucgcuacaaa

SEQ ID NO: 487350 - RNA, 19 nt, Artificial Sequence
  Description of Artificial Sequence: Synthetic oligonucleotide
  Antisense Strand to SEQ ID NO: 487349
uuuguagcgaaagucucuc

SEQ ID NO: 487351 - RNA, 19 nt, Artificial Sequence
  Description of Artificial Sequence: Synthetic oligonucleotide
  Sense strand starting at position 3160 of SEQ ID NO: 317392
aggaacuauccuggaguau

SEQ ID NO: 487352 - RNA, 19 nt, Artificial Sequence
  Description of Artificial Sequence: Synthetic oligonucleotide
  Antisense Strand to SEQ ID NO: 487351
auacuccaggauaguuccu

SEQ ID NO: 487353 - RNA, 19 nt, Artificial Sequence
  Description of Artificial Sequence: Synthetic oligonucleotide
  Sense strand starting at position 3169 of SEQ ID NO: 317392
ccuggaguaugugcuagau

SEQ ID NO: 487354 - RNA, 19 nt, Artificial Sequence
  Description of Artificial Sequence: Synthetic oligonucleotide
  Antisense Strand to SEQ ID NO: 487353
aucuagcacauacuccagg

SEQ ID NO: 487355 - RNA, 19 nt, Artificial Sequence
  Description of Artificial Sequence: Synthetic oligonucleotide
  Sense strand starting at position 3173 of SEQ ID NO: 317392
gaguaugugcuagaucuuu

SEQ ID NO: 487356 - RNA, 19 nt, Artificial Sequence
  Description of Artificial Sequence: Synthetic oligonucleotide
  Antisense Strand to SEQ ID NO: 487355
aaagaucuagcacauacuc

SEQ ID NO: 487357 - RNA, 19 nt, Artificial Sequence
  Description of Artificial Sequence: Synthetic oligonucleotide
  Sense strand starting at position 3178 of SEQ ID NO: 317392
ugugcuagaucuuuaccau

SEQ ID NO: 487358 - RNA, 19 nt, Artificial Sequence
  Description of Artificial Sequence: Synthetic oligonucleotide
  Antisense Strand to SEQ ID NO: 487357
augguaaagaucuagcaca

SEQ ID NO: 487359 - RNA, 19 nt, Artificial Sequence
  Description of Artificial Sequence: Synthetic oligonucleotide
  Sense strand starting at position 3179 of SEQ ID NO: 317392
gugcuagaucuuuaccauc

SEQ ID NO: 487360 - RNA, 19 nt, Artificial Sequence
  Description of Artificial Sequence: Synthetic oligonucleotide
  Antisense Strand to SEQ ID NO: 487359
gaugguaaagaucuagcac

SEQ ID NO: 487361 - RNA, 19 nt, Artificial Sequence
  Description of Artificial Sequence: Synthetic oligonucleotide
  Sense strand starting at position 3372 of SEQ ID NO: 317392
ugcggcagaucauuuauaa

SEQ ID NO: 487362 - RNA, 19 nt, Artificial Sequence
  Description of Artificial Sequence: Synthetic oligonucleotide
  Antisense Strand to SEQ ID NO: 487361
uuauaaaugaucugccgca

SEQ ID NO: 487363 - RNA, 19 nt, Artificial Sequence
  Description of Artificial Sequence: Synthetic oligonucleotide
  Sense strand starting at position 3376 of SEQ ID NO: 317392
gcagaucauuuauaagaga

SEQ ID NO: 487364 - RNA, 19 nt, Artificial Sequence
  Description of Artificial Sequence: Synthetic oligonucleotide
  Antisense Strand to SEQ ID NO: 487363
ucucuuauaaaugaucugc

SEQ ID NO: 487365 - RNA, 19 nt, Artificial Sequence
  Description of Artificial Sequence: Synthetic oligonucleotide
  Sense strand starting at position 3436 of SEQ ID NO: 317392
aaagcucugccaugguaaa

SEQ ID NO: 487366 - RNA, 19 nt, Artificial Sequence
  Description of Artificial Sequence: Synthetic oligonucleotide
  Antisense Strand to SEQ ID NO: 487365
uuuaccauggcagagcuuu

SEQ ID NO: 487367 - RNA, 19 nt, Artificial Sequence
  Description of Artificial Sequence: Synthetic oligonucleotide
  Sense strand starting at position 3481 of SEQ ID NO: 317392
aauacuuuggccugggaga

SEQ ID NO: 487368 - RNA, 19 nt, Artificial Sequence
  Description of Artificial Sequence: Synthetic oligonucleotide
  Antisense Strand to SEQ ID NO: 487367
ucucccaggccaaaguauu

SEQ ID NO: 487369 - RNA, 19 nt, Artificial Sequence
  Description of Artificial Sequence: Synthetic oligonucleotide
  Sense strand starting at position 3483 of SEQ ID NO: 317392
uacuuuggccugggagagu

SEQ ID NO: 487370 - RNA, 19 nt, Artificial Sequence
  Description of Artificial Sequence: Synthetic oligonucleotide
  Antisense Strand to SEQ ID NO: 487369
acucucccaggccaaagua

SEQ ID NO: 487371 - RNA, 19 nt, Artificial Sequence
  Description of Artificial Sequence: Synthetic oligonucleotide
  Sense strand starting at position 3539 of SEQ ID NO: 317392
gaucuuagaaggugguauu

SEQ ID NO: 487372 - RNA, 19 nt, Artificial Sequence
  Description of Artificial Sequence: Synthetic oligonucleotide
  Antisense Strand to SEQ ID NO: 487371
aauaccaccuucuaagauc

SEQ ID NO: 487373 - RNA, 19 nt, Artificial Sequence
  Description of Artificial Sequence: Synthetic oligonucleotide
  Sense strand starting at position 3593 of SEQ ID NO: 317392
cauuucuacugugaaagga

SEQ ID NO: 487374 - RNA, 19 nt, Artificial Sequence
  Description of Artificial Sequence: Synthetic oligonucleotide
  Antisense Strand to SEQ ID NO: 487373
uccuuucacaguagaaaug

SEQ ID NO: 487375 - RNA, 19 nt, Artificial Sequence
  Description of Artificial Sequence: Synthetic oligonucleotide
  Sense strand starting at position 3724 of SEQ ID NO: 317392
uuagcucacugagcuaaau

SEQ ID NO: 487376 - RNA, 19 nt, Artificial Sequence
  Description of Artificial Sequence: Synthetic oligonucleotide
  Antisense Strand to SEQ ID NO: 487375
auuuagcucagugagcuaa

SEQ ID NO: 487377 - RNA, 19 nt, Artificial Sequence
  Description of Artificial Sequence: Synthetic oligonucleotide
  Sense strand starting at position 3749 of SEQ ID NO: 317392
cugauugccuacucuggaa

SEQ ID NO: 487378 - RNA, 19 nt, Artificial Sequence
  Description of Artificial Sequence: Synthetic oligonucleotide
  Antisense Strand to SEQ ID NO: 487377
uuccagaguaggcaaucag

SEQ ID NO: 487379 - RNA, 19 nt, Artificial Sequence
  Description of Artificial Sequence: Synthetic oligonucleotide
  Sense strand starting at position 6 of SEQ ID NO: 317393
gaggaaauaacgggcucau

SEQ ID NO: 487380 - RNA, 19 nt, Artificial Sequence
  Description of Artificial Sequence: Synthetic oligonucleotide
  Antisense Strand to SEQ ID NO: 487379
augagcccguuauuuccuc

SEQ ID NO: 487381 - RNA, 19 nt, Artificial Sequence
  Description of Artificial Sequence: Synthetic oligonucleotide
  Sense strand starting at position 21 of SEQ ID NO: 317393
ucaugaaguuaguccugaa

SEQ ID NO: 487382 - RNA, 19 nt, Artificial Sequence
  Description of Artificial Sequence: Synthetic oligonucleotide
  Antisense Strand to SEQ ID NO: 487381
uucaggacuaacuucauga

SEQ ID NO: 487383 - RNA, 19 nt, Artificial Sequence
  Description of Artificial Sequence: Synthetic oligonucleotide
  Sense strand starting at position 25 of SEQ ID NO: 317393
gaaguuaguccugaaguau

SEQ ID NO: 487384 - RNA, 19 nt, Artificial Sequence
  Description of Artificial Sequence: Synthetic oligonucleotide
  Antisense Strand to SEQ ID NO: 487383
auacuucaggacuaacuuc

SEQ ID NO: 487385 - RNA, 19 nt, Artificial Sequence
  Description of Artificial Sequence: Synthetic oligonucleotide
  Sense strand starting at position 34 of SEQ ID NO: 317393
ccugaaguaucuuugggac

SEQ ID NO: 487386 - RNA, 19 nt, Artificial Sequence
  Description of Artificial Sequence: Synthetic oligonucleotide
  Antisense Strand to SEQ ID NO: 487385
gucccaaagauacuucagg

SEQ ID NO: 487387 - RNA, 19 nt, Artificial Sequence
  Description of Artificial Sequence: Synthetic oligonucleotide
  Sense strand starting at position 40 of SEQ ID NO: 317393
guaucuuugggacacucau

SEQ ID NO: 487388 - RNA, 19 nt, Artificial Sequence
  Description of Artificial Sequence: Synthetic oligonucleotide
  Antisense Strand to SEQ ID NO: 487387
augagugucccaaagauac

SEQ ID NO: 487389 - RNA, 19 nt, Artificial Sequence
  Description of Artificial Sequence: Synthetic oligonucleotide
  Sense strand starting at position 58 of SEQ ID NO: 317393
ugagaagaguuauuguaca

SEQ ID NO: 487390 - RNA, 19 nt, Artificial Sequence
  Description of Artificial Sequence: Synthetic oligonucleotide
  Antisense Strand to SEQ ID NO: 487389
uguacaauaacucuucuca

SEQ ID NO: 487391 - RNA, 19 nt, Artificial Sequence
  Description of Artificial Sequence: Synthetic oligonucleotide
  Sense strand starting at position 409 of SEQ ID NO: 317393
ugaacuugccaaggagaca

SEQ ID NO: 487392 - RNA, 19 nt, Artificial Sequence
  Description of Artificial Sequence: Synthetic oligonucleotide
  Antisense Strand to SEQ ID NO: 487391
ugucuccuuggcaaguuca

SEQ ID NO: 487393 - RNA, 19 nt, Artificial Sequence
  Description of Artificial Sequence: Synthetic oligonucleotide
  Sense strand starting at position 627 of SEQ ID NO: 317393
uguggucacguaagguuua

SEQ ID NO: 487394 - RNA, 19 nt, Artificial Sequence
  Description of Artificial Sequence: Synthetic oligonucleotide
  Antisense Strand to SEQ ID NO: 487393
uaaaccuuacgugaccaca

SEQ ID NO: 487395 - RNA, 19 nt, Artificial Sequence
  Description of Artificial Sequence: Synthetic oligonucleotide
  Sense strand starting at position 632 of SEQ ID NO: 317393
ucacguaagguuuaucaac

SEQ ID NO: 487396 - RNA, 19 nt, Artificial Sequence
  Description of Artificial Sequence: Synthetic oligonucleotide
  Antisense Strand to SEQ ID NO: 487395
guugauaaaccuuacguga

SEQ ID NO: 487397 - RNA, 19 nt, Artificial Sequence
  Description of Artificial Sequence: Synthetic oligonucleotide
  Sense strand starting at position 634 of SEQ ID NO: 317393
acguaagguuuaucaacac

SEQ ID NO: 487398 - RNA, 19 nt, Artificial Sequence
  Description of Artificial Sequence: Synthetic oligonucleotide
  Antisense Strand to SEQ ID NO: 487397
guguugauaaaccuuacgu

SEQ ID NO: 487399 - RNA, 19 nt, Artificial Sequence
  Description of Artificial Sequence: Synthetic oligonucleotide
  Sense strand starting at position 640 of SEQ ID NO: 317393
gguuuaucaacacggagau

SEQ ID NO: 487400 - RNA, 19 nt, Artificial Sequence
  Description of Artificial Sequence: Synthetic oligonucleotide
  Antisense Strand to SEQ ID NO: 487399
aucuccguguugauaaacc

SEQ ID NO: 487401 - RNA, 19 nt, Artificial Sequence
  Description of Artificial Sequence: Synthetic oligonucleotide
  Sense strand starting at position 678 of SEQ ID NO: 317393
aacaguuuccauggaauga

SEQ ID NO: 487402 - RNA, 19 nt, Artificial Sequence
  Description of Artificial Sequence: Synthetic oligonucleotide
  Antisense Strand to SEQ ID NO: 487401
ucauuccauggaaacuguu

SEQ ID NO: 487403 - RNA, 19 nt, Artificial Sequence
  Description of Artificial Sequence: Synthetic oligonucleotide
  Sense strand starting at position 728 of SEQ ID NO: 317393
gagaguauguaagugguga

SEQ ID NO: 487404 - RNA, 19 nt, Artificial Sequence
  Description of Artificial Sequence: Synthetic oligonucleotide
  Antisense Strand to SEQ ID NO: 487403
ucaccacuuacauacucuc

SEQ ID NO: 487405 - RNA, 19 nt, Artificial Sequence
  Description of Artificial Sequence: Synthetic oligonucleotide
  Sense strand starting at position 843 of SEQ ID NO: 317393
gagaaaugagcauguuuac

SEQ ID NO: 487406 - RNA, 19 nt, Artificial Sequence
  Description of Artificial Sequence: Synthetic oligonucleotide
  Antisense Strand to SEQ ID NO: 487405
guaaacaugcucauuucuc

SEQ ID NO: 487407 - RNA, 19 nt, Artificial Sequence
  Description of Artificial Sequence: Synthetic oligonucleotide
  Sense strand starting at position 910 of SEQ ID NO: 317393
agaacaaguuguccucuga

SEQ ID NO: 487408 - RNA, 19 nt, Artificial Sequence
  Description of Artificial Sequence: Synthetic oligonucleotide
  Antisense Strand to SEQ ID NO: 487407
ucagaggacaacuuguucu

SEQ ID NO: 487409 - RNA, 19 nt, Artificial Sequence
  Description of Artificial Sequence: Synthetic oligonucleotide
  Sense strand starting at position 961 of SEQ ID NO: 317393
ucuaaauugucuuuaaggu

SEQ ID NO: 487410 - RNA, 19 nt, Artificial Sequence
  Description of Artificial Sequence: Synthetic oligonucleotide
  Antisense Strand to SEQ ID NO: 487409
accuuaaagacaauuuaga

SEQ ID NO: 487411 - RNA, 19 nt, Artificial Sequence
  Description of Artificial Sequence: Synthetic oligonucleotide
  Sense strand starting at position 962 of SEQ ID NO: 317393
cuaaauugucuuuaagguc

SEQ ID NO: 487412 - RNA, 19 nt, Artificial Sequence
  Description of Artificial Sequence: Synthetic oligonucleotide
  Antisense Strand to SEQ ID NO: 487411
gaccuuaaagacaauuuag

SEQ ID NO: 487413 - RNA, 19 nt, Artificial Sequence
  Description of Artificial Sequence: Synthetic oligonucleotide
  Sense strand starting at position 969 of SEQ ID NO: 317393
gucuuuaaggucugauuag

SEQ ID NO: 487414 - RNA, 19 nt, Artificial Sequence
  Description of Artificial Sequence: Synthetic oligonucleotide
  Antisense Strand to SEQ ID NO: 487413
cuaaucagaccuuaaagac

SEQ ID NO: 487415 - RNA, 19 nt, Artificial Sequence
  Description of Artificial Sequence: Synthetic oligonucleotide
  Sense strand starting at position 1003 of SEQ ID NO: 317393
ccacuagucugguccauuu

SEQ ID NO: 487416 - RNA, 19 nt, Artificial Sequence
  Description of Artificial Sequence: Synthetic oligonucleotide
  Antisense Strand to SEQ ID NO: 487415
aaauggaccagacuagugg

SEQ ID NO: 487417 - RNA, 19 nt, Artificial Sequence
  Description of Artificial Sequence: Synthetic oligonucleotide
  Sense strand starting at position 1111 of SEQ ID NO: 317393
ggagcugucaucuaggaau

SEQ ID NO: 487418 - RNA, 19 nt, Artificial Sequence
  Description of Artificial Sequence: Synthetic oligonucleotide
  Antisense Strand to SEQ ID NO: 487417
auuccuagaugacagcucc

SEQ ID NO: 487419 - RNA, 19 nt, Artificial Sequence
  Description of Artificial Sequence: Synthetic oligonucleotide
  Sense strand starting at position 1191 of SEQ ID NO: 317393
ccugaauggaaucacguua

SEQ ID NO: 487420 - RNA, 19 nt, Artificial Sequence
  Description of Artificial Sequence: Synthetic oligonucleotide
  Antisense Strand to SEQ ID NO: 487419
uaacgugauuccauucagg

SEQ ID NO: 487421 - RNA, 19 nt, Artificial Sequence
  Description of Artificial Sequence: Synthetic oligonucleotide
  Sense strand starting at position 1196 of SEQ ID NO: 317393
auggaaucacguuaacuuu

SEQ ID NO: 487422 - RNA, 19 nt, Artificial Sequence
  Description of Artificial Sequence: Synthetic oligonucleotide
  Antisense Strand to SEQ ID NO: 487421
aaaguuaacgugauuccau

SEQ ID NO: 487423 - RNA, 19 nt, Artificial Sequence
  Description of Artificial Sequence: Synthetic oligonucleotide
  Sense strand starting at position 1254 of SEQ ID NO: 317393
acggcuucuguagaaauua

SEQ ID NO: 487424 - RNA, 19 nt, Artificial Sequence
  Description of Artificial Sequence: Synthetic oligonucleotide
  Antisense Strand to SEQ ID NO: 487423
uaauuucuacagaagccgu

SEQ ID NO: 487425 - RNA, 19 nt, Artificial Sequence
  Description of Artificial Sequence: Synthetic oligonucleotide
  Sense strand starting at position 1263 of SEQ ID NO: 317393
guagaaauuagaugagcua

SEQ ID NO: 487426 - RNA, 19 nt, Artificial Sequence
  Description of Artificial Sequence: Synthetic oligonucleotide
  Antisense Strand to SEQ ID NO: 487425
uagcucaucuaauuucuac

SEQ ID NO: 487427 - RNA, 19 nt, Artificial Sequence
  Description of Artificial Sequence: Synthetic oligonucleotide
  Sense strand starting at position 1336 of SEQ ID NO: 317393
ugcguaguacuggaagaaa

SEQ ID NO: 487428 - RNA, 19 nt, Artificial Sequence
  Description of Artificial Sequence: Synthetic oligonucleotide
  Antisense Strand to SEQ ID NO: 487427
uuucuuccaguacuacgca

SEQ ID NO: 487429 - RNA, 19 nt, Artificial Sequence
  Description of Artificial Sequence: Synthetic oligonucleotide
  Sense strand starting at position 1367 of SEQ ID NO: 317393
cuccuaaaggcagagugau

SEQ ID NO: 487430 - RNA, 19 nt, Artificial Sequence
  Description of Artificial Sequence: Synthetic oligonucleotide
  Antisense Strand to SEQ ID NO: 487429
aucacucugccuuuaggag

SEQ ID NO: 487431 - RNA, 19 nt, Artificial Sequence
  Description of Artificial Sequence: Synthetic oligonucleotide
  Sense strand starting at position 1373 of SEQ ID NO: 317393
aaggcagagugauccacau

SEQ ID NO: 487432 - RNA, 19 nt, Artificial Sequence
  Description of Artificial Sequence: Synthetic oligonucleotide
  Antisense Strand to SEQ ID NO: 487431
auguggaucacucugccuu

SEQ ID NO: 487433 - RNA, 19 nt, Artificial Sequence
  Description of Artificial Sequence: Synthetic oligonucleotide
  Sense strand starting at position 1751 of SEQ ID NO: 317393
cccggaauucuuuacccuu

SEQ ID NO: 487434 - RNA, 19 nt, Artificial Sequence
  Description of Artificial Sequence: Synthetic oligonucleotide
  Antisense Strand to SEQ ID NO: 487433
aaggguaaagaauuccggg

SEQ ID NO: 487435 - RNA, 19 nt, Artificial Sequence
  Description of Artificial Sequence: Synthetic oligonucleotide
  Sense strand starting at position 2164 of SEQ ID NO: 317393
ugccacuuagauuguaaau

SEQ ID NO: 487436 - RNA, 19 nt, Artificial Sequence
  Description of Artificial Sequence: Synthetic oligonucleotide
  Antisense Strand to SEQ ID NO: 487435
auuuacaaucuaaguggca

SEQ ID NO: 487437 - RNA, 19 nt, Artificial Sequence
  Description of Artificial Sequence: Synthetic oligonucleotide
  Sense strand starting at position 2231 of SEQ ID NO: 317393
uaaaccaacgucuguugaa

SEQ ID NO: 487438 - RNA, 19 nt, Artificial Sequence
  Description of Artificial Sequence: Synthetic oligonucleotide
  Antisense Strand to SEQ ID NO: 487437
uucaacagacguugguuua

SEQ ID NO: 487439 - RNA, 19 nt, Artificial Sequence
  Description of Artificial Sequence: Synthetic oligonucleotide
  Sense strand starting at position 2232 of SEQ ID NO: 317393
aaaccaacgucuguugaau

SEQ ID NO: 487440 - RNA, 19 nt, Artificial Sequence
  Description of Artificial Sequence: Synthetic oligonucleotide
  Antisense Strand to SEQ ID NO: 487439
auucaacagacguugguuu

SEQ ID NO: 487441 - RNA, 19 nt, Artificial Sequence
  Description of Artificial Sequence: Synthetic oligonucleotide
  Sense strand starting at position 2606 of SEQ ID NO: 317393
gcggaauccgccaguugga

SEQ ID NO: 487442 - RNA, 19 nt, Artificial Sequence
  Description of Artificial Sequence: Synthetic oligonucleotide
  Antisense Strand to SEQ ID NO: 487441
uccaacuggcggauuccgc

SEQ ID NO: 487443 - RNA, 19 nt, Artificial Sequence
  Description of Artificial Sequence: Synthetic oligonucleotide
  Sense strand starting at position 2939 of SEQ ID NO: 317393
ggugaagaucccggacuuu

SEQ ID NO: 487444 - RNA, 19 nt, Artificial Sequence
  Description of Artificial Sequence: Synthetic oligonucleotide
  Antisense Strand to SEQ ID NO: 487443
aaaguccgggaucuucacc

SEQ ID NO: 487445 - RNA, 19 nt, Artificial Sequence
  Description of Artificial Sequence: Synthetic oligonucleotide
  Sense strand starting at position 3005 of SEQ ID NO: 317393
cggaaauugccguaaacca

SEQ ID NO: 487446 - RNA, 19 nt, Artificial Sequence
  Description of Artificial Sequence: Synthetic oligonucleotide
  Antisense Strand to SEQ ID NO: 487445
ugguuuacggcaauuuccg

SEQ ID NO: 487447 - RNA, 19 nt, Artificial Sequence
  Description of Artificial Sequence: Synthetic oligonucleotide
  Sense strand starting at position 3072 of SEQ ID NO: 317393
gagaguuaauuuggauaau

SEQ ID NO: 487448 - RNA, 19 nt, Artificial Sequence
  Description of Artificial Sequence: Synthetic oligonucleotide
  Antisense Strand to SEQ ID NO: 487447
auuauccaaauuaacucuc

SEQ ID NO: 487449 - RNA, 19 nt, Artificial Sequence
  Description of Artificial Sequence: Synthetic oligonucleotide
  Sense strand starting at position 3073 of SEQ ID NO: 317393
agaguuaauuuggauaaug

SEQ ID NO: 487450 - RNA, 19 nt, Artificial Sequence
  Description of Artificial Sequence: Synthetic oligonucleotide
  Antisense Strand to SEQ ID NO: 487449
cauuauccaaauuaacucu

SEQ ID NO: 487451 - RNA, 19 nt, Artificial Sequence
  Description of Artificial Sequence: Synthetic oligonucleotide
  Sense strand starting at position 3112 of SEQ ID NO: 317393
gugccugccacguauuuaa

SEQ ID NO: 487452 - RNA, 19 nt, Artificial Sequence
  Description of Artificial Sequence: Synthetic oligonucleotide
  Antisense Strand to SEQ ID NO: 487451
uuaaauacguggcaggcac

SEQ ID NO: 487453 - RNA, 19 nt, Artificial Sequence
  Description of Artificial Sequence: Synthetic oligonucleotide
  Sense strand starting at position 3126 of SEQ ID NO: 317393
uuuaaagcucaguagaugu

SEQ ID NO: 487454 - RNA, 19 nt, Artificial Sequence
  Description of Artificial Sequence: Synthetic oligonucleotide
  Antisense Strand to SEQ ID NO: 487453
acaucuacugagcuuuaaa

SEQ ID NO: 487455 - RNA, 19 nt, Artificial Sequence
  Description of Artificial Sequence: Synthetic oligonucleotide
  Sense strand starting at position 3800 of SEQ ID NO: 317393
agagguucagagugucaca

SEQ ID NO: 487456 - RNA, 19 nt, Artificial Sequence
  Description of Artificial Sequence: Synthetic oligonucleotide
  Antisense Strand to SEQ ID NO: 487455
ugugacacucugaaccucu

SEQ ID NO: 487457 - RNA, 19 nt, Artificial Sequence
  Description of Artificial Sequence: Synthetic oligonucleotide
  Sense strand starting at position 3954 of SEQ ID NO: 317393
ccuugagcccaaugauaag

SEQ ID NO: 487458 - RNA, 19 nt, Artificial Sequence
  Description of Artificial Sequence: Synthetic oligonucleotide
  Antisense Strand to SEQ ID NO: 487457
cuuaucauugggcucaagg

SEQ ID NO: 487459 - RNA, 19 nt, Artificial Sequence
  Description of Artificial Sequence: Synthetic oligonucleotide
  Sense strand starting at position 118 of SEQ ID NO: 317394
uggcauauuaaagggugau

SEQ ID NO: 487460 - RNA, 19 nt, Artificial Sequence
  Description of Artificial Sequence: Synthetic oligonucleotide
  Antisense Strand to SEQ ID NO: 487459
aucacccuuuaauaugcca

SEQ ID NO: 487461 - RNA, 19 nt, Artificial Sequence
  Description of Artificial Sequence: Synthetic oligonucleotide
  Sense strand starting at position 119 of SEQ ID NO: 317394
ggcauauuaaagggugaua

SEQ ID NO: 487462 - RNA, 19 nt, Artificial Sequence
  Description of Artificial Sequence: Synthetic oligonucleotide
  Antisense Strand to SEQ ID NO: 487461
uaucacccuuuaauaugcc

SEQ ID NO: 487463 - RNA, 19 nt, Artificial Sequence
  Description of Artificial Sequence: Synthetic oligonucleotide
  Sense strand starting at position 356 of SEQ ID NO: 317394
auguauguacgguauagga

SEQ ID NO: 487464 - RNA, 19 nt, Artificial Sequence
  Description of Artificial Sequence: Synthetic oligonucleotide
  Antisense Strand to SEQ ID NO: 487463
uccuauaccguacauacau

SEQ ID NO: 487465 - RNA, 19 nt, Artificial Sequence
  Description of Artificial Sequence: Synthetic oligonucleotide
  Sense strand starting at position 358 of SEQ ID NO: 317394
guauguacgguauaggaaa

SEQ ID NO: 487466 - RNA, 19 nt, Artificial Sequence
  Description of Artificial Sequence: Synthetic oligonucleotide
  Antisense Strand to SEQ ID NO: 487465
uuuccuauaccguacauac

SEQ ID NO: 487467 - RNA, 19 nt, Artificial Sequence
  Description of Artificial Sequence: Synthetic oligonucleotide
  Sense strand starting at position 400 of SEQ ID NO: 317394
gugcuauccgugguuucag

SEQ ID NO: 487468 - RNA, 19 nt, Artificial Sequence
  Description of Artificial Sequence: Synthetic oligonucleotide
  Antisense Strand to SEQ ID NO: 487467
cugaaaccacggauagcac

SEQ ID NO: 487469 - RNA, 19 nt, Artificial Sequence
  Description of Artificial Sequence: Synthetic oligonucleotide
  Sense strand starting at position 482 of SEQ ID NO: 317394
gcuauuuacuguuuacuac

SEQ ID NO: 487470 - RNA, 19 nt, Artificial Sequence
  Description of Artificial Sequence: Synthetic oligonucleotide
  Antisense Strand to SEQ ID NO: 487469
guaguaaacaguaaauagc

SEQ ID NO: 487471 - RNA, 19 nt, Artificial Sequence
  Description of Artificial Sequence: Synthetic oligonucleotide
  Sense strand starting at position 718 of SEQ ID NO: 317394
ggucuauucgaacaauauc

SEQ ID NO: 487472 - RNA, 19 nt, Artificial Sequence
  Description of Artificial Sequence: Synthetic oligonucleotide
  Antisense Strand to SEQ ID NO: 487471
gauauuguucgaauagacc

SEQ ID NO: 487473 - RNA, 19 nt, Artificial Sequence
  Description of Artificial Sequence: Synthetic oligonucleotide
  Sense strand starting at position 784 of SEQ ID NO: 317394
ggagaaggcucgcuauuug

SEQ ID NO: 487474 - RNA, 19 nt, Artificial Sequence
  Description of Artificial Sequence: Synthetic oligonucleotide
  Antisense Strand to SEQ ID NO: 487473
caaauagcgagccuucucc

SEQ ID NO: 487475 - RNA, 19 nt, Artificial Sequence
  Description of Artificial Sequence: Synthetic oligonucleotide
  Sense strand starting at position 788 of SEQ ID NO: 317394
aaggcucgcuauuugauaa

SEQ ID NO: 487476 - RNA, 19 nt, Artificial Sequence
  Description of Artificial Sequence: Synthetic oligonucleotide
  Antisense Strand to SEQ ID NO: 487475
uuaucaaauagcgagccuu

SEQ ID NO: 487477 - RNA, 19 nt, Artificial Sequence
  Description of Artificial Sequence: Synthetic oligonucleotide
  Sense strand starting at position 847 of SEQ ID NO: 317394
uaaagaacuuguguaagac

SEQ ID NO: 487478 - RNA, 19 nt, Artificial Sequence
  Description of Artificial Sequence: Synthetic oligonucleotide
  Antisense Strand to SEQ ID NO: 487477
gucuuacacaaguucuuua

SEQ ID NO: 487479 - RNA, 19 nt, Artificial Sequence
  Description of Artificial Sequence: Synthetic oligonucleotide
  Sense strand starting at position 853 of SEQ ID NO: 317394
acuuguguaagacggaaau

SEQ ID NO: 487480 - RNA, 19 nt, Artificial Sequence
  Description of Artificial Sequence: Synthetic oligonucleotide
  Antisense Strand to SEQ ID NO: 487479
auuuccgucuuacacaagu

SEQ ID NO: 487481 - RNA, 19 nt, Artificial Sequence
  Description of Artificial Sequence: Synthetic oligonucleotide
  Sense strand starting at position 969 of SEQ ID NO: 317394
auggcacugucauuucgaa

SEQ ID NO: 487482 - RNA, 19 nt, Artificial Sequence
  Description of Artificial Sequence: Synthetic oligonucleotide
  Antisense Strand to SEQ ID NO: 487481
uucgaaaugacagugccau

SEQ ID NO: 487483 - RNA, 19 nt, Artificial Sequence
  Description of Artificial Sequence: Synthetic oligonucleotide
  Sense strand starting at position 1085 of SEQ ID NO: 317394
ggcuaagaugcuuaauucu

SEQ ID NO: 487484 - RNA, 19 nt, Artificial Sequence
  Description of Artificial Sequence: Synthetic oligonucleotide
  Antisense Strand to SEQ ID NO: 487483
agaauuaagcaucuuagcc

SEQ ID NO: 487485 - RNA, 19 nt, Artificial Sequence
  Description of Artificial Sequence: Synthetic oligonucleotide
  Sense strand starting at position 1181 of SEQ ID NO: 317394
cuguaaagggaaugucaaa

SEQ ID NO: 487486 - RNA, 19 nt, Artificial Sequence
  Description of Artificial Sequence: Synthetic oligonucleotide
  Antisense Strand to SEQ ID NO: 487485
uuugacauucccuuuacag

SEQ ID NO: 487487 - RNA, 19 nt, Artificial Sequence
  Description of Artificial Sequence: Synthetic oligonucleotide
  Sense strand starting at position 1204 of SEQ ID NO: 317394
gcaaacucgggugaugaau

SEQ ID NO: 487488 - RNA, 19 nt, Artificial Sequence
  Description of Artificial Sequence: Synthetic oligonucleotide
  Antisense Strand to SEQ ID NO: 487487
auucaucacccgaguuugc

SEQ ID NO: 487489 - RNA, 19 nt, Artificial Sequence
  Description of Artificial Sequence: Synthetic oligonucleotide
  Sense strand starting at position 1210 of SEQ ID NO: 317394
ucgggugaugaaugacaca

SEQ ID NO: 487490 - RNA, 19 nt, Artificial Sequence
  Description of Artificial Sequence: Synthetic oligonucleotide
  Antisense Strand to SEQ ID NO: 487489
ugugucauucaucacccga

SEQ ID NO: 487491 - RNA, 19 nt, Artificial Sequence
  Description of Artificial Sequence: Synthetic oligonucleotide
  Sense strand starting at position 1389 of SEQ ID NO: 317394
uguuguguugcucccucau

SEQ ID NO: 487492 - RNA, 19 nt, Artificial Sequence
  Description of Artificial Sequence: Synthetic oligonucleotide
  Antisense Strand to SEQ ID NO: 487491
augagggagcaacacaaca

SEQ ID NO: 487493 - RNA, 19 nt, Artificial Sequence
  Description of Artificial Sequence: Synthetic oligonucleotide
  Sense strand starting at position 2280 of SEQ ID NO: 317394
cgacuucuugauuacuuau

SEQ ID NO: 487494 - RNA, 19 nt, Artificial Sequence
  Description of Artificial Sequence: Synthetic oligonucleotide
  Antisense Strand to SEQ ID NO: 487493
auaaguaaucaagaagucg

SEQ ID NO: 487495 - RNA, 19 nt, Artificial Sequence
  Description of Artificial Sequence: Synthetic oligonucleotide
  Sense strand starting at position 2330 of SEQ ID NO: 317394
aaguuaaggugguuuagaa

SEQ ID NO: 487496 - RNA, 19 nt, Artificial Sequence
  Description of Artificial Sequence: Synthetic oligonucleotide
  Antisense Strand to SEQ ID NO: 487495
uucuaaaccaccuuaacuu

SEQ ID NO: 487497 - RNA, 19 nt, Artificial Sequence
  Description of Artificial Sequence: Synthetic oligonucleotide
  Sense strand starting at position 2413 of SEQ ID NO: 317394
gucaaaccuggucaaaguu

SEQ ID NO: 487498 - RNA, 19 nt, Artificial Sequence
  Description of Artificial Sequence: Synthetic oligonucleotide
  Antisense Strand to SEQ ID NO: 487497
aacuuugaccagguuugac

SEQ ID NO: 487499 - RNA, 19 nt, Artificial Sequence
  Description of Artificial Sequence: Synthetic oligonucleotide
  Sense strand starting at position 2504 of SEQ ID NO: 317394
cugucacgugcaucaguau

SEQ ID NO: 487500 - RNA, 19 nt, Artificial Sequence
  Description of Artificial Sequence: Synthetic oligonucleotide
  Antisense Strand to SEQ ID NO: 487499
auacugaugcacgugacag

SEQ ID NO: 487501 - RNA, 19 nt, Artificial Sequence
  Description of Artificial Sequence: Synthetic oligonucleotide
  Sense strand starting at position 2565 of SEQ ID NO: 317394
uuguauggauagcuaaaga

SEQ ID NO: 487502 - RNA, 19 nt, Artificial Sequence
  Description of Artificial Sequence: Synthetic oligonucleotide
  Antisense Strand to SEQ ID NO: 487501
ucuuuagcuauccauacaa

SEQ ID NO: 487503 - RNA, 19 nt, Artificial Sequence
  Description of Artificial Sequence: Synthetic oligonucleotide
  Sense strand starting at position 2570 of SEQ ID NO: 317394
uggauagcuaaagauguuu

SEQ ID NO: 487504 - RNA, 19 nt, Artificial Sequence
  Description of Artificial Sequence: Synthetic oligonucleotide
  Antisense Strand to SEQ ID NO: 487503
aaacaucuuuagcuaucca

SEQ ID NO: 487505 - RNA, 19 nt, Artificial Sequence
  Description of Artificial Sequence: Synthetic oligonucleotide
  Sense strand starting at position 2639 of SEQ ID NO: 317394
ggugauuucugauaaauaa

SEQ ID NO: 487506 - RNA, 19 nt, Artificial Sequence
  Description of Artificial Sequence: Synthetic oligonucleotide
  Antisense Strand to SEQ ID NO: 487505
uuauuuaucagaaaucacc

SEQ ID NO: 487507 - RNA, 19 nt, Artificial Sequence
  Description of Artificial Sequence: Synthetic oligonucleotide
  Sense strand starting at position 2659 of SEQ ID NO: 317394
aggauaaccuuucuggguu

SEQ ID NO: 487508 - RNA, 19 nt, Artificial Sequence
  Description of Artificial Sequence: Synthetic oligonucleotide
  Antisense Strand to SEQ ID NO: 487507
aacccagaaagguuauccu

SEQ ID NO: 487509 - RNA, 19 nt, Artificial Sequence
  Description of Artificial Sequence: Synthetic oligonucleotide
  Sense strand starting at position 2705 of SEQ ID NO: 317394
ggaauugcucuacagcaua

SEQ ID NO: 487510 - RNA, 19 nt, Artificial Sequence
  Description of Artificial Sequence: Synthetic oligonucleotide
  Antisense Strand to SEQ ID NO: 487509
uaugcuguagagcaauucc

SEQ ID NO: 487511 - RNA, 19 nt, Artificial Sequence
  Description of Artificial Sequence: Synthetic oligonucleotide
  Sense strand starting at position 2989 of SEQ ID NO: 317394
gugaacaucugaucuugau

SEQ ID NO: 487512 - RNA, 19 nt, Artificial Sequence
  Description of Artificial Sequence: Synthetic oligonucleotide
  Antisense Strand to SEQ ID NO: 487511
aucaagaucagauguucac

SEQ ID NO: 487513 - RNA, 19 nt, Artificial Sequence
  Description of Artificial Sequence: Synthetic oligonucleotide
  Sense strand starting at position 3012 of SEQ ID NO: 317394
gcuuauguugucucuuguu

SEQ ID NO: 487514 - RNA, 19 nt, Artificial Sequence
  Description of Artificial Sequence: Synthetic oligonucleotide
  Antisense Strand to SEQ ID NO: 487513
aacaagagacaacauaagc

SEQ ID NO: 487515 - RNA, 19 nt, Artificial Sequence
  Description of Artificial Sequence: Synthetic oligonucleotide
  Sense strand starting at position 3082 of SEQ ID NO: 317394
gccauacagguaggauuau

SEQ ID NO: 487516 - RNA, 19 nt, Artificial Sequence
  Description of Artificial Sequence: Synthetic oligonucleotide
  Antisense Strand to SEQ ID NO: 487515
auaauccuaccuguauggc

SEQ ID NO: 487517 - RNA, 19 nt, Artificial Sequence
  Description of Artificial Sequence: Synthetic oligonucleotide
  Sense strand starting at position 3088 of SEQ ID NO: 317394
cagguaggauuauuaccaa

SEQ ID NO: 487518 - RNA, 19 nt, Artificial Sequence
  Description of Artificial Sequence: Synthetic oligonucleotide
  Antisense Strand to SEQ ID NO: 487517
uugguaauaauccuaccug

SEQ ID NO: 487519 - RNA, 19 nt, Artificial Sequence
  Description of Artificial Sequence: Synthetic oligonucleotide
  Sense strand starting at position 3091 of SEQ ID NO: 317394
guaggauuauuaccaagug

SEQ ID NO: 487520 - RNA, 19 nt, Artificial Sequence
  Description of Artificial Sequence: Synthetic oligonucleotide
  Antisense Strand to SEQ ID NO: 487519
cacuugguaauaauccuac

SEQ ID NO: 487521 - RNA, 19 nt, Artificial Sequence
  Description of Artificial Sequence: Synthetic oligonucleotide
  Sense strand starting at position 3130 of SEQ ID NO: 317394
guucuaagccuugagaaua

SEQ ID NO: 487522 - RNA, 19 nt, Artificial Sequence
  Description of Artificial Sequence: Synthetic oligonucleotide
  Antisense Strand to SEQ ID NO: 487521
uauucucaaggcuuagaac

SEQ ID NO: 487523 - RNA, 19 nt, Artificial Sequence
  Description of Artificial Sequence: Synthetic oligonucleotide
  Sense strand starting at position 3316 of SEQ ID NO: 317394
ccaucuauacugcaaguga

SEQ ID NO: 487524 - RNA, 19 nt, Artificial Sequence
  Description of Artificial Sequence: Synthetic oligonucleotide
  Antisense Strand to SEQ ID NO: 487523
ucacuugcaguauagaugg

SEQ ID NO: 487525 - RNA, 19 nt, Artificial Sequence
  Description of Artificial Sequence: Synthetic oligonucleotide
  Sense strand starting at position 3610 of SEQ ID NO: 317394
aaggcugguccugauaaac

SEQ ID NO: 487526 - RNA, 19 nt, Artificial Sequence
  Description of Artificial Sequence: Synthetic oligonucleotide
  Antisense Strand to SEQ ID NO: 487525
guuuaucaggaccagccuu

SEQ ID NO: 487527 - RNA, 19 nt, Artificial Sequence
  Description of Artificial Sequence: Synthetic oligonucleotide
  Sense strand starting at position 3690 of SEQ ID NO: 317394
aggucaagaaguugacuuu

SEQ ID NO: 487528 - RNA, 19 nt, Artificial Sequence
  Description of Artificial Sequence: Synthetic oligonucleotide
  Antisense Strand to SEQ ID NO: 487527
aaagucaacuucuugaccu

SEQ ID NO: 487529 - RNA, 19 nt, Artificial Sequence
  Description of Artificial Sequence: Synthetic oligonucleotide
  Sense strand starting at position 3693 of SEQ ID NO: 317394
ucaagaaguugacuuuaua

SEQ ID NO: 487530 - RNA, 19 nt, Artificial Sequence
  Description of Artificial Sequence: Synthetic oligonucleotide
  Antisense Strand to SEQ ID NO: 487529
uauaaagucaacuucuuga

SEQ ID NO: 487531 - RNA, 19 nt, Artificial Sequence
  Description of Artificial Sequence: Synthetic oligonucleotide
  Sense strand starting at position 3760 of SEQ ID NO: 317394
accaguuauauguggagag

SEQ ID NO: 487532 - RNA, 19 nt, Artificial Sequence
  Description of Artificial Sequence: Synthetic oligonucleotide
  Antisense Strand to SEQ ID NO: 487531
cucuccacauauaacuggu

SEQ ID NO: 487533 - RNA, 19 nt, Artificial Sequence
  Description of Artificial Sequence: Synthetic oligonucleotide
  Sense strand starting at position 3762 of SEQ ID NO: 317394
caguuauauguggagagug

SEQ ID NO: 487534 - RNA, 19 nt, Artificial Sequence
  Description of Artificial Sequence: Synthetic oligonucleotide
  Antisense Strand to SEQ ID NO: 487533
cacucuccacauauaacug

SEQ ID NO: 487535 - RNA, 19 nt, Artificial Sequence
  Description of Artificial Sequence: Synthetic oligonucleotide
  Sense strand starting at position 3764 of SEQ ID NO: 317394
guuauauguggagagugag

SEQ ID NO: 487536 - RNA, 19 nt, Artificial Sequence
  Description of Artificial Sequence: Synthetic oligonucleotide
  Antisense Strand to SEQ ID NO: 487535
cucacucuccacauauaac

SEQ ID NO: 487537 - RNA, 19 nt, Artificial Sequence
  Description of Artificial Sequence: Synthetic oligonucleotide
  Sense strand starting at position 3891 of SEQ ID NO: 317394
gcagauugugaacacucaa

SEQ ID NO: 487538 - RNA, 19 nt, Artificial Sequence
  Description of Artificial Sequence: Synthetic oligonucleotide
  Antisense Strand to SEQ ID NO: 487537
uugaguguucacaaucugc

SEQ ID NO: 487539 - RNA, 19 nt, Artificial Sequence
  Description of Artificial Sequence: Synthetic oligonucleotide
  Sense strand starting at position 179 of SEQ ID NO: 317395
ugguuaggauuugauuacu

SEQ ID NO: 487540 - RNA, 19 nt, Artificial Sequence
  Description of Artificial Sequence: Synthetic oligonucleotide
  Antisense Strand to SEQ ID NO: 487539
aguaaucaaauccuaacca

SEQ ID NO: 487541 - RNA, 19 nt, Artificial Sequence
  Description of Artificial Sequence: Synthetic oligonucleotide
  Sense strand starting at position 185 of SEQ ID NO: 317395
ggauuugauuacuaacuga

SEQ ID NO: 487542 - RNA, 19 nt, Artificial Sequence
  Description of Artificial Sequence: Synthetic oligonucleotide
  Antisense Strand to SEQ ID NO: 487541
ucaguuaguaaucaaaucc

SEQ ID NO: 487543 - RNA, 19 nt, Artificial Sequence
  Description of Artificial Sequence: Synthetic oligonucleotide
  Sense strand starting at position 200 of SEQ ID NO: 317395
cugacagcuuccguaauuu

SEQ ID NO: 487544 - RNA, 19 nt, Artificial Sequence
  Description of Artificial Sequence: Synthetic oligonucleotide
  Antisense Strand to SEQ ID NO: 487543
aaauuacggaagcugucag

SEQ ID NO: 487545 - RNA, 19 nt, Artificial Sequence
  Description of Artificial Sequence: Synthetic oligonucleotide
  Sense strand starting at position 211 of SEQ ID NO: 317395
cguaauuucuguccuugau

SEQ ID NO: 487546 - RNA, 19 nt, Artificial Sequence
  Description of Artificial Sequence: Synthetic oligonucleotide
  Antisense Strand to SEQ ID NO: 487545
aucaaggacagaaauuacg

SEQ ID NO: 487547 - RNA, 19 nt, Artificial Sequence
  Description of Artificial Sequence: Synthetic oligonucleotide
  Sense strand starting at position 281 of SEQ ID NO: 317395
auagaauguugugcuucua

SEQ ID NO: 487548 - RNA, 19 nt, Artificial Sequence
  Description of Artificial Sequence: Synthetic oligonucleotide
  Antisense Strand to SEQ ID NO: 487547
uagaagcacaacauucuau

SEQ ID NO: 487549 - RNA, 19 nt, Artificial Sequence
  Description of Artificial Sequence: Synthetic oligonucleotide
  Sense strand starting at position 401 of SEQ ID NO: 317395
ucgagucccuacucaaaug

SEQ ID NO: 487550 - RNA, 19 nt, Artificial Sequence
  Description of Artificial Sequence: Synthetic oligonucleotide
  Antisense Strand to SEQ ID NO: 487549
cauuugaguagggacucga

SEQ ID NO: 487551 - RNA, 19 nt, Artificial Sequence
  Description of Artificial Sequence: Synthetic oligonucleotide
  Sense strand starting at position 486 of SEQ ID NO: 317395
uuugguuggucuccauuua

SEQ ID NO: 487552 - RNA, 19 nt, Artificial Sequence
  Description of Artificial Sequence: Synthetic oligonucleotide
  Antisense Strand to SEQ ID NO: 487551
uaaauggagaccaaccaaa

SEQ ID NO: 487553 - RNA, 19 nt, Artificial Sequence
  Description of Artificial Sequence: Synthetic oligonucleotide
  Sense strand starting at position 588 of SEQ ID NO: 317395
aggaaauauuaacacaaag

SEQ ID NO: 487554 - RNA, 19 nt, Artificial Sequence
  Description of Artificial Sequence: Synthetic oligonucleotide
  Antisense Strand to SEQ ID NO: 487553
cuuuguguuaauauuuccu

SEQ ID NO: 487555 - RNA, 19 nt, Artificial Sequence
  Description of Artificial Sequence: Synthetic oligonucleotide
  Sense strand starting at position 772 of SEQ ID NO: 317395
guagaagugguuugcuacu

SEQ ID NO: 487556 - RNA, 19 nt, Artificial Sequence
  Description of Artificial Sequence: Synthetic oligonucleotide
  Antisense Strand to SEQ ID NO: 487555
aguagcaaaccacuucuac

SEQ ID NO: 487557 - RNA, 19 nt, Artificial Sequence
  Description of Artificial Sequence: Synthetic oligonucleotide
  Sense strand starting at position 774 of SEQ ID NO: 317395
agaagugguuugcuacuua

SEQ ID NO: 487558 - RNA, 19 nt, Artificial Sequence
  Description of Artificial Sequence: Synthetic oligonucleotide
  Antisense Strand to SEQ ID NO: 487557
uaaguagcaaaccacuucu

SEQ ID NO: 487559 - RNA, 19 nt, Artificial Sequence
  Description of Artificial Sequence: Synthetic oligonucleotide
  Sense strand starting at position 1045 of SEQ ID NO: 317395
aaauccaguuugggauuua

SEQ ID NO: 487560 - RNA, 19 nt, Artificial Sequence
  Description of Artificial Sequence: Synthetic oligonucleotide
  Antisense Strand to SEQ ID NO: 487559
uaaaucccaaacuggauuu

SEQ ID NO: 487561 - RNA, 19 nt, Artificial Sequence
  Description of Artificial Sequence: Synthetic oligonucleotide
  Sense strand starting at position 1046 of SEQ ID NO: 317395
aauccaguuugggauuuau

SEQ ID NO: 487562 - RNA, 19 nt, Artificial Sequence
  Description of Artificial Sequence: Synthetic oligonucleotide
  Antisense Strand to SEQ ID NO: 487561
auaaaucccaaacuggauu

SEQ ID NO: 487563 - RNA, 19 nt, Artificial Sequence
  Description of Artificial Sequence: Synthetic oligonucleotide
  Sense strand starting at position 1203 of SEQ ID NO: 317395
ccauuaggguugguugaga

SEQ ID NO: 487564 - RNA, 19 nt, Artificial Sequence
  Description of Artificial Sequence: Synthetic oligonucleotide
  Antisense Strand to SEQ ID NO: 487563
ucucaaccaacccuaaugg

SEQ ID NO: 487565 - RNA, 19 nt, Artificial Sequence
  Description of Artificial Sequence: Synthetic oligonucleotide
  Sense strand starting at position 1208 of SEQ ID NO: 317395
aggguugguugagaaagga

SEQ ID NO: 487566 - RNA, 19 nt, Artificial Sequence
  Description of Artificial Sequence: Synthetic oligonucleotide
  Antisense Strand to SEQ ID NO: 487565
uccuuucucaaccaacccu

SEQ ID NO: 487567 - RNA, 19 nt, Artificial Sequence
  Description of Artificial Sequence: Synthetic oligonucleotide
  Sense strand starting at position 1466 of SEQ ID NO: 317395
uccagugugguuggacuaa

SEQ ID NO: 487568 - RNA, 19 nt, Artificial Sequence
  Description of Artificial Sequence: Synthetic oligonucleotide
  Antisense Strand to SEQ ID NO: 487567
uuaguccaaccacacugga

SEQ ID NO: 487569 - RNA, 19 nt, Artificial Sequence
  Description of Artificial Sequence: Synthetic oligonucleotide
  Sense strand starting at position 1611 of SEQ ID NO: 317395
gauggcagguguccuuaga

SEQ ID NO: 487570 - RNA, 19 nt, Artificial Sequence
  Description of Artificial Sequence: Synthetic oligonucleotide
  Antisense Strand to SEQ ID NO: 487569
ucuaaggacaccugccauc

SEQ ID NO: 487571 - RNA, 19 nt, Artificial Sequence
  Description of Artificial Sequence: Synthetic oligonucleotide
  Sense strand starting at position 2352 of SEQ ID NO: 317395
uacuaagucccagauagug

SEQ ID NO: 487572 - RNA, 19 nt, Artificial Sequence
  Description of Artificial Sequence: Synthetic oligonucleotide
  Antisense Strand to SEQ ID NO: 487571
cacuaucugggacuuagua

SEQ ID NO: 487573 - RNA, 19 nt, Artificial Sequence
  Description of Artificial Sequence: Synthetic oligonucleotide
  Sense strand starting at position 2354 of SEQ ID NO: 317395
cuaagucccagauaguguu

SEQ ID NO: 487574 - RNA, 19 nt, Artificial Sequence
  Description of Artificial Sequence: Synthetic oligonucleotide
  Antisense Strand to SEQ ID NO: 487573
aacacuaucugggacuuag

SEQ ID NO: 487575 - RNA, 19 nt, Artificial Sequence
  Description of Artificial Sequence: Synthetic oligonucleotide
  Sense strand starting at position 2369 of SEQ ID NO: 317395
uguuucguugcugaagaca

SEQ ID NO: 487576 - RNA, 19 nt, Artificial Sequence
  Description of Artificial Sequence: Synthetic oligonucleotide
  Antisense Strand to SEQ ID NO: 487575
ugucuucagcaacgaaaca

SEQ ID NO: 487577 - RNA, 19 nt, Artificial Sequence
  Description of Artificial Sequence: Synthetic oligonucleotide
  Sense strand starting at position 2510 of SEQ ID NO: 317395
uagugauauuuggauacau

SEQ ID NO: 487578 - RNA, 19 nt, Artificial Sequence
  Description of Artificial Sequence: Synthetic oligonucleotide
  Antisense Strand to SEQ ID NO: 487577
auguauccaaauaucacua

SEQ ID NO: 487579 - RNA, 19 nt, Artificial Sequence
  Description of Artificial Sequence: Synthetic oligonucleotide
  Sense strand starting at position 2585 of SEQ ID NO: 317395
ucauuacuuuguguugaga

SEQ ID NO: 487580 - RNA, 19 nt, Artificial Sequence
  Description of Artificial Sequence: Synthetic oligonucleotide
  Antisense Strand to SEQ ID NO: 487579
ucucaacacaaaguaauga

SEQ ID NO: 487581 - RNA, 19 nt, Artificial Sequence
  Description of Artificial Sequence: Synthetic oligonucleotide
  Sense strand starting at position 2588 of SEQ ID NO: 317395
uuacuuuguguugagaaca

SEQ ID NO: 487582 - RNA, 19 nt, Artificial Sequence
  Description of Artificial Sequence: Synthetic oligonucleotide
  Antisense Strand to SEQ ID NO: 487581
uguucucaacacaaaguaa

SEQ ID NO: 487583 - RNA, 19 nt, Artificial Sequence
  Description of Artificial Sequence: Synthetic oligonucleotide
  Sense strand starting at position 2946 of SEQ ID NO: 317395
gugcucgaccuuuauaaua

SEQ ID NO: 487584 - RNA, 19 nt, Artificial Sequence
  Description of Artificial Sequence: Synthetic oligonucleotide
  Antisense Strand to SEQ ID NO: 487583
uauuauaaaggucgagcac

SEQ ID NO: 487585 - RNA, 19 nt, Artificial Sequence
  Description of Artificial Sequence: Synthetic oligonucleotide
  Sense strand starting at position 2972 of SEQ ID NO: 317395
guuaauugucggcacccua

SEQ ID NO: 487586 - RNA, 19 nt, Artificial Sequence
  Description of Artificial Sequence: Synthetic oligonucleotide
  Antisense Strand to SEQ ID NO: 487585
uagggugccgacaauuaac

SEQ ID NO: 487587 - RNA, 19 nt, Artificial Sequence
  Description of Artificial Sequence: Synthetic oligonucleotide
  Sense strand starting at position 3104 of SEQ ID NO: 317395
cucauuacuucugugagaa

SEQ ID NO: 487588 - RNA, 19 nt, Artificial Sequence
  Description of Artificial Sequence: Synthetic oligonucleotide
  Antisense Strand to SEQ ID NO: 487587
uucucacagaaguaaugag

SEQ ID NO: 487589 - RNA, 19 nt, Artificial Sequence
  Description of Artificial Sequence: Synthetic oligonucleotide
  Sense strand starting at position 3105 of SEQ ID NO: 317395
ucauuacuucugugagaaa

SEQ ID NO: 487590 - RNA, 19 nt, Artificial Sequence
  Description of Artificial Sequence: Synthetic oligonucleotide
  Antisense Strand to SEQ ID NO: 487589
uuucucacagaaguaauga

SEQ ID NO: 487591 - RNA, 19 nt, Artificial Sequence
  Description of Artificial Sequence: Synthetic oligonucleotide
  Sense strand starting at position 3307 of SEQ ID NO: 317395
uggccauugagcugagauu

SEQ ID NO: 487592 - RNA, 19 nt, Artificial Sequence
  Description of Artificial Sequence: Synthetic oligonucleotide
  Antisense Strand to SEQ ID NO: 487591
aaucucagcucaauggcca

SEQ ID NO: 487593 - RNA, 19 nt, Artificial Sequence
  Description of Artificial Sequence: Synthetic oligonucleotide
  Sense strand starting at position 3716 of SEQ ID NO: 317395
cugugugucaaaugauucu

SEQ ID NO: 487594 - RNA, 19 nt, Artificial Sequence
  Description of Artificial Sequence: Synthetic oligonucleotide
  Antisense Strand to SEQ ID NO: 487593
agaaucauuugacacacag

SEQ ID NO: 487595 - RNA, 19 nt, Artificial Sequence
  Description of Artificial Sequence: Synthetic oligonucleotide
  Sense strand starting at position 3723 of SEQ ID NO: 317395
ucaaaugauucugugacau

SEQ ID NO: 487596 - RNA, 19 nt, Artificial Sequence
  Description of Artificial Sequence: Synthetic oligonucleotide
  Antisense Strand to SEQ ID NO: 487595
augucacagaaucauuuga

SEQ ID NO: 487597 - RNA, 19 nt, Artificial Sequence
  Description of Artificial Sequence: Synthetic oligonucleotide
  Sense strand starting at position 3735 of SEQ ID NO: 317395
gugacauguugccuuauca

SEQ ID NO: 487598 - RNA, 19 nt, Artificial Sequence
  Description of Artificial Sequence: Synthetic oligonucleotide
  Antisense Strand to SEQ ID NO: 487597
ugauaaggcaacaugucac

SEQ ID NO: 487599 - RNA, 19 nt, Artificial Sequence
  Description of Artificial Sequence: Synthetic oligonucleotide
  Sense strand starting at position 3743 of SEQ ID NO: 317395
uugccuuaucaguaagggu

SEQ ID NO: 487600 - RNA, 19 nt, Artificial Sequence
  Description of Artificial Sequence: Synthetic oligonucleotide
  Antisense Strand to SEQ ID NO: 487599
acccuuacugauaaggcaa

SEQ ID NO: 487601 - RNA, 19 nt, Artificial Sequence
  Description of Artificial Sequence: Synthetic oligonucleotide
  Sense strand starting at position 3801 of SEQ ID NO: 317395
gagauaauuuaguauaagg

SEQ ID NO: 487602 - RNA, 19 nt, Artificial Sequence
  Description of Artificial Sequence: Synthetic oligonucleotide
  Antisense Strand to SEQ ID NO: 487601
ccuuauacuaaauuaucuc

SEQ ID NO: 487603 - RNA, 19 nt, Artificial Sequence
  Description of Artificial Sequence: Synthetic oligonucleotide
  Sense strand starting at position 3811 of SEQ ID NO: 317395
aguauaaggaauuggcuaa

SEQ ID NO: 487604 - RNA, 19 nt, Artificial Sequence
  Description of Artificial Sequence: Synthetic oligonucleotide
  Antisense Strand to SEQ ID NO: 487603
uuagccaauuccuuauacu

SEQ ID NO: 487605 - RNA, 19 nt, Artificial Sequence
  Description of Artificial Sequence: Synthetic oligonucleotide
  Sense strand starting at position 3812 of SEQ ID NO: 317395
guauaaggaauuggcuaau

SEQ ID NO: 487606 - RNA, 19 nt, Artificial Sequence
  Description of Artificial Sequence: Synthetic oligonucleotide
  Antisense Strand to SEQ ID NO: 487605
auuagccaauuccuuauac

SEQ ID NO: 487607 - RNA, 19 nt, Artificial Sequence
  Description of Artificial Sequence: Synthetic oligonucleotide
  Sense strand starting at position 3818 of SEQ ID NO: 317395
ggaauuggcuaauccagua

SEQ ID NO: 487608 - RNA, 19 nt, Artificial Sequence
  Description of Artificial Sequence: Synthetic oligonucleotide
  Antisense Strand to SEQ ID NO: 487607
uacuggauuagccaauucc

SEQ ID NO: 487609 - RNA, 19 nt, Artificial Sequence
  Description of Artificial Sequence: Synthetic oligonucleotide
  Sense strand starting at position 3823 of SEQ ID NO: 317395
uggcuaauccaguagggau

SEQ ID NO: 487610 - RNA, 19 nt, Artificial Sequence
  Description of Artificial Sequence: Synthetic oligonucleotide
  Antisense Strand to SEQ ID NO: 487609
aucccuacuggauuagcca

SEQ ID NO: 487611 - RNA, 19 nt, Artificial Sequence
  Description of Artificial Sequence: Synthetic oligonucleotide
  Sense strand starting at position 3825 of SEQ ID NO: 317395
gcuaauccaguagggauaa

SEQ ID NO: 487612 - RNA, 19 nt, Artificial Sequence
  Description of Artificial Sequence: Synthetic oligonucleotide
  Antisense Strand to SEQ ID NO: 487611
uuaucccuacuggauuagc

SEQ ID NO: 487613 - RNA, 19 nt, Artificial Sequence
  Description of Artificial Sequence: Synthetic oligonucleotide
  Sense strand starting at position 3902 of SEQ ID NO: 317395
gcaucaugccucgaucuag

SEQ ID NO: 487614 - RNA, 19 nt, Artificial Sequence
  Description of Artificial Sequence: Synthetic oligonucleotide
  Antisense Strand to SEQ ID NO: 487613
cuagaucgaggcaugaugc

SEQ ID NO: 487615 - RNA, 19 nt, Artificial Sequence
  Description of Artificial Sequence: Synthetic oligonucleotide
  Sense strand starting at position 3928 of SEQ ID NO: 317395
aacggauuagguugggauu

SEQ ID NO: 487616 - RNA, 19 nt, Artificial Sequence
  Description of Artificial Sequence: Synthetic oligonucleotide
  Antisense Strand to SEQ ID NO: 487615
aaucccaaccuaauccguu

SEQ ID NO: 487617 - RNA, 19 nt, Artificial Sequence
  Description of Artificial Sequence: Synthetic oligonucleotide
  Sense strand starting at position 3939 of SEQ ID NO: 317395
uugggauucucagaacuag

SEQ ID NO: 487618 - RNA, 19 nt, Artificial Sequence
  Description of Artificial Sequence: Synthetic oligonucleotide
  Antisense Strand to SEQ ID NO: 487617
cuaguucugagaaucccaa

SEQ ID NO: 487619 - RNA, 19 nt, Artificial Sequence
  Description of Artificial Sequence: Synthetic oligonucleotide
  Sense strand starting at position 52 of SEQ ID NO: 317396
ugguuaggauuugauuacu

SEQ ID NO: 487620 - RNA, 19 nt, Artificial Sequence
  Description of Artificial Sequence: Synthetic oligonucleotide
  Antisense Strand to SEQ ID NO: 487619
aguaaucaaauccuaacca

SEQ ID NO: 487621 - RNA, 19 nt, Artificial Sequence
  Description of Artificial Sequence: Synthetic oligonucleotide
  Sense strand starting at position 58 of SEQ ID NO: 317396
ggauuugauuacuaacuga

SEQ ID NO: 487622 - RNA, 19 nt, Artificial Sequence
  Description of Artificial Sequence: Synthetic oligonucleotide
  Antisense Strand to SEQ ID NO: 487621
ucaguuaguaaucaaaucc

SEQ ID NO: 487623 - RNA, 19 nt, Artificial Sequence
  Description of Artificial Sequence: Synthetic oligonucleotide
  Sense strand starting at position 73 of SEQ ID NO: 317396
cugacagcuuccguaauuu

SEQ ID NO: 487624 - RNA, 19 nt, Artificial Sequence
  Description of Artificial Sequence: Synthetic oligonucleotide
  Antisense Strand to SEQ ID NO: 487623
aaauuacggaagcugucag

SEQ ID NO: 487625 - RNA, 19 nt, Artificial Sequence
  Description of Artificial Sequence: Synthetic oligonucleotide
  Sense strand starting at position 84 of SEQ ID NO: 317396
cguaauuucuguccuugau

SEQ ID NO: 487626 - RNA, 19 nt, Artificial Sequence
  Description of Artificial Sequence: Synthetic oligonucleotide
  Antisense Strand to SEQ ID NO: 487625
aucaaggacagaaauuacg

SEQ ID NO: 487627 - RNA, 19 nt, Artificial Sequence
  Description of Artificial Sequence: Synthetic oligonucleotide
  Sense strand starting at position 154 of SEQ ID NO: 317396
auagaauguugugcuucua

SEQ ID NO: 487628 - RNA, 19 nt, Artificial Sequence
  Description of Artificial Sequence: Synthetic oligonucleotide
  Antisense Strand to SEQ ID NO: 487627
uagaagcacaacauucuau

SEQ ID NO: 487629 - RNA, 19 nt, Artificial Sequence
  Description of Artificial Sequence: Synthetic oligonucleotide
  Sense strand starting at position 274 of SEQ ID NO: 317396
ucgagucccuacucaaaug

SEQ ID NO: 487630 - RNA, 19 nt, Artificial Sequence
  Description of Artificial Sequence: Synthetic oligonucleotide
  Antisense Strand to SEQ ID NO: 487629
cauuugaguagggacucga

SEQ ID NO: 487631 - RNA, 19 nt, Artificial Sequence
  Description of Artificial Sequence: Synthetic oligonucleotide
  Sense strand starting at position 359 of SEQ ID NO: 317396
uuugguuggucuccauuua

SEQ ID NO: 487632 - RNA, 19 nt, Artificial Sequence
  Description of Artificial Sequence: Synthetic oligonucleotide
  Antisense Strand to SEQ ID NO: 487631
uaaauggagaccaaccaaa

SEQ ID NO: 487633 - RNA, 19 nt, Artificial Sequence
  Description of Artificial Sequence: Synthetic oligonucleotide
  Sense strand starting at position 461 of SEQ ID NO: 317396
aggaaauauuaacacaaag

SEQ ID NO: 487634 - RNA, 19 nt, Artificial Sequence
  Description of Artificial Sequence: Synthetic oligonucleotide
  Antisense Strand to SEQ ID NO: 487633
cuuuguguuaauauuuccu

SEQ ID NO: 487635 - RNA, 19 nt, Artificial Sequence
  Description of Artificial Sequence: Synthetic oligonucleotide
  Sense strand starting at position 647 of SEQ ID NO: 317396
agaagugguuugcuacuua

SEQ ID NO: 487636 - RNA, 19 nt, Artificial Sequence
  Description of Artificial Sequence: Synthetic oligonucleotide
  Antisense Strand to SEQ ID NO: 487635
uaaguagcaaaccacuucu

SEQ ID NO: 487637 - RNA, 19 nt, Artificial Sequence
  Description of Artificial Sequence: Synthetic oligonucleotide
  Sense strand starting at position 918 of SEQ ID NO: 317396
aaauccaguuugggauuua

SEQ ID NO: 487638 - RNA, 19 nt, Artificial Sequence
  Description of Artificial Sequence: Synthetic oligonucleotide
  Antisense Strand to SEQ ID NO: 487637
uaaaucccaaacuggauuu

SEQ ID NO: 487639 - RNA, 19 nt, Artificial Sequence
  Description of Artificial Sequence: Synthetic oligonucleotide
  Sense strand starting at position 919 of SEQ ID NO: 317396
aauccaguuugggauuuau

SEQ ID NO: 487640 - RNA, 19 nt, Artificial Sequence
  Description of Artificial Sequence: Synthetic oligonucleotide
  Antisense Strand to SEQ ID NO: 487639
auaaaucccaaacuggauu

SEQ ID NO: 487641 - RNA, 19 nt, Artificial Sequence
  Description of Artificial Sequence: Synthetic oligonucleotide
  Sense strand starting at position 1076 of SEQ ID NO: 317396
ccauuaggguugguugaga

SEQ ID NO: 487642 - RNA, 19 nt, Artificial Sequence
  Description of Artificial Sequence: Synthetic oligonucleotide
  Antisense Strand to SEQ ID NO: 487641
ucucaaccaacccuaaugg

SEQ ID NO: 487643 - RNA, 19 nt, Artificial Sequence
  Description of Artificial Sequence: Synthetic oligonucleotide
  Sense strand starting at position 1339 of SEQ ID NO: 317396
uccagugugguuggacuaa

SEQ ID NO: 487644 - RNA, 19 nt, Artificial Sequence
  Description of Artificial Sequence: Synthetic oligonucleotide
  Antisense Strand to SEQ ID NO: 487643
uuaguccaaccacacugga

SEQ ID NO: 487645 - RNA, 19 nt, Artificial Sequence
  Description of Artificial Sequence: Synthetic oligonucleotide
  Sense strand starting at position 1484 of SEQ ID NO: 317396
gauggcagguguccuuaga

SEQ ID NO: 487646 - RNA, 19 nt, Artificial Sequence
  Description of Artificial Sequence: Synthetic oligonucleotide
  Antisense Strand to SEQ ID NO: 487645
ucuaaggacaccugccauc

SEQ ID NO: 487647 - RNA, 19 nt, Artificial Sequence
  Description of Artificial Sequence: Synthetic oligonucleotide
  Sense strand starting at position 2225 of SEQ ID NO: 317396
uacuaagucccagauagug

SEQ ID NO: 487648 - RNA, 19 nt, Artificial Sequence
  Description of Artificial Sequence: Synthetic oligonucleotide
  Antisense Strand to SEQ ID NO: 487647
cacuaucugggacuuagua

SEQ ID NO: 487649 - RNA, 19 nt, Artificial Sequence
  Description of Artificial Sequence: Synthetic oligonucleotide
  Sense strand starting at position 2227 of SEQ ID NO: 317396
cuaagucccagauaguguu

SEQ ID NO: 487650 - RNA, 19 nt, Artificial Sequence
  Description of Artificial Sequence: Synthetic oligonucleotide
  Antisense Strand to SEQ ID NO: 487649
aacacuaucugggacuuag

SEQ ID NO: 487651 - RNA, 19 nt, Artificial Sequence
  Description of Artificial Sequence: Synthetic oligonucleotide
  Sense strand starting at position 2242 of SEQ ID NO: 317396
uguuucguugcugaagaca

SEQ ID NO: 487652 - RNA, 19 nt, Artificial Sequence
  Description of Artificial Sequence: Synthetic oligonucleotide
  Antisense Strand to SEQ ID NO: 487651
ugucuucagcaacgaaaca

SEQ ID NO: 487653 - RNA, 19 nt, Artificial Sequence
  Description of Artificial Sequence: Synthetic oligonucleotide
  Sense strand starting at position 2383 of SEQ ID NO: 317396
uagugauauuuggauacau

SEQ ID NO: 487654 - RNA, 19 nt, Artificial Sequence
  Description of Artificial Sequence: Synthetic oligonucleotide
  Antisense Strand to SEQ ID NO: 487653
auguauccaaauaucacua

SEQ ID NO: 487655 - RNA, 19 nt, Artificial Sequence
  Description of Artificial Sequence: Synthetic oligonucleotide
  Sense strand starting at position 2458 of SEQ ID NO: 317396
ucauuacuuuguguugaga

SEQ ID NO: 487656 - RNA, 19 nt, Artificial Sequence
  Description of Artificial Sequence: Synthetic oligonucleotide
  Antisense Strand to SEQ ID NO: 487655
ucucaacacaaaguaauga

SEQ ID NO: 487657 - RNA, 19 nt, Artificial Sequence
  Description of Artificial Sequence: Synthetic oligonucleotide
  Sense strand starting at position 2461 of SEQ ID NO: 317396
uuacuuuguguugagaaca

SEQ ID NO: 487658 - RNA, 19 nt, Artificial Sequence
  Description of Artificial Sequence: Synthetic oligonucleotide
  Antisense Strand to SEQ ID NO: 487657
uguucucaacacaaaguaa

SEQ ID NO: 487659 - RNA, 19 nt, Artificial Sequence
  Description of Artificial Sequence: Synthetic oligonucleotide
  Sense strand starting at position 2819 of SEQ ID NO: 317396
gugcucgaccuuuauaaua

SEQ ID NO: 487660 - RNA, 19 nt, Artificial Sequence
  Description of Artificial Sequence: Synthetic oligonucleotide
  Antisense Strand to SEQ ID NO: 487659
uauuauaaaggucgagcac

SEQ ID NO: 487661 - RNA, 19 nt, Artificial Sequence
  Description of Artificial Sequence: Synthetic oligonucleotide
  Sense strand starting at position 2845 of SEQ ID NO: 317396
guuaauugucggcacccua

SEQ ID NO: 487662 - RNA, 19 nt, Artificial Sequence
  Description of Artificial Sequence: Synthetic oligonucleotide
  Antisense Strand to SEQ ID NO: 487661
uagggugccgacaauuaac

SEQ ID NO: 487663 - RNA, 19 nt, Artificial Sequence
  Description of Artificial Sequence: Synthetic oligonucleotide
  Sense strand starting at position 2977 of SEQ ID NO: 317396
cucauuacuucugugagaa

SEQ ID NO: 487664 - RNA, 19 nt, Artificial Sequence
  Description of Artificial Sequence: Synthetic oligonucleotide
  Antisense Strand to SEQ ID NO: 487663
uucucacagaaguaaugag

SEQ ID NO: 487665 - RNA, 19 nt, Artificial Sequence
  Description of Artificial Sequence: Synthetic oligonucleotide
  Sense strand starting at position 2978 of SEQ ID NO: 317396
ucauuacuucugugagaaa

SEQ ID NO: 487666 - RNA, 19 nt, Artificial Sequence
  Description of Artificial Sequence: Synthetic oligonucleotide
  Antisense Strand to SEQ ID NO: 487665
uuucucacagaaguaauga

SEQ ID NO: 487667 - RNA, 19 nt, Artificial Sequence
  Description of Artificial Sequence: Synthetic oligonucleotide
  Sense strand starting at position 3180 of SEQ ID NO: 317396
uggccauugagcugagauu

SEQ ID NO: 487668 - RNA, 19 nt, Artificial Sequence
  Description of Artificial Sequence: Synthetic oligonucleotide
  Antisense Strand to SEQ ID NO: 487667
aaucucagcucaauggcca

SEQ ID NO: 487669 - RNA, 19 nt, Artificial Sequence
  Description of Artificial Sequence: Synthetic oligonucleotide
  Sense strand starting at position 3589 of SEQ ID NO: 317396
cugugugucaaaugauucu

SEQ ID NO: 487670 - RNA, 19 nt, Artificial Sequence
  Description of Artificial Sequence: Synthetic oligonucleotide
  Antisense Strand to SEQ ID NO: 487669
agaaucauuugacacacag

SEQ ID NO: 487671 - RNA, 19 nt, Artificial Sequence
  Description of Artificial Sequence: Synthetic oligonucleotide
  Sense strand starting at position 3596 of SEQ ID NO: 317396
ucaaaugauucugugacau

SEQ ID NO: 487672 - RNA, 19 nt, Artificial Sequence
  Description of Artificial Sequence: Synthetic oligonucleotide
  Antisense Strand to SEQ ID NO: 487671
augucacagaaucauuuga

SEQ ID NO: 487673 - RNA, 19 nt, Artificial Sequence
  Description of Artificial Sequence: Synthetic oligonucleotide
  Sense strand starting at position 3608 of SEQ ID NO: 317396
gugacauguugccuuauca

SEQ ID NO: 487674 - RNA, 19 nt, Artificial Sequence
  Description of Artificial Sequence: Synthetic oligonucleotide
  Antisense Strand to SEQ ID NO: 487673
ugauaaggcaacaugucac

SEQ ID NO: 487675 - RNA, 19 nt, Artificial Sequence
  Description of Artificial Sequence: Synthetic oligonucleotide
  Sense strand starting at position 3616 of SEQ ID NO: 317396
uugccuuaucaguaagggu

SEQ ID NO: 487676 - RNA, 19 nt, Artificial Sequence
  Description of Artificial Sequence: Synthetic oligonucleotide
  Antisense Strand to SEQ ID NO: 487675
acccuuacugauaaggcaa

SEQ ID NO: 487677 - RNA, 19 nt, Artificial Sequence
  Description of Artificial Sequence: Synthetic oligonucleotide
  Sense strand starting at position 3674 of SEQ ID NO: 317396
gagauaauuuaguauaagg

SEQ ID NO: 487678 - RNA, 19 nt, Artificial Sequence
  Description of Artificial Sequence: Synthetic oligonucleotide
  Antisense Strand to SEQ ID NO: 487677
ccuuauacuaaauuaucuc

SEQ ID NO: 487679 - RNA, 19 nt, Artificial Sequence
  Description of Artificial Sequence: Synthetic oligonucleotide
  Sense strand starting at position 3684 of SEQ ID NO: 317396
aguauaaggaauuggcuaa

SEQ ID NO: 487680 - RNA, 19 nt, Artificial Sequence
  Description of Artificial Sequence: Synthetic oligonucleotide
  Antisense Strand to SEQ ID NO: 487679
uuagccaauuccuuauacu

SEQ ID NO: 487681 - RNA, 19 nt, Artificial Sequence
  Description of Artificial Sequence: Synthetic oligonucleotide
  Sense strand starting at position 3685 of SEQ ID NO: 317396
guauaaggaauuggcuaau

SEQ ID NO: 487682 - RNA, 19 nt, Artificial Sequence
  Description of Artificial Sequence: Synthetic oligonucleotide
  Antisense Strand to SEQ ID NO: 487681
auuagccaauuccuuauac

SEQ ID NO: 487683 - RNA, 19 nt, Artificial Sequence
  Description of Artificial Sequence: Synthetic oligonucleotide
  Sense strand starting at position 3691 of SEQ ID NO: 317396
ggaauuggcuaauccagua

SEQ ID NO: 487684 - RNA, 19 nt, Artificial Sequence
  Description of Artificial Sequence: Synthetic oligonucleotide
  Antisense Strand to SEQ ID NO: 487683
uacuggauuagccaauucc

SEQ ID NO: 487685 - RNA, 19 nt, Artificial Sequence
  Description of Artificial Sequence: Synthetic oligonucleotide
  Sense strand starting at position 3696 of SEQ ID NO: 317396
uggcuaauccaguagggau

SEQ ID NO: 487686 - RNA, 19 nt, Artificial Sequence
  Description of Artificial Sequence: Synthetic oligonucleotide
  Antisense Strand to SEQ ID NO: 487685
aucccuacuggauuagcca

SEQ ID NO: 487687 - RNA, 19 nt, Artificial Sequence
  Description of Artificial Sequence: Synthetic oligonucleotide
  Sense strand starting at position 3698 of SEQ ID NO: 317396
gcuaauccaguagggauaa

SEQ ID NO: 487688 - RNA, 19 nt, Artificial Sequence
  Description of Artificial Sequence: Synthetic oligonucleotide
  Antisense Strand to SEQ ID NO: 487687
uuaucccuacuggauuagc

SEQ ID NO: 487689 - RNA, 19 nt, Artificial Sequence
  Description of Artificial Sequence: Synthetic oligonucleotide
  Sense strand starting at position 3775 of SEQ ID NO: 317396
gcaucaugccucgaucuag

SEQ ID NO: 487690 - RNA, 19 nt, Artificial Sequence
  Description of Artificial Sequence: Synthetic oligonucleotide
  Antisense Strand to SEQ ID NO: 487689
cuagaucgaggcaugaugc

SEQ ID NO: 487691 - RNA, 19 nt, Artificial Sequence
  Description of Artificial Sequence: Synthetic oligonucleotide
  Sense strand starting at position 3801 of SEQ ID NO: 317396
aacggauuagguugggauu

SEQ ID NO: 487692 - RNA, 19 nt, Artificial Sequence
  Description of Artificial Sequence: Synthetic oligonucleotide
  Antisense Strand to SEQ ID NO: 487691
aaucccaaccuaauccguu

SEQ ID NO: 487693 - RNA, 19 nt, Artificial Sequence
  Description of Artificial Sequence: Synthetic oligonucleotide
  Sense strand starting at position 3812 of SEQ ID NO: 317396
uugggauucucagaacuag

SEQ ID NO: 487694 - RNA, 19 nt, Artificial Sequence
  Description of Artificial Sequence: Synthetic oligonucleotide
  Antisense Strand to SEQ ID NO: 487693
cuaguucugagaaucccaa

SEQ ID NO: 487695 - RNA, 19 nt, Artificial Sequence
  Description of Artificial Sequence: Synthetic oligonucleotide
  Sense strand starting at position 3905 of SEQ ID NO: 317396
gcucuaagaguguguggaa

SEQ ID NO: 487696 - RNA, 19 nt, Artificial Sequence
  Description of Artificial Sequence: Synthetic oligonucleotide
  Antisense Strand to SEQ ID NO: 487695
uuccacacacucuuagagc

SEQ ID NO: 487697 - RNA, 19 nt, Artificial Sequence
  Description of Artificial Sequence: Synthetic oligonucleotide
  Sense strand starting at position 3906 of SEQ ID NO: 317396
cucuaagaguguguggaaa

SEQ ID NO: 487698 - RNA, 19 nt, Artificial Sequence
  Description of Artificial Sequence: Synthetic oligonucleotide
  Antisense Strand to SEQ ID NO: 487697
uuuccacacacucuuagag

SEQ ID NO: 487699 - RNA, 19 nt, Artificial Sequence
  Description of Artificial Sequence: Synthetic oligonucleotide
  Sense strand starting at position 33 of SEQ ID NO: 317397
ucaauauugguguaaacuu

SEQ ID NO: 487700 - RNA, 19 nt, Artificial Sequence
  Description of Artificial Sequence: Synthetic oligonucleotide
  Antisense Strand to SEQ ID NO: 487699
aaguuuacaccaauauuga

SEQ ID NO: 487701 - RNA, 19 nt, Artificial Sequence
  Description of Artificial Sequence: Synthetic oligonucleotide
  Sense strand starting at position 123 of SEQ ID NO: 317397
ucaugaaguauguaggcaa

SEQ ID NO: 487702 - RNA, 19 nt, Artificial Sequence
  Description of Artificial Sequence: Synthetic oligonucleotide
  Antisense Strand to SEQ ID NO: 487701
uugccuacauacuucauga

SEQ ID NO: 487703 - RNA, 19 nt, Artificial Sequence
  Description of Artificial Sequence: Synthetic oligonucleotide
  Sense strand starting at position 127 of SEQ ID NO: 317397
gaaguauguaggcaagguu

SEQ ID NO: 487704 - RNA, 19 nt, Artificial Sequence
  Description of Artificial Sequence: Synthetic oligonucleotide
  Antisense Strand to SEQ ID NO: 487703
aaccuugccuacauacuuc

SEQ ID NO: 487705 - RNA, 19 nt, Artificial Sequence
  Description of Artificial Sequence: Synthetic oligonucleotide
  Sense strand starting at position 136 of SEQ ID NO: 317397
aggcaagguucuccauuaa

SEQ ID NO: 487706 - RNA, 19 nt, Artificial Sequence
  Description of Artificial Sequence: Synthetic oligonucleotide
  Antisense Strand to SEQ ID NO: 487705
uuaauggagaaccuugccu

SEQ ID NO: 487707 - RNA, 19 nt, Artificial Sequence
  Description of Artificial Sequence: Synthetic oligonucleotide
  Sense strand starting at position 210 of SEQ ID NO: 317397
aggaaucccucugcuagau

SEQ ID NO: 487708 - RNA, 19 nt, Artificial Sequence
  Description of Artificial Sequence: Synthetic oligonucleotide
  Antisense Strand to SEQ ID NO: 487707
aucuagcagagggauuccu

SEQ ID NO: 487709 - RNA, 19 nt, Artificial Sequence
  Description of Artificial Sequence: Synthetic oligonucleotide
  Sense strand starting at position 225 of SEQ ID NO: 317397
agauuuggcuugucagcua

SEQ ID NO: 487710 - RNA, 19 nt, Artificial Sequence
  Description of Artificial Sequence: Synthetic oligonucleotide
  Antisense Strand to SEQ ID NO: 487709
uagcugacaagccaaaucu

SEQ ID NO: 487711 - RNA, 19 nt, Artificial Sequence
  Description of Artificial Sequence: Synthetic oligonucleotide
  Sense strand starting at position 328 of SEQ ID NO: 317397
ugagucggagcugaugaaa

SEQ ID NO: 487712 - RNA, 19 nt, Artificial Sequence
  Description of Artificial Sequence: Synthetic oligonucleotide
  Antisense Strand to SEQ ID NO: 487711
uuucaucagcuccgacuca

SEQ ID NO: 487713 - RNA, 19 nt, Artificial Sequence
  Description of Artificial Sequence: Synthetic oligonucleotide
  Sense strand starting at position 389 of SEQ ID NO: 317397
acgagaaauucucucaaau

SEQ ID NO: 487714 - RNA, 19 nt, Artificial Sequence
  Description of Artificial Sequence: Synthetic oligonucleotide
  Antisense Strand to SEQ ID NO: 487713
auuugagagaauuucucgu

SEQ ID NO: 487715 - RNA, 19 nt, Artificial Sequence
  Description of Artificial Sequence: Synthetic oligonucleotide
  Sense strand starting at position 422 of SEQ ID NO: 317397
uggcaaugugucuaggaac

SEQ ID NO: 487716 - RNA, 19 nt, Artificial Sequence
  Description of Artificial Sequence: Synthetic oligonucleotide
  Antisense Strand to SEQ ID NO: 487715
guuccuagacacauugcca

SEQ ID NO: 487717 - RNA, 19 nt, Artificial Sequence
  Description of Artificial Sequence: Synthetic oligonucleotide
  Sense strand starting at position 547 of SEQ ID NO: 317397
aguuguaucgugcucugua

SEQ ID NO: 487718 - RNA, 19 nt, Artificial Sequence
  Description of Artificial Sequence: Synthetic oligonucleotide
  Antisense Strand to SEQ ID NO: 487717
uacagagcacgauacaacu

SEQ ID NO: 487719 - RNA, 19 nt, Artificial Sequence
  Description of Artificial Sequence: Synthetic oligonucleotide
  Sense strand starting at position 695 of SEQ ID NO: 317397
gggagucuaugguuuaacu

SEQ ID NO: 487720 - RNA, 19 nt, Artificial Sequence
  Description of Artificial Sequence: Synthetic oligonucleotide
  Antisense Strand to SEQ ID NO: 487719
aguuaaaccauagacuccc

SEQ ID NO: 487721 - RNA, 19 nt, Artificial Sequence
  Description of Artificial Sequence: Synthetic oligonucleotide
  Sense strand starting at position 697 of SEQ ID NO: 317397
gagucuaugguuuaacucu

SEQ ID NO: 487722 - RNA, 19 nt, Artificial Sequence
  Description of Artificial Sequence: Synthetic oligonucleotide
  Antisense Strand to SEQ ID NO: 487721
agaguuaaaccauagacuc

SEQ ID NO: 487723 - RNA, 19 nt, Artificial Sequence
  Description of Artificial Sequence: Synthetic oligonucleotide
  Sense strand starting at position 819 of SEQ ID NO: 317397
gauguucuagauuaaaguc

SEQ ID NO: 487724 - RNA, 19 nt, Artificial Sequence
  Description of Artificial Sequence: Synthetic oligonucleotide
  Antisense Strand to SEQ ID NO: 487723
gacuuuaaucuagaacauc

SEQ ID NO: 487725 - RNA, 19 nt, Artificial Sequence
  Description of Artificial Sequence: Synthetic oligonucleotide
  Sense strand starting at position 846 of SEQ ID NO: 317397
gcacaaaucugaucgacaa

SEQ ID NO: 487726 - RNA, 19 nt, Artificial Sequence
  Description of Artificial Sequence: Synthetic oligonucleotide
  Antisense Strand to SEQ ID NO: 487725
uugucgaucagauuugugc

SEQ ID NO: 487727 - RNA, 19 nt, Artificial Sequence
  Description of Artificial Sequence: Synthetic oligonucleotide
  Sense strand starting at position 978 of SEQ ID NO: 317397
uccuuaauggaccauuagu

SEQ ID NO: 487728 - RNA, 19 nt, Artificial Sequence
  Description of Artificial Sequence: Synthetic oligonucleotide
  Antisense Strand to SEQ ID NO: 487727
acuaaugguccauuaagga

SEQ ID NO: 487729 - RNA, 19 nt, Artificial Sequence
  Description of Artificial Sequence: Synthetic oligonucleotide
  Sense strand starting at position 989 of SEQ ID NO: 317397
ccauuagugacaggaucga

SEQ ID NO: 487730 - RNA, 19 nt, Artificial Sequence
  Description of Artificial Sequence: Synthetic oligonucleotide
  Antisense Strand to SEQ ID NO: 487729
ucgauccugucacuaaugg

SEQ ID NO: 487731 - RNA, 19 nt, Artificial Sequence
  Description of Artificial Sequence: Synthetic oligonucleotide
  Sense strand starting at position 1162 of SEQ ID NO: 317397
gagugugaaccuggugaga

SEQ ID NO: 487732 - RNA, 19 nt, Artificial Sequence
  Description of Artificial Sequence: Synthetic oligonucleotide
  Antisense Strand to SEQ ID NO: 487731
ucucaccagguucacacuc

SEQ ID NO: 487733 - RNA, 19 nt, Artificial Sequence
  Description of Artificial Sequence: Synthetic oligonucleotide
  Sense strand starting at position 1190 of SEQ ID NO: 317397
cugugcauccaagaaacaa

SEQ ID NO: 487734 - RNA, 19 nt, Artificial Sequence
  Description of Artificial Sequence: Synthetic oligonucleotide
  Antisense Strand to SEQ ID NO: 487733
uuguuucuuggaugcacag

SEQ ID NO: 487735 - RNA, 19 nt, Artificial Sequence
  Description of Artificial Sequence: Synthetic oligonucleotide
  Sense strand starting at position 1388 of SEQ ID NO: 317397
aacuuacgucucggaauuu

SEQ ID NO: 487736 - RNA, 19 nt, Artificial Sequence
  Description of Artificial Sequence: Synthetic oligonucleotide
  Antisense Strand to SEQ ID NO: 487735
aaauuccgagacguaaguu

SEQ ID NO: 487737 - RNA, 19 nt, Artificial Sequence
  Description of Artificial Sequence: Synthetic oligonucleotide
  Sense strand starting at position 1428 of SEQ ID NO: 317397
gucauacugagagauugug

SEQ ID NO: 487738 - RNA, 19 nt, Artificial Sequence
  Description of Artificial Sequence: Synthetic oligonucleotide
  Antisense Strand to SEQ ID NO: 487737
cacaaucucucaguaugac

SEQ ID NO: 487739 - RNA, 19 nt, Artificial Sequence
  Description of Artificial Sequence: Synthetic oligonucleotide
  Sense strand starting at position 1437 of SEQ ID NO: 317397
agagauuguggugagccau

SEQ ID NO: 487740 - RNA, 19 nt, Artificial Sequence
  Description of Artificial Sequence: Synthetic oligonucleotide
  Antisense Strand to SEQ ID NO: 487739
auggcucaccacaaucucu

SEQ ID NO: 487741 - RNA, 19 nt, Artificial Sequence
  Description of Artificial Sequence: Synthetic oligonucleotide
  Sense strand starting at position 2021 of SEQ ID NO: 317397
cgcggaucuccagcuuacu

SEQ ID NO: 487742 - RNA, 19 nt, Artificial Sequence
  Description of Artificial Sequence: Synthetic oligonucleotide
  Antisense Strand to SEQ ID NO: 487741
aguaagcuggagauccgcg

SEQ ID NO: 487743 - RNA, 19 nt, Artificial Sequence
  Description of Artificial Sequence: Synthetic oligonucleotide
  Sense strand starting at position 2257 of SEQ ID NO: 317397
uucucugcuccuggauuua

SEQ ID NO: 487744 - RNA, 19 nt, Artificial Sequence
  Description of Artificial Sequence: Synthetic oligonucleotide
  Antisense Strand to SEQ ID NO: 487743
uaaauccaggagcagagaa

SEQ ID NO: 487745 - RNA, 19 nt, Artificial Sequence
  Description of Artificial Sequence: Synthetic oligonucleotide
  Sense strand starting at position 2283 of SEQ ID NO: 317397
guguacuaucucucgcagu

SEQ ID NO: 487746 - RNA, 19 nt, Artificial Sequence
  Description of Artificial Sequence: Synthetic oligonucleotide
  Antisense Strand to SEQ ID NO: 487745
acugcgagagauaguacac

SEQ ID NO: 487747 - RNA, 19 nt, Artificial Sequence
  Description of Artificial Sequence: Synthetic oligonucleotide
  Sense strand starting at position 2344 of SEQ ID NO: 317397
gaaacaagaucugaggaaa

SEQ ID NO: 487748 - RNA, 19 nt, Artificial Sequence
  Description of Artificial Sequence: Synthetic oligonucleotide
  Antisense Strand to SEQ ID NO: 487747
uuuccucagaucuuguuuc

SEQ ID NO: 487749 - RNA, 19 nt, Artificial Sequence
  Description of Artificial Sequence: Synthetic oligonucleotide
  Sense strand starting at position 2391 of SEQ ID NO: 317397
uggacuuccuacccuguaa

SEQ ID NO: 487750 - RNA, 19 nt, Artificial Sequence
  Description of Artificial Sequence: Synthetic oligonucleotide
  Antisense Strand to SEQ ID NO: 487749
uuacaggguaggaagucca

SEQ ID NO: 487751 - RNA, 19 nt, Artificial Sequence
  Description of Artificial Sequence: Synthetic oligonucleotide
  Sense strand starting at position 2405 of SEQ ID NO: 317397
uguaaagcuccugaacuca

SEQ ID NO: 487752 - RNA, 19 nt, Artificial Sequence
  Description of Artificial Sequence: Synthetic oligonucleotide
  Antisense Strand to SEQ ID NO: 487751
ugaguucaggagcuuuaca

SEQ ID NO: 487753 - RNA, 19 nt, Artificial Sequence
  Description of Artificial Sequence: Synthetic oligonucleotide
  Sense strand starting at position 2451 of SEQ ID NO: 317397
ccacaaggucuugggagau

SEQ ID NO: 487754 - RNA, 19 nt, Artificial Sequence
  Description of Artificial Sequence: Synthetic oligonucleotide
  Antisense Strand to SEQ ID NO: 487753
aucucccaagaccuugugg

SEQ ID NO: 487755 - RNA, 19 nt, Artificial Sequence
  Description of Artificial Sequence: Synthetic oligonucleotide
  Sense strand starting at position 2510 of SEQ ID NO: 317397
uggauuacuaccgacagca

SEQ ID NO: 487756 - RNA, 19 nt, Artificial Sequence
  Description of Artificial Sequence: Synthetic oligonucleotide
  Antisense Strand to SEQ ID NO: 487755
ugcugucgguaguaaucca

SEQ ID NO: 487757 - RNA, 19 nt, Artificial Sequence
  Description of Artificial Sequence: Synthetic oligonucleotide
  Sense strand starting at position 2642 of SEQ ID NO: 317397
ggcguuugagaacaccuau

SEQ ID NO: 487758 - RNA, 19 nt, Artificial Sequence
  Description of Artificial Sequence: Synthetic oligonucleotide
  Antisense Strand to SEQ ID NO: 487757
auagguguucucaaacgcc

SEQ ID NO: 487759 - RNA, 19 nt, Artificial Sequence
  Description of Artificial Sequence: Synthetic oligonucleotide
  Sense strand starting at position 3249 of SEQ ID NO: 317397
auauguaugguaggaaaua

SEQ ID NO: 487760 - RNA, 19 nt, Artificial Sequence
  Description of Artificial Sequence: Synthetic oligonucleotide
  Antisense Strand to SEQ ID NO: 487759
uauuuccuaccauacauau

SEQ ID NO: 487761 - RNA, 19 nt, Artificial Sequence
  Description of Artificial Sequence: Synthetic oligonucleotide
  Sense strand starting at position 3352 of SEQ ID NO: 317397
uacagugaugaaugcaauu

SEQ ID NO: 487762 - RNA, 19 nt, Artificial Sequence
  Description of Artificial Sequence: Synthetic oligonucleotide
  Antisense Strand to SEQ ID NO: 487761
aauugcauucaucacugua

SEQ ID NO: 487763 - RNA, 19 nt, Artificial Sequence
  Description of Artificial Sequence: Synthetic oligonucleotide
  Sense strand starting at position 3449 of SEQ ID NO: 317397
gaauauagaugugugcuaa

SEQ ID NO: 487764 - RNA, 19 nt, Artificial Sequence
  Description of Artificial Sequence: Synthetic oligonucleotide
  Antisense Strand to SEQ ID NO: 487763
uuagcacacaucuauauuc

SEQ ID NO: 487765 - RNA, 19 nt, Artificial Sequence
  Description of Artificial Sequence: Synthetic oligonucleotide
  Sense strand starting at position 3497 of SEQ ID NO: 317397
cacagaggguuauuaccau

SEQ ID NO: 487766 - RNA, 19 nt, Artificial Sequence
  Description of Artificial Sequence: Synthetic oligonucleotide
  Antisense Strand to SEQ ID NO: 487765
augguaauaacccucugug

SEQ ID NO: 487767 - RNA, 19 nt, Artificial Sequence
  Description of Artificial Sequence: Synthetic oligonucleotide
  Sense strand starting at position 3717 of SEQ ID NO: 317397
auuuaagucuaauagggaa

SEQ ID NO: 487768 - RNA, 19 nt, Artificial Sequence
  Description of Artificial Sequence: Synthetic oligonucleotide
  Antisense Strand to SEQ ID NO: 487767
uucccuauuagacuuaaau

SEQ ID NO: 487769 - RNA, 19 nt, Artificial Sequence
  Description of Artificial Sequence: Synthetic oligonucleotide
  Sense strand starting at position 3761 of SEQ ID NO: 317397
aacugauacuuggcagaag

SEQ ID NO: 487770 - RNA, 19 nt, Artificial Sequence
  Description of Artificial Sequence: Synthetic oligonucleotide
  Antisense Strand to SEQ ID NO: 487769
cuucugccaaguaucaguu

SEQ ID NO: 487771 - RNA, 19 nt, Artificial Sequence
  Description of Artificial Sequence: Synthetic oligonucleotide
  Sense strand starting at position 3764 of SEQ ID NO: 317397
ugauacuuggcagaaguca

SEQ ID NO: 487772 - RNA, 19 nt, Artificial Sequence
  Description of Artificial Sequence: Synthetic oligonucleotide
  Antisense Strand to SEQ ID NO: 487771
ugacuucugccaaguauca

SEQ ID NO: 487773 - RNA, 19 nt, Artificial Sequence
  Description of Artificial Sequence: Synthetic oligonucleotide
  Sense strand starting at position 3769 of SEQ ID NO: 317397
cuuggcagaagucaguaau

SEQ ID NO: 487774 - RNA, 19 nt, Artificial Sequence
  Description of Artificial Sequence: Synthetic oligonucleotide
  Antisense Strand to SEQ ID NO: 487773
auuacugacuucugccaag

SEQ ID NO: 487775 - RNA, 19 nt, Artificial Sequence
  Description of Artificial Sequence: Synthetic oligonucleotide
  Sense strand starting at position 3772 of SEQ ID NO: 317397
ggcagaagucaguaauucu

SEQ ID NO: 487776 - RNA, 19 nt, Artificial Sequence
  Description of Artificial Sequence: Synthetic oligonucleotide
  Antisense Strand to SEQ ID NO: 487775
agaauuacugacuucugcc

SEQ ID NO: 487777 - RNA, 19 nt, Artificial Sequence
  Description of Artificial Sequence: Synthetic oligonucleotide
  Sense strand starting at position 3775 of SEQ ID NO: 317397
agaagucaguaauucuaaa

SEQ ID NO: 487778 - RNA, 19 nt, Artificial Sequence
  Description of Artificial Sequence: Synthetic oligonucleotide
  Antisense Strand to SEQ ID NO: 487777
uuuagaauuacugacuucu

SEQ ID NO: 487779 - RNA, 19 nt, Artificial Sequence
  Description of Artificial Sequence: Synthetic oligonucleotide
  Sense strand starting at position 197 of SEQ ID NO: 317398
ucaauauugguguaaacuu

SEQ ID NO: 487780 - RNA, 19 nt, Artificial Sequence
  Description of Artificial Sequence: Synthetic oligonucleotide
  Antisense Strand to SEQ ID NO: 487779
aaguuuacaccaauauuga

SEQ ID NO: 487781 - RNA, 19 nt, Artificial Sequence
  Description of Artificial Sequence: Synthetic oligonucleotide
  Sense strand starting at position 287 of SEQ ID NO: 317398
ucaugaaguauguaggcaa

SEQ ID NO: 487782 - RNA, 19 nt, Artificial Sequence
  Description of Artificial Sequence: Synthetic oligonucleotide
  Antisense Strand to SEQ ID NO: 487781
uugccuacauacuucauga

SEQ ID NO: 487783 - RNA, 19 nt, Artificial Sequence
  Description of Artificial Sequence: Synthetic oligonucleotide
  Sense strand starting at position 291 of SEQ ID NO: 317398
gaaguauguaggcaagguu

SEQ ID NO: 487784 - RNA, 19 nt, Artificial Sequence
  Description of Artificial Sequence: Synthetic oligonucleotide
  Antisense Strand to SEQ ID NO: 487783
aaccuugccuacauacuuc

SEQ ID NO: 487785 - RNA, 19 nt, Artificial Sequence
  Description of Artificial Sequence: Synthetic oligonucleotide
  Sense strand starting at position 300 of SEQ ID NO: 317398
aggcaagguucuccauuaa

SEQ ID NO: 487786 - RNA, 19 nt, Artificial Sequence
  Description of Artificial Sequence: Synthetic oligonucleotide
  Antisense Strand to SEQ ID NO: 487785
uuaauggagaaccuugccu

SEQ ID NO: 487787 - RNA, 19 nt, Artificial Sequence
  Description of Artificial Sequence: Synthetic oligonucleotide
  Sense strand starting at position 374 of SEQ ID NO: 317398
aggaaucccucugcuagau

SEQ ID NO: 487788 - RNA, 19 nt, Artificial Sequence
  Description of Artificial Sequence: Synthetic oligonucleotide
  Antisense Strand to SEQ ID NO: 487787
aucuagcagagggauuccu

SEQ ID NO: 487789 - RNA, 19 nt, Artificial Sequence
  Description of Artificial Sequence: Synthetic oligonucleotide
  Sense strand starting at position 389 of SEQ ID NO: 317398
agauuuggcuugucagcua

SEQ ID NO: 487790 - RNA, 19 nt, Artificial Sequence
  Description of Artificial Sequence: Synthetic oligonucleotide
  Antisense Strand to SEQ ID NO: 487789
uagcugacaagccaaaucu

SEQ ID NO: 487791 - RNA, 19 nt, Artificial Sequence
  Description of Artificial Sequence: Synthetic oligonucleotide
  Sense strand starting at position 492 of SEQ ID NO: 317398
ugagucggagcugaugaaa

SEQ ID NO: 487792 - RNA, 19 nt, Artificial Sequence
  Description of Artificial Sequence: Synthetic oligonucleotide
  Antisense Strand to SEQ ID NO: 487791
uuucaucagcuccgacuca

SEQ ID NO: 487793 - RNA, 19 nt, Artificial Sequence
  Description of Artificial Sequence: Synthetic oligonucleotide
  Sense strand starting at position 553 of SEQ ID NO: 317398
acgagaaauucucucaaau

SEQ ID NO: 487794 - RNA, 19 nt, Artificial Sequence
  Description of Artificial Sequence: Synthetic oligonucleotide
  Antisense Strand to SEQ ID NO: 487793
auuugagagaauuucucgu

SEQ ID NO: 487795 - RNA, 19 nt, Artificial Sequence
  Description of Artificial Sequence: Synthetic oligonucleotide
  Sense strand starting at position 586 of SEQ ID NO: 317398
uggcaaugugucuaggaac

SEQ ID NO: 487796 - RNA, 19 nt, Artificial Sequence
  Description of Artificial Sequence: Synthetic oligonucleotide
  Antisense Strand to SEQ ID NO: 487795
guuccuagacacauugcca

SEQ ID NO: 487797 - RNA, 19 nt, Artificial Sequence
  Description of Artificial Sequence: Synthetic oligonucleotide
  Sense strand starting at position 711 of SEQ ID NO: 317398
aguuguaucgugcucugua

SEQ ID NO: 487798 - RNA, 19 nt, Artificial Sequence
  Description of Artificial Sequence: Synthetic oligonucleotide
  Antisense Strand to SEQ ID NO: 487797
uacagagcacgauacaacu

SEQ ID NO: 487799 - RNA, 19 nt, Artificial Sequence
  Description of Artificial Sequence: Synthetic oligonucleotide
  Sense strand starting at position 859 of SEQ ID NO: 317398
gggagucuaugguuuaacu

SEQ ID NO: 487800 - RNA, 19 nt, Artificial Sequence
  Description of Artificial Sequence: Synthetic oligonucleotide
  Antisense Strand to SEQ ID NO: 487799
aguuaaaccauagacuccc

SEQ ID NO: 487801 - RNA, 19 nt, Artificial Sequence
  Description of Artificial Sequence: Synthetic oligonucleotide
  Sense strand starting at position 861 of SEQ ID NO: 317398
gagucuaugguuuaacucu

SEQ ID NO: 487802 - RNA, 19 nt, Artificial Sequence
  Description of Artificial Sequence: Synthetic oligonucleotide
  Antisense Strand to SEQ ID NO: 487801
agaguuaaaccauagacuc

SEQ ID NO: 487803 - RNA, 19 nt, Artificial Sequence
  Description of Artificial Sequence: Synthetic oligonucleotide
  Sense strand starting at position 983 of SEQ ID NO: 317398
gauguucuagauuaaaguc

SEQ ID NO: 487804 - RNA, 19 nt, Artificial Sequence
  Description of Artificial Sequence: Synthetic oligonucleotide
  Antisense Strand to SEQ ID NO: 487803
gacuuuaaucuagaacauc

SEQ ID NO: 487805 - RNA, 19 nt, Artificial Sequence
  Description of Artificial Sequence: Synthetic oligonucleotide
  Sense strand starting at position 1010 of SEQ ID NO: 317398
gcacaaaucugaucgacaa

SEQ ID NO: 487806 - RNA, 19 nt, Artificial Sequence
  Description of Artificial Sequence: Synthetic oligonucleotide
  Antisense Strand to SEQ ID NO: 487805
uugucgaucagauuugugc

SEQ ID NO: 487807 - RNA, 19 nt, Artificial Sequence
  Description of Artificial Sequence: Synthetic oligonucleotide
  Sense strand starting at position 1142 of SEQ ID NO: 317398
uccuuaauggaccauuagu

SEQ ID NO: 487808 - RNA, 19 nt, Artificial Sequence
  Description of Artificial Sequence: Synthetic oligonucleotide
  Antisense Strand to SEQ ID NO: 487807
acuaaugguccauuaagga

SEQ ID NO: 487809 - RNA, 19 nt, Artificial Sequence
  Description of Artificial Sequence: Synthetic oligonucleotide
  Sense strand starting at position 1153 of SEQ ID NO: 317398
ccauuagugacaggaucga

SEQ ID NO: 487810 - RNA, 19 nt, Artificial Sequence
  Description of Artificial Sequence: Synthetic oligonucleotide
  Antisense Strand to SEQ ID NO: 487809
ucgauccugucacuaaugg

SEQ ID NO: 487811 - RNA, 19 nt, Artificial Sequence
  Description of Artificial Sequence: Synthetic oligonucleotide
  Sense strand starting at position 1326 of SEQ ID NO: 317398
gagugugaaccuggugaga

SEQ ID NO: 487812 - RNA, 19 nt, Artificial Sequence
  Description of Artificial Sequence: Synthetic oligonucleotide
  Antisense Strand to SEQ ID NO: 487811
ucucaccagguucacacuc

SEQ ID NO: 487813 - RNA, 19 nt, Artificial Sequence
  Description of Artificial Sequence: Synthetic oligonucleotide
  Sense strand starting at position 1354 of SEQ ID NO: 317398
cugugcauccaagaaacaa

SEQ ID NO: 487814 - RNA, 19 nt, Artificial Sequence
  Description of Artificial Sequence: Synthetic oligonucleotide
  Antisense Strand to SEQ ID NO: 487813
uuguuucuuggaugcacag

SEQ ID NO: 487815 - RNA, 19 nt, Artificial Sequence
  Description of Artificial Sequence: Synthetic oligonucleotide
  Sense strand starting at position 1552 of SEQ ID NO: 317398
aacuuacgucucggaauuu

SEQ ID NO: 487816 - RNA, 19 nt, Artificial Sequence
  Description of Artificial Sequence: Synthetic oligonucleotide
  Antisense Strand to SEQ ID NO: 487815
aaauuccgagacguaaguu

SEQ ID NO: 487817 - RNA, 19 nt, Artificial Sequence
  Description of Artificial Sequence: Synthetic oligonucleotide
  Sense strand starting at position 1592 of SEQ ID NO: 317398
gucauacugagagauugug

SEQ ID NO: 487818 - RNA, 19 nt, Artificial Sequence
  Description of Artificial Sequence: Synthetic oligonucleotide
  Antisense Strand to SEQ ID NO: 487817
cacaaucucucaguaugac

SEQ ID NO: 487819 - RNA, 19 nt, Artificial Sequence
  Description of Artificial Sequence: Synthetic oligonucleotide
  Sense strand starting at position 1601 of SEQ ID NO: 317398
agagauuguggugagccau

SEQ ID NO: 487820 - RNA, 19 nt, Artificial Sequence
  Description of Artificial Sequence: Synthetic oligonucleotide
  Antisense Strand to SEQ ID NO: 487819
auggcucaccacaaucucu

SEQ ID NO: 487821 - RNA, 19 nt, Artificial Sequence
  Description of Artificial Sequence: Synthetic oligonucleotide
  Sense strand starting at position 2185 of SEQ ID NO: 317398
cgcggaucuccagcuuacu

SEQ ID NO: 487822 - RNA, 19 nt, Artificial Sequence
  Description of Artificial Sequence: Synthetic oligonucleotide
  Antisense Strand to SEQ ID NO: 487821
aguaagcuggagauccgcg

SEQ ID NO: 487823 - RNA, 19 nt, Artificial Sequence
  Description of Artificial Sequence: Synthetic oligonucleotide
  Sense strand starting at position 2421 of SEQ ID NO: 317398
uucucugcuccuggauuua

SEQ ID NO: 487824 - RNA, 19 nt, Artificial Sequence
  Description of Artificial Sequence: Synthetic oligonucleotide
  Antisense Strand to SEQ ID NO: 487823
uaaauccaggagcagagaa

SEQ ID NO: 487825 - RNA, 19 nt, Artificial Sequence
  Description of Artificial Sequence: Synthetic oligonucleotide
  Sense strand starting at position 2447 of SEQ ID NO: 317398
guguacuaucucucgcagu

SEQ ID NO: 487826 - RNA, 19 nt, Artificial Sequence
  Description of Artificial Sequence: Synthetic oligonucleotide
  Antisense Strand to SEQ ID NO: 487825
acugcgagagauaguacac

SEQ ID NO: 487827 - RNA, 19 nt, Artificial Sequence
  Description of Artificial Sequence: Synthetic oligonucleotide
  Sense strand starting at position 2508 of SEQ ID NO: 317398
gaaacaagaucugaggaaa

SEQ ID NO: 487828 - RNA, 19 nt, Artificial Sequence
  Description of Artificial Sequence: Synthetic oligonucleotide
  Antisense Strand to SEQ ID NO: 487827
uuuccucagaucuuguuuc

SEQ ID NO: 487829 - RNA, 19 nt, Artificial Sequence
  Description of Artificial Sequence: Synthetic oligonucleotide
  Sense strand starting at position 2555 of SEQ ID NO: 317398
uggacuuccuacccuguaa

SEQ ID NO: 487830 - RNA, 19 nt, Artificial Sequence
  Description of Artificial Sequence: Synthetic oligonucleotide
  Antisense Strand to SEQ ID NO: 487829
uuacaggguaggaagucca

SEQ ID NO: 487831 - RNA, 19 nt, Artificial Sequence
  Description of Artificial Sequence: Synthetic oligonucleotide
  Sense strand starting at position 2569 of SEQ ID NO: 317398
uguaaagcuccugaacuca

SEQ ID NO: 487832 - RNA, 19 nt, Artificial Sequence
  Description of Artificial Sequence: Synthetic oligonucleotide
  Antisense Strand to SEQ ID NO: 487831
ugaguucaggagcuuuaca

SEQ ID NO: 487833 - RNA, 19 nt, Artificial Sequence
  Description of Artificial Sequence: Synthetic oligonucleotide
  Sense strand starting at position 2615 of SEQ ID NO: 317398
ccacaaggucuugggagau

SEQ ID NO: 487834 - RNA, 19 nt, Artificial Sequence
  Description of Artificial Sequence: Synthetic oligonucleotide
  Antisense Strand to SEQ ID NO: 487833
aucucccaagaccuugugg

SEQ ID NO: 487835 - RNA, 19 nt, Artificial Sequence
  Description of Artificial Sequence: Synthetic oligonucleotide
  Sense strand starting at position 2674 of SEQ ID NO: 317398
uggauuacuaccgacagca

SEQ ID NO: 487836 - RNA, 19 nt, Artificial Sequence
  Description of Artificial Sequence: Synthetic oligonucleotide
  Antisense Strand to SEQ ID NO: 487835
ugcugucgguaguaaucca

SEQ ID NO: 487837 - RNA, 19 nt, Artificial Sequence
  Description of Artificial Sequence: Synthetic oligonucleotide
  Sense strand starting at position 2806 of SEQ ID NO: 317398
ggcguuugagaacaccuau

SEQ ID NO: 487838 - RNA, 19 nt, Artificial Sequence
  Description of Artificial Sequence: Synthetic oligonucleotide
  Antisense Strand to SEQ ID NO: 487837
auagguguucucaaacgcc

SEQ ID NO: 487839 - RNA, 19 nt, Artificial Sequence
  Description of Artificial Sequence: Synthetic oligonucleotide
  Sense strand starting at position 3413 of SEQ ID NO: 317398
auauguaugguaggaaaua

SEQ ID NO: 487840 - RNA, 19 nt, Artificial Sequence
  Description of Artificial Sequence: Synthetic oligonucleotide
  Antisense Strand to SEQ ID NO: 487839
uauuuccuaccauacauau

SEQ ID NO: 487841 - RNA, 19 nt, Artificial Sequence
  Description of Artificial Sequence: Synthetic oligonucleotide
  Sense strand starting at position 3516 of SEQ ID NO: 317398
uacagugaugaaugcaauu

SEQ ID NO: 487842 - RNA, 19 nt, Artificial Sequence
  Description of Artificial Sequence: Synthetic oligonucleotide
  Antisense Strand to SEQ ID NO: 487841
aauugcauucaucacugua

SEQ ID NO: 487843 - RNA, 19 nt, Artificial Sequence
  Description of Artificial Sequence: Synthetic oligonucleotide
  Sense strand starting at position 3613 of SEQ ID NO: 317398
gaauauagaugugugcuaa

SEQ ID NO: 487844 - RNA, 19 nt, Artificial Sequence
  Description of Artificial Sequence: Synthetic oligonucleotide
  Antisense Strand to SEQ ID NO: 487843
uuagcacacaucuauauuc

SEQ ID NO: 487845 - RNA, 19 nt, Artificial Sequence
  Description of Artificial Sequence: Synthetic oligonucleotide
  Sense strand starting at position 3661 of SEQ ID NO: 317398
cacagaggguuauuaccau

SEQ ID NO: 487846 - RNA, 19 nt, Artificial Sequence
  Description of Artificial Sequence: Synthetic oligonucleotide
  Antisense Strand to SEQ ID NO: 487845
augguaauaacccucugug

SEQ ID NO: 487847 - RNA, 19 nt, Artificial Sequence
  Description of Artificial Sequence: Synthetic oligonucleotide
  Sense strand starting at position 3881 of SEQ ID NO: 317398
auuuaagucuaauagggaa

SEQ ID NO: 487848 - RNA, 19 nt, Artificial Sequence
  Description of Artificial Sequence: Synthetic oligonucleotide
  Antisense Strand to SEQ ID NO: 487847
uucccuauuagacuuaaau

SEQ ID NO: 487849 - RNA, 19 nt, Artificial Sequence
  Description of Artificial Sequence: Synthetic oligonucleotide
  Sense strand starting at position 3925 of SEQ ID NO: 317398
aacugauacuuggcagaag

SEQ ID NO: 487850 - RNA, 19 nt, Artificial Sequence
  Description of Artificial Sequence: Synthetic oligonucleotide
  Antisense Strand to SEQ ID NO: 487849
cuucugccaaguaucaguu

SEQ ID NO: 487851 - RNA, 19 nt, Artificial Sequence
  Description of Artificial Sequence: Synthetic oligonucleotide
  Sense strand starting at position 3928 of SEQ ID NO: 317398
ugauacuuggcagaaguca

SEQ ID NO: 487852 - RNA, 19 nt, Artificial Sequence
  Description of Artificial Sequence: Synthetic oligonucleotide
  Antisense Strand to SEQ ID NO: 487851
ugacuucugccaaguauca

SEQ ID NO: 487853 - RNA, 19 nt, Artificial Sequence
  Description of Artificial Sequence: Synthetic oligonucleotide
  Sense strand starting at position 3933 of SEQ ID NO: 317398
cuuggcagaagucaguaau

SEQ ID NO: 487854 - RNA, 19 nt, Artificial Sequence
  Description of Artificial Sequence: Synthetic oligonucleotide
  Antisense Strand to SEQ ID NO: 487853
auuacugacuucugccaag

SEQ ID NO: 487855 - RNA, 19 nt, Artificial Sequence
  Description of Artificial Sequence: Synthetic oligonucleotide
  Sense strand starting at position 3936 of SEQ ID NO: 317398
ggcagaagucaguaauucu

SEQ ID NO: 487856 - RNA, 19 nt, Artificial Sequence
  Description of Artificial Sequence: Synthetic oligonucleotide
  Antisense Strand to SEQ ID NO: 487855
agaauuacugacuucugcc

SEQ ID NO: 487857 - RNA, 19 nt, Artificial Sequence
  Description of Artificial Sequence: Synthetic oligonucleotide
  Sense strand starting at position 3939 of SEQ ID NO: 317398
agaagucaguaauucuaaa

SEQ ID NO: 487858 - RNA, 19 nt, Artificial Sequence
  Description of Artificial Sequence: Synthetic oligonucleotide
  Antisense Strand to SEQ ID NO: 487857
uuuagaauuacugacuucu

SEQ ID NO: 487859 - RNA, 19 nt, Artificial Sequence
  Description of Artificial Sequence: Synthetic oligonucleotide
  Sense strand starting at position 231 of SEQ ID NO: 317399
acugguucuuccuccacau

SEQ ID NO: 487860 - RNA, 19 nt, Artificial Sequence
  Description of Artificial Sequence: Synthetic oligonucleotide
  Antisense Strand to SEQ ID NO: 487859
auguggaggaagaaccagu

SEQ ID NO: 487861 - RNA, 19 nt, Artificial Sequence
  Description of Artificial Sequence: Synthetic oligonucleotide
  Sense strand starting at position 249 of SEQ ID NO: 317399
ugcuguagucggagcuaug

SEQ ID NO: 487862 - RNA, 19 nt, Artificial Sequence
  Description of Artificial Sequence: Synthetic oligonucleotide
  Antisense Strand to SEQ ID NO: 487861
cauagcuccgacuacagca

SEQ ID NO: 487863 - RNA, 19 nt, Artificial Sequence
  Description of Artificial Sequence: Synthetic oligonucleotide
  Sense strand starting at position 504 of SEQ ID NO: 317399
cggcaaacauucugguguu

SEQ ID NO: 487864 - RNA, 19 nt, Artificial Sequence
  Description of Artificial Sequence: Synthetic oligonucleotide
  Antisense Strand to SEQ ID NO: 487863
aacaccagaauguuugccg

SEQ ID NO: 487865 - RNA, 19 nt, Artificial Sequence
  Description of Artificial Sequence: Synthetic oligonucleotide
  Sense strand starting at position 505 of SEQ ID NO: 317399
ggcaaacauucugguguua

SEQ ID NO: 487866 - RNA, 19 nt, Artificial Sequence
  Description of Artificial Sequence: Synthetic oligonucleotide
  Antisense Strand to SEQ ID NO: 487865
uaacaccagaauguuugcc

SEQ ID NO: 487867 - RNA, 19 nt, Artificial Sequence
  Description of Artificial Sequence: Synthetic oligonucleotide
  Sense strand starting at position 507 of SEQ ID NO: 317399
caaacauucugguguuaga

SEQ ID NO: 487868 - RNA, 19 nt, Artificial Sequence
  Description of Artificial Sequence: Synthetic oligonucleotide
  Antisense Strand to SEQ ID NO: 487867
ucuaacaccagaauguuug

SEQ ID NO: 487869 - RNA, 19 nt, Artificial Sequence
  Description of Artificial Sequence: Synthetic oligonucleotide
  Sense strand starting at position 2275 of SEQ ID NO: 317399
ugccuuugggaugaagcua

SEQ ID NO: 487870 - RNA, 19 nt, Artificial Sequence
  Description of Artificial Sequence: Synthetic oligonucleotide
  Antisense Strand to SEQ ID NO: 487869
uagcuucaucccaaaggca

SEQ ID NO: 487871 - RNA, 19 nt, Artificial Sequence
  Description of Artificial Sequence: Synthetic oligonucleotide
  Sense strand starting at position 2290 of SEQ ID NO: 317399
gcuaacagaugcugaaguu

SEQ ID NO: 487872 - RNA, 19 nt, Artificial Sequence
  Description of Artificial Sequence: Synthetic oligonucleotide
  Antisense Strand to SEQ ID NO: 487871
aacuucagcaucuguuagc

SEQ ID NO: 487873 - RNA, 19 nt, Artificial Sequence
  Description of Artificial Sequence: Synthetic oligonucleotide
  Sense strand starting at position 2384 of SEQ ID NO: 317399
cgggaauggucuugcucaa

SEQ ID NO: 487874 - RNA, 19 nt, Artificial Sequence
  Description of Artificial Sequence: Synthetic oligonucleotide
  Antisense Strand to SEQ ID NO: 487873
uugagcaagaccauucccg

SEQ ID NO: 487875 - RNA, 19 nt, Artificial Sequence
  Description of Artificial Sequence: Synthetic oligonucleotide
  Sense strand starting at position 2411 of SEQ ID NO: 317399
ggccucugcucaucggaau

SEQ ID NO: 487876 - RNA, 19 nt, Artificial Sequence
  Description of Artificial Sequence: Synthetic oligonucleotide
  Antisense Strand to SEQ ID NO: 487875
auuccgaugagcagaggcc

SEQ ID NO: 487877 - RNA, 19 nt, Artificial Sequence
  Description of Artificial Sequence: Synthetic oligonucleotide
  Sense strand starting at position 2471 of SEQ ID NO: 317399
uuggaacccuguuaauguu

SEQ ID NO: 487878 - RNA, 19 nt, Artificial Sequence
  Description of Artificial Sequence: Synthetic oligonucleotide
  Antisense Strand to SEQ ID NO: 487877
aacauuaacaggguuccaa

SEQ ID NO: 487879 - RNA, 19 nt, Artificial Sequence
  Description of Artificial Sequence: Synthetic oligonucleotide
  Sense strand starting at position 2648 of SEQ ID NO: 317399
cuccgugcuucucaaaugu

SEQ ID NO: 487880 - RNA, 19 nt, Artificial Sequence
  Description of Artificial Sequence: Synthetic oligonucleotide
  Antisense Strand to SEQ ID NO: 487879
acauuugagaagcacggag

SEQ ID NO: 487881 - RNA, 19 nt, Artificial Sequence
  Description of Artificial Sequence: Synthetic oligonucleotide
  Sense strand starting at position 2860 of SEQ ID NO: 317399
gcgccuguggucucaacua

SEQ ID NO: 487882 - RNA, 19 nt, Artificial Sequence
  Description of Artificial Sequence: Synthetic oligonucleotide
  Antisense Strand to SEQ ID NO: 487881
uaguugagaccacaggcgc

SEQ ID NO: 487883 - RNA, 19 nt, Artificial Sequence
  Description of Artificial Sequence: Synthetic oligonucleotide
  Sense strand starting at position 3001 of SEQ ID NO: 317399
gagugagacucaugccugu

SEQ ID NO: 487884 - RNA, 19 nt, Artificial Sequence
  Description of Artificial Sequence: Synthetic oligonucleotide
  Antisense Strand to SEQ ID NO: 487883
acaggcaugagucucacuc

SEQ ID NO: 487885 - RNA, 19 nt, Artificial Sequence
  Description of Artificial Sequence: Synthetic oligonucleotide
  Sense strand starting at position 3347 of SEQ ID NO: 317399
uuuguuuguauggguuaua

SEQ ID NO: 487886 - RNA, 19 nt, Artificial Sequence
  Description of Artificial Sequence: Synthetic oligonucleotide
  Antisense Strand to SEQ ID NO: 487885
uauaacccauacaaacaaa

SEQ ID NO: 487887 - RNA, 19 nt, Artificial Sequence
  Description of Artificial Sequence: Synthetic oligonucleotide
  Sense strand starting at position 3350 of SEQ ID NO: 317399
guuuguauggguuauaccu

SEQ ID NO: 487888 - RNA, 19 nt, Artificial Sequence
  Description of Artificial Sequence: Synthetic oligonucleotide
  Antisense Strand to SEQ ID NO: 487887
agguauaacccauacaaac

SEQ ID NO: 487889 - RNA, 19 nt, Artificial Sequence
  Description of Artificial Sequence: Synthetic oligonucleotide
  Sense strand starting at position 3352 of SEQ ID NO: 317399
uuguauggguuauaccuau

SEQ ID NO: 487890 - RNA, 19 nt, Artificial Sequence
  Description of Artificial Sequence: Synthetic oligonucleotide
  Antisense Strand to SEQ ID NO: 487889
auagguauaacccauacaa

SEQ ID NO: 487891 - RNA, 19 nt, Artificial Sequence
  Description of Artificial Sequence: Synthetic oligonucleotide
  Sense strand starting at position 3358 of SEQ ID NO: 317399
ggguuauaccuauggauac

SEQ ID NO: 487892 - RNA, 19 nt, Artificial Sequence
  Description of Artificial Sequence: Synthetic oligonucleotide
  Antisense Strand to SEQ ID NO: 487891
guauccauagguauaaccc

SEQ ID NO: 487893 - RNA, 19 nt, Artificial Sequence
  Description of Artificial Sequence: Synthetic oligonucleotide
  Sense strand starting at position 3359 of SEQ ID NO: 317399
gguuauaccuauggauacu

SEQ ID NO: 487894 - RNA, 19 nt, Artificial Sequence
  Description of Artificial Sequence: Synthetic oligonucleotide
  Antisense Strand to SEQ ID NO: 487893
aguauccauagguauaacc

SEQ ID NO: 487895 - RNA, 19 nt, Artificial Sequence
  Description of Artificial Sequence: Synthetic oligonucleotide
  Sense strand starting at position 3537 of SEQ ID NO: 317399
guucuacguuggugcgaau

SEQ ID NO: 487896 - RNA, 19 nt, Artificial Sequence
  Description of Artificial Sequence: Synthetic oligonucleotide
  Antisense Strand to SEQ ID NO: 487895
auucgcaccaacguagaac

SEQ ID NO: 487897 - RNA, 19 nt, Artificial Sequence
  Description of Artificial Sequence: Synthetic oligonucleotide
  Sense strand starting at position 3540 of SEQ ID NO: 317399
cuacguuggugcgaaucuu

SEQ ID NO: 487898 - RNA, 19 nt, Artificial Sequence
  Description of Artificial Sequence: Synthetic oligonucleotide
  Antisense Strand to SEQ ID NO: 487897
aagauucgcaccaacguag

SEQ ID NO: 487899 - RNA, 19 nt, Artificial Sequence
  Description of Artificial Sequence: Synthetic oligonucleotide
  Sense strand starting at position 3546 of SEQ ID NO: 317399
uggugcgaaucuuuguauu

SEQ ID NO: 487900 - RNA, 19 nt, Artificial Sequence
  Description of Artificial Sequence: Synthetic oligonucleotide
  Antisense Strand to SEQ ID NO: 487899
aauacaaagauucgcacca

SEQ ID NO: 487901 - RNA, 19 nt, Artificial Sequence
  Description of Artificial Sequence: Synthetic oligonucleotide
  Sense strand starting at position 3548 of SEQ ID NO: 317399
gugcgaaucuuuguauugu

SEQ ID NO: 487902 - RNA, 19 nt, Artificial Sequence
  Description of Artificial Sequence: Synthetic oligonucleotide
  Antisense Strand to SEQ ID NO: 487901
acaauacaaagauucgcac

SEQ ID NO: 487903 - RNA, 19 nt, Artificial Sequence
  Description of Artificial Sequence: Synthetic oligonucleotide
  Sense strand starting at position 3549 of SEQ ID NO: 317399
ugcgaaucuuuguauuguc

SEQ ID NO: 487904 - RNA, 19 nt, Artificial Sequence
  Description of Artificial Sequence: Synthetic oligonucleotide
  Antisense Strand to SEQ ID NO: 487903
gacaauacaaagauucgca

SEQ ID NO: 487905 - RNA, 19 nt, Artificial Sequence
  Description of Artificial Sequence: Synthetic oligonucleotide
  Sense strand starting at position 3556 of SEQ ID NO: 317399
cuuuguauuguccggcuua

SEQ ID NO: 487906 - RNA, 19 nt, Artificial Sequence
  Description of Artificial Sequence: Synthetic oligonucleotide
  Antisense Strand to SEQ ID NO: 487905
uaagccggacaauacaaag

SEQ ID NO: 487907 - RNA, 19 nt, Artificial Sequence
  Description of Artificial Sequence: Synthetic oligonucleotide
  Sense strand starting at position 3557 of SEQ ID NO: 317399
uuuguauuguccggcuuag

SEQ ID NO: 487908 - RNA, 19 nt, Artificial Sequence
  Description of Artificial Sequence: Synthetic oligonucleotide
  Antisense Strand to SEQ ID NO: 487907
cuaagccggacaauacaaa

SEQ ID NO: 487909 - RNA, 19 nt, Artificial Sequence
  Description of Artificial Sequence: Synthetic oligonucleotide
  Sense strand starting at position 3558 of SEQ ID NO: 317399
uuguauuguccggcuuagu

SEQ ID NO: 487910 - RNA, 19 nt, Artificial Sequence
  Description of Artificial Sequence: Synthetic oligonucleotide
  Antisense Strand to SEQ ID NO: 487909
acuaagccggacaauacaa

SEQ ID NO: 487911 - RNA, 19 nt, Artificial Sequence
  Description of Artificial Sequence: Synthetic oligonucleotide
  Sense strand starting at position 3619 of SEQ ID NO: 317399
agaugugcuguugguugaa

SEQ ID NO: 487912 - RNA, 19 nt, Artificial Sequence
  Description of Artificial Sequence: Synthetic oligonucleotide
  Antisense Strand to SEQ ID NO: 487911
uucaaccaacagcacaucu

SEQ ID NO: 487913 - RNA, 19 nt, Artificial Sequence
  Description of Artificial Sequence: Synthetic oligonucleotide
  Sense strand starting at position 3911 of SEQ ID NO: 317399
cucugcaucccuggacaau

SEQ ID NO: 487914 - RNA, 19 nt, Artificial Sequence
  Description of Artificial Sequence: Synthetic oligonucleotide
  Antisense Strand to SEQ ID NO: 487913
auuguccagggaugcagag

SEQ ID NO: 487915 - RNA, 19 nt, Artificial Sequence
  Description of Artificial Sequence: Synthetic oligonucleotide
  Sense strand starting at position 3923 of SEQ ID NO: 317399
ggacaauccucgcuuucug

SEQ ID NO: 487916 - RNA, 19 nt, Artificial Sequence
  Description of Artificial Sequence: Synthetic oligonucleotide
  Antisense Strand to SEQ ID NO: 487915
cagaaagcgaggauugucc

SEQ ID NO: 487917 - RNA, 19 nt, Artificial Sequence
  Description of Artificial Sequence: Synthetic oligonucleotide
  Sense strand starting at position 3942 of SEQ ID NO: 317399
gacagcuuccucggcugaa

SEQ ID NO: 487918 - RNA, 19 nt, Artificial Sequence
  Description of Artificial Sequence: Synthetic oligonucleotide
  Antisense Strand to SEQ ID NO: 487917
uucagccgaggaagcuguc

SEQ ID NO: 487919 - RNA, 19 nt, Artificial Sequence
  Description of Artificial Sequence: Synthetic oligonucleotide
  Sense strand starting at position 3943 of SEQ ID NO: 317399
acagcuuccucggcugaaa

SEQ ID NO: 487920 - RNA, 19 nt, Artificial Sequence
  Description of Artificial Sequence: Synthetic oligonucleotide
  Antisense Strand to SEQ ID NO: 487919
uuucagccgaggaagcugu

SEQ ID NO: 487921 - RNA, 19 nt, Artificial Sequence
  Description of Artificial Sequence: Synthetic oligonucleotide
  Sense strand starting at position 33 of SEQ ID NO: 317400
ggugucauuugggagugga

SEQ ID NO: 487922 - RNA, 19 nt, Artificial Sequence
  Description of Artificial Sequence: Synthetic oligonucleotide
  Antisense Strand to SEQ ID NO: 487921
uccacucccaaaugacacc

SEQ ID NO: 487923 - RNA, 19 nt, Artificial Sequence
  Description of Artificial Sequence: Synthetic oligonucleotide
  Sense strand starting at position 140 of SEQ ID NO: 317400
gaggcacugucaggugaau

SEQ ID NO: 487924 - RNA, 19 nt, Artificial Sequence
  Description of Artificial Sequence: Synthetic oligonucleotide
  Antisense Strand to SEQ ID NO: 487923
auucaccugacagugccuc

SEQ ID NO: 487925 - RNA, 19 nt, Artificial Sequence
  Description of Artificial Sequence: Synthetic oligonucleotide
  Sense strand starting at position 142 of SEQ ID NO: 317400
ggcacugucaggugaaugu

SEQ ID NO: 487926 - RNA, 19 nt, Artificial Sequence
  Description of Artificial Sequence: Synthetic oligonucleotide
  Antisense Strand to SEQ ID NO: 487925
acauucaccugacagugcc

SEQ ID NO: 487927 - RNA, 19 nt, Artificial Sequence
  Description of Artificial Sequence: Synthetic oligonucleotide
  Sense strand starting at position 494 of SEQ ID NO: 317400
gggucaguagcugguuuaa

SEQ ID NO: 487928 - RNA, 19 nt, Artificial Sequence
  Description of Artificial Sequence: Synthetic oligonucleotide
  Antisense Strand to SEQ ID NO: 487927
uuaaaccagcuacugaccc

SEQ ID NO: 487929 - RNA, 19 nt, Artificial Sequence
  Description of Artificial Sequence: Synthetic oligonucleotide
  Sense strand starting at position 791 of SEQ ID NO: 317400
cugccuaucagggauguuu

SEQ ID NO: 487930 - RNA, 19 nt, Artificial Sequence
  Description of Artificial Sequence: Synthetic oligonucleotide
  Antisense Strand to SEQ ID NO: 487929
aaacaucccugauaggcag

SEQ ID NO: 487931 - RNA, 19 nt, Artificial Sequence
  Description of Artificial Sequence: Synthetic oligonucleotide
  Sense strand starting at position 1477 of SEQ ID NO: 317400
ggcggaagucuacaggaga

SEQ ID NO: 487932 - RNA, 19 nt, Artificial Sequence
  Description of Artificial Sequence: Synthetic oligonucleotide
  Antisense Strand to SEQ ID NO: 487931
ucuccuguagacuuccgcc

SEQ ID NO: 487933 - RNA, 19 nt, Artificial Sequence
  Description of Artificial Sequence: Synthetic oligonucleotide
  Sense strand starting at position 1611 of SEQ ID NO: 317400
uacccaaggccuggagaau

SEQ ID NO: 487934 - RNA, 19 nt, Artificial Sequence
  Description of Artificial Sequence: Synthetic oligonucleotide
  Antisense Strand to SEQ ID NO: 487933
auucuccaggccuugggua

SEQ ID NO: 487935 - RNA, 19 nt, Artificial Sequence
  Description of Artificial Sequence: Synthetic oligonucleotide
  Sense strand starting at position 2009 of SEQ ID NO: 317400
guggcuguuuccucuuuaa

SEQ ID NO: 487936 - RNA, 19 nt, Artificial Sequence
  Description of Artificial Sequence: Synthetic oligonucleotide
  Antisense Strand to SEQ ID NO: 487935
uuaaagaggaaacagccac

SEQ ID NO: 487937 - RNA, 19 nt, Artificial Sequence
  Description of Artificial Sequence: Synthetic oligonucleotide
  Sense strand starting at position 2020 of SEQ ID NO: 317400
cucuuuaauucgccugagu

SEQ ID NO: 487938 - RNA, 19 nt, Artificial Sequence
  Description of Artificial Sequence: Synthetic oligonucleotide
  Antisense Strand to SEQ ID NO: 487937
acucaggcgaauuaaagag

SEQ ID NO: 487939 - RNA, 19 nt, Artificial Sequence
  Description of Artificial Sequence: Synthetic oligonucleotide
  Sense strand starting at position 2022 of SEQ ID NO: 317400
cuuuaauucgccugaguuu

SEQ ID NO: 487940 - RNA, 19 nt, Artificial Sequence
  Description of Artificial Sequence: Synthetic oligonucleotide
  Antisense Strand to SEQ ID NO: 487939
aaacucaggcgaauuaaag

SEQ ID NO: 487941 - RNA, 19 nt, Artificial Sequence
  Description of Artificial Sequence: Synthetic oligonucleotide
  Sense strand starting at position 2058 of SEQ ID NO: 317400
agaccuuuguugcugcaua

SEQ ID NO: 487942 - RNA, 19 nt, Artificial Sequence
  Description of Artificial Sequence: Synthetic oligonucleotide
  Antisense Strand to SEQ ID NO: 487941
uaugcagcaacaaaggucu

SEQ ID NO: 487943 - RNA, 19 nt, Artificial Sequence
  Description of Artificial Sequence: Synthetic oligonucleotide
  Sense strand starting at position 2059 of SEQ ID NO: 317400
gaccuuuguugcugcauau

SEQ ID NO: 487944 - RNA, 19 nt, Artificial Sequence
  Description of Artificial Sequence: Synthetic oligonucleotide
  Antisense Strand to SEQ ID NO: 487943
auaugcagcaacaaagguc

SEQ ID NO: 487945 - RNA, 19 nt, Artificial Sequence
  Description of Artificial Sequence: Synthetic oligonucleotide
  Sense strand starting at position 2085 of SEQ ID NO: 317400
aggauaaacuuguugaauu

SEQ ID NO: 487946 - RNA, 19 nt, Artificial Sequence
  Description of Artificial Sequence: Synthetic oligonucleotide
  Antisense Strand to SEQ ID NO: 487945
aauucaacaaguuuauccu

SEQ ID NO: 487947 - RNA, 19 nt, Artificial Sequence
  Description of Artificial Sequence: Synthetic oligonucleotide
  Sense strand starting at position 2086 of SEQ ID NO: 317400
ggauaaacuuguugaauuu

SEQ ID NO: 487948 - RNA, 19 nt, Artificial Sequence
  Description of Artificial Sequence: Synthetic oligonucleotide
  Antisense Strand to SEQ ID NO: 487947
aaauucaacaaguuuaucc

SEQ ID NO: 487949 - RNA, 19 nt, Artificial Sequence
  Description of Artificial Sequence: Synthetic oligonucleotide
  Sense strand starting at position 2149 of SEQ ID NO: 317400
ggcucuagcacucgguaaa

SEQ ID NO: 487950 - RNA, 19 nt, Artificial Sequence
  Description of Artificial Sequence: Synthetic oligonucleotide
  Antisense Strand to SEQ ID NO: 487949
uuuaccgagugcuagagcc

SEQ ID NO: 487951 - RNA, 19 nt, Artificial Sequence
  Description of Artificial Sequence: Synthetic oligonucleotide
  Sense strand starting at position 2172 of SEQ ID NO: 317400
auuuaaagcgcauguaguu

SEQ ID NO: 487952 - RNA, 19 nt, Artificial Sequence
  Description of Artificial Sequence: Synthetic oligonucleotide
  Antisense Strand to SEQ ID NO: 487951
aacuacaugcgcuuuaaau

SEQ ID NO: 487953 - RNA, 19 nt, Artificial Sequence
  Description of Artificial Sequence: Synthetic oligonucleotide
  Sense strand starting at position 2179 of SEQ ID NO: 317400
gcgcauguaguuuacaaca

SEQ ID NO: 487954 - RNA, 19 nt, Artificial Sequence
  Description of Artificial Sequence: Synthetic oligonucleotide
  Antisense Strand to SEQ ID NO: 487953
uguuguaaacuacaugcgc

SEQ ID NO: 487955 - RNA, 19 nt, Artificial Sequence
  Description of Artificial Sequence: Synthetic oligonucleotide
  Sense strand starting at position 2181 of SEQ ID NO: 317400
gcauguaguuuacaacacu

SEQ ID NO: 487956 - RNA, 19 nt, Artificial Sequence
  Description of Artificial Sequence: Synthetic oligonucleotide
  Antisense Strand to SEQ ID NO: 487955
aguguuguaaacuacaugc

SEQ ID NO: 487957 - RNA, 19 nt, Artificial Sequence
  Description of Artificial Sequence: Synthetic oligonucleotide
  Sense strand starting at position 2346 of SEQ ID NO: 317400
uguggaaucgcgugagcag

SEQ ID NO: 487958 - RNA, 19 nt, Artificial Sequence
  Description of Artificial Sequence: Synthetic oligonucleotide
  Antisense Strand to SEQ ID NO: 487957
cugcucacgcgauuccaca

SEQ ID NO: 487959 - RNA, 19 nt, Artificial Sequence
  Description of Artificial Sequence: Synthetic oligonucleotide
  Sense strand starting at position 2428 of SEQ ID NO: 317400
gacuuuguuuccguuuguu

SEQ ID NO: 487960 - RNA, 19 nt, Artificial Sequence
  Description of Artificial Sequence: Synthetic oligonucleotide
  Antisense Strand to SEQ ID NO: 487959
aacaaacggaaacaaaguc

SEQ ID NO: 487961 - RNA, 19 nt, Artificial Sequence
  Description of Artificial Sequence: Synthetic oligonucleotide
  Sense strand starting at position 2547 of SEQ ID NO: 317400
uugggucuuguacacagau

SEQ ID NO: 487962 - RNA, 19 nt, Artificial Sequence
  Description of Artificial Sequence: Synthetic oligonucleotide
  Antisense Strand to SEQ ID NO: 487961
aucuguguacaagacccaa

SEQ ID NO: 487963 - RNA, 19 nt, Artificial Sequence
  Description of Artificial Sequence: Synthetic oligonucleotide
  Sense strand starting at position 2559 of SEQ ID NO: 317400
cacagaugcuugucagcaa

SEQ ID NO: 487964 - RNA, 19 nt, Artificial Sequence
  Description of Artificial Sequence: Synthetic oligonucleotide
  Antisense Strand to SEQ ID NO: 487963
uugcugacaagcaucugug

SEQ ID NO: 487965 - RNA, 19 nt, Artificial Sequence
  Description of Artificial Sequence: Synthetic oligonucleotide
  Sense strand starting at position 2560 of SEQ ID NO: 317400
acagaugcuugucagcaaa

SEQ ID NO: 487966 - RNA, 19 nt, Artificial Sequence
  Description of Artificial Sequence: Synthetic oligonucleotide
  Antisense Strand to SEQ ID NO: 487965
uuugcugacaagcaucugu

SEQ ID NO: 487967 - RNA, 19 nt, Artificial Sequence
  Description of Artificial Sequence: Synthetic oligonucleotide
  Sense strand starting at position 2562 of SEQ ID NO: 317400
agaugcuugucagcaaaua

SEQ ID NO: 487968 - RNA, 19 nt, Artificial Sequence
  Description of Artificial Sequence: Synthetic oligonucleotide
  Antisense Strand to SEQ ID NO: 487967
uauuugcugacaagcaucu

SEQ ID NO: 487969 - RNA, 19 nt, Artificial Sequence
  Description of Artificial Sequence: Synthetic oligonucleotide
  Sense strand starting at position 2563 of SEQ ID NO: 317400
gaugcuugucagcaaauac

SEQ ID NO: 487970 - RNA, 19 nt, Artificial Sequence
  Description of Artificial Sequence: Synthetic oligonucleotide
  Antisense Strand to SEQ ID NO: 487969
guauuugcugacaagcauc

SEQ ID NO: 487971 - RNA, 19 nt, Artificial Sequence
  Description of Artificial Sequence: Synthetic oligonucleotide
  Sense strand starting at position 2845 of SEQ ID NO: 317400
agcuuucugucccuuacau

SEQ ID NO: 487972 - RNA, 19 nt, Artificial Sequence
  Description of Artificial Sequence: Synthetic oligonucleotide
  Antisense Strand to SEQ ID NO: 487971
auguaagggacagaaagcu

SEQ ID NO: 487973 - RNA, 19 nt, Artificial Sequence
  Description of Artificial Sequence: Synthetic oligonucleotide
  Sense strand starting at position 3636 of SEQ ID NO: 317400
cgcuucuuucugcuuuaua

SEQ ID NO: 487974 - RNA, 19 nt, Artificial Sequence
  Description of Artificial Sequence: Synthetic oligonucleotide
  Antisense Strand to SEQ ID NO: 487973
uauaaagcagaaagaagcg

SEQ ID NO: 487975 - RNA, 19 nt, Artificial Sequence
  Description of Artificial Sequence: Synthetic oligonucleotide
  Sense strand starting at position 3872 of SEQ ID NO: 317400
ucucauaaaugaguuggga

SEQ ID NO: 487976 - RNA, 19 nt, Artificial Sequence
  Description of Artificial Sequence: Synthetic oligonucleotide
  Antisense Strand to SEQ ID NO: 487975
ucccaacucauuuaugaga

SEQ ID NO: 487977 - RNA, 19 nt, Artificial Sequence
  Description of Artificial Sequence: Synthetic oligonucleotide
  Sense strand starting at position 3874 of SEQ ID NO: 317400
ucauaaaugaguugggacu

SEQ ID NO: 487978 - RNA, 19 nt, Artificial Sequence
  Description of Artificial Sequence: Synthetic oligonucleotide
  Antisense Strand to SEQ ID NO: 487977
agucccaacucauuuauga

SEQ ID NO: 487979 - RNA, 19 nt, Artificial Sequence
  Description of Artificial Sequence: Synthetic oligonucleotide
  Sense strand starting at position 3888 of SEQ ID NO: 317400
ggacucugcugauuugcau

SEQ ID NO: 487980 - RNA, 19 nt, Artificial Sequence
  Description of Artificial Sequence: Synthetic oligonucleotide
  Antisense Strand to SEQ ID NO: 487979
augcaaaucagcagagucc

SEQ ID NO: 487981 - RNA, 19 nt, Artificial Sequence
  Description of Artificial Sequence: Synthetic oligonucleotide
  Sense strand starting at position 573 of SEQ ID NO: 317401
acugguucuuccuccacau

SEQ ID NO: 487982 - RNA, 19 nt, Artificial Sequence
  Description of Artificial Sequence: Synthetic oligonucleotide
  Antisense Strand to SEQ ID NO: 487981
auguggaggaagaaccagu

SEQ ID NO: 487983 - RNA, 19 nt, Artificial Sequence
  Description of Artificial Sequence: Synthetic oligonucleotide
  Sense strand starting at position 591 of SEQ ID NO: 317401
ugcuguagucggagcuaug

SEQ ID NO: 487984 - RNA, 19 nt, Artificial Sequence
  Description of Artificial Sequence: Synthetic oligonucleotide
  Antisense Strand to SEQ ID NO: 487983
cauagcuccgacuacagca

SEQ ID NO: 487985 - RNA, 19 nt, Artificial Sequence
  Description of Artificial Sequence: Synthetic oligonucleotide
  Sense strand starting at position 846 of SEQ ID NO: 317401
cggcaaacauucugguguu

SEQ ID NO: 487986 - RNA, 19 nt, Artificial Sequence
  Description of Artificial Sequence: Synthetic oligonucleotide
  Antisense Strand to SEQ ID NO: 487985
aacaccagaauguuugccg

SEQ ID NO: 487987 - RNA, 19 nt, Artificial Sequence
  Description of Artificial Sequence: Synthetic oligonucleotide
  Sense strand starting at position 847 of SEQ ID NO: 317401
ggcaaacauucugguguua

SEQ ID NO: 487988 - RNA, 19 nt, Artificial Sequence
  Description of Artificial Sequence: Synthetic oligonucleotide
  Antisense Strand to SEQ ID NO: 487987
uaacaccagaauguuugcc

SEQ ID NO: 487989 - RNA, 19 nt, Artificial Sequence
  Description of Artificial Sequence: Synthetic oligonucleotide
  Sense strand starting at position 849 of SEQ ID NO: 317401
caaacauucugguguuaga

SEQ ID NO: 487990 - RNA, 19 nt, Artificial Sequence
  Description of Artificial Sequence: Synthetic oligonucleotide
  Antisense Strand to SEQ ID NO: 487989
ucuaacaccagaauguuug

SEQ ID NO: 487991 - RNA, 19 nt, Artificial Sequence
  Description of Artificial Sequence: Synthetic oligonucleotide
  Sense strand starting at position 2617 of SEQ ID NO: 317401
ugccuuugggaugaagcua

SEQ ID NO: 487992 - RNA, 19 nt, Artificial Sequence
  Description of Artificial Sequence: Synthetic oligonucleotide
  Antisense Strand to SEQ ID NO: 487991
uagcuucaucccaaaggca

SEQ ID NO: 487993 - RNA, 19 nt, Artificial Sequence
  Description of Artificial Sequence: Synthetic oligonucleotide
  Sense strand starting at position 2632 of SEQ ID NO: 317401
gcuaacagaugcugaaguu

SEQ ID NO: 487994 - RNA, 19 nt, Artificial Sequence
  Description of Artificial Sequence: Synthetic oligonucleotide
  Antisense Strand to SEQ ID NO: 487993
aacuucagcaucuguuagc

SEQ ID NO: 487995 - RNA, 19 nt, Artificial Sequence
  Description of Artificial Sequence: Synthetic oligonucleotide
  Sense strand starting at position 2726 of SEQ ID NO: 317401
cgggaauggucuugcucaa

SEQ ID NO: 487996 - RNA, 19 nt, Artificial Sequence
  Description of Artificial Sequence: Synthetic oligonucleotide
  Antisense Strand to SEQ ID NO: 487995
uugagcaagaccauucccg

SEQ ID NO: 487997 - RNA, 19 nt, Artificial Sequence
  Description of Artificial Sequence: Synthetic oligonucleotide
  Sense strand starting at position 2753 of SEQ ID NO: 317401
ggccucugcucaucggaau

SEQ ID NO: 487998 - RNA, 19 nt, Artificial Sequence
  Description of Artificial Sequence: Synthetic oligonucleotide
  Antisense Strand to SEQ ID NO: 487997
auuccgaugagcagaggcc

SEQ ID NO: 487999 - RNA, 19 nt, Artificial Sequence
  Description of Artificial Sequence: Synthetic oligonucleotide
  Sense strand starting at position 2813 of SEQ ID NO: 317401
uuggaacccuguuaauguu

SEQ ID NO: 488000 - RNA, 19 nt, Artificial Sequence
  Description of Artificial Sequence: Synthetic oligonucleotide
  Antisense Strand to SEQ ID NO: 487999
aacauuaacaggguuccaa

SEQ ID NO: 488001 - RNA, 19 nt, Artificial Sequence
  Description of Artificial Sequence: Synthetic oligonucleotide
  Sense strand starting at position 2990 of SEQ ID NO: 317401
cuccgugcuucucaaaugu

SEQ ID NO: 488002 - RNA, 19 nt, Artificial Sequence
  Description of Artificial Sequence: Synthetic oligonucleotide
  Antisense Strand to SEQ ID NO: 488001
acauuugagaagcacggag

SEQ ID NO: 488003 - RNA, 19 nt, Artificial Sequence
  Description of Artificial Sequence: Synthetic oligonucleotide
  Sense strand starting at position 3202 of SEQ ID NO: 317401
gcgccuguggucucaacua

SEQ ID NO: 488004 - RNA, 19 nt, Artificial Sequence
  Description of Artificial Sequence: Synthetic oligonucleotide
  Antisense Strand to SEQ ID NO: 488003
uaguugagaccacaggcgc

SEQ ID NO: 488005 - RNA, 19 nt, Artificial Sequence
  Description of Artificial Sequence: Synthetic oligonucleotide
  Sense strand starting at position 3343 of SEQ ID NO: 317401
gagugagacucaugccugu

SEQ ID NO: 488006 - RNA, 19 nt, Artificial Sequence
  Description of Artificial Sequence: Synthetic oligonucleotide
  Antisense Strand to SEQ ID NO: 488005
acaggcaugagucucacuc

SEQ ID NO: 488007 - RNA, 19 nt, Artificial Sequence
  Description of Artificial Sequence: Synthetic oligonucleotide
  Sense strand starting at position 3689 of SEQ ID NO: 317401
uuuguuuguauggguuaua

SEQ ID NO: 488008 - RNA, 19 nt, Artificial Sequence
  Description of Artificial Sequence: Synthetic oligonucleotide
  Antisense Strand to SEQ ID NO: 488007
uauaacccauacaaacaaa

SEQ ID NO: 488009 - RNA, 19 nt, Artificial Sequence
  Description of Artificial Sequence: Synthetic oligonucleotide
  Sense strand starting at position 3692 of SEQ ID NO: 317401
guuuguauggguuauaccu

SEQ ID NO: 488010 - RNA, 19 nt, Artificial Sequence
  Description of Artificial Sequence: Synthetic oligonucleotide
  Antisense Strand to SEQ ID NO: 488009
agguauaacccauacaaac

SEQ ID NO: 488011 - RNA, 19 nt, Artificial Sequence
  Description of Artificial Sequence: Synthetic oligonucleotide
  Sense strand starting at position 3694 of SEQ ID NO: 317401
uuguauggguuauaccuau

SEQ ID NO: 488012 - RNA, 19 nt, Artificial Sequence
  Description of Artificial Sequence: Synthetic oligonucleotide
  Antisense Strand to SEQ ID NO: 488011
auagguauaacccauacaa

SEQ ID NO: 488013 - RNA, 19 nt, Artificial Sequence
  Description of Artificial Sequence: Synthetic oligonucleotide
  Sense strand starting at position 3700 of SEQ ID NO: 317401
ggguuauaccuauggauac

SEQ ID NO: 488014 - RNA, 19 nt, Artificial Sequence
  Description of Artificial Sequence: Synthetic oligonucleotide
  Antisense Strand to SEQ ID NO: 488013
guauccauagguauaaccc

SEQ ID NO: 488015 - RNA, 19 nt, Artificial Sequence
  Description of Artificial Sequence: Synthetic oligonucleotide
  Sense strand starting at position 3701 of SEQ ID NO: 317401
gguuauaccuauggauacu

SEQ ID NO: 488016 - RNA, 19 nt, Artificial Sequence
  Description of Artificial Sequence: Synthetic oligonucleotide
  Antisense Strand to SEQ ID NO: 488015
aguauccauagguauaacc

SEQ ID NO: 488017 - RNA, 19 nt, Artificial Sequence
  Description of Artificial Sequence: Synthetic oligonucleotide
  Sense strand starting at position 3879 of SEQ ID NO: 317401
guucuacguuggugcgaau

SEQ ID NO: 488018 - RNA, 19 nt, Artificial Sequence
  Description of Artificial Sequence: Synthetic oligonucleotide
  Antisense Strand to SEQ ID NO: 488017
auucgcaccaacguagaac

SEQ ID NO: 488019 - RNA, 19 nt, Artificial Sequence
  Description of Artificial Sequence: Synthetic oligonucleotide
  Sense strand starting at position 3882 of SEQ ID NO: 317401
cuacguuggugcgaaucuu

SEQ ID NO: 488020 - RNA, 19 nt, Artificial Sequence
  Description of Artificial Sequence: Synthetic oligonucleotide
  Antisense Strand to SEQ ID NO: 488019
aagauucgcaccaacguag

SEQ ID NO: 488021 - RNA, 19 nt, Artificial Sequence
  Description of Artificial Sequence: Synthetic oligonucleotide
  Sense strand starting at position 3888 of SEQ ID NO: 317401
uggugcgaaucuuuguauu

SEQ ID NO: 488022 - RNA, 19 nt, Artificial Sequence
  Description of Artificial Sequence: Synthetic oligonucleotide
  Antisense Strand to SEQ ID NO: 488021
aauacaaagauucgcacca

SEQ ID NO: 488023 - RNA, 19 nt, Artificial Sequence
  Description of Artificial Sequence: Synthetic oligonucleotide
  Sense strand starting at position 3890 of SEQ ID NO: 317401
gugcgaaucuuuguauugu

SEQ ID NO: 488024 - RNA, 19 nt, Artificial Sequence
  Description of Artificial Sequence: Synthetic oligonucleotide
  Antisense Strand to SEQ ID NO: 488023
acaauacaaagauucgcac

SEQ ID NO: 488025 - RNA, 19 nt, Artificial Sequence
  Description of Artificial Sequence: Synthetic oligonucleotide
  Sense strand starting at position 3891 of SEQ ID NO: 317401
ugcgaaucuuuguauuguc

SEQ ID NO: 488026 - RNA, 19 nt, Artificial Sequence
  Description of Artificial Sequence: Synthetic oligonucleotide
  Antisense Strand to SEQ ID NO: 488025
gacaauacaaagauucgca

SEQ ID NO: 488027 - RNA, 19 nt, Artificial Sequence
  Description of Artificial Sequence: Synthetic oligonucleotide
  Sense strand starting at position 3898 of SEQ ID NO: 317401
cuuuguauuguccggcuua

SEQ ID NO: 488028 - RNA, 19 nt, Artificial Sequence
  Description of Artificial Sequence: Synthetic oligonucleotide
  Antisense Strand to SEQ ID NO: 488027
uaagccggacaauacaaag

SEQ ID NO: 488029 - RNA, 19 nt, Artificial Sequence
  Description of Artificial Sequence: Synthetic oligonucleotide
  Sense strand starting at position 3899 of SEQ ID NO: 317401
uuuguauuguccggcuuag

SEQ ID NO: 488030 - RNA, 19 nt, Artificial Sequence
  Description of Artificial Sequence: Synthetic oligonucleotide
  Antisense Strand to SEQ ID NO: 488029
cuaagccggacaauacaaa

SEQ ID NO: 488031 - RNA, 19 nt, Artificial Sequence
  Description of Artificial Sequence: Synthetic oligonucleotide
  Sense strand starting at position 3900 of SEQ ID NO: 317401
uuguauuguccggcuuagu

SEQ ID NO: 488032 - RNA, 19 nt, Artificial Sequence
  Description of Artificial Sequence: Synthetic oligonucleotide
  Antisense Strand to SEQ ID NO: 488031
acuaagccggacaauacaa

SEQ ID NO: 488033 - RNA, 19 nt, Artificial Sequence
  Description of Artificial Sequence: Synthetic oligonucleotide
  Sense strand starting at position 3961 of SEQ ID NO: 317401
agaugugcuguugguugaa

SEQ ID NO: 488034 - RNA, 19 nt, Artificial Sequence
  Description of Artificial Sequence: Synthetic oligonucleotide
  Antisense Strand to SEQ ID NO: 488033
uucaaccaacagcacaucu

SEQ ID NO: 488035 - RNA, 19 nt, Artificial Sequence
  Description of Artificial Sequence: Synthetic oligonucleotide
  Sense strand starting at position 24 of SEQ ID NO: 317402
ucuuauguuugguuagaaa

SEQ ID NO: 488036 - RNA, 19 nt, Artificial Sequence
  Description of Artificial Sequence: Synthetic oligonucleotide
  Antisense Strand to SEQ ID NO: 488035
uuucuaaccaaacauaaga

SEQ ID NO: 488037 - RNA, 19 nt, Artificial Sequence
  Description of Artificial Sequence: Synthetic oligonucleotide
  Sense strand starting at position 143 of SEQ ID NO: 317402
ugaauauuauggucauaca

SEQ ID NO: 488038 - RNA, 19 nt, Artificial Sequence
  Description of Artificial Sequence: Synthetic oligonucleotide
  Antisense Strand to SEQ ID NO: 488037
uguaugaccauaauauuca

SEQ ID NO: 488039 - RNA, 19 nt, Artificial Sequence
  Description of Artificial Sequence: Synthetic oligonucleotide
  Sense strand starting at position 295 of SEQ ID NO: 317402
ucuuacaugcgauaacuca

SEQ ID NO: 488040 - RNA, 19 nt, Artificial Sequence
  Description of Artificial Sequence: Synthetic oligonucleotide
  Antisense Strand to SEQ ID NO: 488039
ugaguuaucgcauguaaga

SEQ ID NO: 488041 - RNA, 19 nt, Artificial Sequence
  Description of Artificial Sequence: Synthetic oligonucleotide
  Sense strand starting at position 302 of SEQ ID NO: 317402
ugcgauaacucaucauaca

SEQ ID NO: 488042 - RNA, 19 nt, Artificial Sequence
  Description of Artificial Sequence: Synthetic oligonucleotide
  Antisense Strand to SEQ ID NO: 488041
uguaugaugaguuaucgca

SEQ ID NO: 488043 - RNA, 19 nt, Artificial Sequence
  Description of Artificial Sequence: Synthetic oligonucleotide
  Sense strand starting at position 303 of SEQ ID NO: 317402
gcgauaacucaucauacau

SEQ ID NO: 488044 - RNA, 19 nt, Artificial Sequence
  Description of Artificial Sequence: Synthetic oligonucleotide
  Antisense Strand to SEQ ID NO: 488043
auguaugaugaguuaucgc

SEQ ID NO: 488045 - RNA, 19 nt, Artificial Sequence
  Description of Artificial Sequence: Synthetic oligonucleotide
  Sense strand starting at position 1239 of SEQ ID NO: 317402
ugcuacuuaggugaaauca

SEQ ID NO: 488046 - RNA, 19 nt, Artificial Sequence
  Description of Artificial Sequence: Synthetic oligonucleotide
  Antisense Strand to SEQ ID NO: 488045
ugauuucaccuaaguagca

SEQ ID NO: 488047 - RNA, 19 nt, Artificial Sequence
  Description of Artificial Sequence: Synthetic oligonucleotide
  Sense strand starting at position 1369 of SEQ ID NO: 317402
gugucauacagguaucuug

SEQ ID NO: 488048 - RNA, 19 nt, Artificial Sequence
  Description of Artificial Sequence: Synthetic oligonucleotide
  Antisense Strand to SEQ ID NO: 488047
caagauaccuguaugacac

SEQ ID NO: 488049 - RNA, 19 nt, Artificial Sequence
  Description of Artificial Sequence: Synthetic oligonucleotide
  Sense strand starting at position 1376 of SEQ ID NO: 317402
acagguaucuuggugaaua

SEQ ID NO: 488050 - RNA, 19 nt, Artificial Sequence
  Description of Artificial Sequence: Synthetic oligonucleotide
  Antisense Strand to SEQ ID NO: 488049
uauucaccaagauaccugu

SEQ ID NO: 488051 - RNA, 19 nt, Artificial Sequence
  Description of Artificial Sequence: Synthetic oligonucleotide
  Sense strand starting at position 1694 of SEQ ID NO: 317402
ccaggagaccugcaaugua

SEQ ID NO: 488052 - RNA, 19 nt, Artificial Sequence
  Description of Artificial Sequence: Synthetic oligonucleotide
  Antisense Strand to SEQ ID NO: 488051
uacauugcaggucuccugg

SEQ ID NO: 488053 - RNA, 19 nt, Artificial Sequence
  Description of Artificial Sequence: Synthetic oligonucleotide
  Sense strand starting at position 2003 of SEQ ID NO: 317402
cggagagauugugucauga

SEQ ID NO: 488054 - RNA, 19 nt, Artificial Sequence
  Description of Artificial Sequence: Synthetic oligonucleotide
  Antisense Strand to SEQ ID NO: 488053
ucaugacacaaucucuccg

SEQ ID NO: 488055 - RNA, 19 nt, Artificial Sequence
  Description of Artificial Sequence: Synthetic oligonucleotide
  Sense strand starting at position 2295 of SEQ ID NO: 317402
agguaauaucugcaaccac

SEQ ID NO: 488056 - RNA, 19 nt, Artificial Sequence
  Description of Artificial Sequence: Synthetic oligonucleotide
  Antisense Strand to SEQ ID NO: 488055
gugguugcagauauuaccu

SEQ ID NO: 488057 - RNA, 19 nt, Artificial Sequence
  Description of Artificial Sequence: Synthetic oligonucleotide
  Sense strand starting at position 2322 of SEQ ID NO: 317402
guaugauuguacuuauuga

SEQ ID NO: 488058 - RNA, 19 nt, Artificial Sequence
  Description of Artificial Sequence: Synthetic oligonucleotide
  Antisense Strand to SEQ ID NO: 488057
ucaauaaguacaaucauac

SEQ ID NO: 488059 - RNA, 19 nt, Artificial Sequence
  Description of Artificial Sequence: Synthetic oligonucleotide
  Sense strand starting at position 2342 of SEQ ID NO: 317402
gagccagaaggcuauuguu

SEQ ID NO: 488060 - RNA, 19 nt, Artificial Sequence
  Description of Artificial Sequence: Synthetic oligonucleotide
  Antisense Strand to SEQ ID NO: 488059
aacaauagccuucuggcuc

SEQ ID NO: 488061 - RNA, 19 nt, Artificial Sequence
  Description of Artificial Sequence: Synthetic oligonucleotide
  Sense strand starting at position 2408 of SEQ ID NO: 317402
aagcuuagcuuugugauuu

SEQ ID NO: 488062 - RNA, 19 nt, Artificial Sequence
  Description of Artificial Sequence: Synthetic oligonucleotide
  Antisense Strand to SEQ ID NO: 488061
aaaucacaaagcuaagcuu

SEQ ID NO: 488063 - RNA, 19 nt, Artificial Sequence
  Description of Artificial Sequence: Synthetic oligonucleotide
  Sense strand starting at position 2412 of SEQ ID NO: 317402
uuagcuuugugauuucgag

SEQ ID NO: 488064 - RNA, 19 nt, Artificial Sequence
  Description of Artificial Sequence: Synthetic oligonucleotide
  Antisense Strand to SEQ ID NO: 488063
cucgaaaucacaaagcuaa

SEQ ID NO: 488065 - RNA, 19 nt, Artificial Sequence
  Description of Artificial Sequence: Synthetic oligonucleotide
  Sense strand starting at position 2421 of SEQ ID NO: 317402
ugauuucgaguaugcagua

SEQ ID NO: 488066 - RNA, 19 nt, Artificial Sequence
  Description of Artificial Sequence: Synthetic oligonucleotide
  Antisense Strand to SEQ ID NO: 488065
uacugcauacucgaaauca

SEQ ID NO: 488067 - RNA, 19 nt, Artificial Sequence
  Description of Artificial Sequence: Synthetic oligonucleotide
  Sense strand starting at position 2517 of SEQ ID NO: 317402
cuagauguugcagaaguaa

SEQ ID NO: 488068 - RNA, 19 nt, Artificial Sequence
  Description of Artificial Sequence: Synthetic oligonucleotide
  Antisense Strand to SEQ ID NO: 488067
uuacuucugcaacaucuag

SEQ ID NO: 488069 - RNA, 19 nt, Artificial Sequence
  Description of Artificial Sequence: Synthetic oligonucleotide
  Sense strand starting at position 2536 of SEQ ID NO: 317402
agcaguuucugacugagag

SEQ ID NO: 488070 - RNA, 19 nt, Artificial Sequence
  Description of Artificial Sequence: Synthetic oligonucleotide
  Antisense Strand to SEQ ID NO: 488069
cucucagucagaaacugcu

SEQ ID NO: 488071 - RNA, 19 nt, Artificial Sequence
  Description of Artificial Sequence: Synthetic oligonucleotide
  Sense strand starting at position 2555 of SEQ ID NO: 317402
caggaugacugcuugagag

SEQ ID NO: 488072 - RNA, 19 nt, Artificial Sequence
  Description of Artificial Sequence: Synthetic oligonucleotide
  Antisense Strand to SEQ ID NO: 488071
cucucaagcagucauccug

SEQ ID NO: 488073 - RNA, 19 nt, Artificial Sequence
  Description of Artificial Sequence: Synthetic oligonucleotide
  Sense strand starting at position 2769 of SEQ ID NO: 317402
gaugcaaaugcucugcgua

SEQ ID NO: 488074 - RNA, 19 nt, Artificial Sequence
  Description of Artificial Sequence: Synthetic oligonucleotide
  Antisense Strand to SEQ ID NO: 488073
uacgcagagcauuugcauc

SEQ ID NO: 488075 - RNA, 19 nt, Artificial Sequence
  Description of Artificial Sequence: Synthetic oligonucleotide
  Sense strand starting at position 2783 of SEQ ID NO: 317402
gcguaucuuaaggacuaua

SEQ ID NO: 488076 - RNA, 19 nt, Artificial Sequence
  Description of Artificial Sequence: Synthetic oligonucleotide
  Antisense Strand to SEQ ID NO: 488075
uauaguccuuaagauacgc

SEQ ID NO: 488077 - RNA, 19 nt, Artificial Sequence
  Description of Artificial Sequence: Synthetic oligonucleotide
  Sense strand starting at position 2801 of SEQ ID NO: 317402
auguguguuaacuauuaug

SEQ ID NO: 488078 - RNA, 19 nt, Artificial Sequence
  Description of Artificial Sequence: Synthetic oligonucleotide
  Antisense Strand to SEQ ID NO: 488077
cauaauaguuaacacacau

SEQ ID NO: 488079 - RNA, 19 nt, Artificial Sequence
  Description of Artificial Sequence: Synthetic oligonucleotide
  Sense strand starting at position 2892 of SEQ ID NO: 317402
gacguaagaucuuuaaauu

SEQ ID NO: 488080 - RNA, 19 nt, Artificial Sequence
  Description of Artificial Sequence: Synthetic oligonucleotide
  Antisense Strand to SEQ ID NO: 488079
aauuuaaagaucuuacguc

SEQ ID NO: 488081 - RNA, 19 nt, Artificial Sequence
  Description of Artificial Sequence: Synthetic oligonucleotide
  Sense strand starting at position 2893 of SEQ ID NO: 317402
acguaagaucuuuaaauug

SEQ ID NO: 488082 - RNA, 19 nt, Artificial Sequence
  Description of Artificial Sequence: Synthetic oligonucleotide
  Antisense Strand to SEQ ID NO: 488081
caauuuaaagaucuuacgu

SEQ ID NO: 488083 - RNA, 19 nt, Artificial Sequence
  Description of Artificial Sequence: Synthetic oligonucleotide
  Sense strand starting at position 3165 of SEQ ID NO: 317402
uuaauauugccuugagauu

SEQ ID NO: 488084 - RNA, 19 nt, Artificial Sequence
  Description of Artificial Sequence: Synthetic oligonucleotide
  Antisense Strand to SEQ ID NO: 488083
aaucucaaggcaauauuaa

SEQ ID NO: 488085 - RNA, 19 nt, Artificial Sequence
  Description of Artificial Sequence: Synthetic oligonucleotide
  Sense strand starting at position 3208 of SEQ ID NO: 317402
uugugaaaugcagauugca

SEQ ID NO: 488086 - RNA, 19 nt, Artificial Sequence
  Description of Artificial Sequence: Synthetic oligonucleotide
  Antisense Strand to SEQ ID NO: 488085
ugcaaucugcauuucacaa

SEQ ID NO: 488087 - RNA, 19 nt, Artificial Sequence
  Description of Artificial Sequence: Synthetic oligonucleotide
  Sense strand starting at position 3261 of SEQ ID NO: 317402
uuguguguaauugagauga

SEQ ID NO: 488088 - RNA, 19 nt, Artificial Sequence
  Description of Artificial Sequence: Synthetic oligonucleotide
  Antisense Strand to SEQ ID NO: 488087
ucaucucaauuacacacaa

SEQ ID NO: 488089 - RNA, 19 nt, Artificial Sequence
  Description of Artificial Sequence: Synthetic oligonucleotide
  Sense strand starting at position 3408 of SEQ ID NO: 317402
agugauaguguauagcuaa

SEQ ID NO: 488090 - RNA, 19 nt, Artificial Sequence
  Description of Artificial Sequence: Synthetic oligonucleotide
  Antisense Strand to SEQ ID NO: 488089
uuagcuauacacuaucacu

SEQ ID NO: 488091 - RNA, 19 nt, Artificial Sequence
  Description of Artificial Sequence: Synthetic oligonucleotide
  Sense strand starting at position 3456 of SEQ ID NO: 317402
ggaaauaugucucccuuaa

SEQ ID NO: 488092 - RNA, 19 nt, Artificial Sequence
  Description of Artificial Sequence: Synthetic oligonucleotide
  Antisense Strand to SEQ ID NO: 488091
uuaagggagacauauuucc

SEQ ID NO: 488093 - RNA, 19 nt, Artificial Sequence
  Description of Artificial Sequence: Synthetic oligonucleotide
  Sense strand starting at position 3469 of SEQ ID NO: 317402
ccuuaaauuggauguauuc

SEQ ID NO: 488094 - RNA, 19 nt, Artificial Sequence
  Description of Artificial Sequence: Synthetic oligonucleotide
  Antisense Strand to SEQ ID NO: 488093
gaauacauccaauuuaagg

SEQ ID NO: 488095 - RNA, 19 nt, Artificial Sequence
  Description of Artificial Sequence: Synthetic oligonucleotide
  Sense strand starting at position 3497 of SEQ ID NO: 317402
ugauaugauugguuuguag

SEQ ID NO: 488096 - RNA, 19 nt, Artificial Sequence
  Description of Artificial Sequence: Synthetic oligonucleotide
  Antisense Strand to SEQ ID NO: 488095
cuacaaaccaaucauauca

SEQ ID NO: 488097 - RNA, 19 nt, Artificial Sequence
  Description of Artificial Sequence: Synthetic oligonucleotide
  Sense strand starting at position 3505 of SEQ ID NO: 317402
uugguuuguagguaauaag

SEQ ID NO: 488098 - RNA, 19 nt, Artificial Sequence
  Description of Artificial Sequence: Synthetic oligonucleotide
  Antisense Strand to SEQ ID NO: 488097
cuuauuaccuacaaaccaa

SEQ ID NO: 488099 - RNA, 19 nt, Artificial Sequence
  Description of Artificial Sequence: Synthetic oligonucleotide
  Sense strand starting at position 3543 of SEQ ID NO: 317402
gaugacgacuaucucuaua

SEQ ID NO: 488100 - RNA, 19 nt, Artificial Sequence
  Description of Artificial Sequence: Synthetic oligonucleotide
  Antisense Strand to SEQ ID NO: 488099
uauagagauagucgucauc

SEQ ID NO: 488101 - RNA, 19 nt, Artificial Sequence
  Description of Artificial Sequence: Synthetic oligonucleotide
  Sense strand starting at position 3545 of SEQ ID NO: 317402
ugacgacuaucucuauaaa

SEQ ID NO: 488102 - RNA, 19 nt, Artificial Sequence
  Description of Artificial Sequence: Synthetic oligonucleotide
  Antisense Strand to SEQ ID NO: 488101
uuuauagagauagucguca

SEQ ID NO: 488103 - RNA, 19 nt, Artificial Sequence
  Description of Artificial Sequence: Synthetic oligonucleotide
  Sense strand starting at position 3646 of SEQ ID NO: 317402
ccgcauaagcgugucaugu

SEQ ID NO: 488104 - RNA, 19 nt, Artificial Sequence
  Description of Artificial Sequence: Synthetic oligonucleotide
  Antisense Strand to SEQ ID NO: 488103
acaugacacgcuuaugcgg

SEQ ID NO: 488105 - RNA, 19 nt, Artificial Sequence
  Description of Artificial Sequence: Synthetic oligonucleotide
  Sense strand starting at position 3647 of SEQ ID NO: 317402
cgcauaagcgugucauguu

SEQ ID NO: 488106 - RNA, 19 nt, Artificial Sequence
  Description of Artificial Sequence: Synthetic oligonucleotide
  Antisense Strand to SEQ ID NO: 488105
aacaugacacgcuuaugcg

SEQ ID NO: 488107 - RNA, 19 nt, Artificial Sequence
  Description of Artificial Sequence: Synthetic oligonucleotide
  Sense strand starting at position 3652 of SEQ ID NO: 317402
aagcgugucauguugucaa

SEQ ID NO: 488108 - RNA, 19 nt, Artificial Sequence
  Description of Artificial Sequence: Synthetic oligonucleotide
  Antisense Strand to SEQ ID NO: 488107
uugacaacaugacacgcuu

SEQ ID NO: 488109 - RNA, 19 nt, Artificial Sequence
  Description of Artificial Sequence: Synthetic oligonucleotide
  Sense strand starting at position 3654 of SEQ ID NO: 317402
gcgugucauguugucaauu

SEQ ID NO: 488110 - RNA, 19 nt, Artificial Sequence
  Description of Artificial Sequence: Synthetic oligonucleotide
  Antisense Strand to SEQ ID NO: 488109
aauugacaacaugacacgc

SEQ ID NO: 488111 - RNA, 19 nt, Artificial Sequence
  Description of Artificial Sequence: Synthetic oligonucleotide
  Sense strand starting at position 3802 of SEQ ID NO: 317402
cccagccaucuugagauga

SEQ ID NO: 488112 - RNA, 19 nt, Artificial Sequence
  Description of Artificial Sequence: Synthetic oligonucleotide
  Antisense Strand to SEQ ID NO: 488111
ucaucucaagauggcuggg

SEQ ID NO: 488113 - RNA, 19 nt, Artificial Sequence
  Description of Artificial Sequence: Synthetic oligonucleotide
  Sense strand starting at position 3929 of SEQ ID NO: 317402
uuaauuccagcgggauaga

SEQ ID NO: 488114 - RNA, 19 nt, Artificial Sequence
  Description of Artificial Sequence: Synthetic oligonucleotide
  Antisense Strand to SEQ ID NO: 488113
ucuaucccgcuggaauuaa

SEQ ID NO: 488115 - RNA, 19 nt, Artificial Sequence
  Description of Artificial Sequence: Synthetic oligonucleotide
  Sense strand starting at position 18 of SEQ ID NO: 317403
aggagacccuguccuguua

SEQ ID NO: 488116 - RNA, 19 nt, Artificial Sequence
  Description of Artificial Sequence: Synthetic oligonucleotide
  Antisense Strand to SEQ ID NO: 488115
uaacaggacagggucuccu

SEQ ID NO: 488117 - RNA, 19 nt, Artificial Sequence
  Description of Artificial Sequence: Synthetic oligonucleotide
  Sense strand starting at position 1182 of SEQ ID NO: 317403
augccugcgacagagaauu

SEQ ID NO: 488118 - RNA, 19 nt, Artificial Sequence
  Description of Artificial Sequence: Synthetic oligonucleotide
  Antisense Strand to SEQ ID NO: 488117
aauucucugucgcaggcau

SEQ ID NO: 488119 - RNA, 19 nt, Artificial Sequence
  Description of Artificial Sequence: Synthetic oligonucleotide
  Sense strand starting at position 1202 of SEQ ID NO: 317403
gagauagaagcucgugaau

SEQ ID NO: 488120 - RNA, 19 nt, Artificial Sequence
  Description of Artificial Sequence: Synthetic oligonucleotide
  Antisense Strand to SEQ ID NO: 488119
auucacgagcuucuaucuc

SEQ ID NO: 488121 - RNA, 19 nt, Artificial Sequence
  Description of Artificial Sequence: Synthetic oligonucleotide
  Sense strand starting at position 1438 of SEQ ID NO: 317403
cgccucugcgcguuaggaa

SEQ ID NO: 488122 - RNA, 19 nt, Artificial Sequence
  Description of Artificial Sequence: Synthetic oligonucleotide
  Antisense Strand to SEQ ID NO: 488121
uuccuaacgcgcagaggcg

SEQ ID NO: 488123 - RNA, 19 nt, Artificial Sequence
  Description of Artificial Sequence: Synthetic oligonucleotide
  Sense strand starting at position 1446 of SEQ ID NO: 317403
cgcguuaggaaucaauaca

SEQ ID NO: 488124 - RNA, 19 nt, Artificial Sequence
  Description of Artificial Sequence: Synthetic oligonucleotide
  Antisense Strand to SEQ ID NO: 488123
uguauugauuccuaacgcg

SEQ ID NO: 488125 - RNA, 19 nt, Artificial Sequence
  Description of Artificial Sequence: Synthetic oligonucleotide
  Sense strand starting at position 1583 of SEQ ID NO: 317403
gcauuaacggcucuguguu

SEQ ID NO: 488126 - RNA, 19 nt, Artificial Sequence
  Description of Artificial Sequence: Synthetic oligonucleotide
  Antisense Strand to SEQ ID NO: 488125
aacacagagccguuaaugc

SEQ ID NO: 488127 - RNA, 19 nt, Artificial Sequence
  Description of Artificial Sequence: Synthetic oligonucleotide
  Sense strand starting at position 1623 of SEQ ID NO: 317403
acuuuaaacgucuacuguu

SEQ ID NO: 488128 - RNA, 19 nt, Artificial Sequence
  Description of Artificial Sequence: Synthetic oligonucleotide
  Antisense Strand to SEQ ID NO: 488127
aacaguagacguuuaaagu

SEQ ID NO: 488129 - RNA, 19 nt, Artificial Sequence
  Description of Artificial Sequence: Synthetic oligonucleotide
  Sense strand starting at position 1642 of SEQ ID NO: 317403
cgguuaaggaaaggugaaa

SEQ ID NO: 488130 - RNA, 19 nt, Artificial Sequence
  Description of Artificial Sequence: Synthetic oligonucleotide
  Antisense Strand to SEQ ID NO: 488129
uuucaccuuuccuuaaccg

SEQ ID NO: 488131 - RNA, 19 nt, Artificial Sequence
  Description of Artificial Sequence: Synthetic oligonucleotide
  Sense strand starting at position 1692 of SEQ ID NO: 317403
uuacuuuaagagcauuagu

SEQ ID NO: 488132 - RNA, 19 nt, Artificial Sequence
  Description of Artificial Sequence: Synthetic oligonucleotide
  Antisense Strand to SEQ ID NO: 488131
acuaaugcucuuaaaguaa

SEQ ID NO: 488133 - RNA, 19 nt, Artificial Sequence
  Description of Artificial Sequence: Synthetic oligonucleotide
  Sense strand starting at position 1749 of SEQ ID NO: 317403
ccaguaaccuuagcuggaa

SEQ ID NO: 488134 - RNA, 19 nt, Artificial Sequence
  Description of Artificial Sequence: Synthetic oligonucleotide
  Antisense Strand to SEQ ID NO: 488133
uuccagcuaagguuacugg

SEQ ID NO: 488135 - RNA, 19 nt, Artificial Sequence
  Description of Artificial Sequence: Synthetic oligonucleotide
  Sense strand starting at position 1750 of SEQ ID NO: 317403
caguaaccuuagcuggaaa

SEQ ID NO: 488136 - RNA, 19 nt, Artificial Sequence
  Description of Artificial Sequence: Synthetic oligonucleotide
  Antisense Strand to SEQ ID NO: 488135
uuuccagcuaagguuacug

SEQ ID NO: 488137 - RNA, 19 nt, Artificial Sequence
  Description of Artificial Sequence: Synthetic oligonucleotide
  Sense strand starting at position 2118 of SEQ ID NO: 317403
ucguuuccucuuucguuua

SEQ ID NO: 488138 - RNA, 19 nt, Artificial Sequence
  Description of Artificial Sequence: Synthetic oligonucleotide
  Antisense Strand to SEQ ID NO: 488137
uaaacgaaagaggaaacga

SEQ ID NO: 488139 - RNA, 19 nt, Artificial Sequence
  Description of Artificial Sequence: Synthetic oligonucleotide
  Sense strand starting at position 2148 of SEQ ID NO: 317403
uuggaaauguugcccuaca

SEQ ID NO: 488140 - RNA, 19 nt, Artificial Sequence
  Description of Artificial Sequence: Synthetic oligonucleotide
  Antisense Strand to SEQ ID NO: 488139
uguagggcaacauuuccaa

SEQ ID NO: 488141 - RNA, 19 nt, Artificial Sequence
  Description of Artificial Sequence: Synthetic oligonucleotide
  Sense strand starting at position 2163 of SEQ ID NO: 317403
uacagacucguguaauaaa

SEQ ID NO: 488142 - RNA, 19 nt, Artificial Sequence
  Description of Artificial Sequence: Synthetic oligonucleotide
  Antisense Strand to SEQ ID NO: 488141
uuuauuacacgagucugua

SEQ ID NO: 488143 - RNA, 19 nt, Artificial Sequence
  Description of Artificial Sequence: Synthetic oligonucleotide
  Sense strand starting at position 2229 of SEQ ID NO: 317403
guuugucauagaggaauac

SEQ ID NO: 488144 - RNA, 19 nt, Artificial Sequence
  Description of Artificial Sequence: Synthetic oligonucleotide
  Antisense Strand to SEQ ID NO: 488143
guauuccucuaugacaaac

SEQ ID NO: 488145 - RNA, 19 nt, Artificial Sequence
  Description of Artificial Sequence: Synthetic oligonucleotide
  Sense strand starting at position 2240 of SEQ ID NO: 317403
aggaauacauucggauuua

SEQ ID NO: 488146 - RNA, 19 nt, Artificial Sequence
  Description of Artificial Sequence: Synthetic oligonucleotide
  Antisense Strand to SEQ ID NO: 488145
uaaauccgaauguauuccu

SEQ ID NO: 488147 - RNA, 19 nt, Artificial Sequence
  Description of Artificial Sequence: Synthetic oligonucleotide
  Sense strand starting at position 2241 of SEQ ID NO: 317403
ggaauacauucggauuuag

SEQ ID NO: 488148 - RNA, 19 nt, Artificial Sequence
  Description of Artificial Sequence: Synthetic oligonucleotide
  Antisense Strand to SEQ ID NO: 488147
cuaaauccgaauguauucc

SEQ ID NO: 488149 - RNA, 19 nt, Artificial Sequence
  Description of Artificial Sequence: Synthetic oligonucleotide
  Sense strand starting at position 2251 of SEQ ID NO: 317403
cggauuuaguuagcaaucu

SEQ ID NO: 488150 - RNA, 19 nt, Artificial Sequence
  Description of Artificial Sequence: Synthetic oligonucleotide
  Antisense Strand to SEQ ID NO: 488149
agauugcuaacuaaauccg

SEQ ID NO: 488151 - RNA, 19 nt, Artificial Sequence
  Description of Artificial Sequence: Synthetic oligonucleotide
  Sense strand starting at position 2298 of SEQ ID NO: 317403
gguggacucuacucuuaag

SEQ ID NO: 488152 - RNA, 19 nt, Artificial Sequence
  Description of Artificial Sequence: Synthetic oligonucleotide
  Antisense Strand to SEQ ID NO: 488151
cuuaagaguagaguccacc

SEQ ID NO: 488153 - RNA, 19 nt, Artificial Sequence
  Description of Artificial Sequence: Synthetic oligonucleotide
  Sense strand starting at position 2751 of SEQ ID NO: 317403
uuaguaauagcugauauga

SEQ ID NO: 488154 - RNA, 19 nt, Artificial Sequence
  Description of Artificial Sequence: Synthetic oligonucleotide
  Antisense Strand to SEQ ID NO: 488153
ucauaucagcuauuacuaa

SEQ ID NO: 488155 - RNA, 19 nt, Artificial Sequence
  Description of Artificial Sequence: Synthetic oligonucleotide
  Sense strand starting at position 2812 of SEQ ID NO: 317403
ucuuacaaacuaugggauu

SEQ ID NO: 488156 - RNA, 19 nt, Artificial Sequence
  Description of Artificial Sequence: Synthetic oligonucleotide
  Antisense Strand to SEQ ID NO: 488155
aaucccauaguuuguaaga

SEQ ID NO: 488157 - RNA, 19 nt, Artificial Sequence
  Description of Artificial Sequence: Synthetic oligonucleotide
  Sense strand starting at position 2813 of SEQ ID NO: 317403
cuuacaaacuaugggauuu

SEQ ID NO: 488158 - RNA, 19 nt, Artificial Sequence
  Description of Artificial Sequence: Synthetic oligonucleotide
  Antisense Strand to SEQ ID NO: 488157
aaaucccauaguuuguaag

SEQ ID NO: 488159 - RNA, 19 nt, Artificial Sequence
  Description of Artificial Sequence: Synthetic oligonucleotide
  Sense strand starting at position 2861 of SEQ ID NO: 317403
ucaugcugcagugaggaua

SEQ ID NO: 488160 - RNA, 19 nt, Artificial Sequence
  Description of Artificial Sequence: Synthetic oligonucleotide
  Antisense Strand to SEQ ID NO: 488159
uauccucacugcagcauga

SEQ ID NO: 488161 - RNA, 19 nt, Artificial Sequence
  Description of Artificial Sequence: Synthetic oligonucleotide
  Sense strand starting at position 2892 of SEQ ID NO: 317403
auugaagguuccguagaaa

SEQ ID NO: 488162 - RNA, 19 nt, Artificial Sequence
  Description of Artificial Sequence: Synthetic oligonucleotide
  Antisense Strand to SEQ ID NO: 488161
uuucuacggaaccuucaau

SEQ ID NO: 488163 - RNA, 19 nt, Artificial Sequence
  Description of Artificial Sequence: Synthetic oligonucleotide
  Sense strand starting at position 2895 of SEQ ID NO: 317403
gaagguuccguagaaacuu

SEQ ID NO: 488164 - RNA, 19 nt, Artificial Sequence
  Description of Artificial Sequence: Synthetic oligonucleotide
  Antisense Strand to SEQ ID NO: 488163
aaguuucuacggaaccuuc

SEQ ID NO: 488165 - RNA, 19 nt, Artificial Sequence
  Description of Artificial Sequence: Synthetic oligonucleotide
  Sense strand starting at position 2971 of SEQ ID NO: 317403
auauaucaggaguagcuua

SEQ ID NO: 488166 - RNA, 19 nt, Artificial Sequence
  Description of Artificial Sequence: Synthetic oligonucleotide
  Antisense Strand to SEQ ID NO: 488165
uaagcuacuccugauauau

SEQ ID NO: 488167 - RNA, 19 nt, Artificial Sequence
  Description of Artificial Sequence: Synthetic oligonucleotide
  Sense strand starting at position 3104 of SEQ ID NO: 317403
agugguucuguugaaacua

SEQ ID NO: 488168 - RNA, 19 nt, Artificial Sequence
  Description of Artificial Sequence: Synthetic oligonucleotide
  Antisense Strand to SEQ ID NO: 488167
uaguuucaacagaaccacu

SEQ ID NO: 488169 - RNA, 19 nt, Artificial Sequence
  Description of Artificial Sequence: Synthetic oligonucleotide
  Sense strand starting at position 3166 of SEQ ID NO: 317403
ucaaaugucugagcacuuu

SEQ ID NO: 488170 - RNA, 19 nt, Artificial Sequence
  Description of Artificial Sequence: Synthetic oligonucleotide
  Antisense Strand to SEQ ID NO: 488169
aaagugcucagacauuuga

SEQ ID NO: 488171 - RNA, 19 nt, Artificial Sequence
  Description of Artificial Sequence: Synthetic oligonucleotide
  Sense strand starting at position 3189 of SEQ ID NO: 317403
aauuaaaguuguguuugga

SEQ ID NO: 488172 - RNA, 19 nt, Artificial Sequence
  Description of Artificial Sequence: Synthetic oligonucleotide
  Antisense Strand to SEQ ID NO: 488171
uccaaacacaacuuuaauu

SEQ ID NO: 488173 - RNA, 19 nt, Artificial Sequence
  Description of Artificial Sequence: Synthetic oligonucleotide
  Sense strand starting at position 3204 of SEQ ID NO: 317403
uggaauugccucugaagaa

SEQ ID NO: 488174 - RNA, 19 nt, Artificial Sequence
  Description of Artificial Sequence: Synthetic oligonucleotide
  Antisense Strand to SEQ ID NO: 488173
uucuucagaggcaauucca

SEQ ID NO: 488175 - RNA, 19 nt, Artificial Sequence
  Description of Artificial Sequence: Synthetic oligonucleotide
  Sense strand starting at position 3221 of SEQ ID NO: 317403
aacacagagcauuguuaag

SEQ ID NO: 488176 - RNA, 19 nt, Artificial Sequence
  Description of Artificial Sequence: Synthetic oligonucleotide
  Antisense Strand to SEQ ID NO: 488175
cuuaacaaugcucuguguu

SEQ ID NO: 488177 - RNA, 19 nt, Artificial Sequence
  Description of Artificial Sequence: Synthetic oligonucleotide
  Sense strand starting at position 3223 of SEQ ID NO: 317403
cacagagcauuguuaagaa

SEQ ID NO: 488178 - RNA, 19 nt, Artificial Sequence
  Description of Artificial Sequence: Synthetic oligonucleotide
  Antisense Strand to SEQ ID NO: 488177
uucuuaacaaugcucugug

SEQ ID NO: 488179 - RNA, 19 nt, Artificial Sequence
  Description of Artificial Sequence: Synthetic oligonucleotide
  Sense strand starting at position 3421 of SEQ ID NO: 317403
uuacuagugauggauaggu

SEQ ID NO: 488180 - RNA, 19 nt, Artificial Sequence
  Description of Artificial Sequence: Synthetic oligonucleotide
  Antisense Strand to SEQ ID NO: 488179
accuauccaucacuaguaa

SEQ ID NO: 488181 - RNA, 19 nt, Artificial Sequence
  Description of Artificial Sequence: Synthetic oligonucleotide
  Sense strand starting at position 3423 of SEQ ID NO: 317403
acuagugauggauagguuu

SEQ ID NO: 488182 - RNA, 19 nt, Artificial Sequence
  Description of Artificial Sequence: Synthetic oligonucleotide
  Antisense Strand to SEQ ID NO: 488181
aaaccuauccaucacuagu

SEQ ID NO: 488183 - RNA, 19 nt, Artificial Sequence
  Description of Artificial Sequence: Synthetic oligonucleotide
  Sense strand starting at position 3430 of SEQ ID NO: 317403
auggauagguuucuuguga

SEQ ID NO: 488184 - RNA, 19 nt, Artificial Sequence
  Description of Artificial Sequence: Synthetic oligonucleotide
  Antisense Strand to SEQ ID NO: 488183
ucacaagaaaccuauccau

SEQ ID NO: 488185 - RNA, 19 nt, Artificial Sequence
  Description of Artificial Sequence: Synthetic oligonucleotide
  Sense strand starting at position 3431 of SEQ ID NO: 317403
uggauagguuucuugugaa

SEQ ID NO: 488186 - RNA, 19 nt, Artificial Sequence
  Description of Artificial Sequence: Synthetic oligonucleotide
  Antisense Strand to SEQ ID NO: 488185
uucacaagaaaccuaucca

SEQ ID NO: 488187 - RNA, 19 nt, Artificial Sequence
  Description of Artificial Sequence: Synthetic oligonucleotide
  Sense strand starting at position 3617 of SEQ ID NO: 317403
uugaaagauuucuauugca

SEQ ID NO: 488188 - RNA, 19 nt, Artificial Sequence
  Description of Artificial Sequence: Synthetic oligonucleotide
  Antisense Strand to SEQ ID NO: 488187
ugcaauagaaaucuuucaa

SEQ ID NO: 488189 - RNA, 19 nt, Artificial Sequence
  Description of Artificial Sequence: Synthetic oligonucleotide
  Sense strand starting at position 3770 of SEQ ID NO: 317403
aaauaugcuguacagaguu

SEQ ID NO: 488190 - RNA, 19 nt, Artificial Sequence
  Description of Artificial Sequence: Synthetic oligonucleotide
  Antisense Strand to SEQ ID NO: 488189
aacucuguacagcauauuu

SEQ ID NO: 488191 - RNA, 19 nt, Artificial Sequence
  Description of Artificial Sequence: Synthetic oligonucleotide
  Sense strand starting at position 3776 of SEQ ID NO: 317403
gcuguacagaguugaucaa

SEQ ID NO: 488192 - RNA, 19 nt, Artificial Sequence
  Description of Artificial Sequence: Synthetic oligonucleotide
  Antisense Strand to SEQ ID NO: 488191
uugaucaacucuguacagc

SEQ ID NO: 488193 - RNA, 19 nt, Artificial Sequence
  Description of Artificial Sequence: Synthetic oligonucleotide
  Sense strand starting at position 3798 of SEQ ID NO: 317403
cccuccaugucauuuagca

SEQ ID NO: 488194 - RNA, 19 nt, Artificial Sequence
  Description of Artificial Sequence: Synthetic oligonucleotide
  Antisense Strand to SEQ ID NO: 488193
ugcuaaaugacauggaggg

SEQ ID NO: 488195 - RNA, 19 nt, Artificial Sequence
  Description of Artificial Sequence: Synthetic oligonucleotide
  Sense strand starting at position 76 of SEQ ID NO: 317404
gucucuaaacuaugucuua

SEQ ID NO: 488196 - RNA, 19 nt, Artificial Sequence
  Description of Artificial Sequence: Synthetic oligonucleotide
  Antisense Strand to SEQ ID NO: 488195
uaagacauaguuuagagac

SEQ ID NO: 488197 - RNA, 19 nt, Artificial Sequence
  Description of Artificial Sequence: Synthetic oligonucleotide
  Sense strand starting at position 142 of SEQ ID NO: 317404
ucgaguuucuacuuuauuc

SEQ ID NO: 488198 - RNA, 19 nt, Artificial Sequence
  Description of Artificial Sequence: Synthetic oligonucleotide
  Antisense Strand to SEQ ID NO: 488197
gaauaaaguagaaacucga

SEQ ID NO: 488199 - RNA, 19 nt, Artificial Sequence
  Description of Artificial Sequence: Synthetic oligonucleotide
  Sense strand starting at position 171 of SEQ ID NO: 317404
gcgcaugaggaguaacaca

SEQ ID NO: 488200 - RNA, 19 nt, Artificial Sequence
  Description of Artificial Sequence: Synthetic oligonucleotide
  Antisense Strand to SEQ ID NO: 488199
uguguuacuccucaugcgc

SEQ ID NO: 488201 - RNA, 19 nt, Artificial Sequence
  Description of Artificial Sequence: Synthetic oligonucleotide
  Sense strand starting at position 215 of SEQ ID NO: 317404
cggaguccucaacaucuaa

SEQ ID NO: 488202 - RNA, 19 nt, Artificial Sequence
  Description of Artificial Sequence: Synthetic oligonucleotide
  Antisense Strand to SEQ ID NO: 488201
uuagauguugaggacuccg

SEQ ID NO: 488203 - RNA, 19 nt, Artificial Sequence
  Description of Artificial Sequence: Synthetic oligonucleotide
  Sense strand starting at position 334 of SEQ ID NO: 317404
cgcagaggauuugaauagu

SEQ ID NO: 488204 - RNA, 19 nt, Artificial Sequence
  Description of Artificial Sequence: Synthetic oligonucleotide
  Antisense Strand to SEQ ID NO: 488203
acuauucaaauccucugcg

SEQ ID NO: 488205 - RNA, 19 nt, Artificial Sequence
  Description of Artificial Sequence: Synthetic oligonucleotide
  Sense strand starting at position 345 of SEQ ID NO: 317404
ugaauaguguaacccauaa

SEQ ID NO: 488206 - RNA, 19 nt, Artificial Sequence
  Description of Artificial Sequence: Synthetic oligonucleotide
  Antisense Strand to SEQ ID NO: 488205
uuauggguuacacuauuca

SEQ ID NO: 488207 - RNA, 19 nt, Artificial Sequence
  Description of Artificial Sequence: Synthetic oligonucleotide
  Sense strand starting at position 389 of SEQ ID NO: 317404
uuccaaugauaguuguaac

SEQ ID NO: 488208 - RNA, 19 nt, Artificial Sequence
  Description of Artificial Sequence: Synthetic oligonucleotide
  Antisense Strand to SEQ ID NO: 488207
guuacaacuaucauuggaa

SEQ ID NO: 488209 - RNA, 19 nt, Artificial Sequence
  Description of Artificial Sequence: Synthetic oligonucleotide
  Sense strand starting at position 413 of SEQ ID NO: 317404
ucauacuggcugggaaaua

SEQ ID NO: 488210 - RNA, 19 nt, Artificial Sequence
  Description of Artificial Sequence: Synthetic oligonucleotide
  Antisense Strand to SEQ ID NO: 488209
uauuucccagccaguauga

SEQ ID NO: 488211 - RNA, 19 nt, Artificial Sequence
  Description of Artificial Sequence: Synthetic oligonucleotide
  Sense strand starting at position 424 of SEQ ID NO: 317404
gggaaauaaaguugccaga

SEQ ID NO: 488212 - RNA, 19 nt, Artificial Sequence
  Description of Artificial Sequence: Synthetic oligonucleotide
  Antisense Strand to SEQ ID NO: 488211
ucuggcaacuuuauuuccc

SEQ ID NO: 488213 - RNA, 19 nt, Artificial Sequence
  Description of Artificial Sequence: Synthetic oligonucleotide
  Sense strand starting at position 426 of SEQ ID NO: 317404
gaaauaaaguugccagaca

SEQ ID NO: 488214 - RNA, 19 nt, Artificial Sequence
  Description of Artificial Sequence: Synthetic oligonucleotide
  Antisense Strand to SEQ ID NO: 488213
ugucuggcaacuuuauuuc

SEQ ID NO: 488215 - RNA, 19 nt, Artificial Sequence
  Description of Artificial Sequence: Synthetic oligonucleotide
  Sense strand starting at position 573 of SEQ ID NO: 317404
cgcgaauggaaguagaaua

SEQ ID NO: 488216 - RNA, 19 nt, Artificial Sequence
  Description of Artificial Sequence: Synthetic oligonucleotide
  Antisense Strand to SEQ ID NO: 488215
uauucuacuuccauucgcg

SEQ ID NO: 488217 - RNA, 19 nt, Artificial Sequence
  Description of Artificial Sequence: Synthetic oligonucleotide
  Sense strand starting at position 963 of SEQ ID NO: 317404
ugagguuaccaugagcuca

SEQ ID NO: 488218 - RNA, 19 nt, Artificial Sequence
  Description of Artificial Sequence: Synthetic oligonucleotide
  Antisense Strand to SEQ ID NO: 488217
ugagcucaugguaaccuca

SEQ ID NO: 488219 - RNA, 19 nt, Artificial Sequence
  Description of Artificial Sequence: Synthetic oligonucleotide
  Sense strand starting at position 1609 of SEQ ID NO: 317404
aggagacccuguccuguua

SEQ ID NO: 488220 - RNA, 19 nt, Artificial Sequence
  Description of Artificial Sequence: Synthetic oligonucleotide
  Antisense Strand to SEQ ID NO: 488219
uaacaggacagggucuccu

SEQ ID NO: 488221 - RNA, 19 nt, Artificial Sequence
  Description of Artificial Sequence: Synthetic oligonucleotide
  Sense strand starting at position 2768 of SEQ ID NO: 317404
ccgaaaugccugcgacaga

SEQ ID NO: 488222 - RNA, 19 nt, Artificial Sequence
  Description of Artificial Sequence: Synthetic oligonucleotide
  Antisense Strand to SEQ ID NO: 488221
ucugucgcaggcauuucgg

SEQ ID NO: 488223 - RNA, 19 nt, Artificial Sequence
  Description of Artificial Sequence: Synthetic oligonucleotide
  Sense strand starting at position 2773 of SEQ ID NO: 317404
augccugcgacagagaauu

SEQ ID NO: 488224 - RNA, 19 nt, Artificial Sequence
  Description of Artificial Sequence: Synthetic oligonucleotide
  Antisense Strand to SEQ ID NO: 488223
aauucucugucgcaggcau

SEQ ID NO: 488225 - RNA, 19 nt, Artificial Sequence
  Description of Artificial Sequence: Synthetic oligonucleotide
  Sense strand starting at position 2793 of SEQ ID NO: 317404
gagauagaagcucgugaau

SEQ ID NO: 488226 - RNA, 19 nt, Artificial Sequence
  Description of Artificial Sequence: Synthetic oligonucleotide
  Antisense Strand to SEQ ID NO: 488225
auucacgagcuucuaucuc

SEQ ID NO: 488227 - RNA, 19 nt, Artificial Sequence
  Description of Artificial Sequence: Synthetic oligonucleotide
  Sense strand starting at position 2808 of SEQ ID NO: 317404
gaaugucccuuucuucgaa

SEQ ID NO: 488228 - RNA, 19 nt, Artificial Sequence
  Description of Artificial Sequence: Synthetic oligonucleotide
  Antisense Strand to SEQ ID NO: 488227
uucgaagaaagggacauuc

SEQ ID NO: 488229 - RNA, 19 nt, Artificial Sequence
  Description of Artificial Sequence: Synthetic oligonucleotide
  Sense strand starting at position 3029 of SEQ ID NO: 317404
cgccucugcgcguuaggaa

SEQ ID NO: 488230 - RNA, 19 nt, Artificial Sequence
  Description of Artificial Sequence: Synthetic oligonucleotide
  Antisense Strand to SEQ ID NO: 488229
uuccuaacgcgcagaggcg

SEQ ID NO: 488231 - RNA, 19 nt, Artificial Sequence
  Description of Artificial Sequence: Synthetic oligonucleotide
  Sense strand starting at position 3037 of SEQ ID NO: 317404
cgcguuaggaaucaauaca

SEQ ID NO: 488232 - RNA, 19 nt, Artificial Sequence
  Description of Artificial Sequence: Synthetic oligonucleotide
  Antisense Strand to SEQ ID NO: 488231
uguauugauuccuaacgcg

SEQ ID NO: 488233 - RNA, 19 nt, Artificial Sequence
  Description of Artificial Sequence: Synthetic oligonucleotide
  Sense strand starting at position 3096 of SEQ ID NO: 317404
gggauucggucgccaacaa

SEQ ID NO: 488234 - RNA, 19 nt, Artificial Sequence
  Description of Artificial Sequence: Synthetic oligonucleotide
  Antisense Strand to SEQ ID NO: 488233
uuguuggcgaccgaauccc

SEQ ID NO: 488235 - RNA, 19 nt, Artificial Sequence
  Description of Artificial Sequence: Synthetic oligonucleotide
  Sense strand starting at position 3097 of SEQ ID NO: 317404
ggauucggucgccaacaau

SEQ ID NO: 488236 - RNA, 19 nt, Artificial Sequence
  Description of Artificial Sequence: Synthetic oligonucleotide
  Antisense Strand to SEQ ID NO: 488235
auuguuggcgaccgaaucc

SEQ ID NO: 488237 - RNA, 19 nt, Artificial Sequence
  Description of Artificial Sequence: Synthetic oligonucleotide
  Sense strand starting at position 3174 of SEQ ID NO: 317404
gcauuaacggcucuguguu

SEQ ID NO: 488238 - RNA, 19 nt, Artificial Sequence
  Description of Artificial Sequence: Synthetic oligonucleotide
  Antisense Strand to SEQ ID NO: 488237
aacacagagccguuaaugc

SEQ ID NO: 488239 - RNA, 19 nt, Artificial Sequence
  Description of Artificial Sequence: Synthetic oligonucleotide
  Sense strand starting at position 3214 of SEQ ID NO: 317404
acuuuaaacgucuacuguu

SEQ ID NO: 488240 - RNA, 19 nt, Artificial Sequence
  Description of Artificial Sequence: Synthetic oligonucleotide
  Antisense Strand to SEQ ID NO: 488239
aacaguagacguuuaaagu

SEQ ID NO: 488241 - RNA, 19 nt, Artificial Sequence
  Description of Artificial Sequence: Synthetic oligonucleotide
  Sense strand starting at position 3233 of SEQ ID NO: 317404
cgguuaaggaaaggugaaa

SEQ ID NO: 488242 - RNA, 19 nt, Artificial Sequence
  Description of Artificial Sequence: Synthetic oligonucleotide
  Antisense Strand to SEQ ID NO: 488241
uuucaccuuuccuuaaccg

SEQ ID NO: 488243 - RNA, 19 nt, Artificial Sequence
  Description of Artificial Sequence: Synthetic oligonucleotide
  Sense strand starting at position 3283 of SEQ ID NO: 317404
uuacuuuaagagcauuagu

SEQ ID NO: 488244 - RNA, 19 nt, Artificial Sequence
  Description of Artificial Sequence: Synthetic oligonucleotide
  Antisense Strand to SEQ ID NO: 488243
acuaaugcucuuaaaguaa

SEQ ID NO: 488245 - RNA, 19 nt, Artificial Sequence
  Description of Artificial Sequence: Synthetic oligonucleotide
  Sense strand starting at position 3311 of SEQ ID NO: 317404
gggaaugcuaccgguguuu

SEQ ID NO: 488246 - RNA, 19 nt, Artificial Sequence
  Description of Artificial Sequence: Synthetic oligonucleotide
  Antisense Strand to SEQ ID NO: 488245
aaacaccgguagcauuccc

SEQ ID NO: 488247 - RNA, 19 nt, Artificial Sequence
  Description of Artificial Sequence: Synthetic oligonucleotide
  Sense strand starting at position 3340 of SEQ ID NO: 317404
ccaguaaccuuagcuggaa

SEQ ID NO: 488248 - RNA, 19 nt, Artificial Sequence
  Description of Artificial Sequence: Synthetic oligonucleotide
  Antisense Strand to SEQ ID NO: 488247
uuccagcuaagguuacugg

SEQ ID NO: 488249 - RNA, 19 nt, Artificial Sequence
  Description of Artificial Sequence: Synthetic oligonucleotide
  Sense strand starting at position 3341 of SEQ ID NO: 317404
caguaaccuuagcuggaaa

SEQ ID NO: 488250 - RNA, 19 nt, Artificial Sequence
  Description of Artificial Sequence: Synthetic oligonucleotide
  Antisense Strand to SEQ ID NO: 488249
uuuccagcuaagguuacug

SEQ ID NO: 488251 - RNA, 19 nt, Artificial Sequence
  Description of Artificial Sequence: Synthetic oligonucleotide
  Sense strand starting at position 3647 of SEQ ID NO: 317404
ggugauaucaugugucaau

SEQ ID NO: 488252 - RNA, 19 nt, Artificial Sequence
  Description of Artificial Sequence: Synthetic oligonucleotide
  Antisense Strand to SEQ ID NO: 488251
auugacacaugauaucacc

SEQ ID NO: 488253 - RNA, 19 nt, Artificial Sequence
  Description of Artificial Sequence: Synthetic oligonucleotide
  Sense strand starting at position 3648 of SEQ ID NO: 317404
gugauaucaugugucaauc

SEQ ID NO: 488254 - RNA, 19 nt, Artificial Sequence
  Description of Artificial Sequence: Synthetic oligonucleotide
  Antisense Strand to SEQ ID NO: 488253
gauugacacaugauaucac

SEQ ID NO: 488255 - RNA, 19 nt, Artificial Sequence
  Description of Artificial Sequence: Synthetic oligonucleotide
  Sense strand starting at position 3709 of SEQ ID NO: 317404
ucguuuccucuuucguuua

SEQ ID NO: 488256 - RNA, 19 nt, Artificial Sequence
  Description of Artificial Sequence: Synthetic oligonucleotide
  Antisense Strand to SEQ ID NO: 488255
uaaacgaaagaggaaacga

SEQ ID NO: 488257 - RNA, 19 nt, Artificial Sequence
  Description of Artificial Sequence: Synthetic oligonucleotide
  Sense strand starting at position 3739 of SEQ ID NO: 317404
uuggaaauguugcccuaca

SEQ ID NO: 488258 - RNA, 19 nt, Artificial Sequence
  Description of Artificial Sequence: Synthetic oligonucleotide
  Antisense Strand to SEQ ID NO: 488257
uguagggcaacauuuccaa

SEQ ID NO: 488259 - RNA, 19 nt, Artificial Sequence
  Description of Artificial Sequence: Synthetic oligonucleotide
  Sense strand starting at position 3754 of SEQ ID NO: 317404
uacagacucguguaauaaa

SEQ ID NO: 488260 - RNA, 19 nt, Artificial Sequence
  Description of Artificial Sequence: Synthetic oligonucleotide
  Antisense Strand to SEQ ID NO: 488259
uuuauuacacgagucugua

SEQ ID NO: 488261 - RNA, 19 nt, Artificial Sequence
  Description of Artificial Sequence: Synthetic oligonucleotide
  Sense strand starting at position 3811 of SEQ ID NO: 317404
gcaaaugcaguuugucaua

SEQ ID NO: 488262 - RNA, 19 nt, Artificial Sequence
  Description of Artificial Sequence: Synthetic oligonucleotide
  Antisense Strand to SEQ ID NO: 488261
uaugacaaacugcauuugc

SEQ ID NO: 488263 - RNA, 19 nt, Artificial Sequence
  Description of Artificial Sequence: Synthetic oligonucleotide
  Sense strand starting at position 3820 of SEQ ID NO: 317404
guuugucauagaggaauac

SEQ ID NO: 488264 - RNA, 19 nt, Artificial Sequence
  Description of Artificial Sequence: Synthetic oligonucleotide
  Antisense Strand to SEQ ID NO: 488263
guauuccucuaugacaaac

SEQ ID NO: 488265 - RNA, 19 nt, Artificial Sequence
  Description of Artificial Sequence: Synthetic oligonucleotide
  Sense strand starting at position 3831 of SEQ ID NO: 317404
aggaauacauucggauuua

SEQ ID NO: 488266 - RNA, 19 nt, Artificial Sequence
  Description of Artificial Sequence: Synthetic oligonucleotide
  Antisense Strand to SEQ ID NO: 488265
uaaauccgaauguauuccu

SEQ ID NO: 488267 - RNA, 19 nt, Artificial Sequence
  Description of Artificial Sequence: Synthetic oligonucleotide
  Sense strand starting at position 3832 of SEQ ID NO: 317404
ggaauacauucggauuuag

SEQ ID NO: 488268 - RNA, 19 nt, Artificial Sequence
  Description of Artificial Sequence: Synthetic oligonucleotide
  Antisense Strand to SEQ ID NO: 488267
cuaaauccgaauguauucc

SEQ ID NO: 488269 - RNA, 19 nt, Artificial Sequence
  Description of Artificial Sequence: Synthetic oligonucleotide
  Sense strand starting at position 3842 of SEQ ID NO: 317404
cggauuuaguuagcaaucu

SEQ ID NO: 488270 - RNA, 19 nt, Artificial Sequence
  Description of Artificial Sequence: Synthetic oligonucleotide
  Antisense Strand to SEQ ID NO: 488269
agauugcuaacuaaauccg

SEQ ID NO: 488271 - RNA, 19 nt, Artificial Sequence
  Description of Artificial Sequence: Synthetic oligonucleotide
  Sense strand starting at position 3843 of SEQ ID NO: 317404
ggauuuaguuagcaaucuu

SEQ ID NO: 488272 - RNA, 19 nt, Artificial Sequence
  Description of Artificial Sequence: Synthetic oligonucleotide
  Antisense Strand to SEQ ID NO: 488271
aagauugcuaacuaaaucc

SEQ ID NO: 488273 - RNA, 19 nt, Artificial Sequence
  Description of Artificial Sequence: Synthetic oligonucleotide
  Sense strand starting at position 3889 of SEQ ID NO: 317404
gguggacucuacucuuaag

SEQ ID NO: 488274 - RNA, 19 nt, Artificial Sequence
  Description of Artificial Sequence: Synthetic oligonucleotide
  Antisense Strand to SEQ ID NO: 488273
cuuaagaguagaguccacc

SEQ ID NO: 488275 - RNA, 19 nt, Artificial Sequence
  Description of Artificial Sequence: Synthetic oligonucleotide
  Sense strand starting at position 44 of SEQ ID NO: 317405
gccuaaaccgccuaguaau

SEQ ID NO: 488276 - RNA, 19 nt, Artificial Sequence
  Description of Artificial Sequence: Synthetic oligonucleotide
  Antisense Strand to SEQ ID NO: 488275
auuacuaggcgguuuaggc

SEQ ID NO: 488277 - RNA, 19 nt, Artificial Sequence
  Description of Artificial Sequence: Synthetic oligonucleotide
  Sense strand starting at position 107 of SEQ ID NO: 317405
agaguccaauucuaggaga

SEQ ID NO: 488278 - RNA, 19 nt, Artificial Sequence
  Description of Artificial Sequence: Synthetic oligonucleotide
  Antisense Strand to SEQ ID NO: 488277
ucuccuagaauuggacucu

SEQ ID NO: 488279 - RNA, 19 nt, Artificial Sequence
  Description of Artificial Sequence: Synthetic oligonucleotide
  Sense strand starting at position 172 of SEQ ID NO: 317405
ugccaugaacauuauaagu

SEQ ID NO: 488280 - RNA, 19 nt, Artificial Sequence
  Description of Artificial Sequence: Synthetic oligonucleotide
  Antisense Strand to SEQ ID NO: 488279
acuuauaauguucauggca

SEQ ID NO: 488281 - RNA, 19 nt, Artificial Sequence
  Description of Artificial Sequence: Synthetic oligonucleotide
  Sense strand starting at position 206 of SEQ ID NO: 317405
gaagcagaaucaggagaaa

SEQ ID NO: 488282 - RNA, 19 nt, Artificial Sequence
  Description of Artificial Sequence: Synthetic oligonucleotide
  Antisense Strand to SEQ ID NO: 488281
uuucuccugauucugcuuc

SEQ ID NO: 488283 - RNA, 19 nt, Artificial Sequence
  Description of Artificial Sequence: Synthetic oligonucleotide
  Sense strand starting at position 228 of SEQ ID NO: 317405
augccuuccuguuugugaa

SEQ ID NO: 488284 - RNA, 19 nt, Artificial Sequence
  Description of Artificial Sequence: Synthetic oligonucleotide
  Antisense Strand to SEQ ID NO: 488283
uucacaaacaggaaggcau

SEQ ID NO: 488285 - RNA, 19 nt, Artificial Sequence
  Description of Artificial Sequence: Synthetic oligonucleotide
  Sense strand starting at position 229 of SEQ ID NO: 317405
ugccuuccuguuugugaau

SEQ ID NO: 488286 - RNA, 19 nt, Artificial Sequence
  Description of Artificial Sequence: Synthetic oligonucleotide
  Antisense Strand to SEQ ID NO: 488285
auucacaaacaggaaggca

SEQ ID NO: 488287 - RNA, 19 nt, Artificial Sequence
  Description of Artificial Sequence: Synthetic oligonucleotide
  Sense strand starting at position 266 of SEQ ID NO: 317405
caugccuucgcagggaaua

SEQ ID NO: 488288 - RNA, 19 nt, Artificial Sequence
  Description of Artificial Sequence: Synthetic oligonucleotide
  Antisense Strand to SEQ ID NO: 488287
uauucccugcgaaggcaug

SEQ ID NO: 488289 - RNA, 19 nt, Artificial Sequence
  Description of Artificial Sequence: Synthetic oligonucleotide
  Sense strand starting at position 286 of SEQ ID NO: 317405
ugaguauaagcaggagaau

SEQ ID NO: 488290 - RNA, 19 nt, Artificial Sequence
  Description of Artificial Sequence: Synthetic oligonucleotide
  Antisense Strand to SEQ ID NO: 488289
auucuccugcuuauacuca

SEQ ID NO: 488291 - RNA, 19 nt, Artificial Sequence
  Description of Artificial Sequence: Synthetic oligonucleotide
  Sense strand starting at position 295 of SEQ ID NO: 317405
gcaggagaauaacucucau

SEQ ID NO: 488292 - RNA, 19 nt, Artificial Sequence
  Description of Artificial Sequence: Synthetic oligonucleotide
  Antisense Strand to SEQ ID NO: 488291
augagaguuauucuccugc

SEQ ID NO: 488293 - RNA, 19 nt, Artificial Sequence
  Description of Artificial Sequence: Synthetic oligonucleotide
  Sense strand starting at position 376 of SEQ ID NO: 317405
agaaauugagaauggcuuu

SEQ ID NO: 488294 - RNA, 19 nt, Artificial Sequence
  Description of Artificial Sequence: Synthetic oligonucleotide
  Antisense Strand to SEQ ID NO: 488293
aaagccauucucaauuucu

SEQ ID NO: 488295 - RNA, 19 nt, Artificial Sequence
  Description of Artificial Sequence: Synthetic oligonucleotide
  Sense strand starting at position 411 of SEQ ID NO: 317405
uguugugugcuguuauaug

SEQ ID NO: 488296 - RNA, 19 nt, Artificial Sequence
  Description of Artificial Sequence: Synthetic oligonucleotide
  Antisense Strand to SEQ ID NO: 488295
cauauaacagcacacaaca

SEQ ID NO: 488297 - RNA, 19 nt, Artificial Sequence
  Description of Artificial Sequence: Synthetic oligonucleotide
  Sense strand starting at position 632 of SEQ ID NO: 317405
caauguauaguccagugaa

SEQ ID NO: 488298 - RNA, 19 nt, Artificial Sequence
  Description of Artificial Sequence: Synthetic oligonucleotide
  Antisense Strand to SEQ ID NO: 488297
uucacuggacuauacauug

SEQ ID NO: 488299 - RNA, 19 nt, Artificial Sequence
  Description of Artificial Sequence: Synthetic oligonucleotide
  Sense strand starting at position 635 of SEQ ID NO: 317405
uguauaguccagugaauga

SEQ ID NO: 488300 - RNA, 19 nt, Artificial Sequence
  Description of Artificial Sequence: Synthetic oligonucleotide
  Antisense Strand to SEQ ID NO: 488299
ucauucacuggacuauaca

SEQ ID NO: 488301 - RNA, 19 nt, Artificial Sequence
  Description of Artificial Sequence: Synthetic oligonucleotide
  Sense strand starting at position 639 of SEQ ID NO: 317405
uaguccagugaaugauaua

SEQ ID NO: 488302 - RNA, 19 nt, Artificial Sequence
  Description of Artificial Sequence: Synthetic oligonucleotide
  Antisense Strand to SEQ ID NO: 488301
uauaucauucacuggacua

SEQ ID NO: 488303 - RNA, 19 nt, Artificial Sequence
  Description of Artificial Sequence: Synthetic oligonucleotide
  Sense strand starting at position 642 of SEQ ID NO: 317405
uccagugaaugauauauaa

SEQ ID NO: 488304 - RNA, 19 nt, Artificial Sequence
  Description of Artificial Sequence: Synthetic oligonucleotide
  Antisense Strand to SEQ ID NO: 488303
uuauauaucauucacugga

SEQ ID NO: 488305 - RNA, 19 nt, Artificial Sequence
  Description of Artificial Sequence: Synthetic oligonucleotide
  Sense strand starting at position 673 of SEQ ID NO: 317405
uugaaauccugagaggauu

SEQ ID NO: 488306 - RNA, 19 nt, Artificial Sequence
  Description of Artificial Sequence: Synthetic oligonucleotide
  Antisense Strand to SEQ ID NO: 488305
aauccucucaggauuucaa

SEQ ID NO: 488307 - RNA, 19 nt, Artificial Sequence
  Description of Artificial Sequence: Synthetic oligonucleotide
  Sense strand starting at position 747 of SEQ ID NO: 317405
gugugaggccuuuaacgca

SEQ ID NO: 488308 - RNA, 19 nt, Artificial Sequence
  Description of Artificial Sequence: Synthetic oligonucleotide
  Antisense Strand to SEQ ID NO: 488307
ugcguuaaaggccucacac

SEQ ID NO: 488309 - RNA, 19 nt, Artificial Sequence
  Description of Artificial Sequence: Synthetic oligonucleotide
  Sense strand starting at position 769 of SEQ ID NO: 317405
uagggaaauccuggcaguu

SEQ ID NO: 488310 - RNA, 19 nt, Artificial Sequence
  Description of Artificial Sequence: Synthetic oligonucleotide
  Antisense Strand to SEQ ID NO: 488309
aacugccaggauuucccua

SEQ ID NO: 488311 - RNA, 19 nt, Artificial Sequence
  Description of Artificial Sequence: Synthetic oligonucleotide
  Sense strand starting at position 1006 of SEQ ID NO: 317405
aguggugaacuagaguauu

SEQ ID NO: 488312 - RNA, 19 nt, Artificial Sequence
  Description of Artificial Sequence: Synthetic oligonucleotide
  Antisense Strand to SEQ ID NO: 488311
aauacucuaguucaccacu

SEQ ID NO: 488313 - RNA, 19 nt, Artificial Sequence
  Description of Artificial Sequence: Synthetic oligonucleotide
  Sense strand starting at position 1180 of SEQ ID NO: 317405
gucucuaaacuaugucuua

SEQ ID NO: 488314 - RNA, 19 nt, Artificial Sequence
  Description of Artificial Sequence: Synthetic oligonucleotide
  Antisense Strand to SEQ ID NO: 488313
uaagacauaguuuagagac

SEQ ID NO: 488315 - RNA, 19 nt, Artificial Sequence
  Description of Artificial Sequence: Synthetic oligonucleotide
  Sense strand starting at position 1246 of SEQ ID NO: 317405
ucgaguuucuacuuuauuc

SEQ ID NO: 488316 - RNA, 19 nt, Artificial Sequence
  Description of Artificial Sequence: Synthetic oligonucleotide
  Antisense Strand to SEQ ID NO: 488315
gaauaaaguagaaacucga

SEQ ID NO: 488317 - RNA, 19 nt, Artificial Sequence
  Description of Artificial Sequence: Synthetic oligonucleotide
  Sense strand starting at position 1275 of SEQ ID NO: 317405
gcgcaugaggaguaacaca

SEQ ID NO: 488318 - RNA, 19 nt, Artificial Sequence
  Description of Artificial Sequence: Synthetic oligonucleotide
  Antisense Strand to SEQ ID NO: 488317
uguguuacuccucaugcgc

SEQ ID NO: 488319 - RNA, 19 nt, Artificial Sequence
  Description of Artificial Sequence: Synthetic oligonucleotide
  Sense strand starting at position 1309 of SEQ ID NO: 317405
gauuuagucucggaguccu

SEQ ID NO: 488320 - RNA, 19 nt, Artificial Sequence
  Description of Artificial Sequence: Synthetic oligonucleotide
  Antisense Strand to SEQ ID NO: 488319
aggacuccgagacuaaauc

SEQ ID NO: 488321 - RNA, 19 nt, Artificial Sequence
  Description of Artificial Sequence: Synthetic oligonucleotide
  Sense strand starting at position 1319 of SEQ ID NO: 317405
cggaguccucaacaucuaa

SEQ ID NO: 488322 - RNA, 19 nt, Artificial Sequence
  Description of Artificial Sequence: Synthetic oligonucleotide
  Antisense Strand to SEQ ID NO: 488321
uuagauguugaggacuccg

SEQ ID NO: 488323 - RNA, 19 nt, Artificial Sequence
  Description of Artificial Sequence: Synthetic oligonucleotide
  Sense strand starting at position 1438 of SEQ ID NO: 317405
cgcagaggauuugaauagu

SEQ ID NO: 488324 - RNA, 19 nt, Artificial Sequence
  Description of Artificial Sequence: Synthetic oligonucleotide
  Antisense Strand to SEQ ID NO: 488323
acuauucaaauccucugcg

SEQ ID NO: 488325 - RNA, 19 nt, Artificial Sequence
  Description of Artificial Sequence: Synthetic oligonucleotide
  Sense strand starting at position 1449 of SEQ ID NO: 317405
ugaauaguguaacccauaa

SEQ ID NO: 488326 - RNA, 19 nt, Artificial Sequence
  Description of Artificial Sequence: Synthetic oligonucleotide
  Antisense Strand to SEQ ID NO: 488325
uuauggguuacacuauuca

SEQ ID NO: 488327 - RNA, 19 nt, Artificial Sequence
  Description of Artificial Sequence: Synthetic oligonucleotide
  Sense strand starting at position 1493 of SEQ ID NO: 317405
uuccaaugauaguuguaac

SEQ ID NO: 488328 - RNA, 19 nt, Artificial Sequence
  Description of Artificial Sequence: Synthetic oligonucleotide
  Antisense Strand to SEQ ID NO: 488327
guuacaacuaucauuggaa

SEQ ID NO: 488329 - RNA, 19 nt, Artificial Sequence
  Description of Artificial Sequence: Synthetic oligonucleotide
  Sense strand starting at position 1517 of SEQ ID NO: 317405
ucauacuggcugggaaaua

SEQ ID NO: 488330 - RNA, 19 nt, Artificial Sequence
  Description of Artificial Sequence: Synthetic oligonucleotide
  Antisense Strand to SEQ ID NO: 488329
uauuucccagccaguauga

SEQ ID NO: 488331 - RNA, 19 nt, Artificial Sequence
  Description of Artificial Sequence: Synthetic oligonucleotide
  Sense strand starting at position 1518 of SEQ ID NO: 317405
cauacuggcugggaaauaa

SEQ ID NO: 488332 - RNA, 19 nt, Artificial Sequence
  Description of Artificial Sequence: Synthetic oligonucleotide
  Antisense Strand to SEQ ID NO: 488331
uuauuucccagccaguaug

SEQ ID NO: 488333 - RNA, 19 nt, Artificial Sequence
  Description of Artificial Sequence: Synthetic oligonucleotide
  Sense strand starting at position 1528 of SEQ ID NO: 317405
gggaaauaaaguugccaga

SEQ ID NO: 488334 - RNA, 19 nt, Artificial Sequence
  Description of Artificial Sequence: Synthetic oligonucleotide
  Antisense Strand to SEQ ID NO: 488333
ucuggcaacuuuauuuccc

SEQ ID NO: 488335 - RNA, 19 nt, Artificial Sequence
  Description of Artificial Sequence: Synthetic oligonucleotide
  Sense strand starting at position 1530 of SEQ ID NO: 317405
gaaauaaaguugccagaca

SEQ ID NO: 488336 - RNA, 19 nt, Artificial Sequence
  Description of Artificial Sequence: Synthetic oligonucleotide
  Antisense Strand to SEQ ID NO: 488335
ugucuggcaacuuuauuuc

SEQ ID NO: 488337 - RNA, 19 nt, Artificial Sequence
  Description of Artificial Sequence: Synthetic oligonucleotide
  Sense strand starting at position 1677 of SEQ ID NO: 317405
cgcgaauggaaguagaaua

SEQ ID NO: 488338 - RNA, 19 nt, Artificial Sequence
  Description of Artificial Sequence: Synthetic oligonucleotide
  Antisense Strand to SEQ ID NO: 488337
uauucuacuuccauucgcg

SEQ ID NO: 488339 - RNA, 19 nt, Artificial Sequence
  Description of Artificial Sequence: Synthetic oligonucleotide
  Sense strand starting at position 2067 of SEQ ID NO: 317405
ugagguuaccaugagcuca

SEQ ID NO: 488340 - RNA, 19 nt, Artificial Sequence
  Description of Artificial Sequence: Synthetic oligonucleotide
  Antisense Strand to SEQ ID NO: 488339
ugagcucaugguaaccuca

SEQ ID NO: 488341 - RNA, 19 nt, Artificial Sequence
  Description of Artificial Sequence: Synthetic oligonucleotide
  Sense strand starting at position 2713 of SEQ ID NO: 317405
aggagacccuguccuguua

SEQ ID NO: 488342 - RNA, 19 nt, Artificial Sequence
  Description of Artificial Sequence: Synthetic oligonucleotide
  Antisense Strand to SEQ ID NO: 488341
uaacaggacagggucuccu

SEQ ID NO: 488343 - RNA, 19 nt, Artificial Sequence
  Description of Artificial Sequence: Synthetic oligonucleotide
  Sense strand starting at position 3387 of SEQ ID NO: 317405
ggcacggugugcucagaga

SEQ ID NO: 488344 - RNA, 19 nt, Artificial Sequence
  Description of Artificial Sequence: Synthetic oligonucleotide
  Antisense Strand to SEQ ID NO: 488343
ucucugagcacaccgugcc

SEQ ID NO: 488345 - RNA, 19 nt, Artificial Sequence
  Description of Artificial Sequence: Synthetic oligonucleotide
  Sense strand starting at position 3872 of SEQ ID NO: 317405
ccgaaaugccugcgacaga

SEQ ID NO: 488346 - RNA, 19 nt, Artificial Sequence
  Description of Artificial Sequence: Synthetic oligonucleotide
  Antisense Strand to SEQ ID NO: 488345
ucugucgcaggcauuucgg

SEQ ID NO: 488347 - RNA, 19 nt, Artificial Sequence
  Description of Artificial Sequence: Synthetic oligonucleotide
  Sense strand starting at position 3877 of SEQ ID NO: 317405
augccugcgacagagaauu

SEQ ID NO: 488348 - RNA, 19 nt, Artificial Sequence
  Description of Artificial Sequence: Synthetic oligonucleotide
  Antisense Strand to SEQ ID NO: 488347
aauucucugucgcaggcau

SEQ ID NO: 488349 - RNA, 19 nt, Artificial Sequence
  Description of Artificial Sequence: Synthetic oligonucleotide
  Sense strand starting at position 3897 of SEQ ID NO: 317405
gagauagaagcucgugaau

SEQ ID NO: 488350 - RNA, 19 nt, Artificial Sequence
  Description of Artificial Sequence: Synthetic oligonucleotide
  Antisense Strand to SEQ ID NO: 488349
auucacgagcuucuaucuc

SEQ ID NO: 488351 - RNA, 19 nt, Artificial Sequence
  Description of Artificial Sequence: Synthetic oligonucleotide
  Sense strand starting at position 3908 of SEQ ID NO: 317405
ucgugaaugucccuuucuu

SEQ ID NO: 488352 - RNA, 19 nt, Artificial Sequence
  Description of Artificial Sequence: Synthetic oligonucleotide
  Antisense Strand to SEQ ID NO: 488351
aagaaagggacauucacga

SEQ ID NO: 488353 - RNA, 19 nt, Artificial Sequence
  Description of Artificial Sequence: Synthetic oligonucleotide
  Sense strand starting at position 3912 of SEQ ID NO: 317405
gaaugucccuuucuucgaa

SEQ ID NO: 488354 - RNA, 19 nt, Artificial Sequence
  Description of Artificial Sequence: Synthetic oligonucleotide
  Antisense Strand to SEQ ID NO: 488353
uucgaagaaagggacauuc

SEQ ID NO: 488355 - RNA, 19 nt, Artificial Sequence
  Description of Artificial Sequence: Synthetic oligonucleotide
  Sense strand starting at position 2 of SEQ ID NO: 317406
gguucuacuguagaauucu

SEQ ID NO: 488356 - RNA, 19 nt, Artificial Sequence
  Description of Artificial Sequence: Synthetic oligonucleotide
  Antisense Strand to SEQ ID NO: 488355
agaauucuacaguagaacc

SEQ ID NO: 488357 - RNA, 19 nt, Artificial Sequence
  Description of Artificial Sequence: Synthetic oligonucleotide
  Sense strand starting at position 57 of SEQ ID NO: 317406
guagaaauuacaggaaguc

SEQ ID NO: 488358 - RNA, 19 nt, Artificial Sequence
  Description of Artificial Sequence: Synthetic oligonucleotide
  Antisense Strand to SEQ ID NO: 488357
gacuuccuguaauuucuac

SEQ ID NO: 488359 - RNA, 19 nt, Artificial Sequence
  Description of Artificial Sequence: Synthetic oligonucleotide
  Sense strand starting at position 255 of SEQ ID NO: 317406
aauaaauugcugugaagua

SEQ ID NO: 488360 - RNA, 19 nt, Artificial Sequence
  Description of Artificial Sequence: Synthetic oligonucleotide
  Antisense Strand to SEQ ID NO: 488359
uacuucacagcaauuuauu

SEQ ID NO: 488361 - RNA, 19 nt, Artificial Sequence
  Description of Artificial Sequence: Synthetic oligonucleotide
  Sense strand starting at position 425 of SEQ ID NO: 317406
guguuaacacaugacacau

SEQ ID NO: 488362 - RNA, 19 nt, Artificial Sequence
  Description of Artificial Sequence: Synthetic oligonucleotide
  Antisense Strand to SEQ ID NO: 488361
augugucauguguuaacac

SEQ ID NO: 488363 - RNA, 19 nt, Artificial Sequence
  Description of Artificial Sequence: Synthetic oligonucleotide
  Sense strand starting at position 549 of SEQ ID NO: 317406
agcgacaacccagauguuu

SEQ ID NO: 488364 - RNA, 19 nt, Artificial Sequence
  Description of Artificial Sequence: Synthetic oligonucleotide
  Antisense Strand to SEQ ID NO: 488363
aaacaucuggguugucgcu

SEQ ID NO: 488365 - RNA, 19 nt, Artificial Sequence
  Description of Artificial Sequence: Synthetic oligonucleotide
  Sense strand starting at position 660 of SEQ ID NO: 317406
uccaaugccugaucucaga

SEQ ID NO: 488366 - RNA, 19 nt, Artificial Sequence
  Description of Artificial Sequence: Synthetic oligonucleotide
  Antisense Strand to SEQ ID NO: 488365
ucugagaucaggcauugga

SEQ ID NO: 488367 - RNA, 19 nt, Artificial Sequence
  Description of Artificial Sequence: Synthetic oligonucleotide
  Sense strand starting at position 906 of SEQ ID NO: 317406
uucuaccaucucgaauagu

SEQ ID NO: 488368 - RNA, 19 nt, Artificial Sequence
  Description of Artificial Sequence: Synthetic oligonucleotide
  Antisense Strand to SEQ ID NO: 488367
acuauucgagaugguagaa

SEQ ID NO: 488369 - RNA, 19 nt, Artificial Sequence
  Description of Artificial Sequence: Synthetic oligonucleotide
  Sense strand starting at position 1243 of SEQ ID NO: 317406
gugaccucaaguuagagua

SEQ ID NO: 488370 - RNA, 19 nt, Artificial Sequence
  Description of Artificial Sequence: Synthetic oligonucleotide
  Antisense Strand to SEQ ID NO: 488369
uacucuaacuugaggucac

SEQ ID NO: 488371 - RNA, 19 nt, Artificial Sequence
  Description of Artificial Sequence: Synthetic oligonucleotide
  Sense strand starting at position 1328 of SEQ ID NO: 317406
ccuaaauucgcaugaccag

SEQ ID NO: 488372 - RNA, 19 nt, Artificial Sequence
  Description of Artificial Sequence: Synthetic oligonucleotide
  Antisense Strand to SEQ ID NO: 488371
cuggucaugcgaauuuagg

SEQ ID NO: 488373 - RNA, 19 nt, Artificial Sequence
  Description of Artificial Sequence: Synthetic oligonucleotide
  Sense strand starting at position 2115 of SEQ ID NO: 317406
gggauucuuagauggagcu

SEQ ID NO: 488374 - RNA, 19 nt, Artificial Sequence
  Description of Artificial Sequence: Synthetic oligonucleotide
  Antisense Strand to SEQ ID NO: 488373
agcuccaucuaagaauccc

SEQ ID NO: 488375 - RNA, 19 nt, Artificial Sequence
  Description of Artificial Sequence: Synthetic oligonucleotide
  Sense strand starting at position 2289 of SEQ ID NO: 317406
ucaugcagucauugagaau

SEQ ID NO: 488376 - RNA, 19 nt, Artificial Sequence
  Description of Artificial Sequence: Synthetic oligonucleotide
  Antisense Strand to SEQ ID NO: 488375
auucucaaugacugcauga

SEQ ID NO: 488377 - RNA, 19 nt, Artificial Sequence
  Description of Artificial Sequence: Synthetic oligonucleotide
  Sense strand starting at position 2305 of SEQ ID NO: 317406
aauuauuaugacgagugua

SEQ ID NO: 488378 - RNA, 19 nt, Artificial Sequence
  Description of Artificial Sequence: Synthetic oligonucleotide
  Antisense Strand to SEQ ID NO: 488377
uacacucgucauaauaauu

SEQ ID NO: 488379 - RNA, 19 nt, Artificial Sequence
  Description of Artificial Sequence: Synthetic oligonucleotide
  Sense strand starting at position 2308 of SEQ ID NO: 317406
uauuaugacgaguguagaa

SEQ ID NO: 488380 - RNA, 19 nt, Artificial Sequence
  Description of Artificial Sequence: Synthetic oligonucleotide
  Antisense Strand to SEQ ID NO: 488379
uucuacacucgucauaaua

SEQ ID NO: 488381 - RNA, 19 nt, Artificial Sequence
  Description of Artificial Sequence: Synthetic oligonucleotide
  Sense strand starting at position 2329 of SEQ ID NO: 317406
agggaaagcuguuuaggaa

SEQ ID NO: 488382 - RNA, 19 nt, Artificial Sequence
  Description of Artificial Sequence: Synthetic oligonucleotide
  Antisense Strand to SEQ ID NO: 488381
uuccuaaacagcuuucccu

SEQ ID NO: 488383 - RNA, 19 nt, Artificial Sequence
  Description of Artificial Sequence: Synthetic oligonucleotide
  Sense strand starting at position 2487 of SEQ ID NO: 317406
uggaaauguguuggauaug

SEQ ID NO: 488384 - RNA, 19 nt, Artificial Sequence
  Description of Artificial Sequence: Synthetic oligonucleotide
  Antisense Strand to SEQ ID NO: 488383
cauauccaacacauuucca

SEQ ID NO: 488385 - RNA, 19 nt, Artificial Sequence
  Description of Artificial Sequence: Synthetic oligonucleotide
  Sense strand starting at position 2490 of SEQ ID NO: 317406
aaauguguuggauaugugu

SEQ ID NO: 488386 - RNA, 19 nt, Artificial Sequence
  Description of Artificial Sequence: Synthetic oligonucleotide
  Antisense Strand to SEQ ID NO: 488385
acacauauccaacacauuu

SEQ ID NO: 488387 - RNA, 19 nt, Artificial Sequence
  Description of Artificial Sequence: Synthetic oligonucleotide
  Sense strand starting at position 2496 of SEQ ID NO: 317406
guuggauauguguauaaug

SEQ ID NO: 488388 - RNA, 19 nt, Artificial Sequence
  Description of Artificial Sequence: Synthetic oligonucleotide
  Antisense Strand to SEQ ID NO: 488387
cauuauacacauauccaac

SEQ ID NO: 488389 - RNA, 19 nt, Artificial Sequence
  Description of Artificial Sequence: Synthetic oligonucleotide
  Sense strand starting at position 2498 of SEQ ID NO: 317406
uggauauguguauaaugua

SEQ ID NO: 488390 - RNA, 19 nt, Artificial Sequence
  Description of Artificial Sequence: Synthetic oligonucleotide
  Antisense Strand to SEQ ID NO: 488389
uacauuauacacauaucca

SEQ ID NO: 488391 - RNA, 19 nt, Artificial Sequence
  Description of Artificial Sequence: Synthetic oligonucleotide
  Sense strand starting at position 2601 of SEQ ID NO: 317406
ggguuccaauccuuagaag

SEQ ID NO: 488392 - RNA, 19 nt, Artificial Sequence
  Description of Artificial Sequence: Synthetic oligonucleotide
  Antisense Strand to SEQ ID NO: 488391
cuucuaaggauuggaaccc

SEQ ID NO: 488393 - RNA, 19 nt, Artificial Sequence
  Description of Artificial Sequence: Synthetic oligonucleotide
  Sense strand starting at position 2788 of SEQ ID NO: 317406
guaugccuacuguaugaca

SEQ ID NO: 488394 - RNA, 19 nt, Artificial Sequence
  Description of Artificial Sequence: Synthetic oligonucleotide
  Antisense Strand to SEQ ID NO: 488393
ugucauacaguaggcauac

SEQ ID NO: 488395 - RNA, 19 nt, Artificial Sequence
  Description of Artificial Sequence: Synthetic oligonucleotide
  Sense strand starting at position 2844 of SEQ ID NO: 317406
agauaauugucacugcuua

SEQ ID NO: 488396 - RNA, 19 nt, Artificial Sequence
  Description of Artificial Sequence: Synthetic oligonucleotide
  Antisense Strand to SEQ ID NO: 488395
uaagcagugacaauuaucu

SEQ ID NO: 488397 - RNA, 19 nt, Artificial Sequence
  Description of Artificial Sequence: Synthetic oligonucleotide
  Sense strand starting at position 2946 of SEQ ID NO: 317406
ugagauacccgauaugugu

SEQ ID NO: 488398 - RNA, 19 nt, Artificial Sequence
  Description of Artificial Sequence: Synthetic oligonucleotide
  Antisense Strand to SEQ ID NO: 488397
acacauaucggguaucuca

SEQ ID NO: 488399 - RNA, 19 nt, Artificial Sequence
  Description of Artificial Sequence: Synthetic oligonucleotide
  Sense strand starting at position 2959 of SEQ ID NO: 317406
auguguguugaauaaacau

SEQ ID NO: 488400 - RNA, 19 nt, Artificial Sequence
  Description of Artificial Sequence: Synthetic oligonucleotide
  Antisense Strand to SEQ ID NO: 488399
auguuuauucaacacacau

SEQ ID NO: 488401 - RNA, 19 nt, Artificial Sequence
  Description of Artificial Sequence: Synthetic oligonucleotide
  Sense strand starting at position 2996 of SEQ ID NO: 317406
gggacuuuggacuguuaaa

SEQ ID NO: 488402 - RNA, 19 nt, Artificial Sequence
  Description of Artificial Sequence: Synthetic oligonucleotide
  Antisense Strand to SEQ ID NO: 488401
uuuaacaguccaaaguccc

SEQ ID NO: 488403 - RNA, 19 nt, Artificial Sequence
  Description of Artificial Sequence: Synthetic oligonucleotide
  Sense strand starting at position 3003 of SEQ ID NO: 317406
uggacuguuaaaugagcaa

SEQ ID NO: 488404 - RNA, 19 nt, Artificial Sequence
  Description of Artificial Sequence: Synthetic oligonucleotide
  Antisense Strand to SEQ ID NO: 488403
uugcucauuuaacagucca

SEQ ID NO: 488405 - RNA, 19 nt, Artificial Sequence
  Description of Artificial Sequence: Synthetic oligonucleotide
  Sense strand starting at position 3007 of SEQ ID NO: 317406
cuguuaaaugagcaagcuu

SEQ ID NO: 488406 - RNA, 19 nt, Artificial Sequence
  Description of Artificial Sequence: Synthetic oligonucleotide
  Antisense Strand to SEQ ID NO: 488405
aagcuugcucauuuaacag

SEQ ID NO: 488407 - RNA, 19 nt, Artificial Sequence
  Description of Artificial Sequence: Synthetic oligonucleotide
  Sense strand starting at position 3075 of SEQ ID NO: 317406
uugacagccaggugauuaa

SEQ ID NO: 488408 - RNA, 19 nt, Artificial Sequence
  Description of Artificial Sequence: Synthetic oligonucleotide
  Antisense Strand to SEQ ID NO: 488407
uuaaucaccuggcugucaa

SEQ ID NO: 488409 - RNA, 19 nt, Artificial Sequence
  Description of Artificial Sequence: Synthetic oligonucleotide
  Sense strand starting at position 3085 of SEQ ID NO: 317406
ggugauuaaggaugguuaa

SEQ ID NO: 488410 - RNA, 19 nt, Artificial Sequence
  Description of Artificial Sequence: Synthetic oligonucleotide
  Antisense Strand to SEQ ID NO: 488409
uuaaccauccuuaaucacc

SEQ ID NO: 488411 - RNA, 19 nt, Artificial Sequence
  Description of Artificial Sequence: Synthetic oligonucleotide
  Sense strand starting at position 3086 of SEQ ID NO: 317406
gugauuaaggaugguuaaa

SEQ ID NO: 488412 - RNA, 19 nt, Artificial Sequence
  Description of Artificial Sequence: Synthetic oligonucleotide
  Antisense Strand to SEQ ID NO: 488411
uuuaaccauccuuaaucac

SEQ ID NO: 488413 - RNA, 19 nt, Artificial Sequence
  Description of Artificial Sequence: Synthetic oligonucleotide
  Sense strand starting at position 3106 of SEQ ID NO: 317406
uggcauucuagcuaggaca

SEQ ID NO: 488414 - RNA, 19 nt, Artificial Sequence
  Description of Artificial Sequence: Synthetic oligonucleotide
  Antisense Strand to SEQ ID NO: 488413
uguccuagcuagaaugcca

SEQ ID NO: 488415 - RNA, 19 nt, Artificial Sequence
  Description of Artificial Sequence: Synthetic oligonucleotide
  Sense strand starting at position 3130 of SEQ ID NO: 317406
gccuuauugagugauccug

SEQ ID NO: 488416 - RNA, 19 nt, Artificial Sequence
  Description of Artificial Sequence: Synthetic oligonucleotide
  Antisense Strand to SEQ ID NO: 488415
caggaucacucaauaaggc

SEQ ID NO: 488417 - RNA, 19 nt, Artificial Sequence
  Description of Artificial Sequence: Synthetic oligonucleotide
  Sense strand starting at position 3132 of SEQ ID NO: 317406
cuuauugagugauccugga

SEQ ID NO: 488418 - RNA, 19 nt, Artificial Sequence
  Description of Artificial Sequence: Synthetic oligonucleotide
  Antisense Strand to SEQ ID NO: 488417
uccaggaucacucaauaag

SEQ ID NO: 488419 - RNA, 19 nt, Artificial Sequence
  Description of Artificial Sequence: Synthetic oligonucleotide
  Sense strand starting at position 3136 of SEQ ID NO: 317406
uugagugauccuggaucuc

SEQ ID NO: 488420 - RNA, 19 nt, Artificial Sequence
  Description of Artificial Sequence: Synthetic oligonucleotide
  Antisense Strand to SEQ ID NO: 488419
gagauccaggaucacucaa

SEQ ID NO: 488421 - RNA, 19 nt, Artificial Sequence
  Description of Artificial Sequence: Synthetic oligonucleotide
  Sense strand starting at position 3529 of SEQ ID NO: 317406
agguuaacucucuguaaau

SEQ ID NO: 488422 - RNA, 19 nt, Artificial Sequence
  Description of Artificial Sequence: Synthetic oligonucleotide
  Antisense Strand to SEQ ID NO: 488421
auuuacagagaguuaaccu

SEQ ID NO: 488423 - RNA, 19 nt, Artificial Sequence
  Description of Artificial Sequence: Synthetic oligonucleotide
  Sense strand starting at position 3530 of SEQ ID NO: 317406
gguuaacucucuguaaaug

SEQ ID NO: 488424 - RNA, 19 nt, Artificial Sequence
  Description of Artificial Sequence: Synthetic oligonucleotide
  Antisense Strand to SEQ ID NO: 488423
cauuuacagagaguuaacc

SEQ ID NO: 488425 - RNA, 19 nt, Artificial Sequence
  Description of Artificial Sequence: Synthetic oligonucleotide
  Sense strand starting at position 3553 of SEQ ID NO: 317406
uggucuguccaugaucuuu

SEQ ID NO: 488426 - RNA, 19 nt, Artificial Sequence
  Description of Artificial Sequence: Synthetic oligonucleotide
  Antisense Strand to SEQ ID NO: 488425
aaagaucauggacagacca

SEQ ID NO: 488427 - RNA, 19 nt, Artificial Sequence
  Description of Artificial Sequence: Synthetic oligonucleotide
  Sense strand starting at position 3579 of SEQ ID NO: 317406
cagagaagcuacuuguaag

SEQ ID NO: 488428 - RNA, 19 nt, Artificial Sequence
  Description of Artificial Sequence: Synthetic oligonucleotide
  Antisense Strand to SEQ ID NO: 488427
cuuacaaguagcuucucug

SEQ ID NO: 488429 - RNA, 19 nt, Artificial Sequence
  Description of Artificial Sequence: Synthetic oligonucleotide
  Sense strand starting at position 3580 of SEQ ID NO: 317406
agagaagcuacuuguaagu

SEQ ID NO: 488430 - RNA, 19 nt, Artificial Sequence
  Description of Artificial Sequence: Synthetic oligonucleotide
  Antisense Strand to SEQ ID NO: 488429
acuuacaaguagcuucucu

SEQ ID NO: 488431 - RNA, 19 nt, Artificial Sequence
  Description of Artificial Sequence: Synthetic oligonucleotide
  Sense strand starting at position 3613 of SEQ ID NO: 317406
caguuuccuggguaggagu

SEQ ID NO: 488432 - RNA, 19 nt, Artificial Sequence
  Description of Artificial Sequence: Synthetic oligonucleotide
  Antisense Strand to SEQ ID NO: 488431
acuccuacccaggaaacug

SEQ ID NO: 488433 - RNA, 19 nt, Artificial Sequence
  Description of Artificial Sequence: Synthetic oligonucleotide
  Sense strand starting at position 3624 of SEQ ID NO: 317406
guaggaguuucucuuacag

SEQ ID NO: 488434 - RNA, 19 nt, Artificial Sequence
  Description of Artificial Sequence: Synthetic oligonucleotide
  Antisense Strand to SEQ ID NO: 488433
cuguaagagaaacuccuac

SEQ ID NO: 488435 - RNA, 19 nt, Artificial Sequence
  Description of Artificial Sequence: Synthetic oligonucleotide
  Sense strand starting at position 273 of SEQ ID NO: 317407
ugcuacauucuacauaguu

SEQ ID NO: 488436 - RNA, 19 nt, Artificial Sequence
  Description of Artificial Sequence: Synthetic oligonucleotide
  Antisense Strand to SEQ ID NO: 488435
aacuauguagaauguagca

SEQ ID NO: 488437 - RNA, 19 nt, Artificial Sequence
  Description of Artificial Sequence: Synthetic oligonucleotide
  Sense strand starting at position 361 of SEQ ID NO: 317407
cacuaaaugcuuugaggua

SEQ ID NO: 488438 - RNA, 19 nt, Artificial Sequence
  Description of Artificial Sequence: Synthetic oligonucleotide
  Antisense Strand to SEQ ID NO: 488437
uaccucaaagcauuuagug

SEQ ID NO: 488439 - RNA, 19 nt, Artificial Sequence
  Description of Artificial Sequence: Synthetic oligonucleotide
  Sense strand starting at position 373 of SEQ ID NO: 317407
ugagguauugggcauauca

SEQ ID NO: 488440 - RNA, 19 nt, Artificial Sequence
  Description of Artificial Sequence: Synthetic oligonucleotide
  Antisense Strand to SEQ ID NO: 488439
ugauaugcccaauaccuca

SEQ ID NO: 488441 - RNA, 19 nt, Artificial Sequence
  Description of Artificial Sequence: Synthetic oligonucleotide
  Sense strand starting at position 375 of SEQ ID NO: 317407
agguauugggcauaucacu

SEQ ID NO: 488442 - RNA, 19 nt, Artificial Sequence
  Description of Artificial Sequence: Synthetic oligonucleotide
  Antisense Strand to SEQ ID NO: 488441
agugauaugcccaauaccu

SEQ ID NO: 488443 - RNA, 19 nt, Artificial Sequence
  Description of Artificial Sequence: Synthetic oligonucleotide
  Sense strand starting at position 644 of SEQ ID NO: 317407
ccaggaucauaguuacucu

SEQ ID NO: 488444 - RNA, 19 nt, Artificial Sequence
  Description of Artificial Sequence: Synthetic oligonucleotide
  Antisense Strand to SEQ ID NO: 488443
agaguaacuaugauccugg

SEQ ID NO: 488445 - RNA, 19 nt, Artificial Sequence
  Description of Artificial Sequence: Synthetic oligonucleotide
  Sense strand starting at position 746 of SEQ ID NO: 317407
ugacaaucuuugcugauua

SEQ ID NO: 488446 - RNA, 19 nt, Artificial Sequence
  Description of Artificial Sequence: Synthetic oligonucleotide
  Antisense Strand to SEQ ID NO: 488445
uaaucagcaaagauuguca

SEQ ID NO: 488447 - RNA, 19 nt, Artificial Sequence
  Description of Artificial Sequence: Synthetic oligonucleotide
  Sense strand starting at position 805 of SEQ ID NO: 317407
guuggaaggcuagaguuaa

SEQ ID NO: 488448 - RNA, 19 nt, Artificial Sequence
  Description of Artificial Sequence: Synthetic oligonucleotide
  Antisense Strand to SEQ ID NO: 488447
uuaacucuagccuuccaac

SEQ ID NO: 488449 - RNA, 19 nt, Artificial Sequence
  Description of Artificial Sequence: Synthetic oligonucleotide
  Sense strand starting at position 923 of SEQ ID NO: 317407
acguuaacccaguacuaga

SEQ ID NO: 488450 - RNA, 19 nt, Artificial Sequence
  Description of Artificial Sequence: Synthetic oligonucleotide
  Antisense Strand to SEQ ID NO: 488449
ucuaguacuggguuaacgu

SEQ ID NO: 488451 - RNA, 19 nt, Artificial Sequence
  Description of Artificial Sequence: Synthetic oligonucleotide
  Sense strand starting at position 1184 of SEQ ID NO: 317407
ccgaaaucaucccuuacag

SEQ ID NO: 488452 - RNA, 19 nt, Artificial Sequence
  Description of Artificial Sequence: Synthetic oligonucleotide
  Antisense Strand to SEQ ID NO: 488451
cuguaagggaugauuucgg

SEQ ID NO: 488453 - RNA, 19 nt, Artificial Sequence
  Description of Artificial Sequence: Synthetic oligonucleotide
  Sense strand starting at position 1307 of SEQ ID NO: 317407
gaaugacaggccugacauc

SEQ ID NO: 488454 - RNA, 19 nt, Artificial Sequence
  Description of Artificial Sequence: Synthetic oligonucleotide
  Antisense Strand to SEQ ID NO: 488453
gaugucaggccugucauuc

SEQ ID NO: 488455 - RNA, 19 nt, Artificial Sequence
  Description of Artificial Sequence: Synthetic oligonucleotide
  Sense strand starting at position 2036 of SEQ ID NO: 317407
ggaagucgaugauugcuaa

SEQ ID NO: 488456 - RNA, 19 nt, Artificial Sequence
  Description of Artificial Sequence: Synthetic oligonucleotide
  Antisense Strand to SEQ ID NO: 488455
uuagcaaucaucgacuucc

SEQ ID NO: 488457 - RNA, 19 nt, Artificial Sequence
  Description of Artificial Sequence: Synthetic oligonucleotide
  Sense strand starting at position 2088 of SEQ ID NO: 317407
ggcagcaucagagaucaua

SEQ ID NO: 488458 - RNA, 19 nt, Artificial Sequence
  Description of Artificial Sequence: Synthetic oligonucleotide
  Antisense Strand to SEQ ID NO: 488457
uaugaucucugaugcugcc

SEQ ID NO: 488459 - RNA, 19 nt, Artificial Sequence
  Description of Artificial Sequence: Synthetic oligonucleotide
  Sense strand starting at position 2145 of SEQ ID NO: 317407
guugauacaccucacuuga

SEQ ID NO: 488460 - RNA, 19 nt, Artificial Sequence
  Description of Artificial Sequence: Synthetic oligonucleotide
  Antisense Strand to SEQ ID NO: 488459
ucaagugagguguaucaac

SEQ ID NO: 488461 - RNA, 19 nt, Artificial Sequence
  Description of Artificial Sequence: Synthetic oligonucleotide
  Sense strand starting at position 2161 of SEQ ID NO: 317407
ugaaguuggccuggagaaa

SEQ ID NO: 488462 - RNA, 19 nt, Artificial Sequence
  Description of Artificial Sequence: Synthetic oligonucleotide
  Antisense Strand to SEQ ID NO: 488461
uuucuccaggccaacuuca

SEQ ID NO: 488463 - RNA, 19 nt, Artificial Sequence
  Description of Artificial Sequence: Synthetic oligonucleotide
  Sense strand starting at position 2325 of SEQ ID NO: 317407
aggacuaugaggugguaaa

SEQ ID NO: 488464 - RNA, 19 nt, Artificial Sequence
  Description of Artificial Sequence: Synthetic oligonucleotide
  Antisense Strand to SEQ ID NO: 488463
uuuaccaccucauaguccu

SEQ ID NO: 488465 - RNA, 19 nt, Artificial Sequence
  Description of Artificial Sequence: Synthetic oligonucleotide
  Sense strand starting at position 2326 of SEQ ID NO: 317407
ggacuaugaggugguaaau

SEQ ID NO: 488466 - RNA, 19 nt, Artificial Sequence
  Description of Artificial Sequence: Synthetic oligonucleotide
  Antisense Strand to SEQ ID NO: 488465
auuuaccaccucauagucc

SEQ ID NO: 488467 - RNA, 19 nt, Artificial Sequence
  Description of Artificial Sequence: Synthetic oligonucleotide
  Sense strand starting at position 2400 of SEQ ID NO: 317407
cucaucugugguugaggga

SEQ ID NO: 488468 - RNA, 19 nt, Artificial Sequence
  Description of Artificial Sequence: Synthetic oligonucleotide
  Antisense Strand to SEQ ID NO: 488467
ucccucaaccacagaugag

SEQ ID NO: 488469 - RNA, 19 nt, Artificial Sequence
  Description of Artificial Sequence: Synthetic oligonucleotide
  Sense strand starting at position 2401 of SEQ ID NO: 317407
ucaucugugguugagggaa

SEQ ID NO: 488470 - RNA, 19 nt, Artificial Sequence
  Description of Artificial Sequence: Synthetic oligonucleotide
  Antisense Strand to SEQ ID NO: 488469
uucccucaaccacagauga

SEQ ID NO: 488471 - RNA, 19 nt, Artificial Sequence
  Description of Artificial Sequence: Synthetic oligonucleotide
  Sense strand starting at position 2430 of SEQ ID NO: 317407
aaagaugauuaggagaacu

SEQ ID NO: 488472 - RNA, 19 nt, Artificial Sequence
  Description of Artificial Sequence: Synthetic oligonucleotide
  Antisense Strand to SEQ ID NO: 488471
aguucuccuaaucaucuuu

SEQ ID NO: 488473 - RNA, 19 nt, Artificial Sequence
  Description of Artificial Sequence: Synthetic oligonucleotide
  Sense strand starting at position 2512 of SEQ ID NO: 317407
aggcaagaaucucccauua

SEQ ID NO: 488474 - RNA, 19 nt, Artificial Sequence
  Description of Artificial Sequence: Synthetic oligonucleotide
  Antisense Strand to SEQ ID NO: 488473
uaaugggagauucuugccu

SEQ ID NO: 488475 - RNA, 19 nt, Artificial Sequence
  Description of Artificial Sequence: Synthetic oligonucleotide
  Sense strand starting at position 2528 of SEQ ID NO: 317407
uuacaaaggguuuggugaa

SEQ ID NO: 488476 - RNA, 19 nt, Artificial Sequence
  Description of Artificial Sequence: Synthetic oligonucleotide
  Antisense Strand to SEQ ID NO: 488475
uucaccaaacccuuuguaa

SEQ ID NO: 488477 - RNA, 19 nt, Artificial Sequence
  Description of Artificial Sequence: Synthetic oligonucleotide
  Sense strand starting at position 2644 of SEQ ID NO: 317407
cgacucacuagaugucuga

SEQ ID NO: 488478 - RNA, 19 nt, Artificial Sequence
  Description of Artificial Sequence: Synthetic oligonucleotide
  Antisense Strand to SEQ ID NO: 488477
ucagacaucuagugagucg

SEQ ID NO: 488479 - RNA, 19 nt, Artificial Sequence
  Description of Artificial Sequence: Synthetic oligonucleotide
  Sense strand starting at position 2647 of SEQ ID NO: 317407
cucacuagaugucugacaa

SEQ ID NO: 488480 - RNA, 19 nt, Artificial Sequence
  Description of Artificial Sequence: Synthetic oligonucleotide
  Antisense Strand to SEQ ID NO: 488479
uugucagacaucuagugag

SEQ ID NO: 488481 - RNA, 19 nt, Artificial Sequence
  Description of Artificial Sequence: Synthetic oligonucleotide
  Sense strand starting at position 2648 of SEQ ID NO: 317407
ucacuagaugucugacaau

SEQ ID NO: 488482 - RNA, 19 nt, Artificial Sequence
  Description of Artificial Sequence: Synthetic oligonucleotide
  Antisense Strand to SEQ ID NO: 488481
auugucagacaucuaguga

SEQ ID NO: 488483 - RNA, 19 nt, Artificial Sequence
  Description of Artificial Sequence: Synthetic oligonucleotide
  Sense strand starting at position 2753 of SEQ ID NO: 317407
guuugcuugcgaccguuaa

SEQ ID NO: 488484 - RNA, 19 nt, Artificial Sequence
  Description of Artificial Sequence: Synthetic oligonucleotide
  Antisense Strand to SEQ ID NO: 488483
uuaacggucgcaagcaaac

SEQ ID NO: 488485 - RNA, 19 nt, Artificial Sequence
  Description of Artificial Sequence: Synthetic oligonucleotide
  Sense strand starting at position 2755 of SEQ ID NO: 317407
uugcuugcgaccguuaaua

SEQ ID NO: 488486 - RNA, 19 nt, Artificial Sequence
  Description of Artificial Sequence: Synthetic oligonucleotide
  Antisense Strand to SEQ ID NO: 488485
uauuaacggucgcaagcaa

SEQ ID NO: 488487 - RNA, 19 nt, Artificial Sequence
  Description of Artificial Sequence: Synthetic oligonucleotide
  Sense strand starting at position 2766 of SEQ ID NO: 317407
cguuaauaucaagaugugu

SEQ ID NO: 488488 - RNA, 19 nt, Artificial Sequence
  Description of Artificial Sequence: Synthetic oligonucleotide
  Antisense Strand to SEQ ID NO: 488487
acacaucuugauauuaacg

SEQ ID NO: 488489 - RNA, 19 nt, Artificial Sequence
  Description of Artificial Sequence: Synthetic oligonucleotide
  Sense strand starting at position 2791 of SEQ ID NO: 317407
guacgaagggaauggauau

SEQ ID NO: 488490 - RNA, 19 nt, Artificial Sequence
  Description of Artificial Sequence: Synthetic oligonucleotide
  Antisense Strand to SEQ ID NO: 488489
auauccauucccuucguac

SEQ ID NO: 488491 - RNA, 19 nt, Artificial Sequence
  Description of Artificial Sequence: Synthetic oligonucleotide
  Sense strand starting at position 2803 of SEQ ID NO: 317407
uggauaucuguuggguaca

SEQ ID NO: 488492 - RNA, 19 nt, Artificial Sequence
  Description of Artificial Sequence: Synthetic oligonucleotide
  Antisense Strand to SEQ ID NO: 488491
uguacccaacagauaucca

SEQ ID NO: 488493 - RNA, 19 nt, Artificial Sequence
  Description of Artificial Sequence: Synthetic oligonucleotide
  Sense strand starting at position 2805 of SEQ ID NO: 317407
gauaucuguuggguacacu

SEQ ID NO: 488494 - RNA, 19 nt, Artificial Sequence
  Description of Artificial Sequence: Synthetic oligonucleotide
  Antisense Strand to SEQ ID NO: 488493
aguguacccaacagauauc

SEQ ID NO: 488495 - RNA, 19 nt, Artificial Sequence
  Description of Artificial Sequence: Synthetic oligonucleotide
  Sense strand starting at position 2964 of SEQ ID NO: 317407
agacgaugugagugauuca

SEQ ID NO: 488496 - RNA, 19 nt, Artificial Sequence
  Description of Artificial Sequence: Synthetic oligonucleotide
  Antisense Strand to SEQ ID NO: 488495
ugaaucacucacaucgucu

SEQ ID NO: 488497 - RNA, 19 nt, Artificial Sequence
  Description of Artificial Sequence: Synthetic oligonucleotide
  Sense strand starting at position 2971 of SEQ ID NO: 317407
gugagugauucacuugaug

SEQ ID NO: 488498 - RNA, 19 nt, Artificial Sequence
  Description of Artificial Sequence: Synthetic oligonucleotide
  Antisense Strand to SEQ ID NO: 488497
caucaagugaaucacucac

SEQ ID NO: 488499 - RNA, 19 nt, Artificial Sequence
  Description of Artificial Sequence: Synthetic oligonucleotide
  Sense strand starting at position 3036 of SEQ ID NO: 317407
cgucaugaccuuuacaacu

SEQ ID NO: 488500 - RNA, 19 nt, Artificial Sequence
  Description of Artificial Sequence: Synthetic oligonucleotide
  Antisense Strand to SEQ ID NO: 488499
aguuguaaaggucaugacg

SEQ ID NO: 488501 - RNA, 19 nt, Artificial Sequence
  Description of Artificial Sequence: Synthetic oligonucleotide
  Sense strand starting at position 3143 of SEQ ID NO: 317407
ggaugaaccucacugcaau

SEQ ID NO: 488502 - RNA, 19 nt, Artificial Sequence
  Description of Artificial Sequence: Synthetic oligonucleotide
  Antisense Strand to SEQ ID NO: 488501
auugcagugagguucaucc

SEQ ID NO: 488503 - RNA, 19 nt, Artificial Sequence
  Description of Artificial Sequence: Synthetic oligonucleotide
  Sense strand starting at position 3618 of SEQ ID NO: 317407
ccuauugugaacugggaau

SEQ ID NO: 488504 - RNA, 19 nt, Artificial Sequence
  Description of Artificial Sequence: Synthetic oligonucleotide
  Antisense Strand to SEQ ID NO: 488503
auucccaguucacaauagg

SEQ ID NO: 488505 - RNA, 19 nt, Artificial Sequence
  Description of Artificial Sequence: Synthetic oligonucleotide
  Sense strand starting at position 3651 of SEQ ID NO: 317407
uugcucacuccuuaagaga

SEQ ID NO: 488506 - RNA, 19 nt, Artificial Sequence
  Description of Artificial Sequence: Synthetic oligonucleotide
  Antisense Strand to SEQ ID NO: 488505
ucucuuaaggagugagcaa

SEQ ID NO: 488507 - RNA, 19 nt, Artificial Sequence
  Description of Artificial Sequence: Synthetic oligonucleotide
  Sense strand starting at position 3715 of SEQ ID NO: 317407
guccaacuccuguggaaag

SEQ ID NO: 488508 - RNA, 19 nt, Artificial Sequence
  Description of Artificial Sequence: Synthetic oligonucleotide
  Antisense Strand to SEQ ID NO: 488507
cuuuccacaggaguuggac

SEQ ID NO: 488509 - RNA, 19 nt, Artificial Sequence
  Description of Artificial Sequence: Synthetic oligonucleotide
  Sense strand starting at position 3729 of SEQ ID NO: 317407
gaaagauugucuucccuga

SEQ ID NO: 488510 - RNA, 19 nt, Artificial Sequence
  Description of Artificial Sequence: Synthetic oligonucleotide
  Antisense Strand to SEQ ID NO: 488509
ucagggaagacaaucuuuc

SEQ ID NO: 488511 - RNA, 19 nt, Artificial Sequence
  Description of Artificial Sequence: Synthetic oligonucleotide
  Sense strand starting at position 3796 of SEQ ID NO: 317407
acuucugagcacugauaau

SEQ ID NO: 488512 - RNA, 19 nt, Artificial Sequence
  Description of Artificial Sequence: Synthetic oligonucleotide
  Antisense Strand to SEQ ID NO: 488511
auuaucagugcucagaagu

SEQ ID NO: 488513 - RNA, 19 nt, Artificial Sequence
  Description of Artificial Sequence: Synthetic oligonucleotide
  Sense strand starting at position 3829 of SEQ ID NO: 317407
cucuguauggacuauaguu

SEQ ID NO: 488514 - RNA, 19 nt, Artificial Sequence
  Description of Artificial Sequence: Synthetic oligonucleotide
  Antisense Strand to SEQ ID NO: 488513
aacuauaguccauacagag

SEQ ID NO: 488515 - RNA, 19 nt, Artificial Sequence
  Description of Artificial Sequence: Synthetic oligonucleotide
  Sense strand starting at position 186 of SEQ ID NO: 317408
ugcuuucuaagagaaggua

SEQ ID NO: 488516 - RNA, 19 nt, Artificial Sequence
  Description of Artificial Sequence: Synthetic oligonucleotide
  Antisense Strand to SEQ ID NO: 488515
uaccuucucuuagaaagca

SEQ ID NO: 488517 - RNA, 19 nt, Artificial Sequence
  Description of Artificial Sequence: Synthetic oligonucleotide
  Sense strand starting at position 290 of SEQ ID NO: 317408
uccagaaaugagugaugcu

SEQ ID NO: 488518 - RNA, 19 nt, Artificial Sequence
  Description of Artificial Sequence: Synthetic oligonucleotide
  Antisense Strand to SEQ ID NO: 488517
agcaucacucauuucugga

SEQ ID NO: 488519 - RNA, 19 nt, Artificial Sequence
  Description of Artificial Sequence: Synthetic oligonucleotide
  Sense strand starting at position 291 of SEQ ID NO: 317408
ccagaaaugagugaugcuu

SEQ ID NO: 488520 - RNA, 19 nt, Artificial Sequence
  Description of Artificial Sequence: Synthetic oligonucleotide
  Antisense Strand to SEQ ID NO: 488519
aagcaucacucauuucugg

SEQ ID NO: 488521 - RNA, 19 nt, Artificial Sequence
  Description of Artificial Sequence: Synthetic oligonucleotide
  Sense strand starting at position 370 of SEQ ID NO: 317408
ccuagaauguaccuuagga

SEQ ID NO: 488522 - RNA, 19 nt, Artificial Sequence
  Description of Artificial Sequence: Synthetic oligonucleotide
  Antisense Strand to SEQ ID NO: 488521
uccuaagguacauucuagg

SEQ ID NO: 488523 - RNA, 19 nt, Artificial Sequence
  Description of Artificial Sequence: Synthetic oligonucleotide
  Sense strand starting at position 390 of SEQ ID NO: 317408
gcaaguagcaaguaguaua

SEQ ID NO: 488524 - RNA, 19 nt, Artificial Sequence
  Description of Artificial Sequence: Synthetic oligonucleotide
  Antisense Strand to SEQ ID NO: 488523
uauacuacuugcuacuugc

SEQ ID NO: 488525 - RNA, 19 nt, Artificial Sequence
  Description of Artificial Sequence: Synthetic oligonucleotide
  Sense strand starting at position 946 of SEQ ID NO: 317408
auuaaacauuucugaugga

SEQ ID NO: 488526 - RNA, 19 nt, Artificial Sequence
  Description of Artificial Sequence: Synthetic oligonucleotide
  Antisense Strand to SEQ ID NO: 488525
uccaucagaaauguuuaau

SEQ ID NO: 488527 - RNA, 19 nt, Artificial Sequence
  Description of Artificial Sequence: Synthetic oligonucleotide
  Sense strand starting at position 1216 of SEQ ID NO: 317408
acuuaauacccacaguagu

SEQ ID NO: 488528 - RNA, 19 nt, Artificial Sequence
  Description of Artificial Sequence: Synthetic oligonucleotide
  Antisense Strand to SEQ ID NO: 488527
acuacuguggguauuaagu

SEQ ID NO: 488529 - RNA, 19 nt, Artificial Sequence
  Description of Artificial Sequence: Synthetic oligonucleotide
  Sense strand starting at position 1250 of SEQ ID NO: 317408
agucacuaucuugaauagu

SEQ ID NO: 488530 - RNA, 19 nt, Artificial Sequence
  Description of Artificial Sequence: Synthetic oligonucleotide
  Antisense Strand to SEQ ID NO: 488529
acuauucaagauagugacu

SEQ ID NO: 488531 - RNA, 19 nt, Artificial Sequence
  Description of Artificial Sequence: Synthetic oligonucleotide
  Sense strand starting at position 1295 of SEQ ID NO: 317408
uguuaaacaguaugaacuu

SEQ ID NO: 488532 - RNA, 19 nt, Artificial Sequence
  Description of Artificial Sequence: Synthetic oligonucleotide
  Antisense Strand to SEQ ID NO: 488531
aaguucauacuguuuaaca

SEQ ID NO: 488533 - RNA, 19 nt, Artificial Sequence
  Description of Artificial Sequence: Synthetic oligonucleotide
  Sense strand starting at position 1428 of SEQ ID NO: 317408
ugguacaugucaucauuga

SEQ ID NO: 488534 - RNA, 19 nt, Artificial Sequence
  Description of Artificial Sequence: Synthetic oligonucleotide
  Antisense Strand to SEQ ID NO: 488533
ucaaugaugacauguacca

SEQ ID NO: 488535 - RNA, 19 nt, Artificial Sequence
  Description of Artificial Sequence: Synthetic oligonucleotide
  Sense strand starting at position 1429 of SEQ ID NO: 317408
gguacaugucaucauugaa

SEQ ID NO: 488536 - RNA, 19 nt, Artificial Sequence
  Description of Artificial Sequence: Synthetic oligonucleotide
  Antisense Strand to SEQ ID NO: 488535
uucaaugaugacauguacc

SEQ ID NO: 488537 - RNA, 19 nt, Artificial Sequence
  Description of Artificial Sequence: Synthetic oligonucleotide
  Sense strand starting at position 1432 of SEQ ID NO: 317408
acaugucaucauugaagca

SEQ ID NO: 488538 - RNA, 19 nt, Artificial Sequence
  Description of Artificial Sequence: Synthetic oligonucleotide
  Antisense Strand to SEQ ID NO: 488537
ugcuucaaugaugacaugu

SEQ ID NO: 488539 - RNA, 19 nt, Artificial Sequence
  Description of Artificial Sequence: Synthetic oligonucleotide
  Sense strand starting at position 1439 of SEQ ID NO: 317408
aucauugaagcauagcaau

SEQ ID NO: 488540 - RNA, 19 nt, Artificial Sequence
  Description of Artificial Sequence: Synthetic oligonucleotide
  Antisense Strand to SEQ ID NO: 488539
auugcuaugcuucaaugau

SEQ ID NO: 488541 - RNA, 19 nt, Artificial Sequence
  Description of Artificial Sequence: Synthetic oligonucleotide
  Sense strand starting at position 1618 of SEQ ID NO: 317408
agguuuaagccagacauug

SEQ ID NO: 488542 - RNA, 19 nt, Artificial Sequence
  Description of Artificial Sequence: Synthetic oligonucleotide
  Antisense Strand to SEQ ID NO: 488541
caaugucuggcuuaaaccu

SEQ ID NO: 488543 - RNA, 19 nt, Artificial Sequence
  Description of Artificial Sequence: Synthetic oligonucleotide
  Sense strand starting at position 2148 of SEQ ID NO: 317408
gagggcaaucucuggguaa

SEQ ID NO: 488544 - RNA, 19 nt, Artificial Sequence
  Description of Artificial Sequence: Synthetic oligonucleotide
  Antisense Strand to SEQ ID NO: 488543
uuacccagagauugcccuc

SEQ ID NO: 488545 - RNA, 19 nt, Artificial Sequence
  Description of Artificial Sequence: Synthetic oligonucleotide
  Sense strand starting at position 2150 of SEQ ID NO: 317408
gggcaaucucuggguaauc

SEQ ID NO: 488546 - RNA, 19 nt, Artificial Sequence
  Description of Artificial Sequence: Synthetic oligonucleotide
  Antisense Strand to SEQ ID NO: 488545
gauuacccagagauugccc

SEQ ID NO: 488547 - RNA, 19 nt, Artificial Sequence
  Description of Artificial Sequence: Synthetic oligonucleotide
  Sense strand starting at position 2166 of SEQ ID NO: 317408
auccacaugugcuuagauu

SEQ ID NO: 488548 - RNA, 19 nt, Artificial Sequence
  Description of Artificial Sequence: Synthetic oligonucleotide
  Antisense Strand to SEQ ID NO: 488547
aaucuaagcacauguggau

SEQ ID NO: 488549 - RNA, 19 nt, Artificial Sequence
  Description of Artificial Sequence: Synthetic oligonucleotide
  Sense strand starting at position 2235 of SEQ ID NO: 317408
agguguagagauugugaac

SEQ ID NO: 488550 - RNA, 19 nt, Artificial Sequence
  Description of Artificial Sequence: Synthetic oligonucleotide
  Antisense Strand to SEQ ID NO: 488549
guucacaaucucuacaccu

SEQ ID NO: 488551 - RNA, 19 nt, Artificial Sequence
  Description of Artificial Sequence: Synthetic oligonucleotide
  Sense strand starting at position 2392 of SEQ ID NO: 317408
acuacuucuguugguuaaa

SEQ ID NO: 488552 - RNA, 19 nt, Artificial Sequence
  Description of Artificial Sequence: Synthetic oligonucleotide
  Antisense Strand to SEQ ID NO: 488551
uuuaaccaacagaaguagu

SEQ ID NO: 488553 - RNA, 19 nt, Artificial Sequence
  Description of Artificial Sequence: Synthetic oligonucleotide
  Sense strand starting at position 2393 of SEQ ID NO: 317408
cuacuucuguugguuaaau

SEQ ID NO: 488554 - RNA, 19 nt, Artificial Sequence
  Description of Artificial Sequence: Synthetic oligonucleotide
  Antisense Strand to SEQ ID NO: 488553
auuuaaccaacagaaguag

SEQ ID NO: 488555 - RNA, 19 nt, Artificial Sequence
  Description of Artificial Sequence: Synthetic oligonucleotide
  Sense strand starting at position 2573 of SEQ ID NO: 317408
guacaugaguucccaauga

SEQ ID NO: 488556 - RNA, 19 nt, Artificial Sequence
  Description of Artificial Sequence: Synthetic oligonucleotide
  Antisense Strand to SEQ ID NO: 488555
ucauugggaacucauguac

SEQ ID NO: 488557 - RNA, 19 nt, Artificial Sequence
  Description of Artificial Sequence: Synthetic oligonucleotide
  Sense strand starting at position 2577 of SEQ ID NO: 317408
augaguucccaaugaauau

SEQ ID NO: 488558 - RNA, 19 nt, Artificial Sequence
  Description of Artificial Sequence: Synthetic oligonucleotide
  Antisense Strand to SEQ ID NO: 488557
auauucauugggaacucau

SEQ ID NO: 488559 - RNA, 19 nt, Artificial Sequence
  Description of Artificial Sequence: Synthetic oligonucleotide
  Sense strand starting at position 2654 of SEQ ID NO: 317408
augcaacaguguuuagaaa

SEQ ID NO: 488560 - RNA, 19 nt, Artificial Sequence
  Description of Artificial Sequence: Synthetic oligonucleotide
  Antisense Strand to SEQ ID NO: 488559
uuucuaaacacuguugcau

SEQ ID NO: 488561 - RNA, 19 nt, Artificial Sequence
  Description of Artificial Sequence: Synthetic oligonucleotide
  Sense strand starting at position 2655 of SEQ ID NO: 317408
ugcaacaguguuuagaaau

SEQ ID NO: 488562 - RNA, 19 nt, Artificial Sequence
  Description of Artificial Sequence: Synthetic oligonucleotide
  Antisense Strand to SEQ ID NO: 488561
auuucuaaacacuguugca

SEQ ID NO: 488563 - RNA, 19 nt, Artificial Sequence
  Description of Artificial Sequence: Synthetic oligonucleotide
  Sense strand starting at position 2661 of SEQ ID NO: 317408
aguguuuagaaaugggacu

SEQ ID NO: 488564 - RNA, 19 nt, Artificial Sequence
  Description of Artificial Sequence: Synthetic oligonucleotide
  Antisense Strand to SEQ ID NO: 488563
agucccauuucuaaacacu

SEQ ID NO: 488565 - RNA, 19 nt, Artificial Sequence
  Description of Artificial Sequence: Synthetic oligonucleotide
  Sense strand starting at position 2662 of SEQ ID NO: 317408
guguuuagaaaugggacuu

SEQ ID NO: 488566 - RNA, 19 nt, Artificial Sequence
  Description of Artificial Sequence: Synthetic oligonucleotide
  Antisense Strand to SEQ ID NO: 488565
aagucccauuucuaaacac

SEQ ID NO: 488567 - RNA, 19 nt, Artificial Sequence
  Description of Artificial Sequence: Synthetic oligonucleotide
  Sense strand starting at position 2663 of SEQ ID NO: 317408
uguuuagaaaugggacuuu

SEQ ID NO: 488568 - RNA, 19 nt, Artificial Sequence
  Description of Artificial Sequence: Synthetic oligonucleotide
  Antisense Strand to SEQ ID NO: 488567
aaagucccauuucuaaaca

SEQ ID NO: 488569 - RNA, 19 nt, Artificial Sequence
  Description of Artificial Sequence: Synthetic oligonucleotide
  Sense strand starting at position 2730 of SEQ ID NO: 317408
uaauuaaugcugugggagu

SEQ ID NO: 488570 - RNA, 19 nt, Artificial Sequence
  Description of Artificial Sequence: Synthetic oligonucleotide
  Antisense Strand to SEQ ID NO: 488569
acucccacagcauuaauua

SEQ ID NO: 488571 - RNA, 19 nt, Artificial Sequence
  Description of Artificial Sequence: Synthetic oligonucleotide
  Sense strand starting at position 3122 of SEQ ID NO: 317408
aucuucugccauggaauga

SEQ ID NO: 488572 - RNA, 19 nt, Artificial Sequence
  Description of Artificial Sequence: Synthetic oligonucleotide
  Antisense Strand to SEQ ID NO: 488571
ucauuccauggcagaagau

SEQ ID NO: 488573 - RNA, 19 nt, Artificial Sequence
  Description of Artificial Sequence: Synthetic oligonucleotide
  Sense strand starting at position 3266 of SEQ ID NO: 317408
aaaggagucuaagauauuu

SEQ ID NO: 488574 - RNA, 19 nt, Artificial Sequence
  Description of Artificial Sequence: Synthetic oligonucleotide
  Antisense Strand to SEQ ID NO: 488573
aaauaucuuagacuccuuu

SEQ ID NO: 488575 - RNA, 19 nt, Artificial Sequence
  Description of Artificial Sequence: Synthetic oligonucleotide
  Sense strand starting at position 3302 of SEQ ID NO: 317408
cagagaaagcuguaaguuu

SEQ ID NO: 488576 - RNA, 19 nt, Artificial Sequence
  Description of Artificial Sequence: Synthetic oligonucleotide
  Antisense Strand to SEQ ID NO: 488575
aaacuuacagcuuucucug

SEQ ID NO: 488577 - RNA, 19 nt, Artificial Sequence
  Description of Artificial Sequence: Synthetic oligonucleotide
  Sense strand starting at position 3385 of SEQ ID NO: 317408
auggacuucccacaguuau

SEQ ID NO: 488578 - RNA, 19 nt, Artificial Sequence
  Description of Artificial Sequence: Synthetic oligonucleotide
  Antisense Strand to SEQ ID NO: 488577
auaacugugggaaguccau

SEQ ID NO: 488579 - RNA, 19 nt, Artificial Sequence
  Description of Artificial Sequence: Synthetic oligonucleotide
  Sense strand starting at position 3405 of SEQ ID NO: 317408
uagugagauuuauaaagcu

SEQ ID NO: 488580 - RNA, 19 nt, Artificial Sequence
  Description of Artificial Sequence: Synthetic oligonucleotide
  Antisense Strand to SEQ ID NO: 488579
agcuuuauaaaucucacua

SEQ ID NO: 488581 - RNA, 19 nt, Artificial Sequence
  Description of Artificial Sequence: Synthetic oligonucleotide
  Sense strand starting at position 3479 of SEQ ID NO: 317408
uuggauuuggcguagcaca

SEQ ID NO: 488582 - RNA, 19 nt, Artificial Sequence
  Description of Artificial Sequence: Synthetic oligonucleotide
  Antisense Strand to SEQ ID NO: 488581
ugugcuacgccaaauccaa

SEQ ID NO: 488583 - RNA, 19 nt, Artificial Sequence
  Description of Artificial Sequence: Synthetic oligonucleotide
  Sense strand starting at position 3634 of SEQ ID NO: 317408
gugagaccagccuauuauu

SEQ ID NO: 488584 - RNA, 19 nt, Artificial Sequence
  Description of Artificial Sequence: Synthetic oligonucleotide
  Antisense Strand to SEQ ID NO: 488583
aauaauaggcuggucucac

SEQ ID NO: 488585 - RNA, 19 nt, Artificial Sequence
  Description of Artificial Sequence: Synthetic oligonucleotide
  Sense strand starting at position 3774 of SEQ ID NO: 317408
uugucuacaaagugaggua

SEQ ID NO: 488586 - RNA, 19 nt, Artificial Sequence
  Description of Artificial Sequence: Synthetic oligonucleotide
  Antisense Strand to SEQ ID NO: 488585
uaccucacuuuguagacaa

SEQ ID NO: 488587 - RNA, 19 nt, Artificial Sequence
  Description of Artificial Sequence: Synthetic oligonucleotide
  Sense strand starting at position 3800 of SEQ ID NO: 317408
acggacugauuaucaguaa

SEQ ID NO: 488588 - RNA, 19 nt, Artificial Sequence
  Description of Artificial Sequence: Synthetic oligonucleotide
  Antisense Strand to SEQ ID NO: 488587
uuacugauaaucaguccgu

SEQ ID NO: 488589 - RNA, 19 nt, Artificial Sequence
  Description of Artificial Sequence: Synthetic oligonucleotide
  Sense strand starting at position 3803 of SEQ ID NO: 317408
gacugauuaucaguaaguu

SEQ ID NO: 488590 - RNA, 19 nt, Artificial Sequence
  Description of Artificial Sequence: Synthetic oligonucleotide
  Antisense Strand to SEQ ID NO: 488589
aacuuacugauaaucaguc

SEQ ID NO: 488591 - RNA, 19 nt, Artificial Sequence
  Description of Artificial Sequence: Synthetic oligonucleotide
  Sense strand starting at position 3804 of SEQ ID NO: 317408
acugauuaucaguaaguua

SEQ ID NO: 488592 - RNA, 19 nt, Artificial Sequence
  Description of Artificial Sequence: Synthetic oligonucleotide
  Antisense Strand to SEQ ID NO: 488591
uaacuuacugauaaucagu

SEQ ID NO: 488593 - RNA, 19 nt, Artificial Sequence
  Description of Artificial Sequence: Synthetic oligonucleotide
  Sense strand starting at position 3807 of SEQ ID NO: 317408
gauuaucaguaaguuagag

SEQ ID NO: 488594 - RNA, 19 nt, Artificial Sequence
  Description of Artificial Sequence: Synthetic oligonucleotide
  Antisense Strand to SEQ ID NO: 488593
cucuaacuuacugauaauc

SEQ ID NO: 488595 - RNA, 19 nt, Artificial Sequence
  Description of Artificial Sequence: Synthetic oligonucleotide
  Sense strand starting at position 25 of SEQ ID NO: 317409
uaaagagauguuuggaugu

SEQ ID NO: 488596 - RNA, 19 nt, Artificial Sequence
  Description of Artificial Sequence: Synthetic oligonucleotide
  Antisense Strand to SEQ ID NO: 488595
acauccaaacaucucuuua

SEQ ID NO: 488597 - RNA, 19 nt, Artificial Sequence
  Description of Artificial Sequence: Synthetic oligonucleotide
  Sense strand starting at position 275 of SEQ ID NO: 317409
cuuaucugggacugugaua

SEQ ID NO: 488598 - RNA, 19 nt, Artificial Sequence
  Description of Artificial Sequence: Synthetic oligonucleotide
  Antisense Strand to SEQ ID NO: 488597
uaucacagucccagauaag

SEQ ID NO: 488599 - RNA, 19 nt, Artificial Sequence
  Description of Artificial Sequence: Synthetic oligonucleotide
  Sense strand starting at position 282 of SEQ ID NO: 317409
gggacugugauauguuauc

SEQ ID NO: 488600 - RNA, 19 nt, Artificial Sequence
  Description of Artificial Sequence: Synthetic oligonucleotide
  Antisense Strand to SEQ ID NO: 488599
gauaacauaucacaguccc

SEQ ID NO: 488601 - RNA, 19 nt, Artificial Sequence
  Description of Artificial Sequence: Synthetic oligonucleotide
  Sense strand starting at position 409 of SEQ ID NO: 317409
acauaauugccacaagagu

SEQ ID NO: 488602 - RNA, 19 nt, Artificial Sequence
  Description of Artificial Sequence: Synthetic oligonucleotide
  Antisense Strand to SEQ ID NO: 488601
acucuuguggcaauuaugu

SEQ ID NO: 488603 - RNA, 19 nt, Artificial Sequence
  Description of Artificial Sequence: Synthetic oligonucleotide
  Sense strand starting at position 626 of SEQ ID NO: 317409
uauggcauuugcuuuguua

SEQ ID NO: 488604 - RNA, 19 nt, Artificial Sequence
  Description of Artificial Sequence: Synthetic oligonucleotide
  Antisense Strand to SEQ ID NO: 488603
uaacaaagcaaaugccaua

SEQ ID NO: 488605 - RNA, 19 nt, Artificial Sequence
  Description of Artificial Sequence: Synthetic oligonucleotide
  Sense strand starting at position 630 of SEQ ID NO: 317409
gcauuugcuuuguuacuua

SEQ ID NO: 488606 - RNA, 19 nt, Artificial Sequence
  Description of Artificial Sequence: Synthetic oligonucleotide
  Antisense Strand to SEQ ID NO: 488605
uaaguaacaaagcaaaugc

SEQ ID NO: 488607 - RNA, 19 nt, Artificial Sequence
  Description of Artificial Sequence: Synthetic oligonucleotide
  Sense strand starting at position 654 of SEQ ID NO: 317409
ugauuugccucaguuauuc

SEQ ID NO: 488608 - RNA, 19 nt, Artificial Sequence
  Description of Artificial Sequence: Synthetic oligonucleotide
  Antisense Strand to SEQ ID NO: 488607
gaauaacugaggcaaauca

SEQ ID NO: 488609 - RNA, 19 nt, Artificial Sequence
  Description of Artificial Sequence: Synthetic oligonucleotide
  Sense strand starting at position 1005 of SEQ ID NO: 317409
ggaaauuucugguauuaga

SEQ ID NO: 488610 - RNA, 19 nt, Artificial Sequence
  Description of Artificial Sequence: Synthetic oligonucleotide
  Antisense Strand to SEQ ID NO: 488609
ucuaauaccagaaauuucc

SEQ ID NO: 488611 - RNA, 19 nt, Artificial Sequence
  Description of Artificial Sequence: Synthetic oligonucleotide
  Sense strand starting at position 1456 of SEQ ID NO: 317409
gguagugagaaauguuuac

SEQ ID NO: 488612 - RNA, 19 nt, Artificial Sequence
  Description of Artificial Sequence: Synthetic oligonucleotide
  Antisense Strand to SEQ ID NO: 488611
guaaacauuucucacuacc

SEQ ID NO: 488613 - RNA, 19 nt, Artificial Sequence
  Description of Artificial Sequence: Synthetic oligonucleotide
  Sense strand starting at position 1460 of SEQ ID NO: 317409
gugagaaauguuuacuuau

SEQ ID NO: 488614 - RNA, 19 nt, Artificial Sequence
  Description of Artificial Sequence: Synthetic oligonucleotide
  Antisense Strand to SEQ ID NO: 488613
auaaguaaacauuucucac

SEQ ID NO: 488615 - RNA, 19 nt, Artificial Sequence
  Description of Artificial Sequence: Synthetic oligonucleotide
  Sense strand starting at position 1613 of SEQ ID NO: 317409
guacguagacaaggaaaua

SEQ ID NO: 488616 - RNA, 19 nt, Artificial Sequence
  Description of Artificial Sequence: Synthetic oligonucleotide
  Antisense Strand to SEQ ID NO: 488615
uauuuccuugucuacguac

SEQ ID NO: 488617 - RNA, 19 nt, Artificial Sequence
  Description of Artificial Sequence: Synthetic oligonucleotide
  Sense strand starting at position 1664 of SEQ ID NO: 317409
guuggaauaugucuccaua

SEQ ID NO: 488618 - RNA, 19 nt, Artificial Sequence
  Description of Artificial Sequence: Synthetic oligonucleotide
  Antisense Strand to SEQ ID NO: 488617
uauggagacauauuccaac

SEQ ID NO: 488619 - RNA, 19 nt, Artificial Sequence
  Description of Artificial Sequence: Synthetic oligonucleotide
  Sense strand starting at position 1666 of SEQ ID NO: 317409
uggaauaugucuccauauu

SEQ ID NO: 488620 - RNA, 19 nt, Artificial Sequence
  Description of Artificial Sequence: Synthetic oligonucleotide
  Antisense Strand to SEQ ID NO: 488619
aauauggagacauauucca

SEQ ID NO: 488621 - RNA, 19 nt, Artificial Sequence
  Description of Artificial Sequence: Synthetic oligonucleotide
  Sense strand starting at position 1667 of SEQ ID NO: 317409
ggaauaugucuccauauuc

SEQ ID NO: 488622 - RNA, 19 nt, Artificial Sequence
  Description of Artificial Sequence: Synthetic oligonucleotide
  Antisense Strand to SEQ ID NO: 488621
gaauauggagacauauucc

SEQ ID NO: 488623 - RNA, 19 nt, Artificial Sequence
  Description of Artificial Sequence: Synthetic oligonucleotide
  Sense strand starting at position 1781 of SEQ ID NO: 317409
ucaauuguuucuuuaugag

SEQ ID NO: 488624 - RNA, 19 nt, Artificial Sequence
  Description of Artificial Sequence: Synthetic oligonucleotide
  Antisense Strand to SEQ ID NO: 488623
cucauaaagaaacaauuga

SEQ ID NO: 488625 - RNA, 19 nt, Artificial Sequence
  Description of Artificial Sequence: Synthetic oligonucleotide
  Sense strand starting at position 2122 of SEQ ID NO: 317409
ugcaauagaugauugugaa

SEQ ID NO: 488626 - RNA, 19 nt, Artificial Sequence
  Description of Artificial Sequence: Synthetic oligonucleotide
  Antisense Strand to SEQ ID NO: 488625
uucacaaucaucuauugca

SEQ ID NO: 488627 - RNA, 19 nt, Artificial Sequence
  Description of Artificial Sequence: Synthetic oligonucleotide
  Sense strand starting at position 2123 of SEQ ID NO: 317409
gcaauagaugauugugaag

SEQ ID NO: 488628 - RNA, 19 nt, Artificial Sequence
  Description of Artificial Sequence: Synthetic oligonucleotide
  Antisense Strand to SEQ ID NO: 488627
cuucacaaucaucuauugc

SEQ ID NO: 488629 - RNA, 19 nt, Artificial Sequence
  Description of Artificial Sequence: Synthetic oligonucleotide
  Sense strand starting at position 2203 of SEQ ID NO: 317409
gagugagucagaugacaga

SEQ ID NO: 488630 - RNA, 19 nt, Artificial Sequence
  Description of Artificial Sequence: Synthetic oligonucleotide
  Antisense Strand to SEQ ID NO: 488629
ucugucaucugacucacuc

SEQ ID NO: 488631 - RNA, 19 nt, Artificial Sequence
  Description of Artificial Sequence: Synthetic oligonucleotide
  Sense strand starting at position 2262 of SEQ ID NO: 317409
ugauaaagauguuuccaca

SEQ ID NO: 488632 - RNA, 19 nt, Artificial Sequence
  Description of Artificial Sequence: Synthetic oligonucleotide
  Antisense Strand to SEQ ID NO: 488631
uguggaaacaucuuuauca

SEQ ID NO: 488633 - RNA, 19 nt, Artificial Sequence
  Description of Artificial Sequence: Synthetic oligonucleotide
  Sense strand starting at position 2553 of SEQ ID NO: 317409
gugaaaugacucuaagugc

SEQ ID NO: 488634 - RNA, 19 nt, Artificial Sequence
  Description of Artificial Sequence: Synthetic oligonucleotide
  Antisense Strand to SEQ ID NO: 488633
gcacuuagagucauuucac

SEQ ID NO: 488635 - RNA, 19 nt, Artificial Sequence
  Description of Artificial Sequence: Synthetic oligonucleotide
  Sense strand starting at position 2561 of SEQ ID NO: 317409
acucuaagugcucacugau

SEQ ID NO: 488636 - RNA, 19 nt, Artificial Sequence
  Description of Artificial Sequence: Synthetic oligonucleotide
  Antisense Strand to SEQ ID NO: 488635
aucagugagcacuuagagu

SEQ ID NO: 488637 - RNA, 19 nt, Artificial Sequence
  Description of Artificial Sequence: Synthetic oligonucleotide
  Sense strand starting at position 2665 of SEQ ID NO: 317409
cagccauguguugacauga

SEQ ID NO: 488638 - RNA, 19 nt, Artificial Sequence
  Description of Artificial Sequence: Synthetic oligonucleotide
  Antisense Strand to SEQ ID NO: 488637
ucaugucaacacauggcug

SEQ ID NO: 488639 - RNA, 19 nt, Artificial Sequence
  Description of Artificial Sequence: Synthetic oligonucleotide
  Sense strand starting at position 2670 of SEQ ID NO: 317409
auguguugacaugauuaca

SEQ ID NO: 488640 - RNA, 19 nt, Artificial Sequence
  Description of Artificial Sequence: Synthetic oligonucleotide
  Antisense Strand to SEQ ID NO: 488639
uguaaucaugucaacacau

SEQ ID NO: 488641 - RNA, 19 nt, Artificial Sequence
  Description of Artificial Sequence: Synthetic oligonucleotide
  Sense strand starting at position 2764 of SEQ ID NO: 317409
uggauaacucaauguacua

SEQ ID NO: 488642 - RNA, 19 nt, Artificial Sequence
  Description of Artificial Sequence: Synthetic oligonucleotide
  Antisense Strand to SEQ ID NO: 488641
uaguacauugaguuaucca

SEQ ID NO: 488643 - RNA, 19 nt, Artificial Sequence
  Description of Artificial Sequence: Synthetic oligonucleotide
  Sense strand starting at position 2849 of SEQ ID NO: 317409
cagagugugccauauggga

SEQ ID NO: 488644 - RNA, 19 nt, Artificial Sequence
  Description of Artificial Sequence: Synthetic oligonucleotide
  Antisense Strand to SEQ ID NO: 488643
ucccauauggcacacucug

SEQ ID NO: 488645 - RNA, 19 nt, Artificial Sequence
  Description of Artificial Sequence: Synthetic oligonucleotide
  Sense strand starting at position 2926 of SEQ ID NO: 317409
caaacuugcugagucagaa

SEQ ID NO: 488646 - RNA, 19 nt, Artificial Sequence
  Description of Artificial Sequence: Synthetic oligonucleotide
  Antisense Strand to SEQ ID NO: 488645
uucugacucagcaaguuug

SEQ ID NO: 488647 - RNA, 19 nt, Artificial Sequence
  Description of Artificial Sequence: Synthetic oligonucleotide
  Sense strand starting at position 2955 of SEQ ID NO: 317409
guccuaaggcguuugcauu

SEQ ID NO: 488648 - RNA, 19 nt, Artificial Sequence
  Description of Artificial Sequence: Synthetic oligonucleotide
  Antisense Strand to SEQ ID NO: 488647
aaugcaaacgccuuaggac

SEQ ID NO: 488649 - RNA, 19 nt, Artificial Sequence
  Description of Artificial Sequence: Synthetic oligonucleotide
  Sense strand starting at position 2977 of SEQ ID NO: 317409
acauuaucuccaggugauu

SEQ ID NO: 488650 - RNA, 19 nt, Artificial Sequence
  Description of Artificial Sequence: Synthetic oligonucleotide
  Antisense Strand to SEQ ID NO: 488649
aaucaccuggagauaaugu

SEQ ID NO: 488651 - RNA, 19 nt, Artificial Sequence
  Description of Artificial Sequence: Synthetic oligonucleotide
  Sense strand starting at position 3003 of SEQ ID NO: 317409
uacugugaaguuugaaaca

SEQ ID NO: 488652 - RNA, 19 nt, Artificial Sequence
  Description of Artificial Sequence: Synthetic oligonucleotide
  Antisense Strand to SEQ ID NO: 488651
uguuucaaacuucacagua

SEQ ID NO: 488653 - RNA, 19 nt, Artificial Sequence
  Description of Artificial Sequence: Synthetic oligonucleotide
  Sense strand starting at position 3178 of SEQ ID NO: 317409
ucuugaaugcauuaguuau

SEQ ID NO: 488654 - RNA, 19 nt, Artificial Sequence
  Description of Artificial Sequence: Synthetic oligonucleotide
  Antisense Strand to SEQ ID NO: 488653
auaacuaaugcauucaaga

SEQ ID NO: 488655 - RNA, 19 nt, Artificial Sequence
  Description of Artificial Sequence: Synthetic oligonucleotide
  Sense strand starting at position 3202 of SEQ ID NO: 317409
ggcuuuaaccaguaaagau

SEQ ID NO: 488656 - RNA, 19 nt, Artificial Sequence
  Description of Artificial Sequence: Synthetic oligonucleotide
  Antisense Strand to SEQ ID NO: 488655
aucuuuacugguuaaagcc

SEQ ID NO: 488657 - RNA, 19 nt, Artificial Sequence
  Description of Artificial Sequence: Synthetic oligonucleotide
  Sense strand starting at position 3255 of SEQ ID NO: 317409
ggaaguauuuauuagguaa

SEQ ID NO: 488658 - RNA, 19 nt, Artificial Sequence
  Description of Artificial Sequence: Synthetic oligonucleotide
  Antisense Strand to SEQ ID NO: 488657
uuaccuaauaaauacuucc

SEQ ID NO: 488659 - RNA, 19 nt, Artificial Sequence
  Description of Artificial Sequence: Synthetic oligonucleotide
  Sense strand starting at position 3290 of SEQ ID NO: 317409
ggaacagccuuacuggaaa

SEQ ID NO: 488660 - RNA, 19 nt, Artificial Sequence
  Description of Artificial Sequence: Synthetic oligonucleotide
  Antisense Strand to SEQ ID NO: 488659
uuuccaguaaggcuguucc

SEQ ID NO: 488661 - RNA, 19 nt, Artificial Sequence
  Description of Artificial Sequence: Synthetic oligonucleotide
  Sense strand starting at position 3310 of SEQ ID NO: 317409
uaugauuacucucugggua

SEQ ID NO: 488662 - RNA, 19 nt, Artificial Sequence
  Description of Artificial Sequence: Synthetic oligonucleotide
  Antisense Strand to SEQ ID NO: 488661
uacccagagaguaaucaua

SEQ ID NO: 488663 - RNA, 19 nt, Artificial Sequence
  Description of Artificial Sequence: Synthetic oligonucleotide
  Sense strand starting at position 3311 of SEQ ID NO: 317409
augauuacucucuggguaa

SEQ ID NO: 488664 - RNA, 19 nt, Artificial Sequence
  Description of Artificial Sequence: Synthetic oligonucleotide
  Antisense Strand to SEQ ID NO: 488663
uuacccagagaguaaucau

SEQ ID NO: 488665 - RNA, 19 nt, Artificial Sequence
  Description of Artificial Sequence: Synthetic oligonucleotide
  Sense strand starting at position 3313 of SEQ ID NO: 317409
gauuacucucuggguaaua

SEQ ID NO: 488666 - RNA, 19 nt, Artificial Sequence
  Description of Artificial Sequence: Synthetic oligonucleotide
  Antisense Strand to SEQ ID NO: 488665
uauuacccagagaguaauc

SEQ ID NO: 488667 - RNA, 19 nt, Artificial Sequence
  Description of Artificial Sequence: Synthetic oligonucleotide
  Sense strand starting at position 3314 of SEQ ID NO: 317409
auuacucucuggguaauau

SEQ ID NO: 488668 - RNA, 19 nt, Artificial Sequence
  Description of Artificial Sequence: Synthetic oligonucleotide
  Antisense Strand to SEQ ID NO: 488667
auauuacccagagaguaau

SEQ ID NO: 488669 - RNA, 19 nt, Artificial Sequence
  Description of Artificial Sequence: Synthetic oligonucleotide
  Sense strand starting at position 3315 of SEQ ID NO: 317409
uuacucucuggguaauaua

SEQ ID NO: 488670 - RNA, 19 nt, Artificial Sequence
  Description of Artificial Sequence: Synthetic oligonucleotide
  Antisense Strand to SEQ ID NO: 488669
uauauuacccagagaguaa

SEQ ID NO: 488671 - RNA, 19 nt, Artificial Sequence
  Description of Artificial Sequence: Synthetic oligonucleotide
  Sense strand starting at position 3411 of SEQ ID NO: 317409
ucaugagauuuauaagcau

SEQ ID NO: 488672 - RNA, 19 nt, Artificial Sequence
  Description of Artificial Sequence: Synthetic oligonucleotide
  Antisense Strand to SEQ ID NO: 488671
augcuuauaaaucucauga

SEQ ID NO: 488673 - RNA, 19 nt, Artificial Sequence
  Description of Artificial Sequence: Synthetic oligonucleotide
  Sense strand starting at position 3475 of SEQ ID NO: 317409
uuuacauucugaguggaaa

SEQ ID NO: 488674 - RNA, 19 nt, Artificial Sequence
  Description of Artificial Sequence: Synthetic oligonucleotide
  Antisense Strand to SEQ ID NO: 488673
uuuccacucagaauguaaa

SEQ ID NO: 488675 - RNA, 19 nt, Artificial Sequence
  Description of Artificial Sequence: Synthetic oligonucleotide
  Sense strand starting at position 56 of SEQ ID NO: 317410
aaagcaugagauuggucuu

SEQ ID NO: 488676 - RNA, 19 nt, Artificial Sequence
  Description of Artificial Sequence: Synthetic oligonucleotide
  Antisense Strand to SEQ ID NO: 488675
aagaccaaucucaugcuuu

SEQ ID NO: 488677 - RNA, 19 nt, Artificial Sequence
  Description of Artificial Sequence: Synthetic oligonucleotide
  Sense strand starting at position 59 of SEQ ID NO: 317410
gcaugagauuggucuucag

SEQ ID NO: 488678 - RNA, 19 nt, Artificial Sequence
  Description of Artificial Sequence: Synthetic oligonucleotide
  Antisense Strand to SEQ ID NO: 488677
cugaagaccaaucucaugc

SEQ ID NO: 488679 - RNA, 19 nt, Artificial Sequence
  Description of Artificial Sequence: Synthetic oligonucleotide
  Sense strand starting at position 83 of SEQ ID NO: 317410
agauaagugaacugucuag

SEQ ID NO: 488680 - RNA, 19 nt, Artificial Sequence
  Description of Artificial Sequence: Synthetic oligonucleotide
  Antisense Strand to SEQ ID NO: 488679
cuagacaguucacuuaucu

SEQ ID NO: 488681 - RNA, 19 nt, Artificial Sequence
  Description of Artificial Sequence: Synthetic oligonucleotide
  Sense strand starting at position 87 of SEQ ID NO: 317410
aagugaacugucuaggcau

SEQ ID NO: 488682 - RNA, 19 nt, Artificial Sequence
  Description of Artificial Sequence: Synthetic oligonucleotide
  Antisense Strand to SEQ ID NO: 488681
augccuagacaguucacuu

SEQ ID NO: 488683 - RNA, 19 nt, Artificial Sequence
  Description of Artificial Sequence: Synthetic oligonucleotide
  Sense strand starting at position 98 of SEQ ID NO: 317410
cuaggcaucccagaccaau

SEQ ID NO: 488684 - RNA, 19 nt, Artificial Sequence
  Description of Artificial Sequence: Synthetic oligonucleotide
  Antisense Strand to SEQ ID NO: 488683
auuggucugggaugccuag

SEQ ID NO: 488685 - RNA, 19 nt, Artificial Sequence
  Description of Artificial Sequence: Synthetic oligonucleotide
  Sense strand starting at position 270 of SEQ ID NO: 317410
caguguucgcucucugcuu

SEQ ID NO: 488686 - RNA, 19 nt, Artificial Sequence
  Description of Artificial Sequence: Synthetic oligonucleotide
  Antisense Strand to SEQ ID NO: 488685
aagcagagagcgaacacug

SEQ ID NO: 488687 - RNA, 19 nt, Artificial Sequence
  Description of Artificial Sequence: Synthetic oligonucleotide
  Sense strand starting at position 276 of SEQ ID NO: 317410
ucgcucucugcuuagcaaa

SEQ ID NO: 488688 - RNA, 19 nt, Artificial Sequence
  Description of Artificial Sequence: Synthetic oligonucleotide
  Antisense Strand to SEQ ID NO: 488687
uuugcuaagcagagagcga

SEQ ID NO: 488689 - RNA, 19 nt, Artificial Sequence
  Description of Artificial Sequence: Synthetic oligonucleotide
  Sense strand starting at position 367 of SEQ ID NO: 317410
agucccuuccuagggauga

SEQ ID NO: 488690 - RNA, 19 nt, Artificial Sequence
  Description of Artificial Sequence: Synthetic oligonucleotide
  Antisense Strand to SEQ ID NO: 488689
ucaucccuaggaagggacu

SEQ ID NO: 488691 - RNA, 19 nt, Artificial Sequence
  Description of Artificial Sequence: Synthetic oligonucleotide
  Sense strand starting at position 371 of SEQ ID NO: 317410
ccuuccuagggaugacuau

SEQ ID NO: 488692 - RNA, 19 nt, Artificial Sequence
  Description of Artificial Sequence: Synthetic oligonucleotide
  Antisense Strand to SEQ ID NO: 488691
auagucaucccuaggaagg

SEQ ID NO: 488693 - RNA, 19 nt, Artificial Sequence
  Description of Artificial Sequence: Synthetic oligonucleotide
  Sense strand starting at position 989 of SEQ ID NO: 317410
accucaaagcucuggcaga

SEQ ID NO: 488694 - RNA, 19 nt, Artificial Sequence
  Description of Artificial Sequence: Synthetic oligonucleotide
  Antisense Strand to SEQ ID NO: 488693
ucugccagagcuuugaggu

SEQ ID NO: 488695 - RNA, 19 nt, Artificial Sequence
  Description of Artificial Sequence: Synthetic oligonucleotide
  Sense strand starting at position 2060 of SEQ ID NO: 317410
ucuguaugaacuggauguu

SEQ ID NO: 488696 - RNA, 19 nt, Artificial Sequence
  Description of Artificial Sequence: Synthetic oligonucleotide
  Antisense Strand to SEQ ID NO: 488695
aacauccaguucauacaga

SEQ ID NO: 488697 - RNA, 19 nt, Artificial Sequence
  Description of Artificial Sequence: Synthetic oligonucleotide
  Sense strand starting at position 2072 of SEQ ID NO: 317410
ggauguuguccauggacga

SEQ ID NO: 488698 - RNA, 19 nt, Artificial Sequence
  Description of Artificial Sequence: Synthetic oligonucleotide
  Antisense Strand to SEQ ID NO: 488697
ucguccauggacaacaucc

SEQ ID NO: 488699 - RNA, 19 nt, Artificial Sequence
  Description of Artificial Sequence: Synthetic oligonucleotide
  Sense strand starting at position 2088 of SEQ ID NO: 317410
cgagcuccuacagauaagu

SEQ ID NO: 488700 - RNA, 19 nt, Artificial Sequence
  Description of Artificial Sequence: Synthetic oligonucleotide
  Antisense Strand to SEQ ID NO: 488699
acuuaucuguaggagcucg

SEQ ID NO: 488701 - RNA, 19 nt, Artificial Sequence
  Description of Artificial Sequence: Synthetic oligonucleotide
  Sense strand starting at position 2119 of SEQ ID NO: 317410
acagcagcucuuuauuaag

SEQ ID NO: 488702 - RNA, 19 nt, Artificial Sequence
  Description of Artificial Sequence: Synthetic oligonucleotide
  Antisense Strand to SEQ ID NO: 488701
cuuaauaaagagcugcugu

SEQ ID NO: 488703 - RNA, 19 nt, Artificial Sequence
  Description of Artificial Sequence: Synthetic oligonucleotide
  Sense strand starting at position 2142 of SEQ ID NO: 317410
gucuguauuccggauguuu

SEQ ID NO: 488704 - RNA, 19 nt, Artificial Sequence
  Description of Artificial Sequence: Synthetic oligonucleotide
  Antisense Strand to SEQ ID NO: 488703
aaacauccggaauacagac

SEQ ID NO: 488705 - RNA, 19 nt, Artificial Sequence
  Description of Artificial Sequence: Synthetic oligonucleotide
  Sense strand starting at position 2198 of SEQ ID NO: 317410
cccugugcgguguuauaua

SEQ ID NO: 488706 - RNA, 19 nt, Artificial Sequence
  Description of Artificial Sequence: Synthetic oligonucleotide
  Antisense Strand to SEQ ID NO: 488705
uauauaacaccgcacaggg

SEQ ID NO: 488707 - RNA, 19 nt, Artificial Sequence
  Description of Artificial Sequence: Synthetic oligonucleotide
  Sense strand starting at position 2246 of SEQ ID NO: 317410
aucugaugacuuugcacaa

SEQ ID NO: 488708 - RNA, 19 nt, Artificial Sequence
  Description of Artificial Sequence: Synthetic oligonucleotide
  Antisense Strand to SEQ ID NO: 488707
uugugcaaagucaucagau

SEQ ID NO: 488709 - RNA, 19 nt, Artificial Sequence
  Description of Artificial Sequence: Synthetic oligonucleotide
  Sense strand starting at position 2370 of SEQ ID NO: 317410
gaguaauugcuauaauugc

SEQ ID NO: 488710 - RNA, 19 nt, Artificial Sequence
  Description of Artificial Sequence: Synthetic oligonucleotide
  Antisense Strand to SEQ ID NO: 488709
gcaauuauagcaauuacuc

SEQ ID NO: 488711 - RNA, 19 nt, Artificial Sequence
  Description of Artificial Sequence: Synthetic oligonucleotide
  Sense strand starting at position 2399 of SEQ ID NO: 317410
agggcaaauuaucuaaugu

SEQ ID NO: 488712 - RNA, 19 nt, Artificial Sequence
  Description of Artificial Sequence: Synthetic oligonucleotide
  Antisense Strand to SEQ ID NO: 488711
acauuagauaauuugcccu

SEQ ID NO: 488713 - RNA, 19 nt, Artificial Sequence
  Description of Artificial Sequence: Synthetic oligonucleotide
  Sense strand starting at position 2400 of SEQ ID NO: 317410
gggcaaauuaucuaaugug

SEQ ID NO: 488714 - RNA, 19 nt, Artificial Sequence
  Description of Artificial Sequence: Synthetic oligonucleotide
  Antisense Strand to SEQ ID NO: 488713
cacauuagauaauuugccc

SEQ ID NO: 488715 - RNA, 19 nt, Artificial Sequence
  Description of Artificial Sequence: Synthetic oligonucleotide
  Sense strand starting at position 2518 of SEQ ID NO: 317410
cuguaaucauaagagagga

SEQ ID NO: 488716 - RNA, 19 nt, Artificial Sequence
  Description of Artificial Sequence: Synthetic oligonucleotide
  Antisense Strand to SEQ ID NO: 488715
uccucucuuaugauuacag

SEQ ID NO: 488717 - RNA, 19 nt, Artificial Sequence
  Description of Artificial Sequence: Synthetic oligonucleotide
  Sense strand starting at position 2570 of SEQ ID NO: 317410
ugggcaucuccucguggau

SEQ ID NO: 488718 - RNA, 19 nt, Artificial Sequence
  Description of Artificial Sequence: Synthetic oligonucleotide
  Antisense Strand to SEQ ID NO: 488717
auccacgaggagaugccca

SEQ ID NO: 488719 - RNA, 19 nt, Artificial Sequence
  Description of Artificial Sequence: Synthetic oligonucleotide
  Sense strand starting at position 2782 of SEQ ID NO: 317410
ccaguucucugcucaagac

SEQ ID NO: 488720 - RNA, 19 nt, Artificial Sequence
  Description of Artificial Sequence: Synthetic oligonucleotide
  Antisense Strand to SEQ ID NO: 488719
gucuugagcagagaacugg

SEQ ID NO: 488721 - RNA, 19 nt, Artificial Sequence
  Description of Artificial Sequence: Synthetic oligonucleotide
  Sense strand starting at position 2804 of SEQ ID NO: 317410
ccaguugcuccagaucaca

SEQ ID NO: 488722 - RNA, 19 nt, Artificial Sequence
  Description of Artificial Sequence: Synthetic oligonucleotide
  Antisense Strand to SEQ ID NO: 488721
ugugaucuggagcaacugg

SEQ ID NO: 488723 - RNA, 19 nt, Artificial Sequence
  Description of Artificial Sequence: Synthetic oligonucleotide
  Sense strand starting at position 2908 of SEQ ID NO: 317410
cuuccuugccuagagucau

SEQ ID NO: 488724 - RNA, 19 nt, Artificial Sequence
  Description of Artificial Sequence: Synthetic oligonucleotide
  Antisense Strand to SEQ ID NO: 488723
augacucuaggcaaggaag

SEQ ID NO: 488725 - RNA, 19 nt, Artificial Sequence
  Description of Artificial Sequence: Synthetic oligonucleotide
  Sense strand starting at position 2920 of SEQ ID NO: 317410
gagucauccuuccugcaga

SEQ ID NO: 488726 - RNA, 19 nt, Artificial Sequence
  Description of Artificial Sequence: Synthetic oligonucleotide
  Antisense Strand to SEQ ID NO: 488725
ucugcaggaaggaugacuc

SEQ ID NO: 488727 - RNA, 19 nt, Artificial Sequence
  Description of Artificial Sequence: Synthetic oligonucleotide
  Sense strand starting at position 2971 of SEQ ID NO: 317410
gcacaagugucaucugcau

SEQ ID NO: 488728 - RNA, 19 nt, Artificial Sequence
  Description of Artificial Sequence: Synthetic oligonucleotide
  Antisense Strand to SEQ ID NO: 488727
augcagaugacacuugugc

SEQ ID NO: 488729 - RNA, 19 nt, Artificial Sequence
  Description of Artificial Sequence: Synthetic oligonucleotide
  Sense strand starting at position 3071 of SEQ ID NO: 317410
gcuccauuguucucauuag

SEQ ID NO: 488730 - RNA, 19 nt, Artificial Sequence
  Description of Artificial Sequence: Synthetic oligonucleotide
  Antisense Strand to SEQ ID NO: 488729
cuaaugagaacaauggagc

SEQ ID NO: 488731 - RNA, 19 nt, Artificial Sequence
  Description of Artificial Sequence: Synthetic oligonucleotide
  Sense strand starting at position 3096 of SEQ ID NO: 317410
gggcgucauuucuaauaca

SEQ ID NO: 488732 - RNA, 19 nt, Artificial Sequence
  Description of Artificial Sequence: Synthetic oligonucleotide
  Antisense Strand to SEQ ID NO: 488731
uguauuagaaaugacgccc

SEQ ID NO: 488733 - RNA, 19 nt, Artificial Sequence
  Description of Artificial Sequence: Synthetic oligonucleotide
  Sense strand starting at position 3115 of SEQ ID NO: 317410
cucuauaaucugugugucu

SEQ ID NO: 488734 - RNA, 19 nt, Artificial Sequence
  Description of Artificial Sequence: Synthetic oligonucleotide
  Antisense Strand to SEQ ID NO: 488733
agacacacagauuauagag

SEQ ID NO: 488735 - RNA, 19 nt, Artificial Sequence
  Description of Artificial Sequence: Synthetic oligonucleotide
  Sense strand starting at position 3189 of SEQ ID NO: 317410
uccuuuguucucugcugaa

SEQ ID NO: 488736 - RNA, 19 nt, Artificial Sequence
  Description of Artificial Sequence: Synthetic oligonucleotide
  Antisense Strand to SEQ ID NO: 488735
uucagcagagaacaaagga

SEQ ID NO: 488737 - RNA, 19 nt, Artificial Sequence
  Description of Artificial Sequence: Synthetic oligonucleotide
  Sense strand starting at position 3217 of SEQ ID NO: 317410
ccuguaaccucuccggagu

SEQ ID NO: 488738 - RNA, 19 nt, Artificial Sequence
  Description of Artificial Sequence: Synthetic oligonucleotide
  Antisense Strand to SEQ ID NO: 488737
acuccggagagguuacagg

SEQ ID NO: 488739 - RNA, 19 nt, Artificial Sequence
  Description of Artificial Sequence: Synthetic oligonucleotide
  Sense strand starting at position 3231 of SEQ ID NO: 317410
ggagugagcgcuuagaagu

SEQ ID NO: 488740 - RNA, 19 nt, Artificial Sequence
  Description of Artificial Sequence: Synthetic oligonucleotide
  Antisense Strand to SEQ ID NO: 488739
acuucuaagcgcucacucc

SEQ ID NO: 488741 - RNA, 19 nt, Artificial Sequence
  Description of Artificial Sequence: Synthetic oligonucleotide
  Sense strand starting at position 3241 of SEQ ID NO: 317410
cuuagaaguacagguugaa

SEQ ID NO: 488742 - RNA, 19 nt, Artificial Sequence
  Description of Artificial Sequence: Synthetic oligonucleotide
  Antisense Strand to SEQ ID NO: 488741
uucaaccuguacuucuaag

SEQ ID NO: 488743 - RNA, 19 nt, Artificial Sequence
  Description of Artificial Sequence: Synthetic oligonucleotide
  Sense strand starting at position 3351 of SEQ ID NO: 317410
auauuaccguuccuugaaa

SEQ ID NO: 488744 - RNA, 19 nt, Artificial Sequence
  Description of Artificial Sequence: Synthetic oligonucleotide
  Antisense Strand to SEQ ID NO: 488743
uuucaaggaacgguaauau

SEQ ID NO: 488745 - RNA, 19 nt, Artificial Sequence
  Description of Artificial Sequence: Synthetic oligonucleotide
  Sense strand starting at position 3353 of SEQ ID NO: 317410
auuaccguuccuugaaauu

SEQ ID NO: 488746 - RNA, 19 nt, Artificial Sequence
  Description of Artificial Sequence: Synthetic oligonucleotide
  Antisense Strand to SEQ ID NO: 488745
aauuucaaggaacgguaau

SEQ ID NO: 488747 - RNA, 19 nt, Artificial Sequence
  Description of Artificial Sequence: Synthetic oligonucleotide
  Sense strand starting at position 3418 of SEQ ID NO: 317410
gaaugaaugucacuguaua

SEQ ID NO: 488748 - RNA, 19 nt, Artificial Sequence
  Description of Artificial Sequence: Synthetic oligonucleotide
  Antisense Strand to SEQ ID NO: 488747
uauacagugacauucauuc

SEQ ID NO: 488749 - RNA, 19 nt, Artificial Sequence
  Description of Artificial Sequence: Synthetic oligonucleotide
  Sense strand starting at position 3667 of SEQ ID NO: 317410
uugcaugugcgguucacau

SEQ ID NO: 488750 - RNA, 19 nt, Artificial Sequence
  Description of Artificial Sequence: Synthetic oligonucleotide
  Antisense Strand to SEQ ID NO: 488749
augugaaccgcacaugcaa

SEQ ID NO: 488751 - RNA, 19 nt, Artificial Sequence
  Description of Artificial Sequence: Synthetic oligonucleotide
  Sense strand starting at position 3707 of SEQ ID NO: 317410
gucuaaugccgcuacugau

SEQ ID NO: 488752 - RNA, 19 nt, Artificial Sequence
  Description of Artificial Sequence: Synthetic oligonucleotide
  Antisense Strand to SEQ ID NO: 488751
aucaguagcggcauuagac

SEQ ID NO: 488753 - RNA, 19 nt, Artificial Sequence
  Description of Artificial Sequence: Synthetic oligonucleotide
  Sense strand starting at position 3713 of SEQ ID NO: 317410
ugccgcuacugaucugaua

SEQ ID NO: 488754 - RNA, 19 nt, Artificial Sequence
  Description of Artificial Sequence: Synthetic oligonucleotide
  Antisense Strand to SEQ ID NO: 488753
uaucagaucaguagcggca

SEQ ID NO: 488755 - RNA, 19 nt, Artificial Sequence
  Description of Artificial Sequence: Synthetic oligonucleotide
  Sense strand starting at position 1 of SEQ ID NO: 317411
guagguuugauguaucaag

SEQ ID NO: 488756 - RNA, 19 nt, Artificial Sequence
  Description of Artificial Sequence: Synthetic oligonucleotide
  Antisense Strand to SEQ ID NO: 488755
cuugauacaucaaaccuac

SEQ ID NO: 488757 - RNA, 19 nt, Artificial Sequence
  Description of Artificial Sequence: Synthetic oligonucleotide
  Sense strand starting at position 25 of SEQ ID NO: 317411
uuuaauagggcuugauaug

SEQ ID NO: 488758 - RNA, 19 nt, Artificial Sequence
  Description of Artificial Sequence: Synthetic oligonucleotide
  Antisense Strand to SEQ ID NO: 488757
cauaucaagcccuauuaaa

SEQ ID NO: 488759 - RNA, 19 nt, Artificial Sequence
  Description of Artificial Sequence: Synthetic oligonucleotide
  Sense strand starting at position 56 of SEQ ID NO: 317411
guuaaacaugcugaccauu

SEQ ID NO: 488760 - RNA, 19 nt, Artificial Sequence
  Description of Artificial Sequence: Synthetic oligonucleotide
  Antisense Strand to SEQ ID NO: 488759
aauggucagcauguuuaac

SEQ ID NO: 488761 - RNA, 19 nt, Artificial Sequence
  Description of Artificial Sequence: Synthetic oligonucleotide
  Sense strand starting at position 67 of SEQ ID NO: 317411
ugaccauuauguucuauac

SEQ ID NO: 488762 - RNA, 19 nt, Artificial Sequence
  Description of Artificial Sequence: Synthetic oligonucleotide
  Antisense Strand to SEQ ID NO: 488761
guauagaacauaaugguca

SEQ ID NO: 488763 - RNA, 19 nt, Artificial Sequence
  Description of Artificial Sequence: Synthetic oligonucleotide
  Sense strand starting at position 166 of SEQ ID NO: 317411
agaaacugcuuggcuuuaa

SEQ ID NO: 488764 - RNA, 19 nt, Artificial Sequence
  Description of Artificial Sequence: Synthetic oligonucleotide
  Antisense Strand to SEQ ID NO: 488763
uuaaagccaagcaguuucu

SEQ ID NO: 488765 - RNA, 19 nt, Artificial Sequence
  Description of Artificial Sequence: Synthetic oligonucleotide
  Sense strand starting at position 170 of SEQ ID NO: 317411
acugcuuggcuuuaaagaa

SEQ ID NO: 488766 - RNA, 19 nt, Artificial Sequence
  Description of Artificial Sequence: Synthetic oligonucleotide
  Antisense Strand to SEQ ID NO: 488765
uucuuuaaagccaagcagu

SEQ ID NO: 488767 - RNA, 19 nt, Artificial Sequence
  Description of Artificial Sequence: Synthetic oligonucleotide
  Sense strand starting at position 177 of SEQ ID NO: 317411
ggcuuuaaagaauacaguu

SEQ ID NO: 488768 - RNA, 19 nt, Artificial Sequence
  Description of Artificial Sequence: Synthetic oligonucleotide
  Antisense Strand to SEQ ID NO: 488767
aacuguauucuuuaaagcc

SEQ ID NO: 488769 - RNA, 19 nt, Artificial Sequence
  Description of Artificial Sequence: Synthetic oligonucleotide
  Sense strand starting at position 201 of SEQ ID NO: 317411
gcacuugucagagaagcug

SEQ ID NO: 488770 - RNA, 19 nt, Artificial Sequence
  Description of Artificial Sequence: Synthetic oligonucleotide
  Antisense Strand to SEQ ID NO: 488769
cagcuucucugacaagugc

SEQ ID NO: 488771 - RNA, 19 nt, Artificial Sequence
  Description of Artificial Sequence: Synthetic oligonucleotide
  Sense strand starting at position 256 of SEQ ID NO: 317411
gguuaaauuaaucacgggu

SEQ ID NO: 488772 - RNA, 19 nt, Artificial Sequence
  Description of Artificial Sequence: Synthetic oligonucleotide
  Antisense Strand to SEQ ID NO: 488771
acccgugauuaauuuaacc

SEQ ID NO: 488773 - RNA, 19 nt, Artificial Sequence
  Description of Artificial Sequence: Synthetic oligonucleotide
  Sense strand starting at position 259 of SEQ ID NO: 317411
uaaauuaaucacgggucau

SEQ ID NO: 488774 - RNA, 19 nt, Artificial Sequence
  Description of Artificial Sequence: Synthetic oligonucleotide
  Antisense Strand to SEQ ID NO: 488773
augacccgugauuaauuua

SEQ ID NO: 488775 - RNA, 19 nt, Artificial Sequence
  Description of Artificial Sequence: Synthetic oligonucleotide
  Sense strand starting at position 453 of SEQ ID NO: 317411
ugaucaguuguacauaaca

SEQ ID NO: 488776 - RNA, 19 nt, Artificial Sequence
  Description of Artificial Sequence: Synthetic oligonucleotide
  Antisense Strand to SEQ ID NO: 488775
uguuauguacaacugauca

SEQ ID NO: 488777 - RNA, 19 nt, Artificial Sequence
  Description of Artificial Sequence: Synthetic oligonucleotide
  Sense strand starting at position 489 of SEQ ID NO: 317411
ggauacaauucugcacuua

SEQ ID NO: 488778 - RNA, 19 nt, Artificial Sequence
  Description of Artificial Sequence: Synthetic oligonucleotide
  Antisense Strand to SEQ ID NO: 488777
uaagugcagaauuguaucc

SEQ ID NO: 488779 - RNA, 19 nt, Artificial Sequence
  Description of Artificial Sequence: Synthetic oligonucleotide
  Sense strand starting at position 535 of SEQ ID NO: 317411
caauuaugagaucguucua

SEQ ID NO: 488780 - RNA, 19 nt, Artificial Sequence
  Description of Artificial Sequence: Synthetic oligonucleotide
  Antisense Strand to SEQ ID NO: 488779
uagaacgaucucauaauug

SEQ ID NO: 488781 - RNA, 19 nt, Artificial Sequence
  Description of Artificial Sequence: Synthetic oligonucleotide
  Sense strand starting at position 542 of SEQ ID NO: 317411
gagaucguucuauauauua

SEQ ID NO: 488782 - RNA, 19 nt, Artificial Sequence
  Description of Artificial Sequence: Synthetic oligonucleotide
  Antisense Strand to SEQ ID NO: 488781
uaauauauagaacgaucuc

SEQ ID NO: 488783 - RNA, 19 nt, Artificial Sequence
  Description of Artificial Sequence: Synthetic oligonucleotide
  Sense strand starting at position 569 of SEQ ID NO: 317411
gugcuagugcagucuauca

SEQ ID NO: 488784 - RNA, 19 nt, Artificial Sequence
  Description of Artificial Sequence: Synthetic oligonucleotide
  Antisense Strand to SEQ ID NO: 488783
ugauagacugcacuagcac

SEQ ID NO: 488785 - RNA, 19 nt, Artificial Sequence
  Description of Artificial Sequence: Synthetic oligonucleotide
  Sense strand starting at position 768 of SEQ ID NO: 317411
uuaggcauuucugcauacu

SEQ ID NO: 488786 - RNA, 19 nt, Artificial Sequence
  Description of Artificial Sequence: Synthetic oligonucleotide
  Antisense Strand to SEQ ID NO: 488785
aguaugcagaaaugccuaa

SEQ ID NO: 488787 - RNA, 19 nt, Artificial Sequence
  Description of Artificial Sequence: Synthetic oligonucleotide
  Sense strand starting at position 2108 of SEQ ID NO: 317411
gcugauaacgcuuuagcga

SEQ ID NO: 488788 - RNA, 19 nt, Artificial Sequence
  Description of Artificial Sequence: Synthetic oligonucleotide
  Antisense Strand to SEQ ID NO: 488787
ucgcuaaagcguuaucagc

SEQ ID NO: 488789 - RNA, 19 nt, Artificial Sequence
  Description of Artificial Sequence: Synthetic oligonucleotide
  Sense strand starting at position 2255 of SEQ ID NO: 317411
gcgaguuucagccucguag

SEQ ID NO: 488790 - RNA, 19 nt, Artificial Sequence
  Description of Artificial Sequence: Synthetic oligonucleotide
  Antisense Strand to SEQ ID NO: 488789
cuacgaggcugaaacucgc

SEQ ID NO: 488791 - RNA, 19 nt, Artificial Sequence
  Description of Artificial Sequence: Synthetic oligonucleotide
  Sense strand starting at position 2283 of SEQ ID NO: 317411
aaaguaauugcauggauca

SEQ ID NO: 488792 - RNA, 19 nt, Artificial Sequence
  Description of Artificial Sequence: Synthetic oligonucleotide
  Antisense Strand to SEQ ID NO: 488791
ugauccaugcaauuacuuu

SEQ ID NO: 488793 - RNA, 19 nt, Artificial Sequence
  Description of Artificial Sequence: Synthetic oligonucleotide
  Sense strand starting at position 2284 of SEQ ID NO: 317411
aaguaauugcauggaucag

SEQ ID NO: 488794 - RNA, 19 nt, Artificial Sequence
  Description of Artificial Sequence: Synthetic oligonucleotide
  Antisense Strand to SEQ ID NO: 488793
cugauccaugcaauuacuu

SEQ ID NO: 488795 - RNA, 19 nt, Artificial Sequence
  Description of Artificial Sequence: Synthetic oligonucleotide
  Sense strand starting at position 2371 of SEQ ID NO: 317411
ggcuguuuagacgcgguua

SEQ ID NO: 488796 - RNA, 19 nt, Artificial Sequence
  Description of Artificial Sequence: Synthetic oligonucleotide
  Antisense Strand to SEQ ID NO: 488795
uaaccgcgucuaaacagcc

SEQ ID NO: 488797 - RNA, 19 nt, Artificial Sequence
  Description of Artificial Sequence: Synthetic oligonucleotide
  Sense strand starting at position 2587 of SEQ ID NO: 317411
augggaaaugagcgagauu

SEQ ID NO: 488798 - RNA, 19 nt, Artificial Sequence
  Description of Artificial Sequence: Synthetic oligonucleotide
  Antisense Strand to SEQ ID NO: 488797
aaucucgcucauuucccau

SEQ ID NO: 488799 - RNA, 19 nt, Artificial Sequence
  Description of Artificial Sequence: Synthetic oligonucleotide
  Sense strand starting at position 2621 of SEQ ID NO: 317411
aggccuauuuaagagaauu

SEQ ID NO: 488800 - RNA, 19 nt, Artificial Sequence
  Description of Artificial Sequence: Synthetic oligonucleotide
  Antisense Strand to SEQ ID NO: 488799
aauucucuuaaauaggccu

SEQ ID NO: 488801 - RNA, 19 nt, Artificial Sequence
  Description of Artificial Sequence: Synthetic oligonucleotide
  Sense strand starting at position 2651 of SEQ ID NO: 317411
cugacucuccuagguacau

SEQ ID NO: 488802 - RNA, 19 nt, Artificial Sequence
  Description of Artificial Sequence: Synthetic oligonucleotide
  Antisense Strand to SEQ ID NO: 488801
auguaccuaggagagucag

SEQ ID NO: 488803 - RNA, 19 nt, Artificial Sequence
  Description of Artificial Sequence: Synthetic oligonucleotide
  Sense strand starting at position 2652 of SEQ ID NO: 317411
ugacucuccuagguacauu

SEQ ID NO: 488804 - RNA, 19 nt, Artificial Sequence
  Description of Artificial Sequence: Synthetic oligonucleotide
  Antisense Strand to SEQ ID NO: 488803
aauguaccuaggagaguca

SEQ ID NO: 488805 - RNA, 19 nt, Artificial Sequence
  Description of Artificial Sequence: Synthetic oligonucleotide
  Sense strand starting at position 2836 of SEQ ID NO: 317411
cuggucuaauugguuugaa

SEQ ID NO: 488806 - RNA, 19 nt, Artificial Sequence
  Description of Artificial Sequence: Synthetic oligonucleotide
  Antisense Strand to SEQ ID NO: 488805
uucaaaccaauuagaccag

SEQ ID NO: 488807 - RNA, 19 nt, Artificial Sequence
  Description of Artificial Sequence: Synthetic oligonucleotide
  Sense strand starting at position 2837 of SEQ ID NO: 317411
uggucuaauugguuugaau

SEQ ID NO: 488808 - RNA, 19 nt, Artificial Sequence
  Description of Artificial Sequence: Synthetic oligonucleotide
  Antisense Strand to SEQ ID NO: 488807
auucaaaccaauuagacca

SEQ ID NO: 488809 - RNA, 19 nt, Artificial Sequence
  Description of Artificial Sequence: Synthetic oligonucleotide
  Sense strand starting at position 2839 of SEQ ID NO: 317411
gucuaauugguuugaauaa

SEQ ID NO: 488810 - RNA, 19 nt, Artificial Sequence
  Description of Artificial Sequence: Synthetic oligonucleotide
  Antisense Strand to SEQ ID NO: 488809
uuauucaaaccaauuagac

SEQ ID NO: 488811 - RNA, 19 nt, Artificial Sequence
  Description of Artificial Sequence: Synthetic oligonucleotide
  Sense strand starting at position 2933 of SEQ ID NO: 317411
ggaaguguugaauguacug

SEQ ID NO: 488812 - RNA, 19 nt, Artificial Sequence
  Description of Artificial Sequence: Synthetic oligonucleotide
  Antisense Strand to SEQ ID NO: 488811
caguacauucaacacuucc

SEQ ID NO: 488813 - RNA, 19 nt, Artificial Sequence
  Description of Artificial Sequence: Synthetic oligonucleotide
  Sense strand starting at position 2944 of SEQ ID NO: 317411
auguacugucacuauaaau

SEQ ID NO: 488814 - RNA, 19 nt, Artificial Sequence
  Description of Artificial Sequence: Synthetic oligonucleotide
  Antisense Strand to SEQ ID NO: 488813
auuuauagugacaguacau

SEQ ID NO: 488815 - RNA, 19 nt, Artificial Sequence
  Description of Artificial Sequence: Synthetic oligonucleotide
  Sense strand starting at position 3040 of SEQ ID NO: 317411
gguuauuaaacacgaagau

SEQ ID NO: 488816 - RNA, 19 nt, Artificial Sequence
  Description of Artificial Sequence: Synthetic oligonucleotide
  Antisense Strand to SEQ ID NO: 488815
aucuucguguuuaauaacc

SEQ ID NO: 488817 - RNA, 19 nt, Artificial Sequence
  Description of Artificial Sequence: Synthetic oligonucleotide
  Sense strand starting at position 3184 of SEQ ID NO: 317411
ccacaaauaucguuuauug

SEQ ID NO: 488818 - RNA, 19 nt, Artificial Sequence
  Description of Artificial Sequence: Synthetic oligonucleotide
  Antisense Strand to SEQ ID NO: 488817
caauaaacgauauuugugg

SEQ ID NO: 488819 - RNA, 19 nt, Artificial Sequence
  Description of Artificial Sequence: Synthetic oligonucleotide
  Sense strand starting at position 3241 of SEQ ID NO: 317411
ugucuuugaggcuaaguca

SEQ ID NO: 488820 - RNA, 19 nt, Artificial Sequence
  Description of Artificial Sequence: Synthetic oligonucleotide
  Antisense Strand to SEQ ID NO: 488819
ugacuuagccucaaagaca

SEQ ID NO: 488821 - RNA, 19 nt, Artificial Sequence
  Description of Artificial Sequence: Synthetic oligonucleotide
  Sense strand starting at position 3572 of SEQ ID NO: 317411
agcagucagggcuaugaga

SEQ ID NO: 488822 - RNA, 19 nt, Artificial Sequence
  Description of Artificial Sequence: Synthetic oligonucleotide
  Antisense Strand to SEQ ID NO: 488821
ucucauagcccugacugcu

SEQ ID NO: 488823 - RNA, 19 nt, Artificial Sequence
  Description of Artificial Sequence: Synthetic oligonucleotide
  Sense strand starting at position 3574 of SEQ ID NO: 317411
cagucagggcuaugagaua

SEQ ID NO: 488824 - RNA, 19 nt, Artificial Sequence
  Description of Artificial Sequence: Synthetic oligonucleotide
  Antisense Strand to SEQ ID NO: 488823
uaucucauagcccugacug

SEQ ID NO: 488825 - RNA, 19 nt, Artificial Sequence
  Description of Artificial Sequence: Synthetic oligonucleotide
  Sense strand starting at position 3596 of SEQ ID NO: 317411
agcacagucccaugacuaa

SEQ ID NO: 488826 - RNA, 19 nt, Artificial Sequence
  Description of Artificial Sequence: Synthetic oligonucleotide
  Antisense Strand to SEQ ID NO: 488825
uuagucaugggacugugcu

SEQ ID NO: 488827 - RNA, 19 nt, Artificial Sequence
  Description of Artificial Sequence: Synthetic oligonucleotide
  Sense strand starting at position 3764 of SEQ ID NO: 317411
gggccaggauucuuuaaac

SEQ ID NO: 488828 - RNA, 19 nt, Artificial Sequence
  Description of Artificial Sequence: Synthetic oligonucleotide
  Antisense Strand to SEQ ID NO: 488827
guuuaaagaauccuggccc

SEQ ID NO: 488829 - RNA, 19 nt, Artificial Sequence
  Description of Artificial Sequence: Synthetic oligonucleotide
  Sense strand starting at position 3826 of SEQ ID NO: 317411
ggguauugacauugagagu

SEQ ID NO: 488830 - RNA, 19 nt, Artificial Sequence
  Description of Artificial Sequence: Synthetic oligonucleotide
  Antisense Strand to SEQ ID NO: 488829
acucucaaugucaauaccc

SEQ ID NO: 488831 - RNA, 19 nt, Artificial Sequence
  Description of Artificial Sequence: Synthetic oligonucleotide
  Sense strand starting at position 3832 of SEQ ID NO: 317411
ugacauugagaguguauug

SEQ ID NO: 488832 - RNA, 19 nt, Artificial Sequence
  Description of Artificial Sequence: Synthetic oligonucleotide
  Antisense Strand to SEQ ID NO: 488831
caauacacucucaauguca

SEQ ID NO: 488833 - RNA, 19 nt, Artificial Sequence
  Description of Artificial Sequence: Synthetic oligonucleotide
  Sense strand starting at position 3972 of SEQ ID NO: 317411
agaucaucuuugccacaga

SEQ ID NO: 488834 - RNA, 19 nt, Artificial Sequence
  Description of Artificial Sequence: Synthetic oligonucleotide
  Antisense Strand to SEQ ID NO: 488833
ucuguggcaaagaugaucu

SEQ ID NO: 488835 - RNA, 19 nt, Artificial Sequence
  Description of Artificial Sequence: Synthetic oligonucleotide
  Sense strand starting at position 148 of SEQ ID NO: 317412
ggcccaaucugcuuauaga

SEQ ID NO: 488836 - RNA, 19 nt, Artificial Sequence
  Description of Artificial Sequence: Synthetic oligonucleotide
  Antisense Strand to SEQ ID NO: 488835
ucuauaagcagauugggcc

SEQ ID NO: 488837 - RNA, 19 nt, Artificial Sequence
  Description of Artificial Sequence: Synthetic oligonucleotide
  Sense strand starting at position 149 of SEQ ID NO: 317412
gcccaaucugcuuauagaa

SEQ ID NO: 488838 - RNA, 19 nt, Artificial Sequence
  Description of Artificial Sequence: Synthetic oligonucleotide
  Antisense Strand to SEQ ID NO: 488837
uucuauaagcagauugggc

SEQ ID NO: 488839 - RNA, 19 nt, Artificial Sequence
  Description of Artificial Sequence: Synthetic oligonucleotide
  Sense strand starting at position 268 of SEQ ID NO: 317412
ucaauauaaggguggcaaa

SEQ ID NO: 488840 - RNA, 19 nt, Artificial Sequence
  Description of Artificial Sequence: Synthetic oligonucleotide
  Antisense Strand to SEQ ID NO: 488839
uuugccacccuuauauuga

SEQ ID NO: 488841 - RNA, 19 nt, Artificial Sequence
  Description of Artificial Sequence: Synthetic oligonucleotide
  Sense strand starting at position 269 of SEQ ID NO: 317412
caauauaaggguggcaaau

SEQ ID NO: 488842 - RNA, 19 nt, Artificial Sequence
  Description of Artificial Sequence: Synthetic oligonucleotide
  Antisense Strand to SEQ ID NO: 488841
auuugccacccuuauauug

SEQ ID NO: 488843 - RNA, 19 nt, Artificial Sequence
  Description of Artificial Sequence: Synthetic oligonucleotide
  Sense strand starting at position 271 of SEQ ID NO: 317412
auauaaggguggcaaauuu

SEQ ID NO: 488844 - RNA, 19 nt, Artificial Sequence
  Description of Artificial Sequence: Synthetic oligonucleotide
  Antisense Strand to SEQ ID NO: 488843
aaauuugccacccuuauau

SEQ ID NO: 488845 - RNA, 19 nt, Artificial Sequence
  Description of Artificial Sequence: Synthetic oligonucleotide
  Sense strand starting at position 279 of SEQ ID NO: 317412
guggcaaauuuccucugua

SEQ ID NO: 488846 - RNA, 19 nt, Artificial Sequence
  Description of Artificial Sequence: Synthetic oligonucleotide
  Antisense Strand to SEQ ID NO: 488845
uacagaggaaauuugccac

SEQ ID NO: 488847 - RNA, 19 nt, Artificial Sequence
  Description of Artificial Sequence: Synthetic oligonucleotide
  Sense strand starting at position 304 of SEQ ID NO: 317412
agagaaagaugcuaggaaa

SEQ ID NO: 488848 - RNA, 19 nt, Artificial Sequence
  Description of Artificial Sequence: Synthetic oligonucleotide
  Antisense Strand to SEQ ID NO: 488847
uuuccuagcaucuuucucu

SEQ ID NO: 488849 - RNA, 19 nt, Artificial Sequence
  Description of Artificial Sequence: Synthetic oligonucleotide
  Sense strand starting at position 378 of SEQ ID NO: 317412
gggugaugcugcauagugu

SEQ ID NO: 488850 - RNA, 19 nt, Artificial Sequence
  Description of Artificial Sequence: Synthetic oligonucleotide
  Antisense Strand to SEQ ID NO: 488849
acacuaugcagcaucaccc

SEQ ID NO: 488851 - RNA, 19 nt, Artificial Sequence
  Description of Artificial Sequence: Synthetic oligonucleotide
  Sense strand starting at position 485 of SEQ ID NO: 317412
gcacaugcuccagacuaaa

SEQ ID NO: 488852 - RNA, 19 nt, Artificial Sequence
  Description of Artificial Sequence: Synthetic oligonucleotide
  Antisense Strand to SEQ ID NO: 488851
uuuagucuggagcaugugc

SEQ ID NO: 488853 - RNA, 19 nt, Artificial Sequence
  Description of Artificial Sequence: Synthetic oligonucleotide
  Sense strand starting at position 725 of SEQ ID NO: 317412
uugggaguucuagaagcca

SEQ ID NO: 488854 - RNA, 19 nt, Artificial Sequence
  Description of Artificial Sequence: Synthetic oligonucleotide
  Antisense Strand to SEQ ID NO: 488853
uggcuucuagaacucccaa

SEQ ID NO: 488855 - RNA, 19 nt, Artificial Sequence
  Description of Artificial Sequence: Synthetic oligonucleotide
  Sense strand starting at position 736 of SEQ ID NO: 317412
agaagccauccaugaugua

SEQ ID NO: 488856 - RNA, 19 nt, Artificial Sequence
  Description of Artificial Sequence: Synthetic oligonucleotide
  Antisense Strand to SEQ ID NO: 488855
uacaucauggauggcuucu

SEQ ID NO: 488857 - RNA, 19 nt, Artificial Sequence
  Description of Artificial Sequence: Synthetic oligonucleotide
  Sense strand starting at position 902 of SEQ ID NO: 317412
gagugaacacuaugugcua

SEQ ID NO: 488858 - RNA, 19 nt, Artificial Sequence
  Description of Artificial Sequence: Synthetic oligonucleotide
  Antisense Strand to SEQ ID NO: 488857
uagcacauaguguucacuc

SEQ ID NO: 488859 - RNA, 19 nt, Artificial Sequence
  Description of Artificial Sequence: Synthetic oligonucleotide
  Sense strand starting at position 918 of SEQ ID NO: 317412
cuagcauggcuggaacaua

SEQ ID NO: 488860 - RNA, 19 nt, Artificial Sequence
  Description of Artificial Sequence: Synthetic oligonucleotide
  Antisense Strand to SEQ ID NO: 488859
uauguuccagccaugcuag

SEQ ID NO: 488861 - RNA, 19 nt, Artificial Sequence
  Description of Artificial Sequence: Synthetic oligonucleotide
  Sense strand starting at position 934 of SEQ ID NO: 317412
auaguaagugcucaguaug

SEQ ID NO: 488862 - RNA, 19 nt, Artificial Sequence
  Description of Artificial Sequence: Synthetic oligonucleotide
  Antisense Strand to SEQ ID NO: 488861
cauacugagcacuuacuau

SEQ ID NO: 488863 - RNA, 19 nt, Artificial Sequence
  Description of Artificial Sequence: Synthetic oligonucleotide
  Sense strand starting at position 1088 of SEQ ID NO: 317412
uggauuacuagugguuaag

SEQ ID NO: 488864 - RNA, 19 nt, Artificial Sequence
  Description of Artificial Sequence: Synthetic oligonucleotide
  Antisense Strand to SEQ ID NO: 488863
cuuaaccacuaguaaucca

SEQ ID NO: 488865 - RNA, 19 nt, Artificial Sequence
  Description of Artificial Sequence: Synthetic oligonucleotide
  Sense strand starting at position 1090 of SEQ ID NO: 317412
gauuacuagugguuaagcu

SEQ ID NO: 488866 - RNA, 19 nt, Artificial Sequence
  Description of Artificial Sequence: Synthetic oligonucleotide
  Antisense Strand to SEQ ID NO: 488865
agcuuaaccacuaguaauc

SEQ ID NO: 488867 - RNA, 19 nt, Artificial Sequence
  Description of Artificial Sequence: Synthetic oligonucleotide
  Sense strand starting at position 1133 of SEQ ID NO: 317412
gugguaucauaacucacau

SEQ ID NO: 488868 - RNA, 19 nt, Artificial Sequence
  Description of Artificial Sequence: Synthetic oligonucleotide
  Antisense Strand to SEQ ID NO: 488867
augugaguuaugauaccac

SEQ ID NO: 488869 - RNA, 19 nt, Artificial Sequence
  Description of Artificial Sequence: Synthetic oligonucleotide
  Sense strand starting at position 1389 of SEQ ID NO: 317412
cucuguccugggugauuga

SEQ ID NO: 488870 - RNA, 19 nt, Artificial Sequence
  Description of Artificial Sequence: Synthetic oligonucleotide
  Antisense Strand to SEQ ID NO: 488869
ucaaucacccaggacagag

SEQ ID NO: 488871 - RNA, 19 nt, Artificial Sequence
  Description of Artificial Sequence: Synthetic oligonucleotide
  Sense strand starting at position 1528 of SEQ ID NO: 317412
aaggaaaccucgguuuccu

SEQ ID NO: 488872 - RNA, 19 nt, Artificial Sequence
  Description of Artificial Sequence: Synthetic oligonucleotide
  Antisense Strand to SEQ ID NO: 488871
aggaaaccgagguuuccuu

SEQ ID NO: 488873 - RNA, 19 nt, Artificial Sequence
  Description of Artificial Sequence: Synthetic oligonucleotide
  Sense strand starting at position 1667 of SEQ ID NO: 317412
caccgucccgacuacuaaa

SEQ ID NO: 488874 - RNA, 19 nt, Artificial Sequence
  Description of Artificial Sequence: Synthetic oligonucleotide
  Antisense Strand to SEQ ID NO: 488873
uuuaguagucgggacggug

SEQ ID NO: 488875 - RNA, 19 nt, Artificial Sequence
  Description of Artificial Sequence: Synthetic oligonucleotide
  Sense strand starting at position 2390 of SEQ ID NO: 317412
aagggaucggcccggaaga

SEQ ID NO: 488876 - RNA, 19 nt, Artificial Sequence
  Description of Artificial Sequence: Synthetic oligonucleotide
  Antisense Strand to SEQ ID NO: 488875
ucuuccgggccgaucccuu

SEQ ID NO: 488877 - RNA, 19 nt, Artificial Sequence
  Description of Artificial Sequence: Synthetic oligonucleotide
  Sense strand starting at position 2392 of SEQ ID NO: 317412
gggaucggcccggaagaau

SEQ ID NO: 488878 - RNA, 19 nt, Artificial Sequence
  Description of Artificial Sequence: Synthetic oligonucleotide
  Antisense Strand to SEQ ID NO: 488877
auucuuccgggccgauccc

SEQ ID NO: 488879 - RNA, 19 nt, Artificial Sequence
  Description of Artificial Sequence: Synthetic oligonucleotide
  Sense strand starting at position 2461 of SEQ ID NO: 317412
ggcaguaagcgguuuguca

SEQ ID NO: 488880 - RNA, 19 nt, Artificial Sequence
  Description of Artificial Sequence: Synthetic oligonucleotide
  Antisense Strand to SEQ ID NO: 488879
ugacaaaccgcuuacugcc

SEQ ID NO: 488881 - RNA, 19 nt, Artificial Sequence
  Description of Artificial Sequence: Synthetic oligonucleotide
  Sense strand starting at position 2550 of SEQ ID NO: 317412
gcaguaagaaagcaucguu

SEQ ID NO: 488882 - RNA, 19 nt, Artificial Sequence
  Description of Artificial Sequence: Synthetic oligonucleotide
  Antisense Strand to SEQ ID NO: 488881
aacgaugcuuucuuacugc

SEQ ID NO: 488883 - RNA, 19 nt, Artificial Sequence
  Description of Artificial Sequence: Synthetic oligonucleotide
  Sense strand starting at position 2751 of SEQ ID NO: 317412
uuucucaguguuuaaugaa

SEQ ID NO: 488884 - RNA, 19 nt, Artificial Sequence
  Description of Artificial Sequence: Synthetic oligonucleotide
  Antisense Strand to SEQ ID NO: 488883
uucauuaaacacugagaaa

SEQ ID NO: 488885 - RNA, 19 nt, Artificial Sequence
  Description of Artificial Sequence: Synthetic oligonucleotide
  Sense strand starting at position 2767 of SEQ ID NO: 317412
gaaugaaaguaucuguuua

SEQ ID NO: 488886 - RNA, 19 nt, Artificial Sequence
  Description of Artificial Sequence: Synthetic oligonucleotide
  Antisense Strand to SEQ ID NO: 488885
uaaacagauacuuucauuc

SEQ ID NO: 488887 - RNA, 19 nt, Artificial Sequence
  Description of Artificial Sequence: Synthetic oligonucleotide
  Sense strand starting at position 2769 of SEQ ID NO: 317412
augaaaguaucuguuuacu

SEQ ID NO: 488888 - RNA, 19 nt, Artificial Sequence
  Description of Artificial Sequence: Synthetic oligonucleotide
  Antisense Strand to SEQ ID NO: 488887
aguaaacagauacuuucau

SEQ ID NO: 488889 - RNA, 19 nt, Artificial Sequence
  Description of Artificial Sequence: Synthetic oligonucleotide
  Sense strand starting at position 2775 of SEQ ID NO: 317412
guaucuguuuacuuucuga

SEQ ID NO: 488890 - RNA, 19 nt, Artificial Sequence
  Description of Artificial Sequence: Synthetic oligonucleotide
  Antisense Strand to SEQ ID NO: 488889
ucagaaaguaaacagauac

SEQ ID NO: 488891 - RNA, 19 nt, Artificial Sequence
  Description of Artificial Sequence: Synthetic oligonucleotide
  Sense strand starting at position 2875 of SEQ ID NO: 317412
accauucucccugggaaug

SEQ ID NO: 488892 - RNA, 19 nt, Artificial Sequence
  Description of Artificial Sequence: Synthetic oligonucleotide
  Antisense Strand to SEQ ID NO: 488891
cauucccagggagaauggu

SEQ ID NO: 488893 - RNA, 19 nt, Artificial Sequence
  Description of Artificial Sequence: Synthetic oligonucleotide
  Sense strand starting at position 3157 of SEQ ID NO: 317412
agggaaucuuuggcuacau

SEQ ID NO: 488894 - RNA, 19 nt, Artificial Sequence
  Description of Artificial Sequence: Synthetic oligonucleotide
  Antisense Strand to SEQ ID NO: 488893
auguagccaaagauucccu

SEQ ID NO: 488895 - RNA, 19 nt, Artificial Sequence
  Description of Artificial Sequence: Synthetic oligonucleotide
  Sense strand starting at position 3158 of SEQ ID NO: 317412
gggaaucuuuggcuacauc

SEQ ID NO: 488896 - RNA, 19 nt, Artificial Sequence
  Description of Artificial Sequence: Synthetic oligonucleotide
  Antisense Strand to SEQ ID NO: 488895
gauguagccaaagauuccc

SEQ ID NO: 488897 - RNA, 19 nt, Artificial Sequence
  Description of Artificial Sequence: Synthetic oligonucleotide
  Sense strand starting at position 3209 of SEQ ID NO: 317412
cgugcuuugauagaaagca

SEQ ID NO: 488898 - RNA, 19 nt, Artificial Sequence
  Description of Artificial Sequence: Synthetic oligonucleotide
  Antisense Strand to SEQ ID NO: 488897
ugcuuucuaucaaagcacg

SEQ ID NO: 488899 - RNA, 19 nt, Artificial Sequence
  Description of Artificial Sequence: Synthetic oligonucleotide
  Sense strand starting at position 3452 of SEQ ID NO: 317412
cagagcuggcucuaccauu

SEQ ID NO: 488900 - RNA, 19 nt, Artificial Sequence
  Description of Artificial Sequence: Synthetic oligonucleotide
  Antisense Strand to SEQ ID NO: 488899
aaugguagagccagcucug

SEQ ID NO: 488901 - RNA, 19 nt, Artificial Sequence
  Description of Artificial Sequence: Synthetic oligonucleotide
  Sense strand starting at position 3492 of SEQ ID NO: 317412
uggaguucuuaucugcaaa

SEQ ID NO: 488902 - RNA, 19 nt, Artificial Sequence
  Description of Artificial Sequence: Synthetic oligonucleotide
  Antisense Strand to SEQ ID NO: 488901
uuugcagauaagaacucca

SEQ ID NO: 488903 - RNA, 19 nt, Artificial Sequence
  Description of Artificial Sequence: Synthetic oligonucleotide
  Sense strand starting at position 3493 of SEQ ID NO: 317412
ggaguucuuaucugcaaag

SEQ ID NO: 488904 - RNA, 19 nt, Artificial Sequence
  Description of Artificial Sequence: Synthetic oligonucleotide
  Antisense Strand to SEQ ID NO: 488903
cuuugcagauaagaacucc

SEQ ID NO: 488905 - RNA, 19 nt, Artificial Sequence
  Description of Artificial Sequence: Synthetic oligonucleotide
  Sense strand starting at position 3522 of SEQ ID NO: 317412
gauauuaacuccuuggguu

SEQ ID NO: 488906 - RNA, 19 nt, Artificial Sequence
  Description of Artificial Sequence: Synthetic oligonucleotide
  Antisense Strand to SEQ ID NO: 488905
aacccaaggaguuaauauc

SEQ ID NO: 488907 - RNA, 19 nt, Artificial Sequence
  Description of Artificial Sequence: Synthetic oligonucleotide
  Sense strand starting at position 3534 of SEQ ID NO: 317412
uuggguugucugugagaau

SEQ ID NO: 488908 - RNA, 19 nt, Artificial Sequence
  Description of Artificial Sequence: Synthetic oligonucleotide
  Antisense Strand to SEQ ID NO: 488907
auucucacagacaacccaa

SEQ ID NO: 488909 - RNA, 19 nt, Artificial Sequence
  Description of Artificial Sequence: Synthetic oligonucleotide
  Sense strand starting at position 3582 of SEQ ID NO: 317412
aacagugcccggcauauaa

SEQ ID NO: 488910 - RNA, 19 nt, Artificial Sequence
  Description of Artificial Sequence: Synthetic oligonucleotide
  Antisense Strand to SEQ ID NO: 488909
uuauaugccgggcacuguu

SEQ ID NO: 488911 - RNA, 19 nt, Artificial Sequence
  Description of Artificial Sequence: Synthetic oligonucleotide
  Sense strand starting at position 3671 of SEQ ID NO: 317412
aggcaaugcccugaacaca

SEQ ID NO: 488912 - RNA, 19 nt, Artificial Sequence
  Description of Artificial Sequence: Synthetic oligonucleotide
  Antisense Strand to SEQ ID NO: 488911
uguguucagggcauugccu

SEQ ID NO: 488913 - RNA, 19 nt, Artificial Sequence
  Description of Artificial Sequence: Synthetic oligonucleotide
  Sense strand starting at position 3788 of SEQ ID NO: 317412
gccaguuaacuuggauaaa

SEQ ID NO: 488914 - RNA, 19 nt, Artificial Sequence
  Description of Artificial Sequence: Synthetic oligonucleotide
  Antisense Strand to SEQ ID NO: 488913
uuuauccaaguuaacuggc

SEQ ID NO: 488915 - RNA, 19 nt, Artificial Sequence
  Description of Artificial Sequence: Synthetic oligonucleotide
  Sense strand starting at position 133 of SEQ ID NO: 317413
agucauuuaucucccugca

SEQ ID NO: 488916 - RNA, 19 nt, Artificial Sequence
  Description of Artificial Sequence: Synthetic oligonucleotide
  Antisense Strand to SEQ ID NO: 488915
ugcagggagauaaaugacu

SEQ ID NO: 488917 - RNA, 19 nt, Artificial Sequence
  Description of Artificial Sequence: Synthetic oligonucleotide
  Sense strand starting at position 2008 of SEQ ID NO: 317413
guccacagcucuuuagaug

SEQ ID NO: 488918 - RNA, 19 nt, Artificial Sequence
  Description of Artificial Sequence: Synthetic oligonucleotide
  Antisense Strand to SEQ ID NO: 488917
caucuaaagagcuguggac

SEQ ID NO: 488919 - RNA, 19 nt, Artificial Sequence
  Description of Artificial Sequence: Synthetic oligonucleotide
  Sense strand starting at position 2041 of SEQ ID NO: 317413
agcuguuucugguccaaca

SEQ ID NO: 488920 - RNA, 19 nt, Artificial Sequence
  Description of Artificial Sequence: Synthetic oligonucleotide
  Antisense Strand to SEQ ID NO: 488919
uguuggaccagaaacagcu

SEQ ID NO: 488921 - RNA, 19 nt, Artificial Sequence
  Description of Artificial Sequence: Synthetic oligonucleotide
  Sense strand starting at position 2163 of SEQ ID NO: 317413
ggaggucacgccgaguuaa

SEQ ID NO: 488922 - RNA, 19 nt, Artificial Sequence
  Description of Artificial Sequence: Synthetic oligonucleotide
  Antisense Strand to SEQ ID NO: 488921
uuaacucggcgugaccucc

SEQ ID NO: 488923 - RNA, 19 nt, Artificial Sequence
  Description of Artificial Sequence: Synthetic oligonucleotide
  Sense strand starting at position 2242 of SEQ ID NO: 317413
acgguuaucuccucgauuu

SEQ ID NO: 488924 - RNA, 19 nt, Artificial Sequence
  Description of Artificial Sequence: Synthetic oligonucleotide
  Antisense Strand to SEQ ID NO: 488923
aaaucgaggagauaaccgu

SEQ ID NO: 488925 - RNA, 19 nt, Artificial Sequence
  Description of Artificial Sequence: Synthetic oligonucleotide
  Sense strand starting at position 2243 of SEQ ID NO: 317413
cgguuaucuccucgauuug

SEQ ID NO: 488926 - RNA, 19 nt, Artificial Sequence
  Description of Artificial Sequence: Synthetic oligonucleotide
  Antisense Strand to SEQ ID NO: 488925
caaaucgaggagauaaccg

SEQ ID NO: 488927 - RNA, 19 nt, Artificial Sequence
  Description of Artificial Sequence: Synthetic oligonucleotide
  Sense strand starting at position 2272 of SEQ ID NO: 317413
aaugcuuugguacaguaaa

SEQ ID NO: 488928 - RNA, 19 nt, Artificial Sequence
  Description of Artificial Sequence: Synthetic oligonucleotide
  Antisense Strand to SEQ ID NO: 488927
uuuacuguaccaaagcauu

SEQ ID NO: 488929 - RNA, 19 nt, Artificial Sequence
  Description of Artificial Sequence: Synthetic oligonucleotide
  Sense strand starting at position 2327 of SEQ ID NO: 317413
cugcauuugacauguuggu

SEQ ID NO: 488930 - RNA, 19 nt, Artificial Sequence
  Description of Artificial Sequence: Synthetic oligonucleotide
  Antisense Strand to SEQ ID NO: 488929
accaacaugucaaaugcag

SEQ ID NO: 488931 - RNA, 19 nt, Artificial Sequence
  Description of Artificial Sequence: Synthetic oligonucleotide
  Sense strand starting at position 2442 of SEQ ID NO: 317413
ucuuuauagggauaugcuu

SEQ ID NO: 488932 - RNA, 19 nt, Artificial Sequence
  Description of Artificial Sequence: Synthetic oligonucleotide
  Antisense Strand to SEQ ID NO: 488931
aagcauaucccuauaaaga

SEQ ID NO: 488933 - RNA, 19 nt, Artificial Sequence
  Description of Artificial Sequence: Synthetic oligonucleotide
  Sense strand starting at position 2458 of SEQ ID NO: 317413
cuucuaacaggcugauauc

SEQ ID NO: 488934 - RNA, 19 nt, Artificial Sequence
  Description of Artificial Sequence: Synthetic oligonucleotide
  Antisense Strand to SEQ ID NO: 488933
gauaucagccuguuagaag

SEQ ID NO: 488935 - RNA, 19 nt, Artificial Sequence
  Description of Artificial Sequence: Synthetic oligonucleotide
  Sense strand starting at position 2490 of SEQ ID NO: 317413
aguggauucuagcugguua

SEQ ID NO: 488936 - RNA, 19 nt, Artificial Sequence
  Description of Artificial Sequence: Synthetic oligonucleotide
  Antisense Strand to SEQ ID NO: 488935
uaaccagcuagaauccacu

SEQ ID NO: 488937 - RNA, 19 nt, Artificial Sequence
  Description of Artificial Sequence: Synthetic oligonucleotide
  Sense strand starting at position 2494 of SEQ ID NO: 317413
gauucuagcugguuaggau

SEQ ID NO: 488938 - RNA, 19 nt, Artificial Sequence
  Description of Artificial Sequence: Synthetic oligonucleotide
  Antisense Strand to SEQ ID NO: 488937
auccuaaccagcuagaauc

SEQ ID NO: 488939 - RNA, 19 nt, Artificial Sequence
  Description of Artificial Sequence: Synthetic oligonucleotide
  Sense strand starting at position 2495 of SEQ ID NO: 317413
auucuagcugguuaggauu

SEQ ID NO: 488940 - RNA, 19 nt, Artificial Sequence
  Description of Artificial Sequence: Synthetic oligonucleotide
  Antisense Strand to SEQ ID NO: 488939
aauccuaaccagcuagaau

SEQ ID NO: 488941 - RNA, 19 nt, Artificial Sequence
  Description of Artificial Sequence: Synthetic oligonucleotide
  Sense strand starting at position 2535 of SEQ ID NO: 317413
gugcuauuccaaggcuuga

SEQ ID NO: 488942 - RNA, 19 nt, Artificial Sequence
  Description of Artificial Sequence: Synthetic oligonucleotide
  Antisense Strand to SEQ ID NO: 488941
ucaagccuuggaauagcac

SEQ ID NO: 488943 - RNA, 19 nt, Artificial Sequence
  Description of Artificial Sequence: Synthetic oligonucleotide
  Sense strand starting at position 2691 of SEQ ID NO: 317413
guacuaccucuugggauac

SEQ ID NO: 488944 - RNA, 19 nt, Artificial Sequence
  Description of Artificial Sequence: Synthetic oligonucleotide
  Antisense Strand to SEQ ID NO: 488943
guaucccaagagguaguac

SEQ ID NO: 488945 - RNA, 19 nt, Artificial Sequence
  Description of Artificial Sequence: Synthetic oligonucleotide
  Sense strand starting at position 2732 of SEQ ID NO: 317413
cacuaaguagccuauggaa

SEQ ID NO: 488946 - RNA, 19 nt, Artificial Sequence
  Description of Artificial Sequence: Synthetic oligonucleotide
  Antisense Strand to SEQ ID NO: 488945
uuccauaggcuacuuagug

SEQ ID NO: 488947 - RNA, 19 nt, Artificial Sequence
  Description of Artificial Sequence: Synthetic oligonucleotide
  Sense strand starting at position 2734 of SEQ ID NO: 317413
cuaaguagccuauggaauu

SEQ ID NO: 488948 - RNA, 19 nt, Artificial Sequence
  Description of Artificial Sequence: Synthetic oligonucleotide
  Antisense Strand to SEQ ID NO: 488947
aauuccauaggcuacuuag

SEQ ID NO: 488949 - RNA, 19 nt, Artificial Sequence
  Description of Artificial Sequence: Synthetic oligonucleotide
  Sense strand starting at position 2735 of SEQ ID NO: 317413
uaaguagccuauggaauuu

SEQ ID NO: 488950 - RNA, 19 nt, Artificial Sequence
  Description of Artificial Sequence: Synthetic oligonucleotide
  Antisense Strand to SEQ ID NO: 488949
aaauuccauaggcuacuua

SEQ ID NO: 488951 - RNA, 19 nt, Artificial Sequence
  Description of Artificial Sequence: Synthetic oligonucleotide
  Sense strand starting at position 2856 of SEQ ID NO: 317413
cuguaagagaacugcuaag

SEQ ID NO: 488952 - RNA, 19 nt, Artificial Sequence
  Description of Artificial Sequence: Synthetic oligonucleotide
  Antisense Strand to SEQ ID NO: 488951
cuuagcaguucucuuacag

SEQ ID NO: 488953 - RNA, 19 nt, Artificial Sequence
  Description of Artificial Sequence: Synthetic oligonucleotide
  Sense strand starting at position 2862 of SEQ ID NO: 317413
gagaacugcuaagaacaga

SEQ ID NO: 488954 - RNA, 19 nt, Artificial Sequence
  Description of Artificial Sequence: Synthetic oligonucleotide
  Antisense Strand to SEQ ID NO: 488953
ucuguucuuagcaguucuc

SEQ ID NO: 488955 - RNA, 19 nt, Artificial Sequence
  Description of Artificial Sequence: Synthetic oligonucleotide
  Sense strand starting at position 2882 of SEQ ID NO: 317413
agauuacagcuuuagaagu

SEQ ID NO: 488956 - RNA, 19 nt, Artificial Sequence
  Description of Artificial Sequence: Synthetic oligonucleotide
  Antisense Strand to SEQ ID NO: 488955
acuucuaaagcuguaaucu

SEQ ID NO: 488957 - RNA, 19 nt, Artificial Sequence
  Description of Artificial Sequence: Synthetic oligonucleotide
  Sense strand starting at position 2896 of SEQ ID NO: 317413
gaaguuauagaaggcacuu

SEQ ID NO: 488958 - RNA, 19 nt, Artificial Sequence
  Description of Artificial Sequence: Synthetic oligonucleotide
  Antisense Strand to SEQ ID NO: 488957
aagugccuucuauaacuuc

SEQ ID NO: 488959 - RNA, 19 nt, Artificial Sequence
  Description of Artificial Sequence: Synthetic oligonucleotide
  Sense strand starting at position 2981 of SEQ ID NO: 317413
auagaaagcuagcuguaua

SEQ ID NO: 488960 - RNA, 19 nt, Artificial Sequence
  Description of Artificial Sequence: Synthetic oligonucleotide
  Antisense Strand to SEQ ID NO: 488959
uauacagcuagcuuucuau

SEQ ID NO: 488961 - RNA, 19 nt, Artificial Sequence
  Description of Artificial Sequence: Synthetic oligonucleotide
  Sense strand starting at position 2984 of SEQ ID NO: 317413
gaaagcuagcuguauaaag

SEQ ID NO: 488962 - RNA, 19 nt, Artificial Sequence
  Description of Artificial Sequence: Synthetic oligonucleotide
  Antisense Strand to SEQ ID NO: 488961
cuuuauacagcuagcuuuc

SEQ ID NO: 488963 - RNA, 19 nt, Artificial Sequence
  Description of Artificial Sequence: Synthetic oligonucleotide
  Sense strand starting at position 3025 of SEQ ID NO: 317413
cauggacugcuuggauauu

SEQ ID NO: 488964 - RNA, 19 nt, Artificial Sequence
  Description of Artificial Sequence: Synthetic oligonucleotide
  Antisense Strand to SEQ ID NO: 488963
aauauccaagcaguccaug

SEQ ID NO: 488965 - RNA, 19 nt, Artificial Sequence
  Description of Artificial Sequence: Synthetic oligonucleotide
  Sense strand starting at position 3026 of SEQ ID NO: 317413
auggacugcuuggauauuu

SEQ ID NO: 488966 - RNA, 19 nt, Artificial Sequence
  Description of Artificial Sequence: Synthetic oligonucleotide
  Antisense Strand to SEQ ID NO: 488965
aaauauccaagcaguccau

SEQ ID NO: 488967 - RNA, 19 nt, Artificial Sequence
  Description of Artificial Sequence: Synthetic oligonucleotide
  Sense strand starting at position 3384 of SEQ ID NO: 317413
ccacauuauggugagugua

SEQ ID NO: 488968 - RNA, 19 nt, Artificial Sequence
  Description of Artificial Sequence: Synthetic oligonucleotide
  Antisense Strand to SEQ ID NO: 488967
uacacucaccauaaugugg

SEQ ID NO: 488969 - RNA, 19 nt, Artificial Sequence
  Description of Artificial Sequence: Synthetic oligonucleotide
  Sense strand starting at position 3386 of SEQ ID NO: 317413
acauuauggugaguguaua

SEQ ID NO: 488970 - RNA, 19 nt, Artificial Sequence
  Description of Artificial Sequence: Synthetic oligonucleotide
  Antisense Strand to SEQ ID NO: 488969
uauacacucaccauaaugu

SEQ ID NO: 488971 - RNA, 19 nt, Artificial Sequence
  Description of Artificial Sequence: Synthetic oligonucleotide
  Sense strand starting at position 3387 of SEQ ID NO: 317413
cauuauggugaguguauau

SEQ ID NO: 488972 - RNA, 19 nt, Artificial Sequence
  Description of Artificial Sequence: Synthetic oligonucleotide
  Antisense Strand to SEQ ID NO: 488971
auauacacucaccauaaug

SEQ ID NO: 488973 - RNA, 19 nt, Artificial Sequence
  Description of Artificial Sequence: Synthetic oligonucleotide
  Sense strand starting at position 3524 of SEQ ID NO: 317413
gaacaacugucuuccacga

SEQ ID NO: 488974 - RNA, 19 nt, Artificial Sequence
  Description of Artificial Sequence: Synthetic oligonucleotide
  Antisense Strand to SEQ ID NO: 488973
ucguggaagacaguuguuc

SEQ ID NO: 488975 - RNA, 19 nt, Artificial Sequence
  Description of Artificial Sequence: Synthetic oligonucleotide
  Sense strand starting at position 3609 of SEQ ID NO: 317413
uguauuaaugaauguagga

SEQ ID NO: 488976 - RNA, 19 nt, Artificial Sequence
  Description of Artificial Sequence: Synthetic oligonucleotide
  Antisense Strand to SEQ ID NO: 488975
uccuacauucauuaauaca

SEQ ID NO: 488977 - RNA, 19 nt, Artificial Sequence
  Description of Artificial Sequence: Synthetic oligonucleotide
  Sense strand starting at position 3614 of SEQ ID NO: 317413
uaaugaauguaggagaacu

SEQ ID NO: 488978 - RNA, 19 nt, Artificial Sequence
  Description of Artificial Sequence: Synthetic oligonucleotide
  Antisense Strand to SEQ ID NO: 488977
aguucuccuacauucauua

SEQ ID NO: 488979 - RNA, 19 nt, Artificial Sequence
  Description of Artificial Sequence: Synthetic oligonucleotide
  Sense strand starting at position 3678 of SEQ ID NO: 317413
agccaaaggugguuauaug

SEQ ID NO: 488980 - RNA, 19 nt, Artificial Sequence
  Description of Artificial Sequence: Synthetic oligonucleotide
  Antisense Strand to SEQ ID NO: 488979
cauauaaccaccuuuggcu

SEQ ID NO: 488981 - RNA, 19 nt, Artificial Sequence
  Description of Artificial Sequence: Synthetic oligonucleotide
  Sense strand starting at position 3679 of SEQ ID NO: 317413
gccaaaggugguuauauga

SEQ ID NO: 488982 - RNA, 19 nt, Artificial Sequence
  Description of Artificial Sequence: Synthetic oligonucleotide
  Antisense Strand to SEQ ID NO: 488981
ucauauaaccaccuuuggc

SEQ ID NO: 488983 - RNA, 19 nt, Artificial Sequence
  Description of Artificial Sequence: Synthetic oligonucleotide
  Sense strand starting at position 3735 of SEQ ID NO: 317413
ugcuguggcaacugugaua

SEQ ID NO: 488984 - RNA, 19 nt, Artificial Sequence
  Description of Artificial Sequence: Synthetic oligonucleotide
  Antisense Strand to SEQ ID NO: 488983
uaucacaguugccacagca

SEQ ID NO: 488985 - RNA, 19 nt, Artificial Sequence
  Description of Artificial Sequence: Synthetic oligonucleotide
  Sense strand starting at position 3773 of SEQ ID NO: 317413
auggcugacugucuagaau

SEQ ID NO: 488986 - RNA, 19 nt, Artificial Sequence
  Description of Artificial Sequence: Synthetic oligonucleotide
  Antisense Strand to SEQ ID NO: 488985
auucuagacagucagccau

SEQ ID NO: 488987 - RNA, 19 nt, Artificial Sequence
  Description of Artificial Sequence: Synthetic oligonucleotide
  Sense strand starting at position 3779 of SEQ ID NO: 317413
gacugucuagaauacgcaa

SEQ ID NO: 488988 - RNA, 19 nt, Artificial Sequence
  Description of Artificial Sequence: Synthetic oligonucleotide
  Antisense Strand to SEQ ID NO: 488987
uugcguauucuagacaguc

SEQ ID NO: 488989 - RNA, 19 nt, Artificial Sequence
  Description of Artificial Sequence: Synthetic oligonucleotide
  Sense strand starting at position 3849 of SEQ ID NO: 317413
aaccgucuaguauggaaga

SEQ ID NO: 488990 - RNA, 19 nt, Artificial Sequence
  Description of Artificial Sequence: Synthetic oligonucleotide
  Antisense Strand to SEQ ID NO: 488989
ucuuccauacuagacgguu

SEQ ID NO: 488991 - RNA, 19 nt, Artificial Sequence
  Description of Artificial Sequence: Synthetic oligonucleotide
  Sense strand starting at position 3851 of SEQ ID NO: 317413
ccgucuaguauggaagaga

SEQ ID NO: 488992 - RNA, 19 nt, Artificial Sequence
  Description of Artificial Sequence: Synthetic oligonucleotide
  Antisense Strand to SEQ ID NO: 488991
ucucuuccauacuagacgg

SEQ ID NO: 488993 - RNA, 19 nt, Artificial Sequence
  Description of Artificial Sequence: Synthetic oligonucleotide
  Sense strand starting at position 3887 of SEQ ID NO: 317413
ugcagaaauugugcuaagu

SEQ ID NO: 488994 - RNA, 19 nt, Artificial Sequence
  Description of Artificial Sequence: Synthetic oligonucleotide
  Antisense Strand to SEQ ID NO: 488993
acuuagcacaauuucugca

SEQ ID NO: 488995 - RNA, 19 nt, Artificial Sequence
  Description of Artificial Sequence: Synthetic oligonucleotide
  Sense strand starting at position 195 of SEQ ID NO: 317414
agaguuuccucugcacaac

SEQ ID NO: 488996 - RNA, 19 nt, Artificial Sequence
  Description of Artificial Sequence: Synthetic oligonucleotide
  Antisense Strand to SEQ ID NO: 488995
guugugcagaggaaacucu

SEQ ID NO: 488997 - RNA, 19 nt, Artificial Sequence
  Description of Artificial Sequence: Synthetic oligonucleotide
  Sense strand starting at position 383 of SEQ ID NO: 317414
aguguacuugauuaauaac

SEQ ID NO: 488998 - RNA, 19 nt, Artificial Sequence
  Description of Artificial Sequence: Synthetic oligonucleotide
  Antisense Strand to SEQ ID NO: 488997
guuauuaaucaaguacacu

SEQ ID NO: 488999 - RNA, 19 nt, Artificial Sequence
  Description of Artificial Sequence: Synthetic oligonucleotide
  Sense strand starting at position 616 of SEQ ID NO: 317414
agaagaugaugcccugauu

SEQ ID NO: 489000 - RNA, 19 nt, Artificial Sequence
  Description of Artificial Sequence: Synthetic oligonucleotide
  Antisense Strand to SEQ ID NO: 488999
aaucagggcaucaucuucu

SEQ ID NO: 489001 - RNA, 19 nt, Artificial Sequence
  Description of Artificial Sequence: Synthetic oligonucleotide
  Sense strand starting at position 625 of SEQ ID NO: 317414
ugcccugauucggcauuua

SEQ ID NO: 489002 - RNA, 19 nt, Artificial Sequence
  Description of Artificial Sequence: Synthetic oligonucleotide
  Antisense Strand to SEQ ID NO: 489001
uaaaugccgaaucagggca

SEQ ID NO: 489003 - RNA, 19 nt, Artificial Sequence
  Description of Artificial Sequence: Synthetic oligonucleotide
  Sense strand starting at position 727 of SEQ ID NO: 317414
aggaaaugauguuacauuu

SEQ ID NO: 489004 - RNA, 19 nt, Artificial Sequence
  Description of Artificial Sequence: Synthetic oligonucleotide
  Antisense Strand to SEQ ID NO: 489003
aaauguaacaucauuuccu

SEQ ID NO: 489005 - RNA, 19 nt, Artificial Sequence
  Description of Artificial Sequence: Synthetic oligonucleotide
  Sense strand starting at position 764 of SEQ ID NO: 317414
agaauaaaguggucaguua

SEQ ID NO: 489006 - RNA, 19 nt, Artificial Sequence
  Description of Artificial Sequence: Synthetic oligonucleotide
  Antisense Strand to SEQ ID NO: 489005
uaacugaccacuuuauucu

SEQ ID NO: 489007 - RNA, 19 nt, Artificial Sequence
  Description of Artificial Sequence: Synthetic oligonucleotide
  Sense strand starting at position 765 of SEQ ID NO: 317414
gaauaaaguggucaguuau

SEQ ID NO: 489008 - RNA, 19 nt, Artificial Sequence
  Description of Artificial Sequence: Synthetic oligonucleotide
  Antisense Strand to SEQ ID NO: 489007
auaacugaccacuuuauuc

SEQ ID NO: 489009 - RNA, 19 nt, Artificial Sequence
  Description of Artificial Sequence: Synthetic oligonucleotide
  Sense strand starting at position 794 of SEQ ID NO: 317414
aggauugcaaagugucaca

SEQ ID NO: 489010 - RNA, 19 nt, Artificial Sequence
  Description of Artificial Sequence: Synthetic oligonucleotide
  Antisense Strand to SEQ ID NO: 489009
ugugacacuuugcaauccu

SEQ ID NO: 489011 - RNA, 19 nt, Artificial Sequence
  Description of Artificial Sequence: Synthetic oligonucleotide
  Sense strand starting at position 838 of SEQ ID NO: 317414
gggaauuaaugcuuauaau

SEQ ID NO: 489012 - RNA, 19 nt, Artificial Sequence
  Description of Artificial Sequence: Synthetic oligonucleotide
  Antisense Strand to SEQ ID NO: 489011
auuauaagcauuaauuccc

SEQ ID NO: 489013 - RNA, 19 nt, Artificial Sequence
  Description of Artificial Sequence: Synthetic oligonucleotide
  Sense strand starting at position 990 of SEQ ID NO: 317414
ucccuuaucugaucaguua

SEQ ID NO: 489014 - RNA, 19 nt, Artificial Sequence
  Description of Artificial Sequence: Synthetic oligonucleotide
  Antisense Strand to SEQ ID NO: 489013
uaacugaucagauaaggga

SEQ ID NO: 489015 - RNA, 19 nt, Artificial Sequence
  Description of Artificial Sequence: Synthetic oligonucleotide
  Sense strand starting at position 991 of SEQ ID NO: 317414
cccuuaucugaucaguuau

SEQ ID NO: 489016 - RNA, 19 nt, Artificial Sequence
  Description of Artificial Sequence: Synthetic oligonucleotide
  Antisense Strand to SEQ ID NO: 489015
auaacugaucagauaaggg

SEQ ID NO: 489017 - RNA, 19 nt, Artificial Sequence
  Description of Artificial Sequence: Synthetic oligonucleotide
  Sense strand starting at position 1337 of SEQ ID NO: 317414
acggaacuaucuuuaaaua

SEQ ID NO: 489018 - RNA, 19 nt, Artificial Sequence
  Description of Artificial Sequence: Synthetic oligonucleotide
  Antisense Strand to SEQ ID NO: 489017
uauuuaaagauaguuccgu

SEQ ID NO: 489019 - RNA, 19 nt, Artificial Sequence
  Description of Artificial Sequence: Synthetic oligonucleotide
  Sense strand starting at position 1560 of SEQ ID NO: 317414
acaacuauugcggaaucaa

SEQ ID NO: 489020 - RNA, 19 nt, Artificial Sequence
  Description of Artificial Sequence: Synthetic oligonucleotide
  Antisense Strand to SEQ ID NO: 489019
uugauuccgcaauaguugu

SEQ ID NO: 489021 - RNA, 19 nt, Artificial Sequence
  Description of Artificial Sequence: Synthetic oligonucleotide
  Sense strand starting at position 1621 of SEQ ID NO: 317414
gugauacuaucagucucau

SEQ ID NO: 489022 - RNA, 19 nt, Artificial Sequence
  Description of Artificial Sequence: Synthetic oligonucleotide
  Antisense Strand to SEQ ID NO: 489021
augagacugauaguaucac

SEQ ID NO: 489023 - RNA, 19 nt, Artificial Sequence
  Description of Artificial Sequence: Synthetic oligonucleotide
  Sense strand starting at position 1971 of SEQ ID NO: 317414
uagcuagaaguguggagaa

SEQ ID NO: 489024 - RNA, 19 nt, Artificial Sequence
  Description of Artificial Sequence: Synthetic oligonucleotide
  Antisense Strand to SEQ ID NO: 489023
uucuccacacuucuagcua

SEQ ID NO: 489025 - RNA, 19 nt, Artificial Sequence
  Description of Artificial Sequence: Synthetic oligonucleotide
  Sense strand starting at position 2030 of SEQ ID NO: 317414
uuccguaaacagggaaauu

SEQ ID NO: 489026 - RNA, 19 nt, Artificial Sequence
  Description of Artificial Sequence: Synthetic oligonucleotide
  Antisense Strand to SEQ ID NO: 489025
aauuucccuguuuacggaa

SEQ ID NO: 489027 - RNA, 19 nt, Artificial Sequence
  Description of Artificial Sequence: Synthetic oligonucleotide
  Sense strand starting at position 2073 of SEQ ID NO: 317414
gcucauugauaccagauuu

SEQ ID NO: 489028 - RNA, 19 nt, Artificial Sequence
  Description of Artificial Sequence: Synthetic oligonucleotide
  Antisense Strand to SEQ ID NO: 489027
aaaucugguaucaaugagc

SEQ ID NO: 489029 - RNA, 19 nt, Artificial Sequence
  Description of Artificial Sequence: Synthetic oligonucleotide
  Sense strand starting at position 2101 of SEQ ID NO: 317414
gauuucuagcucuguggua

SEQ ID NO: 489030 - RNA, 19 nt, Artificial Sequence
  Description of Artificial Sequence: Synthetic oligonucleotide
  Antisense Strand to SEQ ID NO: 489029
uaccacagagcuagaaauc

SEQ ID NO: 489031 - RNA, 19 nt, Artificial Sequence
  Description of Artificial Sequence: Synthetic oligonucleotide
  Sense strand starting at position 2102 of SEQ ID NO: 317414
auuucuagcucugugguaa

SEQ ID NO: 489032 - RNA, 19 nt, Artificial Sequence
  Description of Artificial Sequence: Synthetic oligonucleotide
  Antisense Strand to SEQ ID NO: 489031
uuaccacagagcuagaaau

SEQ ID NO: 489033 - RNA, 19 nt, Artificial Sequence
  Description of Artificial Sequence: Synthetic oligonucleotide
  Sense strand starting at position 2464 of SEQ ID NO: 317414
uacuuaggucccgaacuuu

SEQ ID NO: 489034 - RNA, 19 nt, Artificial Sequence
  Description of Artificial Sequence: Synthetic oligonucleotide
  Antisense Strand to SEQ ID NO: 489033
aaaguucgggaccuaagua

SEQ ID NO: 489035 - RNA, 19 nt, Artificial Sequence
  Description of Artificial Sequence: Synthetic oligonucleotide
  Sense strand starting at position 2528 of SEQ ID NO: 317414
ggacuaacuugaccuugau

SEQ ID NO: 489036 - RNA, 19 nt, Artificial Sequence
  Description of Artificial Sequence: Synthetic oligonucleotide
  Antisense Strand to SEQ ID NO: 489035
aucaaggucaaguuagucc

SEQ ID NO: 489037 - RNA, 19 nt, Artificial Sequence
  Description of Artificial Sequence: Synthetic oligonucleotide
  Sense strand starting at position 2972 of SEQ ID NO: 317414
gauucugaaccuugggcaa

SEQ ID NO: 489038 - RNA, 19 nt, Artificial Sequence
  Description of Artificial Sequence: Synthetic oligonucleotide
  Antisense Strand to SEQ ID NO: 489037
uugcccaagguucagaauc

SEQ ID NO: 489039 - RNA, 19 nt, Artificial Sequence
  Description of Artificial Sequence: Synthetic oligonucleotide
  Sense strand starting at position 3138 of SEQ ID NO: 317414
cuccaaauggucuacagua

SEQ ID NO: 489040 - RNA, 19 nt, Artificial Sequence
  Description of Artificial Sequence: Synthetic oligonucleotide
  Antisense Strand to SEQ ID NO: 489039
uacuguagaccauuuggag

SEQ ID NO: 489041 - RNA, 19 nt, Artificial Sequence
  Description of Artificial Sequence: Synthetic oligonucleotide
  Sense strand starting at position 3154 of SEQ ID NO: 317414
guacguuaauuuguuccua

SEQ ID NO: 489042 - RNA, 19 nt, Artificial Sequence
  Description of Artificial Sequence: Synthetic oligonucleotide
  Antisense Strand to SEQ ID NO: 489041
uaggaacaaauuaacguac

SEQ ID NO: 489043 - RNA, 19 nt, Artificial Sequence
  Description of Artificial Sequence: Synthetic oligonucleotide
  Sense strand starting at position 3156 of SEQ ID NO: 317414
acguuaauuuguuccuacu

SEQ ID NO: 489044 - RNA, 19 nt, Artificial Sequence
  Description of Artificial Sequence: Synthetic oligonucleotide
  Antisense Strand to SEQ ID NO: 489043
aguaggaacaaauuaacgu

SEQ ID NO: 489045 - RNA, 19 nt, Artificial Sequence
  Description of Artificial Sequence: Synthetic oligonucleotide
  Sense strand starting at position 3286 of SEQ ID NO: 317414
gcuauaugcuucucaagga

SEQ ID NO: 489046 - RNA, 19 nt, Artificial Sequence
  Description of Artificial Sequence: Synthetic oligonucleotide
  Antisense Strand to SEQ ID NO: 489045
uccuugagaagcauauagc

SEQ ID NO: 489047 - RNA, 19 nt, Artificial Sequence
  Description of Artificial Sequence: Synthetic oligonucleotide
  Sense strand starting at position 3290 of SEQ ID NO: 317414
uaugcuucucaaggaugua

SEQ ID NO: 489048 - RNA, 19 nt, Artificial Sequence
  Description of Artificial Sequence: Synthetic oligonucleotide
  Antisense Strand to SEQ ID NO: 489047
uacauccuugagaagcaua

SEQ ID NO: 489049 - RNA, 19 nt, Artificial Sequence
  Description of Artificial Sequence: Synthetic oligonucleotide
  Sense strand starting at position 3369 of SEQ ID NO: 317414
cgaauuggcauauacugua

SEQ ID NO: 489050 - RNA, 19 nt, Artificial Sequence
  Description of Artificial Sequence: Synthetic oligonucleotide
  Antisense Strand to SEQ ID NO: 489049
uacaguauaugccaauucg

SEQ ID NO: 489051 - RNA, 19 nt, Artificial Sequence
  Description of Artificial Sequence: Synthetic oligonucleotide
  Sense strand starting at position 3678 of SEQ ID NO: 317414
uagaaagagucacagagau

SEQ ID NO: 489052 - RNA, 19 nt, Artificial Sequence
  Description of Artificial Sequence: Synthetic oligonucleotide
  Antisense Strand to SEQ ID NO: 489051
aucucugugacucuuucua

SEQ ID NO: 489053 - RNA, 19 nt, Artificial Sequence
  Description of Artificial Sequence: Synthetic oligonucleotide
  Sense strand starting at position 3710 of SEQ ID NO: 317414
ucaugugcuguguaugaua

SEQ ID NO: 489054 - RNA, 19 nt, Artificial Sequence
  Description of Artificial Sequence: Synthetic oligonucleotide
  Antisense Strand to SEQ ID NO: 489053
uaucauacacagcacauga

SEQ ID NO: 489055 - RNA, 19 nt, Artificial Sequence
  Description of Artificial Sequence: Synthetic oligonucleotide
  Sense strand starting at position 3723 of SEQ ID NO: 317414
augauaauccaguggugcu

SEQ ID NO: 489056 - RNA, 19 nt, Artificial Sequence
  Description of Artificial Sequence: Synthetic oligonucleotide
  Antisense Strand to SEQ ID NO: 489055
agcaccacuggauuaucau

SEQ ID NO: 489057 - RNA, 19 nt, Artificial Sequence
  Description of Artificial Sequence: Synthetic oligonucleotide
  Sense strand starting at position 3740 of SEQ ID NO: 317414
cuuguaaauuugcccgcua

SEQ ID NO: 489058 - RNA, 19 nt, Artificial Sequence
  Description of Artificial Sequence: Synthetic oligonucleotide
  Antisense Strand to SEQ ID NO: 489057
uagcgggcaaauuuacaag

SEQ ID NO: 489059 - RNA, 19 nt, Artificial Sequence
  Description of Artificial Sequence: Synthetic oligonucleotide
  Sense strand starting at position 3741 of SEQ ID NO: 317414
uuguaaauuugcccgcuau

SEQ ID NO: 489060 - RNA, 19 nt, Artificial Sequence
  Description of Artificial Sequence: Synthetic oligonucleotide
  Antisense Strand to SEQ ID NO: 489059
auagcgggcaaauuuacaa

SEQ ID NO: 489061 - RNA, 19 nt, Artificial Sequence
  Description of Artificial Sequence: Synthetic oligonucleotide
  Sense strand starting at position 3742 of SEQ ID NO: 317414
uguaaauuugcccgcuaug

SEQ ID NO: 489062 - RNA, 19 nt, Artificial Sequence
  Description of Artificial Sequence: Synthetic oligonucleotide
  Antisense Strand to SEQ ID NO: 489061
cauagcgggcaaauuuaca

SEQ ID NO: 489063 - RNA, 19 nt, Artificial Sequence
  Description of Artificial Sequence: Synthetic oligonucleotide
  Sense strand starting at position 3753 of SEQ ID NO: 317414
ccgcuauguccuuaaggac

SEQ ID NO: 489064 - RNA, 19 nt, Artificial Sequence
  Description of Artificial Sequence: Synthetic oligonucleotide
  Antisense Strand to SEQ ID NO: 489063
guccuuaaggacauagcgg

SEQ ID NO: 489065 - RNA, 19 nt, Artificial Sequence
  Description of Artificial Sequence: Synthetic oligonucleotide
  Sense strand starting at position 3759 of SEQ ID NO: 317414
uguccuuaaggacaucauu

SEQ ID NO: 489066 - RNA, 19 nt, Artificial Sequence
  Description of Artificial Sequence: Synthetic oligonucleotide
  Antisense Strand to SEQ ID NO: 489065
aaugauguccuuaaggaca

SEQ ID NO: 489067 - RNA, 19 nt, Artificial Sequence
  Description of Artificial Sequence: Synthetic oligonucleotide
  Sense strand starting at position 3887 of SEQ ID NO: 317414
ucugcaguagucuacauua

SEQ ID NO: 489068 - RNA, 19 nt, Artificial Sequence
  Description of Artificial Sequence: Synthetic oligonucleotide
  Antisense Strand to SEQ ID NO: 489067
uaauguagacuacugcaga

SEQ ID NO: 489069 - RNA, 19 nt, Artificial Sequence
  Description of Artificial Sequence: Synthetic oligonucleotide
  Sense strand starting at position 3889 of SEQ ID NO: 317414
ugcaguagucuacauuacu

SEQ ID NO: 489070 - RNA, 19 nt, Artificial Sequence
  Description of Artificial Sequence: Synthetic oligonucleotide
  Antisense Strand to SEQ ID NO: 489069
aguaauguagacuacugca

SEQ ID NO: 489071 - RNA, 19 nt, Artificial Sequence
  Description of Artificial Sequence: Synthetic oligonucleotide
  Sense strand starting at position 3948 of SEQ ID NO: 317414
aaugguaaagcuggcuuua

SEQ ID NO: 489072 - RNA, 19 nt, Artificial Sequence
  Description of Artificial Sequence: Synthetic oligonucleotide
  Antisense Strand to SEQ ID NO: 489071
uaaagccagcuuuaccauu

SEQ ID NO: 489073 - RNA, 19 nt, Artificial Sequence
  Description of Artificial Sequence: Synthetic oligonucleotide
  Sense strand starting at position 3968 of SEQ ID NO: 317414
augcuuucugucugauuug

SEQ ID NO: 489074 - RNA, 19 nt, Artificial Sequence
  Description of Artificial Sequence: Synthetic oligonucleotide
  Antisense Strand to SEQ ID NO: 489073
caaaucagacagaaagcau

SEQ ID NO: 489075 - RNA, 19 nt, Artificial Sequence
  Description of Artificial Sequence: Synthetic oligonucleotide
  Sense strand starting at position 224 of SEQ ID NO: 317415
uggugcuuucucuaccaga

SEQ ID NO: 489076 - RNA, 19 nt, Artificial Sequence
  Description of Artificial Sequence: Synthetic oligonucleotide
  Antisense Strand to SEQ ID NO: 489075
ucugguagagaaagcacca

SEQ ID NO: 489077 - RNA, 19 nt, Artificial Sequence
  Description of Artificial Sequence: Synthetic oligonucleotide
  Sense strand starting at position 411 of SEQ ID NO: 317415
cuauucucuuagccugaga

SEQ ID NO: 489078 - RNA, 19 nt, Artificial Sequence
  Description of Artificial Sequence: Synthetic oligonucleotide
  Antisense Strand to SEQ ID NO: 489077
ucucaggcuaagagaauag

SEQ ID NO: 489079 - RNA, 19 nt, Artificial Sequence
  Description of Artificial Sequence: Synthetic oligonucleotide
  Sense strand starting at position 413 of SEQ ID NO: 317415
auucucuuagccugagaug

SEQ ID NO: 489080 - RNA, 19 nt, Artificial Sequence
  Description of Artificial Sequence: Synthetic oligonucleotide
  Antisense Strand to SEQ ID NO: 489079
caucucaggcuaagagaau

SEQ ID NO: 489081 - RNA, 19 nt, Artificial Sequence
  Description of Artificial Sequence: Synthetic oligonucleotide
  Sense strand starting at position 414 of SEQ ID NO: 317415
uucucuuagccugagaugu

SEQ ID NO: 489082 - RNA, 19 nt, Artificial Sequence
  Description of Artificial Sequence: Synthetic oligonucleotide
  Antisense Strand to SEQ ID NO: 489081
acaucucaggcuaagagaa

SEQ ID NO: 489083 - RNA, 19 nt, Artificial Sequence
  Description of Artificial Sequence: Synthetic oligonucleotide
  Sense strand starting at position 669 of SEQ ID NO: 317415
caucaauagggcgagugua

SEQ ID NO: 489084 - RNA, 19 nt, Artificial Sequence
  Description of Artificial Sequence: Synthetic oligonucleotide
  Antisense Strand to SEQ ID NO: 489083
uacacucgcccuauugaug

SEQ ID NO: 489085 - RNA, 19 nt, Artificial Sequence
  Description of Artificial Sequence: Synthetic oligonucleotide
  Sense strand starting at position 730 of SEQ ID NO: 317415
gcuaacugucauuaaugca

SEQ ID NO: 489086 - RNA, 19 nt, Artificial Sequence
  Description of Artificial Sequence: Synthetic oligonucleotide
  Antisense Strand to SEQ ID NO: 489085
ugcauuaaugacaguuagc

SEQ ID NO: 489087 - RNA, 19 nt, Artificial Sequence
  Description of Artificial Sequence: Synthetic oligonucleotide
  Sense strand starting at position 798 of SEQ ID NO: 317415
guguaugccaagcagagaa

SEQ ID NO: 489088 - RNA, 19 nt, Artificial Sequence
  Description of Artificial Sequence: Synthetic oligonucleotide
  Antisense Strand to SEQ ID NO: 489087
uucucugcuuggcauacac

SEQ ID NO: 489089 - RNA, 19 nt, Artificial Sequence
  Description of Artificial Sequence: Synthetic oligonucleotide
  Sense strand starting at position 816 of SEQ ID NO: 317415
aggauuuacugugaaauua

SEQ ID NO: 489090 - RNA, 19 nt, Artificial Sequence
  Description of Artificial Sequence: Synthetic oligonucleotide
  Antisense Strand to SEQ ID NO: 489089
uaauuucacaguaaauccu

SEQ ID NO: 489091 - RNA, 19 nt, Artificial Sequence
  Description of Artificial Sequence: Synthetic oligonucleotide
  Sense strand starting at position 825 of SEQ ID NO: 317415
ugugaaauuaaugaggcuu

SEQ ID NO: 489092 - RNA, 19 nt, Artificial Sequence
  Description of Artificial Sequence: Synthetic oligonucleotide
  Antisense Strand to SEQ ID NO: 489091
aagccucauuaauuucaca

SEQ ID NO: 489093 - RNA, 19 nt, Artificial Sequence
  Description of Artificial Sequence: Synthetic oligonucleotide
  Sense strand starting at position 831 of SEQ ID NO: 317415
auuaaugaggcuuaagcuu

SEQ ID NO: 489094 - RNA, 19 nt, Artificial Sequence
  Description of Artificial Sequence: Synthetic oligonucleotide
  Antisense Strand to SEQ ID NO: 489093
aagcuuaagccucauuaau

SEQ ID NO: 489095 - RNA, 19 nt, Artificial Sequence
  Description of Artificial Sequence: Synthetic oligonucleotide
  Sense strand starting at position 879 of SEQ ID NO: 317415
ucugaaucuuucuugguga

SEQ ID NO: 489096 - RNA, 19 nt, Artificial Sequence
  Description of Artificial Sequence: Synthetic oligonucleotide
  Antisense Strand to SEQ ID NO: 489095
ucaccaagaaagauucaga

SEQ ID NO: 489097 - RNA, 19 nt, Artificial Sequence
  Description of Artificial Sequence: Synthetic oligonucleotide
  Sense strand starting at position 881 of SEQ ID NO: 317415
ugaaucuuucuuggugauu

SEQ ID NO: 489098 - RNA, 19 nt, Artificial Sequence
  Description of Artificial Sequence: Synthetic oligonucleotide
  Antisense Strand to SEQ ID NO: 489097
aaucaccaagaaagauuca

SEQ ID NO: 489099 - RNA, 19 nt, Artificial Sequence
  Description of Artificial Sequence: Synthetic oligonucleotide
  Sense strand starting at position 1021 of SEQ ID NO: 317415
uucuguuuaaugggaaaga

SEQ ID NO: 489100 - RNA, 19 nt, Artificial Sequence
  Description of Artificial Sequence: Synthetic oligonucleotide
  Antisense Strand to SEQ ID NO: 489099
ucuuucccauuaaacagaa

SEQ ID NO: 489101 - RNA, 19 nt, Artificial Sequence
  Description of Artificial Sequence: Synthetic oligonucleotide
  Sense strand starting at position 1145 of SEQ ID NO: 317415
uccuguucccagggagaug

SEQ ID NO: 489102 - RNA, 19 nt, Artificial Sequence
  Description of Artificial Sequence: Synthetic oligonucleotide
  Antisense Strand to SEQ ID NO: 489101
caucucccugggaacagga

SEQ ID NO: 489103 - RNA, 19 nt, Artificial Sequence
  Description of Artificial Sequence: Synthetic oligonucleotide
  Sense strand starting at position 1198 of SEQ ID NO: 317415
aguugaggugacuguaaca

SEQ ID NO: 489104 - RNA, 19 nt, Artificial Sequence
  Description of Artificial Sequence: Synthetic oligonucleotide
  Antisense Strand to SEQ ID NO: 489103
uguuacagucaccucaacu

SEQ ID NO: 489105 - RNA, 19 nt, Artificial Sequence
  Description of Artificial Sequence: Synthetic oligonucleotide
  Sense strand starting at position 1224 of SEQ ID NO: 317415
ugcgaaagauuacccuaaa

SEQ ID NO: 489106 - RNA, 19 nt, Artificial Sequence
  Description of Artificial Sequence: Synthetic oligonucleotide
  Antisense Strand to SEQ ID NO: 489105
uuuaggguaaucuuucgca

SEQ ID NO: 489107 - RNA, 19 nt, Artificial Sequence
  Description of Artificial Sequence: Synthetic oligonucleotide
  Sense strand starting at position 1225 of SEQ ID NO: 317415
gcgaaagauuacccuaaac

SEQ ID NO: 489108 - RNA, 19 nt, Artificial Sequence
  Description of Artificial Sequence: Synthetic oligonucleotide
  Antisense Strand to SEQ ID NO: 489107
guuuaggguaaucuuucgc

SEQ ID NO: 489109 - RNA, 19 nt, Artificial Sequence
  Description of Artificial Sequence: Synthetic oligonucleotide
  Sense strand starting at position 1261 of SEQ ID NO: 317415
gaguccuacuuauugcaga

SEQ ID NO: 489110 - RNA, 19 nt, Artificial Sequence
  Description of Artificial Sequence: Synthetic oligonucleotide
  Antisense Strand to SEQ ID NO: 489109
ucugcaauaaguaggacuc

SEQ ID NO: 489111 - RNA, 19 nt, Artificial Sequence
  Description of Artificial Sequence: Synthetic oligonucleotide
  Sense strand starting at position 1293 of SEQ ID NO: 317415
aagaguucggcugaauaca

SEQ ID NO: 489112 - RNA, 19 nt, Artificial Sequence
  Description of Artificial Sequence: Synthetic oligonucleotide
  Antisense Strand to SEQ ID NO: 489111
uguauucagccgaacucuu

SEQ ID NO: 489113 - RNA, 19 nt, Artificial Sequence
  Description of Artificial Sequence: Synthetic oligonucleotide
  Sense strand starting at position 1441 of SEQ ID NO: 317415
gcgaacucaugaccucaca

SEQ ID NO: 489114 - RNA, 19 nt, Artificial Sequence
  Description of Artificial Sequence: Synthetic oligonucleotide
  Antisense Strand to SEQ ID NO: 489113
ugugaggucaugaguucgc

SEQ ID NO: 489115 - RNA, 19 nt, Artificial Sequence
  Description of Artificial Sequence: Synthetic oligonucleotide
  Sense strand starting at position 1898 of SEQ ID NO: 317415
gcgugauguccaccgccau

SEQ ID NO: 489116 - RNA, 19 nt, Artificial Sequence
  Description of Artificial Sequence: Synthetic oligonucleotide
  Antisense Strand to SEQ ID NO: 489115
auggcgguggacaucacgc

SEQ ID NO: 489117 - RNA, 19 nt, Artificial Sequence
  Description of Artificial Sequence: Synthetic oligonucleotide
  Sense strand starting at position 2454 of SEQ ID NO: 317415
agaggccuuucuucuccaa

SEQ ID NO: 489118 - RNA, 19 nt, Artificial Sequence
  Description of Artificial Sequence: Synthetic oligonucleotide
  Antisense Strand to SEQ ID NO: 489117
uuggagaagaaaggccucu

SEQ ID NO: 489119 - RNA, 19 nt, Artificial Sequence
  Description of Artificial Sequence: Synthetic oligonucleotide
  Sense strand starting at position 2562 of SEQ ID NO: 317415
uguugcuuggcuccuagua

SEQ ID NO: 489120 - RNA, 19 nt, Artificial Sequence
  Description of Artificial Sequence: Synthetic oligonucleotide
  Antisense Strand to SEQ ID NO: 489119
uacuaggagccaagcaaca

SEQ ID NO: 489121 - RNA, 19 nt, Artificial Sequence
  Description of Artificial Sequence: Synthetic oligonucleotide
  Sense strand starting at position 2574 of SEQ ID NO: 317415
ccuaguaaguggccaauaa

SEQ ID NO: 489122 - RNA, 19 nt, Artificial Sequence
  Description of Artificial Sequence: Synthetic oligonucleotide
  Antisense Strand to SEQ ID NO: 489121
uuauuggccacuuacuagg

SEQ ID NO: 489123 - RNA, 19 nt, Artificial Sequence
  Description of Artificial Sequence: Synthetic oligonucleotide
  Sense strand starting at position 2575 of SEQ ID NO: 317415
cuaguaaguggccaauaaa

SEQ ID NO: 489124 - RNA, 19 nt, Artificial Sequence
  Description of Artificial Sequence: Synthetic oligonucleotide
  Antisense Strand to SEQ ID NO: 489123
uuuauuggccacuuacuag

SEQ ID NO: 489125 - RNA, 19 nt, Artificial Sequence
  Description of Artificial Sequence: Synthetic oligonucleotide
  Sense strand starting at position 2583 of SEQ ID NO: 317415
uggccaauaaaugguagua

SEQ ID NO: 489126 - RNA, 19 nt, Artificial Sequence
  Description of Artificial Sequence: Synthetic oligonucleotide
  Antisense Strand to SEQ ID NO: 489125
uacuaccauuuauuggcca

SEQ ID NO: 489127 - RNA, 19 nt, Artificial Sequence
  Description of Artificial Sequence: Synthetic oligonucleotide
  Sense strand starting at position 2595 of SEQ ID NO: 317415
gguaguaaucguuaauaau

SEQ ID NO: 489128 - RNA, 19 nt, Artificial Sequence
  Description of Artificial Sequence: Synthetic oligonucleotide
  Antisense Strand to SEQ ID NO: 489127
auuauuaacgauuacuacc

SEQ ID NO: 489129 - RNA, 19 nt, Artificial Sequence
  Description of Artificial Sequence: Synthetic oligonucleotide
  Sense strand starting at position 2626 of SEQ ID NO: 317415
aucacuguuauuuguggua

SEQ ID NO: 489130 - RNA, 19 nt, Artificial Sequence
  Description of Artificial Sequence: Synthetic oligonucleotide
  Antisense Strand to SEQ ID NO: 489129
uaccacaaauaacagugau

SEQ ID NO: 489131 - RNA, 19 nt, Artificial Sequence
  Description of Artificial Sequence: Synthetic oligonucleotide
  Sense strand starting at position 2723 of SEQ ID NO: 317415
gugaaagaguggcccuaau

SEQ ID NO: 489132 - RNA, 19 nt, Artificial Sequence
  Description of Artificial Sequence: Synthetic oligonucleotide
  Antisense Strand to SEQ ID NO: 489131
auuagggccacucuuucac

SEQ ID NO: 489133 - RNA, 19 nt, Artificial Sequence
  Description of Artificial Sequence: Synthetic oligonucleotide
  Sense strand starting at position 2734 of SEQ ID NO: 317415
gcccuaaugccgcuggauu

SEQ ID NO: 489134 - RNA, 19 nt, Artificial Sequence
  Description of Artificial Sequence: Synthetic oligonucleotide
  Antisense Strand to SEQ ID NO: 489133
aauccagcggcauuagggc

SEQ ID NO: 489135 - RNA, 19 nt, Artificial Sequence
  Description of Artificial Sequence: Synthetic oligonucleotide
  Sense strand starting at position 3099 of SEQ ID NO: 317415
gcacaaguagaauauguau

SEQ ID NO: 489136 - RNA, 19 nt, Artificial Sequence
  Description of Artificial Sequence: Synthetic oligonucleotide
  Antisense Strand to SEQ ID NO: 489135
auacauauucuacuugugc

SEQ ID NO: 489137 - RNA, 19 nt, Artificial Sequence
  Description of Artificial Sequence: Synthetic oligonucleotide
  Sense strand starting at position 3197 of SEQ ID NO: 317415
uuaugaguugcauacaguu

SEQ ID NO: 489138 - RNA, 19 nt, Artificial Sequence
  Description of Artificial Sequence: Synthetic oligonucleotide
  Antisense Strand to SEQ ID NO: 489137
aacuguaugcaacucauaa

SEQ ID NO: 489139 - RNA, 19 nt, Artificial Sequence
  Description of Artificial Sequence: Synthetic oligonucleotide
  Sense strand starting at position 3199 of SEQ ID NO: 317415
augaguugcauacaguuga

SEQ ID NO: 489140 - RNA, 19 nt, Artificial Sequence
  Description of Artificial Sequence: Synthetic oligonucleotide
  Antisense Strand to SEQ ID NO: 489139
ucaacuguaugcaacucau

SEQ ID NO: 489141 - RNA, 19 nt, Artificial Sequence
  Description of Artificial Sequence: Synthetic oligonucleotide
  Sense strand starting at position 3219 of SEQ ID NO: 317415
uuugcuggagacugugaua

SEQ ID NO: 489142 - RNA, 19 nt, Artificial Sequence
  Description of Artificial Sequence: Synthetic oligonucleotide
  Antisense Strand to SEQ ID NO: 489141
uaucacagucuccagcaaa

SEQ ID NO: 489143 - RNA, 19 nt, Artificial Sequence
  Description of Artificial Sequence: Synthetic oligonucleotide
  Sense strand starting at position 3233 of SEQ ID NO: 317415
ugauauugcaacggaguaa

SEQ ID NO: 489144 - RNA, 19 nt, Artificial Sequence
  Description of Artificial Sequence: Synthetic oligonucleotide
  Antisense Strand to SEQ ID NO: 489143
uuacuccguugcaauauca

SEQ ID NO: 489145 - RNA, 19 nt, Artificial Sequence
  Description of Artificial Sequence: Synthetic oligonucleotide
  Sense strand starting at position 3333 of SEQ ID NO: 317415
auaguaaaugucgauaaug

SEQ ID NO: 489146 - RNA, 19 nt, Artificial Sequence
  Description of Artificial Sequence: Synthetic oligonucleotide
  Antisense Strand to SEQ ID NO: 489145
cauuaucgacauuuacuau

SEQ ID NO: 489147 - RNA, 19 nt, Artificial Sequence
  Description of Artificial Sequence: Synthetic oligonucleotide
  Sense strand starting at position 3335 of SEQ ID NO: 317415
aguaaaugucgauaauguc

SEQ ID NO: 489148 - RNA, 19 nt, Artificial Sequence
  Description of Artificial Sequence: Synthetic oligonucleotide
  Antisense Strand to SEQ ID NO: 489147
gacauuaucgacauuuacu

SEQ ID NO: 489149 - RNA, 19 nt, Artificial Sequence
  Description of Artificial Sequence: Synthetic oligonucleotide
  Sense strand starting at position 3457 of SEQ ID NO: 317415
agaaauagaugucaagaaa

SEQ ID NO: 489150 - RNA, 19 nt, Artificial Sequence
  Description of Artificial Sequence: Synthetic oligonucleotide
  Antisense Strand to SEQ ID NO: 489149
uuucuugacaucuauuucu

SEQ ID NO: 489151 - RNA, 19 nt, Artificial Sequence
  Description of Artificial Sequence: Synthetic oligonucleotide
  Sense strand starting at position 3476 of SEQ ID NO: 317415
guauauauuuaccagaaag

SEQ ID NO: 489152 - RNA, 19 nt, Artificial Sequence
  Description of Artificial Sequence: Synthetic oligonucleotide
  Antisense Strand to SEQ ID NO: 489151
cuuucugguaaauauauac

SEQ ID NO: 489153 - RNA, 19 nt, Artificial Sequence
  Description of Artificial Sequence: Synthetic oligonucleotide
  Sense strand starting at position 3812 of SEQ ID NO: 317415
cuucuugcaguuuaaggaa

SEQ ID NO: 489154 - RNA, 19 nt, Artificial Sequence
  Description of Artificial Sequence: Synthetic oligonucleotide
  Antisense Strand to SEQ ID NO: 489153
uuccuuaaacugcaagaag

SEQ ID NO: 489155 - RNA, 19 nt, Artificial Sequence
  Description of Artificial Sequence: Synthetic oligonucleotide
  Sense strand starting at position 189 of SEQ ID NO: 317416
auguguuauuggccuuaac

SEQ ID NO: 489156 - RNA, 19 nt, Artificial Sequence
  Description of Artificial Sequence: Synthetic oligonucleotide
  Antisense Strand to SEQ ID NO: 489155
guuaaggccaauaacacau

SEQ ID NO: 489157 - RNA, 19 nt, Artificial Sequence
  Description of Artificial Sequence: Synthetic oligonucleotide
  Sense strand starting at position 192 of SEQ ID NO: 317416
uguuauuggccuuaacgga

SEQ ID NO: 489158 - RNA, 19 nt, Artificial Sequence
  Description of Artificial Sequence: Synthetic oligonucleotide
  Antisense Strand to SEQ ID NO: 489157
uccguuaaggccaauaaca

SEQ ID NO: 489159 - RNA, 19 nt, Artificial Sequence
  Description of Artificial Sequence: Synthetic oligonucleotide
  Sense strand starting at position 213 of SEQ ID NO: 317416
gcuuguuggaaauguggaa

SEQ ID NO: 489160 - RNA, 19 nt, Artificial Sequence
  Description of Artificial Sequence: Synthetic oligonucleotide
  Antisense Strand to SEQ ID NO: 489159
uuccacauuuccaacaagc

SEQ ID NO: 489161 - RNA, 19 nt, Artificial Sequence
  Description of Artificial Sequence: Synthetic oligonucleotide
  Sense strand starting at position 336 of SEQ ID NO: 317416
ucuaaugauacagggugua

SEQ ID NO: 489162 - RNA, 19 nt, Artificial Sequence
  Description of Artificial Sequence: Synthetic oligonucleotide
  Antisense Strand to SEQ ID NO: 489161
uacacccuguaucauuaga

SEQ ID NO: 489163 - RNA, 19 nt, Artificial Sequence
  Description of Artificial Sequence: Synthetic oligonucleotide
  Sense strand starting at position 339 of SEQ ID NO: 317416
aaugauacaggguguaagu

SEQ ID NO: 489164 - RNA, 19 nt, Artificial Sequence
  Description of Artificial Sequence: Synthetic oligonucleotide
  Antisense Strand to SEQ ID NO: 489163
acuuacacccuguaucauu

SEQ ID NO: 489165 - RNA, 19 nt, Artificial Sequence
  Description of Artificial Sequence: Synthetic oligonucleotide
  Sense strand starting at position 453 of SEQ ID NO: 317416
ugauaagucuuacuugcau

SEQ ID NO: 489166 - RNA, 19 nt, Artificial Sequence
  Description of Artificial Sequence: Synthetic oligonucleotide
  Antisense Strand to SEQ ID NO: 489165
augcaaguaagacuuauca

SEQ ID NO: 489167 - RNA, 19 nt, Artificial Sequence
  Description of Artificial Sequence: Synthetic oligonucleotide
  Sense strand starting at position 476 of SEQ ID NO: 317416
uggauaagauuaggaaaca

SEQ ID NO: 489168 - RNA, 19 nt, Artificial Sequence
  Description of Artificial Sequence: Synthetic oligonucleotide
  Antisense Strand to SEQ ID NO: 489167
uguuuccuaaucuuaucca

SEQ ID NO: 489169 - RNA, 19 nt, Artificial Sequence
  Description of Artificial Sequence: Synthetic oligonucleotide
  Sense strand starting at position 501 of SEQ ID NO: 317416
cagagcgucugcucaaaga

SEQ ID NO: 489170 - RNA, 19 nt, Artificial Sequence
  Description of Artificial Sequence: Synthetic oligonucleotide
  Antisense Strand to SEQ ID NO: 489169
ucuuugagcagacgcucug

SEQ ID NO: 489171 - RNA, 19 nt, Artificial Sequence
  Description of Artificial Sequence: Synthetic oligonucleotide
  Sense strand starting at position 621 of SEQ ID NO: 317416
aaauguccgugauuuaucu

SEQ ID NO: 489172 - RNA, 19 nt, Artificial Sequence
  Description of Artificial Sequence: Synthetic oligonucleotide
  Antisense Strand to SEQ ID NO: 489171
agauaaaucacggacauuu

SEQ ID NO: 489173 - RNA, 19 nt, Artificial Sequence
  Description of Artificial Sequence: Synthetic oligonucleotide
  Sense strand starting at position 625 of SEQ ID NO: 317416
guccgugauuuaucucauu

SEQ ID NO: 489174 - RNA, 19 nt, Artificial Sequence
  Description of Artificial Sequence: Synthetic oligonucleotide
  Antisense Strand to SEQ ID NO: 489173
aaugagauaaaucacggac

SEQ ID NO: 489175 - RNA, 19 nt, Artificial Sequence
  Description of Artificial Sequence: Synthetic oligonucleotide
  Sense strand starting at position 734 of SEQ ID NO: 317416
auuguugccggagaaggau

SEQ ID NO: 489176 - RNA, 19 nt, Artificial Sequence
  Description of Artificial Sequence: Synthetic oligonucleotide
  Antisense Strand to SEQ ID NO: 489175
auccuucuccggcaacaau

SEQ ID NO: 489177 - RNA, 19 nt, Artificial Sequence
  Description of Artificial Sequence: Synthetic oligonucleotide
  Sense strand starting at position 776 of SEQ ID NO: 317416
aaggcagcuguuugugaau

SEQ ID NO: 489178 - RNA, 19 nt, Artificial Sequence
  Description of Artificial Sequence: Synthetic oligonucleotide
  Antisense Strand to SEQ ID NO: 489177
auucacaaacagcugccuu

SEQ ID NO: 489179 - RNA, 19 nt, Artificial Sequence
  Description of Artificial Sequence: Synthetic oligonucleotide
  Sense strand starting at position 799 of SEQ ID NO: 317416
gcuagucaccucugggaag

SEQ ID NO: 489180 - RNA, 19 nt, Artificial Sequence
  Description of Artificial Sequence: Synthetic oligonucleotide
  Antisense Strand to SEQ ID NO: 489179
cuucccagaggugacuagc

SEQ ID NO: 489181 - RNA, 19 nt, Artificial Sequence
  Description of Artificial Sequence: Synthetic oligonucleotide
  Sense strand starting at position 813 of SEQ ID NO: 317416
ggaaguggguguguccaau

SEQ ID NO: 489182 - RNA, 19 nt, Artificial Sequence
  Description of Artificial Sequence: Synthetic oligonucleotide
  Antisense Strand to SEQ ID NO: 489181
auuggacacacccacuucc

SEQ ID NO: 489183 - RNA, 19 nt, Artificial Sequence
  Description of Artificial Sequence: Synthetic oligonucleotide
  Sense strand starting at position 861 of SEQ ID NO: 317416
acagcauuaccucgucaug

SEQ ID NO: 489184 - RNA, 19 nt, Artificial Sequence
  Description of Artificial Sequence: Synthetic oligonucleotide
  Antisense Strand to SEQ ID NO: 489183
caugacgagguaaugcugu

SEQ ID NO: 489185 - RNA, 19 nt, Artificial Sequence
  Description of Artificial Sequence: Synthetic oligonucleotide
  Sense strand starting at position 863 of SEQ ID NO: 317416
agcauuaccucgucaugac

SEQ ID NO: 489186 - RNA, 19 nt, Artificial Sequence
  Description of Artificial Sequence: Synthetic oligonucleotide
  Antisense Strand to SEQ ID NO: 489185
gucaugacgagguaaugcu

SEQ ID NO: 489187 - RNA, 19 nt, Artificial Sequence
  Description of Artificial Sequence: Synthetic oligonucleotide
  Sense strand starting at position 873 of SEQ ID NO: 317416
cgucaugaccaguggauaa

SEQ ID NO: 489188 - RNA, 19 nt, Artificial Sequence
  Description of Artificial Sequence: Synthetic oligonucleotide
  Antisense Strand to SEQ ID NO: 489187
uuauccacuggucaugacg

SEQ ID NO: 489189 - RNA, 19 nt, Artificial Sequence
  Description of Artificial Sequence: Synthetic oligonucleotide
  Sense strand starting at position 1290 of SEQ ID NO: 317416
ugacaaaguuuagcucuau

SEQ ID NO: 489190 - RNA, 19 nt, Artificial Sequence
  Description of Artificial Sequence: Synthetic oligonucleotide
  Antisense Strand to SEQ ID NO: 489189
auagagcuaaacuuuguca

SEQ ID NO: 489191 - RNA, 19 nt, Artificial Sequence
  Description of Artificial Sequence: Synthetic oligonucleotide
  Sense strand starting at position 1368 of SEQ ID NO: 317416
uggagugcaccuuaaaggu

SEQ ID NO: 489192 - RNA, 19 nt, Artificial Sequence
  Description of Artificial Sequence: Synthetic oligonucleotide
  Antisense Strand to SEQ ID NO: 489191
accuuuaaggugcacucca

SEQ ID NO: 489193 - RNA, 19 nt, Artificial Sequence
  Description of Artificial Sequence: Synthetic oligonucleotide
  Sense strand starting at position 1408 of SEQ ID NO: 317416
caugaaugcaugugaguag

SEQ ID NO: 489194 - RNA, 19 nt, Artificial Sequence
  Description of Artificial Sequence: Synthetic oligonucleotide
  Antisense Strand to SEQ ID NO: 489193
cuacucacaugcauucaug

SEQ ID NO: 489195 - RNA, 19 nt, Artificial Sequence
  Description of Artificial Sequence: Synthetic oligonucleotide
  Sense strand starting at position 1412 of SEQ ID NO: 317416
aaugcaugugaguaggacu

SEQ ID NO: 489196 - RNA, 19 nt, Artificial Sequence
  Description of Artificial Sequence: Synthetic oligonucleotide
  Antisense Strand to SEQ ID NO: 489195
aguccuacucacaugcauu

SEQ ID NO: 489197 - RNA, 19 nt, Artificial Sequence
  Description of Artificial Sequence: Synthetic oligonucleotide
  Sense strand starting at position 1419 of SEQ ID NO: 317416
gugaguaggacuggaugaa

SEQ ID NO: 489198 - RNA, 19 nt, Artificial Sequence
  Description of Artificial Sequence: Synthetic oligonucleotide
  Antisense Strand to SEQ ID NO: 489197
uucauccaguccuacucac

SEQ ID NO: 489199 - RNA, 19 nt, Artificial Sequence
  Description of Artificial Sequence: Synthetic oligonucleotide
  Sense strand starting at position 1489 of SEQ ID NO: 317416
ggcuuacaguuucuugaga

SEQ ID NO: 489200 - RNA, 19 nt, Artificial Sequence
  Description of Artificial Sequence: Synthetic oligonucleotide
  Antisense Strand to SEQ ID NO: 489199
ucucaagaaacuguaagcc

SEQ ID NO: 489201 - RNA, 19 nt, Artificial Sequence
  Description of Artificial Sequence: Synthetic oligonucleotide
  Sense strand starting at position 1490 of SEQ ID NO: 317416
gcuuacaguuucuugagaa

SEQ ID NO: 489202 - RNA, 19 nt, Artificial Sequence
  Description of Artificial Sequence: Synthetic oligonucleotide
  Antisense Strand to SEQ ID NO: 489201
uucucaagaaacuguaagc

SEQ ID NO: 489203 - RNA, 19 nt, Artificial Sequence
  Description of Artificial Sequence: Synthetic oligonucleotide
  Sense strand starting at position 1566 of SEQ ID NO: 317416
uugaaagcuugagagauuu

SEQ ID NO: 489204 - RNA, 19 nt, Artificial Sequence
  Description of Artificial Sequence: Synthetic oligonucleotide
  Antisense Strand to SEQ ID NO: 489203
aaaucucucaagcuuucaa

SEQ ID NO: 489205 - RNA, 19 nt, Artificial Sequence
  Description of Artificial Sequence: Synthetic oligonucleotide
  Sense strand starting at position 1674 of SEQ ID NO: 317416
uguucugaggcacacaaua

SEQ ID NO: 489206 - RNA, 19 nt, Artificial Sequence
  Description of Artificial Sequence: Synthetic oligonucleotide
  Antisense Strand to SEQ ID NO: 489205
uauugugugccucagaaca

SEQ ID NO: 489207 - RNA, 19 nt, Artificial Sequence
  Description of Artificial Sequence: Synthetic oligonucleotide
  Sense strand starting at position 1822 of SEQ ID NO: 317416
ggugguucuggcaggcaau

SEQ ID NO: 489208 - RNA, 19 nt, Artificial Sequence
  Description of Artificial Sequence: Synthetic oligonucleotide
  Antisense Strand to SEQ ID NO: 489207
auugccugccagaaccacc

SEQ ID NO: 489209 - RNA, 19 nt, Artificial Sequence
  Description of Artificial Sequence: Synthetic oligonucleotide
  Sense strand starting at position 1887 of SEQ ID NO: 317416
guuugaucugaacguagca

SEQ ID NO: 489210 - RNA, 19 nt, Artificial Sequence
  Description of Artificial Sequence: Synthetic oligonucleotide
  Antisense Strand to SEQ ID NO: 489209
ugcuacguucagaucaaac

SEQ ID NO: 489211 - RNA, 19 nt, Artificial Sequence
  Description of Artificial Sequence: Synthetic oligonucleotide
  Sense strand starting at position 1889 of SEQ ID NO: 317416
uugaucugaacguagcaau

SEQ ID NO: 489212 - RNA, 19 nt, Artificial Sequence
  Description of Artificial Sequence: Synthetic oligonucleotide
  Antisense Strand to SEQ ID NO: 489211
auugcuacguucagaucaa

SEQ ID NO: 489213 - RNA, 19 nt, Artificial Sequence
  Description of Artificial Sequence: Synthetic oligonucleotide
  Sense strand starting at position 1902 of SEQ ID NO: 317416
agcaaucacugaguuuaca

SEQ ID NO: 489214 - RNA, 19 nt, Artificial Sequence
  Description of Artificial Sequence: Synthetic oligonucleotide
  Antisense Strand to SEQ ID NO: 489213
uguaaacucagugauugcu

SEQ ID NO: 489215 - RNA, 19 nt, Artificial Sequence
  Description of Artificial Sequence: Synthetic oligonucleotide
  Sense strand starting at position 1911 of SEQ ID NO: 317416
ugaguuuacaggcagcuaa

SEQ ID NO: 489216 - RNA, 19 nt, Artificial Sequence
  Description of Artificial Sequence: Synthetic oligonucleotide
  Antisense Strand to SEQ ID NO: 489215
uuagcugccuguaaacuca

SEQ ID NO: 489217 - RNA, 19 nt, Artificial Sequence
  Description of Artificial Sequence: Synthetic oligonucleotide
  Sense strand starting at position 2070 of SEQ ID NO: 317416
agcacaggcuguuuagauu

SEQ ID NO: 489218 - RNA, 19 nt, Artificial Sequence
  Description of Artificial Sequence: Synthetic oligonucleotide
  Antisense Strand to SEQ ID NO: 489217
aaucuaaacagccugugcu

SEQ ID NO: 489219 - RNA, 19 nt, Artificial Sequence
  Description of Artificial Sequence: Synthetic oligonucleotide
  Sense strand starting at position 2164 of SEQ ID NO: 317416
guugcuucucuauaucuua

SEQ ID NO: 489220 - RNA, 19 nt, Artificial Sequence
  Description of Artificial Sequence: Synthetic oligonucleotide
  Antisense Strand to SEQ ID NO: 489219
uaagauauagagaagcaac

SEQ ID NO: 489221 - RNA, 19 nt, Artificial Sequence
  Description of Artificial Sequence: Synthetic oligonucleotide
  Sense strand starting at position 2268 of SEQ ID NO: 317416
cuggaauaaacgugaguuu

SEQ ID NO: 489222 - RNA, 19 nt, Artificial Sequence
  Description of Artificial Sequence: Synthetic oligonucleotide
  Antisense Strand to SEQ ID NO: 489221
aaacucacguuuauuccag

SEQ ID NO: 489223 - RNA, 19 nt, Artificial Sequence
  Description of Artificial Sequence: Synthetic oligonucleotide
  Sense strand starting at position 2271 of SEQ ID NO: 317416
gaauaaacgugaguuucua

SEQ ID NO: 489224 - RNA, 19 nt, Artificial Sequence
  Description of Artificial Sequence: Synthetic oligonucleotide
  Antisense Strand to SEQ ID NO: 489223
uagaaacucacguuuauuc

SEQ ID NO: 489225 - RNA, 19 nt, Artificial Sequence
  Description of Artificial Sequence: Synthetic oligonucleotide
  Sense strand starting at position 2275 of SEQ ID NO: 317416
aaacgugaguuucuaauau

SEQ ID NO: 489226 - RNA, 19 nt, Artificial Sequence
  Description of Artificial Sequence: Synthetic oligonucleotide
  Antisense Strand to SEQ ID NO: 489225
auauuagaaacucacguuu

SEQ ID NO: 489227 - RNA, 19 nt, Artificial Sequence
  Description of Artificial Sequence: Synthetic oligonucleotide
  Sense strand starting at position 2323 of SEQ ID NO: 317416
augauuaauuacuuuggca

SEQ ID NO: 489228 - RNA, 19 nt, Artificial Sequence
  Description of Artificial Sequence: Synthetic oligonucleotide
  Antisense Strand to SEQ ID NO: 489227
ugccaaaguaauuaaucau

SEQ ID NO: 489229 - RNA, 19 nt, Artificial Sequence
  Description of Artificial Sequence: Synthetic oligonucleotide
  Sense strand starting at position 2331 of SEQ ID NO: 317416
uuacuuuggcaucagaaac

SEQ ID NO: 489230 - RNA, 19 nt, Artificial Sequence
  Description of Artificial Sequence: Synthetic oligonucleotide
  Antisense Strand to SEQ ID NO: 489229
guuucugaugccaaaguaa

SEQ ID NO: 489231 - RNA, 19 nt, Artificial Sequence
  Description of Artificial Sequence: Synthetic oligonucleotide
  Sense strand starting at position 2501 of SEQ ID NO: 317416
gaguuauaccuaugaaggc

SEQ ID NO: 489232 - RNA, 19 nt, Artificial Sequence
  Description of Artificial Sequence: Synthetic oligonucleotide
  Antisense Strand to SEQ ID NO: 489231
gccuucauagguauaacuc

SEQ ID NO: 489233 - RNA, 19 nt, Artificial Sequence
  Description of Artificial Sequence: Synthetic oligonucleotide
  Sense strand starting at position 2559 of SEQ ID NO: 317416
ccuuuagaccaucaguuua

SEQ ID NO: 489234 - RNA, 19 nt, Artificial Sequence
  Description of Artificial Sequence: Synthetic oligonucleotide
  Antisense Strand to SEQ ID NO: 489233
uaaacugauggucuaaagg

SEQ ID NO: 489235 - RNA, 19 nt, Artificial Sequence
  Description of Artificial Sequence: Synthetic oligonucleotide
  Sense strand starting at position 1 of SEQ ID NO: 317417
accaaaugcuuggugaaug

SEQ ID NO: 489236 - RNA, 19 nt, Artificial Sequence
  Description of Artificial Sequence: Synthetic oligonucleotide
  Antisense Strand to SEQ ID NO: 489235
cauucaccaagcauuuggu

SEQ ID NO: 489237 - RNA, 19 nt, Artificial Sequence
  Description of Artificial Sequence: Synthetic oligonucleotide
  Sense strand starting at position 6 of SEQ ID NO: 317417
augcuuggugaauguauuu

SEQ ID NO: 489238 - RNA, 19 nt, Artificial Sequence
  Description of Artificial Sequence: Synthetic oligonucleotide
  Antisense Strand to SEQ ID NO: 489237
aaauacauucaccaagcau

SEQ ID NO: 489239 - RNA, 19 nt, Artificial Sequence
  Description of Artificial Sequence: Synthetic oligonucleotide
  Sense strand starting at position 41 of SEQ ID NO: 317417
uuaauuacacuguaauggu

SEQ ID NO: 489240 - RNA, 19 nt, Artificial Sequence
  Description of Artificial Sequence: Synthetic oligonucleotide
  Antisense Strand to SEQ ID NO: 489239
accauuacaguguaauuaa

SEQ ID NO: 489241 - RNA, 19 nt, Artificial Sequence
  Description of Artificial Sequence: Synthetic oligonucleotide
  Sense strand starting at position 90 of SEQ ID NO: 317417
aaaggauuccucugugacc

SEQ ID NO: 489242 - RNA, 19 nt, Artificial Sequence
  Description of Artificial Sequence: Synthetic oligonucleotide
  Antisense Strand to SEQ ID NO: 489241
ggucacagaggaauccuuu

SEQ ID NO: 489243 - RNA, 19 nt, Artificial Sequence
  Description of Artificial Sequence: Synthetic oligonucleotide
  Sense strand starting at position 91 of SEQ ID NO: 317417
aaggauuccucugugaccu

SEQ ID NO: 489244 - RNA, 19 nt, Artificial Sequence
  Description of Artificial Sequence: Synthetic oligonucleotide
  Antisense Strand to SEQ ID NO: 489243
aggucacagaggaauccuu

SEQ ID NO: 489245 - RNA, 19 nt, Artificial Sequence
  Description of Artificial Sequence: Synthetic oligonucleotide
  Sense strand starting at position 128 of SEQ ID NO: 317417
ccauucgaucaauaaggua

SEQ ID NO: 489246 - RNA, 19 nt, Artificial Sequence
  Description of Artificial Sequence: Synthetic oligonucleotide
  Antisense Strand to SEQ ID NO: 489245
uaccuuauugaucgaaugg

SEQ ID NO: 489247 - RNA, 19 nt, Artificial Sequence
  Description of Artificial Sequence: Synthetic oligonucleotide
  Sense strand starting at position 159 of SEQ ID NO: 317417
auugaaugacuuggcuaaa

SEQ ID NO: 489248 - RNA, 19 nt, Artificial Sequence
  Description of Artificial Sequence: Synthetic oligonucleotide
  Antisense Strand to SEQ ID NO: 489247
uuuagccaagucauucaau

SEQ ID NO: 489249 - RNA, 19 nt, Artificial Sequence
  Description of Artificial Sequence: Synthetic oligonucleotide
  Sense strand starting at position 180 of SEQ ID NO: 317417
ugauaagguuaagcaagau

SEQ ID NO: 489250 - RNA, 19 nt, Artificial Sequence
  Description of Artificial Sequence: Synthetic oligonucleotide
  Antisense Strand to SEQ ID NO: 489249
aucuugcuuaaccuuauca

SEQ ID NO: 489251 - RNA, 19 nt, Artificial Sequence
  Description of Artificial Sequence: Synthetic oligonucleotide
  Sense strand starting at position 189 of SEQ ID NO: 317417
uaagcaagaugguuaucau

SEQ ID NO: 489252 - RNA, 19 nt, Artificial Sequence
  Description of Artificial Sequence: Synthetic oligonucleotide
  Antisense Strand to SEQ ID NO: 489251
augauaaccaucuugcuua

SEQ ID NO: 489253 - RNA, 19 nt, Artificial Sequence
  Description of Artificial Sequence: Synthetic oligonucleotide
  Sense strand starting at position 190 of SEQ ID NO: 317417
aagcaagaugguuaucauu

SEQ ID NO: 489254 - RNA, 19 nt, Artificial Sequence
  Description of Artificial Sequence: Synthetic oligonucleotide
  Antisense Strand to SEQ ID NO: 489253
aaugauaaccaucuugcuu

SEQ ID NO: 489255 - RNA, 19 nt, Artificial Sequence
  Description of Artificial Sequence: Synthetic oligonucleotide
  Sense strand starting at position 380 of SEQ ID NO: 317417
uuugucuuuccugacauua

SEQ ID NO: 489256 - RNA, 19 nt, Artificial Sequence
  Description of Artificial Sequence: Synthetic oligonucleotide
  Antisense Strand to SEQ ID NO: 489255
uaaugucaggaaagacaaa

SEQ ID NO: 489257 - RNA, 19 nt, Artificial Sequence
  Description of Artificial Sequence: Synthetic oligonucleotide
  Sense strand starting at position 735 of SEQ ID NO: 317417
uaagaauuggcuuauaguc

SEQ ID NO: 489258 - RNA, 19 nt, Artificial Sequence
  Description of Artificial Sequence: Synthetic oligonucleotide
  Antisense Strand to SEQ ID NO: 489257
gacuauaagccaauucuua

SEQ ID NO: 489259 - RNA, 19 nt, Artificial Sequence
  Description of Artificial Sequence: Synthetic oligonucleotide
  Sense strand starting at position 821 of SEQ ID NO: 317417
uggucugagaggcaaagua

SEQ ID NO: 489260 - RNA, 19 nt, Artificial Sequence
  Description of Artificial Sequence: Synthetic oligonucleotide
  Antisense Strand to SEQ ID NO: 489259
uacuuugccucucagacca

SEQ ID NO: 489261 - RNA, 19 nt, Artificial Sequence
  Description of Artificial Sequence: Synthetic oligonucleotide
  Sense strand starting at position 837 of SEQ ID NO: 317417
guagguggcauguaauaaa

SEQ ID NO: 489262 - RNA, 19 nt, Artificial Sequence
  Description of Artificial Sequence: Synthetic oligonucleotide
  Antisense Strand to SEQ ID NO: 489261
uuuauuacaugccaccuac

SEQ ID NO: 489263 - RNA, 19 nt, Artificial Sequence
  Description of Artificial Sequence: Synthetic oligonucleotide
  Sense strand starting at position 1152 of SEQ ID NO: 317417
gcaaauacucccuauguga

SEQ ID NO: 489264 - RNA, 19 nt, Artificial Sequence
  Description of Artificial Sequence: Synthetic oligonucleotide
  Antisense Strand to SEQ ID NO: 489263
ucacauagggaguauuugc

SEQ ID NO: 489265 - RNA, 19 nt, Artificial Sequence
  Description of Artificial Sequence: Synthetic oligonucleotide
  Sense strand starting at position 1196 of SEQ ID NO: 317417
uagucagugcuagaauacu

SEQ ID NO: 489266 - RNA, 19 nt, Artificial Sequence
  Description of Artificial Sequence: Synthetic oligonucleotide
  Antisense Strand to SEQ ID NO: 489265
aguauucuagcacugacua

SEQ ID NO: 489267 - RNA, 19 nt, Artificial Sequence
  Description of Artificial Sequence: Synthetic oligonucleotide
  Sense strand starting at position 1204 of SEQ ID NO: 317417
gcuagaauacuauggugga

SEQ ID NO: 489268 - RNA, 19 nt, Artificial Sequence
  Description of Artificial Sequence: Synthetic oligonucleotide
  Antisense Strand to SEQ ID NO: 489267
uccaccauaguauucuagc

SEQ ID NO: 489269 - RNA, 19 nt, Artificial Sequence
  Description of Artificial Sequence: Synthetic oligonucleotide
  Sense strand starting at position 1229 of SEQ ID NO: 317417
uacauaggguucucauagu

SEQ ID NO: 489270 - RNA, 19 nt, Artificial Sequence
  Description of Artificial Sequence: Synthetic oligonucleotide
  Antisense Strand to SEQ ID NO: 489269
acuaugagaacccuaugua

SEQ ID NO: 489271 - RNA, 19 nt, Artificial Sequence
  Description of Artificial Sequence: Synthetic oligonucleotide
  Sense strand starting at position 1385 of SEQ ID NO: 317417
aguuucuacuaaguaagga

SEQ ID NO: 489272 - RNA, 19 nt, Artificial Sequence
  Description of Artificial Sequence: Synthetic oligonucleotide
  Antisense Strand to SEQ ID NO: 489271
uccuuacuuaguagaaacu

SEQ ID NO: 489273 - RNA, 19 nt, Artificial Sequence
  Description of Artificial Sequence: Synthetic oligonucleotide
  Sense strand starting at position 1465 of SEQ ID NO: 317417
uuggauuucugucauauuu

SEQ ID NO: 489274 - RNA, 19 nt, Artificial Sequence
  Description of Artificial Sequence: Synthetic oligonucleotide
  Antisense Strand to SEQ ID NO: 489273
aaauaugacagaaauccaa

SEQ ID NO: 489275 - RNA, 19 nt, Artificial Sequence
  Description of Artificial Sequence: Synthetic oligonucleotide
  Sense strand starting at position 1484 of SEQ ID NO: 317417
aucugaaguuucuuacaug

SEQ ID NO: 489276 - RNA, 19 nt, Artificial Sequence
  Description of Artificial Sequence: Synthetic oligonucleotide
  Antisense Strand to SEQ ID NO: 489275
cauguaagaaacuucagau

SEQ ID NO: 489277 - RNA, 19 nt, Artificial Sequence
  Description of Artificial Sequence: Synthetic oligonucleotide
  Sense strand starting at position 1490 of SEQ ID NO: 317417
aguuucuuacaugaaagua

SEQ ID NO: 489278 - RNA, 19 nt, Artificial Sequence
  Description of Artificial Sequence: Synthetic oligonucleotide
  Antisense Strand to SEQ ID NO: 489277
uacuuucauguaagaaacu

SEQ ID NO: 489279 - RNA, 19 nt, Artificial Sequence
  Description of Artificial Sequence: Synthetic oligonucleotide
  Sense strand starting at position 1614 of SEQ ID NO: 317417
ggagaacacguccagcauu

SEQ ID NO: 489280 - RNA, 19 nt, Artificial Sequence
  Description of Artificial Sequence: Synthetic oligonucleotide
  Antisense Strand to SEQ ID NO: 489279
aaugcuggacguguucucc

SEQ ID NO: 489281 - RNA, 19 nt, Artificial Sequence
  Description of Artificial Sequence: Synthetic oligonucleotide
  Sense strand starting at position 1641 of SEQ ID NO: 317417
uuaagauagcaaugguacu

SEQ ID NO: 489282 - RNA, 19 nt, Artificial Sequence
  Description of Artificial Sequence: Synthetic oligonucleotide
  Antisense Strand to SEQ ID NO: 489281
aguaccauugcuaucuuaa

SEQ ID NO: 489283 - RNA, 19 nt, Artificial Sequence
  Description of Artificial Sequence: Synthetic oligonucleotide
  Sense strand starting at position 2002 of SEQ ID NO: 317417
aauguuucuggugaguuua

SEQ ID NO: 489284 - RNA, 19 nt, Artificial Sequence
  Description of Artificial Sequence: Synthetic oligonucleotide
  Antisense Strand to SEQ ID NO: 489283
uaaacucaccagaaacauu

SEQ ID NO: 489285 - RNA, 19 nt, Artificial Sequence
  Description of Artificial Sequence: Synthetic oligonucleotide
  Sense strand starting at position 2018 of SEQ ID NO: 317417
uuauauccugaaugccaga

SEQ ID NO: 489286 - RNA, 19 nt, Artificial Sequence
  Description of Artificial Sequence: Synthetic oligonucleotide
  Antisense Strand to SEQ ID NO: 489285
ucuggcauucaggauauaa

SEQ ID NO: 489287 - RNA, 19 nt, Artificial Sequence
  Description of Artificial Sequence: Synthetic oligonucleotide
  Sense strand starting at position 2070 of SEQ ID NO: 317417
ucaugaaguccaugaugca

SEQ ID NO: 489288 - RNA, 19 nt, Artificial Sequence
  Description of Artificial Sequence: Synthetic oligonucleotide
  Antisense Strand to SEQ ID NO: 489287
ugcaucauggacuucauga

SEQ ID NO: 489289 - RNA, 19 nt, Artificial Sequence
  Description of Artificial Sequence: Synthetic oligonucleotide
  Sense strand starting at position 2071 of SEQ ID NO: 317417
caugaaguccaugaugcaa

SEQ ID NO: 489290 - RNA, 19 nt, Artificial Sequence
  Description of Artificial Sequence: Synthetic oligonucleotide
  Antisense Strand to SEQ ID NO: 489289
uugcaucauggacuucaug

SEQ ID NO: 489291 - RNA, 19 nt, Artificial Sequence
  Description of Artificial Sequence: Synthetic oligonucleotide
  Sense strand starting at position 2330 of SEQ ID NO: 317417
auagcaugacuaugguuaa

SEQ ID NO: 489292 - RNA, 19 nt, Artificial Sequence
  Description of Artificial Sequence: Synthetic oligonucleotide
  Antisense Strand to SEQ ID NO: 489291
uuaaccauagucaugcuau

SEQ ID NO: 489293 - RNA, 19 nt, Artificial Sequence
  Description of Artificial Sequence: Synthetic oligonucleotide
  Sense strand starting at position 2456 of SEQ ID NO: 317417
caaagaagucauuggguug

SEQ ID NO: 489294 - RNA, 19 nt, Artificial Sequence
  Description of Artificial Sequence: Synthetic oligonucleotide
  Antisense Strand to SEQ ID NO: 489293
caacccaaugacuucuuug

SEQ ID NO: 489295 - RNA, 19 nt, Artificial Sequence
  Description of Artificial Sequence: Synthetic oligonucleotide
  Sense strand starting at position 2457 of SEQ ID NO: 317417
aaagaagucauuggguugu

SEQ ID NO: 489296 - RNA, 19 nt, Artificial Sequence
  Description of Artificial Sequence: Synthetic oligonucleotide
  Antisense Strand to SEQ ID NO: 489295
acaacccaaugacuucuuu

SEQ ID NO: 489297 - RNA, 19 nt, Artificial Sequence
  Description of Artificial Sequence: Synthetic oligonucleotide
  Sense strand starting at position 2665 of SEQ ID NO: 317417
agguaaugauagcuaccaa

SEQ ID NO: 489298 - RNA, 19 nt, Artificial Sequence
  Description of Artificial Sequence: Synthetic oligonucleotide
  Antisense Strand to SEQ ID NO: 489297
uugguagcuaucauuaccu

SEQ ID NO: 489299 - RNA, 19 nt, Artificial Sequence
  Description of Artificial Sequence: Synthetic oligonucleotide
  Sense strand starting at position 2878 of SEQ ID NO: 317417
cuuugagaggcucacucuu

SEQ ID NO: 489300 - RNA, 19 nt, Artificial Sequence
  Description of Artificial Sequence: Synthetic oligonucleotide
  Antisense Strand to SEQ ID NO: 489299
aagagugagccucucaaag

SEQ ID NO: 489301 - RNA, 19 nt, Artificial Sequence
  Description of Artificial Sequence: Synthetic oligonucleotide
  Sense strand starting at position 3068 of SEQ ID NO: 317417
uaggcuaggcauugaauau

SEQ ID NO: 489302 - RNA, 19 nt, Artificial Sequence
  Description of Artificial Sequence: Synthetic oligonucleotide
  Antisense Strand to SEQ ID NO: 489301
auauucaaugccuagccua

SEQ ID NO: 489303 - RNA, 19 nt, Artificial Sequence
  Description of Artificial Sequence: Synthetic oligonucleotide
  Sense strand starting at position 3072 of SEQ ID NO: 317417
cuaggcauugaauauguau

SEQ ID NO: 489304 - RNA, 19 nt, Artificial Sequence
  Description of Artificial Sequence: Synthetic oligonucleotide
  Antisense Strand to SEQ ID NO: 489303
auacauauucaaugccuag

SEQ ID NO: 489305 - RNA, 19 nt, Artificial Sequence
  Description of Artificial Sequence: Synthetic oligonucleotide
  Sense strand starting at position 3755 of SEQ ID NO: 317417
cucauucuucuccaugagu

SEQ ID NO: 489306 - RNA, 19 nt, Artificial Sequence
  Description of Artificial Sequence: Synthetic oligonucleotide
  Antisense Strand to SEQ ID NO: 489305
acucauggagaagaaugag

SEQ ID NO: 489307 - RNA, 19 nt, Artificial Sequence
  Description of Artificial Sequence: Synthetic oligonucleotide
  Sense strand starting at position 3775 of SEQ ID NO: 317417
auggguacagacugaguua

SEQ ID NO: 489308 - RNA, 19 nt, Artificial Sequence
  Description of Artificial Sequence: Synthetic oligonucleotide
  Antisense Strand to SEQ ID NO: 489307
uaacucagucuguacccau

SEQ ID NO: 489309 - RNA, 19 nt, Artificial Sequence
  Description of Artificial Sequence: Synthetic oligonucleotide
  Sense strand starting at position 3778 of SEQ ID NO: 317417
gguacagacugaguuacaa

SEQ ID NO: 489310 - RNA, 19 nt, Artificial Sequence
  Description of Artificial Sequence: Synthetic oligonucleotide
  Antisense Strand to SEQ ID NO: 489309
uuguaacucagucuguacc

SEQ ID NO: 489311 - RNA, 19 nt, Artificial Sequence
  Description of Artificial Sequence: Synthetic oligonucleotide
  Sense strand starting at position 3860 of SEQ ID NO: 317417
ucuugacccucagaauuug

SEQ ID NO: 489312 - RNA, 19 nt, Artificial Sequence
  Description of Artificial Sequence: Synthetic oligonucleotide
  Antisense Strand to SEQ ID NO: 489311
caaauucugagggucaaga

SEQ ID NO: 489313 - RNA, 19 nt, Artificial Sequence
  Description of Artificial Sequence: Synthetic oligonucleotide
  Sense strand starting at position 3876 of SEQ ID NO: 317417
uugggcagauaucuugaaa

SEQ ID NO: 489314 - RNA, 19 nt, Artificial Sequence
  Description of Artificial Sequence: Synthetic oligonucleotide
  Antisense Strand to SEQ ID NO: 489313
uuucaagauaucugcccaa

SEQ ID NO: 489315 - RNA, 19 nt, Artificial Sequence
  Description of Artificial Sequence: Synthetic oligonucleotide
  Sense strand starting at position 156 of SEQ ID NO: 317418
caggaagggugagagauuu

SEQ ID NO: 489316 - RNA, 19 nt, Artificial Sequence
  Description of Artificial Sequence: Synthetic oligonucleotide
  Antisense Strand to SEQ ID NO: 489315
aaaucucucacccuuccug

SEQ ID NO: 489317 - RNA, 19 nt, Artificial Sequence
  Description of Artificial Sequence: Synthetic oligonucleotide
  Sense strand starting at position 195 of SEQ ID NO: 317418
uuagaucagagcuggaauu

SEQ ID NO: 489318 - RNA, 19 nt, Artificial Sequence
  Description of Artificial Sequence: Synthetic oligonucleotide
  Antisense Strand to SEQ ID NO: 489317
aauuccagcucugaucuaa

SEQ ID NO: 489319 - RNA, 19 nt, Artificial Sequence
  Description of Artificial Sequence: Synthetic oligonucleotide
  Sense strand starting at position 196 of SEQ ID NO: 317418
uagaucagagcuggaauua

SEQ ID NO: 489320 - RNA, 19 nt, Artificial Sequence
  Description of Artificial Sequence: Synthetic oligonucleotide
  Antisense Strand to SEQ ID NO: 489319
uaauuccagcucugaucua

SEQ ID NO: 489321 - RNA, 19 nt, Artificial Sequence
  Description of Artificial Sequence: Synthetic oligonucleotide
  Sense strand starting at position 332 of SEQ ID NO: 317418
gccugcuauugacuccuaa

SEQ ID NO: 489322 - RNA, 19 nt, Artificial Sequence
  Description of Artificial Sequence: Synthetic oligonucleotide
  Antisense Strand to SEQ ID NO: 489321
uuaggagucaauagcaggc

SEQ ID NO: 489323 - RNA, 19 nt, Artificial Sequence
  Description of Artificial Sequence: Synthetic oligonucleotide
  Sense strand starting at position 437 of SEQ ID NO: 317418
ugggcucuuuccucaucua

SEQ ID NO: 489324 - RNA, 19 nt, Artificial Sequence
  Description of Artificial Sequence: Synthetic oligonucleotide
  Antisense Strand to SEQ ID NO: 489323
uagaugaggaaagagccca

SEQ ID NO: 489325 - RNA, 19 nt, Artificial Sequence
  Description of Artificial Sequence: Synthetic oligonucleotide
  Sense strand starting at position 438 of SEQ ID NO: 317418
gggcucuuuccucaucuaa

SEQ ID NO: 489326 - RNA, 19 nt, Artificial Sequence
  Description of Artificial Sequence: Synthetic oligonucleotide
  Antisense Strand to SEQ ID NO: 489325
uuagaugaggaaagagccc

SEQ ID NO: 489327 - RNA, 19 nt, Artificial Sequence
  Description of Artificial Sequence: Synthetic oligonucleotide
  Sense strand starting at position 537 of SEQ ID NO: 317418
auucuugauguuugcaauu

SEQ ID NO: 489328 - RNA, 19 nt, Artificial Sequence
  Description of Artificial Sequence: Synthetic oligonucleotide
  Antisense Strand to SEQ ID NO: 489327
aauugcaaacaucaagaau

SEQ ID NO: 489329 - RNA, 19 nt, Artificial Sequence
  Description of Artificial Sequence: Synthetic oligonucleotide
  Sense strand starting at position 567 of SEQ ID NO: 317418
gcaggauuccaccaucaca

SEQ ID NO: 489330 - RNA, 19 nt, Artificial Sequence
  Description of Artificial Sequence: Synthetic oligonucleotide
  Antisense Strand to SEQ ID NO: 489329
ugugaugguggaauccugc

SEQ ID NO: 489331 - RNA, 19 nt, Artificial Sequence
  Description of Artificial Sequence: Synthetic oligonucleotide
  Sense strand starting at position 602 of SEQ ID NO: 317418
auaugaugccuggaagcaa

SEQ ID NO: 489332 - RNA, 19 nt, Artificial Sequence
  Description of Artificial Sequence: Synthetic oligonucleotide
  Antisense Strand to SEQ ID NO: 489331
uugcuuccaggcaucauau

SEQ ID NO: 489333 - RNA, 19 nt, Artificial Sequence
  Description of Artificial Sequence: Synthetic oligonucleotide
  Sense strand starting at position 749 of SEQ ID NO: 317418
aaggcaauggcccauguau

SEQ ID NO: 489334 - RNA, 19 nt, Artificial Sequence
  Description of Artificial Sequence: Synthetic oligonucleotide
  Antisense Strand to SEQ ID NO: 489333
auacaugggccauugccuu

SEQ ID NO: 489335 - RNA, 19 nt, Artificial Sequence
  Description of Artificial Sequence: Synthetic oligonucleotide
  Sense strand starting at position 751 of SEQ ID NO: 317418
ggcaauggcccauguauuu

SEQ ID NO: 489336 - RNA, 19 nt, Artificial Sequence
  Description of Artificial Sequence: Synthetic oligonucleotide
  Antisense Strand to SEQ ID NO: 489335
aaauacaugggccauugcc

SEQ ID NO: 489337 - RNA, 19 nt, Artificial Sequence
  Description of Artificial Sequence: Synthetic oligonucleotide
  Sense strand starting at position 857 of SEQ ID NO: 317418
uuugcaauuugaugauaag

SEQ ID NO: 489338 - RNA, 19 nt, Artificial Sequence
  Description of Artificial Sequence: Synthetic oligonucleotide
  Antisense Strand to SEQ ID NO: 489337
cuuaucaucaaauugcaaa

SEQ ID NO: 489339 - RNA, 19 nt, Artificial Sequence
  Description of Artificial Sequence: Synthetic oligonucleotide
  Sense strand starting at position 860 of SEQ ID NO: 317418
gcaauuugaugauaagguu

SEQ ID NO: 489340 - RNA, 19 nt, Artificial Sequence
  Description of Artificial Sequence: Synthetic oligonucleotide
  Antisense Strand to SEQ ID NO: 489339
aaccuuaucaucaaauugc

SEQ ID NO: 489341 - RNA, 19 nt, Artificial Sequence
  Description of Artificial Sequence: Synthetic oligonucleotide
  Sense strand starting at position 956 of SEQ ID NO: 317418
ugggcuaaccaguaaugca

SEQ ID NO: 489342 - RNA, 19 nt, Artificial Sequence
  Description of Artificial Sequence: Synthetic oligonucleotide
  Antisense Strand to SEQ ID NO: 489341
ugcauuacugguuagccca

SEQ ID NO: 489343 - RNA, 19 nt, Artificial Sequence
  Description of Artificial Sequence: Synthetic oligonucleotide
  Sense strand starting at position 1026 of SEQ ID NO: 317418
guuacaaaguuaccucuua

SEQ ID NO: 489344 - RNA, 19 nt, Artificial Sequence
  Description of Artificial Sequence: Synthetic oligonucleotide
  Antisense Strand to SEQ ID NO: 489343
uaagagguaacuuuguaac

SEQ ID NO: 489345 - RNA, 19 nt, Artificial Sequence
  Description of Artificial Sequence: Synthetic oligonucleotide
  Sense strand starting at position 1034 of SEQ ID NO: 317418
guuaccucuuaguuacuca

SEQ ID NO: 489346 - RNA, 19 nt, Artificial Sequence
  Description of Artificial Sequence: Synthetic oligonucleotide
  Antisense Strand to SEQ ID NO: 489345
ugaguaacuaagagguaac

SEQ ID NO: 489347 - RNA, 19 nt, Artificial Sequence
  Description of Artificial Sequence: Synthetic oligonucleotide
  Sense strand starting at position 1236 of SEQ ID NO: 317418
ucaugaaugcugcauaaua

SEQ ID NO: 489348 - RNA, 19 nt, Artificial Sequence
  Description of Artificial Sequence: Synthetic oligonucleotide
  Antisense Strand to SEQ ID NO: 489347
uauuaugcagcauucauga

SEQ ID NO: 489349 - RNA, 19 nt, Artificial Sequence
  Description of Artificial Sequence: Synthetic oligonucleotide
  Sense strand starting at position 1302 of SEQ ID NO: 317418
agucguuaugcugaacuga

SEQ ID NO: 489350 - RNA, 19 nt, Artificial Sequence
  Description of Artificial Sequence: Synthetic oligonucleotide
  Antisense Strand to SEQ ID NO: 489349
ucaguucagcauaacgacu

SEQ ID NO: 489351 - RNA, 19 nt, Artificial Sequence
  Description of Artificial Sequence: Synthetic oligonucleotide
  Sense strand starting at position 1424 of SEQ ID NO: 317418
gucagaagaacaugguuaa

SEQ ID NO: 489352 - RNA, 19 nt, Artificial Sequence
  Description of Artificial Sequence: Synthetic oligonucleotide
  Antisense Strand to SEQ ID NO: 489351
uuaaccauguucuucugac

SEQ ID NO: 489353 - RNA, 19 nt, Artificial Sequence
  Description of Artificial Sequence: Synthetic oligonucleotide
  Sense strand starting at position 1573 of SEQ ID NO: 317418
aucuuaauauccgcagcaa

SEQ ID NO: 489354 - RNA, 19 nt, Artificial Sequence
  Description of Artificial Sequence: Synthetic oligonucleotide
  Antisense Strand to SEQ ID NO: 489353
uugcugcggauauuaagau

SEQ ID NO: 489355 - RNA, 19 nt, Artificial Sequence
  Description of Artificial Sequence: Synthetic oligonucleotide
  Sense strand starting at position 1574 of SEQ ID NO: 317418
ucuuaauauccgcagcaaa

SEQ ID NO: 489356 - RNA, 19 nt, Artificial Sequence
  Description of Artificial Sequence: Synthetic oligonucleotide
  Antisense Strand to SEQ ID NO: 489355
uuugcugcggauauuaaga

SEQ ID NO: 489357 - RNA, 19 nt, Artificial Sequence
  Description of Artificial Sequence: Synthetic oligonucleotide
  Sense strand starting at position 1604 of SEQ ID NO: 317418
cuuagacuucugcaucaga

SEQ ID NO: 489358 - RNA, 19 nt, Artificial Sequence
  Description of Artificial Sequence: Synthetic oligonucleotide
  Antisense Strand to SEQ ID NO: 489357
ucugaugcagaagucuaag

SEQ ID NO: 489359 - RNA, 19 nt, Artificial Sequence
  Description of Artificial Sequence: Synthetic oligonucleotide
  Sense strand starting at position 1998 of SEQ ID NO: 317418
gcucauucucaaggaggca

SEQ ID NO: 489360 - RNA, 19 nt, Artificial Sequence
  Description of Artificial Sequence: Synthetic oligonucleotide
  Antisense Strand to SEQ ID NO: 489359
ugccuccuugagaaugagc

SEQ ID NO: 489361 - RNA, 19 nt, Artificial Sequence
  Description of Artificial Sequence: Synthetic oligonucleotide
  Sense strand starting at position 2109 of SEQ ID NO: 317418
aggagaauguccucacgug

SEQ ID NO: 489362 - RNA, 19 nt, Artificial Sequence
  Description of Artificial Sequence: Synthetic oligonucleotide
  Antisense Strand to SEQ ID NO: 489361
cacgugaggacauucuccu

SEQ ID NO: 489363 - RNA, 19 nt, Artificial Sequence
  Description of Artificial Sequence: Synthetic oligonucleotide
  Sense strand starting at position 2160 of SEQ ID NO: 317418
gagccaaaguuaucuugca

SEQ ID NO: 489364 - RNA, 19 nt, Artificial Sequence
  Description of Artificial Sequence: Synthetic oligonucleotide
  Antisense Strand to SEQ ID NO: 489363
ugcaagauaacuuuggcuc

SEQ ID NO: 489365 - RNA, 19 nt, Artificial Sequence
  Description of Artificial Sequence: Synthetic oligonucleotide
  Sense strand starting at position 2168 of SEQ ID NO: 317418
guuaucuugcacuaacaga

SEQ ID NO: 489366 - RNA, 19 nt, Artificial Sequence
  Description of Artificial Sequence: Synthetic oligonucleotide
  Antisense Strand to SEQ ID NO: 489365
ucuguuagugcaagauaac

SEQ ID NO: 489367 - RNA, 19 nt, Artificial Sequence
  Description of Artificial Sequence: Synthetic oligonucleotide
  Sense strand starting at position 2198 of SEQ ID NO: 317418
caguuaaugguauaaguau

SEQ ID NO: 489368 - RNA, 19 nt, Artificial Sequence
  Description of Artificial Sequence: Synthetic oligonucleotide
  Antisense Strand to SEQ ID NO: 489367
auacuuauaccauuaacug

SEQ ID NO: 489369 - RNA, 19 nt, Artificial Sequence
  Description of Artificial Sequence: Synthetic oligonucleotide
  Sense strand starting at position 2204 of SEQ ID NO: 317418
augguauaaguaugauuga

SEQ ID NO: 489370 - RNA, 19 nt, Artificial Sequence
  Description of Artificial Sequence: Synthetic oligonucleotide
  Antisense Strand to SEQ ID NO: 489369
ucaaucauacuuauaccau

SEQ ID NO: 489371 - RNA, 19 nt, Artificial Sequence
  Description of Artificial Sequence: Synthetic oligonucleotide
  Sense strand starting at position 2267 of SEQ ID NO: 317418
agguuuaaucuccacgcca

SEQ ID NO: 489372 - RNA, 19 nt, Artificial Sequence
  Description of Artificial Sequence: Synthetic oligonucleotide
  Antisense Strand to SEQ ID NO: 489371
uggcguggagauuaaaccu

SEQ ID NO: 489373 - RNA, 19 nt, Artificial Sequence
  Description of Artificial Sequence: Synthetic oligonucleotide
  Sense strand starting at position 2429 of SEQ ID NO: 317418
cugcauucugcugaauuau

SEQ ID NO: 489374 - RNA, 19 nt, Artificial Sequence
  Description of Artificial Sequence: Synthetic oligonucleotide
  Antisense Strand to SEQ ID NO: 489373
auaauucagcagaaugcag

SEQ ID NO: 489375 - RNA, 19 nt, Artificial Sequence
  Description of Artificial Sequence: Synthetic oligonucleotide
  Sense strand starting at position 2438 of SEQ ID NO: 317418
gcugaauuauuccuauaag

SEQ ID NO: 489376 - RNA, 19 nt, Artificial Sequence
  Description of Artificial Sequence: Synthetic oligonucleotide
  Antisense Strand to SEQ ID NO: 489375
cuuauaggaauaauucagc

SEQ ID NO: 489377 - RNA, 19 nt, Artificial Sequence
  Description of Artificial Sequence: Synthetic oligonucleotide
  Sense strand starting at position 2444 of SEQ ID NO: 317418
uuauuccuauaagaggaaa

SEQ ID NO: 489378 - RNA, 19 nt, Artificial Sequence
  Description of Artificial Sequence: Synthetic oligonucleotide
  Antisense Strand to SEQ ID NO: 489377
uuuccucuuauaggaauaa

SEQ ID NO: 489379 - RNA, 19 nt, Artificial Sequence
  Description of Artificial Sequence: Synthetic oligonucleotide
  Sense strand starting at position 2784 of SEQ ID NO: 317418
gaaucugggugguccaaua

SEQ ID NO: 489380 - RNA, 19 nt, Artificial Sequence
  Description of Artificial Sequence: Synthetic oligonucleotide
  Antisense Strand to SEQ ID NO: 489379
uauuggaccacccagauuc

SEQ ID NO: 489381 - RNA, 19 nt, Artificial Sequence
  Description of Artificial Sequence: Synthetic oligonucleotide
  Sense strand starting at position 2958 of SEQ ID NO: 317418
gggaaaguuuguuuguguu

SEQ ID NO: 489382 - RNA, 19 nt, Artificial Sequence
  Description of Artificial Sequence: Synthetic oligonucleotide
  Antisense Strand to SEQ ID NO: 489381
aacacaaacaaacuuuccc

SEQ ID NO: 489383 - RNA, 19 nt, Artificial Sequence
  Description of Artificial Sequence: Synthetic oligonucleotide
  Sense strand starting at position 3106 of SEQ ID NO: 317418
accaucgacuaauugauaa

SEQ ID NO: 489384 - RNA, 19 nt, Artificial Sequence
  Description of Artificial Sequence: Synthetic oligonucleotide
  Antisense Strand to SEQ ID NO: 489383
uuaucaauuagucgauggu

SEQ ID NO: 489385 - RNA, 19 nt, Artificial Sequence
  Description of Artificial Sequence: Synthetic oligonucleotide
  Sense strand starting at position 3408 of SEQ ID NO: 317418
auagcaggcucacugagaa

SEQ ID NO: 489386 - RNA, 19 nt, Artificial Sequence
  Description of Artificial Sequence: Synthetic oligonucleotide
  Antisense Strand to SEQ ID NO: 489385
uucucagugagccugcuau

SEQ ID NO: 489387 - RNA, 19 nt, Artificial Sequence
  Description of Artificial Sequence: Synthetic oligonucleotide
  Sense strand starting at position 3450 of SEQ ID NO: 317418
cugugcauuugugugauua

SEQ ID NO: 489388 - RNA, 19 nt, Artificial Sequence
  Description of Artificial Sequence: Synthetic oligonucleotide
  Antisense Strand to SEQ ID NO: 489387
uaaucacacaaaugcacag

SEQ ID NO: 489389 - RNA, 19 nt, Artificial Sequence
  Description of Artificial Sequence: Synthetic oligonucleotide
  Sense strand starting at position 3454 of SEQ ID NO: 317418
gcauuugugugauuaacau

SEQ ID NO: 489390 - RNA, 19 nt, Artificial Sequence
  Description of Artificial Sequence: Synthetic oligonucleotide
  Antisense Strand to SEQ ID NO: 489389
auguuaaucacacaaaugc

SEQ ID NO: 489391 - RNA, 19 nt, Artificial Sequence
  Description of Artificial Sequence: Synthetic oligonucleotide
  Sense strand starting at position 3838 of SEQ ID NO: 317418
ucaucaauguugucaugaa

SEQ ID NO: 489392 - RNA, 19 nt, Artificial Sequence
  Description of Artificial Sequence: Synthetic oligonucleotide
  Antisense Strand to SEQ ID NO: 489391
uucaugacaacauugauga

SEQ ID NO: 489393 - RNA, 19 nt, Artificial Sequence
  Description of Artificial Sequence: Synthetic oligonucleotide
  Sense strand starting at position 3960 of SEQ ID NO: 317418
ugacucaucacuggaguga

SEQ ID NO: 489394 - RNA, 19 nt, Artificial Sequence
  Description of Artificial Sequence: Synthetic oligonucleotide
  Antisense Strand to SEQ ID NO: 489393
ucacuccagugaugaguca

SEQ ID NO: 489395 - RNA, 19 nt, Artificial Sequence
  Description of Artificial Sequence: Synthetic oligonucleotide
  Sense strand starting at position 246 of SEQ ID NO: 317419
cgaauacugcuguaaugaa

SEQ ID NO: 489396 - RNA, 19 nt, Artificial Sequence
  Description of Artificial Sequence: Synthetic oligonucleotide
  Antisense Strand to SEQ ID NO: 489395
uucauuacagcaguauucg

SEQ ID NO: 489397 - RNA, 19 nt, Artificial Sequence
  Description of Artificial Sequence: Synthetic oligonucleotide
  Sense strand starting at position 595 of SEQ ID NO: 317419
cuaagugacaaauguguga

SEQ ID NO: 489398 - RNA, 19 nt, Artificial Sequence
  Description of Artificial Sequence: Synthetic oligonucleotide
  Antisense Strand to SEQ ID NO: 489397
ucacacauuugucacuuag

SEQ ID NO: 489399 - RNA, 19 nt, Artificial Sequence
  Description of Artificial Sequence: Synthetic oligonucleotide
  Sense strand starting at position 890 of SEQ ID NO: 317419
ugaauauagaggugguuau

SEQ ID NO: 489400 - RNA, 19 nt, Artificial Sequence
  Description of Artificial Sequence: Synthetic oligonucleotide
  Antisense Strand to SEQ ID NO: 489399
auaaccaccucuauauuca

SEQ ID NO: 489401 - RNA, 19 nt, Artificial Sequence
  Description of Artificial Sequence: Synthetic oligonucleotide
  Sense strand starting at position 1037 of SEQ ID NO: 317419
auugacaugcaaugacauu

SEQ ID NO: 489402 - RNA, 19 nt, Artificial Sequence
  Description of Artificial Sequence: Synthetic oligonucleotide
  Antisense Strand to SEQ ID NO: 489401
aaugucauugcaugucaau

SEQ ID NO: 489403 - RNA, 19 nt, Artificial Sequence
  Description of Artificial Sequence: Synthetic oligonucleotide
  Sense strand starting at position 1113 of SEQ ID NO: 317419
ccauaauaucgauagcuau

SEQ ID NO: 489404 - RNA, 19 nt, Artificial Sequence
  Description of Artificial Sequence: Synthetic oligonucleotide
  Antisense Strand to SEQ ID NO: 489403
auagcuaucgauauuaugg

SEQ ID NO: 489405 - RNA, 19 nt, Artificial Sequence
  Description of Artificial Sequence: Synthetic oligonucleotide
  Sense strand starting at position 1453 of SEQ ID NO: 317419
uugaaagacugucuuaaau

SEQ ID NO: 489406 - RNA, 19 nt, Artificial Sequence
  Description of Artificial Sequence: Synthetic oligonucleotide
  Antisense Strand to SEQ ID NO: 489405
auuuaagacagucuuucaa

SEQ ID NO: 489407 - RNA, 19 nt, Artificial Sequence
  Description of Artificial Sequence: Synthetic oligonucleotide
  Sense strand starting at position 1556 of SEQ ID NO: 317419
ugacgaaagaccugguauu

SEQ ID NO: 489408 - RNA, 19 nt, Artificial Sequence
  Description of Artificial Sequence: Synthetic oligonucleotide
  Antisense Strand to SEQ ID NO: 489407
aauaccaggucuuucguca

SEQ ID NO: 489409 - RNA, 19 nt, Artificial Sequence
  Description of Artificial Sequence: Synthetic oligonucleotide
  Sense strand starting at position 1557 of SEQ ID NO: 317419
gacgaaagaccugguauuc

SEQ ID NO: 489410 - RNA, 19 nt, Artificial Sequence
  Description of Artificial Sequence: Synthetic oligonucleotide
  Antisense Strand to SEQ ID NO: 489409
gaauaccaggucuuucguc

SEQ ID NO: 489411 - RNA, 19 nt, Artificial Sequence
  Description of Artificial Sequence: Synthetic oligonucleotide
  Sense strand starting at position 1567 of SEQ ID NO: 317419
cugguauuccacuaagacu

SEQ ID NO: 489412 - RNA, 19 nt, Artificial Sequence
  Description of Artificial Sequence: Synthetic oligonucleotide
  Antisense Strand to SEQ ID NO: 489411
agucuuaguggaauaccag

SEQ ID NO: 489413 - RNA, 19 nt, Artificial Sequence
  Description of Artificial Sequence: Synthetic oligonucleotide
  Sense strand starting at position 1673 of SEQ ID NO: 317419
gcaggcaauaaugaguaau

SEQ ID NO: 489414 - RNA, 19 nt, Artificial Sequence
  Description of Artificial Sequence: Synthetic oligonucleotide
  Antisense Strand to SEQ ID NO: 489413
auuacucauuauugccugc

SEQ ID NO: 489415 - RNA, 19 nt, Artificial Sequence
  Description of Artificial Sequence: Synthetic oligonucleotide
  Sense strand starting at position 1675 of SEQ ID NO: 317419
aggcaauaaugaguaauga

SEQ ID NO: 489416 - RNA, 19 nt, Artificial Sequence
  Description of Artificial Sequence: Synthetic oligonucleotide
  Antisense Strand to SEQ ID NO: 489415
ucauuacucauuauugccu

SEQ ID NO: 489417 - RNA, 19 nt, Artificial Sequence
  Description of Artificial Sequence: Synthetic oligonucleotide
  Sense strand starting at position 1685 of SEQ ID NO: 317419
gaguaaugaguucagguga

SEQ ID NO: 489418 - RNA, 19 nt, Artificial Sequence
  Description of Artificial Sequence: Synthetic oligonucleotide
  Antisense Strand to SEQ ID NO: 489417
ucaccugaacucauuacuc

SEQ ID NO: 489419 - RNA, 19 nt, Artificial Sequence
  Description of Artificial Sequence: Synthetic oligonucleotide
  Sense strand starting at position 2297 of SEQ ID NO: 317419
gaugccucccuccaggaua

SEQ ID NO: 489420 - RNA, 19 nt, Artificial Sequence
  Description of Artificial Sequence: Synthetic oligonucleotide
  Antisense Strand to SEQ ID NO: 489419
uauccuggagggaggcauc

SEQ ID NO: 489421 - RNA, 19 nt, Artificial Sequence
  Description of Artificial Sequence: Synthetic oligonucleotide
  Sense strand starting at position 2299 of SEQ ID NO: 317419
ugccucccuccaggauaaa

SEQ ID NO: 489422 - RNA, 19 nt, Artificial Sequence
  Description of Artificial Sequence: Synthetic oligonucleotide
  Antisense Strand to SEQ ID NO: 489421
uuuauccuggagggaggca

SEQ ID NO: 489423 - RNA, 19 nt, Artificial Sequence
  Description of Artificial Sequence: Synthetic oligonucleotide
  Sense strand starting at position 2300 of SEQ ID NO: 317419
gccucccuccaggauaaau

SEQ ID NO: 489424 - RNA, 19 nt, Artificial Sequence
  Description of Artificial Sequence: Synthetic oligonucleotide
  Antisense Strand to SEQ ID NO: 489423
auuuauccuggagggaggc

SEQ ID NO: 489425 - RNA, 19 nt, Artificial Sequence
  Description of Artificial Sequence: Synthetic oligonucleotide
  Sense strand starting at position 2555 of SEQ ID NO: 317419
aaucacuuuccggauuguu

SEQ ID NO: 489426 - RNA, 19 nt, Artificial Sequence
  Description of Artificial Sequence: Synthetic oligonucleotide
  Antisense Strand to SEQ ID NO: 489425
aacaauccggaaagugauu

SEQ ID NO: 489427 - RNA, 19 nt, Artificial Sequence
  Description of Artificial Sequence: Synthetic oligonucleotide
  Sense strand starting at position 2567 of SEQ ID NO: 317419
gauuguucucaagauguuu

SEQ ID NO: 489428 - RNA, 19 nt, Artificial Sequence
  Description of Artificial Sequence: Synthetic oligonucleotide
  Antisense Strand to SEQ ID NO: 489427
aaacaucuugagaacaauc

SEQ ID NO: 489429 - RNA, 19 nt, Artificial Sequence
  Description of Artificial Sequence: Synthetic oligonucleotide
  Sense strand starting at position 2672 of SEQ ID NO: 317419
uccucaauuuaggaagauu

SEQ ID NO: 489430 - RNA, 19 nt, Artificial Sequence
  Description of Artificial Sequence: Synthetic oligonucleotide
  Antisense Strand to SEQ ID NO: 489429
aaucuuccuaaauugagga

SEQ ID NO: 489431 - RNA, 19 nt, Artificial Sequence
  Description of Artificial Sequence: Synthetic oligonucleotide
  Sense strand starting at position 2865 of SEQ ID NO: 317419
guguacugugcugcuagau

SEQ ID NO: 489432 - RNA, 19 nt, Artificial Sequence
  Description of Artificial Sequence: Synthetic oligonucleotide
  Antisense Strand to SEQ ID NO: 489431
aucuagcagcacaguacac

SEQ ID NO: 489433 - RNA, 19 nt, Artificial Sequence
  Description of Artificial Sequence: Synthetic oligonucleotide
  Sense strand starting at position 2931 of SEQ ID NO: 317419
gguaaauuaggcuaagcua

SEQ ID NO: 489434 - RNA, 19 nt, Artificial Sequence
  Description of Artificial Sequence: Synthetic oligonucleotide
  Antisense Strand to SEQ ID NO: 489433
uagcuuagccuaauuuacc

SEQ ID NO: 489435 - RNA, 19 nt, Artificial Sequence
  Description of Artificial Sequence: Synthetic oligonucleotide
  Sense strand starting at position 2942 of SEQ ID NO: 317419
cuaagcuauguuugauaga

SEQ ID NO: 489436 - RNA, 19 nt, Artificial Sequence
  Description of Artificial Sequence: Synthetic oligonucleotide
  Antisense Strand to SEQ ID NO: 489435
ucuaucaaacauagcuuag

SEQ ID NO: 489437 - RNA, 19 nt, Artificial Sequence
  Description of Artificial Sequence: Synthetic oligonucleotide
  Sense strand starting at position 3008 of SEQ ID NO: 317419
auggauuuaucaugacaua

SEQ ID NO: 489438 - RNA, 19 nt, Artificial Sequence
  Description of Artificial Sequence: Synthetic oligonucleotide
  Antisense Strand to SEQ ID NO: 489437
uaugucaugauaaauccau

SEQ ID NO: 489439 - RNA, 19 nt, Artificial Sequence
  Description of Artificial Sequence: Synthetic oligonucleotide
  Sense strand starting at position 3053 of SEQ ID NO: 317419
guauuugcauuugaaaucu

SEQ ID NO: 489440 - RNA, 19 nt, Artificial Sequence
  Description of Artificial Sequence: Synthetic oligonucleotide
  Antisense Strand to SEQ ID NO: 489439
agauuucaaaugcaaauac

SEQ ID NO: 489441 - RNA, 19 nt, Artificial Sequence
  Description of Artificial Sequence: Synthetic oligonucleotide
  Sense strand starting at position 3168 of SEQ ID NO: 317419
guagacucacauuauguua

SEQ ID NO: 489442 - RNA, 19 nt, Artificial Sequence
  Description of Artificial Sequence: Synthetic oligonucleotide
  Antisense Strand to SEQ ID NO: 489441
uaacauaaugugagucuac

SEQ ID NO: 489443 - RNA, 19 nt, Artificial Sequence
  Description of Artificial Sequence: Synthetic oligonucleotide
  Sense strand starting at position 3360 of SEQ ID NO: 317419
uugcuagaauuccuugaau

SEQ ID NO: 489444 - RNA, 19 nt, Artificial Sequence
  Description of Artificial Sequence: Synthetic oligonucleotide
  Antisense Strand to SEQ ID NO: 489443
auucaaggaauucuagcaa

SEQ ID NO: 489445 - RNA, 19 nt, Artificial Sequence
  Description of Artificial Sequence: Synthetic oligonucleotide
  Sense strand starting at position 3362 of SEQ ID NO: 317419
gcuagaauuccuugaauau

SEQ ID NO: 489446 - RNA, 19 nt, Artificial Sequence
  Description of Artificial Sequence: Synthetic oligonucleotide
  Antisense Strand to SEQ ID NO: 489445
auauucaaggaauucuagc

SEQ ID NO: 489447 - RNA, 19 nt, Artificial Sequence
  Description of Artificial Sequence: Synthetic oligonucleotide
  Sense strand starting at position 3420 of SEQ ID NO: 317419
acauuucuuuaacagggau

SEQ ID NO: 489448 - RNA, 19 nt, Artificial Sequence
  Description of Artificial Sequence: Synthetic oligonucleotide
  Antisense Strand to SEQ ID NO: 489447
aucccuguuaaagaaaugu

SEQ ID NO: 489449 - RNA, 19 nt, Artificial Sequence
  Description of Artificial Sequence: Synthetic oligonucleotide
  Sense strand starting at position 3423 of SEQ ID NO: 317419
uuucuuuaacagggauguu

SEQ ID NO: 489450 - RNA, 19 nt, Artificial Sequence
  Description of Artificial Sequence: Synthetic oligonucleotide
  Antisense Strand to SEQ ID NO: 489449
aacaucccuguuaaagaaa

SEQ ID NO: 489451 - RNA, 19 nt, Artificial Sequence
  Description of Artificial Sequence: Synthetic oligonucleotide
  Sense strand starting at position 3586 of SEQ ID NO: 317419
aucaguguuaguuacagau

SEQ ID NO: 489452 - RNA, 19 nt, Artificial Sequence
  Description of Artificial Sequence: Synthetic oligonucleotide
  Antisense Strand to SEQ ID NO: 489451
aucuguaacuaacacugau

SEQ ID NO: 489453 - RNA, 19 nt, Artificial Sequence
  Description of Artificial Sequence: Synthetic oligonucleotide
  Sense strand starting at position 3590 of SEQ ID NO: 317419
guguuaguuacagauaagc

SEQ ID NO: 489454 - RNA, 19 nt, Artificial Sequence
  Description of Artificial Sequence: Synthetic oligonucleotide
  Antisense Strand to SEQ ID NO: 489453
gcuuaucuguaacuaacac

SEQ ID NO: 489455 - RNA, 19 nt, Artificial Sequence
  Description of Artificial Sequence: Synthetic oligonucleotide
  Sense strand starting at position 3679 of SEQ ID NO: 317419
aguauagaaacuuggaagu

SEQ ID NO: 489456 - RNA, 19 nt, Artificial Sequence
  Description of Artificial Sequence: Synthetic oligonucleotide
  Antisense Strand to SEQ ID NO: 489455
acuuccaaguuucuauacu

SEQ ID NO: 489457 - RNA, 19 nt, Artificial Sequence
  Description of Artificial Sequence: Synthetic oligonucleotide
  Sense strand starting at position 3730 of SEQ ID NO: 317419
gggauauucuuaguuuaua

SEQ ID NO: 489458 - RNA, 19 nt, Artificial Sequence
  Description of Artificial Sequence: Synthetic oligonucleotide
  Antisense Strand to SEQ ID NO: 489457
uauaaacuaagaauauccc

SEQ ID NO: 489459 - RNA, 19 nt, Artificial Sequence
  Description of Artificial Sequence: Synthetic oligonucleotide
  Sense strand starting at position 3789 of SEQ ID NO: 317419
ugaacucguagugaucuaa

SEQ ID NO: 489460 - RNA, 19 nt, Artificial Sequence
  Description of Artificial Sequence: Synthetic oligonucleotide
  Antisense Strand to SEQ ID NO: 489459
uuagaucacuacgaguuca

SEQ ID NO: 489461 - RNA, 19 nt, Artificial Sequence
  Description of Artificial Sequence: Synthetic oligonucleotide
  Sense strand starting at position 3886 of SEQ ID NO: 317419
ugauauaagcaaggagguu

SEQ ID NO: 489462 - RNA, 19 nt, Artificial Sequence
  Description of Artificial Sequence: Synthetic oligonucleotide
  Antisense Strand to SEQ ID NO: 489461
aaccuccuugcuuauauca

SEQ ID NO: 489463 - RNA, 19 nt, Artificial Sequence
  Description of Artificial Sequence: Synthetic oligonucleotide
  Sense strand starting at position 3895 of SEQ ID NO: 317419
caaggagguuguucucaua

SEQ ID NO: 489464 - RNA, 19 nt, Artificial Sequence
  Description of Artificial Sequence: Synthetic oligonucleotide
  Antisense Strand to SEQ ID NO: 489463
uaugagaacaaccuccuug

SEQ ID NO: 489465 - RNA, 19 nt, Artificial Sequence
  Description of Artificial Sequence: Synthetic oligonucleotide
  Sense strand starting at position 3944 of SEQ ID NO: 317419
gucuuaaaggcagaaugcu

SEQ ID NO: 489466 - RNA, 19 nt, Artificial Sequence
  Description of Artificial Sequence: Synthetic oligonucleotide
  Antisense Strand to SEQ ID NO: 489465
agcauucugccuuuaagac

SEQ ID NO: 489467 - RNA, 19 nt, Artificial Sequence
  Description of Artificial Sequence: Synthetic oligonucleotide
  Sense strand starting at position 3963 of SEQ ID NO: 317419
ggcacaauauucuuaguaa

SEQ ID NO: 489468 - RNA, 19 nt, Artificial Sequence
  Description of Artificial Sequence: Synthetic oligonucleotide
  Antisense Strand to SEQ ID NO: 489467
uuacuaagaauauugugcc

SEQ ID NO: 489469 - RNA, 19 nt, Artificial Sequence
  Description of Artificial Sequence: Synthetic oligonucleotide
  Sense strand starting at position 3966 of SEQ ID NO: 317419
acaauauucuuaguaaggu

SEQ ID NO: 489470 - RNA, 19 nt, Artificial Sequence
  Description of Artificial Sequence: Synthetic oligonucleotide
  Antisense Strand to SEQ ID NO: 489469
accuuacuaagaauauugu

SEQ ID NO: 489471 - RNA, 19 nt, Artificial Sequence
  Description of Artificial Sequence: Synthetic oligonucleotide
  Sense strand starting at position 3975 of SEQ ID NO: 317419
uuaguaaggugccuagaga

SEQ ID NO: 489472 - RNA, 19 nt, Artificial Sequence
  Description of Artificial Sequence: Synthetic oligonucleotide
  Antisense Strand to SEQ ID NO: 489471
ucucuaggcaccuuacuaa

SEQ ID NO: 489473 - RNA, 19 nt, Artificial Sequence
  Description of Artificial Sequence: Synthetic oligonucleotide
  Sense strand starting at position 3976 of SEQ ID NO: 317419
uaguaaggugccuagagau

SEQ ID NO: 489474 - RNA, 19 nt, Artificial Sequence
  Description of Artificial Sequence: Synthetic oligonucleotide
  Antisense Strand to SEQ ID NO: 489473
aucucuaggcaccuuacua

SEQ ID NO: 489475 - RNA, 19 nt, Artificial Sequence
  Description of Artificial Sequence: Synthetic oligonucleotide
  Sense strand starting at position 79 of SEQ ID NO: 317420
gcagaacauguuuguguca

SEQ ID NO: 489476 - RNA, 19 nt, Artificial Sequence
  Description of Artificial Sequence: Synthetic oligonucleotide
  Antisense Strand to SEQ ID NO: 489475
ugacacaaacauguucugc

SEQ ID NO: 489477 - RNA, 19 nt, Artificial Sequence
  Description of Artificial Sequence: Synthetic oligonucleotide
  Sense strand starting at position 81 of SEQ ID NO: 317420
agaacauguuugugucagu

SEQ ID NO: 489478 - RNA, 19 nt, Artificial Sequence
  Description of Artificial Sequence: Synthetic oligonucleotide
  Antisense Strand to SEQ ID NO: 489477
acugacacaaacauguucu

SEQ ID NO: 489479 - RNA, 19 nt, Artificial Sequence
  Description of Artificial Sequence: Synthetic oligonucleotide
  Sense strand starting at position 177 of SEQ ID NO: 317420
ugugcucauugcucuggaa

SEQ ID NO: 489480 - RNA, 19 nt, Artificial Sequence
  Description of Artificial Sequence: Synthetic oligonucleotide
  Antisense Strand to SEQ ID NO: 489479
uuccagagcaaugagcaca

SEQ ID NO: 489481 - RNA, 19 nt, Artificial Sequence
  Description of Artificial Sequence: Synthetic oligonucleotide
  Sense strand starting at position 179 of SEQ ID NO: 317420
ugcucauugcucuggaacu

SEQ ID NO: 489482 - RNA, 19 nt, Artificial Sequence
  Description of Artificial Sequence: Synthetic oligonucleotide
  Antisense Strand to SEQ ID NO: 489481
aguuccagagcaaugagca

SEQ ID NO: 489483 - RNA, 19 nt, Artificial Sequence
  Description of Artificial Sequence: Synthetic oligonucleotide
  Sense strand starting at position 181 of SEQ ID NO: 317420
cucauugcucuggaacuca

SEQ ID NO: 489484 - RNA, 19 nt, Artificial Sequence
  Description of Artificial Sequence: Synthetic oligonucleotide
  Antisense Strand to SEQ ID NO: 489483
ugaguuccagagcaaugag

SEQ ID NO: 489485 - RNA, 19 nt, Artificial Sequence
  Description of Artificial Sequence: Synthetic oligonucleotide
  Sense strand starting at position 208 of SEQ ID NO: 317420
acacgugucucuuggcaga

SEQ ID NO: 489486 - RNA, 19 nt, Artificial Sequence
  Description of Artificial Sequence: Synthetic oligonucleotide
  Antisense Strand to SEQ ID NO: 489485
ucugccaagagacacgugu

SEQ ID NO: 489487 - RNA, 19 nt, Artificial Sequence
  Description of Artificial Sequence: Synthetic oligonucleotide
  Sense strand starting at position 210 of SEQ ID NO: 317420
acgugucucuuggcagaga

SEQ ID NO: 489488 - RNA, 19 nt, Artificial Sequence
  Description of Artificial Sequence: Synthetic oligonucleotide
  Antisense Strand to SEQ ID NO: 489487
ucucugccaagagacacgu

SEQ ID NO: 489489 - RNA, 19 nt, Artificial Sequence
  Description of Artificial Sequence: Synthetic oligonucleotide
  Sense strand starting at position 211 of SEQ ID NO: 317420
cgugucucuuggcagagaa

SEQ ID NO: 489490 - RNA, 19 nt, Artificial Sequence
  Description of Artificial Sequence: Synthetic oligonucleotide
  Antisense Strand to SEQ ID NO: 489489
uucucugccaagagacacg

SEQ ID NO: 489491 - RNA, 19 nt, Artificial Sequence
  Description of Artificial Sequence: Synthetic oligonucleotide
  Sense strand starting at position 213 of SEQ ID NO: 317420
ugucucuuggcagagaaag

SEQ ID NO: 489492 - RNA, 19 nt, Artificial Sequence
  Description of Artificial Sequence: Synthetic oligonucleotide
  Antisense Strand to SEQ ID NO: 489491
cuuucucugccaagagaca

SEQ ID NO: 489493 - RNA, 19 nt, Artificial Sequence
  Description of Artificial Sequence: Synthetic oligonucleotide
  Sense strand starting at position 303 of SEQ ID NO: 317420
ugcugcuuccugggaccaa

SEQ ID NO: 489494 - RNA, 19 nt, Artificial Sequence
  Description of Artificial Sequence: Synthetic oligonucleotide
  Antisense Strand to SEQ ID NO: 489493
uuggucccaggaagcagca

SEQ ID NO: 489495 - RNA, 19 nt, Artificial Sequence
  Description of Artificial Sequence: Synthetic oligonucleotide
  Sense strand starting at position 341 of SEQ ID NO: 317420
cugagauggugagaaagaa

SEQ ID NO: 489496 - RNA, 19 nt, Artificial Sequence
  Description of Artificial Sequence: Synthetic oligonucleotide
  Antisense Strand to SEQ ID NO: 489495
uucuuucucaccaucucag

SEQ ID NO: 489497 - RNA, 19 nt, Artificial Sequence
  Description of Artificial Sequence: Synthetic oligonucleotide
  Sense strand starting at position 385 of SEQ ID NO: 317420
gcuguauuacuauaucaag

SEQ ID NO: 489498 - RNA, 19 nt, Artificial Sequence
  Description of Artificial Sequence: Synthetic oligonucleotide
  Antisense Strand to SEQ ID NO: 489497
cuugauauaguaauacagc

SEQ ID NO: 489499 - RNA, 19 nt, Artificial Sequence
  Description of Artificial Sequence: Synthetic oligonucleotide
  Sense strand starting at position 875 of SEQ ID NO: 317420
aggcuuugauuugaagaag

SEQ ID NO: 489500 - RNA, 19 nt, Artificial Sequence
  Description of Artificial Sequence: Synthetic oligonucleotide
  Antisense Strand to SEQ ID NO: 489499
cuucuucaaaucaaagccu

SEQ ID NO: 489501 - RNA, 19 nt, Artificial Sequence
  Description of Artificial Sequence: Synthetic oligonucleotide
  Sense strand starting at position 1269 of SEQ ID NO: 317420
ggccuuuacugacuaugga

SEQ ID NO: 489502 - RNA, 19 nt, Artificial Sequence
  Description of Artificial Sequence: Synthetic oligonucleotide
  Antisense Strand to SEQ ID NO: 489501
uccauagucaguaaaggcc

SEQ ID NO: 489503 - RNA, 19 nt, Artificial Sequence
  Description of Artificial Sequence: Synthetic oligonucleotide
  Sense strand starting at position 1341 of SEQ ID NO: 317420
gugcuacucuggugcacaa

SEQ ID NO: 489504 - RNA, 19 nt, Artificial Sequence
  Description of Artificial Sequence: Synthetic oligonucleotide
  Antisense Strand to SEQ ID NO: 489503
uugugcaccagaguagcac

SEQ ID NO: 489505 - RNA, 19 nt, Artificial Sequence
  Description of Artificial Sequence: Synthetic oligonucleotide
  Sense strand starting at position 2135 of SEQ ID NO: 317420
guuccguuuccggagugga

SEQ ID NO: 489506 - RNA, 19 nt, Artificial Sequence
  Description of Artificial Sequence: Synthetic oligonucleotide
  Antisense Strand to SEQ ID NO: 489505
uccacuccggaaacggaac

SEQ ID NO: 489507 - RNA, 19 nt, Artificial Sequence
  Description of Artificial Sequence: Synthetic oligonucleotide
  Sense strand starting at position 2208 of SEQ ID NO: 317420
uuucgaguuccgcaacuga

SEQ ID NO: 489508 - RNA, 19 nt, Artificial Sequence
  Description of Artificial Sequence: Synthetic oligonucleotide
  Antisense Strand to SEQ ID NO: 489507
ucaguugcggaacucgaaa

SEQ ID NO: 489509 - RNA, 19 nt, Artificial Sequence
  Description of Artificial Sequence: Synthetic oligonucleotide
  Sense strand starting at position 3180 of SEQ ID NO: 317420
ggagaaggcaacuguugau

SEQ ID NO: 489510 - RNA, 19 nt, Artificial Sequence
  Description of Artificial Sequence: Synthetic oligonucleotide
  Antisense Strand to SEQ ID NO: 489509
aucaacaguugccuucucc

SEQ ID NO: 489511 - RNA, 19 nt, Artificial Sequence
  Description of Artificial Sequence: Synthetic oligonucleotide
  Sense strand starting at position 3183 of SEQ ID NO: 317420
gaaggcaacuguugauuga

SEQ ID NO: 489512 - RNA, 19 nt, Artificial Sequence
  Description of Artificial Sequence: Synthetic oligonucleotide
  Antisense Strand to SEQ ID NO: 489511
ucaaucaacaguugccuuc

SEQ ID NO: 489513 - RNA, 19 nt, Artificial Sequence
  Description of Artificial Sequence: Synthetic oligonucleotide
  Sense strand starting at position 3193 of SEQ ID NO: 317420
guugauugaguccaacgga

SEQ ID NO: 489514 - RNA, 19 nt, Artificial Sequence
  Description of Artificial Sequence: Synthetic oligonucleotide
  Antisense Strand to SEQ ID NO: 489513
uccguuggacucaaucaac

SEQ ID NO: 489515 - RNA, 19 nt, Artificial Sequence
  Description of Artificial Sequence: Synthetic oligonucleotide
  Sense strand starting at position 3934 of SEQ ID NO: 317420
agguauuaguuaccuguuu

SEQ ID NO: 489516 - RNA, 19 nt, Artificial Sequence
  Description of Artificial Sequence: Synthetic oligonucleotide
  Antisense Strand to SEQ ID NO: 489515
aaacagguaacuaauaccu

SEQ ID NO: 489517 - RNA, 19 nt, Artificial Sequence
  Description of Artificial Sequence: Synthetic oligonucleotide
  Sense strand starting at position 48 of SEQ ID NO: 317421
ugcauauguguggauaauc

SEQ ID NO: 489518 - RNA, 19 nt, Artificial Sequence
  Description of Artificial Sequence: Synthetic oligonucleotide
  Antisense Strand to SEQ ID NO: 489517
gauuauccacacauaugca

SEQ ID NO: 489519 - RNA, 19 nt, Artificial Sequence
  Description of Artificial Sequence: Synthetic oligonucleotide
  Sense strand starting at position 53 of SEQ ID NO: 317421
auguguggauaaucagaga

SEQ ID NO: 489520 - RNA, 19 nt, Artificial Sequence
  Description of Artificial Sequence: Synthetic oligonucleotide
  Antisense Strand to SEQ ID NO: 489519
ucucugauuauccacacau

SEQ ID NO: 489521 - RNA, 19 nt, Artificial Sequence
  Description of Artificial Sequence: Synthetic oligonucleotide
  Sense strand starting at position 606 of SEQ ID NO: 317421
ggcaaaggcacauagaguu

SEQ ID NO: 489522 - RNA, 19 nt, Artificial Sequence
  Description of Artificial Sequence: Synthetic oligonucleotide
  Antisense Strand to SEQ ID NO: 489521
aacucuaugugccuuugcc

SEQ ID NO: 489523 - RNA, 19 nt, Artificial Sequence
  Description of Artificial Sequence: Synthetic oligonucleotide
  Sense strand starting at position 707 of SEQ ID NO: 317421
cugagaugugguggaaacu

SEQ ID NO: 489524 - RNA, 19 nt, Artificial Sequence
  Description of Artificial Sequence: Synthetic oligonucleotide
  Antisense Strand to SEQ ID NO: 489523
aguuuccaccacaucucag

SEQ ID NO: 489525 - RNA, 19 nt, Artificial Sequence
  Description of Artificial Sequence: Synthetic oligonucleotide
  Sense strand starting at position 771 of SEQ ID NO: 317421
guucuuggugacugggaga

SEQ ID NO: 489526 - RNA, 19 nt, Artificial Sequence
  Description of Artificial Sequence: Synthetic oligonucleotide
  Antisense Strand to SEQ ID NO: 489525
ucucccagucaccaagaac

SEQ ID NO: 489527 - RNA, 19 nt, Artificial Sequence
  Description of Artificial Sequence: Synthetic oligonucleotide
  Sense strand starting at position 976 of SEQ ID NO: 317421
uugagaaaguuugcuggua

SEQ ID NO: 489528 - RNA, 19 nt, Artificial Sequence
  Description of Artificial Sequence: Synthetic oligonucleotide
  Antisense Strand to SEQ ID NO: 489527
uaccagcaaacuuucucaa

SEQ ID NO: 489529 - RNA, 19 nt, Artificial Sequence
  Description of Artificial Sequence: Synthetic oligonucleotide
  Sense strand starting at position 1096 of SEQ ID NO: 317421
ugauuuagagcuugagugu

SEQ ID NO: 489530 - RNA, 19 nt, Artificial Sequence
  Description of Artificial Sequence: Synthetic oligonucleotide
  Antisense Strand to SEQ ID NO: 489529
acacucaagcucuaaauca

SEQ ID NO: 489531 - RNA, 19 nt, Artificial Sequence
  Description of Artificial Sequence: Synthetic oligonucleotide
  Sense strand starting at position 1224 of SEQ ID NO: 317421
cguuacuauuuccuuugua

SEQ ID NO: 489532 - RNA, 19 nt, Artificial Sequence
  Description of Artificial Sequence: Synthetic oligonucleotide
  Antisense Strand to SEQ ID NO: 489531
uacaaaggaaauaguaacg

SEQ ID NO: 489533 - RNA, 19 nt, Artificial Sequence
  Description of Artificial Sequence: Synthetic oligonucleotide
  Sense strand starting at position 1354 of SEQ ID NO: 317421
acagcugugauaggaaaga

SEQ ID NO: 489534 - RNA, 19 nt, Artificial Sequence
  Description of Artificial Sequence: Synthetic oligonucleotide
  Antisense Strand to SEQ ID NO: 489533
ucuuuccuaucacagcugu

SEQ ID NO: 489535 - RNA, 19 nt, Artificial Sequence
  Description of Artificial Sequence: Synthetic oligonucleotide
  Sense strand starting at position 1424 of SEQ ID NO: 317421
cguagaugaaauugaccaa

SEQ ID NO: 489536 - RNA, 19 nt, Artificial Sequence
  Description of Artificial Sequence: Synthetic oligonucleotide
  Antisense Strand to SEQ ID NO: 489535
uuggucaauuucaucuacg

SEQ ID NO: 489537 - RNA, 19 nt, Artificial Sequence
  Description of Artificial Sequence: Synthetic oligonucleotide
  Sense strand starting at position 1458 of SEQ ID NO: 317421
cauggaggcgucggagaaa

SEQ ID NO: 489538 - RNA, 19 nt, Artificial Sequence
  Description of Artificial Sequence: Synthetic oligonucleotide
  Antisense Strand to SEQ ID NO: 489537
uuucuccgacgccuccaug

SEQ ID NO: 489539 - RNA, 19 nt, Artificial Sequence
  Description of Artificial Sequence: Synthetic oligonucleotide
  Sense strand starting at position 1910 of SEQ ID NO: 317421
agacgagacuccucugaag

SEQ ID NO: 489540 - RNA, 19 nt, Artificial Sequence
  Description of Artificial Sequence: Synthetic oligonucleotide
  Antisense Strand to SEQ ID NO: 489539
cuucagaggagucucgucu

SEQ ID NO: 489541 - RNA, 19 nt, Artificial Sequence
  Description of Artificial Sequence: Synthetic oligonucleotide
  Sense strand starting at position 1912 of SEQ ID NO: 317421
acgagacuccucugaaguu

SEQ ID NO: 489542 - RNA, 19 nt, Artificial Sequence
  Description of Artificial Sequence: Synthetic oligonucleotide
  Antisense Strand to SEQ ID NO: 489541
aacuucagaggagucucgu

SEQ ID NO: 489543 - RNA, 19 nt, Artificial Sequence
  Description of Artificial Sequence: Synthetic oligonucleotide
  Sense strand starting at position 2102 of SEQ ID NO: 317421
gauuaaggguuaucgaguc

SEQ ID NO: 489544 - RNA, 19 nt, Artificial Sequence
  Description of Artificial Sequence: Synthetic oligonucleotide
  Antisense Strand to SEQ ID NO: 489543
gacucgauaacccuuaauc

SEQ ID NO: 489545 - RNA, 19 nt, Artificial Sequence
  Description of Artificial Sequence: Synthetic oligonucleotide
  Sense strand starting at position 2108 of SEQ ID NO: 317421
ggguuaucgagucacauca

SEQ ID NO: 489546 - RNA, 19 nt, Artificial Sequence
  Description of Artificial Sequence: Synthetic oligonucleotide
  Antisense Strand to SEQ ID NO: 489545
ugaugugacucgauaaccc

SEQ ID NO: 489547 - RNA, 19 nt, Artificial Sequence
  Description of Artificial Sequence: Synthetic oligonucleotide
  Sense strand starting at position 2418 of SEQ ID NO: 317421
caggauaucuugcugaggu

SEQ ID NO: 489548 - RNA, 19 nt, Artificial Sequence
  Description of Artificial Sequence: Synthetic oligonucleotide
  Antisense Strand to SEQ ID NO: 489547
accucagcaagauauccug

SEQ ID NO: 489549 - RNA, 19 nt, Artificial Sequence
  Description of Artificial Sequence: Synthetic oligonucleotide
  Sense strand starting at position 2431 of SEQ ID NO: 317421
ugaggucccuguucucaaa

SEQ ID NO: 489550 - RNA, 19 nt, Artificial Sequence
  Description of Artificial Sequence: Synthetic oligonucleotide
  Antisense Strand to SEQ ID NO: 489549
uuugagaacagggaccuca

SEQ ID NO: 489551 - RNA, 19 nt, Artificial Sequence
  Description of Artificial Sequence: Synthetic oligonucleotide
  Sense strand starting at position 2527 of SEQ ID NO: 317421
cggagagugcaugagugua

SEQ ID NO: 489552 - RNA, 19 nt, Artificial Sequence
  Description of Artificial Sequence: Synthetic oligonucleotide
  Antisense Strand to SEQ ID NO: 489551
uacacucaugcacucuccg

SEQ ID NO: 489553 - RNA, 19 nt, Artificial Sequence
  Description of Artificial Sequence: Synthetic oligonucleotide
  Sense strand starting at position 2779 of SEQ ID NO: 317421
ggaggauucugcucagguu

SEQ ID NO: 489554 - RNA, 19 nt, Artificial Sequence
  Description of Artificial Sequence: Synthetic oligonucleotide
  Antisense Strand to SEQ ID NO: 489553
aaccugagcagaauccucc

SEQ ID NO: 489555 - RNA, 19 nt, Artificial Sequence
  Description of Artificial Sequence: Synthetic oligonucleotide
  Sense strand starting at position 2865 of SEQ ID NO: 317421
cgagacagaucucuacauu

SEQ ID NO: 489556 - RNA, 19 nt, Artificial Sequence
  Description of Artificial Sequence: Synthetic oligonucleotide
  Antisense Strand to SEQ ID NO: 489555
aauguagagaucugucucg

SEQ ID NO: 489557 - RNA, 19 nt, Artificial Sequence
  Description of Artificial Sequence: Synthetic oligonucleotide
  Sense strand starting at position 2903 of SEQ ID NO: 317421
caguaagcacugugaauac

SEQ ID NO: 489558 - RNA, 19 nt, Artificial Sequence
  Description of Artificial Sequence: Synthetic oligonucleotide
  Antisense Strand to SEQ ID NO: 489557
guauucacagugcuuacug

SEQ ID NO: 489559 - RNA, 19 nt, Artificial Sequence
  Description of Artificial Sequence: Synthetic oligonucleotide
  Sense strand starting at position 3050 of SEQ ID NO: 317421
auuucugagcuuugcuuga

SEQ ID NO: 489560 - RNA, 19 nt, Artificial Sequence
  Description of Artificial Sequence: Synthetic oligonucleotide
  Antisense Strand to SEQ ID NO: 489559
ucaagcaaagcucagaaau

SEQ ID NO: 489561 - RNA, 19 nt, Artificial Sequence
  Description of Artificial Sequence: Synthetic oligonucleotide
  Sense strand starting at position 3054 of SEQ ID NO: 317421
cugagcuuugcuugagaau

SEQ ID NO: 489562 - RNA, 19 nt, Artificial Sequence
  Description of Artificial Sequence: Synthetic oligonucleotide
  Antisense Strand to SEQ ID NO: 489561
auucucaagcaaagcucag

SEQ ID NO: 489563 - RNA, 19 nt, Artificial Sequence
  Description of Artificial Sequence: Synthetic oligonucleotide
  Sense strand starting at position 3055 of SEQ ID NO: 317421
ugagcuuugcuugagaaua

SEQ ID NO: 489564 - RNA, 19 nt, Artificial Sequence
  Description of Artificial Sequence: Synthetic oligonucleotide
  Antisense Strand to SEQ ID NO: 489563
uauucucaagcaaagcuca

SEQ ID NO: 489565 - RNA, 19 nt, Artificial Sequence
  Description of Artificial Sequence: Synthetic oligonucleotide
  Sense strand starting at position 3060 of SEQ ID NO: 317421
uuugcuugagaauaaguga

SEQ ID NO: 489566 - RNA, 19 nt, Artificial Sequence
  Description of Artificial Sequence: Synthetic oligonucleotide
  Antisense Strand to SEQ ID NO: 489565
ucacuuauucucaagcaaa

SEQ ID NO: 489567 - RNA, 19 nt, Artificial Sequence
  Description of Artificial Sequence: Synthetic oligonucleotide
  Sense strand starting at position 3109 of SEQ ID NO: 317421
aggacauagucugugcuua

SEQ ID NO: 489568 - RNA, 19 nt, Artificial Sequence
  Description of Artificial Sequence: Synthetic oligonucleotide
  Antisense Strand to SEQ ID NO: 489567
uaagcacagacuauguccu

SEQ ID NO: 489569 - RNA, 19 nt, Artificial Sequence
  Description of Artificial Sequence: Synthetic oligonucleotide
  Sense strand starting at position 3111 of SEQ ID NO: 317421
gacauagucugugcuuaga

SEQ ID NO: 489570 - RNA, 19 nt, Artificial Sequence
  Description of Artificial Sequence: Synthetic oligonucleotide
  Antisense Strand to SEQ ID NO: 489569
ucuaagcacagacuauguc

SEQ ID NO: 489571 - RNA, 19 nt, Artificial Sequence
  Description of Artificial Sequence: Synthetic oligonucleotide
  Sense strand starting at position 3234 of SEQ ID NO: 317421
acuggauauacgugaacug

SEQ ID NO: 489572 - RNA, 19 nt, Artificial Sequence
  Description of Artificial Sequence: Synthetic oligonucleotide
  Antisense Strand to SEQ ID NO: 489571
caguucacguauauccagu

SEQ ID NO: 489573 - RNA, 19 nt, Artificial Sequence
  Description of Artificial Sequence: Synthetic oligonucleotide
  Sense strand starting at position 3235 of SEQ ID NO: 317421
cuggauauacgugaacugu

SEQ ID NO: 489574 - RNA, 19 nt, Artificial Sequence
  Description of Artificial Sequence: Synthetic oligonucleotide
  Antisense Strand to SEQ ID NO: 489573
acaguucacguauauccag

SEQ ID NO: 489575 - RNA, 19 nt, Artificial Sequence
  Description of Artificial Sequence: Synthetic oligonucleotide
  Sense strand starting at position 3239 of SEQ ID NO: 317421
auauacgugaacuguuuga

SEQ ID NO: 489576 - RNA, 19 nt, Artificial Sequence
  Description of Artificial Sequence: Synthetic oligonucleotide
  Antisense Strand to SEQ ID NO: 489575
ucaaacaguucacguauau

SEQ ID NO: 489577 - RNA, 19 nt, Artificial Sequence
  Description of Artificial Sequence: Synthetic oligonucleotide
  Sense strand starting at position 3377 of SEQ ID NO: 317421
guuaucauuguguauuaca

SEQ ID NO: 489578 - RNA, 19 nt, Artificial Sequence
  Description of Artificial Sequence: Synthetic oligonucleotide
  Antisense Strand to SEQ ID NO: 489577
uguaauacacaaugauaac

SEQ ID NO: 489579 - RNA, 19 nt, Artificial Sequence
  Description of Artificial Sequence: Synthetic oligonucleotide
  Sense strand starting at position 3399 of SEQ ID NO: 317421
aaacauguuuaggugaaag

SEQ ID NO: 489580 - RNA, 19 nt, Artificial Sequence
  Description of Artificial Sequence: Synthetic oligonucleotide
  Antisense Strand to SEQ ID NO: 489579
cuuucaccuaaacauguuu

SEQ ID NO: 489581 - RNA, 19 nt, Artificial Sequence
  Description of Artificial Sequence: Synthetic oligonucleotide
  Sense strand starting at position 3772 of SEQ ID NO: 317421
uccagcaaugcugggauua

SEQ ID NO: 489582 - RNA, 19 nt, Artificial Sequence
  Description of Artificial Sequence: Synthetic oligonucleotide
  Antisense Strand to SEQ ID NO: 489581
uaaucccagcauugcugga

SEQ ID NO: 489583 - RNA, 19 nt, Artificial Sequence
  Description of Artificial Sequence: Synthetic oligonucleotide
  Sense strand starting at position 3865 of SEQ ID NO: 317421
ugcugugaugauuggacaa

SEQ ID NO: 489584 - RNA, 19 nt, Artificial Sequence
  Description of Artificial Sequence: Synthetic oligonucleotide
  Antisense Strand to SEQ ID NO: 489583
uuguccaaucaucacagca

SEQ ID NO: 489585 - RNA, 19 nt, Artificial Sequence
  Description of Artificial Sequence: Synthetic oligonucleotide
  Sense strand starting at position 3887 of SEQ ID NO: 317421
gacuuaagguguguaguga

SEQ ID NO: 489586 - RNA, 19 nt, Artificial Sequence
  Description of Artificial Sequence: Synthetic oligonucleotide
  Antisense Strand to SEQ ID NO: 489585
ucacuacacaccuuaaguc

SEQ ID NO: 489587 - RNA, 19 nt, Artificial Sequence
  Description of Artificial Sequence: Synthetic oligonucleotide
  Sense strand starting at position 3888 of SEQ ID NO: 317421
acuuaagguguguagugau

SEQ ID NO: 489588 - RNA, 19 nt, Artificial Sequence
  Description of Artificial Sequence: Synthetic oligonucleotide
  Antisense Strand to SEQ ID NO: 489587
aucacuacacaccuuaagu

SEQ ID NO: 489589 - RNA, 19 nt, Artificial Sequence
  Description of Artificial Sequence: Synthetic oligonucleotide
  Sense strand starting at position 3936 of SEQ ID NO: 317421
ugacuaaauggcuagugua

SEQ ID NO: 489590 - RNA, 19 nt, Artificial Sequence
  Description of Artificial Sequence: Synthetic oligonucleotide
  Antisense Strand to SEQ ID NO: 489589
uacacuagccauuuaguca

SEQ ID NO: 489591 - RNA, 19 nt, Artificial Sequence
  Description of Artificial Sequence: Synthetic oligonucleotide
  Sense strand starting at position 3943 of SEQ ID NO: 317421
auggcuaguguauaacaau

SEQ ID NO: 489592 - RNA, 19 nt, Artificial Sequence
  Description of Artificial Sequence: Synthetic oligonucleotide
  Antisense Strand to SEQ ID NO: 489591
auuguuauacacuagccau

SEQ ID NO: 489593 - RNA, 19 nt, Artificial Sequence
  Description of Artificial Sequence: Synthetic oligonucleotide
  Sense strand starting at position 3970 of SEQ ID NO: 317421
gcaaccugauaguuauuau

SEQ ID NO: 489594 - RNA, 19 nt, Artificial Sequence
  Description of Artificial Sequence: Synthetic oligonucleotide
  Antisense Strand to SEQ ID NO: 489593
auaauaacuaucagguugc

SEQ ID NO: 489595 - RNA, 19 nt, Artificial Sequence
  Description of Artificial Sequence: Synthetic oligonucleotide
  Sense strand starting at position 3973 of SEQ ID NO: 317421
accugauaguuauuaucac

SEQ ID NO: 489596 - RNA, 19 nt, Artificial Sequence
  Description of Artificial Sequence: Synthetic oligonucleotide
  Antisense Strand to SEQ ID NO: 489595
gugauaauaacuaucaggu

SEQ ID NO: 489597 - RNA, 19 nt, Artificial Sequence
  Description of Artificial Sequence: Synthetic oligonucleotide
  Sense strand starting at position 1 of SEQ ID NO: 317422
ccgguuaugguguguggaa

SEQ ID NO: 489598 - RNA, 19 nt, Artificial Sequence
  Description of Artificial Sequence: Synthetic oligonucleotide
  Antisense Strand to SEQ ID NO: 489597
uuccacacaccauaaccgg

SEQ ID NO: 489599 - RNA, 19 nt, Artificial Sequence
  Description of Artificial Sequence: Synthetic oligonucleotide
  Sense strand starting at position 2 of SEQ ID NO: 317422
cgguuaugguguguggaau

SEQ ID NO: 489600 - RNA, 19 nt, Artificial Sequence
  Description of Artificial Sequence: Synthetic oligonucleotide
  Antisense Strand to SEQ ID NO: 489599
auuccacacaccauaaccg

SEQ ID NO: 489601 - RNA, 19 nt, Artificial Sequence
  Description of Artificial Sequence: Synthetic oligonucleotide
  Sense strand starting at position 3 of SEQ ID NO: 317422
gguuaugguguguggaaua

SEQ ID NO: 489602 - RNA, 19 nt, Artificial Sequence
  Description of Artificial Sequence: Synthetic oligonucleotide
  Antisense Strand to SEQ ID NO: 489601
uauuccacacaccauaacc

SEQ ID NO: 489603 - RNA, 19 nt, Artificial Sequence
  Description of Artificial Sequence: Synthetic oligonucleotide
  Sense strand starting at position 63 of SEQ ID NO: 317422
caaaguggucaaggcaaga

SEQ ID NO: 489604 - RNA, 19 nt, Artificial Sequence
  Description of Artificial Sequence: Synthetic oligonucleotide
  Antisense Strand to SEQ ID NO: 489603
ucuugccuugaccacuuug

SEQ ID NO: 489605 - RNA, 19 nt, Artificial Sequence
  Description of Artificial Sequence: Synthetic oligonucleotide
  Sense strand starting at position 76 of SEQ ID NO: 317422
gcaagaaguaaacguaaac

SEQ ID NO: 489606 - RNA, 19 nt, Artificial Sequence
  Description of Artificial Sequence: Synthetic oligonucleotide
  Antisense Strand to SEQ ID NO: 489605
guuuacguuuacuucuugc

SEQ ID NO: 489607 - RNA, 19 nt, Artificial Sequence
  Description of Artificial Sequence: Synthetic oligonucleotide
  Sense strand starting at position 101 of SEQ ID NO: 317422
cgggacuacggcuguaaga

SEQ ID NO: 489608 - RNA, 19 nt, Artificial Sequence
  Description of Artificial Sequence: Synthetic oligonucleotide
  Antisense Strand to SEQ ID NO: 489607
ucuuacagccguagucccg

SEQ ID NO: 489609 - RNA, 19 nt, Artificial Sequence
  Description of Artificial Sequence: Synthetic oligonucleotide
  Sense strand starting at position 103 of SEQ ID NO: 317422
ggacuacggcuguaagaag

SEQ ID NO: 489610 - RNA, 19 nt, Artificial Sequence
  Description of Artificial Sequence: Synthetic oligonucleotide
  Antisense Strand to SEQ ID NO: 489609
cuucuuacagccguagucc

SEQ ID NO: 489611 - RNA, 19 nt, Artificial Sequence
  Description of Artificial Sequence: Synthetic oligonucleotide
  Sense strand starting at position 111 of SEQ ID NO: 317422
gcuguaagaagugguuugu

SEQ ID NO: 489612 - RNA, 19 nt, Artificial Sequence
  Description of Artificial Sequence: Synthetic oligonucleotide
  Antisense Strand to SEQ ID NO: 489611
acaaaccacuucuuacagc

SEQ ID NO: 489613 - RNA, 19 nt, Artificial Sequence
  Description of Artificial Sequence: Synthetic oligonucleotide
  Sense strand starting at position 117 of SEQ ID NO: 317422
agaagugguuuguucugca

SEQ ID NO: 489614 - RNA, 19 nt, Artificial Sequence
  Description of Artificial Sequence: Synthetic oligonucleotide
  Antisense Strand to SEQ ID NO: 489613
ugcagaacaaaccacuucu

SEQ ID NO: 489615 - RNA, 19 nt, Artificial Sequence
  Description of Artificial Sequence: Synthetic oligonucleotide
  Sense strand starting at position 120 of SEQ ID NO: 317422
agugguuuguucugcaugu

SEQ ID NO: 489616 - RNA, 19 nt, Artificial Sequence
  Description of Artificial Sequence: Synthetic oligonucleotide
  Antisense Strand to SEQ ID NO: 489615
acaugcagaacaaaccacu

SEQ ID NO: 489617 - RNA, 19 nt, Artificial Sequence
  Description of Artificial Sequence: Synthetic oligonucleotide
  Sense strand starting at position 121 of SEQ ID NO: 317422
gugguuuguucugcaugua

SEQ ID NO: 489618 - RNA, 19 nt, Artificial Sequence
  Description of Artificial Sequence: Synthetic oligonucleotide
  Antisense Strand to SEQ ID NO: 489617
uacaugcagaacaaaccac

SEQ ID NO: 489619 - RNA, 19 nt, Artificial Sequence
  Description of Artificial Sequence: Synthetic oligonucleotide
  Sense strand starting at position 281 of SEQ ID NO: 317422
acuuuaagcucccugaaug

SEQ ID NO: 489620 - RNA, 19 nt, Artificial Sequence
  Description of Artificial Sequence: Synthetic oligonucleotide
  Antisense Strand to SEQ ID NO: 489619
cauucagggagcuuaaagu

SEQ ID NO: 489621 - RNA, 19 nt, Artificial Sequence
  Description of Artificial Sequence: Synthetic oligonucleotide
  Sense strand starting at position 291 of SEQ ID NO: 317422
cccugaaugcagggauaaa

SEQ ID NO: 489622 - RNA, 19 nt, Artificial Sequence
  Description of Artificial Sequence: Synthetic oligonucleotide
  Antisense Strand to SEQ ID NO: 489621
uuuaucccugcauucaggg

SEQ ID NO: 489623 - RNA, 19 nt, Artificial Sequence
  Description of Artificial Sequence: Synthetic oligonucleotide
  Sense strand starting at position 326 of SEQ ID NO: 317422
agaguucuccgccacugua

SEQ ID NO: 489624 - RNA, 19 nt, Artificial Sequence
  Description of Artificial Sequence: Synthetic oligonucleotide
  Antisense Strand to SEQ ID NO: 489623
uacaguggcggagaacucu

SEQ ID NO: 489625 - RNA, 19 nt, Artificial Sequence
  Description of Artificial Sequence: Synthetic oligonucleotide
  Sense strand starting at position 342 of SEQ ID NO: 317422
guagaauccgcacagaaca

SEQ ID NO: 489626 - RNA, 19 nt, Artificial Sequence
  Description of Artificial Sequence: Synthetic oligonucleotide
  Antisense Strand to SEQ ID NO: 489625
uguucugugcggauucuac

SEQ ID NO: 489627 - RNA, 19 nt, Artificial Sequence
  Description of Artificial Sequence: Synthetic oligonucleotide
  Sense strand starting at position 358 of SEQ ID NO: 317422
acacaugcucagugcauau

SEQ ID NO: 489628 - RNA, 19 nt, Artificial Sequence
  Description of Artificial Sequence: Synthetic oligonucleotide
  Antisense Strand to SEQ ID NO: 489627
auaugcacugagcaugugu

SEQ ID NO: 489629 - RNA, 19 nt, Artificial Sequence
  Description of Artificial Sequence: Synthetic oligonucleotide
  Sense strand starting at position 436 of SEQ ID NO: 317422
gcugguggccauuagguaa

SEQ ID NO: 489630 - RNA, 19 nt, Artificial Sequence
  Description of Artificial Sequence: Synthetic oligonucleotide
  Antisense Strand to SEQ ID NO: 489629
uuaccuaauggccaccagc

SEQ ID NO: 489631 - RNA, 19 nt, Artificial Sequence
  Description of Artificial Sequence: Synthetic oligonucleotide
  Sense strand starting at position 448 of SEQ ID NO: 317422
uagguaaggguuuguaaag

SEQ ID NO: 489632 - RNA, 19 nt, Artificial Sequence
  Description of Artificial Sequence: Synthetic oligonucleotide
  Antisense Strand to SEQ ID NO: 489631
cuuuacaaacccuuaccua

SEQ ID NO: 489633 - RNA, 19 nt, Artificial Sequence
  Description of Artificial Sequence: Synthetic oligonucleotide
  Sense strand starting at position 454 of SEQ ID NO: 317422
aggguuuguaaaggagcau

SEQ ID NO: 489634 - RNA, 19 nt, Artificial Sequence
  Description of Artificial Sequence: Synthetic oligonucleotide
  Antisense Strand to SEQ ID NO: 489633
augcuccuuuacaaacccu

SEQ ID NO: 489635 - RNA, 19 nt, Artificial Sequence
  Description of Artificial Sequence: Synthetic oligonucleotide
  Sense strand starting at position 466 of SEQ ID NO: 317422
ggagcaucuucucuaagga

SEQ ID NO: 489636 - RNA, 19 nt, Artificial Sequence
  Description of Artificial Sequence: Synthetic oligonucleotide
  Antisense Strand to SEQ ID NO: 489635
uccuuagagaagaugcucc

SEQ ID NO: 489637 - RNA, 19 nt, Artificial Sequence
  Description of Artificial Sequence: Synthetic oligonucleotide
  Sense strand starting at position 508 of SEQ ID NO: 317422
agggcuucagaaugaguau

SEQ ID NO: 489638 - RNA, 19 nt, Artificial Sequence
  Description of Artificial Sequence: Synthetic oligonucleotide
  Antisense Strand to SEQ ID NO: 489637
auacucauucugaagcccu

SEQ ID NO: 489639 - RNA, 19 nt, Artificial Sequence
  Description of Artificial Sequence: Synthetic oligonucleotide
  Sense strand starting at position 614 of SEQ ID NO: 317422
gauggaugcuguuccgaga

SEQ ID NO: 489640 - RNA, 19 nt, Artificial Sequence
  Description of Artificial Sequence: Synthetic oligonucleotide
  Antisense Strand to SEQ ID NO: 489639
ucucggaacagcauccauc

SEQ ID NO: 489641 - RNA, 19 nt, Artificial Sequence
  Description of Artificial Sequence: Synthetic oligonucleotide
  Sense strand starting at position 727 of SEQ ID NO: 317422
acaugucuuuggugguuau

SEQ ID NO: 489642 - RNA, 19 nt, Artificial Sequence
  Description of Artificial Sequence: Synthetic oligonucleotide
  Antisense Strand to SEQ ID NO: 489641
auaaccaccaaagacaugu

SEQ ID NO: 489643 - RNA, 19 nt, Artificial Sequence
  Description of Artificial Sequence: Synthetic oligonucleotide
  Sense strand starting at position 737 of SEQ ID NO: 317422
ggugguuaugagcgggaau

SEQ ID NO: 489644 - RNA, 19 nt, Artificial Sequence
  Description of Artificial Sequence: Synthetic oligonucleotide
  Antisense Strand to SEQ ID NO: 489643
auucccgcucauaaccacc

SEQ ID NO: 489645 - RNA, 19 nt, Artificial Sequence
  Description of Artificial Sequence: Synthetic oligonucleotide
  Sense strand starting at position 738 of SEQ ID NO: 317422
gugguuaugagcgggaaua

SEQ ID NO: 489646 - RNA, 19 nt, Artificial Sequence
  Description of Artificial Sequence: Synthetic oligonucleotide
  Antisense Strand to SEQ ID NO: 489645
uauucccgcucauaaccac

SEQ ID NO: 489647 - RNA, 19 nt, Artificial Sequence
  Description of Artificial Sequence: Synthetic oligonucleotide
  Sense strand starting at position 739 of SEQ ID NO: 317422
ugguuaugagcgggaauac

SEQ ID NO: 489648 - RNA, 19 nt, Artificial Sequence
  Description of Artificial Sequence: Synthetic oligonucleotide
  Antisense Strand to SEQ ID NO: 489647
guauucccgcucauaacca

SEQ ID NO: 489649 - RNA, 19 nt, Artificial Sequence
  Description of Artificial Sequence: Synthetic oligonucleotide
  Sense strand starting at position 749 of SEQ ID NO: 317422
cgggaauacggcuagagau

SEQ ID NO: 489650 - RNA, 19 nt, Artificial Sequence
  Description of Artificial Sequence: Synthetic oligonucleotide
  Antisense Strand to SEQ ID NO: 489649
aucucuagccguauucccg

SEQ ID NO: 489651 - RNA, 19 nt, Artificial Sequence
  Description of Artificial Sequence: Synthetic oligonucleotide
  Sense strand starting at position 770 of SEQ ID NO: 317422
ucuccuuucuaauacggau

SEQ ID NO: 489652 - RNA, 19 nt, Artificial Sequence
  Description of Artificial Sequence: Synthetic oligonucleotide
  Antisense Strand to SEQ ID NO: 489651
auccguauuagaaaggaga

SEQ ID NO: 489653 - RNA, 19 nt, Artificial Sequence
  Description of Artificial Sequence: Synthetic oligonucleotide
  Sense strand starting at position 867 of SEQ ID NO: 317422
acacgauguugcuagcgua

SEQ ID NO: 489654 - RNA, 19 nt, Artificial Sequence
  Description of Artificial Sequence: Synthetic oligonucleotide
  Antisense Strand to SEQ ID NO: 489653
uacgcuagcaacaucgugu

SEQ ID NO: 489655 - RNA, 19 nt, Artificial Sequence
  Description of Artificial Sequence: Synthetic oligonucleotide
  Sense strand starting at position 870 of SEQ ID NO: 317422
cgauguugcuagcguaagu

SEQ ID NO: 489656 - RNA, 19 nt, Artificial Sequence
  Description of Artificial Sequence: Synthetic oligonucleotide
  Antisense Strand to SEQ ID NO: 489655
acuuacgcuagcaacaucg

SEQ ID NO: 489657 - RNA, 19 nt, Artificial Sequence
  Description of Artificial Sequence: Synthetic oligonucleotide
  Sense strand starting at position 920 of SEQ ID NO: 317422
cagggcugucucuacagaa

SEQ ID NO: 489658 - RNA, 19 nt, Artificial Sequence
  Description of Artificial Sequence: Synthetic oligonucleotide
  Antisense Strand to SEQ ID NO: 489657
uucuguagagacagcccug

SEQ ID NO: 489659 - RNA, 19 nt, Artificial Sequence
  Description of Artificial Sequence: Synthetic oligonucleotide
  Sense strand starting at position 1313 of SEQ ID NO: 317422
ggaaauggcucugcuguca

SEQ ID NO: 489660 - RNA, 19 nt, Artificial Sequence
  Description of Artificial Sequence: Synthetic oligonucleotide
  Antisense Strand to SEQ ID NO: 489659
ugacagcagagccauuucc

SEQ ID NO: 489661 - RNA, 19 nt, Artificial Sequence
  Description of Artificial Sequence: Synthetic oligonucleotide
  Sense strand starting at position 1328 of SEQ ID NO: 317422
gucagaagccagcguucaa

SEQ ID NO: 489662 - RNA, 19 nt, Artificial Sequence
  Description of Artificial Sequence: Synthetic oligonucleotide
  Antisense Strand to SEQ ID NO: 489661
uugaacgcuggcuucugac

SEQ ID NO: 489663 - RNA, 19 nt, Artificial Sequence
  Description of Artificial Sequence: Synthetic oligonucleotide
  Sense strand starting at position 3120 of SEQ ID NO: 317422
ucgagugguccgaggaggu

SEQ ID NO: 489664 - RNA, 19 nt, Artificial Sequence
  Description of Artificial Sequence: Synthetic oligonucleotide
  Antisense Strand to SEQ ID NO: 489663
accuccucggaccacucga

SEQ ID NO: 489665 - RNA, 19 nt, Artificial Sequence
  Description of Artificial Sequence: Synthetic oligonucleotide
  Sense strand starting at position 3574 of SEQ ID NO: 317422
ccaggcguuggaggauaaa

SEQ ID NO: 489666 - RNA, 19 nt, Artificial Sequence
  Description of Artificial Sequence: Synthetic oligonucleotide
  Antisense Strand to SEQ ID NO: 489665
uuuauccuccaacgccugg

SEQ ID NO: 489667 - RNA, 19 nt, Artificial Sequence
  Description of Artificial Sequence: Synthetic oligonucleotide
  Sense strand starting at position 3693 of SEQ ID NO: 317422
agggucugcuucuuauuga

SEQ ID NO: 489668 - RNA, 19 nt, Artificial Sequence
  Description of Artificial Sequence: Synthetic oligonucleotide
  Antisense Strand to SEQ ID NO: 489667
ucaauaagaagcagacccu

SEQ ID NO: 489669 - RNA, 19 nt, Artificial Sequence
  Description of Artificial Sequence: Synthetic oligonucleotide
  Sense strand starting at position 3696 of SEQ ID NO: 317422
gucugcuucuuauugacuu

SEQ ID NO: 489670 - RNA, 19 nt, Artificial Sequence
  Description of Artificial Sequence: Synthetic oligonucleotide
  Antisense Strand to SEQ ID NO: 489669
aagucaauaagaagcagac

SEQ ID NO: 489671 - RNA, 19 nt, Artificial Sequence
  Description of Artificial Sequence: Synthetic oligonucleotide
  Sense strand starting at position 3700 of SEQ ID NO: 317422
gcuucuuauugacuuugaa

SEQ ID NO: 489672 - RNA, 19 nt, Artificial Sequence
  Description of Artificial Sequence: Synthetic oligonucleotide
  Antisense Strand to SEQ ID NO: 489671
uucaaagucaauaagaagc

SEQ ID NO: 489673 - RNA, 19 nt, Artificial Sequence
  Description of Artificial Sequence: Synthetic oligonucleotide
  Sense strand starting at position 3721 of SEQ ID NO: 317422
gcugaagauugagaaccaa

SEQ ID NO: 489674 - RNA, 19 nt, Artificial Sequence
  Description of Artificial Sequence: Synthetic oligonucleotide
  Antisense Strand to SEQ ID NO: 489673
uugguucucaaucuucagc

SEQ ID NO: 489675 - RNA, 19 nt, Artificial Sequence
  Description of Artificial Sequence: Synthetic oligonucleotide
  Sense strand starting at position 3814 of SEQ ID NO: 317422
aguaauaacccacgugaag

SEQ ID NO: 489676 - RNA, 19 nt, Artificial Sequence
  Description of Artificial Sequence: Synthetic oligonucleotide
  Antisense Strand to SEQ ID NO: 489675
cuucacguggguuauuacu

SEQ ID NO: 489677 - RNA, 19 nt, Artificial Sequence
  Description of Artificial Sequence: Synthetic oligonucleotide
  Sense strand starting at position 103 of SEQ ID NO: 317423
ggaggcaucucccugauaa

SEQ ID NO: 489678 - RNA, 19 nt, Artificial Sequence
  Description of Artificial Sequence: Synthetic oligonucleotide
  Antisense Strand to SEQ ID NO: 489677
uuaucagggagaugccucc

SEQ ID NO: 489679 - RNA, 19 nt, Artificial Sequence
  Description of Artificial Sequence: Synthetic oligonucleotide
  Sense strand starting at position 105 of SEQ ID NO: 317423
aggcaucucccugauaaug

SEQ ID NO: 489680 - RNA, 19 nt, Artificial Sequence
  Description of Artificial Sequence: Synthetic oligonucleotide
  Antisense Strand to SEQ ID NO: 489679
cauuaucagggagaugccu

SEQ ID NO: 489681 - RNA, 19 nt, Artificial Sequence
  Description of Artificial Sequence: Synthetic oligonucleotide
  Sense strand starting at position 169 of SEQ ID NO: 317423
ugaaccauguuggugaaga

SEQ ID NO: 489682 - RNA, 19 nt, Artificial Sequence
  Description of Artificial Sequence: Synthetic oligonucleotide
  Antisense Strand to SEQ ID NO: 489681
ucuucaccaacaugguuca

SEQ ID NO: 489683 - RNA, 19 nt, Artificial Sequence
  Description of Artificial Sequence: Synthetic oligonucleotide
  Sense strand starting at position 183 of SEQ ID NO: 317423
gaagaauggauacguggua

SEQ ID NO: 489684 - RNA, 19 nt, Artificial Sequence
  Description of Artificial Sequence: Synthetic oligonucleotide
  Antisense Strand to SEQ ID NO: 489683
uaccacguauccauucuuc

SEQ ID NO: 489685 - RNA, 19 nt, Artificial Sequence
  Description of Artificial Sequence: Synthetic oligonucleotide
  Sense strand starting at position 190 of SEQ ID NO: 317423
ggauacgugguauaaugaa

SEQ ID NO: 489686 - RNA, 19 nt, Artificial Sequence
  Description of Artificial Sequence: Synthetic oligonucleotide
  Antisense Strand to SEQ ID NO: 489685
uucauuauaccacguaucc

SEQ ID NO: 489687 - RNA, 19 nt, Artificial Sequence
  Description of Artificial Sequence: Synthetic oligonucleotide
  Sense strand starting at position 202 of SEQ ID NO: 317423
uaaugaaguccauggaagu

SEQ ID NO: 489688 - RNA, 19 nt, Artificial Sequence
  Description of Artificial Sequence: Synthetic oligonucleotide
  Antisense Strand to SEQ ID NO: 489687
acuuccauggacuucauua

SEQ ID NO: 489689 - RNA, 19 nt, Artificial Sequence
  Description of Artificial Sequence: Synthetic oligonucleotide
  Sense strand starting at position 252 of SEQ ID NO: 317423
agaaguguuaagugauacu

SEQ ID NO: 489690 - RNA, 19 nt, Artificial Sequence
  Description of Artificial Sequence: Synthetic oligonucleotide
  Antisense Strand to SEQ ID NO: 489689
aguaucacuuaacacuucu

SEQ ID NO: 489691 - RNA, 19 nt, Artificial Sequence
  Description of Artificial Sequence: Synthetic oligonucleotide
  Sense strand starting at position 357 of SEQ ID NO: 317423
guggcuuuccugcaacuga

SEQ ID NO: 489692 - RNA, 19 nt, Artificial Sequence
  Description of Artificial Sequence: Synthetic oligonucleotide
  Antisense Strand to SEQ ID NO: 489691
ucaguugcaggaaagccac

SEQ ID NO: 489693 - RNA, 19 nt, Artificial Sequence
  Description of Artificial Sequence: Synthetic oligonucleotide
  Sense strand starting at position 466 of SEQ ID NO: 317423
acagacaguugagagauuu

SEQ ID NO: 489694 - RNA, 19 nt, Artificial Sequence
  Description of Artificial Sequence: Synthetic oligonucleotide
  Antisense Strand to SEQ ID NO: 489693
aaaucucucaacugucugu

SEQ ID NO: 489695 - RNA, 19 nt, Artificial Sequence
  Description of Artificial Sequence: Synthetic oligonucleotide
  Sense strand starting at position 502 of SEQ ID NO: 317423
agauccugccaaugaagaa

SEQ ID NO: 489696 - RNA, 19 nt, Artificial Sequence
  Description of Artificial Sequence: Synthetic oligonucleotide
  Antisense Strand to SEQ ID NO: 489695
uucuucauuggcaggaucu

SEQ ID NO: 489697 - RNA, 19 nt, Artificial Sequence
  Description of Artificial Sequence: Synthetic oligonucleotide
  Sense strand starting at position 522 of SEQ ID NO: 317423
guaaauacucuugaaagca

SEQ ID NO: 489698 - RNA, 19 nt, Artificial Sequence
  Description of Artificial Sequence: Synthetic oligonucleotide
  Antisense Strand to SEQ ID NO: 489697
ugcuuucaagaguauuuac

SEQ ID NO: 489699 - RNA, 19 nt, Artificial Sequence
  Description of Artificial Sequence: Synthetic oligonucleotide
  Sense strand starting at position 538 of SEQ ID NO: 317423
gcaaauguuuaacugagaa

SEQ ID NO: 489700 - RNA, 19 nt, Artificial Sequence
  Description of Artificial Sequence: Synthetic oligonucleotide
  Antisense Strand to SEQ ID NO: 489699
uucucaguuaaacauuugc

SEQ ID NO: 489701 - RNA, 19 nt, Artificial Sequence
  Description of Artificial Sequence: Synthetic oligonucleotide
  Sense strand starting at position 562 of SEQ ID NO: 317423
ccaaauaaaguaugguuga

SEQ ID NO: 489702 - RNA, 19 nt, Artificial Sequence
  Description of Artificial Sequence: Synthetic oligonucleotide
  Antisense Strand to SEQ ID NO: 489701
ucaaccauacuuuauuugg

SEQ ID NO: 489703 - RNA, 19 nt, Artificial Sequence
  Description of Artificial Sequence: Synthetic oligonucleotide
  Sense strand starting at position 698 of SEQ ID NO: 317423
aucgcaucugaucaacuuu

SEQ ID NO: 489704 - RNA, 19 nt, Artificial Sequence
  Description of Artificial Sequence: Synthetic oligonucleotide
  Antisense Strand to SEQ ID NO: 489703
aaaguugaucagaugcgau

SEQ ID NO: 489705 - RNA, 19 nt, Artificial Sequence
  Description of Artificial Sequence: Synthetic oligonucleotide
  Sense strand starting at position 860 of SEQ ID NO: 317423
gaagaaauuuaauggaguu

SEQ ID NO: 489706 - RNA, 19 nt, Artificial Sequence
  Description of Artificial Sequence: Synthetic oligonucleotide
  Antisense Strand to SEQ ID NO: 489705
aacuccauuaaauuucuuc

SEQ ID NO: 489707 - RNA, 19 nt, Artificial Sequence
  Description of Artificial Sequence: Synthetic oligonucleotide
  Sense strand starting at position 891 of SEQ ID NO: 317423
cuguuuacagcuugagaau

SEQ ID NO: 489708 - RNA, 19 nt, Artificial Sequence
  Description of Artificial Sequence: Synthetic oligonucleotide
  Antisense Strand to SEQ ID NO: 489707
auucucaagcuguaaacag

SEQ ID NO: 489709 - RNA, 19 nt, Artificial Sequence
  Description of Artificial Sequence: Synthetic oligonucleotide
  Sense strand starting at position 892 of SEQ ID NO: 317423
uguuuacagcuugagaauu

SEQ ID NO: 489710 - RNA, 19 nt, Artificial Sequence
  Description of Artificial Sequence: Synthetic oligonucleotide
  Antisense Strand to SEQ ID NO: 489709
aauucucaagcuguaaaca

SEQ ID NO: 489711 - RNA, 19 nt, Artificial Sequence
  Description of Artificial Sequence: Synthetic oligonucleotide
  Sense strand starting at position 979 of SEQ ID NO: 317423
cuguaacugcaauaugaau

SEQ ID NO: 489712 - RNA, 19 nt, Artificial Sequence
  Description of Artificial Sequence: Synthetic oligonucleotide
  Antisense Strand to SEQ ID NO: 489711
auucauauugcaguuacag

SEQ ID NO: 489713 - RNA, 19 nt, Artificial Sequence
  Description of Artificial Sequence: Synthetic oligonucleotide
  Sense strand starting at position 1086 of SEQ ID NO: 317423
cuggucauugaauguagga

SEQ ID NO: 489714 - RNA, 19 nt, Artificial Sequence
  Description of Artificial Sequence: Synthetic oligonucleotide
  Antisense Strand to SEQ ID NO: 489713
uccuacauucaaugaccag

SEQ ID NO: 489715 - RNA, 19 nt, Artificial Sequence
  Description of Artificial Sequence: Synthetic oligonucleotide
  Sense strand starting at position 1088 of SEQ ID NO: 317423
ggucauugaauguaggauu

SEQ ID NO: 489716 - RNA, 19 nt, Artificial Sequence
  Description of Artificial Sequence: Synthetic oligonucleotide
  Antisense Strand to SEQ ID NO: 489715
aauccuacauucaaugacc

SEQ ID NO: 489717 - RNA, 19 nt, Artificial Sequence
  Description of Artificial Sequence: Synthetic oligonucleotide
  Sense strand starting at position 1289 of SEQ ID NO: 317423
guuucuauggcucaaguuu

SEQ ID NO: 489718 - RNA, 19 nt, Artificial Sequence
  Description of Artificial Sequence: Synthetic oligonucleotide
  Antisense Strand to SEQ ID NO: 489717
aaacuugagccauagaaac

SEQ ID NO: 489719 - RNA, 19 nt, Artificial Sequence
  Description of Artificial Sequence: Synthetic oligonucleotide
  Sense strand starting at position 1331 of SEQ ID NO: 317423
gucaccuuggcaugaauau

SEQ ID NO: 489720 - RNA, 19 nt, Artificial Sequence
  Description of Artificial Sequence: Synthetic oligonucleotide
  Antisense Strand to SEQ ID NO: 489719
auauucaugccaaggugac

SEQ ID NO: 489721 - RNA, 19 nt, Artificial Sequence
  Description of Artificial Sequence: Synthetic oligonucleotide
  Sense strand starting at position 1332 of SEQ ID NO: 317423
ucaccuuggcaugaauaua

SEQ ID NO: 489722 - RNA, 19 nt, Artificial Sequence
  Description of Artificial Sequence: Synthetic oligonucleotide
  Antisense Strand to SEQ ID NO: 489721
uauauucaugccaagguga

SEQ ID NO: 489723 - RNA, 19 nt, Artificial Sequence
  Description of Artificial Sequence: Synthetic oligonucleotide
  Sense strand starting at position 1398 of SEQ ID NO: 317423
ggagaugcccgcuaaccua

SEQ ID NO: 489724 - RNA, 19 nt, Artificial Sequence
  Description of Artificial Sequence: Synthetic oligonucleotide
  Antisense Strand to SEQ ID NO: 489723
uagguuagcgggcaucucc

SEQ ID NO: 489725 - RNA, 19 nt, Artificial Sequence
  Description of Artificial Sequence: Synthetic oligonucleotide
  Sense strand starting at position 1916 of SEQ ID NO: 317423
ccauguuccgagcacaaca

SEQ ID NO: 489726 - RNA, 19 nt, Artificial Sequence
  Description of Artificial Sequence: Synthetic oligonucleotide
  Antisense Strand to SEQ ID NO: 489725
uguugugcucggaacaugg

SEQ ID NO: 489727 - RNA, 19 nt, Artificial Sequence
  Description of Artificial Sequence: Synthetic oligonucleotide
  Sense strand starting at position 2060 of SEQ ID NO: 317423
gagccauuggcgucagcga

SEQ ID NO: 489728 - RNA, 19 nt, Artificial Sequence
  Description of Artificial Sequence: Synthetic oligonucleotide
  Antisense Strand to SEQ ID NO: 489727
ucgcugacgccaauggcuc

SEQ ID NO: 489729 - RNA, 19 nt, Artificial Sequence
  Description of Artificial Sequence: Synthetic oligonucleotide
  Sense strand starting at position 3004 of SEQ ID NO: 317423
ugucucuuugauuagcaaa

SEQ ID NO: 489730 - RNA, 19 nt, Artificial Sequence
  Description of Artificial Sequence: Synthetic oligonucleotide
  Antisense Strand to SEQ ID NO: 489729
uuugcuaaucaaagagaca

SEQ ID NO: 489731 - RNA, 19 nt, Artificial Sequence
  Description of Artificial Sequence: Synthetic oligonucleotide
  Sense strand starting at position 3045 of SEQ ID NO: 317423
acacuaagcuuccuggaaa

SEQ ID NO: 489732 - RNA, 19 nt, Artificial Sequence
  Description of Artificial Sequence: Synthetic oligonucleotide
  Antisense Strand to SEQ ID NO: 489731
uuuccaggaagcuuagugu

SEQ ID NO: 489733 - RNA, 19 nt, Artificial Sequence
  Description of Artificial Sequence: Synthetic oligonucleotide
  Sense strand starting at position 3048 of SEQ ID NO: 317423
cuaagcuuccuggaaacuu

SEQ ID NO: 489734 - RNA, 19 nt, Artificial Sequence
  Description of Artificial Sequence: Synthetic oligonucleotide
  Antisense Strand to SEQ ID NO: 489733
aaguuuccaggaagcuuag

SEQ ID NO: 489735 - RNA, 19 nt, Artificial Sequence
  Description of Artificial Sequence: Synthetic oligonucleotide
  Sense strand starting at position 3079 of SEQ ID NO: 317423
acuugagaaccgcauauaa

SEQ ID NO: 489736 - RNA, 19 nt, Artificial Sequence
  Description of Artificial Sequence: Synthetic oligonucleotide
  Antisense Strand to SEQ ID NO: 489735
uuauaugcgguucucaagu

SEQ ID NO: 489737 - RNA, 19 nt, Artificial Sequence
  Description of Artificial Sequence: Synthetic oligonucleotide
  Sense strand starting at position 3081 of SEQ ID NO: 317423
uugagaaccgcauauaaau

SEQ ID NO: 489738 - RNA, 19 nt, Artificial Sequence
  Description of Artificial Sequence: Synthetic oligonucleotide
  Antisense Strand to SEQ ID NO: 489737
auuuauaugcgguucucaa

SEQ ID NO: 489739 - RNA, 19 nt, Artificial Sequence
  Description of Artificial Sequence: Synthetic oligonucleotide
  Sense strand starting at position 3273 of SEQ ID NO: 317423
ggcccaaccucguugaaag

SEQ ID NO: 489740 - RNA, 19 nt, Artificial Sequence
  Description of Artificial Sequence: Synthetic oligonucleotide
  Antisense Strand to SEQ ID NO: 489739
cuuucaacgagguugggcc

SEQ ID NO: 489741 - RNA, 19 nt, Artificial Sequence
  Description of Artificial Sequence: Synthetic oligonucleotide
  Sense strand starting at position 3313 of SEQ ID NO: 317423
ucggaaccuuauuauuuau

SEQ ID NO: 489742 - RNA, 19 nt, Artificial Sequence
  Description of Artificial Sequence: Synthetic oligonucleotide
  Antisense Strand to SEQ ID NO: 489741
auaaauaauaagguuccga

SEQ ID NO: 489743 - RNA, 19 nt, Artificial Sequence
  Description of Artificial Sequence: Synthetic oligonucleotide
  Sense strand starting at position 3319 of SEQ ID NO: 317423
ccuuauuauuuaugaaagg

SEQ ID NO: 489744 - RNA, 19 nt, Artificial Sequence
  Description of Artificial Sequence: Synthetic oligonucleotide
  Antisense Strand to SEQ ID NO: 489743
ccuuucauaaauaauaagg

SEQ ID NO: 489745 - RNA, 19 nt, Artificial Sequence
  Description of Artificial Sequence: Synthetic oligonucleotide
  Sense strand starting at position 3537 of SEQ ID NO: 317423
uucuauuauucucugaugu

SEQ ID NO: 489746 - RNA, 19 nt, Artificial Sequence
  Description of Artificial Sequence: Synthetic oligonucleotide
  Antisense Strand to SEQ ID NO: 489745
acaucagagaauaauagaa

SEQ ID NO: 489747 - RNA, 19 nt, Artificial Sequence
  Description of Artificial Sequence: Synthetic oligonucleotide
  Sense strand starting at position 3538 of SEQ ID NO: 317423
ucuauuauucucugauguu

SEQ ID NO: 489748 - RNA, 19 nt, Artificial Sequence
  Description of Artificial Sequence: Synthetic oligonucleotide
  Antisense Strand to SEQ ID NO: 489747
aacaucagagaauaauaga

SEQ ID NO: 489749 - RNA, 19 nt, Artificial Sequence
  Description of Artificial Sequence: Synthetic oligonucleotide
  Sense strand starting at position 3584 of SEQ ID NO: 317423
uuauguauugauugucaag

SEQ ID NO: 489750 - RNA, 19 nt, Artificial Sequence
  Description of Artificial Sequence: Synthetic oligonucleotide
  Antisense Strand to SEQ ID NO: 489749
cuugacaaucaauacauaa

SEQ ID NO: 489751 - RNA, 19 nt, Artificial Sequence
  Description of Artificial Sequence: Synthetic oligonucleotide
  Sense strand starting at position 3586 of SEQ ID NO: 317423
auguauugauugucaagaa

SEQ ID NO: 489752 - RNA, 19 nt, Artificial Sequence
  Description of Artificial Sequence: Synthetic oligonucleotide
  Antisense Strand to SEQ ID NO: 489751
uucuugacaaucaauacau

SEQ ID NO: 489753 - RNA, 19 nt, Artificial Sequence
  Description of Artificial Sequence: Synthetic oligonucleotide
  Sense strand starting at position 3742 of SEQ ID NO: 317423
aguugucagaauggacuuu

SEQ ID NO: 489754 - RNA, 19 nt, Artificial Sequence
  Description of Artificial Sequence: Synthetic oligonucleotide
  Antisense Strand to SEQ ID NO: 489753
aaaguccauucugacaacu

SEQ ID NO: 489755 - RNA, 19 nt, Artificial Sequence
  Description of Artificial Sequence: Synthetic oligonucleotide
  Sense strand starting at position 3771 of SEQ ID NO: 317423
uauuaugaggccugaggaa

SEQ ID NO: 489756 - RNA, 19 nt, Artificial Sequence
  Description of Artificial Sequence: Synthetic oligonucleotide
  Antisense Strand to SEQ ID NO: 489755
uuccucaggccucauaaua

SEQ ID NO: 489757 - RNA, 19 nt, Artificial Sequence
  Description of Artificial Sequence: Synthetic oligonucleotide
  Sense strand starting at position 130 of SEQ ID NO: 317424
ggguacaucucauugucau

SEQ ID NO: 489758 - RNA, 19 nt, Artificial Sequence
  Description of Artificial Sequence: Synthetic oligonucleotide
  Antisense Strand to SEQ ID NO: 489757
augacaaugagauguaccc

SEQ ID NO: 489759 - RNA, 19 nt, Artificial Sequence
  Description of Artificial Sequence: Synthetic oligonucleotide
  Sense strand starting at position 131 of SEQ ID NO: 317424
gguacaucucauugucauu

SEQ ID NO: 489760 - RNA, 19 nt, Artificial Sequence
  Description of Artificial Sequence: Synthetic oligonucleotide
  Antisense Strand to SEQ ID NO: 489759
aaugacaaugagauguacc

SEQ ID NO: 489761 - RNA, 19 nt, Artificial Sequence
  Description of Artificial Sequence: Synthetic oligonucleotide
  Sense strand starting at position 198 of SEQ ID NO: 317424
uuaucaccagcuggauaau

SEQ ID NO: 489762 - RNA, 19 nt, Artificial Sequence
  Description of Artificial Sequence: Synthetic oligonucleotide
  Antisense Strand to SEQ ID NO: 489761
auuauccagcuggugauaa

SEQ ID NO: 489763 - RNA, 19 nt, Artificial Sequence
  Description of Artificial Sequence: Synthetic oligonucleotide
  Sense strand starting at position 263 of SEQ ID NO: 317424
ccuaauacccacuaguguu

SEQ ID NO: 489764 - RNA, 19 nt, Artificial Sequence
  Description of Artificial Sequence: Synthetic oligonucleotide
  Antisense Strand to SEQ ID NO: 489763
aacacuaguggguauuagg

SEQ ID NO: 489765 - RNA, 19 nt, Artificial Sequence
  Description of Artificial Sequence: Synthetic oligonucleotide
  Sense strand starting at position 282 of SEQ ID NO: 317424
uugacaaacugugccuuau

SEQ ID NO: 489766 - RNA, 19 nt, Artificial Sequence
  Description of Artificial Sequence: Synthetic oligonucleotide
  Antisense Strand to SEQ ID NO: 489765
auaaggcacaguuugucaa

SEQ ID NO: 489767 - RNA, 19 nt, Artificial Sequence
  Description of Artificial Sequence: Synthetic oligonucleotide
  Sense strand starting at position 286 of SEQ ID NO: 317424
caaacugugccuuauggga

SEQ ID NO: 489768 - RNA, 19 nt, Artificial Sequence
  Description of Artificial Sequence: Synthetic oligonucleotide
  Antisense Strand to SEQ ID NO: 489767
ucccauaaggcacaguuug

SEQ ID NO: 489769 - RNA, 19 nt, Artificial Sequence
  Description of Artificial Sequence: Synthetic oligonucleotide
  Sense strand starting at position 497 of SEQ ID NO: 317424
uugcaaauggcuggacaaa

SEQ ID NO: 489770 - RNA, 19 nt, Artificial Sequence
  Description of Artificial Sequence: Synthetic oligonucleotide
  Antisense Strand to SEQ ID NO: 489769
uuuguccagccauuugcaa

SEQ ID NO: 489771 - RNA, 19 nt, Artificial Sequence
  Description of Artificial Sequence: Synthetic oligonucleotide
  Sense strand starting at position 498 of SEQ ID NO: 317424
ugcaaauggcuggacaaau

SEQ ID NO: 489772 - RNA, 19 nt, Artificial Sequence
  Description of Artificial Sequence: Synthetic oligonucleotide
  Antisense Strand to SEQ ID NO: 489771
auuuguccagccauuugca

SEQ ID NO: 489773 - RNA, 19 nt, Artificial Sequence
  Description of Artificial Sequence: Synthetic oligonucleotide
  Sense strand starting at position 595 of SEQ ID NO: 317424
ccuugcacucaauaguguu

SEQ ID NO: 489774 - RNA, 19 nt, Artificial Sequence
  Description of Artificial Sequence: Synthetic oligonucleotide
  Antisense Strand to SEQ ID NO: 489773
aacacuauugagugcaagg

SEQ ID NO: 489775 - RNA, 19 nt, Artificial Sequence
  Description of Artificial Sequence: Synthetic oligonucleotide
  Sense strand starting at position 611 of SEQ ID NO: 317424
guuagaaugcucuacuugu

SEQ ID NO: 489776 - RNA, 19 nt, Artificial Sequence
  Description of Artificial Sequence: Synthetic oligonucleotide
  Antisense Strand to SEQ ID NO: 489775
acaaguagagcauucuaac

SEQ ID NO: 489777 - RNA, 19 nt, Artificial Sequence
  Description of Artificial Sequence: Synthetic oligonucleotide
  Sense strand starting at position 826 of SEQ ID NO: 317424
aguuuagaaguuugaacuu

SEQ ID NO: 489778 - RNA, 19 nt, Artificial Sequence
  Description of Artificial Sequence: Synthetic oligonucleotide
  Antisense Strand to SEQ ID NO: 489777
aaguucaaacuucuaaacu

SEQ ID NO: 489779 - RNA, 19 nt, Artificial Sequence
  Description of Artificial Sequence: Synthetic oligonucleotide
  Sense strand starting at position 844 of SEQ ID NO: 317424
uguacagauagcugaguuu

SEQ ID NO: 489780 - RNA, 19 nt, Artificial Sequence
  Description of Artificial Sequence: Synthetic oligonucleotide
  Antisense Strand to SEQ ID NO: 489779
aaacucagcuaucuguaca

SEQ ID NO: 489781 - RNA, 19 nt, Artificial Sequence
  Description of Artificial Sequence: Synthetic oligonucleotide
  Sense strand starting at position 847 of SEQ ID NO: 317424
acagauagcugaguuucuu

SEQ ID NO: 489782 - RNA, 19 nt, Artificial Sequence
  Description of Artificial Sequence: Synthetic oligonucleotide
  Antisense Strand to SEQ ID NO: 489781
aagaaacucagcuaucugu

SEQ ID NO: 489783 - RNA, 19 nt, Artificial Sequence
  Description of Artificial Sequence: Synthetic oligonucleotide
  Sense strand starting at position 959 of SEQ ID NO: 317424
ugagaaaucuaugaaggga

SEQ ID NO: 489784 - RNA, 19 nt, Artificial Sequence
  Description of Artificial Sequence: Synthetic oligonucleotide
  Antisense Strand to SEQ ID NO: 489783
ucccuucauagauuucuca

SEQ ID NO: 489785 - RNA, 19 nt, Artificial Sequence
  Description of Artificial Sequence: Synthetic oligonucleotide
  Sense strand starting at position 1071 of SEQ ID NO: 317424
gagaauaagcuauguuaag

SEQ ID NO: 489786 - RNA, 19 nt, Artificial Sequence
  Description of Artificial Sequence: Synthetic oligonucleotide
  Antisense Strand to SEQ ID NO: 489785
cuuaacauagcuuauucuc

SEQ ID NO: 489787 - RNA, 19 nt, Artificial Sequence
  Description of Artificial Sequence: Synthetic oligonucleotide
  Sense strand starting at position 1072 of SEQ ID NO: 317424
agaauaagcuauguuaagu

SEQ ID NO: 489788 - RNA, 19 nt, Artificial Sequence
  Description of Artificial Sequence: Synthetic oligonucleotide
  Antisense Strand to SEQ ID NO: 489787
acuuaacauagcuuauucu

SEQ ID NO: 489789 - RNA, 19 nt, Artificial Sequence
  Description of Artificial Sequence: Synthetic oligonucleotide
  Sense strand starting at position 1108 of SEQ ID NO: 317424
agccacaucuagguggauu

SEQ ID NO: 489790 - RNA, 19 nt, Artificial Sequence
  Description of Artificial Sequence: Synthetic oligonucleotide
  Antisense Strand to SEQ ID NO: 489789
aauccaccuagauguggcu

SEQ ID NO: 489791 - RNA, 19 nt, Artificial Sequence
  Description of Artificial Sequence: Synthetic oligonucleotide
  Sense strand starting at position 1169 of SEQ ID NO: 317424
accuuaaugccuggugaag

SEQ ID NO: 489792 - RNA, 19 nt, Artificial Sequence
  Description of Artificial Sequence: Synthetic oligonucleotide
  Antisense Strand to SEQ ID NO: 489791
cuucaccaggcauuaaggu

SEQ ID NO: 489793 - RNA, 19 nt, Artificial Sequence
  Description of Artificial Sequence: Synthetic oligonucleotide
  Sense strand starting at position 1325 of SEQ ID NO: 317424
ugcaaaguacccugaacuu

SEQ ID NO: 489794 - RNA, 19 nt, Artificial Sequence
  Description of Artificial Sequence: Synthetic oligonucleotide
  Antisense Strand to SEQ ID NO: 489793
aaguucaggguacuuugca

SEQ ID NO: 489795 - RNA, 19 nt, Artificial Sequence
  Description of Artificial Sequence: Synthetic oligonucleotide
  Sense strand starting at position 1398 of SEQ ID NO: 317424
gcaaacacgcuaggauaau

SEQ ID NO: 489796 - RNA, 19 nt, Artificial Sequence
  Description of Artificial Sequence: Synthetic oligonucleotide
  Antisense Strand to SEQ ID NO: 489795
auuauccuagcguguuugc

SEQ ID NO: 489797 - RNA, 19 nt, Artificial Sequence
  Description of Artificial Sequence: Synthetic oligonucleotide
  Sense strand starting at position 1435 of SEQ ID NO: 317424
gagagaugcgcggaccagu

SEQ ID NO: 489798 - RNA, 19 nt, Artificial Sequence
  Description of Artificial Sequence: Synthetic oligonucleotide
  Antisense Strand to SEQ ID NO: 489797
acugguccgcgcaucucuc

SEQ ID NO: 489799 - RNA, 19 nt, Artificial Sequence
  Description of Artificial Sequence: Synthetic oligonucleotide
  Sense strand starting at position 1561 of SEQ ID NO: 317424
acgagauggcaaugaacuu

SEQ ID NO: 489800 - RNA, 19 nt, Artificial Sequence
  Description of Artificial Sequence: Synthetic oligonucleotide
  Antisense Strand to SEQ ID NO: 489799
aaguucauugccaucucgu

SEQ ID NO: 489801 - RNA, 19 nt, Artificial Sequence
  Description of Artificial Sequence: Synthetic oligonucleotide
  Sense strand starting at position 2785 of SEQ ID NO: 317424
cagggacucugggaaacaa

SEQ ID NO: 489802 - RNA, 19 nt, Artificial Sequence
  Description of Artificial Sequence: Synthetic oligonucleotide
  Antisense Strand to SEQ ID NO: 489801
uuguuucccagagucccug

SEQ ID NO: 489803 - RNA, 19 nt, Artificial Sequence
  Description of Artificial Sequence: Synthetic oligonucleotide
  Sense strand starting at position 2814 of SEQ ID NO: 317424
gugcccucccgggauuaaa

SEQ ID NO: 489804 - RNA, 19 nt, Artificial Sequence
  Description of Artificial Sequence: Synthetic oligonucleotide
  Antisense Strand to SEQ ID NO: 489803
uuuaaucccgggagggcac

SEQ ID NO: 489805 - RNA, 19 nt, Artificial Sequence
  Description of Artificial Sequence: Synthetic oligonucleotide
  Sense strand starting at position 2852 of SEQ ID NO: 317424
uaaccaauugcgggaguga

SEQ ID NO: 489806 - RNA, 19 nt, Artificial Sequence
  Description of Artificial Sequence: Synthetic oligonucleotide
  Antisense Strand to SEQ ID NO: 489805
ucacucccgcaauugguua

SEQ ID NO: 489807 - RNA, 19 nt, Artificial Sequence
  Description of Artificial Sequence: Synthetic oligonucleotide
  Sense strand starting at position 3043 of SEQ ID NO: 317424
gagcucgcucccuaagacu

SEQ ID NO: 489808 - RNA, 19 nt, Artificial Sequence
  Description of Artificial Sequence: Synthetic oligonucleotide
  Antisense Strand to SEQ ID NO: 489807
agucuuagggagcgagcuc

SEQ ID NO: 489809 - RNA, 19 nt, Artificial Sequence
  Description of Artificial Sequence: Synthetic oligonucleotide
  Sense strand starting at position 3251 of SEQ ID NO: 317424
gguggcaucuuucuggauu

SEQ ID NO: 489810 - RNA, 19 nt, Artificial Sequence
  Description of Artificial Sequence: Synthetic oligonucleotide
  Antisense Strand to SEQ ID NO: 489809
aauccagaaagaugccacc

SEQ ID NO: 489811 - RNA, 19 nt, Artificial Sequence
  Description of Artificial Sequence: Synthetic oligonucleotide
  Sense strand starting at position 3455 of SEQ ID NO: 317424
aggaaaguguaaguaaagu

SEQ ID NO: 489812 - RNA, 19 nt, Artificial Sequence
  Description of Artificial Sequence: Synthetic oligonucleotide
  Antisense Strand to SEQ ID NO: 489811
acuuuacuuacacuuuccu

SEQ ID NO: 489813 - RNA, 19 nt, Artificial Sequence
  Description of Artificial Sequence: Synthetic oligonucleotide
  Sense strand starting at position 3494 of SEQ ID NO: 317424
cguacaugguccucaacua

SEQ ID NO: 489814 - RNA, 19 nt, Artificial Sequence
  Description of Artificial Sequence: Synthetic oligonucleotide
  Antisense Strand to SEQ ID NO: 489813
uaguugaggaccauguacg

SEQ ID NO: 489815 - RNA, 19 nt, Artificial Sequence
  Description of Artificial Sequence: Synthetic oligonucleotide
  Sense strand starting at position 3495 of SEQ ID NO: 317424
guacaugguccucaacuaa

SEQ ID NO: 489816 - RNA, 19 nt, Artificial Sequence
  Description of Artificial Sequence: Synthetic oligonucleotide
  Antisense Strand to SEQ ID NO: 489815
uuaguugaggaccauguac

SEQ ID NO: 489817 - RNA, 19 nt, Artificial Sequence
  Description of Artificial Sequence: Synthetic oligonucleotide
  Sense strand starting at position 3629 of SEQ ID NO: 317424
uuagauuagggcugucuua

SEQ ID NO: 489818 - RNA, 19 nt, Artificial Sequence
  Description of Artificial Sequence: Synthetic oligonucleotide
  Antisense Strand to SEQ ID NO: 489817
uaagacagcccuaaucuaa

SEQ ID NO: 489819 - RNA, 19 nt, Artificial Sequence
  Description of Artificial Sequence: Synthetic oligonucleotide
  Sense strand starting at position 3754 of SEQ ID NO: 317424
cuauucuuuacggaggagu

SEQ ID NO: 489820 - RNA, 19 nt, Artificial Sequence
  Description of Artificial Sequence: Synthetic oligonucleotide
  Antisense Strand to SEQ ID NO: 489819
acuccuccguaaagaauag

SEQ ID NO: 489821 - RNA, 19 nt, Artificial Sequence
  Description of Artificial Sequence: Synthetic oligonucleotide
  Sense strand starting at position 3756 of SEQ ID NO: 317424
auucuuuacggaggaguua

SEQ ID NO: 489822 - RNA, 19 nt, Artificial Sequence
  Description of Artificial Sequence: Synthetic oligonucleotide
  Antisense Strand to SEQ ID NO: 489821
uaacuccuccguaaagaau

SEQ ID NO: 489823 - RNA, 19 nt, Artificial Sequence
  Description of Artificial Sequence: Synthetic oligonucleotide
  Sense strand starting at position 3764 of SEQ ID NO: 317424
cggaggaguuagucgauuu

SEQ ID NO: 489824 - RNA, 19 nt, Artificial Sequence
  Description of Artificial Sequence: Synthetic oligonucleotide
  Antisense Strand to SEQ ID NO: 489823
aaaucgacuaacuccuccg

SEQ ID NO: 489825 - RNA, 19 nt, Artificial Sequence
  Description of Artificial Sequence: Synthetic oligonucleotide
  Sense strand starting at position 3785 of SEQ ID NO: 317424
gguauugugcuagauacug

SEQ ID NO: 489826 - RNA, 19 nt, Artificial Sequence
  Description of Artificial Sequence: Synthetic oligonucleotide
  Antisense Strand to SEQ ID NO: 489825
caguaucuagcacaauacc

SEQ ID NO: 489827 - RNA, 19 nt, Artificial Sequence
  Description of Artificial Sequence: Synthetic oligonucleotide
  Sense strand starting at position 3793 of SEQ ID NO: 317424
gcuagauacuguccuuaua

SEQ ID NO: 489828 - RNA, 19 nt, Artificial Sequence
  Description of Artificial Sequence: Synthetic oligonucleotide
  Antisense Strand to SEQ ID NO: 489827
uauaaggacaguaucuagc

SEQ ID NO: 489829 - RNA, 19 nt, Artificial Sequence
  Description of Artificial Sequence: Synthetic oligonucleotide
  Sense strand starting at position 3815 of SEQ ID NO: 317424
uguugcuaauuugcucaaa

SEQ ID NO: 489830 - RNA, 19 nt, Artificial Sequence
  Description of Artificial Sequence: Synthetic oligonucleotide
  Antisense Strand to SEQ ID NO: 489829
uuugagcaaauuagcaaca

SEQ ID NO: 489831 - RNA, 19 nt, Artificial Sequence
  Description of Artificial Sequence: Synthetic oligonucleotide
  Sense strand starting at position 3841 of SEQ ID NO: 317424
cagggcaaagauuguuaaa

SEQ ID NO: 489832 - RNA, 19 nt, Artificial Sequence
  Description of Artificial Sequence: Synthetic oligonucleotide
  Antisense Strand to SEQ ID NO: 489831
uuuaacaaucuuugcccug

SEQ ID NO: 489833 - RNA, 19 nt, Artificial Sequence
  Description of Artificial Sequence: Synthetic oligonucleotide
  Sense strand starting at position 3843 of SEQ ID NO: 317424
gggcaaagauuguuaaauc

SEQ ID NO: 489834 - RNA, 19 nt, Artificial Sequence
  Description of Artificial Sequence: Synthetic oligonucleotide
  Antisense Strand to SEQ ID NO: 489833
gauuuaacaaucuuugccc

SEQ ID NO: 489835 - RNA, 19 nt, Artificial Sequence
  Description of Artificial Sequence: Synthetic oligonucleotide
  Sense strand starting at position 3983 of SEQ ID NO: 317424
auucuuugucauugaguag

SEQ ID NO: 489836 - RNA, 19 nt, Artificial Sequence
  Description of Artificial Sequence: Synthetic oligonucleotide
  Antisense Strand to SEQ ID NO: 489835
cuacucaaugacaaagaau

SEQ ID NO: 489837 - RNA, 19 nt, Artificial Sequence
  Description of Artificial Sequence: Synthetic oligonucleotide
  Sense strand starting at position 327 of SEQ ID NO: 317425
gcacccaucugacuuugua

SEQ ID NO: 489838 - RNA, 19 nt, Artificial Sequence
  Description of Artificial Sequence: Synthetic oligonucleotide
  Antisense Strand to SEQ ID NO: 489837
uacaaagucagaugggugc

SEQ ID NO: 489839 - RNA, 19 nt, Artificial Sequence
  Description of Artificial Sequence: Synthetic oligonucleotide
  Sense strand starting at position 410 of SEQ ID NO: 317425
ccaggucaauaguucucaa

SEQ ID NO: 489840 - RNA, 19 nt, Artificial Sequence
  Description of Artificial Sequence: Synthetic oligonucleotide
  Antisense Strand to SEQ ID NO: 489839
uugagaacuauugaccugg

SEQ ID NO: 489841 - RNA, 19 nt, Artificial Sequence
  Description of Artificial Sequence: Synthetic oligonucleotide
  Sense strand starting at position 413 of SEQ ID NO: 317425
ggucaauaguucucaaugu

SEQ ID NO: 489842 - RNA, 19 nt, Artificial Sequence
  Description of Artificial Sequence: Synthetic oligonucleotide
  Antisense Strand to SEQ ID NO: 489841
acauugagaacuauugacc

SEQ ID NO: 489843 - RNA, 19 nt, Artificial Sequence
  Description of Artificial Sequence: Synthetic oligonucleotide
  Sense strand starting at position 811 of SEQ ID NO: 317425
acagaagcucuuugggcua

SEQ ID NO: 489844 - RNA, 19 nt, Artificial Sequence
  Description of Artificial Sequence: Synthetic oligonucleotide
  Antisense Strand to SEQ ID NO: 489843
uagcccaaagagcuucugu

SEQ ID NO: 489845 - RNA, 19 nt, Artificial Sequence
  Description of Artificial Sequence: Synthetic oligonucleotide
  Sense strand starting at position 860 of SEQ ID NO: 317425
uccaucaaaguuugggaau

SEQ ID NO: 489846 - RNA, 19 nt, Artificial Sequence
  Description of Artificial Sequence: Synthetic oligonucleotide
  Antisense Strand to SEQ ID NO: 489845
auucccaaacuuugaugga

SEQ ID NO: 489847 - RNA, 19 nt, Artificial Sequence
  Description of Artificial Sequence: Synthetic oligonucleotide
  Sense strand starting at position 1005 of SEQ ID NO: 317425
auucguauaauccaguguu

SEQ ID NO: 489848 - RNA, 19 nt, Artificial Sequence
  Description of Artificial Sequence: Synthetic oligonucleotide
  Antisense Strand to SEQ ID NO: 489847
aacacuggauuauacgaau

SEQ ID NO: 489849 - RNA, 19 nt, Artificial Sequence
  Description of Artificial Sequence: Synthetic oligonucleotide
  Sense strand starting at position 1182 of SEQ ID NO: 317425
gcaccuuaacuaugagcaa

SEQ ID NO: 489850 - RNA, 19 nt, Artificial Sequence
  Description of Artificial Sequence: Synthetic oligonucleotide
  Antisense Strand to SEQ ID NO: 489849
uugcucauaguuaaggugc

SEQ ID NO: 489851 - RNA, 19 nt, Artificial Sequence
  Description of Artificial Sequence: Synthetic oligonucleotide
  Sense strand starting at position 1229 of SEQ ID NO: 317425
ucaguuugugaacagauuc

SEQ ID NO: 489852 - RNA, 19 nt, Artificial Sequence
  Description of Artificial Sequence: Synthetic oligonucleotide
  Antisense Strand to SEQ ID NO: 489851
gaaucuguucacaaacuga

SEQ ID NO: 489853 - RNA, 19 nt, Artificial Sequence
  Description of Artificial Sequence: Synthetic oligonucleotide
  Sense strand starting at position 1254 of SEQ ID NO: 317425
gaagcucugccucaagaag

SEQ ID NO: 489854 - RNA, 19 nt, Artificial Sequence
  Description of Artificial Sequence: Synthetic oligonucleotide
  Antisense Strand to SEQ ID NO: 489853
cuucuugaggcagagcuuc

SEQ ID NO: 489855 - RNA, 19 nt, Artificial Sequence
  Description of Artificial Sequence: Synthetic oligonucleotide
  Sense strand starting at position 2215 of SEQ ID NO: 317425
cuaucuccucugcagaaga

SEQ ID NO: 489856 - RNA, 19 nt, Artificial Sequence
  Description of Artificial Sequence: Synthetic oligonucleotide
  Antisense Strand to SEQ ID NO: 489855
ucuucugcagaggagauag

SEQ ID NO: 489857 - RNA, 19 nt, Artificial Sequence
  Description of Artificial Sequence: Synthetic oligonucleotide
  Sense strand starting at position 2260 of SEQ ID NO: 317425
agauuccuuccuggaugaa

SEQ ID NO: 489858 - RNA, 19 nt, Artificial Sequence
  Description of Artificial Sequence: Synthetic oligonucleotide
  Antisense Strand to SEQ ID NO: 489857
uucauccaggaaggaaucu

SEQ ID NO: 489859 - RNA, 19 nt, Artificial Sequence
  Description of Artificial Sequence: Synthetic oligonucleotide
  Sense strand starting at position 2263 of SEQ ID NO: 317425
uuccuuccuggaugaagau

SEQ ID NO: 489860 - RNA, 19 nt, Artificial Sequence
  Description of Artificial Sequence: Synthetic oligonucleotide
  Antisense Strand to SEQ ID NO: 489859
aucuucauccaggaaggaa

SEQ ID NO: 489861 - RNA, 19 nt, Artificial Sequence
  Description of Artificial Sequence: Synthetic oligonucleotide
  Sense strand starting at position 2310 of SEQ ID NO: 317425
ugcauuuagcucugagcag

SEQ ID NO: 489862 - RNA, 19 nt, Artificial Sequence
  Description of Artificial Sequence: Synthetic oligonucleotide
  Antisense Strand to SEQ ID NO: 489861
cugcucagagcuaaaugca

SEQ ID NO: 489863 - RNA, 19 nt, Artificial Sequence
  Description of Artificial Sequence: Synthetic oligonucleotide
  Sense strand starting at position 2362 of SEQ ID NO: 317425
cuuuguaacccucagaagu

SEQ ID NO: 489864 - RNA, 19 nt, Artificial Sequence
  Description of Artificial Sequence: Synthetic oligonucleotide
  Antisense Strand to SEQ ID NO: 489863
acuucugaggguuacaaag

SEQ ID NO: 489865 - RNA, 19 nt, Artificial Sequence
  Description of Artificial Sequence: Synthetic oligonucleotide
  Sense strand starting at position 2370 of SEQ ID NO: 317425
cccucagaaguuuaaguca

SEQ ID NO: 489866 - RNA, 19 nt, Artificial Sequence
  Description of Artificial Sequence: Synthetic oligonucleotide
  Antisense Strand to SEQ ID NO: 489865
ugacuuaaacuucugaggg

SEQ ID NO: 489867 - RNA, 19 nt, Artificial Sequence
  Description of Artificial Sequence: Synthetic oligonucleotide
  Sense strand starting at position 2373 of SEQ ID NO: 317425
ucagaaguuuaagucacuu

SEQ ID NO: 489868 - RNA, 19 nt, Artificial Sequence
  Description of Artificial Sequence: Synthetic oligonucleotide
  Antisense Strand to SEQ ID NO: 489867
aagugacuuaaacuucuga

SEQ ID NO: 489869 - RNA, 19 nt, Artificial Sequence
  Description of Artificial Sequence: Synthetic oligonucleotide
  Sense strand starting at position 2377 of SEQ ID NO: 317425
aaguuuaagucacuugguu

SEQ ID NO: 489870 - RNA, 19 nt, Artificial Sequence
  Description of Artificial Sequence: Synthetic oligonucleotide
  Antisense Strand to SEQ ID NO: 489869
aaccaagugacuuaaacuu

SEQ ID NO: 489871 - RNA, 19 nt, Artificial Sequence
  Description of Artificial Sequence: Synthetic oligonucleotide
  Sense strand starting at position 2381 of SEQ ID NO: 317425
uuaagucacuugguuauca

SEQ ID NO: 489872 - RNA, 19 nt, Artificial Sequence
  Description of Artificial Sequence: Synthetic oligonucleotide
  Antisense Strand to SEQ ID NO: 489871
ugauaaccaagugacuuaa

SEQ ID NO: 489873 - RNA, 19 nt, Artificial Sequence
  Description of Artificial Sequence: Synthetic oligonucleotide
  Sense strand starting at position 2383 of SEQ ID NO: 317425
aagucacuugguuaucagu

SEQ ID NO: 489874 - RNA, 19 nt, Artificial Sequence
  Description of Artificial Sequence: Synthetic oligonucleotide
  Antisense Strand to SEQ ID NO: 489873
acugauaaccaagugacuu

SEQ ID NO: 489875 - RNA, 19 nt, Artificial Sequence
  Description of Artificial Sequence: Synthetic oligonucleotide
  Sense strand starting at position 2408 of SEQ ID NO: 317425
guaucagucuucccacuag

SEQ ID NO: 489876 - RNA, 19 nt, Artificial Sequence
  Description of Artificial Sequence: Synthetic oligonucleotide
  Antisense Strand to SEQ ID NO: 489875
cuagugggaagacugauac

SEQ ID NO: 489877 - RNA, 19 nt, Artificial Sequence
  Description of Artificial Sequence: Synthetic oligonucleotide
  Sense strand starting at position 2578 of SEQ ID NO: 317425
cuccaugaccagugacauc

SEQ ID NO: 489878 - RNA, 19 nt, Artificial Sequence
  Description of Artificial Sequence: Synthetic oligonucleotide
  Antisense Strand to SEQ ID NO: 489877
gaugucacuggucauggag

SEQ ID NO: 489879 - RNA, 19 nt, Artificial Sequence
  Description of Artificial Sequence: Synthetic oligonucleotide
  Sense strand starting at position 2589 of SEQ ID NO: 317425
gugacaucaaguggguagu

SEQ ID NO: 489880 - RNA, 19 nt, Artificial Sequence
  Description of Artificial Sequence: Synthetic oligonucleotide
  Antisense Strand to SEQ ID NO: 489879
acuacccacuugaugucac

SEQ ID NO: 489881 - RNA, 19 nt, Artificial Sequence
  Description of Artificial Sequence: Synthetic oligonucleotide
  Sense strand starting at position 2592 of SEQ ID NO: 317425
acaucaaguggguaguuua

SEQ ID NO: 489882 - RNA, 19 nt, Artificial Sequence
  Description of Artificial Sequence: Synthetic oligonucleotide
  Antisense Strand to SEQ ID NO: 489881
uaaacuacccacuugaugu

SEQ ID NO: 489883 - RNA, 19 nt, Artificial Sequence
  Description of Artificial Sequence: Synthetic oligonucleotide
  Sense strand starting at position 2629 of SEQ ID NO: 317425
cuaguugcacaauggaaau

SEQ ID NO: 489884 - RNA, 19 nt, Artificial Sequence
  Description of Artificial Sequence: Synthetic oligonucleotide
  Antisense Strand to SEQ ID NO: 489883
auuuccauugugcaacuag

SEQ ID NO: 489885 - RNA, 19 nt, Artificial Sequence
  Description of Artificial Sequence: Synthetic oligonucleotide
  Sense strand starting at position 2684 of SEQ ID NO: 317425
gugagaggagcugguuauu

SEQ ID NO: 489886 - RNA, 19 nt, Artificial Sequence
  Description of Artificial Sequence: Synthetic oligonucleotide
  Antisense Strand to SEQ ID NO: 489885
aauaaccagcuccucucac

SEQ ID NO: 489887 - RNA, 19 nt, Artificial Sequence
  Description of Artificial Sequence: Synthetic oligonucleotide
  Sense strand starting at position 2689 of SEQ ID NO: 317425
aggagcugguuauuaaaca

SEQ ID NO: 489888 - RNA, 19 nt, Artificial Sequence
  Description of Artificial Sequence: Synthetic oligonucleotide
  Antisense Strand to SEQ ID NO: 489887
uguuuaauaaccagcuccu

SEQ ID NO: 489889 - RNA, 19 nt, Artificial Sequence
  Description of Artificial Sequence: Synthetic oligonucleotide
  Sense strand starting at position 2747 of SEQ ID NO: 317425
auuccagaccucugugaaa

SEQ ID NO: 489890 - RNA, 19 nt, Artificial Sequence
  Description of Artificial Sequence: Synthetic oligonucleotide
  Antisense Strand to SEQ ID NO: 489889
uuucacagaggucuggaau

SEQ ID NO: 489891 - RNA, 19 nt, Artificial Sequence
  Description of Artificial Sequence: Synthetic oligonucleotide
  Sense strand starting at position 2822 of SEQ ID NO: 317425
uuuggacuuaaaggguaua

SEQ ID NO: 489892 - RNA, 19 nt, Artificial Sequence
  Description of Artificial Sequence: Synthetic oligonucleotide
  Antisense Strand to SEQ ID NO: 489891
uauacccuuuaaguccaaa

SEQ ID NO: 489893 - RNA, 19 nt, Artificial Sequence
  Description of Artificial Sequence: Synthetic oligonucleotide
  Sense strand starting at position 2859 of SEQ ID NO: 317425
auaugaucccacgauguga

SEQ ID NO: 489894 - RNA, 19 nt, Artificial Sequence
  Description of Artificial Sequence: Synthetic oligonucleotide
  Antisense Strand to SEQ ID NO: 489893
ucacaucgugggaucauau

SEQ ID NO: 489895 - RNA, 19 nt, Artificial Sequence
  Description of Artificial Sequence: Synthetic oligonucleotide
  Sense strand starting at position 2880 of SEQ ID NO: 317425
cugauaagaucagagacaa

SEQ ID NO: 489896 - RNA, 19 nt, Artificial Sequence
  Description of Artificial Sequence: Synthetic oligonucleotide
  Antisense Strand to SEQ ID NO: 489895
uugucucugaucuuaucag

SEQ ID NO: 489897 - RNA, 19 nt, Artificial Sequence
  Description of Artificial Sequence: Synthetic oligonucleotide
  Sense strand starting at position 3006 of SEQ ID NO: 317425
cagacaggugcgugagaua

SEQ ID NO: 489898 - RNA, 19 nt, Artificial Sequence
  Description of Artificial Sequence: Synthetic oligonucleotide
  Antisense Strand to SEQ ID NO: 489897
uaucucacgcaccugucug

SEQ ID NO: 489899 - RNA, 19 nt, Artificial Sequence
  Description of Artificial Sequence: Synthetic oligonucleotide
  Sense strand starting at position 3027 of SEQ ID NO: 317425
aagacugcugaauguuaca

SEQ ID NO: 489900 - RNA, 19 nt, Artificial Sequence
  Description of Artificial Sequence: Synthetic oligonucleotide
  Antisense Strand to SEQ ID NO: 489899
uguaacauucagcagucuu

SEQ ID NO: 489901 - RNA, 19 nt, Artificial Sequence
  Description of Artificial Sequence: Synthetic oligonucleotide
  Sense strand starting at position 3463 of SEQ ID NO: 317425
ccaggcaggcuuuauacau

SEQ ID NO: 489902 - RNA, 19 nt, Artificial Sequence
  Description of Artificial Sequence: Synthetic oligonucleotide
  Antisense Strand to SEQ ID NO: 489901
auguauaaagccugccugg

SEQ ID NO: 489903 - RNA, 19 nt, Artificial Sequence
  Description of Artificial Sequence: Synthetic oligonucleotide
  Sense strand starting at position 3593 of SEQ ID NO: 317425
ucugguaucccugauggag

SEQ ID NO: 489904 - RNA, 19 nt, Artificial Sequence
  Description of Artificial Sequence: Synthetic oligonucleotide
  Antisense Strand to SEQ ID NO: 489903
cuccaucagggauaccaga

SEQ ID NO: 489905 - RNA, 19 nt, Artificial Sequence
  Description of Artificial Sequence: Synthetic oligonucleotide
  Sense strand starting at position 3636 of SEQ ID NO: 317425
uggcacuucuggucaccaa

SEQ ID NO: 489906 - RNA, 19 nt, Artificial Sequence
  Description of Artificial Sequence: Synthetic oligonucleotide
  Antisense Strand to SEQ ID NO: 489905
uuggugaccagaagugcca

SEQ ID NO: 489907 - RNA, 19 nt, Artificial Sequence
  Description of Artificial Sequence: Synthetic oligonucleotide
  Sense strand starting at position 3637 of SEQ ID NO: 317425
ggcacuucuggucaccaaa

SEQ ID NO: 489908 - RNA, 19 nt, Artificial Sequence
  Description of Artificial Sequence: Synthetic oligonucleotide
  Antisense Strand to SEQ ID NO: 489907
uuuggugaccagaagugcc

SEQ ID NO: 489909 - RNA, 19 nt, Artificial Sequence
  Description of Artificial Sequence: Synthetic oligonucleotide
  Sense strand starting at position 3663 of SEQ ID NO: 317425
cagacucuugcagggauua

SEQ ID NO: 489910 - RNA, 19 nt, Artificial Sequence
  Description of Artificial Sequence: Synthetic oligonucleotide
  Antisense Strand to SEQ ID NO: 489909
uaaucccugcaagagucug

SEQ ID NO: 489911 - RNA, 19 nt, Artificial Sequence
  Description of Artificial Sequence: Synthetic oligonucleotide
  Sense strand starting at position 3664 of SEQ ID NO: 317425
agacucuugcagggauuau

SEQ ID NO: 489912 - RNA, 19 nt, Artificial Sequence
  Description of Artificial Sequence: Synthetic oligonucleotide
  Antisense Strand to SEQ ID NO: 489911
auaaucccugcaagagucu

SEQ ID NO: 489913 - RNA, 19 nt, Artificial Sequence
  Description of Artificial Sequence: Synthetic oligonucleotide
  Sense strand starting at position 3675 of SEQ ID NO: 317425
gggauuauaaacugugcca

SEQ ID NO: 489914 - RNA, 19 nt, Artificial Sequence
  Description of Artificial Sequence: Synthetic oligonucleotide
  Antisense Strand to SEQ ID NO: 489913
uggcacaguuuauaauccc

SEQ ID NO: 489915 - RNA, 19 nt, Artificial Sequence
  Description of Artificial Sequence: Synthetic oligonucleotide
  Sense strand starting at position 3771 of SEQ ID NO: 317425
ucugcuuucugaucuaaug

SEQ ID NO: 489916 - RNA, 19 nt, Artificial Sequence
  Description of Artificial Sequence: Synthetic oligonucleotide
  Antisense Strand to SEQ ID NO: 489915
cauuagaucagaaagcaga

SEQ ID NO: 489917 - RNA, 19 nt, Artificial Sequence
  Description of Artificial Sequence: Synthetic oligonucleotide
  Sense strand starting at position 70 of SEQ ID NO: 317426
uuugaaauccaguguguuc

SEQ ID NO: 489918 - RNA, 19 nt, Artificial Sequence
  Description of Artificial Sequence: Synthetic oligonucleotide
  Antisense Strand to SEQ ID NO: 489917
gaacacacuggauuucaaa

SEQ ID NO: 489919 - RNA, 19 nt, Artificial Sequence
  Description of Artificial Sequence: Synthetic oligonucleotide
  Sense strand starting at position 72 of SEQ ID NO: 317426
ugaaauccaguguguucuu

SEQ ID NO: 489920 - RNA, 19 nt, Artificial Sequence
  Description of Artificial Sequence: Synthetic oligonucleotide
  Antisense Strand to SEQ ID NO: 489919
aagaacacacuggauuuca

SEQ ID NO: 489921 - RNA, 19 nt, Artificial Sequence
  Description of Artificial Sequence: Synthetic oligonucleotide
  Sense strand starting at position 73 of SEQ ID NO: 317426
gaaauccaguguguucuuu

SEQ ID NO: 489922 - RNA, 19 nt, Artificial Sequence
  Description of Artificial Sequence: Synthetic oligonucleotide
  Antisense Strand to SEQ ID NO: 489921
aaagaacacacuggauuuc

SEQ ID NO: 489923 - RNA, 19 nt, Artificial Sequence
  Description of Artificial Sequence: Synthetic oligonucleotide
  Sense strand starting at position 79 of SEQ ID NO: 317426
caguguguucuuuauacug

SEQ ID NO: 489924 - RNA, 19 nt, Artificial Sequence
  Description of Artificial Sequence: Synthetic oligonucleotide
  Antisense Strand to SEQ ID NO: 489923
caguauaaagaacacacug

SEQ ID NO: 489925 - RNA, 19 nt, Artificial Sequence
  Description of Artificial Sequence: Synthetic oligonucleotide
  Sense strand starting at position 183 of SEQ ID NO: 317426
guuuccucauagucucaaa

SEQ ID NO: 489926 - RNA, 19 nt, Artificial Sequence
  Description of Artificial Sequence: Synthetic oligonucleotide
  Antisense Strand to SEQ ID NO: 489925
uuugagacuaugaggaaac

SEQ ID NO: 489927 - RNA, 19 nt, Artificial Sequence
  Description of Artificial Sequence: Synthetic oligonucleotide
  Sense strand starting at position 346 of SEQ ID NO: 317426
gcagaauaugcaggaguca

SEQ ID NO: 489928 - RNA, 19 nt, Artificial Sequence
  Description of Artificial Sequence: Synthetic oligonucleotide
  Antisense Strand to SEQ ID NO: 489927
ugacuccugcauauucugc

SEQ ID NO: 489929 - RNA, 19 nt, Artificial Sequence
  Description of Artificial Sequence: Synthetic oligonucleotide
  Sense strand starting at position 387 of SEQ ID NO: 317426
aagguuuaguuauucugaa

SEQ ID NO: 489930 - RNA, 19 nt, Artificial Sequence
  Description of Artificial Sequence: Synthetic oligonucleotide
  Antisense Strand to SEQ ID NO: 489929
uucagaauaacuaaaccuu

SEQ ID NO: 489931 - RNA, 19 nt, Artificial Sequence
  Description of Artificial Sequence: Synthetic oligonucleotide
  Sense strand starting at position 388 of SEQ ID NO: 317426
agguuuaguuauucugaau

SEQ ID NO: 489932 - RNA, 19 nt, Artificial Sequence
  Description of Artificial Sequence: Synthetic oligonucleotide
  Antisense Strand to SEQ ID NO: 489931
auucagaauaacuaaaccu

SEQ ID NO: 489933 - RNA, 19 nt, Artificial Sequence
  Description of Artificial Sequence: Synthetic oligonucleotide
  Sense strand starting at position 406 of SEQ ID NO: 317426
uuuaaucugucaguguuau

SEQ ID NO: 489934 - RNA, 19 nt, Artificial Sequence
  Description of Artificial Sequence: Synthetic oligonucleotide
  Antisense Strand to SEQ ID NO: 489933
auaacacugacagauuaaa

SEQ ID NO: 489935 - RNA, 19 nt, Artificial Sequence
  Description of Artificial Sequence: Synthetic oligonucleotide
  Sense strand starting at position 511 of SEQ ID NO: 317426
guggcuauuucuuauuuaa

SEQ ID NO: 489936 - RNA, 19 nt, Artificial Sequence
  Description of Artificial Sequence: Synthetic oligonucleotide
  Antisense Strand to SEQ ID NO: 489935
uuaaauaagaaauagccac

SEQ ID NO: 489937 - RNA, 19 nt, Artificial Sequence
  Description of Artificial Sequence: Synthetic oligonucleotide
  Sense strand starting at position 569 of SEQ ID NO: 317426
gggagugaccuaugcuaau

SEQ ID NO: 489938 - RNA, 19 nt, Artificial Sequence
  Description of Artificial Sequence: Synthetic oligonucleotide
  Antisense Strand to SEQ ID NO: 489937
auuagcauaggucacuccc

SEQ ID NO: 489939 - RNA, 19 nt, Artificial Sequence
  Description of Artificial Sequence: Synthetic oligonucleotide
  Sense strand starting at position 580 of SEQ ID NO: 317426
augcuaauuggccacucaa

SEQ ID NO: 489940 - RNA, 19 nt, Artificial Sequence
  Description of Artificial Sequence: Synthetic oligonucleotide
  Antisense Strand to SEQ ID NO: 489939
uugaguggccaauuagcau

SEQ ID NO: 489941 - RNA, 19 nt, Artificial Sequence
  Description of Artificial Sequence: Synthetic oligonucleotide
  Sense strand starting at position 591 of SEQ ID NO: 317426
ccacucaagaguggucaga

SEQ ID NO: 489942 - RNA, 19 nt, Artificial Sequence
  Description of Artificial Sequence: Synthetic oligonucleotide
  Antisense Strand to SEQ ID NO: 489941
ucugaccacucuugagugg

SEQ ID NO: 489943 - RNA, 19 nt, Artificial Sequence
  Description of Artificial Sequence: Synthetic oligonucleotide
  Sense strand starting at position 593 of SEQ ID NO: 317426
acucaagaguggucagaug

SEQ ID NO: 489944 - RNA, 19 nt, Artificial Sequence
  Description of Artificial Sequence: Synthetic oligonucleotide
  Antisense Strand to SEQ ID NO: 489943
caucugaccacucuugagu

SEQ ID NO: 489945 - RNA, 19 nt, Artificial Sequence
  Description of Artificial Sequence: Synthetic oligonucleotide
  Sense strand starting at position 761 of SEQ ID NO: 317426
ugcaauaggcccugcaaau

SEQ ID NO: 489946 - RNA, 19 nt, Artificial Sequence
  Description of Artificial Sequence: Synthetic oligonucleotide
  Antisense Strand to SEQ ID NO: 489945
auuugcagggccuauugca

SEQ ID NO: 489947 - RNA, 19 nt, Artificial Sequence
  Description of Artificial Sequence: Synthetic oligonucleotide
  Sense strand starting at position 912 of SEQ ID NO: 317426
ugaccuuuaucagcaagcu

SEQ ID NO: 489948 - RNA, 19 nt, Artificial Sequence
  Description of Artificial Sequence: Synthetic oligonucleotide
  Antisense Strand to SEQ ID NO: 489947
agcuugcugauaaagguca

SEQ ID NO: 489949 - RNA, 19 nt, Artificial Sequence
  Description of Artificial Sequence: Synthetic oligonucleotide
  Sense strand starting at position 987 of SEQ ID NO: 317426
caagcacuucucgagaaag

SEQ ID NO: 489950 - RNA, 19 nt, Artificial Sequence
  Description of Artificial Sequence: Synthetic oligonucleotide
  Antisense Strand to SEQ ID NO: 489949
cuuucucgagaagugcuug

SEQ ID NO: 489951 - RNA, 19 nt, Artificial Sequence
  Description of Artificial Sequence: Synthetic oligonucleotide
  Sense strand starting at position 989 of SEQ ID NO: 317426
agcacuucucgagaaaggu

SEQ ID NO: 489952 - RNA, 19 nt, Artificial Sequence
  Description of Artificial Sequence: Synthetic oligonucleotide
  Antisense Strand to SEQ ID NO: 489951
accuuucucgagaagugcu

SEQ ID NO: 489953 - RNA, 19 nt, Artificial Sequence
  Description of Artificial Sequence: Synthetic oligonucleotide
  Sense strand starting at position 1227 of SEQ ID NO: 317426
agaacaauucucugaugug

SEQ ID NO: 489954 - RNA, 19 nt, Artificial Sequence
  Description of Artificial Sequence: Synthetic oligonucleotide
  Antisense Strand to SEQ ID NO: 489953
cacaucagagaauuguucu

SEQ ID NO: 489955 - RNA, 19 nt, Artificial Sequence
  Description of Artificial Sequence: Synthetic oligonucleotide
  Sense strand starting at position 1359 of SEQ ID NO: 317426
aacacauaguuugcagagu

SEQ ID NO: 489956 - RNA, 19 nt, Artificial Sequence
  Description of Artificial Sequence: Synthetic oligonucleotide
  Antisense Strand to SEQ ID NO: 489955
acucugcaaacuauguguu

SEQ ID NO: 489957 - RNA, 19 nt, Artificial Sequence
  Description of Artificial Sequence: Synthetic oligonucleotide
  Sense strand starting at position 1402 of SEQ ID NO: 317426
ugcaaaugguugcuaugaa

SEQ ID NO: 489958 - RNA, 19 nt, Artificial Sequence
  Description of Artificial Sequence: Synthetic oligonucleotide
  Antisense Strand to SEQ ID NO: 489957
uucauagcaaccauuugca

SEQ ID NO: 489959 - RNA, 19 nt, Artificial Sequence
  Description of Artificial Sequence: Synthetic oligonucleotide
  Sense strand starting at position 1435 of SEQ ID NO: 317426
gggcaauaaucuucggaua

SEQ ID NO: 489960 - RNA, 19 nt, Artificial Sequence
  Description of Artificial Sequence: Synthetic oligonucleotide
  Antisense Strand to SEQ ID NO: 489959
uauccgaagauuauugccc

SEQ ID NO: 489961 - RNA, 19 nt, Artificial Sequence
  Description of Artificial Sequence: Synthetic oligonucleotide
  Sense strand starting at position 1436 of SEQ ID NO: 317426
ggcaauaaucuucggauag

SEQ ID NO: 489962 - RNA, 19 nt, Artificial Sequence
  Description of Artificial Sequence: Synthetic oligonucleotide
  Antisense Strand to SEQ ID NO: 489961
cuauccgaagauuauugcc

SEQ ID NO: 489963 - RNA, 19 nt, Artificial Sequence
  Description of Artificial Sequence: Synthetic oligonucleotide
  Sense strand starting at position 1599 of SEQ ID NO: 317426
ugcacauaagcugggaaau

SEQ ID NO: 489964 - RNA, 19 nt, Artificial Sequence
  Description of Artificial Sequence: Synthetic oligonucleotide
  Antisense Strand to SEQ ID NO: 489963
auuucccagcuuaugugca

SEQ ID NO: 489965 - RNA, 19 nt, Artificial Sequence
  Description of Artificial Sequence: Synthetic oligonucleotide
  Sense strand starting at position 1600 of SEQ ID NO: 317426
gcacauaagcugggaaauc

SEQ ID NO: 489966 - RNA, 19 nt, Artificial Sequence
  Description of Artificial Sequence: Synthetic oligonucleotide
  Antisense Strand to SEQ ID NO: 489965
gauuucccagcuuaugugc

SEQ ID NO: 489967 - RNA, 19 nt, Artificial Sequence
  Description of Artificial Sequence: Synthetic oligonucleotide
  Sense strand starting at position 1610 of SEQ ID NO: 317426
ugggaaaucucgcuuucug

SEQ ID NO: 489968 - RNA, 19 nt, Artificial Sequence
  Description of Artificial Sequence: Synthetic oligonucleotide
  Antisense Strand to SEQ ID NO: 489967
cagaaagcgagauuuccca

SEQ ID NO: 489969 - RNA, 19 nt, Artificial Sequence
  Description of Artificial Sequence: Synthetic oligonucleotide
  Sense strand starting at position 2048 of SEQ ID NO: 317426
gcacccaucugacuuugua

SEQ ID NO: 489970 - RNA, 19 nt, Artificial Sequence
  Description of Artificial Sequence: Synthetic oligonucleotide
  Antisense Strand to SEQ ID NO: 489969
uacaaagucagaugggugc

SEQ ID NO: 489971 - RNA, 19 nt, Artificial Sequence
  Description of Artificial Sequence: Synthetic oligonucleotide
  Sense strand starting at position 2131 of SEQ ID NO: 317426
ccaggucaauaguucucaa

SEQ ID NO: 489972 - RNA, 19 nt, Artificial Sequence
  Description of Artificial Sequence: Synthetic oligonucleotide
  Antisense Strand to SEQ ID NO: 489971
uugagaacuauugaccugg

SEQ ID NO: 489973 - RNA, 19 nt, Artificial Sequence
  Description of Artificial Sequence: Synthetic oligonucleotide
  Sense strand starting at position 2134 of SEQ ID NO: 317426
ggucaauaguucucaaugu

SEQ ID NO: 489974 - RNA, 19 nt, Artificial Sequence
  Description of Artificial Sequence: Synthetic oligonucleotide
  Antisense Strand to SEQ ID NO: 489973
acauugagaacuauugacc

SEQ ID NO: 489975 - RNA, 19 nt, Artificial Sequence
  Description of Artificial Sequence: Synthetic oligonucleotide
  Sense strand starting at position 2532 of SEQ ID NO: 317426
acagaagcucuuugggcua

SEQ ID NO: 489976 - RNA, 19 nt, Artificial Sequence
  Description of Artificial Sequence: Synthetic oligonucleotide
  Antisense Strand to SEQ ID NO: 489975
uagcccaaagagcuucugu

SEQ ID NO: 489977 - RNA, 19 nt, Artificial Sequence
  Description of Artificial Sequence: Synthetic oligonucleotide
  Sense strand starting at position 2581 of SEQ ID NO: 317426
uccaucaaaguuugggaau

SEQ ID NO: 489978 - RNA, 19 nt, Artificial Sequence
  Description of Artificial Sequence: Synthetic oligonucleotide
  Antisense Strand to SEQ ID NO: 489977
auucccaaacuuugaugga

SEQ ID NO: 489979 - RNA, 19 nt, Artificial Sequence
  Description of Artificial Sequence: Synthetic oligonucleotide
  Sense strand starting at position 2726 of SEQ ID NO: 317426
auucguauaauccaguguu

SEQ ID NO: 489980 - RNA, 19 nt, Artificial Sequence
  Description of Artificial Sequence: Synthetic oligonucleotide
  Antisense Strand to SEQ ID NO: 489979
aacacuggauuauacgaau

SEQ ID NO: 489981 - RNA, 19 nt, Artificial Sequence
  Description of Artificial Sequence: Synthetic oligonucleotide
  Sense strand starting at position 2729 of SEQ ID NO: 317426
cguauaauccaguguugag

SEQ ID NO: 489982 - RNA, 19 nt, Artificial Sequence
  Description of Artificial Sequence: Synthetic oligonucleotide
  Antisense Strand to SEQ ID NO: 489981
cucaacacuggauuauacg

SEQ ID NO: 489983 - RNA, 19 nt, Artificial Sequence
  Description of Artificial Sequence: Synthetic oligonucleotide
  Sense strand starting at position 2736 of SEQ ID NO: 317426
uccaguguugagcacugua

SEQ ID NO: 489984 - RNA, 19 nt, Artificial Sequence
  Description of Artificial Sequence: Synthetic oligonucleotide
  Antisense Strand to SEQ ID NO: 489983
uacagugcucaacacugga

SEQ ID NO: 489985 - RNA, 19 nt, Artificial Sequence
  Description of Artificial Sequence: Synthetic oligonucleotide
  Sense strand starting at position 2903 of SEQ ID NO: 317426
gcaccuuaacuaugagcaa

SEQ ID NO: 489986 - RNA, 19 nt, Artificial Sequence
  Description of Artificial Sequence: Synthetic oligonucleotide
  Antisense Strand to SEQ ID NO: 489985
uugcucauaguuaaggugc

SEQ ID NO: 489987 - RNA, 19 nt, Artificial Sequence
  Description of Artificial Sequence: Synthetic oligonucleotide
  Sense strand starting at position 2950 of SEQ ID NO: 317426
ucaguuugugaacagauuc

SEQ ID NO: 489988 - RNA, 19 nt, Artificial Sequence
  Description of Artificial Sequence: Synthetic oligonucleotide
  Antisense Strand to SEQ ID NO: 489987
gaaucuguucacaaacuga

SEQ ID NO: 489989 - RNA, 19 nt, Artificial Sequence
  Description of Artificial Sequence: Synthetic oligonucleotide
  Sense strand starting at position 2975 of SEQ ID NO: 317426
gaagcucugccucaagaag

SEQ ID NO: 489990 - RNA, 19 nt, Artificial Sequence
  Description of Artificial Sequence: Synthetic oligonucleotide
  Antisense Strand to SEQ ID NO: 489989
cuucuugaggcagagcuuc

SEQ ID NO: 489991 - RNA, 19 nt, Artificial Sequence
  Description of Artificial Sequence: Synthetic oligonucleotide
  Sense strand starting at position 3134 of SEQ ID NO: 317426
aggccugccucuuuaaacu

SEQ ID NO: 489992 - RNA, 19 nt, Artificial Sequence
  Description of Artificial Sequence: Synthetic oligonucleotide
  Antisense Strand to SEQ ID NO: 489991
aguuuaaagaggcaggccu

SEQ ID NO: 489993 - RNA, 19 nt, Artificial Sequence
  Description of Artificial Sequence: Synthetic oligonucleotide
  Sense strand starting at position 3936 of SEQ ID NO: 317426
cuaucuccucugcagaaga

SEQ ID NO: 489994 - RNA, 19 nt, Artificial Sequence
  Description of Artificial Sequence: Synthetic oligonucleotide
  Antisense Strand to SEQ ID NO: 489993
ucuucugcagaggagauag

SEQ ID NO: 489995 - RNA, 19 nt, Artificial Sequence
  Description of Artificial Sequence: Synthetic oligonucleotide
  Sense strand starting at position 3981 of SEQ ID NO: 317426
agauuccuuccuggaugaa

SEQ ID NO: 489996 - RNA, 19 nt, Artificial Sequence
  Description of Artificial Sequence: Synthetic oligonucleotide
  Antisense Strand to SEQ ID NO: 489995
uucauccaggaaggaaucu

SEQ ID NO: 489997 - RNA, 19 nt, Artificial Sequence
  Description of Artificial Sequence: Synthetic oligonucleotide
  Sense strand starting at position 24 of SEQ ID NO: 317427
cuaaauuugucugaugaca

SEQ ID NO: 489998 - RNA, 19 nt, Artificial Sequence
  Description of Artificial Sequence: Synthetic oligonucleotide
  Antisense Strand to SEQ ID NO: 489997
ugucaucagacaaauuuag

SEQ ID NO: 489999 - RNA, 19 nt, Artificial Sequence
  Description of Artificial Sequence: Synthetic oligonucleotide
  Sense strand starting at position 188 of SEQ ID NO: 317427
gccugucuuccgguaucuu

SEQ ID NO: 490000 - RNA, 19 nt, Artificial Sequence
  Description of Artificial Sequence: Synthetic oligonucleotide
  Antisense Strand to SEQ ID NO: 489999
aagauaccggaagacaggc

SEQ ID NO: 490001 - RNA, 19 nt, Artificial Sequence
  Description of Artificial Sequence: Synthetic oligonucleotide
  Sense strand starting at position 578 of SEQ ID NO: 317427
ccucuuauugcguuacugu

SEQ ID NO: 490002 - RNA, 19 nt, Artificial Sequence
  Description of Artificial Sequence: Synthetic oligonucleotide
  Antisense Strand to SEQ ID NO: 490001
acaguaacgcaauaagagg

SEQ ID NO: 490003 - RNA, 19 nt, Artificial Sequence
  Description of Artificial Sequence: Synthetic oligonucleotide
  Sense strand starting at position 602 of SEQ ID NO: 317427
ggaacucuauuugaaacua

SEQ ID NO: 490004 - RNA, 19 nt, Artificial Sequence
  Description of Artificial Sequence: Synthetic oligonucleotide
  Antisense Strand to SEQ ID NO: 490003
uaguuucaaauagaguucc

SEQ ID NO: 490005 - RNA, 19 nt, Artificial Sequence
  Description of Artificial Sequence: Synthetic oligonucleotide
  Sense strand starting at position 764 of SEQ ID NO: 317427
cuaugaguaacggguaaag

SEQ ID NO: 490006 - RNA, 19 nt, Artificial Sequence
  Description of Artificial Sequence: Synthetic oligonucleotide
  Antisense Strand to SEQ ID NO: 490005
cuuuacccguuacucauag

SEQ ID NO: 490007 - RNA, 19 nt, Artificial Sequence
  Description of Artificial Sequence: Synthetic oligonucleotide
  Sense strand starting at position 801 of SEQ ID NO: 317427
gacagugcugugcagaaca

SEQ ID NO: 490008 - RNA, 19 nt, Artificial Sequence
  Description of Artificial Sequence: Synthetic oligonucleotide
  Antisense Strand to SEQ ID NO: 490007
uguucugcacagcacuguc

SEQ ID NO: 490009 - RNA, 19 nt, Artificial Sequence
  Description of Artificial Sequence: Synthetic oligonucleotide
  Sense strand starting at position 856 of SEQ ID NO: 317427
ggcaucaugucaccugaau

SEQ ID NO: 490010 - RNA, 19 nt, Artificial Sequence
  Description of Artificial Sequence: Synthetic oligonucleotide
  Antisense Strand to SEQ ID NO: 490009
auucaggugacaugaugcc

SEQ ID NO: 490011 - RNA, 19 nt, Artificial Sequence
  Description of Artificial Sequence: Synthetic oligonucleotide
  Sense strand starting at position 867 of SEQ ID NO: 317427
accugaauagcuggagauu

SEQ ID NO: 490012 - RNA, 19 nt, Artificial Sequence
  Description of Artificial Sequence: Synthetic oligonucleotide
  Antisense Strand to SEQ ID NO: 490011
aaucuccagcuauucaggu

SEQ ID NO: 490013 - RNA, 19 nt, Artificial Sequence
  Description of Artificial Sequence: Synthetic oligonucleotide
  Sense strand starting at position 1209 of SEQ ID NO: 317427
ggcuauugacauuauguga

SEQ ID NO: 490014 - RNA, 19 nt, Artificial Sequence
  Description of Artificial Sequence: Synthetic oligonucleotide
  Antisense Strand to SEQ ID NO: 490013
ucacauaaugucaauagcc

SEQ ID NO: 490015 - RNA, 19 nt, Artificial Sequence
  Description of Artificial Sequence: Synthetic oligonucleotide
  Sense strand starting at position 1264 of SEQ ID NO: 317427
guaucaugugaagguuaag

SEQ ID NO: 490016 - RNA, 19 nt, Artificial Sequence
  Description of Artificial Sequence: Synthetic oligonucleotide
  Antisense Strand to SEQ ID NO: 490015
cuuaaccuucacaugauac

SEQ ID NO: 490017 - RNA, 19 nt, Artificial Sequence
  Description of Artificial Sequence: Synthetic oligonucleotide
  Sense strand starting at position 1367 of SEQ ID NO: 317427
gguggugcaaacugaaaua

SEQ ID NO: 490018 - RNA, 19 nt, Artificial Sequence
  Description of Artificial Sequence: Synthetic oligonucleotide
  Antisense Strand to SEQ ID NO: 490017
uauuucaguuugcaccacc

SEQ ID NO: 490019 - RNA, 19 nt, Artificial Sequence
  Description of Artificial Sequence: Synthetic oligonucleotide
  Sense strand starting at position 1388 of SEQ ID NO: 317427
uuacuuagucaacaaaguu

SEQ ID NO: 490020 - RNA, 19 nt, Artificial Sequence
  Description of Artificial Sequence: Synthetic oligonucleotide
  Antisense Strand to SEQ ID NO: 490019
aacuuuguugacuaaguaa

SEQ ID NO: 490021 - RNA, 19 nt, Artificial Sequence
  Description of Artificial Sequence: Synthetic oligonucleotide
  Sense strand starting at position 1416 of SEQ ID NO: 317427
uuuagaguuuauccagacu

SEQ ID NO: 490022 - RNA, 19 nt, Artificial Sequence
  Description of Artificial Sequence: Synthetic oligonucleotide
  Antisense Strand to SEQ ID NO: 490021
agucuggauaaacucuaaa

SEQ ID NO: 490023 - RNA, 19 nt, Artificial Sequence
  Description of Artificial Sequence: Synthetic oligonucleotide
  Sense strand starting at position 1486 of SEQ ID NO: 317427
aauggcaggcuuugaaaua

SEQ ID NO: 490024 - RNA, 19 nt, Artificial Sequence
  Description of Artificial Sequence: Synthetic oligonucleotide
  Antisense Strand to SEQ ID NO: 490023
uauuucaaagccugccauu

SEQ ID NO: 490025 - RNA, 19 nt, Artificial Sequence
  Description of Artificial Sequence: Synthetic oligonucleotide
  Sense strand starting at position 1654 of SEQ ID NO: 317427
gccagugcggccuugagau

SEQ ID NO: 490026 - RNA, 19 nt, Artificial Sequence
  Description of Artificial Sequence: Synthetic oligonucleotide
  Antisense Strand to SEQ ID NO: 490025
aucucaaggccgcacuggc

SEQ ID NO: 490027 - RNA, 19 nt, Artificial Sequence
  Description of Artificial Sequence: Synthetic oligonucleotide
  Sense strand starting at position 1741 of SEQ ID NO: 317427
gucugugggauccaggaau

SEQ ID NO: 490028 - RNA, 19 nt, Artificial Sequence
  Description of Artificial Sequence: Synthetic oligonucleotide
  Antisense Strand to SEQ ID NO: 490027
auuccuggaucccacagac

SEQ ID NO: 490029 - RNA, 19 nt, Artificial Sequence
  Description of Artificial Sequence: Synthetic oligonucleotide
  Sense strand starting at position 2012 of SEQ ID NO: 317427
ccagaacuuucugcaagca

SEQ ID NO: 490030 - RNA, 19 nt, Artificial Sequence
  Description of Artificial Sequence: Synthetic oligonucleotide
  Antisense Strand to SEQ ID NO: 490029
ugcuugcagaaaguucugg

SEQ ID NO: 490031 - RNA, 19 nt, Artificial Sequence
  Description of Artificial Sequence: Synthetic oligonucleotide
  Sense strand starting at position 2141 of SEQ ID NO: 317427
guaauuuaaugccugagcu

SEQ ID NO: 490032 - RNA, 19 nt, Artificial Sequence
  Description of Artificial Sequence: Synthetic oligonucleotide
  Antisense Strand to SEQ ID NO: 490031
agcucaggcauuaaauuac

SEQ ID NO: 490033 - RNA, 19 nt, Artificial Sequence
  Description of Artificial Sequence: Synthetic oligonucleotide
  Sense strand starting at position 2151 of SEQ ID NO: 317427
gccugagcuguuuacaaac

SEQ ID NO: 490034 - RNA, 19 nt, Artificial Sequence
  Description of Artificial Sequence: Synthetic oligonucleotide
  Antisense Strand to SEQ ID NO: 490033
guuuguaaacagcucaggc

SEQ ID NO: 490035 - RNA, 19 nt, Artificial Sequence
  Description of Artificial Sequence: Synthetic oligonucleotide
  Sense strand starting at position 2291 of SEQ ID NO: 317427
aauuuccaguguuagagaa

SEQ ID NO: 490036 - RNA, 19 nt, Artificial Sequence
  Description of Artificial Sequence: Synthetic oligonucleotide
  Antisense Strand to SEQ ID NO: 490035
uucucuaacacuggaaauu

SEQ ID NO: 490037 - RNA, 19 nt, Artificial Sequence
  Description of Artificial Sequence: Synthetic oligonucleotide
  Sense strand starting at position 2295 of SEQ ID NO: 317427
uccaguguuagagaaguca

SEQ ID NO: 490038 - RNA, 19 nt, Artificial Sequence
  Description of Artificial Sequence: Synthetic oligonucleotide
  Antisense Strand to SEQ ID NO: 490037
ugacuucucuaacacugga

SEQ ID NO: 490039 - RNA, 19 nt, Artificial Sequence
  Description of Artificial Sequence: Synthetic oligonucleotide
  Sense strand starting at position 2319 of SEQ ID NO: 317427
auagaaguuauuggcaaga

SEQ ID NO: 490040 - RNA, 19 nt, Artificial Sequence
  Description of Artificial Sequence: Synthetic oligonucleotide
  Antisense Strand to SEQ ID NO: 490039
ucuugccaauaacuucuau

SEQ ID NO: 490041 - RNA, 19 nt, Artificial Sequence
  Description of Artificial Sequence: Synthetic oligonucleotide
  Sense strand starting at position 2324 of SEQ ID NO: 317427
aguuauuggcaagaaagcu

SEQ ID NO: 490042 - RNA, 19 nt, Artificial Sequence
  Description of Artificial Sequence: Synthetic oligonucleotide
  Antisense Strand to SEQ ID NO: 490041
agcuuucuugccaauaacu

SEQ ID NO: 490043 - RNA, 19 nt, Artificial Sequence
  Description of Artificial Sequence: Synthetic oligonucleotide
  Sense strand starting at position 2345 of SEQ ID NO: 317427
aagccuagagcuugagauu

SEQ ID NO: 490044 - RNA, 19 nt, Artificial Sequence
  Description of Artificial Sequence: Synthetic oligonucleotide
  Antisense Strand to SEQ ID NO: 490043
aaucucaagcucuaggcuu

SEQ ID NO: 490045 - RNA, 19 nt, Artificial Sequence
  Description of Artificial Sequence: Synthetic oligonucleotide
  Sense strand starting at position 2588 of SEQ ID NO: 317427
cuuuaaagguucuuguaga

SEQ ID NO: 490046 - RNA, 19 nt, Artificial Sequence
  Description of Artificial Sequence: Synthetic oligonucleotide
  Antisense Strand to SEQ ID NO: 490045
ucuacaagaaccuuuaaag

SEQ ID NO: 490047 - RNA, 19 nt, Artificial Sequence
  Description of Artificial Sequence: Synthetic oligonucleotide
  Sense strand starting at position 2659 of SEQ ID NO: 317427
aaggguaaaugcucacuua

SEQ ID NO: 490048 - RNA, 19 nt, Artificial Sequence
  Description of Artificial Sequence: Synthetic oligonucleotide
  Antisense Strand to SEQ ID NO: 490047
uaagugagcauuuacccuu

SEQ ID NO: 490049 - RNA, 19 nt, Artificial Sequence
  Description of Artificial Sequence: Synthetic oligonucleotide
  Sense strand starting at position 2660 of SEQ ID NO: 317427
aggguaaaugcucacuuau

SEQ ID NO: 490050 - RNA, 19 nt, Artificial Sequence
  Description of Artificial Sequence: Synthetic oligonucleotide
  Antisense Strand to SEQ ID NO: 490049
auaagugagcauuuacccu

SEQ ID NO: 490051 - RNA, 19 nt, Artificial Sequence
  Description of Artificial Sequence: Synthetic oligonucleotide
  Sense strand starting at position 2662 of SEQ ID NO: 317427
gguaaaugcucacuuauau

SEQ ID NO: 490052 - RNA, 19 nt, Artificial Sequence
  Description of Artificial Sequence: Synthetic oligonucleotide
  Antisense Strand to SEQ ID NO: 490051
auauaagugagcauuuacc

SEQ ID NO: 490053 - RNA, 19 nt, Artificial Sequence
  Description of Artificial Sequence: Synthetic oligonucleotide
  Sense strand starting at position 2718 of SEQ ID NO: 317427
uuaagauguuuacccaaag

SEQ ID NO: 490054 - RNA, 19 nt, Artificial Sequence
  Description of Artificial Sequence: Synthetic oligonucleotide
  Antisense Strand to SEQ ID NO: 490053
cuuuggguaaacaucuuaa

SEQ ID NO: 490055 - RNA, 19 nt, Artificial Sequence
  Description of Artificial Sequence: Synthetic oligonucleotide
  Sense strand starting at position 2750 of SEQ ID NO: 317427
guaucaaugucuuugaaca

SEQ ID NO: 490056 - RNA, 19 nt, Artificial Sequence
  Description of Artificial Sequence: Synthetic oligonucleotide
  Antisense Strand to SEQ ID NO: 490055
uguucaaagacauugauac

SEQ ID NO: 490057 - RNA, 19 nt, Artificial Sequence
  Description of Artificial Sequence: Synthetic oligonucleotide
  Sense strand starting at position 2936 of SEQ ID NO: 317427
uuuauucugcaguagggaa

SEQ ID NO: 490058 - RNA, 19 nt, Artificial Sequence
  Description of Artificial Sequence: Synthetic oligonucleotide
  Antisense Strand to SEQ ID NO: 490057
uucccuacugcagaauaaa

SEQ ID NO: 490059 - RNA, 19 nt, Artificial Sequence
  Description of Artificial Sequence: Synthetic oligonucleotide
  Sense strand starting at position 3021 of SEQ ID NO: 317427
gcccuaucccugcauauga

SEQ ID NO: 490060 - RNA, 19 nt, Artificial Sequence
  Description of Artificial Sequence: Synthetic oligonucleotide
  Antisense Strand to SEQ ID NO: 490059
ucauaugcagggauagggc

SEQ ID NO: 490061 - RNA, 19 nt, Artificial Sequence
  Description of Artificial Sequence: Synthetic oligonucleotide
  Sense strand starting at position 3049 of SEQ ID NO: 317427
gaaggcuuuguguaugaac

SEQ ID NO: 490062 - RNA, 19 nt, Artificial Sequence
  Description of Artificial Sequence: Synthetic oligonucleotide
  Antisense Strand to SEQ ID NO: 490061
guucauacacaaagccuuc

SEQ ID NO: 490063 - RNA, 19 nt, Artificial Sequence
  Description of Artificial Sequence: Synthetic oligonucleotide
  Sense strand starting at position 3252 of SEQ ID NO: 317427
ggagguguuacucaagguc

SEQ ID NO: 490064 - RNA, 19 nt, Artificial Sequence
  Description of Artificial Sequence: Synthetic oligonucleotide
  Antisense Strand to SEQ ID NO: 490063
gaccuugaguaacaccucc

SEQ ID NO: 490065 - RNA, 19 nt, Artificial Sequence
  Description of Artificial Sequence: Synthetic oligonucleotide
  Sense strand starting at position 3269 of SEQ ID NO: 317427
uccugacacuggucuccaa

SEQ ID NO: 490066 - RNA, 19 nt, Artificial Sequence
  Description of Artificial Sequence: Synthetic oligonucleotide
  Antisense Strand to SEQ ID NO: 490065
uuggagaccagugucagga

SEQ ID NO: 490067 - RNA, 19 nt, Artificial Sequence
  Description of Artificial Sequence: Synthetic oligonucleotide
  Sense strand starting at position 3465 of SEQ ID NO: 317427
agccaaguccuccaaaugu

SEQ ID NO: 490068 - RNA, 19 nt, Artificial Sequence
  Description of Artificial Sequence: Synthetic oligonucleotide
  Antisense Strand to SEQ ID NO: 490067
acauuuggaggacuuggcu

SEQ ID NO: 490069 - RNA, 19 nt, Artificial Sequence
  Description of Artificial Sequence: Synthetic oligonucleotide
  Sense strand starting at position 3641 of SEQ ID NO: 317427
acaauacccuguucuggua

SEQ ID NO: 490070 - RNA, 19 nt, Artificial Sequence
  Description of Artificial Sequence: Synthetic oligonucleotide
  Antisense Strand to SEQ ID NO: 490069
uaccagaacaggguauugu

SEQ ID NO: 490071 - RNA, 19 nt, Artificial Sequence
  Description of Artificial Sequence: Synthetic oligonucleotide
  Sense strand starting at position 3655 of SEQ ID NO: 317427
ugguaagagcuacagguau

SEQ ID NO: 490072 - RNA, 19 nt, Artificial Sequence
  Description of Artificial Sequence: Synthetic oligonucleotide
  Antisense Strand to SEQ ID NO: 490071
auaccuguagcucuuacca

SEQ ID NO: 490073 - RNA, 19 nt, Artificial Sequence
  Description of Artificial Sequence: Synthetic oligonucleotide
  Sense strand starting at position 3936 of SEQ ID NO: 317427
gccacaagggcugagaauu

SEQ ID NO: 490074 - RNA, 19 nt, Artificial Sequence
  Description of Artificial Sequence: Synthetic oligonucleotide
  Antisense Strand to SEQ ID NO: 490073
aauucucagcccuuguggc

SEQ ID NO: 490075 - RNA, 19 nt, Artificial Sequence
  Description of Artificial Sequence: Synthetic oligonucleotide
  Sense strand starting at position 3955 of SEQ ID NO: 317427
agggaucugccacagcaau

SEQ ID NO: 490076 - RNA, 19 nt, Artificial Sequence
  Description of Artificial Sequence: Synthetic oligonucleotide
  Antisense Strand to SEQ ID NO: 490075
auugcuguggcagaucccu

SEQ ID NO: 490077 - RNA, 19 nt, Artificial Sequence
  Description of Artificial Sequence: Synthetic oligonucleotide
  Sense strand starting at position 117 of SEQ ID NO: 317428
agcugacacccuugauguu

SEQ ID NO: 490078 - RNA, 19 nt, Artificial Sequence
  Description of Artificial Sequence: Synthetic oligonucleotide
  Antisense Strand to SEQ ID NO: 490077
aacaucaagggugucagcu

SEQ ID NO: 490079 - RNA, 19 nt, Artificial Sequence
  Description of Artificial Sequence: Synthetic oligonucleotide
  Sense strand starting at position 118 of SEQ ID NO: 317428
gcugacacccuugauguuu

SEQ ID NO: 490080 - RNA, 19 nt, Artificial Sequence
  Description of Artificial Sequence: Synthetic oligonucleotide
  Antisense Strand to SEQ ID NO: 490079
aaacaucaagggugucagc

SEQ ID NO: 490081 - RNA, 19 nt, Artificial Sequence
  Description of Artificial Sequence: Synthetic oligonucleotide
  Sense strand starting at position 303 of SEQ ID NO: 317428
ugagauauggguugguacu

SEQ ID NO: 490082 - RNA, 19 nt, Artificial Sequence
  Description of Artificial Sequence: Synthetic oligonucleotide
  Antisense Strand to SEQ ID NO: 490081
aguaccaacccauaucuca

SEQ ID NO: 490083 - RNA, 19 nt, Artificial Sequence
  Description of Artificial Sequence: Synthetic oligonucleotide
  Sense strand starting at position 313 of SEQ ID NO: 317428
guugguacuggccagauaa

SEQ ID NO: 490084 - RNA, 19 nt, Artificial Sequence
  Description of Artificial Sequence: Synthetic oligonucleotide
  Antisense Strand to SEQ ID NO: 490083
uuaucuggccaguaccaac

SEQ ID NO: 490085 - RNA, 19 nt, Artificial Sequence
  Description of Artificial Sequence: Synthetic oligonucleotide
  Sense strand starting at position 624 of SEQ ID NO: 317428
ccaauuccacgcuagagaa

SEQ ID NO: 490086 - RNA, 19 nt, Artificial Sequence
  Description of Artificial Sequence: Synthetic oligonucleotide
  Antisense Strand to SEQ ID NO: 490085
uucucuagcguggaauugg

SEQ ID NO: 490087 - RNA, 19 nt, Artificial Sequence
  Description of Artificial Sequence: Synthetic oligonucleotide
  Sense strand starting at position 836 of SEQ ID NO: 317428
ggacuuacuccucaaggca

SEQ ID NO: 490088 - RNA, 19 nt, Artificial Sequence
  Description of Artificial Sequence: Synthetic oligonucleotide
  Antisense Strand to SEQ ID NO: 490087
ugccuugaggaguaagucc

SEQ ID NO: 490089 - RNA, 19 nt, Artificial Sequence
  Description of Artificial Sequence: Synthetic oligonucleotide
  Sense strand starting at position 1197 of SEQ ID NO: 317428
cgucaaguuccguaaagga

SEQ ID NO: 490090 - RNA, 19 nt, Artificial Sequence
  Description of Artificial Sequence: Synthetic oligonucleotide
  Antisense Strand to SEQ ID NO: 490089
uccuuuacggaacuugacg

SEQ ID NO: 490091 - RNA, 19 nt, Artificial Sequence
  Description of Artificial Sequence: Synthetic oligonucleotide
  Sense strand starting at position 2224 of SEQ ID NO: 317428
cucucuuaucgcgcuguga

SEQ ID NO: 490092 - RNA, 19 nt, Artificial Sequence
  Description of Artificial Sequence: Synthetic oligonucleotide
  Antisense Strand to SEQ ID NO: 490091
ucacagcgcgauaagagag

SEQ ID NO: 490093 - RNA, 19 nt, Artificial Sequence
  Description of Artificial Sequence: Synthetic oligonucleotide
  Sense strand starting at position 2330 of SEQ ID NO: 317428
aagucacagucucugaaga

SEQ ID NO: 490094 - RNA, 19 nt, Artificial Sequence
  Description of Artificial Sequence: Synthetic oligonucleotide
  Antisense Strand to SEQ ID NO: 490093
ucuucagagacugugacuu

SEQ ID NO: 490095 - RNA, 19 nt, Artificial Sequence
  Description of Artificial Sequence: Synthetic oligonucleotide
  Sense strand starting at position 2331 of SEQ ID NO: 317428
agucacagucucugaagau

SEQ ID NO: 490096 - RNA, 19 nt, Artificial Sequence
  Description of Artificial Sequence: Synthetic oligonucleotide
  Antisense Strand to SEQ ID NO: 490095
aucuucagagacugugacu

SEQ ID NO: 490097 - RNA, 19 nt, Artificial Sequence
  Description of Artificial Sequence: Synthetic oligonucleotide
  Sense strand starting at position 2353 of SEQ ID NO: 317428
auggaagcaucaucaguuu

SEQ ID NO: 490098 - RNA, 19 nt, Artificial Sequence
  Description of Artificial Sequence: Synthetic oligonucleotide
  Antisense Strand to SEQ ID NO: 490097
aaacugaugaugcuuccau

SEQ ID NO: 490099 - RNA, 19 nt, Artificial Sequence
  Description of Artificial Sequence: Synthetic oligonucleotide
  Sense strand starting at position 2415 of SEQ ID NO: 317428
uggcguuaucugcauauuu

SEQ ID NO: 490100 - RNA, 19 nt, Artificial Sequence
  Description of Artificial Sequence: Synthetic oligonucleotide
  Antisense Strand to SEQ ID NO: 490099
aaauaugcagauaacgcca

SEQ ID NO: 490101 - RNA, 19 nt, Artificial Sequence
  Description of Artificial Sequence: Synthetic oligonucleotide
  Sense strand starting at position 2595 of SEQ ID NO: 317428
gcugguagagaguauguga

SEQ ID NO: 490102 - RNA, 19 nt, Artificial Sequence
  Description of Artificial Sequence: Synthetic oligonucleotide
  Antisense Strand to SEQ ID NO: 490101
ucacauacucucuaccagc

SEQ ID NO: 490103 - RNA, 19 nt, Artificial Sequence
  Description of Artificial Sequence: Synthetic oligonucleotide
  Sense strand starting at position 2670 of SEQ ID NO: 317428
ugaggaaagccgggcuuau

SEQ ID NO: 490104 - RNA, 19 nt, Artificial Sequence
  Description of Artificial Sequence: Synthetic oligonucleotide
  Antisense Strand to SEQ ID NO: 490103
auaagcccggcuuuccuca

SEQ ID NO: 490105 - RNA, 19 nt, Artificial Sequence
  Description of Artificial Sequence: Synthetic oligonucleotide
  Sense strand starting at position 2737 of SEQ ID NO: 317428
cguuauuggguugucguua

SEQ ID NO: 490106 - RNA, 19 nt, Artificial Sequence
  Description of Artificial Sequence: Synthetic oligonucleotide
  Antisense Strand to SEQ ID NO: 490105
uaacgacaacccaauaacg

SEQ ID NO: 490107 - RNA, 19 nt, Artificial Sequence
  Description of Artificial Sequence: Synthetic oligonucleotide
  Sense strand starting at position 2853 of SEQ ID NO: 317428
gaggguugucacuggcaga

SEQ ID NO: 490108 - RNA, 19 nt, Artificial Sequence
  Description of Artificial Sequence: Synthetic oligonucleotide
  Antisense Strand to SEQ ID NO: 490107
ucugccagugacaacccuc

SEQ ID NO: 490109 - RNA, 19 nt, Artificial Sequence
  Description of Artificial Sequence: Synthetic oligonucleotide
  Sense strand starting at position 2854 of SEQ ID NO: 317428
aggguugucacuggcagau

SEQ ID NO: 490110 - RNA, 19 nt, Artificial Sequence
  Description of Artificial Sequence: Synthetic oligonucleotide
  Antisense Strand to SEQ ID NO: 490109
aucugccagugacaacccu

SEQ ID NO: 490111 - RNA, 19 nt, Artificial Sequence
  Description of Artificial Sequence: Synthetic oligonucleotide
  Sense strand starting at position 2858 of SEQ ID NO: 317428
uugucacuggcagauaaau

SEQ ID NO: 490112 - RNA, 19 nt, Artificial Sequence
  Description of Artificial Sequence: Synthetic oligonucleotide
  Antisense Strand to SEQ ID NO: 490111
auuuaucugccagugacaa

SEQ ID NO: 490113 - RNA, 19 nt, Artificial Sequence
  Description of Artificial Sequence: Synthetic oligonucleotide
  Sense strand starting at position 2960 of SEQ ID NO: 317428
gaguuuccgcauuacagga

SEQ ID NO: 490114 - RNA, 19 nt, Artificial Sequence
  Description of Artificial Sequence: Synthetic oligonucleotide
  Antisense Strand to SEQ ID NO: 490113
uccuguaaugcggaaacuc

SEQ ID NO: 490115 - RNA, 19 nt, Artificial Sequence
  Description of Artificial Sequence: Synthetic oligonucleotide
  Sense strand starting at position 3090 of SEQ ID NO: 317428
gcaucuaugagauaugacg

SEQ ID NO: 490116 - RNA, 19 nt, Artificial Sequence
  Description of Artificial Sequence: Synthetic oligonucleotide
  Antisense Strand to SEQ ID NO: 490115
cgucauaucucauagaugc

SEQ ID NO: 490117 - RNA, 19 nt, Artificial Sequence
  Description of Artificial Sequence: Synthetic oligonucleotide
  Sense strand starting at position 3099 of SEQ ID NO: 317428
agauaugacgcagaagcaa

SEQ ID NO: 490118 - RNA, 19 nt, Artificial Sequence
  Description of Artificial Sequence: Synthetic oligonucleotide
  Antisense Strand to SEQ ID NO: 490117
uugcuucugcgucauaucu

SEQ ID NO: 490119 - RNA, 19 nt, Artificial Sequence
  Description of Artificial Sequence: Synthetic oligonucleotide
  Sense strand starting at position 3131 of SEQ ID NO: 317428
aggcgaucucuugaaagca

SEQ ID NO: 490120 - RNA, 19 nt, Artificial Sequence
  Description of Artificial Sequence: Synthetic oligonucleotide
  Antisense Strand to SEQ ID NO: 490119
ugcuuucaagagaucgccu

SEQ ID NO: 490121 - RNA, 19 nt, Artificial Sequence
  Description of Artificial Sequence: Synthetic oligonucleotide
  Sense strand starting at position 3167 of SEQ ID NO: 317428
cgcagugcugcaucacaga

SEQ ID NO: 490122 - RNA, 19 nt, Artificial Sequence
  Description of Artificial Sequence: Synthetic oligonucleotide
  Antisense Strand to SEQ ID NO: 490121
ucugugaugcagcacugcg

SEQ ID NO: 490123 - RNA, 19 nt, Artificial Sequence
  Description of Artificial Sequence: Synthetic oligonucleotide
  Sense strand starting at position 3313 of SEQ ID NO: 317428
ucagucgugacuuaauuag

SEQ ID NO: 490124 - RNA, 19 nt, Artificial Sequence
  Description of Artificial Sequence: Synthetic oligonucleotide
  Antisense Strand to SEQ ID NO: 490123
cuaauuaagucacgacuga

SEQ ID NO: 490125 - RNA, 19 nt, Artificial Sequence
  Description of Artificial Sequence: Synthetic oligonucleotide
  Sense strand starting at position 3330 of SEQ ID NO: 317428
agcaauuuaaugcguugga

SEQ ID NO: 490126 - RNA, 19 nt, Artificial Sequence
  Description of Artificial Sequence: Synthetic oligonucleotide
  Antisense Strand to SEQ ID NO: 490125
uccaacgcauuaaauugcu

SEQ ID NO: 490127 - RNA, 19 nt, Artificial Sequence
  Description of Artificial Sequence: Synthetic oligonucleotide
  Sense strand starting at position 3331 of SEQ ID NO: 317428
gcaauuuaaugcguuggau

SEQ ID NO: 490128 - RNA, 19 nt, Artificial Sequence
  Description of Artificial Sequence: Synthetic oligonucleotide
  Antisense Strand to SEQ ID NO: 490127
auccaacgcauuaaauugc

SEQ ID NO: 490129 - RNA, 19 nt, Artificial Sequence
  Description of Artificial Sequence: Synthetic oligonucleotide
  Sense strand starting at position 3427 of SEQ ID NO: 317428
aggaaccauuguucuguau

SEQ ID NO: 490130 - RNA, 19 nt, Artificial Sequence
  Description of Artificial Sequence: Synthetic oligonucleotide
  Antisense Strand to SEQ ID NO: 490129
auacagaacaaugguuccu

SEQ ID NO: 490131 - RNA, 19 nt, Artificial Sequence
  Description of Artificial Sequence: Synthetic oligonucleotide
  Sense strand starting at position 3434 of SEQ ID NO: 317428
auuguucuguauccagaac

SEQ ID NO: 490132 - RNA, 19 nt, Artificial Sequence
  Description of Artificial Sequence: Synthetic oligonucleotide
  Antisense Strand to SEQ ID NO: 490131
guucuggauacagaacaau

SEQ ID NO: 490133 - RNA, 19 nt, Artificial Sequence
  Description of Artificial Sequence: Synthetic oligonucleotide
  Sense strand starting at position 3572 of SEQ ID NO: 317428
ugauuugacccacgccuua

SEQ ID NO: 490134 - RNA, 19 nt, Artificial Sequence
  Description of Artificial Sequence: Synthetic oligonucleotide
  Antisense Strand to SEQ ID NO: 490133
uaaggcgugggucaaauca

SEQ ID NO: 490135 - RNA, 19 nt, Artificial Sequence
  Description of Artificial Sequence: Synthetic oligonucleotide
  Sense strand starting at position 3610 of SEQ ID NO: 317428
agacguguucuagacaaau

SEQ ID NO: 490136 - RNA, 19 nt, Artificial Sequence
  Description of Artificial Sequence: Synthetic oligonucleotide
  Antisense Strand to SEQ ID NO: 490135
auuugucuagaacacgucu

SEQ ID NO: 490137 - RNA, 19 nt, Artificial Sequence
  Description of Artificial Sequence: Synthetic oligonucleotide
  Sense strand starting at position 3636 of SEQ ID NO: 317428
gcaacuugagucugacaaa

SEQ ID NO: 490138 - RNA, 19 nt, Artificial Sequence
  Description of Artificial Sequence: Synthetic oligonucleotide
  Antisense Strand to SEQ ID NO: 490137
uuugucagacucaaguugc

SEQ ID NO: 490139 - RNA, 19 nt, Artificial Sequence
  Description of Artificial Sequence: Synthetic oligonucleotide
  Sense strand starting at position 3670 of SEQ ID NO: 317428
aggauuuagccguguggcu

SEQ ID NO: 490140 - RNA, 19 nt, Artificial Sequence
  Description of Artificial Sequence: Synthetic oligonucleotide
  Antisense Strand to SEQ ID NO: 490139
agccacacggcuaaauccu

SEQ ID NO: 490141 - RNA, 19 nt, Artificial Sequence
  Description of Artificial Sequence: Synthetic oligonucleotide
  Sense strand starting at position 3728 of SEQ ID NO: 317428
caucucugaugugcagaua

SEQ ID NO: 490142 - RNA, 19 nt, Artificial Sequence
  Description of Artificial Sequence: Synthetic oligonucleotide
  Antisense Strand to SEQ ID NO: 490141
uaucugcacaucagagaug

SEQ ID NO: 490143 - RNA, 19 nt, Artificial Sequence
  Description of Artificial Sequence: Synthetic oligonucleotide
  Sense strand starting at position 3731 of SEQ ID NO: 317428
cucugaugugcagauaauc

SEQ ID NO: 490144 - RNA, 19 nt, Artificial Sequence
  Description of Artificial Sequence: Synthetic oligonucleotide
  Antisense Strand to SEQ ID NO: 490143
gauuaucugcacaucagag

SEQ ID NO: 490145 - RNA, 19 nt, Artificial Sequence
  Description of Artificial Sequence: Synthetic oligonucleotide
  Sense strand starting at position 3740 of SEQ ID NO: 317428
gcagauaaucccgggauca

SEQ ID NO: 490146 - RNA, 19 nt, Artificial Sequence
  Description of Artificial Sequence: Synthetic oligonucleotide
  Antisense Strand to SEQ ID NO: 490145
ugaucccgggauuaucugc

SEQ ID NO: 490147 - RNA, 19 nt, Artificial Sequence
  Description of Artificial Sequence: Synthetic oligonucleotide
  Sense strand starting at position 3741 of SEQ ID NO: 317428
cagauaaucccgggaucag

SEQ ID NO: 490148 - RNA, 19 nt, Artificial Sequence
  Description of Artificial Sequence: Synthetic oligonucleotide
  Antisense Strand to SEQ ID NO: 490147
cugaucccgggauuaucug

SEQ ID NO: 490149 - RNA, 19 nt, Artificial Sequence
  Description of Artificial Sequence: Synthetic oligonucleotide
  Sense strand starting at position 3847 of SEQ ID NO: 317428
gcagacucuaccugagguu

SEQ ID NO: 490150 - RNA, 19 nt, Artificial Sequence
  Description of Artificial Sequence: Synthetic oligonucleotide
  Antisense Strand to SEQ ID NO: 490149
aaccucagguagagucugc

SEQ ID NO: 490151 - RNA, 19 nt, Artificial Sequence
  Description of Artificial Sequence: Synthetic oligonucleotide
  Sense strand starting at position 3861 of SEQ ID NO: 317428
agguuuccagaaggauuau

SEQ ID NO: 490152 - RNA, 19 nt, Artificial Sequence
  Description of Artificial Sequence: Synthetic oligonucleotide
  Antisense Strand to SEQ ID NO: 490151
auaauccuucuggaaaccu

SEQ ID NO: 490153 - RNA, 19 nt, Artificial Sequence
  Description of Artificial Sequence: Synthetic oligonucleotide
  Sense strand starting at position 3898 of SEQ ID NO: 317428
ucgcuuaguguggacaaga

SEQ ID NO: 490154 - RNA, 19 nt, Artificial Sequence
  Description of Artificial Sequence: Synthetic oligonucleotide
  Antisense Strand to SEQ ID NO: 490153
ucuuguccacacuaagcga

SEQ ID NO: 490155 - RNA, 19 nt, Artificial Sequence
  Description of Artificial Sequence: Synthetic oligonucleotide
  Sense strand starting at position 3938 of SEQ ID NO: 317428
ucaucaguuccaggcaaag

SEQ ID NO: 490156 - RNA, 19 nt, Artificial Sequence
  Description of Artificial Sequence: Synthetic oligonucleotide
  Antisense Strand to SEQ ID NO: 490155
cuuugccuggaacugauga

SEQ ID NO: 490157 - RNA, 19 nt, Artificial Sequence
  Description of Artificial Sequence: Synthetic oligonucleotide
  Sense strand starting at position 3 of SEQ ID NO: 317429
cugaauuagguuuaacguu

SEQ ID NO: 490158 - RNA, 19 nt, Artificial Sequence
  Description of Artificial Sequence: Synthetic oligonucleotide
  Antisense Strand to SEQ ID NO: 490157
aacguuaaaccuaauucag

SEQ ID NO: 490159 - RNA, 19 nt, Artificial Sequence
  Description of Artificial Sequence: Synthetic oligonucleotide
  Sense strand starting at position 301 of SEQ ID NO: 317429
gaaaguacuccugguagaa

SEQ ID NO: 490160 - RNA, 19 nt, Artificial Sequence
  Description of Artificial Sequence: Synthetic oligonucleotide
  Antisense Strand to SEQ ID NO: 490159
uucuaccaggaguacuuuc

SEQ ID NO: 490161 - RNA, 19 nt, Artificial Sequence
  Description of Artificial Sequence: Synthetic oligonucleotide
  Sense strand starting at position 461 of SEQ ID NO: 317429
aggaaagggucaucaguca

SEQ ID NO: 490162 - RNA, 19 nt, Artificial Sequence
  Description of Artificial Sequence: Synthetic oligonucleotide
  Antisense Strand to SEQ ID NO: 490161
ugacugaugacccuuuccu

SEQ ID NO: 490163 - RNA, 19 nt, Artificial Sequence
  Description of Artificial Sequence: Synthetic oligonucleotide
  Sense strand starting at position 586 of SEQ ID NO: 317429
gcuggccauccgaguggua

SEQ ID NO: 490164 - RNA, 19 nt, Artificial Sequence
  Description of Artificial Sequence: Synthetic oligonucleotide
  Antisense Strand to SEQ ID NO: 490163
uaccacucggauggccagc

SEQ ID NO: 490165 - RNA, 19 nt, Artificial Sequence
  Description of Artificial Sequence: Synthetic oligonucleotide
  Sense strand starting at position 595 of SEQ ID NO: 317429
ccgagugguaccuaucaaa

SEQ ID NO: 490166 - RNA, 19 nt, Artificial Sequence
  Description of Artificial Sequence: Synthetic oligonucleotide
  Antisense Strand to SEQ ID NO: 490165
uuugauagguaccacucgg

SEQ ID NO: 490167 - RNA, 19 nt, Artificial Sequence
  Description of Artificial Sequence: Synthetic oligonucleotide
  Sense strand starting at position 725 of SEQ ID NO: 317429
gcagaaugaccuugagcuc

SEQ ID NO: 490168 - RNA, 19 nt, Artificial Sequence
  Description of Artificial Sequence: Synthetic oligonucleotide
  Antisense Strand to SEQ ID NO: 490167
gagcucaaggucauucugc

SEQ ID NO: 490169 - RNA, 19 nt, Artificial Sequence
  Description of Artificial Sequence: Synthetic oligonucleotide
  Sense strand starting at position 772 of SEQ ID NO: 317429
ucuguuacacuugaagauu

SEQ ID NO: 490170 - RNA, 19 nt, Artificial Sequence
  Description of Artificial Sequence: Synthetic oligonucleotide
  Antisense Strand to SEQ ID NO: 490169
aaucuucaaguguaacaga

SEQ ID NO: 490171 - RNA, 19 nt, Artificial Sequence
  Description of Artificial Sequence: Synthetic oligonucleotide
  Sense strand starting at position 820 of SEQ ID NO: 317429
aaagcaggugcccagaaau

SEQ ID NO: 490172 - RNA, 19 nt, Artificial Sequence
  Description of Artificial Sequence: Synthetic oligonucleotide
  Antisense Strand to SEQ ID NO: 490171
auuucugggcaccugcuuu

SEQ ID NO: 490173 - RNA, 19 nt, Artificial Sequence
  Description of Artificial Sequence: Synthetic oligonucleotide
  Sense strand starting at position 846 of SEQ ID NO: 317429
guaugacugucacuauaua

SEQ ID NO: 490174 - RNA, 19 nt, Artificial Sequence
  Description of Artificial Sequence: Synthetic oligonucleotide
  Antisense Strand to SEQ ID NO: 490173
uauauagugacagucauac

SEQ ID NO: 490175 - RNA, 19 nt, Artificial Sequence
  Description of Artificial Sequence: Synthetic oligonucleotide
  Sense strand starting at position 1116 of SEQ ID NO: 317429
cugaccucacaguaaguaa

SEQ ID NO: 490176 - RNA, 19 nt, Artificial Sequence
  Description of Artificial Sequence: Synthetic oligonucleotide
  Antisense Strand to SEQ ID NO: 490175
uuacuuacugugaggucag

SEQ ID NO: 490177 - RNA, 19 nt, Artificial Sequence
  Description of Artificial Sequence: Synthetic oligonucleotide
  Sense strand starting at position 1164 of SEQ ID NO: 317429
uggccuggguucuuuaaca

SEQ ID NO: 490178 - RNA, 19 nt, Artificial Sequence
  Description of Artificial Sequence: Synthetic oligonucleotide
  Antisense Strand to SEQ ID NO: 490177
uguuaaagaacccaggcca

SEQ ID NO: 490179 - RNA, 19 nt, Artificial Sequence
  Description of Artificial Sequence: Synthetic oligonucleotide
  Sense strand starting at position 1201 of SEQ ID NO: 317429
gaaagcguucucuaaguua

SEQ ID NO: 490180 - RNA, 19 nt, Artificial Sequence
  Description of Artificial Sequence: Synthetic oligonucleotide
  Antisense Strand to SEQ ID NO: 490179
uaacuuagagaacgcuuuc

SEQ ID NO: 490181 - RNA, 19 nt, Artificial Sequence
  Description of Artificial Sequence: Synthetic oligonucleotide
  Sense strand starting at position 1210 of SEQ ID NO: 317429
cucuaaguuacugggaaug

SEQ ID NO: 490182 - RNA, 19 nt, Artificial Sequence
  Description of Artificial Sequence: Synthetic oligonucleotide
  Antisense Strand to SEQ ID NO: 490181
cauucccaguaacuuagag

SEQ ID NO: 490183 - RNA, 19 nt, Artificial Sequence
  Description of Artificial Sequence: Synthetic oligonucleotide
  Sense strand starting at position 1220 of SEQ ID NO: 317429
cugggaauguuggcauucu

SEQ ID NO: 490184 - RNA, 19 nt, Artificial Sequence
  Description of Artificial Sequence: Synthetic oligonucleotide
  Antisense Strand to SEQ ID NO: 490183
agaaugccaacauucccag

SEQ ID NO: 490185 - RNA, 19 nt, Artificial Sequence
  Description of Artificial Sequence: Synthetic oligonucleotide
  Sense strand starting at position 1305 of SEQ ID NO: 317429
cgggcuggugaaugaaaca

SEQ ID NO: 490186 - RNA, 19 nt, Artificial Sequence
  Description of Artificial Sequence: Synthetic oligonucleotide
  Antisense Strand to SEQ ID NO: 490185
uguuucauucaccagcccg

SEQ ID NO: 490187 - RNA, 19 nt, Artificial Sequence
  Description of Artificial Sequence: Synthetic oligonucleotide
  Sense strand starting at position 1402 of SEQ ID NO: 317429
gcagucucaucuccauaca

SEQ ID NO: 490188 - RNA, 19 nt, Artificial Sequence
  Description of Artificial Sequence: Synthetic oligonucleotide
  Antisense Strand to SEQ ID NO: 490187
uguauggagaugagacugc

SEQ ID NO: 490189 - RNA, 19 nt, Artificial Sequence
  Description of Artificial Sequence: Synthetic oligonucleotide
  Sense strand starting at position 1534 of SEQ ID NO: 317429
ucucucgucguccuaguaa

SEQ ID NO: 490190 - RNA, 19 nt, Artificial Sequence
  Description of Artificial Sequence: Synthetic oligonucleotide
  Antisense Strand to SEQ ID NO: 490189
uuacuaggacgacgagaga

SEQ ID NO: 490191 - RNA, 19 nt, Artificial Sequence
  Description of Artificial Sequence: Synthetic oligonucleotide
  Sense strand starting at position 2163 of SEQ ID NO: 317429
ccuuaaagaucacccgaga

SEQ ID NO: 490192 - RNA, 19 nt, Artificial Sequence
  Description of Artificial Sequence: Synthetic oligonucleotide
  Antisense Strand to SEQ ID NO: 490191
ucucgggugaucuuuaagg

SEQ ID NO: 490193 - RNA, 19 nt, Artificial Sequence
  Description of Artificial Sequence: Synthetic oligonucleotide
  Sense strand starting at position 2166 of SEQ ID NO: 317429
uaaagaucacccgagagcu

SEQ ID NO: 490194 - RNA, 19 nt, Artificial Sequence
  Description of Artificial Sequence: Synthetic oligonucleotide
  Antisense Strand to SEQ ID NO: 490193
agcucucgggugaucuuua

SEQ ID NO: 490195 - RNA, 19 nt, Artificial Sequence
  Description of Artificial Sequence: Synthetic oligonucleotide
  Sense strand starting at position 2298 of SEQ ID NO: 317429
aguauuaacagguggguuu

SEQ ID NO: 490196 - RNA, 19 nt, Artificial Sequence
  Description of Artificial Sequence: Synthetic oligonucleotide
  Antisense Strand to SEQ ID NO: 490195
aaacccaccuguuaauacu

SEQ ID NO: 490197 - RNA, 19 nt, Artificial Sequence
  Description of Artificial Sequence: Synthetic oligonucleotide
  Sense strand starting at position 2299 of SEQ ID NO: 317429
guauuaacagguggguuua

SEQ ID NO: 490198 - RNA, 19 nt, Artificial Sequence
  Description of Artificial Sequence: Synthetic oligonucleotide
  Antisense Strand to SEQ ID NO: 490197
uaaacccaccuguuaauac

SEQ ID NO: 490199 - RNA, 19 nt, Artificial Sequence
  Description of Artificial Sequence: Synthetic oligonucleotide
  Sense strand starting at position 2743 of SEQ ID NO: 317429
uccuaaauccuugguagga

SEQ ID NO: 490200 - RNA, 19 nt, Artificial Sequence
  Description of Artificial Sequence: Synthetic oligonucleotide
  Antisense Strand to SEQ ID NO: 490199
uccuaccaaggauuuagga

SEQ ID NO: 490201 - RNA, 19 nt, Artificial Sequence
  Description of Artificial Sequence: Synthetic oligonucleotide
  Sense strand starting at position 2842 of SEQ ID NO: 317429
gagagacuugcaugcaaac

SEQ ID NO: 490202 - RNA, 19 nt, Artificial Sequence
  Description of Artificial Sequence: Synthetic oligonucleotide
  Antisense Strand to SEQ ID NO: 490201
guuugcaugcaagucucuc

SEQ ID NO: 490203 - RNA, 19 nt, Artificial Sequence
  Description of Artificial Sequence: Synthetic oligonucleotide
  Sense strand starting at position 3181 of SEQ ID NO: 317429
acuagauugcaaugauagu

SEQ ID NO: 490204 - RNA, 19 nt, Artificial Sequence
  Description of Artificial Sequence: Synthetic oligonucleotide
  Antisense Strand to SEQ ID NO: 490203
acuaucauugcaaucuagu

SEQ ID NO: 490205 - RNA, 19 nt, Artificial Sequence
  Description of Artificial Sequence: Synthetic oligonucleotide
  Sense strand starting at position 3192 of SEQ ID NO: 317429
augauaguugcauaacugu

SEQ ID NO: 490206 - RNA, 19 nt, Artificial Sequence
  Description of Artificial Sequence: Synthetic oligonucleotide
  Antisense Strand to SEQ ID NO: 490205
acaguuaugcaacuaucau

SEQ ID NO: 490207 - RNA, 19 nt, Artificial Sequence
  Description of Artificial Sequence: Synthetic oligonucleotide
  Sense strand starting at position 3195 of SEQ ID NO: 317429
auaguugcauaacuguaua

SEQ ID NO: 490208 - RNA, 19 nt, Artificial Sequence
  Description of Artificial Sequence: Synthetic oligonucleotide
  Antisense Strand to SEQ ID NO: 490207
uauacaguuaugcaacuau

SEQ ID NO: 490209 - RNA, 19 nt, Artificial Sequence
  Description of Artificial Sequence: Synthetic oligonucleotide
  Sense strand starting at position 3245 of SEQ ID NO: 317429
aguggaucucaugguauau

SEQ ID NO: 490210 - RNA, 19 nt, Artificial Sequence
  Description of Artificial Sequence: Synthetic oligonucleotide
  Antisense Strand to SEQ ID NO: 490209
auauaccaugagauccacu

SEQ ID NO: 490211 - RNA, 19 nt, Artificial Sequence
  Description of Artificial Sequence: Synthetic oligonucleotide
  Sense strand starting at position 3311 of SEQ ID NO: 317429
gcugauucuggcugaaagg

SEQ ID NO: 490212 - RNA, 19 nt, Artificial Sequence
  Description of Artificial Sequence: Synthetic oligonucleotide
  Antisense Strand to SEQ ID NO: 490211
ccuuucagccagaaucagc

SEQ ID NO: 490213 - RNA, 19 nt, Artificial Sequence
  Description of Artificial Sequence: Synthetic oligonucleotide
  Sense strand starting at position 3320 of SEQ ID NO: 317429
ggcugaaaggauuagcgaa

SEQ ID NO: 490214 - RNA, 19 nt, Artificial Sequence
  Description of Artificial Sequence: Synthetic oligonucleotide
  Antisense Strand to SEQ ID NO: 490213
uucgcuaauccuuucagcc

SEQ ID NO: 490215 - RNA, 19 nt, Artificial Sequence
  Description of Artificial Sequence: Synthetic oligonucleotide
  Sense strand starting at position 3470 of SEQ ID NO: 317429
ugcuauuuguuacuccauu

SEQ ID NO: 490216 - RNA, 19 nt, Artificial Sequence
  Description of Artificial Sequence: Synthetic oligonucleotide
  Antisense Strand to SEQ ID NO: 490215
aauggaguaacaaauagca

SEQ ID NO: 490217 - RNA, 19 nt, Artificial Sequence
  Description of Artificial Sequence: Synthetic oligonucleotide
  Sense strand starting at position 3678 of SEQ ID NO: 317429
ucaaaugcucuuggcauaa

SEQ ID NO: 490218 - RNA, 19 nt, Artificial Sequence
  Description of Artificial Sequence: Synthetic oligonucleotide
  Antisense Strand to SEQ ID NO: 490217
uuaugccaagagcauuuga

SEQ ID NO: 490219 - RNA, 19 nt, Artificial Sequence
  Description of Artificial Sequence: Synthetic oligonucleotide
  Sense strand starting at position 3682 of SEQ ID NO: 317429
augcucuuggcauaaguuu

SEQ ID NO: 490220 - RNA, 19 nt, Artificial Sequence
  Description of Artificial Sequence: Synthetic oligonucleotide
  Antisense Strand to SEQ ID NO: 490219
aaacuuaugccaagagcau

SEQ ID NO: 490221 - RNA, 19 nt, Artificial Sequence
  Description of Artificial Sequence: Synthetic oligonucleotide
  Sense strand starting at position 3892 of SEQ ID NO: 317429
uagaacaugcucuggguau

SEQ ID NO: 490222 - RNA, 19 nt, Artificial Sequence
  Description of Artificial Sequence: Synthetic oligonucleotide
  Antisense Strand to SEQ ID NO: 490221
auacccagagcauguucua

SEQ ID NO: 490223 - RNA, 19 nt, Artificial Sequence
  Description of Artificial Sequence: Synthetic oligonucleotide
  Sense strand starting at position 3894 of SEQ ID NO: 317429
gaacaugcucuggguauca

SEQ ID NO: 490224 - RNA, 19 nt, Artificial Sequence
  Description of Artificial Sequence: Synthetic oligonucleotide
  Antisense Strand to SEQ ID NO: 490223
ugauacccagagcauguuc

SEQ ID NO: 490225 - RNA, 19 nt, Artificial Sequence
  Description of Artificial Sequence: Synthetic oligonucleotide
  Sense strand starting at position 3896 of SEQ ID NO: 317429
acaugcucuggguaucaga

SEQ ID NO: 490226 - RNA, 19 nt, Artificial Sequence
  Description of Artificial Sequence: Synthetic oligonucleotide
  Antisense Strand to SEQ ID NO: 490225
ucugauacccagagcaugu

SEQ ID NO: 490227 - RNA, 19 nt, Artificial Sequence
  Description of Artificial Sequence: Synthetic oligonucleotide
  Sense strand starting at position 3903 of SEQ ID NO: 317429
cuggguaucagaugcuacu

SEQ ID NO: 490228 - RNA, 19 nt, Artificial Sequence
  Description of Artificial Sequence: Synthetic oligonucleotide
  Antisense Strand to SEQ ID NO: 490227
aguagcaucugauacccag

SEQ ID NO: 490229 - RNA, 19 nt, Artificial Sequence
  Description of Artificial Sequence: Synthetic oligonucleotide
  Sense strand starting at position 3948 of SEQ ID NO: 317429
ugugguaacagucaugguu

SEQ ID NO: 490230 - RNA, 19 nt, Artificial Sequence
  Description of Artificial Sequence: Synthetic oligonucleotide
  Antisense Strand to SEQ ID NO: 490229
aaccaugacuguuaccaca

SEQ ID NO: 490231 - RNA, 19 nt, Artificial Sequence
  Description of Artificial Sequence: Synthetic oligonucleotide
  Sense strand starting at position 3969 of SEQ ID NO: 317429
guaggagaaugucuuuacu

SEQ ID NO: 490232 - RNA, 19 nt, Artificial Sequence
  Description of Artificial Sequence: Synthetic oligonucleotide
  Antisense Strand to SEQ ID NO: 490231
aguaaagacauucuccuac

SEQ ID NO: 490233 - RNA, 19 nt, Artificial Sequence
  Description of Artificial Sequence: Synthetic oligonucleotide
  Sense strand starting at position 3971 of SEQ ID NO: 317429
aggagaaugucuuuacucu

SEQ ID NO: 490234 - RNA, 19 nt, Artificial Sequence
  Description of Artificial Sequence: Synthetic oligonucleotide
  Antisense Strand to SEQ ID NO: 490233
agaguaaagacauucuccu

SEQ ID NO: 490235 - RNA, 19 nt, Artificial Sequence
  Description of Artificial Sequence: Synthetic oligonucleotide
  Sense strand starting at position 3972 of SEQ ID NO: 317429
ggagaaugucuuuacucuu

SEQ ID NO: 490236 - RNA, 19 nt, Artificial Sequence
  Description of Artificial Sequence: Synthetic oligonucleotide
  Antisense Strand to SEQ ID NO: 490235
aagaguaaagacauucucc

SEQ ID NO: 490237 - RNA, 19 nt, Artificial Sequence
  Description of Artificial Sequence: Synthetic oligonucleotide
  Sense strand starting at position 142 of SEQ ID NO: 317430
gggaauggugcagagucaa

SEQ ID NO: 490238 - RNA, 19 nt, Artificial Sequence
  Description of Artificial Sequence: Synthetic oligonucleotide
  Antisense Strand to SEQ ID NO: 490237
uugacucugcaccauuccc

SEQ ID NO: 490239 - RNA, 19 nt, Artificial Sequence
  Description of Artificial Sequence: Synthetic oligonucleotide
  Sense strand starting at position 309 of SEQ ID NO: 317430
ugaucugcacagugcuaaa

SEQ ID NO: 490240 - RNA, 19 nt, Artificial Sequence
  Description of Artificial Sequence: Synthetic oligonucleotide
  Antisense Strand to SEQ ID NO: 490239
uuuagcacugugcagauca

SEQ ID NO: 490241 - RNA, 19 nt, Artificial Sequence
  Description of Artificial Sequence: Synthetic oligonucleotide
  Sense strand starting at position 349 of SEQ ID NO: 317430
cugaauuagguuuaacguu

SEQ ID NO: 490242 - RNA, 19 nt, Artificial Sequence
  Description of Artificial Sequence: Synthetic oligonucleotide
  Antisense Strand to SEQ ID NO: 490241
aacguuaaaccuaauucag

SEQ ID NO: 490243 - RNA, 19 nt, Artificial Sequence
  Description of Artificial Sequence: Synthetic oligonucleotide
  Sense strand starting at position 647 of SEQ ID NO: 317430
gaaaguacuccugguagaa

SEQ ID NO: 490244 - RNA, 19 nt, Artificial Sequence
  Description of Artificial Sequence: Synthetic oligonucleotide
  Antisense Strand to SEQ ID NO: 490243
uucuaccaggaguacuuuc

SEQ ID NO: 490245 - RNA, 19 nt, Artificial Sequence
  Description of Artificial Sequence: Synthetic oligonucleotide
  Sense strand starting at position 807 of SEQ ID NO: 317430
aggaaagggucaucaguca

SEQ ID NO: 490246 - RNA, 19 nt, Artificial Sequence
  Description of Artificial Sequence: Synthetic oligonucleotide
  Antisense Strand to SEQ ID NO: 490245
ugacugaugacccuuuccu

SEQ ID NO: 490247 - RNA, 19 nt, Artificial Sequence
  Description of Artificial Sequence: Synthetic oligonucleotide
  Sense strand starting at position 821 of SEQ ID NO: 317430
agucaaauccugugcuuaa

SEQ ID NO: 490248 - RNA, 19 nt, Artificial Sequence
  Description of Artificial Sequence: Synthetic oligonucleotide
  Antisense Strand to SEQ ID NO: 490247
uuaagcacaggauuugacu

SEQ ID NO: 490249 - RNA, 19 nt, Artificial Sequence
  Description of Artificial Sequence: Synthetic oligonucleotide
  Sense strand starting at position 822 of SEQ ID NO: 317430
gucaaauccugugcuuaaa

SEQ ID NO: 490250 - RNA, 19 nt, Artificial Sequence
  Description of Artificial Sequence: Synthetic oligonucleotide
  Antisense Strand to SEQ ID NO: 490249
uuuaagcacaggauuugac

SEQ ID NO: 490251 - RNA, 19 nt, Artificial Sequence
  Description of Artificial Sequence: Synthetic oligonucleotide
  Sense strand starting at position 932 of SEQ ID NO: 317430
gcuggccauccgaguggua

SEQ ID NO: 490252 - RNA, 19 nt, Artificial Sequence
  Description of Artificial Sequence: Synthetic oligonucleotide
  Antisense Strand to SEQ ID NO: 490251
uaccacucggauggccagc

SEQ ID NO: 490253 - RNA, 19 nt, Artificial Sequence
  Description of Artificial Sequence: Synthetic oligonucleotide
  Sense strand starting at position 941 of SEQ ID NO: 317430
ccgagugguaccuaucaaa

SEQ ID NO: 490254 - RNA, 19 nt, Artificial Sequence
  Description of Artificial Sequence: Synthetic oligonucleotide
  Antisense Strand to SEQ ID NO: 490253
uuugauagguaccacucgg

SEQ ID NO: 490255 - RNA, 19 nt, Artificial Sequence
  Description of Artificial Sequence: Synthetic oligonucleotide
  Sense strand starting at position 1071 of SEQ ID NO: 317430
gcagaaugaccuugagcuc

SEQ ID NO: 490256 - RNA, 19 nt, Artificial Sequence
  Description of Artificial Sequence: Synthetic oligonucleotide
  Antisense Strand to SEQ ID NO: 490255
gagcucaaggucauucugc

SEQ ID NO: 490257 - RNA, 19 nt, Artificial Sequence
  Description of Artificial Sequence: Synthetic oligonucleotide
  Sense strand starting at position 1118 of SEQ ID NO: 317430
ucuguuacacuugaagauu

SEQ ID NO: 490258 - RNA, 19 nt, Artificial Sequence
  Description of Artificial Sequence: Synthetic oligonucleotide
  Antisense Strand to SEQ ID NO: 490257
aaucuucaaguguaacaga

SEQ ID NO: 490259 - RNA, 19 nt, Artificial Sequence
  Description of Artificial Sequence: Synthetic oligonucleotide
  Sense strand starting at position 1166 of SEQ ID NO: 317430
aaagcaggugcccagaaau

SEQ ID NO: 490260 - RNA, 19 nt, Artificial Sequence
  Description of Artificial Sequence: Synthetic oligonucleotide
  Antisense Strand to SEQ ID NO: 490259
auuucugggcaccugcuuu

SEQ ID NO: 490261 - RNA, 19 nt, Artificial Sequence
  Description of Artificial Sequence: Synthetic oligonucleotide
  Sense strand starting at position 1192 of SEQ ID NO: 317430
guaugacugucacuauaua

SEQ ID NO: 490262 - RNA, 19 nt, Artificial Sequence
  Description of Artificial Sequence: Synthetic oligonucleotide
  Antisense Strand to SEQ ID NO: 490261
uauauagugacagucauac

SEQ ID NO: 490263 - RNA, 19 nt, Artificial Sequence
  Description of Artificial Sequence: Synthetic oligonucleotide
  Sense strand starting at position 1462 of SEQ ID NO: 317430
cugaccucacaguaaguaa

SEQ ID NO: 490264 - RNA, 19 nt, Artificial Sequence
  Description of Artificial Sequence: Synthetic oligonucleotide
  Antisense Strand to SEQ ID NO: 490263
uuacuuacugugaggucag

SEQ ID NO: 490265 - RNA, 19 nt, Artificial Sequence
  Description of Artificial Sequence: Synthetic oligonucleotide
  Sense strand starting at position 1510 of SEQ ID NO: 317430
uggccuggguucuuuaaca

SEQ ID NO: 490266 - RNA, 19 nt, Artificial Sequence
  Description of Artificial Sequence: Synthetic oligonucleotide
  Antisense Strand to SEQ ID NO: 490265
uguuaaagaacccaggcca

SEQ ID NO: 490267 - RNA, 19 nt, Artificial Sequence
  Description of Artificial Sequence: Synthetic oligonucleotide
  Sense strand starting at position 1547 of SEQ ID NO: 317430
gaaagcguucucuaaguua

SEQ ID NO: 490268 - RNA, 19 nt, Artificial Sequence
  Description of Artificial Sequence: Synthetic oligonucleotide
  Antisense Strand to SEQ ID NO: 490267
uaacuuagagaacgcuuuc

SEQ ID NO: 490269 - RNA, 19 nt, Artificial Sequence
  Description of Artificial Sequence: Synthetic oligonucleotide
  Sense strand starting at position 1556 of SEQ ID NO: 317430
cucuaaguuacugggaaug

SEQ ID NO: 490270 - RNA, 19 nt, Artificial Sequence
  Description of Artificial Sequence: Synthetic oligonucleotide
  Antisense Strand to SEQ ID NO: 490269
cauucccaguaacuuagag

SEQ ID NO: 490271 - RNA, 19 nt, Artificial Sequence
  Description of Artificial Sequence: Synthetic oligonucleotide
  Sense strand starting at position 1566 of SEQ ID NO: 317430
cugggaauguuggcauucu

SEQ ID NO: 490272 - RNA, 19 nt, Artificial Sequence
  Description of Artificial Sequence: Synthetic oligonucleotide
  Antisense Strand to SEQ ID NO: 490271
agaaugccaacauucccag

SEQ ID NO: 490273 - RNA, 19 nt, Artificial Sequence
  Description of Artificial Sequence: Synthetic oligonucleotide
  Sense strand starting at position 1574 of SEQ ID NO: 317430
guuggcauucugggaagca

SEQ ID NO: 490274 - RNA, 19 nt, Artificial Sequence
  Description of Artificial Sequence: Synthetic oligonucleotide
  Antisense Strand to SEQ ID NO: 490273
ugcuucccagaaugccaac

SEQ ID NO: 490275 - RNA, 19 nt, Artificial Sequence
  Description of Artificial Sequence: Synthetic oligonucleotide
  Sense strand starting at position 1651 of SEQ ID NO: 317430
cgggcuggugaaugaaaca

SEQ ID NO: 490276 - RNA, 19 nt, Artificial Sequence
  Description of Artificial Sequence: Synthetic oligonucleotide
  Antisense Strand to SEQ ID NO: 490275
uguuucauucaccagcccg

SEQ ID NO: 490277 - RNA, 19 nt, Artificial Sequence
  Description of Artificial Sequence: Synthetic oligonucleotide
  Sense strand starting at position 1748 of SEQ ID NO: 317430
gcagucucaucuccauaca

SEQ ID NO: 490278 - RNA, 19 nt, Artificial Sequence
  Description of Artificial Sequence: Synthetic oligonucleotide
  Antisense Strand to SEQ ID NO: 490277
uguauggagaugagacugc

SEQ ID NO: 490279 - RNA, 19 nt, Artificial Sequence
  Description of Artificial Sequence: Synthetic oligonucleotide
  Sense strand starting at position 1880 of SEQ ID NO: 317430
ucucucgucguccuaguaa

SEQ ID NO: 490280 - RNA, 19 nt, Artificial Sequence
  Description of Artificial Sequence: Synthetic oligonucleotide
  Antisense Strand to SEQ ID NO: 490279
uuacuaggacgacgagaga

SEQ ID NO: 490281 - RNA, 19 nt, Artificial Sequence
  Description of Artificial Sequence: Synthetic oligonucleotide
  Sense strand starting at position 2509 of SEQ ID NO: 317430
ccuuaaagaucacccgaga

SEQ ID NO: 490282 - RNA, 19 nt, Artificial Sequence
  Description of Artificial Sequence: Synthetic oligonucleotide
  Antisense Strand to SEQ ID NO: 490281
ucucgggugaucuuuaagg

SEQ ID NO: 490283 - RNA, 19 nt, Artificial Sequence
  Description of Artificial Sequence: Synthetic oligonucleotide
  Sense strand starting at position 2512 of SEQ ID NO: 317430
uaaagaucacccgagagcu

SEQ ID NO: 490284 - RNA, 19 nt, Artificial Sequence
  Description of Artificial Sequence: Synthetic oligonucleotide
  Antisense Strand to SEQ ID NO: 490283
agcucucgggugaucuuua

SEQ ID NO: 490285 - RNA, 19 nt, Artificial Sequence
  Description of Artificial Sequence: Synthetic oligonucleotide
  Sense strand starting at position 2644 of SEQ ID NO: 317430
aguauuaacagguggguuu

SEQ ID NO: 490286 - RNA, 19 nt, Artificial Sequence
  Description of Artificial Sequence: Synthetic oligonucleotide
  Antisense Strand to SEQ ID NO: 490285
aaacccaccuguuaauacu

SEQ ID NO: 490287 - RNA, 19 nt, Artificial Sequence
  Description of Artificial Sequence: Synthetic oligonucleotide
  Sense strand starting at position 2645 of SEQ ID NO: 317430
guauuaacagguggguuua

SEQ ID NO: 490288 - RNA, 19 nt, Artificial Sequence
  Description of Artificial Sequence: Synthetic oligonucleotide
  Antisense Strand to SEQ ID NO: 490287
uaaacccaccuguuaauac

SEQ ID NO: 490289 - RNA, 19 nt, Artificial Sequence
  Description of Artificial Sequence: Synthetic oligonucleotide
  Sense strand starting at position 2953 of SEQ ID NO: 317430
cgcagaucuccugggauuc

SEQ ID NO: 490290 - RNA, 19 nt, Artificial Sequence
  Description of Artificial Sequence: Synthetic oligonucleotide
  Antisense Strand to SEQ ID NO: 490289
gaaucccaggagaucugcg

SEQ ID NO: 490291 - RNA, 19 nt, Artificial Sequence
  Description of Artificial Sequence: Synthetic oligonucleotide
  Sense strand starting at position 3089 of SEQ ID NO: 317430
uccuaaauccuugguagga

SEQ ID NO: 490292 - RNA, 19 nt, Artificial Sequence
  Description of Artificial Sequence: Synthetic oligonucleotide
  Antisense Strand to SEQ ID NO: 490291
uccuaccaaggauuuagga

SEQ ID NO: 490293 - RNA, 19 nt, Artificial Sequence
  Description of Artificial Sequence: Synthetic oligonucleotide
  Sense strand starting at position 3188 of SEQ ID NO: 317430
gagagacuugcaugcaaac

SEQ ID NO: 490294 - RNA, 19 nt, Artificial Sequence
  Description of Artificial Sequence: Synthetic oligonucleotide
  Antisense Strand to SEQ ID NO: 490293
guuugcaugcaagucucuc

SEQ ID NO: 490295 - RNA, 19 nt, Artificial Sequence
  Description of Artificial Sequence: Synthetic oligonucleotide
  Sense strand starting at position 3371 of SEQ ID NO: 317430
uuccauuuaugugacacuu

SEQ ID NO: 490296 - RNA, 19 nt, Artificial Sequence
  Description of Artificial Sequence: Synthetic oligonucleotide
  Antisense Strand to SEQ ID NO: 490295
aagugucacauaaauggaa

SEQ ID NO: 490297 - RNA, 19 nt, Artificial Sequence
  Description of Artificial Sequence: Synthetic oligonucleotide
  Sense strand starting at position 3373 of SEQ ID NO: 317430
ccauuuaugugacacuucu

SEQ ID NO: 490298 - RNA, 19 nt, Artificial Sequence
  Description of Artificial Sequence: Synthetic oligonucleotide
  Antisense Strand to SEQ ID NO: 490297
agaagugucacauaaaugg

SEQ ID NO: 490299 - RNA, 19 nt, Artificial Sequence
  Description of Artificial Sequence: Synthetic oligonucleotide
  Sense strand starting at position 3527 of SEQ ID NO: 317430
acuagauugcaaugauagu

SEQ ID NO: 490300 - RNA, 19 nt, Artificial Sequence
  Description of Artificial Sequence: Synthetic oligonucleotide
  Antisense Strand to SEQ ID NO: 490299
acuaucauugcaaucuagu

SEQ ID NO: 490301 - RNA, 19 nt, Artificial Sequence
  Description of Artificial Sequence: Synthetic oligonucleotide
  Sense strand starting at position 3533 of SEQ ID NO: 317430
uugcaaugauaguugcaua

SEQ ID NO: 490302 - RNA, 19 nt, Artificial Sequence
  Description of Artificial Sequence: Synthetic oligonucleotide
  Antisense Strand to SEQ ID NO: 490301
uaugcaacuaucauugcaa

SEQ ID NO: 490303 - RNA, 19 nt, Artificial Sequence
  Description of Artificial Sequence: Synthetic oligonucleotide
  Sense strand starting at position 3538 of SEQ ID NO: 317430
augauaguugcauaacugu

SEQ ID NO: 490304 - RNA, 19 nt, Artificial Sequence
  Description of Artificial Sequence: Synthetic oligonucleotide
  Antisense Strand to SEQ ID NO: 490303
acaguuaugcaacuaucau

SEQ ID NO: 490305 - RNA, 19 nt, Artificial Sequence
  Description of Artificial Sequence: Synthetic oligonucleotide
  Sense strand starting at position 3541 of SEQ ID NO: 317430
auaguugcauaacuguaua

SEQ ID NO: 490306 - RNA, 19 nt, Artificial Sequence
  Description of Artificial Sequence: Synthetic oligonucleotide
  Antisense Strand to SEQ ID NO: 490305
uauacaguuaugcaacuau

SEQ ID NO: 490307 - RNA, 19 nt, Artificial Sequence
  Description of Artificial Sequence: Synthetic oligonucleotide
  Sense strand starting at position 3591 of SEQ ID NO: 317430
aguggaucucaugguauau

SEQ ID NO: 490308 - RNA, 19 nt, Artificial Sequence
  Description of Artificial Sequence: Synthetic oligonucleotide
  Antisense Strand to SEQ ID NO: 490307
auauaccaugagauccacu

SEQ ID NO: 490309 - RNA, 19 nt, Artificial Sequence
  Description of Artificial Sequence: Synthetic oligonucleotide
  Sense strand starting at position 3657 of SEQ ID NO: 317430
gcugauucuggcugaaagg

SEQ ID NO: 490310 - RNA, 19 nt, Artificial Sequence
  Description of Artificial Sequence: Synthetic oligonucleotide
  Antisense Strand to SEQ ID NO: 490309
ccuuucagccagaaucagc

SEQ ID NO: 490311 - RNA, 19 nt, Artificial Sequence
  Description of Artificial Sequence: Synthetic oligonucleotide
  Sense strand starting at position 3666 of SEQ ID NO: 317430
ggcugaaaggauuagcgaa

SEQ ID NO: 490312 - RNA, 19 nt, Artificial Sequence
  Description of Artificial Sequence: Synthetic oligonucleotide
  Antisense Strand to SEQ ID NO: 490311
uucgcuaauccuuucagcc

SEQ ID NO: 490313 - RNA, 19 nt, Artificial Sequence
  Description of Artificial Sequence: Synthetic oligonucleotide
  Sense strand starting at position 3772 of SEQ ID NO: 317430
uagcauggcugccuaaaga

SEQ ID NO: 490314 - RNA, 19 nt, Artificial Sequence
  Description of Artificial Sequence: Synthetic oligonucleotide
  Antisense Strand to SEQ ID NO: 490313
ucuuuaggcagccaugcua

SEQ ID NO: 490315 - RNA, 19 nt, Artificial Sequence
  Description of Artificial Sequence: Synthetic oligonucleotide
  Sense strand starting at position 3816 of SEQ ID NO: 317430
ugcuauuuguuacuccauu

SEQ ID NO: 490316 - RNA, 19 nt, Artificial Sequence
  Description of Artificial Sequence: Synthetic oligonucleotide
  Antisense Strand to SEQ ID NO: 490315
aauggaguaacaaauagca

SEQ ID NO: 490317 - RNA, 19 nt, Artificial Sequence
  Description of Artificial Sequence: Synthetic oligonucleotide
  Sense strand starting at position 441 of SEQ ID NO: 317431
agcugacacccuugauguu

SEQ ID NO: 490318 - RNA, 19 nt, Artificial Sequence
  Description of Artificial Sequence: Synthetic oligonucleotide
  Antisense Strand to SEQ ID NO: 490317
aacaucaagggugucagcu

SEQ ID NO: 490319 - RNA, 19 nt, Artificial Sequence
  Description of Artificial Sequence: Synthetic oligonucleotide
  Sense strand starting at position 442 of SEQ ID NO: 317431
gcugacacccuugauguuu

SEQ ID NO: 490320 - RNA, 19 nt, Artificial Sequence
  Description of Artificial Sequence: Synthetic oligonucleotide
  Antisense Strand to SEQ ID NO: 490319
aaacaucaagggugucagc

SEQ ID NO: 490321 - RNA, 19 nt, Artificial Sequence
  Description of Artificial Sequence: Synthetic oligonucleotide
  Sense strand starting at position 627 of SEQ ID NO: 317431
ugagauauggguugguacu

SEQ ID NO: 490322 - RNA, 19 nt, Artificial Sequence
  Description of Artificial Sequence: Synthetic oligonucleotide
  Antisense Strand to SEQ ID NO: 490321
aguaccaacccauaucuca

SEQ ID NO: 490323 - RNA, 19 nt, Artificial Sequence
  Description of Artificial Sequence: Synthetic oligonucleotide
  Sense strand starting at position 637 of SEQ ID NO: 317431
guugguacuggccagauaa

SEQ ID NO: 490324 - RNA, 19 nt, Artificial Sequence
  Description of Artificial Sequence: Synthetic oligonucleotide
  Antisense Strand to SEQ ID NO: 490323
uuaucuggccaguaccaac

SEQ ID NO: 490325 - RNA, 19 nt, Artificial Sequence
  Description of Artificial Sequence: Synthetic oligonucleotide
  Sense strand starting at position 855 of SEQ ID NO: 317431
gccucagugcgugaaauaa

SEQ ID NO: 490326 - RNA, 19 nt, Artificial Sequence
  Description of Artificial Sequence: Synthetic oligonucleotide
  Antisense Strand to SEQ ID NO: 490325
uuauuucacgcacugaggc

SEQ ID NO: 490327 - RNA, 19 nt, Artificial Sequence
  Description of Artificial Sequence: Synthetic oligonucleotide
  Sense strand starting at position 945 of SEQ ID NO: 317431
cuuccaauuccacgcuaga

SEQ ID NO: 490328 - RNA, 19 nt, Artificial Sequence
  Description of Artificial Sequence: Synthetic oligonucleotide
  Antisense Strand to SEQ ID NO: 490327
ucuagcguggaauuggaag

SEQ ID NO: 490329 - RNA, 19 nt, Artificial Sequence
  Description of Artificial Sequence: Synthetic oligonucleotide
  Sense strand starting at position 948 of SEQ ID NO: 317431
ccaauuccacgcuagagaa

SEQ ID NO: 490330 - RNA, 19 nt, Artificial Sequence
  Description of Artificial Sequence: Synthetic oligonucleotide
  Antisense Strand to SEQ ID NO: 490329
uucucuagcguggaauugg

SEQ ID NO: 490331 - RNA, 19 nt, Artificial Sequence
  Description of Artificial Sequence: Synthetic oligonucleotide
  Sense strand starting at position 1160 of SEQ ID NO: 317431
ggacuuacuccucaaggca

SEQ ID NO: 490332 - RNA, 19 nt, Artificial Sequence
  Description of Artificial Sequence: Synthetic oligonucleotide
  Antisense Strand to SEQ ID NO: 490331
ugccuugaggaguaagucc

SEQ ID NO: 490333 - RNA, 19 nt, Artificial Sequence
  Description of Artificial Sequence: Synthetic oligonucleotide
  Sense strand starting at position 1521 of SEQ ID NO: 317431
cgucaaguuccguaaagga

SEQ ID NO: 490334 - RNA, 19 nt, Artificial Sequence
  Description of Artificial Sequence: Synthetic oligonucleotide
  Antisense Strand to SEQ ID NO: 490333
uccuuuacggaacuugacg

SEQ ID NO: 490335 - RNA, 19 nt, Artificial Sequence
  Description of Artificial Sequence: Synthetic oligonucleotide
  Sense strand starting at position 2548 of SEQ ID NO: 317431
cucucuuaucgcgcuguga

SEQ ID NO: 490336 - RNA, 19 nt, Artificial Sequence
  Description of Artificial Sequence: Synthetic oligonucleotide
  Antisense Strand to SEQ ID NO: 490335
ucacagcgcgauaagagag

SEQ ID NO: 490337 - RNA, 19 nt, Artificial Sequence
  Description of Artificial Sequence: Synthetic oligonucleotide
  Sense strand starting at position 2596 of SEQ ID NO: 317431
uggucugcacuuuaguauu

SEQ ID NO: 490338 - RNA, 19 nt, Artificial Sequence
  Description of Artificial Sequence: Synthetic oligonucleotide
  Antisense Strand to SEQ ID NO: 490337
aauacuaaagugcagacca

SEQ ID NO: 490339 - RNA, 19 nt, Artificial Sequence
  Description of Artificial Sequence: Synthetic oligonucleotide
  Sense strand starting at position 2654 of SEQ ID NO: 317431
aagucacagucucugaaga

SEQ ID NO: 490340 - RNA, 19 nt, Artificial Sequence
  Description of Artificial Sequence: Synthetic oligonucleotide
  Antisense Strand to SEQ ID NO: 490339
ucuucagagacugugacuu

SEQ ID NO: 490341 - RNA, 19 nt, Artificial Sequence
  Description of Artificial Sequence: Synthetic oligonucleotide
  Sense strand starting at position 2655 of SEQ ID NO: 317431
agucacagucucugaagau

SEQ ID NO: 490342 - RNA, 19 nt, Artificial Sequence
  Description of Artificial Sequence: Synthetic oligonucleotide
  Antisense Strand to SEQ ID NO: 490341
aucuucagagacugugacu

SEQ ID NO: 490343 - RNA, 19 nt, Artificial Sequence
  Description of Artificial Sequence: Synthetic oligonucleotide
  Sense strand starting at position 2677 of SEQ ID NO: 317431
auggaagcaucaucaguuu

SEQ ID NO: 490344 - RNA, 19 nt, Artificial Sequence
  Description of Artificial Sequence: Synthetic oligonucleotide
  Antisense Strand to SEQ ID NO: 490343
aaacugaugaugcuuccau

SEQ ID NO: 490345 - RNA, 19 nt, Artificial Sequence
  Description of Artificial Sequence: Synthetic oligonucleotide
  Sense strand starting at position 2739 of SEQ ID NO: 317431
uggcguuaucugcauauuu

SEQ ID NO: 490346 - RNA, 19 nt, Artificial Sequence
  Description of Artificial Sequence: Synthetic oligonucleotide
  Antisense Strand to SEQ ID NO: 490345
aaauaugcagauaacgcca

SEQ ID NO: 490347 - RNA, 19 nt, Artificial Sequence
  Description of Artificial Sequence: Synthetic oligonucleotide
  Sense strand starting at position 2919 of SEQ ID NO: 317431
gcugguagagaguauguga

SEQ ID NO: 490348 - RNA, 19 nt, Artificial Sequence
  Description of Artificial Sequence: Synthetic oligonucleotide
  Antisense Strand to SEQ ID NO: 490347
ucacauacucucuaccagc

SEQ ID NO: 490349 - RNA, 19 nt, Artificial Sequence
  Description of Artificial Sequence: Synthetic oligonucleotide
  Sense strand starting at position 2994 of SEQ ID NO: 317431
ugaggaaagccgggcuuau

SEQ ID NO: 490350 - RNA, 19 nt, Artificial Sequence
  Description of Artificial Sequence: Synthetic oligonucleotide
  Antisense Strand to SEQ ID NO: 490349
auaagcccggcuuuccuca

SEQ ID NO: 490351 - RNA, 19 nt, Artificial Sequence
  Description of Artificial Sequence: Synthetic oligonucleotide
  Sense strand starting at position 3005 of SEQ ID NO: 317431
gggcuuaucuuguuuacug

SEQ ID NO: 490352 - RNA, 19 nt, Artificial Sequence
  Description of Artificial Sequence: Synthetic oligonucleotide
  Antisense Strand to SEQ ID NO: 490351
caguaaacaagauaagccc

SEQ ID NO: 490353 - RNA, 19 nt, Artificial Sequence
  Description of Artificial Sequence: Synthetic oligonucleotide
  Sense strand starting at position 3039 of SEQ ID NO: 317431
cuggcaaauaguugguauu

SEQ ID NO: 490354 - RNA, 19 nt, Artificial Sequence
  Description of Artificial Sequence: Synthetic oligonucleotide
  Antisense Strand to SEQ ID NO: 490353
aauaccaacuauuugccag

SEQ ID NO: 490355 - RNA, 19 nt, Artificial Sequence
  Description of Artificial Sequence: Synthetic oligonucleotide
  Sense strand starting at position 3042 of SEQ ID NO: 317431
gcaaauaguugguauuuga

SEQ ID NO: 490356 - RNA, 19 nt, Artificial Sequence
  Description of Artificial Sequence: Synthetic oligonucleotide
  Antisense Strand to SEQ ID NO: 490355
ucaaauaccaacuauuugc

SEQ ID NO: 490357 - RNA, 19 nt, Artificial Sequence
  Description of Artificial Sequence: Synthetic oligonucleotide
  Sense strand starting at position 3061 of SEQ ID NO: 317431
cguuauuggguugucguua

SEQ ID NO: 490358 - RNA, 19 nt, Artificial Sequence
  Description of Artificial Sequence: Synthetic oligonucleotide
  Antisense Strand to SEQ ID NO: 490357
uaacgacaacccaauaacg

SEQ ID NO: 490359 - RNA, 19 nt, Artificial Sequence
  Description of Artificial Sequence: Synthetic oligonucleotide
  Sense strand starting at position 3066 of SEQ ID NO: 317431
uuggguugucguuagacuc

SEQ ID NO: 490360 - RNA, 19 nt, Artificial Sequence
  Description of Artificial Sequence: Synthetic oligonucleotide
  Antisense Strand to SEQ ID NO: 490359
gagucuaacgacaacccaa

SEQ ID NO: 490361 - RNA, 19 nt, Artificial Sequence
  Description of Artificial Sequence: Synthetic oligonucleotide
  Sense strand starting at position 3177 of SEQ ID NO: 317431
gaggguugucacuggcaga

SEQ ID NO: 490362 - RNA, 19 nt, Artificial Sequence
  Description of Artificial Sequence: Synthetic oligonucleotide
  Antisense Strand to SEQ ID NO: 490361
ucugccagugacaacccuc

SEQ ID NO: 490363 - RNA, 19 nt, Artificial Sequence
  Description of Artificial Sequence: Synthetic oligonucleotide
  Sense strand starting at position 3178 of SEQ ID NO: 317431
aggguugucacuggcagau

SEQ ID NO: 490364 - RNA, 19 nt, Artificial Sequence
  Description of Artificial Sequence: Synthetic oligonucleotide
  Antisense Strand to SEQ ID NO: 490363
aucugccagugacaacccu

SEQ ID NO: 490365 - RNA, 19 nt, Artificial Sequence
  Description of Artificial Sequence: Synthetic oligonucleotide
  Sense strand starting at position 3182 of SEQ ID NO: 317431
uugucacuggcagauaaau

SEQ ID NO: 490366 - RNA, 19 nt, Artificial Sequence
  Description of Artificial Sequence: Synthetic oligonucleotide
  Antisense Strand to SEQ ID NO: 490365
auuuaucugccagugacaa

SEQ ID NO: 490367 - RNA, 19 nt, Artificial Sequence
  Description of Artificial Sequence: Synthetic oligonucleotide
  Sense strand starting at position 3280 of SEQ ID NO: 317431
ggaggaguuuccgcauuac

SEQ ID NO: 490368 - RNA, 19 nt, Artificial Sequence
  Description of Artificial Sequence: Synthetic oligonucleotide
  Antisense Strand to SEQ ID NO: 490367
guaaugcggaaacuccucc

SEQ ID NO: 490369 - RNA, 19 nt, Artificial Sequence
  Description of Artificial Sequence: Synthetic oligonucleotide
  Sense strand starting at position 3284 of SEQ ID NO: 317431
gaguuuccgcauuacagga

SEQ ID NO: 490370 - RNA, 19 nt, Artificial Sequence
  Description of Artificial Sequence: Synthetic oligonucleotide
  Antisense Strand to SEQ ID NO: 490369
uccuguaaugcggaaacuc

SEQ ID NO: 490371 - RNA, 19 nt, Artificial Sequence
  Description of Artificial Sequence: Synthetic oligonucleotide
  Sense strand starting at position 3343 of SEQ ID NO: 317431
ggucguuagggaugggcua

SEQ ID NO: 490372 - RNA, 19 nt, Artificial Sequence
  Description of Artificial Sequence: Synthetic oligonucleotide
  Antisense Strand to SEQ ID NO: 490371
uagcccaucccuaacgacc

SEQ ID NO: 490373 - RNA, 19 nt, Artificial Sequence
  Description of Artificial Sequence: Synthetic oligonucleotide
  Sense strand starting at position 3414 of SEQ ID NO: 317431
gcaucuaugagauaugacg

SEQ ID NO: 490374 - RNA, 19 nt, Artificial Sequence
  Description of Artificial Sequence: Synthetic oligonucleotide
  Antisense Strand to SEQ ID NO: 490373
cgucauaucucauagaugc

SEQ ID NO: 490375 - RNA, 19 nt, Artificial Sequence
  Description of Artificial Sequence: Synthetic oligonucleotide
  Sense strand starting at position 3423 of SEQ ID NO: 317431
agauaugacgcagaagcaa

SEQ ID NO: 490376 - RNA, 19 nt, Artificial Sequence
  Description of Artificial Sequence: Synthetic oligonucleotide
  Antisense Strand to SEQ ID NO: 490375
uugcuucugcgucauaucu

SEQ ID NO: 490377 - RNA, 19 nt, Artificial Sequence
  Description of Artificial Sequence: Synthetic oligonucleotide
  Sense strand starting at position 3455 of SEQ ID NO: 317431
aggcgaucucuugaaagca

SEQ ID NO: 490378 - RNA, 19 nt, Artificial Sequence
  Description of Artificial Sequence: Synthetic oligonucleotide
  Antisense Strand to SEQ ID NO: 490377
ugcuuucaagagaucgccu

SEQ ID NO: 490379 - RNA, 19 nt, Artificial Sequence
  Description of Artificial Sequence: Synthetic oligonucleotide
  Sense strand starting at position 3491 of SEQ ID NO: 317431
cgcagugcugcaucacaga

SEQ ID NO: 490380 - RNA, 19 nt, Artificial Sequence
  Description of Artificial Sequence: Synthetic oligonucleotide
  Antisense Strand to SEQ ID NO: 490379
ucugugaugcagcacugcg

SEQ ID NO: 490381 - RNA, 19 nt, Artificial Sequence
  Description of Artificial Sequence: Synthetic oligonucleotide
  Sense strand starting at position 3637 of SEQ ID NO: 317431
ucagucgugacuuaauuag

SEQ ID NO: 490382 - RNA, 19 nt, Artificial Sequence
  Description of Artificial Sequence: Synthetic oligonucleotide
  Antisense Strand to SEQ ID NO: 490381
cuaauuaagucacgacuga

SEQ ID NO: 490383 - RNA, 19 nt, Artificial Sequence
  Description of Artificial Sequence: Synthetic oligonucleotide
  Sense strand starting at position 3654 of SEQ ID NO: 317431
agcaauuuaaugcguugga

SEQ ID NO: 490384 - RNA, 19 nt, Artificial Sequence
  Description of Artificial Sequence: Synthetic oligonucleotide
  Antisense Strand to SEQ ID NO: 490383
uccaacgcauuaaauugcu

SEQ ID NO: 490385 - RNA, 19 nt, Artificial Sequence
  Description of Artificial Sequence: Synthetic oligonucleotide
  Sense strand starting at position 3655 of SEQ ID NO: 317431
gcaauuuaaugcguuggau

SEQ ID NO: 490386 - RNA, 19 nt, Artificial Sequence
  Description of Artificial Sequence: Synthetic oligonucleotide
  Antisense Strand to SEQ ID NO: 490385
auccaacgcauuaaauugc

SEQ ID NO: 490387 - RNA, 19 nt, Artificial Sequence
  Description of Artificial Sequence: Synthetic oligonucleotide
  Sense strand starting at position 3751 of SEQ ID NO: 317431
aggaaccauuguucuguau

SEQ ID NO: 490388 - RNA, 19 nt, Artificial Sequence
  Description of Artificial Sequence: Synthetic oligonucleotide
  Antisense Strand to SEQ ID NO: 490387
auacagaacaaugguuccu

SEQ ID NO: 490389 - RNA, 19 nt, Artificial Sequence
  Description of Artificial Sequence: Synthetic oligonucleotide
  Sense strand starting at position 3758 of SEQ ID NO: 317431
auuguucuguauccagaac

SEQ ID NO: 490390 - RNA, 19 nt, Artificial Sequence
  Description of Artificial Sequence: Synthetic oligonucleotide
  Antisense Strand to SEQ ID NO: 490389
guucuggauacagaacaau

SEQ ID NO: 490391 - RNA, 19 nt, Artificial Sequence
  Description of Artificial Sequence: Synthetic oligonucleotide
  Sense strand starting at position 3896 of SEQ ID NO: 317431
ugauuugacccacgccuua

SEQ ID NO: 490392 - RNA, 19 nt, Artificial Sequence
  Description of Artificial Sequence: Synthetic oligonucleotide
  Antisense Strand to SEQ ID NO: 490391
uaaggcgugggucaaauca

SEQ ID NO: 490393 - RNA, 19 nt, Artificial Sequence
  Description of Artificial Sequence: Synthetic oligonucleotide
  Sense strand starting at position 3934 of SEQ ID NO: 317431
agacguguucuagacaaau

SEQ ID NO: 490394 - RNA, 19 nt, Artificial Sequence
  Description of Artificial Sequence: Synthetic oligonucleotide
  Antisense Strand to SEQ ID NO: 490393
auuugucuagaacacgucu

SEQ ID NO: 490395 - RNA, 19 nt, Artificial Sequence
  Description of Artificial Sequence: Synthetic oligonucleotide
  Sense strand starting at position 3960 of SEQ ID NO: 317431
gcaacuugagucugacaaa

SEQ ID NO: 490396 - RNA, 19 nt, Artificial Sequence
  Description of Artificial Sequence: Synthetic oligonucleotide
  Antisense Strand to SEQ ID NO: 490395
uuugucagacucaaguugc

SEQ ID NO: 490397 - RNA, 19 nt, Artificial Sequence
  Description of Artificial Sequence: Synthetic oligonucleotide
  Sense strand starting at position 655 of SEQ ID NO: 317432
cucagaauugcuuguggga

SEQ ID NO: 490398 - RNA, 19 nt, Artificial Sequence
  Description of Artificial Sequence: Synthetic oligonucleotide
  Antisense Strand to SEQ ID NO: 490397
ucccacaagcaauucugag

SEQ ID NO: 490399 - RNA, 19 nt, Artificial Sequence
  Description of Artificial Sequence: Synthetic oligonucleotide
  Sense strand starting at position 703 of SEQ ID NO: 317432
gugugacaguuucucauag

SEQ ID NO: 490400 - RNA, 19 nt, Artificial Sequence
  Description of Artificial Sequence: Synthetic oligonucleotide
  Antisense Strand to SEQ ID NO: 490399
cuaugagaaacugucacac

SEQ ID NO: 490401 - RNA, 19 nt, Artificial Sequence
  Description of Artificial Sequence: Synthetic oligonucleotide
  Sense strand starting at position 704 of SEQ ID NO: 317432
ugugacaguuucucauaga

SEQ ID NO: 490402 - RNA, 19 nt, Artificial Sequence
  Description of Artificial Sequence: Synthetic oligonucleotide
  Antisense Strand to SEQ ID NO: 490401
ucuaugagaaacugucaca

SEQ ID NO: 490403 - RNA, 19 nt, Artificial Sequence
  Description of Artificial Sequence: Synthetic oligonucleotide
  Sense strand starting at position 807 of SEQ ID NO: 317432
aaucguauacuagaaugua

SEQ ID NO: 490404 - RNA, 19 nt, Artificial Sequence
  Description of Artificial Sequence: Synthetic oligonucleotide
  Antisense Strand to SEQ ID NO: 490403
uacauucuaguauacgauu

SEQ ID NO: 490405 - RNA, 19 nt, Artificial Sequence
  Description of Artificial Sequence: Synthetic oligonucleotide
  Sense strand starting at position 810 of SEQ ID NO: 317432
cguauacuagaauguauau

SEQ ID NO: 490406 - RNA, 19 nt, Artificial Sequence
  Description of Artificial Sequence: Synthetic oligonucleotide
  Antisense Strand to SEQ ID NO: 490405
auauacauucuaguauacg

SEQ ID NO: 490407 - RNA, 19 nt, Artificial Sequence
  Description of Artificial Sequence: Synthetic oligonucleotide
  Sense strand starting at position 993 of SEQ ID NO: 317432
guguuaaugccagaaagca

SEQ ID NO: 490408 - RNA, 19 nt, Artificial Sequence
  Description of Artificial Sequence: Synthetic oligonucleotide
  Antisense Strand to SEQ ID NO: 490407
ugcuuucuggcauuaacac

SEQ ID NO: 490409 - RNA, 19 nt, Artificial Sequence
  Description of Artificial Sequence: Synthetic oligonucleotide
  Sense strand starting at position 1020 of SEQ ID NO: 317432
auguacaaacuguaugauu

SEQ ID NO: 490410 - RNA, 19 nt, Artificial Sequence
  Description of Artificial Sequence: Synthetic oligonucleotide
  Antisense Strand to SEQ ID NO: 490409
aaucauacaguuuguacau

SEQ ID NO: 490411 - RNA, 19 nt, Artificial Sequence
  Description of Artificial Sequence: Synthetic oligonucleotide
  Sense strand starting at position 1150 of SEQ ID NO: 317432
gaauaauugcagggagggu

SEQ ID NO: 490412 - RNA, 19 nt, Artificial Sequence
  Description of Artificial Sequence: Synthetic oligonucleotide
  Antisense Strand to SEQ ID NO: 490411
acccucccugcaauuauuc

SEQ ID NO: 490413 - RNA, 19 nt, Artificial Sequence
  Description of Artificial Sequence: Synthetic oligonucleotide
  Sense strand starting at position 1326 of SEQ ID NO: 317432
uagauaaaugaguaagcgu

SEQ ID NO: 490414 - RNA, 19 nt, Artificial Sequence
  Description of Artificial Sequence: Synthetic oligonucleotide
  Antisense Strand to SEQ ID NO: 490413
acgcuuacucauuuaucua

SEQ ID NO: 490415 - RNA, 19 nt, Artificial Sequence
  Description of Artificial Sequence: Synthetic oligonucleotide
  Sense strand starting at position 1992 of SEQ ID NO: 317432
ccuugucuaugguugaaag

SEQ ID NO: 490416 - RNA, 19 nt, Artificial Sequence
  Description of Artificial Sequence: Synthetic oligonucleotide
  Antisense Strand to SEQ ID NO: 490415
cuuucaaccauagacaagg

SEQ ID NO: 490417 - RNA, 19 nt, Artificial Sequence
  Description of Artificial Sequence: Synthetic oligonucleotide
  Sense strand starting at position 2132 of SEQ ID NO: 317432
gacuguggcacgcaaugau

SEQ ID NO: 490418 - RNA, 19 nt, Artificial Sequence
  Description of Artificial Sequence: Synthetic oligonucleotide
  Antisense Strand to SEQ ID NO: 490417
aucauugcgugccacaguc

SEQ ID NO: 490419 - RNA, 19 nt, Artificial Sequence
  Description of Artificial Sequence: Synthetic oligonucleotide
  Sense strand starting at position 2167 of SEQ ID NO: 317432
acgaauuguuaggcucuga

SEQ ID NO: 490420 - RNA, 19 nt, Artificial Sequence
  Description of Artificial Sequence: Synthetic oligonucleotide
  Antisense Strand to SEQ ID NO: 490419
ucagagccuaacaauucgu

SEQ ID NO: 490421 - RNA, 19 nt, Artificial Sequence
  Description of Artificial Sequence: Synthetic oligonucleotide
  Sense strand starting at position 2171 of SEQ ID NO: 317432
auuguuaggcucugacacu

SEQ ID NO: 490422 - RNA, 19 nt, Artificial Sequence
  Description of Artificial Sequence: Synthetic oligonucleotide
  Antisense Strand to SEQ ID NO: 490421
agugucagagccuaacaau

SEQ ID NO: 490423 - RNA, 19 nt, Artificial Sequence
  Description of Artificial Sequence: Synthetic oligonucleotide
  Sense strand starting at position 2193 of SEQ ID NO: 317432
ugcguaaacguguuacagu

SEQ ID NO: 490424 - RNA, 19 nt, Artificial Sequence
  Description of Artificial Sequence: Synthetic oligonucleotide
  Antisense Strand to SEQ ID NO: 490423
acuguaacacguuuacgca

SEQ ID NO: 490425 - RNA, 19 nt, Artificial Sequence
  Description of Artificial Sequence: Synthetic oligonucleotide
  Sense strand starting at position 2247 of SEQ ID NO: 317432
uguugugaugauuagcuga

SEQ ID NO: 490426 - RNA, 19 nt, Artificial Sequence
  Description of Artificial Sequence: Synthetic oligonucleotide
  Antisense Strand to SEQ ID NO: 490425
ucagcuaaucaucacaaca

SEQ ID NO: 490427 - RNA, 19 nt, Artificial Sequence
  Description of Artificial Sequence: Synthetic oligonucleotide
  Sense strand starting at position 2329 of SEQ ID NO: 317432
guuucuauucucuagaguc

SEQ ID NO: 490428 - RNA, 19 nt, Artificial Sequence
  Description of Artificial Sequence: Synthetic oligonucleotide
  Antisense Strand to SEQ ID NO: 490427
gacucuagagaauagaaac

SEQ ID NO: 490429 - RNA, 19 nt, Artificial Sequence
  Description of Artificial Sequence: Synthetic oligonucleotide
  Sense strand starting at position 2331 of SEQ ID NO: 317432
uucuauucucuagagucuu

SEQ ID NO: 490430 - RNA, 19 nt, Artificial Sequence
  Description of Artificial Sequence: Synthetic oligonucleotide
  Antisense Strand to SEQ ID NO: 490429
aagacucuagagaauagaa

SEQ ID NO: 490431 - RNA, 19 nt, Artificial Sequence
  Description of Artificial Sequence: Synthetic oligonucleotide
  Sense strand starting at position 2424 of SEQ ID NO: 317432
ucugcaaagcauuagcaau

SEQ ID NO: 490432 - RNA, 19 nt, Artificial Sequence
  Description of Artificial Sequence: Synthetic oligonucleotide
  Antisense Strand to SEQ ID NO: 490431
auugcuaaugcuuugcaga

SEQ ID NO: 490433 - RNA, 19 nt, Artificial Sequence
  Description of Artificial Sequence: Synthetic oligonucleotide
  Sense strand starting at position 2577 of SEQ ID NO: 317432
ggaacugugugggcacaaa

SEQ ID NO: 490434 - RNA, 19 nt, Artificial Sequence
  Description of Artificial Sequence: Synthetic oligonucleotide
  Antisense Strand to SEQ ID NO: 490433
uuugugcccacacaguucc

SEQ ID NO: 490435 - RNA, 19 nt, Artificial Sequence
  Description of Artificial Sequence: Synthetic oligonucleotide
  Sense strand starting at position 2923 of SEQ ID NO: 317432
ucuggugagaacugguaaa

SEQ ID NO: 490436 - RNA, 19 nt, Artificial Sequence
  Description of Artificial Sequence: Synthetic oligonucleotide
  Antisense Strand to SEQ ID NO: 490435
uuuaccaguucucaccaga

SEQ ID NO: 490437 - RNA, 19 nt, Artificial Sequence
  Description of Artificial Sequence: Synthetic oligonucleotide
  Sense strand starting at position 3094 of SEQ ID NO: 317432
ccagaauacugggaugaua

SEQ ID NO: 490438 - RNA, 19 nt, Artificial Sequence
  Description of Artificial Sequence: Synthetic oligonucleotide
  Antisense Strand to SEQ ID NO: 490437
uaucaucccaguauucugg

SEQ ID NO: 490439 - RNA, 19 nt, Artificial Sequence
  Description of Artificial Sequence: Synthetic oligonucleotide
  Sense strand starting at position 3133 of SEQ ID NO: 317432
ugguaaaguugguuuauca

SEQ ID NO: 490440 - RNA, 19 nt, Artificial Sequence
  Description of Artificial Sequence: Synthetic oligonucleotide
  Antisense Strand to SEQ ID NO: 490439
ugauaaaccaacuuuacca

SEQ ID NO: 490441 - RNA, 19 nt, Artificial Sequence
  Description of Artificial Sequence: Synthetic oligonucleotide
  Sense strand starting at position 3207 of SEQ ID NO: 317432
augacagacucucuaaagu

SEQ ID NO: 490442 - RNA, 19 nt, Artificial Sequence
  Description of Artificial Sequence: Synthetic oligonucleotide
  Antisense Strand to SEQ ID NO: 490441
acuuuagagagucugucau

SEQ ID NO: 490443 - RNA, 19 nt, Artificial Sequence
  Description of Artificial Sequence: Synthetic oligonucleotide
  Sense strand starting at position 3223 of SEQ ID NO: 317432
agugcaguuucucuacaaa

SEQ ID NO: 490444 - RNA, 19 nt, Artificial Sequence
  Description of Artificial Sequence: Synthetic oligonucleotide
  Antisense Strand to SEQ ID NO: 490443
uuuguagagaaacugcacu

SEQ ID NO: 490445 - RNA, 19 nt, Artificial Sequence
  Description of Artificial Sequence: Synthetic oligonucleotide
  Sense strand starting at position 3264 of SEQ ID NO: 317432
uucucaaagcugcagauaa

SEQ ID NO: 490446 - RNA, 19 nt, Artificial Sequence
  Description of Artificial Sequence: Synthetic oligonucleotide
  Antisense Strand to SEQ ID NO: 490445
uuaucugcagcuuugagaa

SEQ ID NO: 490447 - RNA, 19 nt, Artificial Sequence
  Description of Artificial Sequence: Synthetic oligonucleotide
  Sense strand starting at position 3272 of SEQ ID NO: 317432
gcugcagauaaguagauau

SEQ ID NO: 490448 - RNA, 19 nt, Artificial Sequence
  Description of Artificial Sequence: Synthetic oligonucleotide
  Antisense Strand to SEQ ID NO: 490447
auaucuacuuaucugcagc

SEQ ID NO: 490449 - RNA, 19 nt, Artificial Sequence
  Description of Artificial Sequence: Synthetic oligonucleotide
  Sense strand starting at position 3289 of SEQ ID NO: 317432
auugucaacucuuuauagu

SEQ ID NO: 490450 - RNA, 19 nt, Artificial Sequence
  Description of Artificial Sequence: Synthetic oligonucleotide
  Antisense Strand to SEQ ID NO: 490449
acuauaaagaguugacaau

SEQ ID NO: 490451 - RNA, 19 nt, Artificial Sequence
  Description of Artificial Sequence: Synthetic oligonucleotide
  Sense strand starting at position 3290 of SEQ ID NO: 317432
uugucaacucuuuauaguc

SEQ ID NO: 490452 - RNA, 19 nt, Artificial Sequence
  Description of Artificial Sequence: Synthetic oligonucleotide
  Antisense Strand to SEQ ID NO: 490451
gacuauaaagaguugacaa

SEQ ID NO: 490453 - RNA, 19 nt, Artificial Sequence
  Description of Artificial Sequence: Synthetic oligonucleotide
  Sense strand starting at position 3396 of SEQ ID NO: 317432
agagcacuaccauaacagu

SEQ ID NO: 490454 - RNA, 19 nt, Artificial Sequence
  Description of Artificial Sequence: Synthetic oligonucleotide
  Antisense Strand to SEQ ID NO: 490453
acuguuaugguagugcucu

SEQ ID NO: 490455 - RNA, 19 nt, Artificial Sequence
  Description of Artificial Sequence: Synthetic oligonucleotide
  Sense strand starting at position 3435 of SEQ ID NO: 317432
uggagugauuagcugccaa

SEQ ID NO: 490456 - RNA, 19 nt, Artificial Sequence
  Description of Artificial Sequence: Synthetic oligonucleotide
  Antisense Strand to SEQ ID NO: 490455
uuggcagcuaaucacucca

SEQ ID NO: 490457 - RNA, 19 nt, Artificial Sequence
  Description of Artificial Sequence: Synthetic oligonucleotide
  Sense strand starting at position 3479 of SEQ ID NO: 317432
agauuaguagagcguugaa

SEQ ID NO: 490458 - RNA, 19 nt, Artificial Sequence
  Description of Artificial Sequence: Synthetic oligonucleotide
  Antisense Strand to SEQ ID NO: 490457
uucaacgcucuacuaaucu

SEQ ID NO: 490459 - RNA, 19 nt, Artificial Sequence
  Description of Artificial Sequence: Synthetic oligonucleotide
  Sense strand starting at position 3531 of SEQ ID NO: 317432
cauagauagugccuggagu

SEQ ID NO: 490460 - RNA, 19 nt, Artificial Sequence
  Description of Artificial Sequence: Synthetic oligonucleotide
  Antisense Strand to SEQ ID NO: 490459
acuccaggcacuaucuaug

SEQ ID NO: 490461 - RNA, 19 nt, Artificial Sequence
  Description of Artificial Sequence: Synthetic oligonucleotide
  Sense strand starting at position 3533 of SEQ ID NO: 317432
uagauagugccuggaguca

SEQ ID NO: 490462 - RNA, 19 nt, Artificial Sequence
  Description of Artificial Sequence: Synthetic oligonucleotide
  Antisense Strand to SEQ ID NO: 490461
ugacuccaggcacuaucua

SEQ ID NO: 490463 - RNA, 19 nt, Artificial Sequence
  Description of Artificial Sequence: Synthetic oligonucleotide
  Sense strand starting at position 3574 of SEQ ID NO: 317432
uaguauguacccugggaau

SEQ ID NO: 490464 - RNA, 19 nt, Artificial Sequence
  Description of Artificial Sequence: Synthetic oligonucleotide
  Antisense Strand to SEQ ID NO: 490463
auucccaggguacauacua

SEQ ID NO: 490465 - RNA, 19 nt, Artificial Sequence
  Description of Artificial Sequence: Synthetic oligonucleotide
  Sense strand starting at position 3576 of SEQ ID NO: 317432
guauguacccugggaauug

SEQ ID NO: 490466 - RNA, 19 nt, Artificial Sequence
  Description of Artificial Sequence: Synthetic oligonucleotide
  Antisense Strand to SEQ ID NO: 490465
caauucccaggguacauac

SEQ ID NO: 490467 - RNA, 19 nt, Artificial Sequence
  Description of Artificial Sequence: Synthetic oligonucleotide
  Sense strand starting at position 3585 of SEQ ID NO: 317432
cugggaauugcaugagucu

SEQ ID NO: 490468 - RNA, 19 nt, Artificial Sequence
  Description of Artificial Sequence: Synthetic oligonucleotide
  Antisense Strand to SEQ ID NO: 490467
agacucaugcaauucccag

SEQ ID NO: 490469 - RNA, 19 nt, Artificial Sequence
  Description of Artificial Sequence: Synthetic oligonucleotide
  Sense strand starting at position 3588 of SEQ ID NO: 317432
ggaauugcaugagucucuu

SEQ ID NO: 490470 - RNA, 19 nt, Artificial Sequence
  Description of Artificial Sequence: Synthetic oligonucleotide
  Antisense Strand to SEQ ID NO: 490469
aagagacucaugcaauucc

SEQ ID NO: 490471 - RNA, 19 nt, Artificial Sequence
  Description of Artificial Sequence: Synthetic oligonucleotide
  Sense strand starting at position 3599 of SEQ ID NO: 317432
agucucuuucccuaucagu

SEQ ID NO: 490472 - RNA, 19 nt, Artificial Sequence
  Description of Artificial Sequence: Synthetic oligonucleotide
  Antisense Strand to SEQ ID NO: 490471
acugauagggaaagagacu

SEQ ID NO: 490473 - RNA, 19 nt, Artificial Sequence
  Description of Artificial Sequence: Synthetic oligonucleotide
  Sense strand starting at position 3810 of SEQ ID NO: 317432
ugugaaagugcccagaacu

SEQ ID NO: 490474 - RNA, 19 nt, Artificial Sequence
  Description of Artificial Sequence: Synthetic oligonucleotide
  Antisense Strand to SEQ ID NO: 490473
aguucugggcacuuucaca

SEQ ID NO: 490475 - RNA, 19 nt, Artificial Sequence
  Description of Artificial Sequence: Synthetic oligonucleotide
  Sense strand starting at position 3823 of SEQ ID NO: 317432
agaacuauuccuugcacag

SEQ ID NO: 490476 - RNA, 19 nt, Artificial Sequence
  Description of Artificial Sequence: Synthetic oligonucleotide
  Antisense Strand to SEQ ID NO: 490475
cugugcaaggaauaguucu

SEQ ID NO: 490477 - RNA, 19 nt, Artificial Sequence
  Description of Artificial Sequence: Synthetic oligonucleotide
  Sense strand starting at position 326 of SEQ ID NO: 317433
aggacaaugugggcugauu

SEQ ID NO: 490478 - RNA, 19 nt, Artificial Sequence
  Description of Artificial Sequence: Synthetic oligonucleotide
  Antisense Strand to SEQ ID NO: 490477
aaucagcccacauuguccu

SEQ ID NO: 490479 - RNA, 19 nt, Artificial Sequence
  Description of Artificial Sequence: Synthetic oligonucleotide
  Sense strand starting at position 417 of SEQ ID NO: 317433
cugguaucagaucacuagu

SEQ ID NO: 490480 - RNA, 19 nt, Artificial Sequence
  Description of Artificial Sequence: Synthetic oligonucleotide
  Antisense Strand to SEQ ID NO: 490479
acuagugaucugauaccag

SEQ ID NO: 490481 - RNA, 19 nt, Artificial Sequence
  Description of Artificial Sequence: Synthetic oligonucleotide
  Sense strand starting at position 419 of SEQ ID NO: 317433
gguaucagaucacuaguaa

SEQ ID NO: 490482 - RNA, 19 nt, Artificial Sequence
  Description of Artificial Sequence: Synthetic oligonucleotide
  Antisense Strand to SEQ ID NO: 490481
uuacuagugaucugauacc

SEQ ID NO: 490483 - RNA, 19 nt, Artificial Sequence
  Description of Artificial Sequence: Synthetic oligonucleotide
  Sense strand starting at position 508 of SEQ ID NO: 317433
accaguauacauuguacca

SEQ ID NO: 490484 - RNA, 19 nt, Artificial Sequence
  Description of Artificial Sequence: Synthetic oligonucleotide
  Antisense Strand to SEQ ID NO: 490483
ugguacaauguauacuggu

SEQ ID NO: 490485 - RNA, 19 nt, Artificial Sequence
  Description of Artificial Sequence: Synthetic oligonucleotide
  Sense strand starting at position 645 of SEQ ID NO: 317433
gugcaaacuccaggugaua

SEQ ID NO: 490486 - RNA, 19 nt, Artificial Sequence
  Description of Artificial Sequence: Synthetic oligonucleotide
  Antisense Strand to SEQ ID NO: 490485
uaucaccuggaguuugcac

SEQ ID NO: 490487 - RNA, 19 nt, Artificial Sequence
  Description of Artificial Sequence: Synthetic oligonucleotide
  Sense strand starting at position 654 of SEQ ID NO: 317433
ccaggugauauaugagguu

SEQ ID NO: 490488 - RNA, 19 nt, Artificial Sequence
  Description of Artificial Sequence: Synthetic oligonucleotide
  Antisense Strand to SEQ ID NO: 490487
aaccucauauaucaccugg

SEQ ID NO: 490489 - RNA, 19 nt, Artificial Sequence
  Description of Artificial Sequence: Synthetic oligonucleotide
  Sense strand starting at position 832 of SEQ ID NO: 317433
ucuaguaugguaugaguuc

SEQ ID NO: 490490 - RNA, 19 nt, Artificial Sequence
  Description of Artificial Sequence: Synthetic oligonucleotide
  Antisense Strand to SEQ ID NO: 490489
gaacucauaccauacuaga

SEQ ID NO: 490491 - RNA, 19 nt, Artificial Sequence
  Description of Artificial Sequence: Synthetic oligonucleotide
  Sense strand starting at position 838 of SEQ ID NO: 317433
augguaugaguucgagauu

SEQ ID NO: 490492 - RNA, 19 nt, Artificial Sequence
  Description of Artificial Sequence: Synthetic oligonucleotide
  Antisense Strand to SEQ ID NO: 490491
aaucucgaacucauaccau

SEQ ID NO: 490493 - RNA, 19 nt, Artificial Sequence
  Description of Artificial Sequence: Synthetic oligonucleotide
  Sense strand starting at position 841 of SEQ ID NO: 317433
guaugaguucgagauuauu

SEQ ID NO: 490494 - RNA, 19 nt, Artificial Sequence
  Description of Artificial Sequence: Synthetic oligonucleotide
  Antisense Strand to SEQ ID NO: 490493
aauaaucucgaacucauac

SEQ ID NO: 490495 - RNA, 19 nt, Artificial Sequence
  Description of Artificial Sequence: Synthetic oligonucleotide
  Sense strand starting at position 850 of SEQ ID NO: 317433
cgagauuauuucuaauaug

SEQ ID NO: 490496 - RNA, 19 nt, Artificial Sequence
  Description of Artificial Sequence: Synthetic oligonucleotide
  Antisense Strand to SEQ ID NO: 490495
cauauuagaaauaaucucg

SEQ ID NO: 490497 - RNA, 19 nt, Artificial Sequence
  Description of Artificial Sequence: Synthetic oligonucleotide
  Sense strand starting at position 878 of SEQ ID NO: 317433
uggauaugggucugacuga

SEQ ID NO: 490498 - RNA, 19 nt, Artificial Sequence
  Description of Artificial Sequence: Synthetic oligonucleotide
  Antisense Strand to SEQ ID NO: 490497
ucagucagacccauaucca

SEQ ID NO: 490499 - RNA, 19 nt, Artificial Sequence
  Description of Artificial Sequence: Synthetic oligonucleotide
  Sense strand starting at position 885 of SEQ ID NO: 317433
gggucugacugaucuuauu

SEQ ID NO: 490500 - RNA, 19 nt, Artificial Sequence
  Description of Artificial Sequence: Synthetic oligonucleotide
  Antisense Strand to SEQ ID NO: 490499
aauaagaucagucagaccc

SEQ ID NO: 490501 - RNA, 19 nt, Artificial Sequence
  Description of Artificial Sequence: Synthetic oligonucleotide
  Sense strand starting at position 1056 of SEQ ID NO: 317433
augucuaauuaggugaaac

SEQ ID NO: 490502 - RNA, 19 nt, Artificial Sequence
  Description of Artificial Sequence: Synthetic oligonucleotide
  Antisense Strand to SEQ ID NO: 490501
guuucaccuaauuagacau

SEQ ID NO: 490503 - RNA, 19 nt, Artificial Sequence
  Description of Artificial Sequence: Synthetic oligonucleotide
  Sense strand starting at position 1097 of SEQ ID NO: 317433
ucauucucuucggucauaa

SEQ ID NO: 490504 - RNA, 19 nt, Artificial Sequence
  Description of Artificial Sequence: Synthetic oligonucleotide
  Antisense Strand to SEQ ID NO: 490503
uuaugaccgaagagaauga

SEQ ID NO: 490505 - RNA, 19 nt, Artificial Sequence
  Description of Artificial Sequence: Synthetic oligonucleotide
  Sense strand starting at position 1099 of SEQ ID NO: 317433
auucucuucggucauaacu

SEQ ID NO: 490506 - RNA, 19 nt, Artificial Sequence
  Description of Artificial Sequence: Synthetic oligonucleotide
  Antisense Strand to SEQ ID NO: 490505
aguuaugaccgaagagaau

SEQ ID NO: 490507 - RNA, 19 nt, Artificial Sequence
  Description of Artificial Sequence: Synthetic oligonucleotide
  Sense strand starting at position 1147 of SEQ ID NO: 317433
acuuaucgcuucccuggaa

SEQ ID NO: 490508 - RNA, 19 nt, Artificial Sequence
  Description of Artificial Sequence: Synthetic oligonucleotide
  Antisense Strand to SEQ ID NO: 490507
uuccagggaagcgauaagu

SEQ ID NO: 490509 - RNA, 19 nt, Artificial Sequence
  Description of Artificial Sequence: Synthetic oligonucleotide
  Sense strand starting at position 1148 of SEQ ID NO: 317433
cuuaucgcuucccuggaaa

SEQ ID NO: 490510 - RNA, 19 nt, Artificial Sequence
  Description of Artificial Sequence: Synthetic oligonucleotide
  Antisense Strand to SEQ ID NO: 490509
uuuccagggaagcgauaag

SEQ ID NO: 490511 - RNA, 19 nt, Artificial Sequence
  Description of Artificial Sequence: Synthetic oligonucleotide
  Sense strand starting at position 1151 of SEQ ID NO: 317433
aucgcuucccuggaaacaa

SEQ ID NO: 490512 - RNA, 19 nt, Artificial Sequence
  Description of Artificial Sequence: Synthetic oligonucleotide
  Antisense Strand to SEQ ID NO: 490511
uuguuuccagggaagcgau

SEQ ID NO: 490513 - RNA, 19 nt, Artificial Sequence
  Description of Artificial Sequence: Synthetic oligonucleotide
  Sense strand starting at position 1192 of SEQ ID NO: 317433
ugcuguugccaguaaagaa

SEQ ID NO: 490514 - RNA, 19 nt, Artificial Sequence
  Description of Artificial Sequence: Synthetic oligonucleotide
  Antisense Strand to SEQ ID NO: 490513
uucuuuacuggcaacagca

SEQ ID NO: 490515 - RNA, 19 nt, Artificial Sequence
  Description of Artificial Sequence: Synthetic oligonucleotide
  Sense strand starting at position 2351 of SEQ ID NO: 317433
ggacacugcgaaugaauga

SEQ ID NO: 490516 - RNA, 19 nt, Artificial Sequence
  Description of Artificial Sequence: Synthetic oligonucleotide
  Antisense Strand to SEQ ID NO: 490515
ucauucauucgcagugucc

SEQ ID NO: 490517 - RNA, 19 nt, Artificial Sequence
  Description of Artificial Sequence: Synthetic oligonucleotide
  Sense strand starting at position 2584 of SEQ ID NO: 317433
guugacgcucuaugggaua

SEQ ID NO: 490518 - RNA, 19 nt, Artificial Sequence
  Description of Artificial Sequence: Synthetic oligonucleotide
  Antisense Strand to SEQ ID NO: 490517
uaucccauagagcgucaac

SEQ ID NO: 490519 - RNA, 19 nt, Artificial Sequence
  Description of Artificial Sequence: Synthetic oligonucleotide
  Sense strand starting at position 2787 of SEQ ID NO: 317433
auuaaaguggccuagcuaa

SEQ ID NO: 490520 - RNA, 19 nt, Artificial Sequence
  Description of Artificial Sequence: Synthetic oligonucleotide
  Antisense Strand to SEQ ID NO: 490519
uuagcuaggccacuuuaau

SEQ ID NO: 490521 - RNA, 19 nt, Artificial Sequence
  Description of Artificial Sequence: Synthetic oligonucleotide
  Sense strand starting at position 2800 of SEQ ID NO: 317433
agcuaagugcauuacauca

SEQ ID NO: 490522 - RNA, 19 nt, Artificial Sequence
  Description of Artificial Sequence: Synthetic oligonucleotide
  Antisense Strand to SEQ ID NO: 490521
ugauguaaugcacuuagcu

SEQ ID NO: 490523 - RNA, 19 nt, Artificial Sequence
  Description of Artificial Sequence: Synthetic oligonucleotide
  Sense strand starting at position 2838 of SEQ ID NO: 317433
gggcgugagcaauagagaa

SEQ ID NO: 490524 - RNA, 19 nt, Artificial Sequence
  Description of Artificial Sequence: Synthetic oligonucleotide
  Antisense Strand to SEQ ID NO: 490523
uucucuauugcucacgccc

SEQ ID NO: 490525 - RNA, 19 nt, Artificial Sequence
  Description of Artificial Sequence: Synthetic oligonucleotide
  Sense strand starting at position 2840 of SEQ ID NO: 317433
gcgugagcaauagagaagu

SEQ ID NO: 490526 - RNA, 19 nt, Artificial Sequence
  Description of Artificial Sequence: Synthetic oligonucleotide
  Antisense Strand to SEQ ID NO: 490525
acuucucuauugcucacgc

SEQ ID NO: 490527 - RNA, 19 nt, Artificial Sequence
  Description of Artificial Sequence: Synthetic oligonucleotide
  Sense strand starting at position 2958 of SEQ ID NO: 317433
uuauccacucuugguagau

SEQ ID NO: 490528 - RNA, 19 nt, Artificial Sequence
  Description of Artificial Sequence: Synthetic oligonucleotide
  Antisense Strand to SEQ ID NO: 490527
aucuaccaagaguggauaa

SEQ ID NO: 490529 - RNA, 19 nt, Artificial Sequence
  Description of Artificial Sequence: Synthetic oligonucleotide
  Sense strand starting at position 2959 of SEQ ID NO: 317433
uauccacucuugguagaug

SEQ ID NO: 490530 - RNA, 19 nt, Artificial Sequence
  Description of Artificial Sequence: Synthetic oligonucleotide
  Antisense Strand to SEQ ID NO: 490529
caucuaccaagaguggaua

SEQ ID NO: 490531 - RNA, 19 nt, Artificial Sequence
  Description of Artificial Sequence: Synthetic oligonucleotide
  Sense strand starting at position 3021 of SEQ ID NO: 317433
gcagcuuuaucccuagaca

SEQ ID NO: 490532 - RNA, 19 nt, Artificial Sequence
  Description of Artificial Sequence: Synthetic oligonucleotide
  Antisense Strand to SEQ ID NO: 490531
ugucuagggauaaagcugc

SEQ ID NO: 490533 - RNA, 19 nt, Artificial Sequence
  Description of Artificial Sequence: Synthetic oligonucleotide
  Sense strand starting at position 3024 of SEQ ID NO: 317433
gcuuuaucccuagacaguu

SEQ ID NO: 490534 - RNA, 19 nt, Artificial Sequence
  Description of Artificial Sequence: Synthetic oligonucleotide
  Antisense Strand to SEQ ID NO: 490533
aacugucuagggauaaagc

SEQ ID NO: 490535 - RNA, 19 nt, Artificial Sequence
  Description of Artificial Sequence: Synthetic oligonucleotide
  Sense strand starting at position 3195 of SEQ ID NO: 317433
cccaaaugaugggaauuua

SEQ ID NO: 490536 - RNA, 19 nt, Artificial Sequence
  Description of Artificial Sequence: Synthetic oligonucleotide
  Antisense Strand to SEQ ID NO: 490535
uaaauucccaucauuuggg

SEQ ID NO: 490537 - RNA, 19 nt, Artificial Sequence
  Description of Artificial Sequence: Synthetic oligonucleotide
  Sense strand starting at position 3239 of SEQ ID NO: 317433
ugggcaauccuagggacuu

SEQ ID NO: 490538 - RNA, 19 nt, Artificial Sequence
  Description of Artificial Sequence: Synthetic oligonucleotide
  Antisense Strand to SEQ ID NO: 490537
aagucccuaggauugccca

SEQ ID NO: 490539 - RNA, 19 nt, Artificial Sequence
  Description of Artificial Sequence: Synthetic oligonucleotide
  Sense strand starting at position 3330 of SEQ ID NO: 317433
uccgacuugaauuguugaa

SEQ ID NO: 490540 - RNA, 19 nt, Artificial Sequence
  Description of Artificial Sequence: Synthetic oligonucleotide
  Antisense Strand to SEQ ID NO: 490539
uucaacaauucaagucgga

SEQ ID NO: 490541 - RNA, 19 nt, Artificial Sequence
  Description of Artificial Sequence: Synthetic oligonucleotide
  Sense strand starting at position 3332 of SEQ ID NO: 317433
cgacuugaauuguugaauu

SEQ ID NO: 490542 - RNA, 19 nt, Artificial Sequence
  Description of Artificial Sequence: Synthetic oligonucleotide
  Antisense Strand to SEQ ID NO: 490541
aauucaacaauucaagucg

SEQ ID NO: 490543 - RNA, 19 nt, Artificial Sequence
  Description of Artificial Sequence: Synthetic oligonucleotide
  Sense strand starting at position 3355 of SEQ ID NO: 317433
caauuagucgaaugagcaa

SEQ ID NO: 490544 - RNA, 19 nt, Artificial Sequence
  Description of Artificial Sequence: Synthetic oligonucleotide
  Antisense Strand to SEQ ID NO: 490543
uugcucauucgacuaauug

SEQ ID NO: 490545 - RNA, 19 nt, Artificial Sequence
  Description of Artificial Sequence: Synthetic oligonucleotide
  Sense strand starting at position 3440 of SEQ ID NO: 317433
aauggaaguuucccuugau

SEQ ID NO: 490546 - RNA, 19 nt, Artificial Sequence
  Description of Artificial Sequence: Synthetic oligonucleotide
  Antisense Strand to SEQ ID NO: 490545
aucaagggaaacuuccauu

SEQ ID NO: 490547 - RNA, 19 nt, Artificial Sequence
  Description of Artificial Sequence: Synthetic oligonucleotide
  Sense strand starting at position 3441 of SEQ ID NO: 317433
auggaaguuucccuugaug

SEQ ID NO: 490548 - RNA, 19 nt, Artificial Sequence
  Description of Artificial Sequence: Synthetic oligonucleotide
  Antisense Strand to SEQ ID NO: 490547
caucaagggaaacuuccau

SEQ ID NO: 490549 - RNA, 19 nt, Artificial Sequence
  Description of Artificial Sequence: Synthetic oligonucleotide
  Sense strand starting at position 3443 of SEQ ID NO: 317433
ggaaguuucccuugauguu

SEQ ID NO: 490550 - RNA, 19 nt, Artificial Sequence
  Description of Artificial Sequence: Synthetic oligonucleotide
  Antisense Strand to SEQ ID NO: 490549
aacaucaagggaaacuucc

SEQ ID NO: 490551 - RNA, 19 nt, Artificial Sequence
  Description of Artificial Sequence: Synthetic oligonucleotide
  Sense strand starting at position 3967 of SEQ ID NO: 317433
cucacucuucuguguaaga

SEQ ID NO: 490552 - RNA, 19 nt, Artificial Sequence
  Description of Artificial Sequence: Synthetic oligonucleotide
  Antisense Strand to SEQ ID NO: 490551
ucuuacacagaagagugag

SEQ ID NO: 490553 - RNA, 19 nt, Artificial Sequence
  Description of Artificial Sequence: Synthetic oligonucleotide
  Sense strand starting at position 3968 of SEQ ID NO: 317433
ucacucuucuguguaagag

SEQ ID NO: 490554 - RNA, 19 nt, Artificial Sequence
  Description of Artificial Sequence: Synthetic oligonucleotide
  Antisense Strand to SEQ ID NO: 490553
cucuuacacagaagaguga

SEQ ID NO: 490555 - RNA, 19 nt, Artificial Sequence
  Description of Artificial Sequence: Synthetic oligonucleotide
  Sense strand starting at position 3977 of SEQ ID NO: 317433
uguguaagagcagacauaa

SEQ ID NO: 490556 - RNA, 19 nt, Artificial Sequence
  Description of Artificial Sequence: Synthetic oligonucleotide
  Antisense Strand to SEQ ID NO: 490555
uuaugucugcucuuacaca

SEQ ID NO: 490557 - RNA, 19 nt, Artificial Sequence
  Description of Artificial Sequence: Synthetic oligonucleotide
  Sense strand starting at position 179 of SEQ ID NO: 317434
gggcuaucucaagaaguca

SEQ ID NO: 490558 - RNA, 19 nt, Artificial Sequence
  Description of Artificial Sequence: Synthetic oligonucleotide
  Antisense Strand to SEQ ID NO: 490557
ugacuucuugagauagccc

SEQ ID NO: 490559 - RNA, 19 nt, Artificial Sequence
  Description of Artificial Sequence: Synthetic oligonucleotide
  Sense strand starting at position 262 of SEQ ID NO: 317434
agugguuaucuuugaagaa

SEQ ID NO: 490560 - RNA, 19 nt, Artificial Sequence
  Description of Artificial Sequence: Synthetic oligonucleotide
  Antisense Strand to SEQ ID NO: 490559
uucuucaaagauaaccacu

SEQ ID NO: 490561 - RNA, 19 nt, Artificial Sequence
  Description of Artificial Sequence: Synthetic oligonucleotide
  Sense strand starting at position 266 of SEQ ID NO: 317434
guuaucuuugaagaacagu

SEQ ID NO: 490562 - RNA, 19 nt, Artificial Sequence
  Description of Artificial Sequence: Synthetic oligonucleotide
  Antisense Strand to SEQ ID NO: 490561
acuguucuucaaagauaac

SEQ ID NO: 490563 - RNA, 19 nt, Artificial Sequence
  Description of Artificial Sequence: Synthetic oligonucleotide
  Sense strand starting at position 306 of SEQ ID NO: 317434
acaguugcacuuuauuauu

SEQ ID NO: 490564 - RNA, 19 nt, Artificial Sequence
  Description of Artificial Sequence: Synthetic oligonucleotide
  Antisense Strand to SEQ ID NO: 490563
aauaauaaagugcaacugu

SEQ ID NO: 490565 - RNA, 19 nt, Artificial Sequence
  Description of Artificial Sequence: Synthetic oligonucleotide
  Sense strand starting at position 671 of SEQ ID NO: 317434
aucagaugucuuuaucauc

SEQ ID NO: 490566 - RNA, 19 nt, Artificial Sequence
  Description of Artificial Sequence: Synthetic oligonucleotide
  Antisense Strand to SEQ ID NO: 490565
gaugauaaagacaucugau

SEQ ID NO: 490567 - RNA, 19 nt, Artificial Sequence
  Description of Artificial Sequence: Synthetic oligonucleotide
  Sense strand starting at position 779 of SEQ ID NO: 317434
ccucuuaaaugguuguaca

SEQ ID NO: 490568 - RNA, 19 nt, Artificial Sequence
  Description of Artificial Sequence: Synthetic oligonucleotide
  Antisense Strand to SEQ ID NO: 490567
uguacaaccauuuaagagg

SEQ ID NO: 490569 - RNA, 19 nt, Artificial Sequence
  Description of Artificial Sequence: Synthetic oligonucleotide
  Sense strand starting at position 780 of SEQ ID NO: 317434
cucuuaaaugguuguacau

SEQ ID NO: 490570 - RNA, 19 nt, Artificial Sequence
  Description of Artificial Sequence: Synthetic oligonucleotide
  Antisense Strand to SEQ ID NO: 490569
auguacaaccauuuaagag

SEQ ID NO: 490571 - RNA, 19 nt, Artificial Sequence
  Description of Artificial Sequence: Synthetic oligonucleotide
  Sense strand starting at position 2190 of SEQ ID NO: 317434
gaggguugaaucuguagaa

SEQ ID NO: 490572 - RNA, 19 nt, Artificial Sequence
  Description of Artificial Sequence: Synthetic oligonucleotide
  Antisense Strand to SEQ ID NO: 490571
uucuacagauucaacccuc

SEQ ID NO: 490573 - RNA, 19 nt, Artificial Sequence
  Description of Artificial Sequence: Synthetic oligonucleotide
  Sense strand starting at position 2191 of SEQ ID NO: 317434
aggguugaaucuguagaac

SEQ ID NO: 490574 - RNA, 19 nt, Artificial Sequence
  Description of Artificial Sequence: Synthetic oligonucleotide
  Antisense Strand to SEQ ID NO: 490573
guucuacagauucaacccu

SEQ ID NO: 490575 - RNA, 19 nt, Artificial Sequence
  Description of Artificial Sequence: Synthetic oligonucleotide
  Sense strand starting at position 2194 of SEQ ID NO: 317434
guugaaucuguagaacacu

SEQ ID NO: 490576 - RNA, 19 nt, Artificial Sequence
  Description of Artificial Sequence: Synthetic oligonucleotide
  Antisense Strand to SEQ ID NO: 490575
aguguucuacagauucaac

SEQ ID NO: 490577 - RNA, 19 nt, Artificial Sequence
  Description of Artificial Sequence: Synthetic oligonucleotide
  Sense strand starting at position 2490 of SEQ ID NO: 317434
guuugagacuuccuucuaa

SEQ ID NO: 490578 - RNA, 19 nt, Artificial Sequence
  Description of Artificial Sequence: Synthetic oligonucleotide
  Antisense Strand to SEQ ID NO: 490577
uuagaaggaagucucaaac

SEQ ID NO: 490579 - RNA, 19 nt, Artificial Sequence
  Description of Artificial Sequence: Synthetic oligonucleotide
  Sense strand starting at position 2509 of SEQ ID NO: 317434
aggagccacguuugagaaa

SEQ ID NO: 490580 - RNA, 19 nt, Artificial Sequence
  Description of Artificial Sequence: Synthetic oligonucleotide
  Antisense Strand to SEQ ID NO: 490579
uuucucaaacguggcuccu

SEQ ID NO: 490581 - RNA, 19 nt, Artificial Sequence
  Description of Artificial Sequence: Synthetic oligonucleotide
  Sense strand starting at position 2516 of SEQ ID NO: 317434
acguuugagaaaugggaug

SEQ ID NO: 490582 - RNA, 19 nt, Artificial Sequence
  Description of Artificial Sequence: Synthetic oligonucleotide
  Antisense Strand to SEQ ID NO: 490581
caucccauuucucaaacgu

SEQ ID NO: 490583 - RNA, 19 nt, Artificial Sequence
  Description of Artificial Sequence: Synthetic oligonucleotide
  Sense strand starting at position 2534 of SEQ ID NO: 317434
gcaggccuaaguuaagaau

SEQ ID NO: 490584 - RNA, 19 nt, Artificial Sequence
  Description of Artificial Sequence: Synthetic oligonucleotide
  Antisense Strand to SEQ ID NO: 490583
auucuuaacuuaggccugc

SEQ ID NO: 490585 - RNA, 19 nt, Artificial Sequence
  Description of Artificial Sequence: Synthetic oligonucleotide
  Sense strand starting at position 2540 of SEQ ID NO: 317434
cuaaguuaagaaugcuaca

SEQ ID NO: 490586 - RNA, 19 nt, Artificial Sequence
  Description of Artificial Sequence: Synthetic oligonucleotide
  Antisense Strand to SEQ ID NO: 490585
uguagcauucuuaacuuag

SEQ ID NO: 490587 - RNA, 19 nt, Artificial Sequence
  Description of Artificial Sequence: Synthetic oligonucleotide
  Sense strand starting at position 2661 of SEQ ID NO: 317434
uugagcgaauaguuauuaa

SEQ ID NO: 490588 - RNA, 19 nt, Artificial Sequence
  Description of Artificial Sequence: Synthetic oligonucleotide
  Antisense Strand to SEQ ID NO: 490587
uuaauaacuauucgcucaa

SEQ ID NO: 490589 - RNA, 19 nt, Artificial Sequence
  Description of Artificial Sequence: Synthetic oligonucleotide
  Sense strand starting at position 2742 of SEQ ID NO: 317434
ggaaaucugugucuacuug

SEQ ID NO: 490590 - RNA, 19 nt, Artificial Sequence
  Description of Artificial Sequence: Synthetic oligonucleotide
  Antisense Strand to SEQ ID NO: 490589
caaguagacacagauuucc

SEQ ID NO: 490591 - RNA, 19 nt, Artificial Sequence
  Description of Artificial Sequence: Synthetic oligonucleotide
  Sense strand starting at position 2743 of SEQ ID NO: 317434
gaaaucugugucuacuugu

SEQ ID NO: 490592 - RNA, 19 nt, Artificial Sequence
  Description of Artificial Sequence: Synthetic oligonucleotide
  Antisense Strand to SEQ ID NO: 490591
acaaguagacacagauuuc

SEQ ID NO: 490593 - RNA, 19 nt, Artificial Sequence
  Description of Artificial Sequence: Synthetic oligonucleotide
  Sense strand starting at position 2828 of SEQ ID NO: 317434
cgugauaguccugaagaga

SEQ ID NO: 490594 - RNA, 19 nt, Artificial Sequence
  Description of Artificial Sequence: Synthetic oligonucleotide
  Antisense Strand to SEQ ID NO: 490593
ucucuucaggacuaucacg

SEQ ID NO: 490595 - RNA, 19 nt, Artificial Sequence
  Description of Artificial Sequence: Synthetic oligonucleotide
  Sense strand starting at position 2910 of SEQ ID NO: 317434
uaaguaaagggcugacaga

SEQ ID NO: 490596 - RNA, 19 nt, Artificial Sequence
  Description of Artificial Sequence: Synthetic oligonucleotide
  Antisense Strand to SEQ ID NO: 490595
ucugucagcccuuuacuua

SEQ ID NO: 490597 - RNA, 19 nt, Artificial Sequence
  Description of Artificial Sequence: Synthetic oligonucleotide
  Sense strand starting at position 2946 of SEQ ID NO: 317434
cgcgaauaucuugggaaag

SEQ ID NO: 490598 - RNA, 19 nt, Artificial Sequence
  Description of Artificial Sequence: Synthetic oligonucleotide
  Antisense Strand to SEQ ID NO: 490597
cuuucccaagauauucgcg

SEQ ID NO: 490599 - RNA, 19 nt, Artificial Sequence
  Description of Artificial Sequence: Synthetic oligonucleotide
  Sense strand starting at position 3050 of SEQ ID NO: 317434
gagugaaggguuuaguccu

SEQ ID NO: 490600 - RNA, 19 nt, Artificial Sequence
  Description of Artificial Sequence: Synthetic oligonucleotide
  Antisense Strand to SEQ ID NO: 490599
aggacuaaacccuucacuc

SEQ ID NO: 490601 - RNA, 19 nt, Artificial Sequence
  Description of Artificial Sequence: Synthetic oligonucleotide
  Sense strand starting at position 3191 of SEQ ID NO: 317434
uuaagagggucacucuuua

SEQ ID NO: 490602 - RNA, 19 nt, Artificial Sequence
  Description of Artificial Sequence: Synthetic oligonucleotide
  Antisense Strand to SEQ ID NO: 490601
uaaagagugacccucuuaa

SEQ ID NO: 490603 - RNA, 19 nt, Artificial Sequence
  Description of Artificial Sequence: Synthetic oligonucleotide
  Sense strand starting at position 3195 of SEQ ID NO: 317434
gagggucacucuuuaagga

SEQ ID NO: 490604 - RNA, 19 nt, Artificial Sequence
  Description of Artificial Sequence: Synthetic oligonucleotide
  Antisense Strand to SEQ ID NO: 490603
uccuuaaagagugacccuc

SEQ ID NO: 490605 - RNA, 19 nt, Artificial Sequence
  Description of Artificial Sequence: Synthetic oligonucleotide
  Sense strand starting at position 3282 of SEQ ID NO: 317434
aagcauaauggugguuuga

SEQ ID NO: 490606 - RNA, 19 nt, Artificial Sequence
  Description of Artificial Sequence: Synthetic oligonucleotide
  Antisense Strand to SEQ ID NO: 490605
ucaaaccaccauuaugcuu

SEQ ID NO: 490607 - RNA, 19 nt, Artificial Sequence
  Description of Artificial Sequence: Synthetic oligonucleotide
  Sense strand starting at position 3295 of SEQ ID NO: 317434
guuugacuaugggugguaa

SEQ ID NO: 490608 - RNA, 19 nt, Artificial Sequence
  Description of Artificial Sequence: Synthetic oligonucleotide
  Antisense Strand to SEQ ID NO: 490607
uuaccacccauagucaaac

SEQ ID NO: 490609 - RNA, 19 nt, Artificial Sequence
  Description of Artificial Sequence: Synthetic oligonucleotide
  Sense strand starting at position 3297 of SEQ ID NO: 317434
uugacuaugggugguaaga

SEQ ID NO: 490610 - RNA, 19 nt, Artificial Sequence
  Description of Artificial Sequence: Synthetic oligonucleotide
  Antisense Strand to SEQ ID NO: 490609
ucuuaccacccauagucaa

SEQ ID NO: 490611 - RNA, 19 nt, Artificial Sequence
  Description of Artificial Sequence: Synthetic oligonucleotide
  Sense strand starting at position 3310 of SEQ ID NO: 317434
guaagaaauggccaguuau

SEQ ID NO: 490612 - RNA, 19 nt, Artificial Sequence
  Description of Artificial Sequence: Synthetic oligonucleotide
  Antisense Strand to SEQ ID NO: 490611
auaacuggccauuucuuac

SEQ ID NO: 490613 - RNA, 19 nt, Artificial Sequence
  Description of Artificial Sequence: Synthetic oligonucleotide
  Sense strand starting at position 3323 of SEQ ID NO: 317434
aguuauauucuugaugcac

SEQ ID NO: 490614 - RNA, 19 nt, Artificial Sequence
  Description of Artificial Sequence: Synthetic oligonucleotide
  Antisense Strand to SEQ ID NO: 490613
gugcaucaagaauauaacu

SEQ ID NO: 490615 - RNA, 19 nt, Artificial Sequence
  Description of Artificial Sequence: Synthetic oligonucleotide
  Sense strand starting at position 3389 of SEQ ID NO: 317434
uuaauuaggcuuuggagga

SEQ ID NO: 490616 - RNA, 19 nt, Artificial Sequence
  Description of Artificial Sequence: Synthetic oligonucleotide
  Antisense Strand to SEQ ID NO: 490615
uccuccaaagccuaauuaa

SEQ ID NO: 490617 - RNA, 19 nt, Artificial Sequence
  Description of Artificial Sequence: Synthetic oligonucleotide
  Sense strand starting at position 3431 of SEQ ID NO: 317434
ugaguuucagaguggcaaa

SEQ ID NO: 490618 - RNA, 19 nt, Artificial Sequence
  Description of Artificial Sequence: Synthetic oligonucleotide
  Antisense Strand to SEQ ID NO: 490617
uuugccacucugaaacuca

SEQ ID NO: 490619 - RNA, 19 nt, Artificial Sequence
  Description of Artificial Sequence: Synthetic oligonucleotide
  Sense strand starting at position 3512 of SEQ ID NO: 317434
uuuccuggaucugucuaua

SEQ ID NO: 490620 - RNA, 19 nt, Artificial Sequence
  Description of Artificial Sequence: Synthetic oligonucleotide
  Antisense Strand to SEQ ID NO: 490619
uauagacagauccaggaaa

SEQ ID NO: 490621 - RNA, 19 nt, Artificial Sequence
  Description of Artificial Sequence: Synthetic oligonucleotide
  Sense strand starting at position 3576 of SEQ ID NO: 317434
auagguauuuaaugacaag

SEQ ID NO: 490622 - RNA, 19 nt, Artificial Sequence
  Description of Artificial Sequence: Synthetic oligonucleotide
  Antisense Strand to SEQ ID NO: 490621
cuugucauuaaauaccuau

SEQ ID NO: 490623 - RNA, 19 nt, Artificial Sequence
  Description of Artificial Sequence: Synthetic oligonucleotide
  Sense strand starting at position 3579 of SEQ ID NO: 317434
gguauuuaaugacaaggua

SEQ ID NO: 490624 - RNA, 19 nt, Artificial Sequence
  Description of Artificial Sequence: Synthetic oligonucleotide
  Antisense Strand to SEQ ID NO: 490623
uaccuugucauuaaauacc

SEQ ID NO: 490625 - RNA, 19 nt, Artificial Sequence
  Description of Artificial Sequence: Synthetic oligonucleotide
  Sense strand starting at position 3592 of SEQ ID NO: 317434
aagguauguaaugggucua

SEQ ID NO: 490626 - RNA, 19 nt, Artificial Sequence
  Description of Artificial Sequence: Synthetic oligonucleotide
  Antisense Strand to SEQ ID NO: 490625
uagacccauuacauaccuu

SEQ ID NO: 490627 - RNA, 19 nt, Artificial Sequence
  Description of Artificial Sequence: Synthetic oligonucleotide
  Sense strand starting at position 3604 of SEQ ID NO: 317434
gggucuagucugcaaaucu

SEQ ID NO: 490628 - RNA, 19 nt, Artificial Sequence
  Description of Artificial Sequence: Synthetic oligonucleotide
  Antisense Strand to SEQ ID NO: 490627
agauuugcagacuagaccc

SEQ ID NO: 490629 - RNA, 19 nt, Artificial Sequence
  Description of Artificial Sequence: Synthetic oligonucleotide
  Sense strand starting at position 3614 of SEQ ID NO: 317434
ugcaaaucuuaaccaggua

SEQ ID NO: 490630 - RNA, 19 nt, Artificial Sequence
  Description of Artificial Sequence: Synthetic oligonucleotide
  Antisense Strand to SEQ ID NO: 490629
uaccugguuaagauuugca

SEQ ID NO: 490631 - RNA, 19 nt, Artificial Sequence
  Description of Artificial Sequence: Synthetic oligonucleotide
  Sense strand starting at position 3727 of SEQ ID NO: 317434
uguguuaaugacgauggua

SEQ ID NO: 490632 - RNA, 19 nt, Artificial Sequence
  Description of Artificial Sequence: Synthetic oligonucleotide
  Antisense Strand to SEQ ID NO: 490631
uaccaucgucauuaacaca

SEQ ID NO: 490633 - RNA, 19 nt, Artificial Sequence
  Description of Artificial Sequence: Synthetic oligonucleotide
  Sense strand starting at position 3860 of SEQ ID NO: 317434
cugucugguaagggaaaua

SEQ ID NO: 490634 - RNA, 19 nt, Artificial Sequence
  Description of Artificial Sequence: Synthetic oligonucleotide
  Antisense Strand to SEQ ID NO: 490633
uauuucccuuaccagacag

SEQ ID NO: 490635 - RNA, 19 nt, Artificial Sequence
  Description of Artificial Sequence: Synthetic oligonucleotide
  Sense strand starting at position 3923 of SEQ ID NO: 317434
uuuggcaaagguugauaaa

SEQ ID NO: 490636 - RNA, 19 nt, Artificial Sequence
  Description of Artificial Sequence: Synthetic oligonucleotide
  Antisense Strand to SEQ ID NO: 490635
uuuaucaaccuuugccaaa

SEQ ID NO: 490637 - RNA, 19 nt, Artificial Sequence
  Description of Artificial Sequence: Synthetic oligonucleotide
  Sense strand starting at position 233 of SEQ ID NO: 317435
aucagaugucuuuaucauc

SEQ ID NO: 490638 - RNA, 19 nt, Artificial Sequence
  Description of Artificial Sequence: Synthetic oligonucleotide
  Antisense Strand to SEQ ID NO: 490637
gaugauaaagacaucugau

SEQ ID NO: 490639 - RNA, 19 nt, Artificial Sequence
  Description of Artificial Sequence: Synthetic oligonucleotide
  Sense strand starting at position 341 of SEQ ID NO: 317435
ccucuuaaaugguuguaca

SEQ ID NO: 490640 - RNA, 19 nt, Artificial Sequence
  Description of Artificial Sequence: Synthetic oligonucleotide
  Antisense Strand to SEQ ID NO: 490639
uguacaaccauuuaagagg

SEQ ID NO: 490641 - RNA, 19 nt, Artificial Sequence
  Description of Artificial Sequence: Synthetic oligonucleotide
  Sense strand starting at position 342 of SEQ ID NO: 317435
cucuuaaaugguuguacau

SEQ ID NO: 490642 - RNA, 19 nt, Artificial Sequence
  Description of Artificial Sequence: Synthetic oligonucleotide
  Antisense Strand to SEQ ID NO: 490641
auguacaaccauuuaagag

SEQ ID NO: 490643 - RNA, 19 nt, Artificial Sequence
  Description of Artificial Sequence: Synthetic oligonucleotide
  Sense strand starting at position 1752 of SEQ ID NO: 317435
gaggguugaaucuguagaa

SEQ ID NO: 490644 - RNA, 19 nt, Artificial Sequence
  Description of Artificial Sequence: Synthetic oligonucleotide
  Antisense Strand to SEQ ID NO: 490643
uucuacagauucaacccuc

SEQ ID NO: 490645 - RNA, 19 nt, Artificial Sequence
  Description of Artificial Sequence: Synthetic oligonucleotide
  Sense strand starting at position 1753 of SEQ ID NO: 317435
aggguugaaucuguagaac

SEQ ID NO: 490646 - RNA, 19 nt, Artificial Sequence
  Description of Artificial Sequence: Synthetic oligonucleotide
  Antisense Strand to SEQ ID NO: 490645
guucuacagauucaacccu

SEQ ID NO: 490647 - RNA, 19 nt, Artificial Sequence
  Description of Artificial Sequence: Synthetic oligonucleotide
  Sense strand starting at position 1756 of SEQ ID NO: 317435
guugaaucuguagaacacu

SEQ ID NO: 490648 - RNA, 19 nt, Artificial Sequence
  Description of Artificial Sequence: Synthetic oligonucleotide
  Antisense Strand to SEQ ID NO: 490647
aguguucuacagauucaac

SEQ ID NO: 490649 - RNA, 19 nt, Artificial Sequence
  Description of Artificial Sequence: Synthetic oligonucleotide
  Sense strand starting at position 2052 of SEQ ID NO: 317435
guuugagacuuccuucuaa

SEQ ID NO: 490650 - RNA, 19 nt, Artificial Sequence
  Description of Artificial Sequence: Synthetic oligonucleotide
  Antisense Strand to SEQ ID NO: 490649
uuagaaggaagucucaaac

SEQ ID NO: 490651 - RNA, 19 nt, Artificial Sequence
  Description of Artificial Sequence: Synthetic oligonucleotide
  Sense strand starting at position 2071 of SEQ ID NO: 317435
aggagccacguuugagaaa

SEQ ID NO: 490652 - RNA, 19 nt, Artificial Sequence
  Description of Artificial Sequence: Synthetic oligonucleotide
  Antisense Strand to SEQ ID NO: 490651
uuucucaaacguggcuccu

SEQ ID NO: 490653 - RNA, 19 nt, Artificial Sequence
  Description of Artificial Sequence: Synthetic oligonucleotide
  Sense strand starting at position 2078 of SEQ ID NO: 317435
acguuugagaaaugggaug

SEQ ID NO: 490654 - RNA, 19 nt, Artificial Sequence
  Description of Artificial Sequence: Synthetic oligonucleotide
  Antisense Strand to SEQ ID NO: 490653
caucccauuucucaaacgu

SEQ ID NO: 490655 - RNA, 19 nt, Artificial Sequence
  Description of Artificial Sequence: Synthetic oligonucleotide
  Sense strand starting at position 2096 of SEQ ID NO: 317435
gcaggccuaaguuaagaau

SEQ ID NO: 490656 - RNA, 19 nt, Artificial Sequence
  Description of Artificial Sequence: Synthetic oligonucleotide
  Antisense Strand to SEQ ID NO: 490655
auucuuaacuuaggccugc

SEQ ID NO: 490657 - RNA, 19 nt, Artificial Sequence
  Description of Artificial Sequence: Synthetic oligonucleotide
  Sense strand starting at position 2102 of SEQ ID NO: 317435
cuaaguuaagaaugcuaca

SEQ ID NO: 490658 - RNA, 19 nt, Artificial Sequence
  Description of Artificial Sequence: Synthetic oligonucleotide
  Antisense Strand to SEQ ID NO: 490657
uguagcauucuuaacuuag

SEQ ID NO: 490659 - RNA, 19 nt, Artificial Sequence
  Description of Artificial Sequence: Synthetic oligonucleotide
  Sense strand starting at position 2223 of SEQ ID NO: 317435
uugagcgaauaguuauuaa

SEQ ID NO: 490660 - RNA, 19 nt, Artificial Sequence
  Description of Artificial Sequence: Synthetic oligonucleotide
  Antisense Strand to SEQ ID NO: 490659
uuaauaacuauucgcucaa

SEQ ID NO: 490661 - RNA, 19 nt, Artificial Sequence
  Description of Artificial Sequence: Synthetic oligonucleotide
  Sense strand starting at position 2304 of SEQ ID NO: 317435
ggaaaucugugucuacuug

SEQ ID NO: 490662 - RNA, 19 nt, Artificial Sequence
  Description of Artificial Sequence: Synthetic oligonucleotide
  Antisense Strand to SEQ ID NO: 490661
caaguagacacagauuucc

SEQ ID NO: 490663 - RNA, 19 nt, Artificial Sequence
  Description of Artificial Sequence: Synthetic oligonucleotide
  Sense strand starting at position 2305 of SEQ ID NO: 317435
gaaaucugugucuacuugu

SEQ ID NO: 490664 - RNA, 19 nt, Artificial Sequence
  Description of Artificial Sequence: Synthetic oligonucleotide
  Antisense Strand to SEQ ID NO: 490663
acaaguagacacagauuuc

SEQ ID NO: 490665 - RNA, 19 nt, Artificial Sequence
  Description of Artificial Sequence: Synthetic oligonucleotide
  Sense strand starting at position 2390 of SEQ ID NO: 317435
cgugauaguccugaagaga

SEQ ID NO: 490666 - RNA, 19 nt, Artificial Sequence
  Description of Artificial Sequence: Synthetic oligonucleotide
  Antisense Strand to SEQ ID NO: 490665
ucucuucaggacuaucacg

SEQ ID NO: 490667 - RNA, 19 nt, Artificial Sequence
  Description of Artificial Sequence: Synthetic oligonucleotide
  Sense strand starting at position 2472 of SEQ ID NO: 317435
uaaguaaagggcugacaga

SEQ ID NO: 490668 - RNA, 19 nt, Artificial Sequence
  Description of Artificial Sequence: Synthetic oligonucleotide
  Antisense Strand to SEQ ID NO: 490667
ucugucagcccuuuacuua

SEQ ID NO: 490669 - RNA, 19 nt, Artificial Sequence
  Description of Artificial Sequence: Synthetic oligonucleotide
  Sense strand starting at position 2508 of SEQ ID NO: 317435
cgcgaauaucuugggaaag

SEQ ID NO: 490670 - RNA, 19 nt, Artificial Sequence
  Description of Artificial Sequence: Synthetic oligonucleotide
  Antisense Strand to SEQ ID NO: 490669
cuuucccaagauauucgcg

SEQ ID NO: 490671 - RNA, 19 nt, Artificial Sequence
  Description of Artificial Sequence: Synthetic oligonucleotide
  Sense strand starting at position 2612 of SEQ ID NO: 317435
gagugaaggguuuaguccu

SEQ ID NO: 490672 - RNA, 19 nt, Artificial Sequence
  Description of Artificial Sequence: Synthetic oligonucleotide
  Antisense Strand to SEQ ID NO: 490671
aggacuaaacccuucacuc

SEQ ID NO: 490673 - RNA, 19 nt, Artificial Sequence
  Description of Artificial Sequence: Synthetic oligonucleotide
  Sense strand starting at position 2753 of SEQ ID NO: 317435
uuaagagggucacucuuua

SEQ ID NO: 490674 - RNA, 19 nt, Artificial Sequence
  Description of Artificial Sequence: Synthetic oligonucleotide
  Antisense Strand to SEQ ID NO: 490673
uaaagagugacccucuuaa

SEQ ID NO: 490675 - RNA, 19 nt, Artificial Sequence
  Description of Artificial Sequence: Synthetic oligonucleotide
  Sense strand starting at position 2757 of SEQ ID NO: 317435
gagggucacucuuuaagga

SEQ ID NO: 490676 - RNA, 19 nt, Artificial Sequence
  Description of Artificial Sequence: Synthetic oligonucleotide
  Antisense Strand to SEQ ID NO: 490675
uccuuaaagagugacccuc

SEQ ID NO: 490677 - RNA, 19 nt, Artificial Sequence
  Description of Artificial Sequence: Synthetic oligonucleotide
  Sense strand starting at position 2844 of SEQ ID NO: 317435
aagcauaauggugguuuga

SEQ ID NO: 490678 - RNA, 19 nt, Artificial Sequence
  Description of Artificial Sequence: Synthetic oligonucleotide
  Antisense Strand to SEQ ID NO: 490677
ucaaaccaccauuaugcuu

SEQ ID NO: 490679 - RNA, 19 nt, Artificial Sequence
  Description of Artificial Sequence: Synthetic oligonucleotide
  Sense strand starting at position 2857 of SEQ ID NO: 317435
guuugacuaugggugguaa

SEQ ID NO: 490680 - RNA, 19 nt, Artificial Sequence
  Description of Artificial Sequence: Synthetic oligonucleotide
  Antisense Strand to SEQ ID NO: 490679
uuaccacccauagucaaac

SEQ ID NO: 490681 - RNA, 19 nt, Artificial Sequence
  Description of Artificial Sequence: Synthetic oligonucleotide
  Sense strand starting at position 2859 of SEQ ID NO: 317435
uugacuaugggugguaaga

SEQ ID NO: 490682 - RNA, 19 nt, Artificial Sequence
  Description of Artificial Sequence: Synthetic oligonucleotide
  Antisense Strand to SEQ ID NO: 490681
ucuuaccacccauagucaa

SEQ ID NO: 490683 - RNA, 19 nt, Artificial Sequence
  Description of Artificial Sequence: Synthetic oligonucleotide
  Sense strand starting at position 2872 of SEQ ID NO: 317435
guaagaaauggccaguuau

SEQ ID NO: 490684 - RNA, 19 nt, Artificial Sequence
  Description of Artificial Sequence: Synthetic oligonucleotide
  Antisense Strand to SEQ ID NO: 490683
auaacuggccauuucuuac

SEQ ID NO: 490685 - RNA, 19 nt, Artificial Sequence
  Description of Artificial Sequence: Synthetic oligonucleotide
  Sense strand starting at position 2885 of SEQ ID NO: 317435
aguuauauucuugaugcac

SEQ ID NO: 490686 - RNA, 19 nt, Artificial Sequence
  Description of Artificial Sequence: Synthetic oligonucleotide
  Antisense Strand to SEQ ID NO: 490685
gugcaucaagaauauaacu

SEQ ID NO: 490687 - RNA, 19 nt, Artificial Sequence
  Description of Artificial Sequence: Synthetic oligonucleotide
  Sense strand starting at position 2951 of SEQ ID NO: 317435
uuaauuaggcuuuggagga

SEQ ID NO: 490688 - RNA, 19 nt, Artificial Sequence
  Description of Artificial Sequence: Synthetic oligonucleotide
  Antisense Strand to SEQ ID NO: 490687
uccuccaaagccuaauuaa

SEQ ID NO: 490689 - RNA, 19 nt, Artificial Sequence
  Description of Artificial Sequence: Synthetic oligonucleotide
  Sense strand starting at position 2993 of SEQ ID NO: 317435
ugaguuucagaguggcaaa

SEQ ID NO: 490690 - RNA, 19 nt, Artificial Sequence
  Description of Artificial Sequence: Synthetic oligonucleotide
  Antisense Strand to SEQ ID NO: 490689
uuugccacucugaaacuca

SEQ ID NO: 490691 - RNA, 19 nt, Artificial Sequence
  Description of Artificial Sequence: Synthetic oligonucleotide
  Sense strand starting at position 3074 of SEQ ID NO: 317435
uuuccuggaucugucuaua

SEQ ID NO: 490692 - RNA, 19 nt, Artificial Sequence
  Description of Artificial Sequence: Synthetic oligonucleotide
  Antisense Strand to SEQ ID NO: 490691
uauagacagauccaggaaa

SEQ ID NO: 490693 - RNA, 19 nt, Artificial Sequence
  Description of Artificial Sequence: Synthetic oligonucleotide
  Sense strand starting at position 3138 of SEQ ID NO: 317435
auagguauuuaaugacaag

SEQ ID NO: 490694 - RNA, 19 nt, Artificial Sequence
  Description of Artificial Sequence: Synthetic oligonucleotide
  Antisense Strand to SEQ ID NO: 490693
cuugucauuaaauaccuau

SEQ ID NO: 490695 - RNA, 19 nt, Artificial Sequence
  Description of Artificial Sequence: Synthetic oligonucleotide
  Sense strand starting at position 3141 of SEQ ID NO: 317435
gguauuuaaugacaaggua

SEQ ID NO: 490696 - RNA, 19 nt, Artificial Sequence
  Description of Artificial Sequence: Synthetic oligonucleotide
  Antisense Strand to SEQ ID NO: 490695
uaccuugucauuaaauacc

SEQ ID NO: 490697 - RNA, 19 nt, Artificial Sequence
  Description of Artificial Sequence: Synthetic oligonucleotide
  Sense strand starting at position 3154 of SEQ ID NO: 317435
aagguauguaaugggucua

SEQ ID NO: 490698 - RNA, 19 nt, Artificial Sequence
  Description of Artificial Sequence: Synthetic oligonucleotide
  Antisense Strand to SEQ ID NO: 490697
uagacccauuacauaccuu

SEQ ID NO: 490699 - RNA, 19 nt, Artificial Sequence
  Description of Artificial Sequence: Synthetic oligonucleotide
  Sense strand starting at position 3166 of SEQ ID NO: 317435
gggucuagucugcaaaucu

SEQ ID NO: 490700 - RNA, 19 nt, Artificial Sequence
  Description of Artificial Sequence: Synthetic oligonucleotide
  Antisense Strand to SEQ ID NO: 490699
agauuugcagacuagaccc

SEQ ID NO: 490701 - RNA, 19 nt, Artificial Sequence
  Description of Artificial Sequence: Synthetic oligonucleotide
  Sense strand starting at position 3176 of SEQ ID NO: 317435
ugcaaaucuuaaccaggua

SEQ ID NO: 490702 - RNA, 19 nt, Artificial Sequence
  Description of Artificial Sequence: Synthetic oligonucleotide
  Antisense Strand to SEQ ID NO: 490701
uaccugguuaagauuugca

SEQ ID NO: 490703 - RNA, 19 nt, Artificial Sequence
  Description of Artificial Sequence: Synthetic oligonucleotide
  Sense strand starting at position 3289 of SEQ ID NO: 317435
uguguuaaugacgauggua

SEQ ID NO: 490704 - RNA, 19 nt, Artificial Sequence
  Description of Artificial Sequence: Synthetic oligonucleotide
  Antisense Strand to SEQ ID NO: 490703
uaccaucgucauuaacaca

SEQ ID NO: 490705 - RNA, 19 nt, Artificial Sequence
  Description of Artificial Sequence: Synthetic oligonucleotide
  Sense strand starting at position 3422 of SEQ ID NO: 317435
cugucugguaagggaaaua

SEQ ID NO: 490706 - RNA, 19 nt, Artificial Sequence
  Description of Artificial Sequence: Synthetic oligonucleotide
  Antisense Strand to SEQ ID NO: 490705
uauuucccuuaccagacag

SEQ ID NO: 490707 - RNA, 19 nt, Artificial Sequence
  Description of Artificial Sequence: Synthetic oligonucleotide
  Sense strand starting at position 3485 of SEQ ID NO: 317435
uuuggcaaagguugauaaa

SEQ ID NO: 490708 - RNA, 19 nt, Artificial Sequence
  Description of Artificial Sequence: Synthetic oligonucleotide
  Antisense Strand to SEQ ID NO: 490707
uuuaucaaccuuugccaaa

SEQ ID NO: 490709 - RNA, 19 nt, Artificial Sequence
  Description of Artificial Sequence: Synthetic oligonucleotide
  Sense strand starting at position 3737 of SEQ ID NO: 317435
caguaauuagauuguguag

SEQ ID NO: 490710 - RNA, 19 nt, Artificial Sequence
  Description of Artificial Sequence: Synthetic oligonucleotide
  Antisense Strand to SEQ ID NO: 490709
cuacacaaucuaauuacug

SEQ ID NO: 490711 - RNA, 19 nt, Artificial Sequence
  Description of Artificial Sequence: Synthetic oligonucleotide
  Sense strand starting at position 3740 of SEQ ID NO: 317435
uaauuagauuguguagcaa

SEQ ID NO: 490712 - RNA, 19 nt, Artificial Sequence
  Description of Artificial Sequence: Synthetic oligonucleotide
  Antisense Strand to SEQ ID NO: 490711
uugcuacacaaucuaauua

SEQ ID NO: 490713 - RNA, 19 nt, Artificial Sequence
  Description of Artificial Sequence: Synthetic oligonucleotide
  Sense strand starting at position 3932 of SEQ ID NO: 317435
ugaauuggcaguugugaga

SEQ ID NO: 490714 - RNA, 19 nt, Artificial Sequence
  Description of Artificial Sequence: Synthetic oligonucleotide
  Antisense Strand to SEQ ID NO: 490713
ucucacaacugccaauuca

SEQ ID NO: 490715 - RNA, 19 nt, Artificial Sequence
  Description of Artificial Sequence: Synthetic oligonucleotide
  Sense strand starting at position 3945 of SEQ ID NO: 317435
gugagauauuugucauugc

SEQ ID NO: 490716 - RNA, 19 nt, Artificial Sequence
  Description of Artificial Sequence: Synthetic oligonucleotide
  Antisense Strand to SEQ ID NO: 490715
gcaaugacaaauaucucac

SEQ ID NO: 490717 - RNA, 19 nt, Artificial Sequence
  Description of Artificial Sequence: Synthetic oligonucleotide
  Sense strand starting at position 154 of SEQ ID NO: 317436
uuacuagauuuguauagga

SEQ ID NO: 490718 - RNA, 19 nt, Artificial Sequence
  Description of Artificial Sequence: Synthetic oligonucleotide
  Antisense Strand to SEQ ID NO: 490717
uccuauacaaaucuaguaa

SEQ ID NO: 490719 - RNA, 19 nt, Artificial Sequence
  Description of Artificial Sequence: Synthetic oligonucleotide
  Sense strand starting at position 159 of SEQ ID NO: 317436
agauuuguauaggauuaug

SEQ ID NO: 490720 - RNA, 19 nt, Artificial Sequence
  Description of Artificial Sequence: Synthetic oligonucleotide
  Antisense Strand to SEQ ID NO: 490719
cauaauccuauacaaaucu

SEQ ID NO: 490721 - RNA, 19 nt, Artificial Sequence
  Description of Artificial Sequence: Synthetic oligonucleotide
  Sense strand starting at position 162 of SEQ ID NO: 317436
uuuguauaggauuauguca

SEQ ID NO: 490722 - RNA, 19 nt, Artificial Sequence
  Description of Artificial Sequence: Synthetic oligonucleotide
  Antisense Strand to SEQ ID NO: 490721
ugacauaauccuauacaaa

SEQ ID NO: 490723 - RNA, 19 nt, Artificial Sequence
  Description of Artificial Sequence: Synthetic oligonucleotide
  Sense strand starting at position 227 of SEQ ID NO: 317436
cgaagugagaaacguaaca

SEQ ID NO: 490724 - RNA, 19 nt, Artificial Sequence
  Description of Artificial Sequence: Synthetic oligonucleotide
  Antisense Strand to SEQ ID NO: 490723
uguuacguuucucacuucg

SEQ ID NO: 490725 - RNA, 19 nt, Artificial Sequence
  Description of Artificial Sequence: Synthetic oligonucleotide
  Sense strand starting at position 326 of SEQ ID NO: 317436
caccuauuagcagaggagu

SEQ ID NO: 490726 - RNA, 19 nt, Artificial Sequence
  Description of Artificial Sequence: Synthetic oligonucleotide
  Antisense Strand to SEQ ID NO: 490725
acuccucugcuaauaggug

SEQ ID NO: 490727 - RNA, 19 nt, Artificial Sequence
  Description of Artificial Sequence: Synthetic oligonucleotide
  Sense strand starting at position 328 of SEQ ID NO: 317436
ccuauuagcagaggaguaa

SEQ ID NO: 490728 - RNA, 19 nt, Artificial Sequence
  Description of Artificial Sequence: Synthetic oligonucleotide
  Antisense Strand to SEQ ID NO: 490727
uuacuccucugcuaauagg

SEQ ID NO: 490729 - RNA, 19 nt, Artificial Sequence
  Description of Artificial Sequence: Synthetic oligonucleotide
  Sense strand starting at position 372 of SEQ ID NO: 317436
auaucaguccuaugagaau

SEQ ID NO: 490730 - RNA, 19 nt, Artificial Sequence
  Description of Artificial Sequence: Synthetic oligonucleotide
  Antisense Strand to SEQ ID NO: 490729
auucucauaggacugauau

SEQ ID NO: 490731 - RNA, 19 nt, Artificial Sequence
  Description of Artificial Sequence: Synthetic oligonucleotide
  Sense strand starting at position 429 of SEQ ID NO: 317436
aggugauuccaugaucuuu

SEQ ID NO: 490732 - RNA, 19 nt, Artificial Sequence
  Description of Artificial Sequence: Synthetic oligonucleotide
  Antisense Strand to SEQ ID NO: 490731
aaagaucauggaaucaccu

SEQ ID NO: 490733 - RNA, 19 nt, Artificial Sequence
  Description of Artificial Sequence: Synthetic oligonucleotide
  Sense strand starting at position 479 of SEQ ID NO: 317436
ccucguuaucaaugagaaa

SEQ ID NO: 490734 - RNA, 19 nt, Artificial Sequence
  Description of Artificial Sequence: Synthetic oligonucleotide
  Antisense Strand to SEQ ID NO: 490733
uuucucauugauaacgagg

SEQ ID NO: 490735 - RNA, 19 nt, Artificial Sequence
  Description of Artificial Sequence: Synthetic oligonucleotide
  Sense strand starting at position 528 of SEQ ID NO: 317436
gcaacuuaccuugaugagu

SEQ ID NO: 490736 - RNA, 19 nt, Artificial Sequence
  Description of Artificial Sequence: Synthetic oligonucleotide
  Antisense Strand to SEQ ID NO: 490735
acucaucaagguaaguugc

SEQ ID NO: 490737 - RNA, 19 nt, Artificial Sequence
  Description of Artificial Sequence: Synthetic oligonucleotide
  Sense strand starting at position 531 of SEQ ID NO: 317436
acuuaccuugaugaguuau

SEQ ID NO: 490738 - RNA, 19 nt, Artificial Sequence
  Description of Artificial Sequence: Synthetic oligonucleotide
  Antisense Strand to SEQ ID NO: 490737
auaacucaucaagguaagu

SEQ ID NO: 490739 - RNA, 19 nt, Artificial Sequence
  Description of Artificial Sequence: Synthetic oligonucleotide
  Sense strand starting at position 533 of SEQ ID NO: 317436
uuaccuugaugaguuauga

SEQ ID NO: 490740 - RNA, 19 nt, Artificial Sequence
  Description of Artificial Sequence: Synthetic oligonucleotide
  Antisense Strand to SEQ ID NO: 490739
ucauaacucaucaagguaa

SEQ ID NO: 490741 - RNA, 19 nt, Artificial Sequence
  Description of Artificial Sequence: Synthetic oligonucleotide
  Sense strand starting at position 860 of SEQ ID NO: 317436
cuauuaagcucuuugagac

SEQ ID NO: 490742 - RNA, 19 nt, Artificial Sequence
  Description of Artificial Sequence: Synthetic oligonucleotide
  Antisense Strand to SEQ ID NO: 490741
gucucaaagagcuuaauag

SEQ ID NO: 490743 - RNA, 19 nt, Artificial Sequence
  Description of Artificial Sequence: Synthetic oligonucleotide
  Sense strand starting at position 927 of SEQ ID NO: 317436
cugagcugacuaugcauuu

SEQ ID NO: 490744 - RNA, 19 nt, Artificial Sequence
  Description of Artificial Sequence: Synthetic oligonucleotide
  Antisense Strand to SEQ ID NO: 490743
aaaugcauagucagcucag

SEQ ID NO: 490745 - RNA, 19 nt, Artificial Sequence
  Description of Artificial Sequence: Synthetic oligonucleotide
  Sense strand starting at position 1011 of SEQ ID NO: 317436
cuuagaaacucaccgauga

SEQ ID NO: 490746 - RNA, 19 nt, Artificial Sequence
  Description of Artificial Sequence: Synthetic oligonucleotide
  Antisense Strand to SEQ ID NO: 490745
ucaucggugaguuucuaag

SEQ ID NO: 490747 - RNA, 19 nt, Artificial Sequence
  Description of Artificial Sequence: Synthetic oligonucleotide
  Sense strand starting at position 1261 of SEQ ID NO: 317436
augucuuaucuauacaagu

SEQ ID NO: 490748 - RNA, 19 nt, Artificial Sequence
  Description of Artificial Sequence: Synthetic oligonucleotide
  Antisense Strand to SEQ ID NO: 490747
acuuguauagauaagacau

SEQ ID NO: 490749 - RNA, 19 nt, Artificial Sequence
  Description of Artificial Sequence: Synthetic oligonucleotide
  Sense strand starting at position 1292 of SEQ ID NO: 317436
gugaauuauccacagugua

SEQ ID NO: 490750 - RNA, 19 nt, Artificial Sequence
  Description of Artificial Sequence: Synthetic oligonucleotide
  Antisense Strand to SEQ ID NO: 490749
uacacuguggauaauucac

SEQ ID NO: 490751 - RNA, 19 nt, Artificial Sequence
  Description of Artificial Sequence: Synthetic oligonucleotide
  Sense strand starting at position 1351 of SEQ ID NO: 317436
ucuuacuuccacuggagau

SEQ ID NO: 490752 - RNA, 19 nt, Artificial Sequence
  Description of Artificial Sequence: Synthetic oligonucleotide
  Antisense Strand to SEQ ID NO: 490751
aucuccaguggaaguaaga

SEQ ID NO: 490753 - RNA, 19 nt, Artificial Sequence
  Description of Artificial Sequence: Synthetic oligonucleotide
  Sense strand starting at position 1465 of SEQ ID NO: 317436
auuggugacuuucccuaau

SEQ ID NO: 490754 - RNA, 19 nt, Artificial Sequence
  Description of Artificial Sequence: Synthetic oligonucleotide
  Antisense Strand to SEQ ID NO: 490753
auuagggaaagucaccaau

SEQ ID NO: 490755 - RNA, 19 nt, Artificial Sequence
  Description of Artificial Sequence: Synthetic oligonucleotide
  Sense strand starting at position 1506 of SEQ ID NO: 317436
agucacuuggcagaauuga

SEQ ID NO: 490756 - RNA, 19 nt, Artificial Sequence
  Description of Artificial Sequence: Synthetic oligonucleotide
  Antisense Strand to SEQ ID NO: 490755
ucaauucugccaagugacu

SEQ ID NO: 490757 - RNA, 19 nt, Artificial Sequence
  Description of Artificial Sequence: Synthetic oligonucleotide
  Sense strand starting at position 1517 of SEQ ID NO: 317436
agaauugagugccuaacaa

SEQ ID NO: 490758 - RNA, 19 nt, Artificial Sequence
  Description of Artificial Sequence: Synthetic oligonucleotide
  Antisense Strand to SEQ ID NO: 490757
uuguuaggcacucaauucu

SEQ ID NO: 490759 - RNA, 19 nt, Artificial Sequence
  Description of Artificial Sequence: Synthetic oligonucleotide
  Sense strand starting at position 1730 of SEQ ID NO: 317436
acuaaugauaugggugauu

SEQ ID NO: 490760 - RNA, 19 nt, Artificial Sequence
  Description of Artificial Sequence: Synthetic oligonucleotide
  Antisense Strand to SEQ ID NO: 490759
aaucacccauaucauuagu

SEQ ID NO: 490761 - RNA, 19 nt, Artificial Sequence
  Description of Artificial Sequence: Synthetic oligonucleotide
  Sense strand starting at position 1771 of SEQ ID NO: 317436
uuuagaguagauuguuaga

SEQ ID NO: 490762 - RNA, 19 nt, Artificial Sequence
  Description of Artificial Sequence: Synthetic oligonucleotide
  Antisense Strand to SEQ ID NO: 490761
ucuaacaaucuacucuaaa

SEQ ID NO: 490763 - RNA, 19 nt, Artificial Sequence
  Description of Artificial Sequence: Synthetic oligonucleotide
  Sense strand starting at position 1773 of SEQ ID NO: 317436
uagaguagauuguuagaca

SEQ ID NO: 490764 - RNA, 19 nt, Artificial Sequence
  Description of Artificial Sequence: Synthetic oligonucleotide
  Antisense Strand to SEQ ID NO: 490763
ugucuaacaaucuacucua

SEQ ID NO: 490765 - RNA, 19 nt, Artificial Sequence
  Description of Artificial Sequence: Synthetic oligonucleotide
  Sense strand starting at position 2089 of SEQ ID NO: 317436
uuuccauugguacagaacu

SEQ ID NO: 490766 - RNA, 19 nt, Artificial Sequence
  Description of Artificial Sequence: Synthetic oligonucleotide
  Antisense Strand to SEQ ID NO: 490765
aguucuguaccaauggaaa

SEQ ID NO: 490767 - RNA, 19 nt, Artificial Sequence
  Description of Artificial Sequence: Synthetic oligonucleotide
  Sense strand starting at position 2178 of SEQ ID NO: 317436
aauugaguuguaugacuug

SEQ ID NO: 490768 - RNA, 19 nt, Artificial Sequence
  Description of Artificial Sequence: Synthetic oligonucleotide
  Antisense Strand to SEQ ID NO: 490767
caagucauacaacucaauu

SEQ ID NO: 490769 - RNA, 19 nt, Artificial Sequence
  Description of Artificial Sequence: Synthetic oligonucleotide
  Sense strand starting at position 2422 of SEQ ID NO: 317436
uaauaaagucuggguacau

SEQ ID NO: 490770 - RNA, 19 nt, Artificial Sequence
  Description of Artificial Sequence: Synthetic oligonucleotide
  Antisense Strand to SEQ ID NO: 490769
auguacccagacuuuauua

SEQ ID NO: 490771 - RNA, 19 nt, Artificial Sequence
  Description of Artificial Sequence: Synthetic oligonucleotide
  Sense strand starting at position 2565 of SEQ ID NO: 317436
ucaucuguggcauaccaau

SEQ ID NO: 490772 - RNA, 19 nt, Artificial Sequence
  Description of Artificial Sequence: Synthetic oligonucleotide
  Antisense Strand to SEQ ID NO: 490771
auugguaugccacagauga

SEQ ID NO: 490773 - RNA, 19 nt, Artificial Sequence
  Description of Artificial Sequence: Synthetic oligonucleotide
  Sense strand starting at position 2599 of SEQ ID NO: 317436
agucauccacauuagcaua

SEQ ID NO: 490774 - RNA, 19 nt, Artificial Sequence
  Description of Artificial Sequence: Synthetic oligonucleotide
  Antisense Strand to SEQ ID NO: 490773
uaugcuaauguggaugacu

SEQ ID NO: 490775 - RNA, 19 nt, Artificial Sequence
  Description of Artificial Sequence: Synthetic oligonucleotide
  Sense strand starting at position 2613 of SEQ ID NO: 317436
gcauacauugccuauauag

SEQ ID NO: 490776 - RNA, 19 nt, Artificial Sequence
  Description of Artificial Sequence: Synthetic oligonucleotide
  Antisense Strand to SEQ ID NO: 490775
cuauauaggcaauguaugc

SEQ ID NO: 490777 - RNA, 19 nt, Artificial Sequence
  Description of Artificial Sequence: Synthetic oligonucleotide
  Sense strand starting at position 3126 of SEQ ID NO: 317436
uagccaaagucauuggaag

SEQ ID NO: 490778 - RNA, 19 nt, Artificial Sequence
  Description of Artificial Sequence: Synthetic oligonucleotide
  Antisense Strand to SEQ ID NO: 490777
cuuccaaugacuuuggcua

SEQ ID NO: 490779 - RNA, 19 nt, Artificial Sequence
  Description of Artificial Sequence: Synthetic oligonucleotide
  Sense strand starting at position 3237 of SEQ ID NO: 317436
aauagaaaguguuuaagcu

SEQ ID NO: 490780 - RNA, 19 nt, Artificial Sequence
  Description of Artificial Sequence: Synthetic oligonucleotide
  Antisense Strand to SEQ ID NO: 490779
agcuuaaacacuuucuauu

SEQ ID NO: 490781 - RNA, 19 nt, Artificial Sequence
  Description of Artificial Sequence: Synthetic oligonucleotide
  Sense strand starting at position 3244 of SEQ ID NO: 317436
aguguuuaagcugauuaua

SEQ ID NO: 490782 - RNA, 19 nt, Artificial Sequence
  Description of Artificial Sequence: Synthetic oligonucleotide
  Antisense Strand to SEQ ID NO: 490781
uauaaucagcuuaaacacu

SEQ ID NO: 490783 - RNA, 19 nt, Artificial Sequence
  Description of Artificial Sequence: Synthetic oligonucleotide
  Sense strand starting at position 3247 of SEQ ID NO: 317436
guuuaagcugauuauaauc

SEQ ID NO: 490784 - RNA, 19 nt, Artificial Sequence
  Description of Artificial Sequence: Synthetic oligonucleotide
  Antisense Strand to SEQ ID NO: 490783
gauuauaaucagcuuaaac

SEQ ID NO: 490785 - RNA, 19 nt, Artificial Sequence
  Description of Artificial Sequence: Synthetic oligonucleotide
  Sense strand starting at position 3271 of SEQ ID NO: 317436
gauccugacccagguuaaa

SEQ ID NO: 490786 - RNA, 19 nt, Artificial Sequence
  Description of Artificial Sequence: Synthetic oligonucleotide
  Antisense Strand to SEQ ID NO: 490785
uuuaaccugggucaggauc

SEQ ID NO: 490787 - RNA, 19 nt, Artificial Sequence
  Description of Artificial Sequence: Synthetic oligonucleotide
  Sense strand starting at position 3403 of SEQ ID NO: 317436
ugucacauuucccuugagu

SEQ ID NO: 490788 - RNA, 19 nt, Artificial Sequence
  Description of Artificial Sequence: Synthetic oligonucleotide
  Antisense Strand to SEQ ID NO: 490787
acucaagggaaaugugaca

SEQ ID NO: 490789 - RNA, 19 nt, Artificial Sequence
  Description of Artificial Sequence: Synthetic oligonucleotide
  Sense strand starting at position 3435 of SEQ ID NO: 317436
ccuggaaauugccuacaca

SEQ ID NO: 490790 - RNA, 19 nt, Artificial Sequence
  Description of Artificial Sequence: Synthetic oligonucleotide
  Antisense Strand to SEQ ID NO: 490789
uguguaggcaauuuccagg

SEQ ID NO: 490791 - RNA, 19 nt, Artificial Sequence
  Description of Artificial Sequence: Synthetic oligonucleotide
  Sense strand starting at position 3583 of SEQ ID NO: 317436
cguguuuacagagaauaau

SEQ ID NO: 490792 - RNA, 19 nt, Artificial Sequence
  Description of Artificial Sequence: Synthetic oligonucleotide
  Antisense Strand to SEQ ID NO: 490791
auuauucucuguaaacacg

SEQ ID NO: 490793 - RNA, 19 nt, Artificial Sequence
  Description of Artificial Sequence: Synthetic oligonucleotide
  Sense strand starting at position 3944 of SEQ ID NO: 317436
gcaauagcauuaucaaaug

SEQ ID NO: 490794 - RNA, 19 nt, Artificial Sequence
  Description of Artificial Sequence: Synthetic oligonucleotide
  Antisense Strand to SEQ ID NO: 490793
cauuugauaaugcuauugc

SEQ ID NO: 490795 - RNA, 19 nt, Artificial Sequence
  Description of Artificial Sequence: Synthetic oligonucleotide
  Sense strand starting at position 3972 of SEQ ID NO: 317436
uuauauucuggucaucauu

SEQ ID NO: 490796 - RNA, 19 nt, Artificial Sequence
  Description of Artificial Sequence: Synthetic oligonucleotide
  Antisense Strand to SEQ ID NO: 490795
aaugaugaccagaauauaa

SEQ ID NO: 490797 - RNA, 19 nt, Artificial Sequence
  Description of Artificial Sequence: Synthetic oligonucleotide
  Sense strand starting at position 180 of SEQ ID NO: 317437
cagagaggccaguaauucu

SEQ ID NO: 490798 - RNA, 19 nt, Artificial Sequence
  Description of Artificial Sequence: Synthetic oligonucleotide
  Antisense Strand to SEQ ID NO: 490797
agaauuacuggccucucug

SEQ ID NO: 490799 - RNA, 19 nt, Artificial Sequence
  Description of Artificial Sequence: Synthetic oligonucleotide
  Sense strand starting at position 421 of SEQ ID NO: 317437
auccuuuccuaguugggaa

SEQ ID NO: 490800 - RNA, 19 nt, Artificial Sequence
  Description of Artificial Sequence: Synthetic oligonucleotide
  Antisense Strand to SEQ ID NO: 490799
uucccaacuaggaaaggau

SEQ ID NO: 490801 - RNA, 19 nt, Artificial Sequence
  Description of Artificial Sequence: Synthetic oligonucleotide
  Sense strand starting at position 476 of SEQ ID NO: 317437
gguauugccaacuagagua

SEQ ID NO: 490802 - RNA, 19 nt, Artificial Sequence
  Description of Artificial Sequence: Synthetic oligonucleotide
  Antisense Strand to SEQ ID NO: 490801
uacucuaguuggcaauacc

SEQ ID NO: 490803 - RNA, 19 nt, Artificial Sequence
  Description of Artificial Sequence: Synthetic oligonucleotide
  Sense strand starting at position 498 of SEQ ID NO: 317437
cacugacugcaugaguuua

SEQ ID NO: 490804 - RNA, 19 nt, Artificial Sequence
  Description of Artificial Sequence: Synthetic oligonucleotide
  Antisense Strand to SEQ ID NO: 490803
uaaacucaugcagucagug

SEQ ID NO: 490805 - RNA, 19 nt, Artificial Sequence
  Description of Artificial Sequence: Synthetic oligonucleotide
  Sense strand starting at position 500 of SEQ ID NO: 317437
cugacugcaugaguuuaca

SEQ ID NO: 490806 - RNA, 19 nt, Artificial Sequence
  Description of Artificial Sequence: Synthetic oligonucleotide
  Antisense Strand to SEQ ID NO: 490805
uguaaacucaugcagucag

SEQ ID NO: 490807 - RNA, 19 nt, Artificial Sequence
  Description of Artificial Sequence: Synthetic oligonucleotide
  Sense strand starting at position 548 of SEQ ID NO: 317437
uguacacacccuugugaga

SEQ ID NO: 490808 - RNA, 19 nt, Artificial Sequence
  Description of Artificial Sequence: Synthetic oligonucleotide
  Antisense Strand to SEQ ID NO: 490807
ucucacaaggguguguaca

SEQ ID NO: 490809 - RNA, 19 nt, Artificial Sequence
  Description of Artificial Sequence: Synthetic oligonucleotide
  Sense strand starting at position 600 of SEQ ID NO: 317437
uaagcaucugcguuggcaa

SEQ ID NO: 490810 - RNA, 19 nt, Artificial Sequence
  Description of Artificial Sequence: Synthetic oligonucleotide
  Antisense Strand to SEQ ID NO: 490809
uugccaacgcagaugcuua

SEQ ID NO: 490811 - RNA, 19 nt, Artificial Sequence
  Description of Artificial Sequence: Synthetic oligonucleotide
  Sense strand starting at position 612 of SEQ ID NO: 317437
uuggcaagaguguaauaua

SEQ ID NO: 490812 - RNA, 19 nt, Artificial Sequence
  Description of Artificial Sequence: Synthetic oligonucleotide
  Antisense Strand to SEQ ID NO: 490811
uauauuacacucuugccaa

SEQ ID NO: 490813 - RNA, 19 nt, Artificial Sequence
  Description of Artificial Sequence: Synthetic oligonucleotide
  Sense strand starting at position 722 of SEQ ID NO: 317437
ugugaaaguuacccauacu

SEQ ID NO: 490814 - RNA, 19 nt, Artificial Sequence
  Description of Artificial Sequence: Synthetic oligonucleotide
  Antisense Strand to SEQ ID NO: 490813
aguauggguaacuuucaca

SEQ ID NO: 490815 - RNA, 19 nt, Artificial Sequence
  Description of Artificial Sequence: Synthetic oligonucleotide
  Sense strand starting at position 775 of SEQ ID NO: 317437
cuuacuccaggugauuauu

SEQ ID NO: 490816 - RNA, 19 nt, Artificial Sequence
  Description of Artificial Sequence: Synthetic oligonucleotide
  Antisense Strand to SEQ ID NO: 490815
aauaaucaccuggaguaag

SEQ ID NO: 490817 - RNA, 19 nt, Artificial Sequence
  Description of Artificial Sequence: Synthetic oligonucleotide
  Sense strand starting at position 785 of SEQ ID NO: 317437
gugauuauugcagaguaag

SEQ ID NO: 490818 - RNA, 19 nt, Artificial Sequence
  Description of Artificial Sequence: Synthetic oligonucleotide
  Antisense Strand to SEQ ID NO: 490817
cuuacucugcaauaaucac

SEQ ID NO: 490819 - RNA, 19 nt, Artificial Sequence
  Description of Artificial Sequence: Synthetic oligonucleotide
  Sense strand starting at position 878 of SEQ ID NO: 317437
agcucuuuagcagagaaua

SEQ ID NO: 490820 - RNA, 19 nt, Artificial Sequence
  Description of Artificial Sequence: Synthetic oligonucleotide
  Antisense Strand to SEQ ID NO: 490819
uauucucugcuaaagagcu

SEQ ID NO: 490821 - RNA, 19 nt, Artificial Sequence
  Description of Artificial Sequence: Synthetic oligonucleotide
  Sense strand starting at position 905 of SEQ ID NO: 317437
gugaguaaauucucagaau

SEQ ID NO: 490822 - RNA, 19 nt, Artificial Sequence
  Description of Artificial Sequence: Synthetic oligonucleotide
  Antisense Strand to SEQ ID NO: 490821
auucugagaauuuacucac

SEQ ID NO: 490823 - RNA, 19 nt, Artificial Sequence
  Description of Artificial Sequence: Synthetic oligonucleotide
  Sense strand starting at position 1061 of SEQ ID NO: 317437
cgaaucaaauauuccaguu

SEQ ID NO: 490824 - RNA, 19 nt, Artificial Sequence
  Description of Artificial Sequence: Synthetic oligonucleotide
  Antisense Strand to SEQ ID NO: 490823
aacuggaauauuugauucg

SEQ ID NO: 490825 - RNA, 19 nt, Artificial Sequence
  Description of Artificial Sequence: Synthetic oligonucleotide
  Sense strand starting at position 1077 of SEQ ID NO: 317437
guuuccaaagaauagcaau

SEQ ID NO: 490826 - RNA, 19 nt, Artificial Sequence
  Description of Artificial Sequence: Synthetic oligonucleotide
  Antisense Strand to SEQ ID NO: 490825
auugcuauucuuuggaaac

SEQ ID NO: 490827 - RNA, 19 nt, Artificial Sequence
  Description of Artificial Sequence: Synthetic oligonucleotide
  Sense strand starting at position 1096 of SEQ ID NO: 317437
ggaugagauuguuuccaaa

SEQ ID NO: 490828 - RNA, 19 nt, Artificial Sequence
  Description of Artificial Sequence: Synthetic oligonucleotide
  Antisense Strand to SEQ ID NO: 490827
uuuggaaacaaucucaucc

SEQ ID NO: 490829 - RNA, 19 nt, Artificial Sequence
  Description of Artificial Sequence: Synthetic oligonucleotide
  Sense strand starting at position 1098 of SEQ ID NO: 317437
augagauuguuuccaaacc

SEQ ID NO: 490830 - RNA, 19 nt, Artificial Sequence
  Description of Artificial Sequence: Synthetic oligonucleotide
  Antisense Strand to SEQ ID NO: 490829
gguuuggaaacaaucucau

SEQ ID NO: 490831 - RNA, 19 nt, Artificial Sequence
  Description of Artificial Sequence: Synthetic oligonucleotide
  Sense strand starting at position 1337 of SEQ ID NO: 317437
ugaacuucacugggugagu

SEQ ID NO: 490832 - RNA, 19 nt, Artificial Sequence
  Description of Artificial Sequence: Synthetic oligonucleotide
  Antisense Strand to SEQ ID NO: 490831
acucacccagugaaguuca

SEQ ID NO: 490833 - RNA, 19 nt, Artificial Sequence
  Description of Artificial Sequence: Synthetic oligonucleotide
  Sense strand starting at position 1509 of SEQ ID NO: 317437
agguauaucuaucucgaca

SEQ ID NO: 490834 - RNA, 19 nt, Artificial Sequence
  Description of Artificial Sequence: Synthetic oligonucleotide
  Antisense Strand to SEQ ID NO: 490833
ugucgagauagauauaccu

SEQ ID NO: 490835 - RNA, 19 nt, Artificial Sequence
  Description of Artificial Sequence: Synthetic oligonucleotide
  Sense strand starting at position 2223 of SEQ ID NO: 317437
cggcgauuucaaggcaagu

SEQ ID NO: 490836 - RNA, 19 nt, Artificial Sequence
  Description of Artificial Sequence: Synthetic oligonucleotide
  Antisense Strand to SEQ ID NO: 490835
acuugccuugaaaucgccg

SEQ ID NO: 490837 - RNA, 19 nt, Artificial Sequence
  Description of Artificial Sequence: Synthetic oligonucleotide
  Sense strand starting at position 2547 of SEQ ID NO: 317437
gggagcagugcauaucuga

SEQ ID NO: 490838 - RNA, 19 nt, Artificial Sequence
  Description of Artificial Sequence: Synthetic oligonucleotide
  Antisense Strand to SEQ ID NO: 490837
ucagauaugcacugcuccc

SEQ ID NO: 490839 - RNA, 19 nt, Artificial Sequence
  Description of Artificial Sequence: Synthetic oligonucleotide
  Sense strand starting at position 2594 of SEQ ID NO: 317437
auguguuaacauuaaacuc

SEQ ID NO: 490840 - RNA, 19 nt, Artificial Sequence
  Description of Artificial Sequence: Synthetic oligonucleotide
  Antisense Strand to SEQ ID NO: 490839
gaguuuaauguuaacacau

SEQ ID NO: 490841 - RNA, 19 nt, Artificial Sequence
  Description of Artificial Sequence: Synthetic oligonucleotide
  Sense strand starting at position 2689 of SEQ ID NO: 317437
uucucugaagcguauauua

SEQ ID NO: 490842 - RNA, 19 nt, Artificial Sequence
  Description of Artificial Sequence: Synthetic oligonucleotide
  Antisense Strand to SEQ ID NO: 490841
uaauauacgcuucagagaa

SEQ ID NO: 490843 - RNA, 19 nt, Artificial Sequence
  Description of Artificial Sequence: Synthetic oligonucleotide
  Sense strand starting at position 2691 of SEQ ID NO: 317437
cucugaagcguauauuauc

SEQ ID NO: 490844 - RNA, 19 nt, Artificial Sequence
  Description of Artificial Sequence: Synthetic oligonucleotide
  Antisense Strand to SEQ ID NO: 490843
gauaauauacgcuucagag

SEQ ID NO: 490845 - RNA, 19 nt, Artificial Sequence
  Description of Artificial Sequence: Synthetic oligonucleotide
  Sense strand starting at position 2696 of SEQ ID NO: 317437
aagcguauauuaucagaau

SEQ ID NO: 490846 - RNA, 19 nt, Artificial Sequence
  Description of Artificial Sequence: Synthetic oligonucleotide
  Antisense Strand to SEQ ID NO: 490845
auucugauaauauacgcuu

SEQ ID NO: 490847 - RNA, 19 nt, Artificial Sequence
  Description of Artificial Sequence: Synthetic oligonucleotide
  Sense strand starting at position 2789 of SEQ ID NO: 317437
uugagaagcuggguugaga

SEQ ID NO: 490848 - RNA, 19 nt, Artificial Sequence
  Description of Artificial Sequence: Synthetic oligonucleotide
  Antisense Strand to SEQ ID NO: 490847
ucucaacccagcuucucaa

SEQ ID NO: 490849 - RNA, 19 nt, Artificial Sequence
  Description of Artificial Sequence: Synthetic oligonucleotide
  Sense strand starting at position 2978 of SEQ ID NO: 317437
gacaauaagugauugucga

SEQ ID NO: 490850 - RNA, 19 nt, Artificial Sequence
  Description of Artificial Sequence: Synthetic oligonucleotide
  Antisense Strand to SEQ ID NO: 490849
ucgacaaucacuuauuguc

SEQ ID NO: 490851 - RNA, 19 nt, Artificial Sequence
  Description of Artificial Sequence: Synthetic oligonucleotide
  Sense strand starting at position 2979 of SEQ ID NO: 317437
acaauaagugauugucgac

SEQ ID NO: 490852 - RNA, 19 nt, Artificial Sequence
  Description of Artificial Sequence: Synthetic oligonucleotide
  Antisense Strand to SEQ ID NO: 490851
gucgacaaucacuuauugu

SEQ ID NO: 490853 - RNA, 19 nt, Artificial Sequence
  Description of Artificial Sequence: Synthetic oligonucleotide
  Sense strand starting at position 3015 of SEQ ID NO: 317437
gcuguuaaagaaugaaagu

SEQ ID NO: 490854 - RNA, 19 nt, Artificial Sequence
  Description of Artificial Sequence: Synthetic oligonucleotide
  Antisense Strand to SEQ ID NO: 490853
acuuucauucuuuaacagc

SEQ ID NO: 490855 - RNA, 19 nt, Artificial Sequence
  Description of Artificial Sequence: Synthetic oligonucleotide
  Sense strand starting at position 3145 of SEQ ID NO: 317437
uuuagaaacaguuggugaa

SEQ ID NO: 490856 - RNA, 19 nt, Artificial Sequence
  Description of Artificial Sequence: Synthetic oligonucleotide
  Antisense Strand to SEQ ID NO: 490855
uucaccaacuguuucuaaa

SEQ ID NO: 490857 - RNA, 19 nt, Artificial Sequence
  Description of Artificial Sequence: Synthetic oligonucleotide
  Sense strand starting at position 3189 of SEQ ID NO: 317437
acaguuugggcuuaagagu

SEQ ID NO: 490858 - RNA, 19 nt, Artificial Sequence
  Description of Artificial Sequence: Synthetic oligonucleotide
  Antisense Strand to SEQ ID NO: 490857
acucuuaagcccaaacugu

SEQ ID NO: 490859 - RNA, 19 nt, Artificial Sequence
  Description of Artificial Sequence: Synthetic oligonucleotide
  Sense strand starting at position 3197 of SEQ ID NO: 317437
ggcuuaagaguacaucugu

SEQ ID NO: 490860 - RNA, 19 nt, Artificial Sequence
  Description of Artificial Sequence: Synthetic oligonucleotide
  Antisense Strand to SEQ ID NO: 490859
acagauguacucuuaagcc

SEQ ID NO: 490861 - RNA, 19 nt, Artificial Sequence
  Description of Artificial Sequence: Synthetic oligonucleotide
  Sense strand starting at position 3256 of SEQ ID NO: 317437
uuaucuuaggugcaguaaa

SEQ ID NO: 490862 - RNA, 19 nt, Artificial Sequence
  Description of Artificial Sequence: Synthetic oligonucleotide
  Antisense Strand to SEQ ID NO: 490861
uuuacugcaccuaagauaa

SEQ ID NO: 490863 - RNA, 19 nt, Artificial Sequence
  Description of Artificial Sequence: Synthetic oligonucleotide
  Sense strand starting at position 3306 of SEQ ID NO: 317437
uccuguguucuaucucguu

SEQ ID NO: 490864 - RNA, 19 nt, Artificial Sequence
  Description of Artificial Sequence: Synthetic oligonucleotide
  Antisense Strand to SEQ ID NO: 490863
aacgagauagaacacagga

SEQ ID NO: 490865 - RNA, 19 nt, Artificial Sequence
  Description of Artificial Sequence: Synthetic oligonucleotide
  Sense strand starting at position 3397 of SEQ ID NO: 317437
agcagaaaugagcaagcau

SEQ ID NO: 490866 - RNA, 19 nt, Artificial Sequence
  Description of Artificial Sequence: Synthetic oligonucleotide
  Antisense Strand to SEQ ID NO: 490865
augcuugcucauuucugcu

SEQ ID NO: 490867 - RNA, 19 nt, Artificial Sequence
  Description of Artificial Sequence: Synthetic oligonucleotide
  Sense strand starting at position 3511 of SEQ ID NO: 317437
gggugauggaauugagagu

SEQ ID NO: 490868 - RNA, 19 nt, Artificial Sequence
  Description of Artificial Sequence: Synthetic oligonucleotide
  Antisense Strand to SEQ ID NO: 490867
acucucaauuccaucaccc

SEQ ID NO: 490869 - RNA, 19 nt, Artificial Sequence
  Description of Artificial Sequence: Synthetic oligonucleotide
  Sense strand starting at position 3538 of SEQ ID NO: 317437
gagggaggcuacuuuagau

SEQ ID NO: 490870 - RNA, 19 nt, Artificial Sequence
  Description of Artificial Sequence: Synthetic oligonucleotide
  Antisense Strand to SEQ ID NO: 490869
aucuaaaguagccucccuc

SEQ ID NO: 490871 - RNA, 19 nt, Artificial Sequence
  Description of Artificial Sequence: Synthetic oligonucleotide
  Sense strand starting at position 3701 of SEQ ID NO: 317437
agugccuuccuauaucauu

SEQ ID NO: 490872 - RNA, 19 nt, Artificial Sequence
  Description of Artificial Sequence: Synthetic oligonucleotide
  Antisense Strand to SEQ ID NO: 490871
aaugauauaggaaggcacu

SEQ ID NO: 490873 - RNA, 19 nt, Artificial Sequence
  Description of Artificial Sequence: Synthetic oligonucleotide
  Sense strand starting at position 3733 of SEQ ID NO: 317437
cuguaauaacccugagaag

SEQ ID NO: 490874 - RNA, 19 nt, Artificial Sequence
  Description of Artificial Sequence: Synthetic oligonucleotide
  Antisense Strand to SEQ ID NO: 490873
cuucucaggguuauuacag

SEQ ID NO: 490875 - RNA, 19 nt, Artificial Sequence
  Description of Artificial Sequence: Synthetic oligonucleotide
  Sense strand starting at position 3952 of SEQ ID NO: 317437
guuugcacuccugagagaa

SEQ ID NO: 490876 - RNA, 19 nt, Artificial Sequence
  Description of Artificial Sequence: Synthetic oligonucleotide
  Antisense Strand to SEQ ID NO: 490875
uucucucaggagugcaaac

SEQ ID NO: 490877 - RNA, 19 nt, Artificial Sequence
  Description of Artificial Sequence: Synthetic oligonucleotide
  Sense strand starting at position 163 of SEQ ID NO: 317438
aauuguagucuuuggaaau

SEQ ID NO: 490878 - RNA, 19 nt, Artificial Sequence
  Description of Artificial Sequence: Synthetic oligonucleotide
  Antisense Strand to SEQ ID NO: 490877
auuuccaaagacuacaauu

SEQ ID NO: 490879 - RNA, 19 nt, Artificial Sequence
  Description of Artificial Sequence: Synthetic oligonucleotide
  Sense strand starting at position 173 of SEQ ID NO: 317438
uuuggaaauccuugacuua

SEQ ID NO: 490880 - RNA, 19 nt, Artificial Sequence
  Description of Artificial Sequence: Synthetic oligonucleotide
  Antisense Strand to SEQ ID NO: 490879
uaagucaaggauuuccaaa

SEQ ID NO: 490881 - RNA, 19 nt, Artificial Sequence
  Description of Artificial Sequence: Synthetic oligonucleotide
  Sense strand starting at position 245 of SEQ ID NO: 317438
ucuuguaagauuuguguuu

SEQ ID NO: 490882 - RNA, 19 nt, Artificial Sequence
  Description of Artificial Sequence: Synthetic oligonucleotide
  Antisense Strand to SEQ ID NO: 490881
aaacacaaaucuuacaaga

SEQ ID NO: 490883 - RNA, 19 nt, Artificial Sequence
  Description of Artificial Sequence: Synthetic oligonucleotide
  Sense strand starting at position 290 of SEQ ID NO: 317438
gcaacuucugaagaguaau

SEQ ID NO: 490884 - RNA, 19 nt, Artificial Sequence
  Description of Artificial Sequence: Synthetic oligonucleotide
  Antisense Strand to SEQ ID NO: 490883
auuacucuucagaaguugc

SEQ ID NO: 490885 - RNA, 19 nt, Artificial Sequence
  Description of Artificial Sequence: Synthetic oligonucleotide
  Sense strand starting at position 496 of SEQ ID NO: 317438
uauauauggccucaguaga

SEQ ID NO: 490886 - RNA, 19 nt, Artificial Sequence
  Description of Artificial Sequence: Synthetic oligonucleotide
  Antisense Strand to SEQ ID NO: 490885
ucuacugaggccauauaua

SEQ ID NO: 490887 - RNA, 19 nt, Artificial Sequence
  Description of Artificial Sequence: Synthetic oligonucleotide
  Sense strand starting at position 582 of SEQ ID NO: 317438
accugugugcacuaauaaa

SEQ ID NO: 490888 - RNA, 19 nt, Artificial Sequence
  Description of Artificial Sequence: Synthetic oligonucleotide
  Antisense Strand to SEQ ID NO: 490887
uuuauuagugcacacaggu

SEQ ID NO: 490889 - RNA, 19 nt, Artificial Sequence
  Description of Artificial Sequence: Synthetic oligonucleotide
  Sense strand starting at position 783 of SEQ ID NO: 317438
cggaaugauugauugcauu

SEQ ID NO: 490890 - RNA, 19 nt, Artificial Sequence
  Description of Artificial Sequence: Synthetic oligonucleotide
  Antisense Strand to SEQ ID NO: 490889
aaugcaaucaaucauuccg

SEQ ID NO: 490891 - RNA, 19 nt, Artificial Sequence
  Description of Artificial Sequence: Synthetic oligonucleotide
  Sense strand starting at position 1038 of SEQ ID NO: 317438
gugcaacaccugugaauau

SEQ ID NO: 490892 - RNA, 19 nt, Artificial Sequence
  Description of Artificial Sequence: Synthetic oligonucleotide
  Antisense Strand to SEQ ID NO: 490891
auauucacagguguugcac

SEQ ID NO: 490893 - RNA, 19 nt, Artificial Sequence
  Description of Artificial Sequence: Synthetic oligonucleotide
  Sense strand starting at position 1461 of SEQ ID NO: 317438
gaguaugagagaugcauug

SEQ ID NO: 490894 - RNA, 19 nt, Artificial Sequence
  Description of Artificial Sequence: Synthetic oligonucleotide
  Antisense Strand to SEQ ID NO: 490893
caaugcaucucucauacuc

SEQ ID NO: 490895 - RNA, 19 nt, Artificial Sequence
  Description of Artificial Sequence: Synthetic oligonucleotide
  Sense strand starting at position 1684 of SEQ ID NO: 317438
uuguuugagcaucaaauau

SEQ ID NO: 490896 - RNA, 19 nt, Artificial Sequence
  Description of Artificial Sequence: Synthetic oligonucleotide
  Antisense Strand to SEQ ID NO: 490895
auauuugaugcucaaacaa

SEQ ID NO: 490897 - RNA, 19 nt, Artificial Sequence
  Description of Artificial Sequence: Synthetic oligonucleotide
  Sense strand starting at position 1842 of SEQ ID NO: 317438
aguaaugcucucuugcguu

SEQ ID NO: 490898 - RNA, 19 nt, Artificial Sequence
  Description of Artificial Sequence: Synthetic oligonucleotide
  Antisense Strand to SEQ ID NO: 490897
aacgcaagagagcauuacu

SEQ ID NO: 490899 - RNA, 19 nt, Artificial Sequence
  Description of Artificial Sequence: Synthetic oligonucleotide
  Sense strand starting at position 1847 of SEQ ID NO: 317438
ugcucucuugcguuccgaa

SEQ ID NO: 490900 - RNA, 19 nt, Artificial Sequence
  Description of Artificial Sequence: Synthetic oligonucleotide
  Antisense Strand to SEQ ID NO: 490899
uucggaacgcaagagagca

SEQ ID NO: 490901 - RNA, 19 nt, Artificial Sequence
  Description of Artificial Sequence: Synthetic oligonucleotide
  Sense strand starting at position 1883 of SEQ ID NO: 317438
uuugaacauugugugaacu

SEQ ID NO: 490902 - RNA, 19 nt, Artificial Sequence
  Description of Artificial Sequence: Synthetic oligonucleotide
  Antisense Strand to SEQ ID NO: 490901
aguucacacaauguucaaa

SEQ ID NO: 490903 - RNA, 19 nt, Artificial Sequence
  Description of Artificial Sequence: Synthetic oligonucleotide
  Sense strand starting at position 1884 of SEQ ID NO: 317438
uugaacauugugugaacua

SEQ ID NO: 490904 - RNA, 19 nt, Artificial Sequence
  Description of Artificial Sequence: Synthetic oligonucleotide
  Antisense Strand to SEQ ID NO: 490903
uaguucacacaauguucaa

SEQ ID NO: 490905 - RNA, 19 nt, Artificial Sequence
  Description of Artificial Sequence: Synthetic oligonucleotide
  Sense strand starting at position 1988 of SEQ ID NO: 317438
ggucaaaugguaugccauu

SEQ ID NO: 490906 - RNA, 19 nt, Artificial Sequence
  Description of Artificial Sequence: Synthetic oligonucleotide
  Antisense Strand to SEQ ID NO: 490905
aauggcauaccauuugacc

SEQ ID NO: 490907 - RNA, 19 nt, Artificial Sequence
  Description of Artificial Sequence: Synthetic oligonucleotide
  Sense strand starting at position 2042 of SEQ ID NO: 317438
agugacugaucuuauuucu

SEQ ID NO: 490908 - RNA, 19 nt, Artificial Sequence
  Description of Artificial Sequence: Synthetic oligonucleotide
  Antisense Strand to SEQ ID NO: 490907
agaaauaagaucagucacu

SEQ ID NO: 490909 - RNA, 19 nt, Artificial Sequence
  Description of Artificial Sequence: Synthetic oligonucleotide
  Sense strand starting at position 2074 of SEQ ID NO: 317438
uauugugauuugcugugua

SEQ ID NO: 490910 - RNA, 19 nt, Artificial Sequence
  Description of Artificial Sequence: Synthetic oligonucleotide
  Antisense Strand to SEQ ID NO: 490909
uacacagcaaaucacaaua

SEQ ID NO: 490911 - RNA, 19 nt, Artificial Sequence
  Description of Artificial Sequence: Synthetic oligonucleotide
  Sense strand starting at position 2077 of SEQ ID NO: 317438
ugugauuugcuguguagag

SEQ ID NO: 490912 - RNA, 19 nt, Artificial Sequence
  Description of Artificial Sequence: Synthetic oligonucleotide
  Antisense Strand to SEQ ID NO: 490911
cucuacacagcaaaucaca

SEQ ID NO: 490913 - RNA, 19 nt, Artificial Sequence
  Description of Artificial Sequence: Synthetic oligonucleotide
  Sense strand starting at position 2078 of SEQ ID NO: 317438
gugauuugcuguguagagu

SEQ ID NO: 490914 - RNA, 19 nt, Artificial Sequence
  Description of Artificial Sequence: Synthetic oligonucleotide
  Antisense Strand to SEQ ID NO: 490913
acucuacacagcaaaucac

SEQ ID NO: 490915 - RNA, 19 nt, Artificial Sequence
  Description of Artificial Sequence: Synthetic oligonucleotide
  Sense strand starting at position 2211 of SEQ ID NO: 317438
cucugaguucuggaugcac

SEQ ID NO: 490916 - RNA, 19 nt, Artificial Sequence
  Description of Artificial Sequence: Synthetic oligonucleotide
  Antisense Strand to SEQ ID NO: 490915
gugcauccagaacucagag

SEQ ID NO: 490917 - RNA, 19 nt, Artificial Sequence
  Description of Artificial Sequence: Synthetic oligonucleotide
  Sense strand starting at position 2314 of SEQ ID NO: 317438
ccuaguacauuacuaugua

SEQ ID NO: 490918 - RNA, 19 nt, Artificial Sequence
  Description of Artificial Sequence: Synthetic oligonucleotide
  Antisense Strand to SEQ ID NO: 490917
uacauaguaauguacuagg

SEQ ID NO: 490919 - RNA, 19 nt, Artificial Sequence
  Description of Artificial Sequence: Synthetic oligonucleotide
  Sense strand starting at position 2317 of SEQ ID NO: 317438
aguacauuacuauguaaca

SEQ ID NO: 490920 - RNA, 19 nt, Artificial Sequence
  Description of Artificial Sequence: Synthetic oligonucleotide
  Antisense Strand to SEQ ID NO: 490919
uguuacauaguaauguacu

SEQ ID NO: 490921 - RNA, 19 nt, Artificial Sequence
  Description of Artificial Sequence: Synthetic oligonucleotide
  Sense strand starting at position 2318 of SEQ ID NO: 317438
guacauuacuauguaacau

SEQ ID NO: 490922 - RNA, 19 nt, Artificial Sequence
  Description of Artificial Sequence: Synthetic oligonucleotide
  Antisense Strand to SEQ ID NO: 490921
auguuacauaguaauguac

SEQ ID NO: 490923 - RNA, 19 nt, Artificial Sequence
  Description of Artificial Sequence: Synthetic oligonucleotide
  Sense strand starting at position 2355 of SEQ ID NO: 317438
gguaaagagaaguggcaua

SEQ ID NO: 490924 - RNA, 19 nt, Artificial Sequence
  Description of Artificial Sequence: Synthetic oligonucleotide
  Antisense Strand to SEQ ID NO: 490923
uaugccacuucucuuuacc

SEQ ID NO: 490925 - RNA, 19 nt, Artificial Sequence
  Description of Artificial Sequence: Synthetic oligonucleotide
  Sense strand starting at position 2659 of SEQ ID NO: 317438
aucuguagucagcaucaca

SEQ ID NO: 490926 - RNA, 19 nt, Artificial Sequence
  Description of Artificial Sequence: Synthetic oligonucleotide
  Antisense Strand to SEQ ID NO: 490925
ugugaugcugacuacagau

SEQ ID NO: 490927 - RNA, 19 nt, Artificial Sequence
  Description of Artificial Sequence: Synthetic oligonucleotide
  Sense strand starting at position 2771 of SEQ ID NO: 317438
cuccuaguccucugagaua

SEQ ID NO: 490928 - RNA, 19 nt, Artificial Sequence
  Description of Artificial Sequence: Synthetic oligonucleotide
  Antisense Strand to SEQ ID NO: 490927
uaucucagaggacuaggag

SEQ ID NO: 490929 - RNA, 19 nt, Artificial Sequence
  Description of Artificial Sequence: Synthetic oligonucleotide
  Sense strand starting at position 2866 of SEQ ID NO: 317438
aauauucuggaaugugauu

SEQ ID NO: 490930 - RNA, 19 nt, Artificial Sequence
  Description of Artificial Sequence: Synthetic oligonucleotide
  Antisense Strand to SEQ ID NO: 490929
aaucacauuccagaauauu

SEQ ID NO: 490931 - RNA, 19 nt, Artificial Sequence
  Description of Artificial Sequence: Synthetic oligonucleotide
  Sense strand starting at position 2937 of SEQ ID NO: 317438
uguuaucuaccugaggcua

SEQ ID NO: 490932 - RNA, 19 nt, Artificial Sequence
  Description of Artificial Sequence: Synthetic oligonucleotide
  Antisense Strand to SEQ ID NO: 490931
uagccucagguagauaaca

SEQ ID NO: 490933 - RNA, 19 nt, Artificial Sequence
  Description of Artificial Sequence: Synthetic oligonucleotide
  Sense strand starting at position 2948 of SEQ ID NO: 317438
ugaggcuaaucuuuacuuu

SEQ ID NO: 490934 - RNA, 19 nt, Artificial Sequence
  Description of Artificial Sequence: Synthetic oligonucleotide
  Antisense Strand to SEQ ID NO: 490933
aaaguaaagauuagccuca

SEQ ID NO: 490935 - RNA, 19 nt, Artificial Sequence
  Description of Artificial Sequence: Synthetic oligonucleotide
  Sense strand starting at position 3043 of SEQ ID NO: 317438
aguuauuauguugacacuu

SEQ ID NO: 490936 - RNA, 19 nt, Artificial Sequence
  Description of Artificial Sequence: Synthetic oligonucleotide
  Antisense Strand to SEQ ID NO: 490935
aagugucaacauaauaacu

SEQ ID NO: 490937 - RNA, 19 nt, Artificial Sequence
  Description of Artificial Sequence: Synthetic oligonucleotide
  Sense strand starting at position 3287 of SEQ ID NO: 317438
gcaugaaucucaccuguau

SEQ ID NO: 490938 - RNA, 19 nt, Artificial Sequence
  Description of Artificial Sequence: Synthetic oligonucleotide
  Antisense Strand to SEQ ID NO: 490937
auacaggugagauucaugc

SEQ ID NO: 490939 - RNA, 19 nt, Artificial Sequence
  Description of Artificial Sequence: Synthetic oligonucleotide
  Sense strand starting at position 3338 of SEQ ID NO: 317438
cuagucaaucaauagucua

SEQ ID NO: 490940 - RNA, 19 nt, Artificial Sequence
  Description of Artificial Sequence: Synthetic oligonucleotide
  Antisense Strand to SEQ ID NO: 490939
uagacuauugauugacuag

SEQ ID NO: 490941 - RNA, 19 nt, Artificial Sequence
  Description of Artificial Sequence: Synthetic oligonucleotide
  Sense strand starting at position 3385 of SEQ ID NO: 317438
guucuauauuaagugggua

SEQ ID NO: 490942 - RNA, 19 nt, Artificial Sequence
  Description of Artificial Sequence: Synthetic oligonucleotide
  Antisense Strand to SEQ ID NO: 490941
uacccacuuaauauagaac

SEQ ID NO: 490943 - RNA, 19 nt, Artificial Sequence
  Description of Artificial Sequence: Synthetic oligonucleotide
  Sense strand starting at position 3388 of SEQ ID NO: 317438
cuauauuaaguggguaacu

SEQ ID NO: 490944 - RNA, 19 nt, Artificial Sequence
  Description of Artificial Sequence: Synthetic oligonucleotide
  Antisense Strand to SEQ ID NO: 490943
aguuacccacuuaauauag

SEQ ID NO: 490945 - RNA, 19 nt, Artificial Sequence
  Description of Artificial Sequence: Synthetic oligonucleotide
  Sense strand starting at position 3389 of SEQ ID NO: 317438
uauauuaaguggguaacuu

SEQ ID NO: 490946 - RNA, 19 nt, Artificial Sequence
  Description of Artificial Sequence: Synthetic oligonucleotide
  Antisense Strand to SEQ ID NO: 490945
aaguuacccacuuaauaua

SEQ ID NO: 490947 - RNA, 19 nt, Artificial Sequence
  Description of Artificial Sequence: Synthetic oligonucleotide
  Sense strand starting at position 3566 of SEQ ID NO: 317438
ucuaauauggacuggugau

SEQ ID NO: 490948 - RNA, 19 nt, Artificial Sequence
  Description of Artificial Sequence: Synthetic oligonucleotide
  Antisense Strand to SEQ ID NO: 490947
aucaccaguccauauuaga

SEQ ID NO: 490949 - RNA, 19 nt, Artificial Sequence
  Description of Artificial Sequence: Synthetic oligonucleotide
  Sense strand starting at position 3567 of SEQ ID NO: 317438
cuaauauggacuggugauc

SEQ ID NO: 490950 - RNA, 19 nt, Artificial Sequence
  Description of Artificial Sequence: Synthetic oligonucleotide
  Antisense Strand to SEQ ID NO: 490949
gaucaccaguccauauuag

SEQ ID NO: 490951 - RNA, 19 nt, Artificial Sequence
  Description of Artificial Sequence: Synthetic oligonucleotide
  Sense strand starting at position 3572 of SEQ ID NO: 317438
auggacuggugauccauaa

SEQ ID NO: 490952 - RNA, 19 nt, Artificial Sequence
  Description of Artificial Sequence: Synthetic oligonucleotide
  Antisense Strand to SEQ ID NO: 490951
uuauggaucaccaguccau

SEQ ID NO: 490953 - RNA, 19 nt, Artificial Sequence
  Description of Artificial Sequence: Synthetic oligonucleotide
  Sense strand starting at position 3636 of SEQ ID NO: 317438
uguguaacagaaugauauu

SEQ ID NO: 490954 - RNA, 19 nt, Artificial Sequence
  Description of Artificial Sequence: Synthetic oligonucleotide
  Antisense Strand to SEQ ID NO: 490953
aauaucauucuguuacaca

SEQ ID NO: 490955 - RNA, 19 nt, Artificial Sequence
  Description of Artificial Sequence: Synthetic oligonucleotide
  Sense strand starting at position 3645 of SEQ ID NO: 317438
gaaugauauugugcuaagu

SEQ ID NO: 490956 - RNA, 19 nt, Artificial Sequence
  Description of Artificial Sequence: Synthetic oligonucleotide
  Antisense Strand to SEQ ID NO: 490955
acuuagcacaauaucauuc

SEQ ID NO: 490957 - RNA, 19 nt, Artificial Sequence
  Description of Artificial Sequence: Synthetic oligonucleotide
  Sense strand starting at position 4 of SEQ ID NO: 317439
ccggguugucaacaacagu

SEQ ID NO: 490958 - RNA, 19 nt, Artificial Sequence
  Description of Artificial Sequence: Synthetic oligonucleotide
  Antisense Strand to SEQ ID NO: 490957
acuguuguugacaacccgg

SEQ ID NO: 490959 - RNA, 19 nt, Artificial Sequence
  Description of Artificial Sequence: Synthetic oligonucleotide
  Sense strand starting at position 179 of SEQ ID NO: 317439
guuuccuucgaauaauauu

SEQ ID NO: 490960 - RNA, 19 nt, Artificial Sequence
  Description of Artificial Sequence: Synthetic oligonucleotide
  Antisense Strand to SEQ ID NO: 490959
aauauuauucgaaggaaac

SEQ ID NO: 490961 - RNA, 19 nt, Artificial Sequence
  Description of Artificial Sequence: Synthetic oligonucleotide
  Sense strand starting at position 525 of SEQ ID NO: 317439
ugauaccaguaauuaguaa

SEQ ID NO: 490962 - RNA, 19 nt, Artificial Sequence
  Description of Artificial Sequence: Synthetic oligonucleotide
  Antisense Strand to SEQ ID NO: 490961
uuacuaauuacugguauca

SEQ ID NO: 490963 - RNA, 19 nt, Artificial Sequence
  Description of Artificial Sequence: Synthetic oligonucleotide
  Sense strand starting at position 541 of SEQ ID NO: 317439
uaaggcaugcuuuagggua

SEQ ID NO: 490964 - RNA, 19 nt, Artificial Sequence
  Description of Artificial Sequence: Synthetic oligonucleotide
  Antisense Strand to SEQ ID NO: 490963
uacccuaaagcaugccuua

SEQ ID NO: 490965 - RNA, 19 nt, Artificial Sequence
  Description of Artificial Sequence: Synthetic oligonucleotide
  Sense strand starting at position 737 of SEQ ID NO: 317439
guuccugcccaauaucaga

SEQ ID NO: 490966 - RNA, 19 nt, Artificial Sequence
  Description of Artificial Sequence: Synthetic oligonucleotide
  Antisense Strand to SEQ ID NO: 490965
ucugauauugggcaggaac

SEQ ID NO: 490967 - RNA, 19 nt, Artificial Sequence
  Description of Artificial Sequence: Synthetic oligonucleotide
  Sense strand starting at position 745 of SEQ ID NO: 317439
ccaauaucagacuguuagu

SEQ ID NO: 490968 - RNA, 19 nt, Artificial Sequence
  Description of Artificial Sequence: Synthetic oligonucleotide
  Antisense Strand to SEQ ID NO: 490967
acuaacagucugauauugg

SEQ ID NO: 490969 - RNA, 19 nt, Artificial Sequence
  Description of Artificial Sequence: Synthetic oligonucleotide
  Sense strand starting at position 751 of SEQ ID NO: 317439
ucagacuguuagucacacu

SEQ ID NO: 490970 - RNA, 19 nt, Artificial Sequence
  Description of Artificial Sequence: Synthetic oligonucleotide
  Antisense Strand to SEQ ID NO: 490969
agugugacuaacagucuga

SEQ ID NO: 490971 - RNA, 19 nt, Artificial Sequence
  Description of Artificial Sequence: Synthetic oligonucleotide
  Sense strand starting at position 771 of SEQ ID NO: 317439
ucuguacggugauuggaaa

SEQ ID NO: 490972 - RNA, 19 nt, Artificial Sequence
  Description of Artificial Sequence: Synthetic oligonucleotide
  Antisense Strand to SEQ ID NO: 490971
uuuccaaucaccguacaga

SEQ ID NO: 490973 - RNA, 19 nt, Artificial Sequence
  Description of Artificial Sequence: Synthetic oligonucleotide
  Sense strand starting at position 1009 of SEQ ID NO: 317439
aguagaaauggguagguuu

SEQ ID NO: 490974 - RNA, 19 nt, Artificial Sequence
  Description of Artificial Sequence: Synthetic oligonucleotide
  Antisense Strand to SEQ ID NO: 490973
aaaccuacccauuucuacu

SEQ ID NO: 490975 - RNA, 19 nt, Artificial Sequence
  Description of Artificial Sequence: Synthetic oligonucleotide
  Sense strand starting at position 1023 of SEQ ID NO: 317439
gguuuaggagagugaagua

SEQ ID NO: 490976 - RNA, 19 nt, Artificial Sequence
  Description of Artificial Sequence: Synthetic oligonucleotide
  Antisense Strand to SEQ ID NO: 490975
uacuucacucuccuaaacc

SEQ ID NO: 490977 - RNA, 19 nt, Artificial Sequence
  Description of Artificial Sequence: Synthetic oligonucleotide
  Sense strand starting at position 1038 of SEQ ID NO: 317439
aguaaaguuacaggaguca

SEQ ID NO: 490978 - RNA, 19 nt, Artificial Sequence
  Description of Artificial Sequence: Synthetic oligonucleotide
  Antisense Strand to SEQ ID NO: 490977
ugacuccuguaacuuuacu

SEQ ID NO: 490979 - RNA, 19 nt, Artificial Sequence
  Description of Artificial Sequence: Synthetic oligonucleotide
  Sense strand starting at position 1054 of SEQ ID NO: 317439
ucaugauuccacugggagc

SEQ ID NO: 490980 - RNA, 19 nt, Artificial Sequence
  Description of Artificial Sequence: Synthetic oligonucleotide
  Antisense Strand to SEQ ID NO: 490979
gcucccaguggaaucauga

SEQ ID NO: 490981 - RNA, 19 nt, Artificial Sequence
  Description of Artificial Sequence: Synthetic oligonucleotide
  Sense strand starting at position 1105 of SEQ ID NO: 317439
aacagauagacgcgaauga

SEQ ID NO: 490982 - RNA, 19 nt, Artificial Sequence
  Description of Artificial Sequence: Synthetic oligonucleotide
  Antisense Strand to SEQ ID NO: 490981
ucauucgcgucuaucuguu

SEQ ID NO: 490983 - RNA, 19 nt, Artificial Sequence
  Description of Artificial Sequence: Synthetic oligonucleotide
  Sense strand starting at position 1133 of SEQ ID NO: 317439
aguggauuacauuguggga

SEQ ID NO: 490984 - RNA, 19 nt, Artificial Sequence
  Description of Artificial Sequence: Synthetic oligonucleotide
  Antisense Strand to SEQ ID NO: 490983
ucccacaauguaauccacu

SEQ ID NO: 490985 - RNA, 19 nt, Artificial Sequence
  Description of Artificial Sequence: Synthetic oligonucleotide
  Sense strand starting at position 1137 of SEQ ID NO: 317439
gauuacauugugggaaacu

SEQ ID NO: 490986 - RNA, 19 nt, Artificial Sequence
  Description of Artificial Sequence: Synthetic oligonucleotide
  Antisense Strand to SEQ ID NO: 490985
aguuucccacaauguaauc

SEQ ID NO: 490987 - RNA, 19 nt, Artificial Sequence
  Description of Artificial Sequence: Synthetic oligonucleotide
  Sense strand starting at position 1160 of SEQ ID NO: 317439
aguguuaagguauaaacuu

SEQ ID NO: 490988 - RNA, 19 nt, Artificial Sequence
  Description of Artificial Sequence: Synthetic oligonucleotide
  Antisense Strand to SEQ ID NO: 490987
aaguuuauaccuuaacacu

SEQ ID NO: 490989 - RNA, 19 nt, Artificial Sequence
  Description of Artificial Sequence: Synthetic oligonucleotide
  Sense strand starting at position 1185 of SEQ ID NO: 317439
cuagguugccugggagaaa

SEQ ID NO: 490990 - RNA, 19 nt, Artificial Sequence
  Description of Artificial Sequence: Synthetic oligonucleotide
  Antisense Strand to SEQ ID NO: 490989
uuucucccaggcaaccuag

SEQ ID NO: 490991 - RNA, 19 nt, Artificial Sequence
  Description of Artificial Sequence: Synthetic oligonucleotide
  Sense strand starting at position 1303 of SEQ ID NO: 317439
cuuucuugugagggaaaga

SEQ ID NO: 490992 - RNA, 19 nt, Artificial Sequence
  Description of Artificial Sequence: Synthetic oligonucleotide
  Antisense Strand to SEQ ID NO: 490991
ucuuucccucacaagaaag

SEQ ID NO: 490993 - RNA, 19 nt, Artificial Sequence
  Description of Artificial Sequence: Synthetic oligonucleotide
  Sense strand starting at position 1579 of SEQ ID NO: 317439
uggaauacugcaugaugau

SEQ ID NO: 490994 - RNA, 19 nt, Artificial Sequence
  Description of Artificial Sequence: Synthetic oligonucleotide
  Antisense Strand to SEQ ID NO: 490993
aucaucaugcaguauucca

SEQ ID NO: 490995 - RNA, 19 nt, Artificial Sequence
  Description of Artificial Sequence: Synthetic oligonucleotide
  Sense strand starting at position 1585 of SEQ ID NO: 317439
acugcaugaugaucuaaua

SEQ ID NO: 490996 - RNA, 19 nt, Artificial Sequence
  Description of Artificial Sequence: Synthetic oligonucleotide
  Antisense Strand to SEQ ID NO: 490995
uauuagaucaucaugcagu

SEQ ID NO: 490997 - RNA, 19 nt, Artificial Sequence
  Description of Artificial Sequence: Synthetic oligonucleotide
  Sense strand starting at position 1672 of SEQ ID NO: 317439
ucacgacaccuacaaguua

SEQ ID NO: 490998 - RNA, 19 nt, Artificial Sequence
  Description of Artificial Sequence: Synthetic oligonucleotide
  Antisense Strand to SEQ ID NO: 490997
uaacuuguaggugucguga

SEQ ID NO: 490999 - RNA, 19 nt, Artificial Sequence
  Description of Artificial Sequence: Synthetic oligonucleotide
  Sense strand starting at position 2051 of SEQ ID NO: 317439
caagguuugcaugagguca

SEQ ID NO: 491000 - RNA, 19 nt, Artificial Sequence
  Description of Artificial Sequence: Synthetic oligonucleotide
  Antisense Strand to SEQ ID NO: 490999
ugaccucaugcaaaccuug

SEQ ID NO: 491001 - RNA, 19 nt, Artificial Sequence
  Description of Artificial Sequence: Synthetic oligonucleotide
  Sense strand starting at position 2135 of SEQ ID NO: 317439
aguauugcuuaucuaggaa

SEQ ID NO: 491002 - RNA, 19 nt, Artificial Sequence
  Description of Artificial Sequence: Synthetic oligonucleotide
  Antisense Strand to SEQ ID NO: 491001
uuccuagauaagcaauacu

SEQ ID NO: 491003 - RNA, 19 nt, Artificial Sequence
  Description of Artificial Sequence: Synthetic oligonucleotide
  Sense strand starting at position 2138 of SEQ ID NO: 317439
auugcuuaucuaggaaacu

SEQ ID NO: 491004 - RNA, 19 nt, Artificial Sequence
  Description of Artificial Sequence: Synthetic oligonucleotide
  Antisense Strand to SEQ ID NO: 491003
aguuuccuagauaagcaau

SEQ ID NO: 491005 - RNA, 19 nt, Artificial Sequence
  Description of Artificial Sequence: Synthetic oligonucleotide
  Sense strand starting at position 2223 of SEQ ID NO: 317439
gcacgcuuucugcugguga

SEQ ID NO: 491006 - RNA, 19 nt, Artificial Sequence
  Description of Artificial Sequence: Synthetic oligonucleotide
  Antisense Strand to SEQ ID NO: 491005
ucaccagcagaaagcgugc

SEQ ID NO: 491007 - RNA, 19 nt, Artificial Sequence
  Description of Artificial Sequence: Synthetic oligonucleotide
  Sense strand starting at position 2506 of SEQ ID NO: 317439
gggaaauucuugccacuga

SEQ ID NO: 491008 - RNA, 19 nt, Artificial Sequence
  Description of Artificial Sequence: Synthetic oligonucleotide
  Antisense Strand to SEQ ID NO: 491007
ucaguggcaagaauuuccc

SEQ ID NO: 491009 - RNA, 19 nt, Artificial Sequence
  Description of Artificial Sequence: Synthetic oligonucleotide
  Sense strand starting at position 2520 of SEQ ID NO: 317439
acugaaacuuugucaaaug

SEQ ID NO: 491010 - RNA, 19 nt, Artificial Sequence
  Description of Artificial Sequence: Synthetic oligonucleotide
  Antisense Strand to SEQ ID NO: 491009
cauuugacaaaguuucagu

SEQ ID NO: 491011 - RNA, 19 nt, Artificial Sequence
  Description of Artificial Sequence: Synthetic oligonucleotide
  Sense strand starting at position 2530 of SEQ ID NO: 317439
ugucaaaugcauugaacuu

SEQ ID NO: 491012 - RNA, 19 nt, Artificial Sequence
  Description of Artificial Sequence: Synthetic oligonucleotide
  Antisense Strand to SEQ ID NO: 491011
aaguucaaugcauuugaca

SEQ ID NO: 491013 - RNA, 19 nt, Artificial Sequence
  Description of Artificial Sequence: Synthetic oligonucleotide
  Sense strand starting at position 2620 of SEQ ID NO: 317439
cucaaaugucuugaacugu

SEQ ID NO: 491014 - RNA, 19 nt, Artificial Sequence
  Description of Artificial Sequence: Synthetic oligonucleotide
  Antisense Strand to SEQ ID NO: 491013
acaguucaagacauuugag

SEQ ID NO: 491015 - RNA, 19 nt, Artificial Sequence
  Description of Artificial Sequence: Synthetic oligonucleotide
  Sense strand starting at position 2712 of SEQ ID NO: 317439
agcgcaaaucgugauauuu

SEQ ID NO: 491016 - RNA, 19 nt, Artificial Sequence
  Description of Artificial Sequence: Synthetic oligonucleotide
  Antisense Strand to SEQ ID NO: 491015
aaauaucacgauuugcgcu

SEQ ID NO: 491017 - RNA, 19 nt, Artificial Sequence
  Description of Artificial Sequence: Synthetic oligonucleotide
  Sense strand starting at position 2935 of SEQ ID NO: 317439
augguucuccuuuaucuuu

SEQ ID NO: 491018 - RNA, 19 nt, Artificial Sequence
  Description of Artificial Sequence: Synthetic oligonucleotide
  Antisense Strand to SEQ ID NO: 491017
aaagauaaaggagaaccau

SEQ ID NO: 491019 - RNA, 19 nt, Artificial Sequence
  Description of Artificial Sequence: Synthetic oligonucleotide
  Sense strand starting at position 3067 of SEQ ID NO: 317439
uucuuugagugauuccaua

SEQ ID NO: 491020 - RNA, 19 nt, Artificial Sequence
  Description of Artificial Sequence: Synthetic oligonucleotide
  Antisense Strand to SEQ ID NO: 491019
uauggaaucacucaaagaa

SEQ ID NO: 491021 - RNA, 19 nt, Artificial Sequence
  Description of Artificial Sequence: Synthetic oligonucleotide
  Sense strand starting at position 3075 of SEQ ID NO: 317439
gugauuccauagucaacuu

SEQ ID NO: 491022 - RNA, 19 nt, Artificial Sequence
  Description of Artificial Sequence: Synthetic oligonucleotide
  Antisense Strand to SEQ ID NO: 491021
aaguugacuauggaaucac

SEQ ID NO: 491023 - RNA, 19 nt, Artificial Sequence
  Description of Artificial Sequence: Synthetic oligonucleotide
  Sense strand starting at position 3093 of SEQ ID NO: 317439
ugaaaucaaugguucccaa

SEQ ID NO: 491024 - RNA, 19 nt, Artificial Sequence
  Description of Artificial Sequence: Synthetic oligonucleotide
  Antisense Strand to SEQ ID NO: 491023
uugggaaccauugauuuca

SEQ ID NO: 491025 - RNA, 19 nt, Artificial Sequence
  Description of Artificial Sequence: Synthetic oligonucleotide
  Sense strand starting at position 3153 of SEQ ID NO: 317439
gccgugaccgcuguugaga

SEQ ID NO: 491026 - RNA, 19 nt, Artificial Sequence
  Description of Artificial Sequence: Synthetic oligonucleotide
  Antisense Strand to SEQ ID NO: 491025
ucucaacagcggucacggc

SEQ ID NO: 491027 - RNA, 19 nt, Artificial Sequence
  Description of Artificial Sequence: Synthetic oligonucleotide
  Sense strand starting at position 3404 of SEQ ID NO: 317439
uggaguugucaagaauucu

SEQ ID NO: 491028 - RNA, 19 nt, Artificial Sequence
  Description of Artificial Sequence: Synthetic oligonucleotide
  Antisense Strand to SEQ ID NO: 491027
agaauucuugacaacucca

SEQ ID NO: 491029 - RNA, 19 nt, Artificial Sequence
  Description of Artificial Sequence: Synthetic oligonucleotide
  Sense strand starting at position 3639 of SEQ ID NO: 317439
guuccauauuucucugcuu

SEQ ID NO: 491030 - RNA, 19 nt, Artificial Sequence
  Description of Artificial Sequence: Synthetic oligonucleotide
  Antisense Strand to SEQ ID NO: 491029
aagcagagaaauauggaac

SEQ ID NO: 491031 - RNA, 19 nt, Artificial Sequence
  Description of Artificial Sequence: Synthetic oligonucleotide
  Sense strand starting at position 3714 of SEQ ID NO: 317439
uaguuuagucuuggaauau

SEQ ID NO: 491032 - RNA, 19 nt, Artificial Sequence
  Description of Artificial Sequence: Synthetic oligonucleotide
  Antisense Strand to SEQ ID NO: 491031
auauuccaagacuaaacua

SEQ ID NO: 491033 - RNA, 19 nt, Artificial Sequence
  Description of Artificial Sequence: Synthetic oligonucleotide
  Sense strand starting at position 3718 of SEQ ID NO: 317439
uuagucuuggaauauaucu

SEQ ID NO: 491034 - RNA, 19 nt, Artificial Sequence
  Description of Artificial Sequence: Synthetic oligonucleotide
  Antisense Strand to SEQ ID NO: 491033
agauauauuccaagacuaa

SEQ ID NO: 491035 - RNA, 19 nt, Artificial Sequence
  Description of Artificial Sequence: Synthetic oligonucleotide
  Sense strand starting at position 3723 of SEQ ID NO: 317439
cuuggaauauaucuugauu

SEQ ID NO: 491036 - RNA, 19 nt, Artificial Sequence
  Description of Artificial Sequence: Synthetic oligonucleotide
  Antisense Strand to SEQ ID NO: 491035
aaucaagauauauuccaag

SEQ ID NO: 491037 - RNA, 19 nt, Artificial Sequence
  Description of Artificial Sequence: Synthetic oligonucleotide
  Sense strand starting at position 164 of SEQ ID NO: 317440
aucuuauuccuaugaugga

SEQ ID NO: 491038 - RNA, 19 nt, Artificial Sequence
  Description of Artificial Sequence: Synthetic oligonucleotide
  Antisense Strand to SEQ ID NO: 491037
uccaucauaggaauaagau

SEQ ID NO: 491039 - RNA, 19 nt, Artificial Sequence
  Description of Artificial Sequence: Synthetic oligonucleotide
  Sense strand starting at position 189 of SEQ ID NO: 317440
guugaugaauaucuuugaa

SEQ ID NO: 491040 - RNA, 19 nt, Artificial Sequence
  Description of Artificial Sequence: Synthetic oligonucleotide
  Antisense Strand to SEQ ID NO: 491039
uucaaagauauucaucaac

SEQ ID NO: 491041 - RNA, 19 nt, Artificial Sequence
  Description of Artificial Sequence: Synthetic oligonucleotide
  Sense strand starting at position 210 of SEQ ID NO: 317440
uggguuucccauuauaauc

SEQ ID NO: 491042 - RNA, 19 nt, Artificial Sequence
  Description of Artificial Sequence: Synthetic oligonucleotide
  Antisense Strand to SEQ ID NO: 491041
gauuauaaugggaaaccca

SEQ ID NO: 491043 - RNA, 19 nt, Artificial Sequence
  Description of Artificial Sequence: Synthetic oligonucleotide
  Sense strand starting at position 284 of SEQ ID NO: 317440
guauuccacucccuagaca

SEQ ID NO: 491044 - RNA, 19 nt, Artificial Sequence
  Description of Artificial Sequence: Synthetic oligonucleotide
  Antisense Strand to SEQ ID NO: 491043
ugucuagggaguggaauac

SEQ ID NO: 491045 - RNA, 19 nt, Artificial Sequence
  Description of Artificial Sequence: Synthetic oligonucleotide
  Sense strand starting at position 471 of SEQ ID NO: 317440
cggccuuuccaggagucua

SEQ ID NO: 491046 - RNA, 19 nt, Artificial Sequence
  Description of Artificial Sequence: Synthetic oligonucleotide
  Antisense Strand to SEQ ID NO: 491045
uagacuccuggaaaggccg

SEQ ID NO: 491047 - RNA, 19 nt, Artificial Sequence
  Description of Artificial Sequence: Synthetic oligonucleotide
  Sense strand starting at position 719 of SEQ ID NO: 317440
uuuggaugggacuguuaua

SEQ ID NO: 491048 - RNA, 19 nt, Artificial Sequence
  Description of Artificial Sequence: Synthetic oligonucleotide
  Antisense Strand to SEQ ID NO: 491047
uauaacagucccauccaaa

SEQ ID NO: 491049 - RNA, 19 nt, Artificial Sequence
  Description of Artificial Sequence: Synthetic oligonucleotide
  Sense strand starting at position 867 of SEQ ID NO: 317440
ugugucugccugucacuua

SEQ ID NO: 491050 - RNA, 19 nt, Artificial Sequence
  Description of Artificial Sequence: Synthetic oligonucleotide
  Antisense Strand to SEQ ID NO: 491049
uaagugacaggcagacaca

SEQ ID NO: 491051 - RNA, 19 nt, Artificial Sequence
  Description of Artificial Sequence: Synthetic oligonucleotide
  Sense strand starting at position 994 of SEQ ID NO: 317440
ugacuuauguaccuugaga

SEQ ID NO: 491052 - RNA, 19 nt, Artificial Sequence
  Description of Artificial Sequence: Synthetic oligonucleotide
  Antisense Strand to SEQ ID NO: 491051
ucucaagguacauaaguca

SEQ ID NO: 491053 - RNA, 19 nt, Artificial Sequence
  Description of Artificial Sequence: Synthetic oligonucleotide
  Sense strand starting at position 996 of SEQ ID NO: 317440
acuuauguaccuugagaaa

SEQ ID NO: 491054 - RNA, 19 nt, Artificial Sequence
  Description of Artificial Sequence: Synthetic oligonucleotide
  Antisense Strand to SEQ ID NO: 491053
uuucucaagguacauaagu

SEQ ID NO: 491055 - RNA, 19 nt, Artificial Sequence
  Description of Artificial Sequence: Synthetic oligonucleotide
  Sense strand starting at position 1262 of SEQ ID NO: 317440
cucugagguuguucaggau

SEQ ID NO: 491056 - RNA, 19 nt, Artificial Sequence
  Description of Artificial Sequence: Synthetic oligonucleotide
  Antisense Strand to SEQ ID NO: 491055
auccugaacaaccucagag

SEQ ID NO: 491057 - RNA, 19 nt, Artificial Sequence
  Description of Artificial Sequence: Synthetic oligonucleotide
  Sense strand starting at position 1470 of SEQ ID NO: 317440
cgagcauuaggaggagaga

SEQ ID NO: 491058 - RNA, 19 nt, Artificial Sequence
  Description of Artificial Sequence: Synthetic oligonucleotide
  Antisense Strand to SEQ ID NO: 491057
ucucuccuccuaaugcucg

SEQ ID NO: 491059 - RNA, 19 nt, Artificial Sequence
  Description of Artificial Sequence: Synthetic oligonucleotide
  Sense strand starting at position 1539 of SEQ ID NO: 317440
auuugucagccauguugaa

SEQ ID NO: 491060 - RNA, 19 nt, Artificial Sequence
  Description of Artificial Sequence: Synthetic oligonucleotide
  Antisense Strand to SEQ ID NO: 491059
uucaacauggcugacaaau

SEQ ID NO: 491061 - RNA, 19 nt, Artificial Sequence
  Description of Artificial Sequence: Synthetic oligonucleotide
  Sense strand starting at position 2840 of SEQ ID NO: 317440
gggcgucucacagauugaa

SEQ ID NO: 491062 - RNA, 19 nt, Artificial Sequence
  Description of Artificial Sequence: Synthetic oligonucleotide
  Antisense Strand to SEQ ID NO: 491061
uucaaucugugagacgccc

SEQ ID NO: 491063 - RNA, 19 nt, Artificial Sequence
  Description of Artificial Sequence: Synthetic oligonucleotide
  Sense strand starting at position 2843 of SEQ ID NO: 317440
cgucucacagauugaaaua

SEQ ID NO: 491064 - RNA, 19 nt, Artificial Sequence
  Description of Artificial Sequence: Synthetic oligonucleotide
  Antisense Strand to SEQ ID NO: 491063
uauuucaaucugugagacg

SEQ ID NO: 491065 - RNA, 19 nt, Artificial Sequence
  Description of Artificial Sequence: Synthetic oligonucleotide
  Sense strand starting at position 2855 of SEQ ID NO: 317440
ugaaauagguuucucacua

SEQ ID NO: 491066 - RNA, 19 nt, Artificial Sequence
  Description of Artificial Sequence: Synthetic oligonucleotide
  Antisense Strand to SEQ ID NO: 491065
uagugagaaaccuauuuca

SEQ ID NO: 491067 - RNA, 19 nt, Artificial Sequence
  Description of Artificial Sequence: Synthetic oligonucleotide
  Sense strand starting at position 2856 of SEQ ID NO: 317440
gaaauagguuucucacuag

SEQ ID NO: 491068 - RNA, 19 nt, Artificial Sequence
  Description of Artificial Sequence: Synthetic oligonucleotide
  Antisense Strand to SEQ ID NO: 491067
cuagugagaaaccuauuuc

SEQ ID NO: 491069 - RNA, 19 nt, Artificial Sequence
  Description of Artificial Sequence: Synthetic oligonucleotide
  Sense strand starting at position 2859 of SEQ ID NO: 317440
auagguuucucacuaguga

SEQ ID NO: 491070 - RNA, 19 nt, Artificial Sequence
  Description of Artificial Sequence: Synthetic oligonucleotide
  Antisense Strand to SEQ ID NO: 491069
ucacuagugagaaaccuau

SEQ ID NO: 491071 - RNA, 19 nt, Artificial Sequence
  Description of Artificial Sequence: Synthetic oligonucleotide
  Sense strand starting at position 2860 of SEQ ID NO: 317440
uagguuucucacuagugac

SEQ ID NO: 491072 - RNA, 19 nt, Artificial Sequence
  Description of Artificial Sequence: Synthetic oligonucleotide
  Antisense Strand to SEQ ID NO: 491071
gucacuagugagaaaccua

SEQ ID NO: 491073 - RNA, 19 nt, Artificial Sequence
  Description of Artificial Sequence: Synthetic oligonucleotide
  Sense strand starting at position 2883 of SEQ ID NO: 317440
uacuucucgcuaggaggaa

SEQ ID NO: 491074 - RNA, 19 nt, Artificial Sequence
  Description of Artificial Sequence: Synthetic oligonucleotide
  Antisense Strand to SEQ ID NO: 491073
uuccuccuagcgagaagua

SEQ ID NO: 491075 - RNA, 19 nt, Artificial Sequence
  Description of Artificial Sequence: Synthetic oligonucleotide
  Sense strand starting at position 2922 of SEQ ID NO: 317440
gcuuaaguugccucucgua

SEQ ID NO: 491076 - RNA, 19 nt, Artificial Sequence
  Description of Artificial Sequence: Synthetic oligonucleotide
  Antisense Strand to SEQ ID NO: 491075
uacgagaggcaacuuaagc

SEQ ID NO: 491077 - RNA, 19 nt, Artificial Sequence
  Description of Artificial Sequence: Synthetic oligonucleotide
  Sense strand starting at position 2942 of SEQ ID NO: 317440
gagcccuuacuuugaagua

SEQ ID NO: 491078 - RNA, 19 nt, Artificial Sequence
  Description of Artificial Sequence: Synthetic oligonucleotide
  Antisense Strand to SEQ ID NO: 491077
uacuucaaaguaagggcuc

SEQ ID NO: 491079 - RNA, 19 nt, Artificial Sequence
  Description of Artificial Sequence: Synthetic oligonucleotide
  Sense strand starting at position 3007 of SEQ ID NO: 317440
gcuaauuccgaaugacgga

SEQ ID NO: 491080 - RNA, 19 nt, Artificial Sequence
  Description of Artificial Sequence: Synthetic oligonucleotide
  Antisense Strand to SEQ ID NO: 491079
uccgucauucggaauuagc

SEQ ID NO: 491081 - RNA, 19 nt, Artificial Sequence
  Description of Artificial Sequence: Synthetic oligonucleotide
  Sense strand starting at position 3045 of SEQ ID NO: 317440
uucggagcucuguaacuau

SEQ ID NO: 491082 - RNA, 19 nt, Artificial Sequence
  Description of Artificial Sequence: Synthetic oligonucleotide
  Antisense Strand to SEQ ID NO: 491081
auaguuacagagcuccgaa

SEQ ID NO: 491083 - RNA, 19 nt, Artificial Sequence
  Description of Artificial Sequence: Synthetic oligonucleotide
  Sense strand starting at position 3088 of SEQ ID NO: 317440
cucuauugccgaguagugu

SEQ ID NO: 491084 - RNA, 19 nt, Artificial Sequence
  Description of Artificial Sequence: Synthetic oligonucleotide
  Antisense Strand to SEQ ID NO: 491083
acacuacucggcaauagag

SEQ ID NO: 491085 - RNA, 19 nt, Artificial Sequence
  Description of Artificial Sequence: Synthetic oligonucleotide
  Sense strand starting at position 3184 of SEQ ID NO: 317440
gagucauaguaaguaucau

SEQ ID NO: 491086 - RNA, 19 nt, Artificial Sequence
  Description of Artificial Sequence: Synthetic oligonucleotide
  Antisense Strand to SEQ ID NO: 491085
augauacuuacuaugacuc

SEQ ID NO: 491087 - RNA, 19 nt, Artificial Sequence
  Description of Artificial Sequence: Synthetic oligonucleotide
  Sense strand starting at position 3196 of SEQ ID NO: 317440
guaucauauuacgucagau

SEQ ID NO: 491088 - RNA, 19 nt, Artificial Sequence
  Description of Artificial Sequence: Synthetic oligonucleotide
  Antisense Strand to SEQ ID NO: 491087
aucugacguaauaugauac

SEQ ID NO: 491089 - RNA, 19 nt, Artificial Sequence
  Description of Artificial Sequence: Synthetic oligonucleotide
  Sense strand starting at position 3198 of SEQ ID NO: 317440
aucauauuacgucagauag

SEQ ID NO: 491090 - RNA, 19 nt, Artificial Sequence
  Description of Artificial Sequence: Synthetic oligonucleotide
  Antisense Strand to SEQ ID NO: 491089
cuaucugacguaauaugau

SEQ ID NO: 491091 - RNA, 19 nt, Artificial Sequence
  Description of Artificial Sequence: Synthetic oligonucleotide
  Sense strand starting at position 3306 of SEQ ID NO: 317440
gggaucacugcauggugau

SEQ ID NO: 491092 - RNA, 19 nt, Artificial Sequence
  Description of Artificial Sequence: Synthetic oligonucleotide
  Antisense Strand to SEQ ID NO: 491091
aucaccaugcagugauccc

SEQ ID NO: 491093 - RNA, 19 nt, Artificial Sequence
  Description of Artificial Sequence: Synthetic oligonucleotide
  Sense strand starting at position 3313 of SEQ ID NO: 317440
cugcauggugaucacagua

SEQ ID NO: 491094 - RNA, 19 nt, Artificial Sequence
  Description of Artificial Sequence: Synthetic oligonucleotide
  Antisense Strand to SEQ ID NO: 491093
uacugugaucaccaugcag

SEQ ID NO: 491095 - RNA, 19 nt, Artificial Sequence
  Description of Artificial Sequence: Synthetic oligonucleotide
  Sense strand starting at position 3332 of SEQ ID NO: 317440
cccuuaagucaauacuagu

SEQ ID NO: 491096 - RNA, 19 nt, Artificial Sequence
  Description of Artificial Sequence: Synthetic oligonucleotide
  Antisense Strand to SEQ ID NO: 491095
acuaguauugacuuaaggg

SEQ ID NO: 491097 - RNA, 19 nt, Artificial Sequence
  Description of Artificial Sequence: Synthetic oligonucleotide
  Sense strand starting at position 3348 of SEQ ID NO: 317440
aguuauauuguguaaccac

SEQ ID NO: 491098 - RNA, 19 nt, Artificial Sequence
  Description of Artificial Sequence: Synthetic oligonucleotide
  Antisense Strand to SEQ ID NO: 491097
gugguuacacaauauaacu

SEQ ID NO: 491099 - RNA, 19 nt, Artificial Sequence
  Description of Artificial Sequence: Synthetic oligonucleotide
  Sense strand starting at position 3431 of SEQ ID NO: 317440
cucuuugaagagugugaaa

SEQ ID NO: 491100 - RNA, 19 nt, Artificial Sequence
  Description of Artificial Sequence: Synthetic oligonucleotide
  Antisense Strand to SEQ ID NO: 491099
uuucacacucuucaaagag

SEQ ID NO: 491101 - RNA, 19 nt, Artificial Sequence
  Description of Artificial Sequence: Synthetic oligonucleotide
  Sense strand starting at position 3450 of SEQ ID NO: 317440
aagggaacuccuugcaagu

SEQ ID NO: 491102 - RNA, 19 nt, Artificial Sequence
  Description of Artificial Sequence: Synthetic oligonucleotide
  Antisense Strand to SEQ ID NO: 491101
acuugcaaggaguucccuu

SEQ ID NO: 491103 - RNA, 19 nt, Artificial Sequence
  Description of Artificial Sequence: Synthetic oligonucleotide
  Sense strand starting at position 3468 of SEQ ID NO: 317440
ugucgcauuguugcuaaga

SEQ ID NO: 491104 - RNA, 19 nt, Artificial Sequence
  Description of Artificial Sequence: Synthetic oligonucleotide
  Antisense Strand to SEQ ID NO: 491103
ucuuagcaacaaugcgaca

SEQ ID NO: 491105 - RNA, 19 nt, Artificial Sequence
  Description of Artificial Sequence: Synthetic oligonucleotide
  Sense strand starting at position 3488 of SEQ ID NO: 317440
gaauguuuaguggguccaa

SEQ ID NO: 491106 - RNA, 19 nt, Artificial Sequence
  Description of Artificial Sequence: Synthetic oligonucleotide
  Antisense Strand to SEQ ID NO: 491105
uuggacccacuaaacauuc

SEQ ID NO: 491107 - RNA, 19 nt, Artificial Sequence
  Description of Artificial Sequence: Synthetic oligonucleotide
  Sense strand starting at position 3489 of SEQ ID NO: 317440
aauguuuaguggguccaau

SEQ ID NO: 491108 - RNA, 19 nt, Artificial Sequence
  Description of Artificial Sequence: Synthetic oligonucleotide
  Antisense Strand to SEQ ID NO: 491107
auuggacccacuaaacauu

SEQ ID NO: 491109 - RNA, 19 nt, Artificial Sequence
  Description of Artificial Sequence: Synthetic oligonucleotide
  Sense strand starting at position 3646 of SEQ ID NO: 317440
cacuuaggucuuggaaauu

SEQ ID NO: 491110 - RNA, 19 nt, Artificial Sequence
  Description of Artificial Sequence: Synthetic oligonucleotide
  Antisense Strand to SEQ ID NO: 491109
aauuuccaagaccuaagug

SEQ ID NO: 491111 - RNA, 19 nt, Artificial Sequence
  Description of Artificial Sequence: Synthetic oligonucleotide
  Sense strand starting at position 3652 of SEQ ID NO: 317440
ggucuuggaaauuguuaau

SEQ ID NO: 491112 - RNA, 19 nt, Artificial Sequence
  Description of Artificial Sequence: Synthetic oligonucleotide
  Antisense Strand to SEQ ID NO: 491111
auuaacaauuuccaagacc

SEQ ID NO: 491113 - RNA, 19 nt, Artificial Sequence
  Description of Artificial Sequence: Synthetic oligonucleotide
  Sense strand starting at position 3691 of SEQ ID NO: 317440
uuugaaaguucuuugugau

SEQ ID NO: 491114 - RNA, 19 nt, Artificial Sequence
  Description of Artificial Sequence: Synthetic oligonucleotide
  Antisense Strand to SEQ ID NO: 491113
aucacaaagaacuuucaaa

SEQ ID NO: 491115 - RNA, 19 nt, Artificial Sequence
  Description of Artificial Sequence: Synthetic oligonucleotide
  Sense strand starting at position 3692 of SEQ ID NO: 317440
uugaaaguucuuugugauc

SEQ ID NO: 491116 - RNA, 19 nt, Artificial Sequence
  Description of Artificial Sequence: Synthetic oligonucleotide
  Antisense Strand to SEQ ID NO: 491115
gaucacaaagaacuuucaa

SEQ ID NO: 491117 - RNA, 19 nt, Artificial Sequence
  Description of Artificial Sequence: Synthetic oligonucleotide
  Sense strand starting at position 57 of SEQ ID NO: 317441
ugugucugccugucacuua

SEQ ID NO: 491118 - RNA, 19 nt, Artificial Sequence
  Description of Artificial Sequence: Synthetic oligonucleotide
  Antisense Strand to SEQ ID NO: 491117
uaagugacaggcagacaca

SEQ ID NO: 491119 - RNA, 19 nt, Artificial Sequence
  Description of Artificial Sequence: Synthetic oligonucleotide
  Sense strand starting at position 184 of SEQ ID NO: 317441
ugacuuauguaccuugaga

SEQ ID NO: 491120 - RNA, 19 nt, Artificial Sequence
  Description of Artificial Sequence: Synthetic oligonucleotide
  Antisense Strand to SEQ ID NO: 491119
ucucaagguacauaaguca

SEQ ID NO: 491121 - RNA, 19 nt, Artificial Sequence
  Description of Artificial Sequence: Synthetic oligonucleotide
  Sense strand starting at position 186 of SEQ ID NO: 317441
acuuauguaccuugagaaa

SEQ ID NO: 491122 - RNA, 19 nt, Artificial Sequence
  Description of Artificial Sequence: Synthetic oligonucleotide
  Antisense Strand to SEQ ID NO: 491121
uuucucaagguacauaagu

SEQ ID NO: 491123 - RNA, 19 nt, Artificial Sequence
  Description of Artificial Sequence: Synthetic oligonucleotide
  Sense strand starting at position 452 of SEQ ID NO: 317441
cucugagguuguucaggau

SEQ ID NO: 491124 - RNA, 19 nt, Artificial Sequence
  Description of Artificial Sequence: Synthetic oligonucleotide
  Antisense Strand to SEQ ID NO: 491123
auccugaacaaccucagag

SEQ ID NO: 491125 - RNA, 19 nt, Artificial Sequence
  Description of Artificial Sequence: Synthetic oligonucleotide
  Sense strand starting at position 660 of SEQ ID NO: 317441
cgagcauuaggaggagaga

SEQ ID NO: 491126 - RNA, 19 nt, Artificial Sequence
  Description of Artificial Sequence: Synthetic oligonucleotide
  Antisense Strand to SEQ ID NO: 491125
ucucuccuccuaaugcucg

SEQ ID NO: 491127 - RNA, 19 nt, Artificial Sequence
  Description of Artificial Sequence: Synthetic oligonucleotide
  Sense strand starting at position 729 of SEQ ID NO: 317441
auuugucagccauguugaa

SEQ ID NO: 491128 - RNA, 19 nt, Artificial Sequence
  Description of Artificial Sequence: Synthetic oligonucleotide
  Antisense Strand to SEQ ID NO: 491127
uucaacauggcugacaaau

SEQ ID NO: 491129 - RNA, 19 nt, Artificial Sequence
  Description of Artificial Sequence: Synthetic oligonucleotide
  Sense strand starting at position 2030 of SEQ ID NO: 317441
gggcgucucacagauugaa

SEQ ID NO: 491130 - RNA, 19 nt, Artificial Sequence
  Description of Artificial Sequence: Synthetic oligonucleotide
  Antisense Strand to SEQ ID NO: 491129
uucaaucugugagacgccc

SEQ ID NO: 491131 - RNA, 19 nt, Artificial Sequence
  Description of Artificial Sequence: Synthetic oligonucleotide
  Sense strand starting at position 2033 of SEQ ID NO: 317441
cgucucacagauugaaaua

SEQ ID NO: 491132 - RNA, 19 nt, Artificial Sequence
  Description of Artificial Sequence: Synthetic oligonucleotide
  Antisense Strand to SEQ ID NO: 491131
uauuucaaucugugagacg

SEQ ID NO: 491133 - RNA, 19 nt, Artificial Sequence
  Description of Artificial Sequence: Synthetic oligonucleotide
  Sense strand starting at position 2045 of SEQ ID NO: 317441
ugaaauagguuucucacua

SEQ ID NO: 491134 - RNA, 19 nt, Artificial Sequence
  Description of Artificial Sequence: Synthetic oligonucleotide
  Antisense Strand to SEQ ID NO: 491133
uagugagaaaccuauuuca

SEQ ID NO: 491135 - RNA, 19 nt, Artificial Sequence
  Description of Artificial Sequence: Synthetic oligonucleotide
  Sense strand starting at position 2046 of SEQ ID NO: 317441
gaaauagguuucucacuag

SEQ ID NO: 491136 - RNA, 19 nt, Artificial Sequence
  Description of Artificial Sequence: Synthetic oligonucleotide
  Antisense Strand to SEQ ID NO: 491135
cuagugagaaaccuauuuc

SEQ ID NO: 491137 - RNA, 19 nt, Artificial Sequence
  Description of Artificial Sequence: Synthetic oligonucleotide
  Sense strand starting at position 2049 of SEQ ID NO: 317441
auagguuucucacuaguga

SEQ ID NO: 491138 - RNA, 19 nt, Artificial Sequence
  Description of Artificial Sequence: Synthetic oligonucleotide
  Antisense Strand to SEQ ID NO: 491137
ucacuagugagaaaccuau

SEQ ID NO: 491139 - RNA, 19 nt, Artificial Sequence
  Description of Artificial Sequence: Synthetic oligonucleotide
  Sense strand starting at position 2050 of SEQ ID NO: 317441
uagguuucucacuagugac

SEQ ID NO: 491140 - RNA, 19 nt, Artificial Sequence
  Description of Artificial Sequence: Synthetic oligonucleotide
  Antisense Strand to SEQ ID NO: 491139
gucacuagugagaaaccua

SEQ ID NO: 491141 - RNA, 19 nt, Artificial Sequence
  Description of Artificial Sequence: Synthetic oligonucleotide
  Sense strand starting at position 2073 of SEQ ID NO: 317441
uacuucucgcuaggaggaa

SEQ ID NO: 491142 - RNA, 19 nt, Artificial Sequence
  Description of Artificial Sequence: Synthetic oligonucleotide
  Antisense Strand to SEQ ID NO: 491141
uuccuccuagcgagaagua

SEQ ID NO: 491143 - RNA, 19 nt, Artificial Sequence
  Description of Artificial Sequence: Synthetic oligonucleotide
  Sense strand starting at position 2112 of SEQ ID NO: 317441
gcuuaaguugccucucgua

SEQ ID NO: 491144 - RNA, 19 nt, Artificial Sequence
  Description of Artificial Sequence: Synthetic oligonucleotide
  Antisense Strand to SEQ ID NO: 491143
uacgagaggcaacuuaagc

SEQ ID NO: 491145 - RNA, 19 nt, Artificial Sequence
  Description of Artificial Sequence: Synthetic oligonucleotide
  Sense strand starting at position 2132 of SEQ ID NO: 317441
gagcccuuacuuugaagua

SEQ ID NO: 491146 - RNA, 19 nt, Artificial Sequence
  Description of Artificial Sequence: Synthetic oligonucleotide
  Antisense Strand to SEQ ID NO: 491145
uacuucaaaguaagggcuc

SEQ ID NO: 491147 - RNA, 19 nt, Artificial Sequence
  Description of Artificial Sequence: Synthetic oligonucleotide
  Sense strand starting at position 2278 of SEQ ID NO: 317441
cucuauugccgaguagugu

SEQ ID NO: 491148 - RNA, 19 nt, Artificial Sequence
  Description of Artificial Sequence: Synthetic oligonucleotide
  Antisense Strand to SEQ ID NO: 491147
acacuacucggcaauagag

SEQ ID NO: 491149 - RNA, 19 nt, Artificial Sequence
  Description of Artificial Sequence: Synthetic oligonucleotide
  Sense strand starting at position 2374 of SEQ ID NO: 317441
gagucauaguaaguaucau

SEQ ID NO: 491150 - RNA, 19 nt, Artificial Sequence
  Description of Artificial Sequence: Synthetic oligonucleotide
  Antisense Strand to SEQ ID NO: 491149
augauacuuacuaugacuc

SEQ ID NO: 491151 - RNA, 19 nt, Artificial Sequence
  Description of Artificial Sequence: Synthetic oligonucleotide
  Sense strand starting at position 2388 of SEQ ID NO: 317441
aucauauuacgucagauag

SEQ ID NO: 491152 - RNA, 19 nt, Artificial Sequence
  Description of Artificial Sequence: Synthetic oligonucleotide
  Antisense Strand to SEQ ID NO: 491151
cuaucugacguaauaugau

SEQ ID NO: 491153 - RNA, 19 nt, Artificial Sequence
  Description of Artificial Sequence: Synthetic oligonucleotide
  Sense strand starting at position 2496 of SEQ ID NO: 317441
gggaucacugcauggugau

SEQ ID NO: 491154 - RNA, 19 nt, Artificial Sequence
  Description of Artificial Sequence: Synthetic oligonucleotide
  Antisense Strand to SEQ ID NO: 491153
aucaccaugcagugauccc

SEQ ID NO: 491155 - RNA, 19 nt, Artificial Sequence
  Description of Artificial Sequence: Synthetic oligonucleotide
  Sense strand starting at position 2503 of SEQ ID NO: 317441
cugcauggugaucacagua

SEQ ID NO: 491156 - RNA, 19 nt, Artificial Sequence
  Description of Artificial Sequence: Synthetic oligonucleotide
  Antisense Strand to SEQ ID NO: 491155
uacugugaucaccaugcag

SEQ ID NO: 491157 - RNA, 19 nt, Artificial Sequence
  Description of Artificial Sequence: Synthetic oligonucleotide
  Sense strand starting at position 2522 of SEQ ID NO: 317441
cccuuaagucaauacuagu

SEQ ID NO: 491158 - RNA, 19 nt, Artificial Sequence
  Description of Artificial Sequence: Synthetic oligonucleotide
  Antisense Strand to SEQ ID NO: 491157
acuaguauugacuuaaggg

SEQ ID NO: 491159 - RNA, 19 nt, Artificial Sequence
  Description of Artificial Sequence: Synthetic oligonucleotide
  Sense strand starting at position 2538 of SEQ ID NO: 317441
aguuauauuguguaaccac

SEQ ID NO: 491160 - RNA, 19 nt, Artificial Sequence
  Description of Artificial Sequence: Synthetic oligonucleotide
  Antisense Strand to SEQ ID NO: 491159
gugguuacacaauauaacu

SEQ ID NO: 491161 - RNA, 19 nt, Artificial Sequence
  Description of Artificial Sequence: Synthetic oligonucleotide
  Sense strand starting at position 2621 of SEQ ID NO: 317441
cucuuugaagagugugaaa

SEQ ID NO: 491162 - RNA, 19 nt, Artificial Sequence
  Description of Artificial Sequence: Synthetic oligonucleotide
  Antisense Strand to SEQ ID NO: 491161
uuucacacucuucaaagag

SEQ ID NO: 491163 - RNA, 19 nt, Artificial Sequence
  Description of Artificial Sequence: Synthetic oligonucleotide
  Sense strand starting at position 2640 of SEQ ID NO: 317441
aagggaacuccuugcaagu

SEQ ID NO: 491164 - RNA, 19 nt, Artificial Sequence
  Description of Artificial Sequence: Synthetic oligonucleotide
  Antisense Strand to SEQ ID NO: 491163
acuugcaaggaguucccuu

SEQ ID NO: 491165 - RNA, 19 nt, Artificial Sequence
  Description of Artificial Sequence: Synthetic oligonucleotide
  Sense strand starting at position 2658 of SEQ ID NO: 317441
ugucgcauuguugcuaaga

SEQ ID NO: 491166 - RNA, 19 nt, Artificial Sequence
  Description of Artificial Sequence: Synthetic oligonucleotide
  Antisense Strand to SEQ ID NO: 491165
ucuuagcaacaaugcgaca

SEQ ID NO: 491167 - RNA, 19 nt, Artificial Sequence
  Description of Artificial Sequence: Synthetic oligonucleotide
  Sense strand starting at position 2678 of SEQ ID NO: 317441
gaauguuuaguggguccaa

SEQ ID NO: 491168 - RNA, 19 nt, Artificial Sequence
  Description of Artificial Sequence: Synthetic oligonucleotide
  Antisense Strand to SEQ ID NO: 491167
uuggacccacuaaacauuc

SEQ ID NO: 491169 - RNA, 19 nt, Artificial Sequence
  Description of Artificial Sequence: Synthetic oligonucleotide
  Sense strand starting at position 2836 of SEQ ID NO: 317441
cacuuaggucuuggaaauu

SEQ ID NO: 491170 - RNA, 19 nt, Artificial Sequence
  Description of Artificial Sequence: Synthetic oligonucleotide
  Antisense Strand to SEQ ID NO: 491169
aauuuccaagaccuaagug

SEQ ID NO: 491171 - RNA, 19 nt, Artificial Sequence
  Description of Artificial Sequence: Synthetic oligonucleotide
  Sense strand starting at position 2842 of SEQ ID NO: 317441
ggucuuggaaauuguuaau

SEQ ID NO: 491172 - RNA, 19 nt, Artificial Sequence
  Description of Artificial Sequence: Synthetic oligonucleotide
  Antisense Strand to SEQ ID NO: 491171
auuaacaauuuccaagacc

SEQ ID NO: 491173 - RNA, 19 nt, Artificial Sequence
  Description of Artificial Sequence: Synthetic oligonucleotide
  Sense strand starting at position 2881 of SEQ ID NO: 317441
uuugaaaguucuuugugau

SEQ ID NO: 491174 - RNA, 19 nt, Artificial Sequence
  Description of Artificial Sequence: Synthetic oligonucleotide
  Antisense Strand to SEQ ID NO: 491173
aucacaaagaacuuucaaa

SEQ ID NO: 491175 - RNA, 19 nt, Artificial Sequence
  Description of Artificial Sequence: Synthetic oligonucleotide
  Sense strand starting at position 3270 of SEQ ID NO: 317441
auugcagaguuguugaaac

SEQ ID NO: 491176 - RNA, 19 nt, Artificial Sequence
  Description of Artificial Sequence: Synthetic oligonucleotide
  Antisense Strand to SEQ ID NO: 491175
guuucaacaacucugcaau

SEQ ID NO: 491177 - RNA, 19 nt, Artificial Sequence
  Description of Artificial Sequence: Synthetic oligonucleotide
  Sense strand starting at position 3272 of SEQ ID NO: 317441
ugcagaguuguugaaacau

SEQ ID NO: 491178 - RNA, 19 nt, Artificial Sequence
  Description of Artificial Sequence: Synthetic oligonucleotide
  Antisense Strand to SEQ ID NO: 491177
auguuucaacaacucugca

SEQ ID NO: 491179 - RNA, 19 nt, Artificial Sequence
  Description of Artificial Sequence: Synthetic oligonucleotide
  Sense strand starting at position 3308 of SEQ ID NO: 317441
agagcugagugacucuuaa

SEQ ID NO: 491180 - RNA, 19 nt, Artificial Sequence
  Description of Artificial Sequence: Synthetic oligonucleotide
  Antisense Strand to SEQ ID NO: 491179
uuaagagucacucagcucu

SEQ ID NO: 491181 - RNA, 19 nt, Artificial Sequence
  Description of Artificial Sequence: Synthetic oligonucleotide
  Sense strand starting at position 3403 of SEQ ID NO: 317441
ccuguaagacagcagaguu

SEQ ID NO: 491182 - RNA, 19 nt, Artificial Sequence
  Description of Artificial Sequence: Synthetic oligonucleotide
  Antisense Strand to SEQ ID NO: 491181
aacucugcugucuuacagg

SEQ ID NO: 491183 - RNA, 19 nt, Artificial Sequence
  Description of Artificial Sequence: Synthetic oligonucleotide
  Sense strand starting at position 3510 of SEQ ID NO: 317441
uguuucugacuauagaagu

SEQ ID NO: 491184 - RNA, 19 nt, Artificial Sequence
  Description of Artificial Sequence: Synthetic oligonucleotide
  Antisense Strand to SEQ ID NO: 491183
acuucuauagucagaaaca

SEQ ID NO: 491185 - RNA, 19 nt, Artificial Sequence
  Description of Artificial Sequence: Synthetic oligonucleotide
  Sense strand starting at position 3608 of SEQ ID NO: 317441
agguuccuuuaguuauaac

SEQ ID NO: 491186 - RNA, 19 nt, Artificial Sequence
  Description of Artificial Sequence: Synthetic oligonucleotide
  Antisense Strand to SEQ ID NO: 491185
guuauaacuaaaggaaccu

SEQ ID NO: 491187 - RNA, 19 nt, Artificial Sequence
  Description of Artificial Sequence: Synthetic oligonucleotide
  Sense strand starting at position 3628 of SEQ ID NO: 317441
gggaaaugaucuuucaggu

SEQ ID NO: 491188 - RNA, 19 nt, Artificial Sequence
  Description of Artificial Sequence: Synthetic oligonucleotide
  Antisense Strand to SEQ ID NO: 491187
accugaaagaucauuuccc

SEQ ID NO: 491189 - RNA, 19 nt, Artificial Sequence
  Description of Artificial Sequence: Synthetic oligonucleotide
  Sense strand starting at position 3709 of SEQ ID NO: 317441
uuggaaucauguuuggguu

SEQ ID NO: 491190 - RNA, 19 nt, Artificial Sequence
  Description of Artificial Sequence: Synthetic oligonucleotide
  Antisense Strand to SEQ ID NO: 491189
aacccaaacaugauuccaa

SEQ ID NO: 491191 - RNA, 19 nt, Artificial Sequence
  Description of Artificial Sequence: Synthetic oligonucleotide
  Sense strand starting at position 3950 of SEQ ID NO: 317441
ugcuauuucugggaaagaa

SEQ ID NO: 491192 - RNA, 19 nt, Artificial Sequence
  Description of Artificial Sequence: Synthetic oligonucleotide
  Antisense Strand to SEQ ID NO: 491191
uucuuucccagaaauagca

SEQ ID NO: 491193 - RNA, 19 nt, Artificial Sequence
  Description of Artificial Sequence: Synthetic oligonucleotide
  Sense strand starting at position 3968 of SEQ ID NO: 317441
aaggauauaguuugcaaau

SEQ ID NO: 491194 - RNA, 19 nt, Artificial Sequence
  Description of Artificial Sequence: Synthetic oligonucleotide
  Antisense Strand to SEQ ID NO: 491193
auuugcaaacuauauccuu

SEQ ID NO: 491195 - RNA, 19 nt, Artificial Sequence
  Description of Artificial Sequence: Synthetic oligonucleotide
  Sense strand starting at position 3969 of SEQ ID NO: 317441
aggauauaguuugcaaauc

SEQ ID NO: 491196 - RNA, 19 nt, Artificial Sequence
  Description of Artificial Sequence: Synthetic oligonucleotide
  Antisense Strand to SEQ ID NO: 491195
gauuugcaaacuauauccu

SEQ ID NO: 491197 - RNA, 19 nt, Artificial Sequence
  Description of Artificial Sequence: Synthetic oligonucleotide
  Sense strand starting at position 126 of SEQ ID NO: 317442
ucuacagaugcuuagugaa

SEQ ID NO: 491198 - RNA, 19 nt, Artificial Sequence
  Description of Artificial Sequence: Synthetic oligonucleotide
  Antisense Strand to SEQ ID NO: 491197
uucacuaagcaucuguaga

SEQ ID NO: 491199 - RNA, 19 nt, Artificial Sequence
  Description of Artificial Sequence: Synthetic oligonucleotide
  Sense strand starting at position 128 of SEQ ID NO: 317442
uacagaugcuuagugaaug

SEQ ID NO: 491200 - RNA, 19 nt, Artificial Sequence
  Description of Artificial Sequence: Synthetic oligonucleotide
  Antisense Strand to SEQ ID NO: 491199
cauucacuaagcaucugua

SEQ ID NO: 491201 - RNA, 19 nt, Artificial Sequence
  Description of Artificial Sequence: Synthetic oligonucleotide
  Sense strand starting at position 167 of SEQ ID NO: 317442
uguggaguucuggagauca

SEQ ID NO: 491202 - RNA, 19 nt, Artificial Sequence
  Description of Artificial Sequence: Synthetic oligonucleotide
  Antisense Strand to SEQ ID NO: 491201
ugaucuccagaacuccaca

SEQ ID NO: 491203 - RNA, 19 nt, Artificial Sequence
  Description of Artificial Sequence: Synthetic oligonucleotide
  Sense strand starting at position 316 of SEQ ID NO: 317442
ggagaucuuucucuaacac

SEQ ID NO: 491204 - RNA, 19 nt, Artificial Sequence
  Description of Artificial Sequence: Synthetic oligonucleotide
  Antisense Strand to SEQ ID NO: 491203
guguuagagaaagaucucc

SEQ ID NO: 491205 - RNA, 19 nt, Artificial Sequence
  Description of Artificial Sequence: Synthetic oligonucleotide
  Sense strand starting at position 429 of SEQ ID NO: 317442
ugucaagagaauggcuaaa

SEQ ID NO: 491206 - RNA, 19 nt, Artificial Sequence
  Description of Artificial Sequence: Synthetic oligonucleotide
  Antisense Strand to SEQ ID NO: 491205
uuuagccauucucuugaca

SEQ ID NO: 491207 - RNA, 19 nt, Artificial Sequence
  Description of Artificial Sequence: Synthetic oligonucleotide
  Sense strand starting at position 694 of SEQ ID NO: 317442
guaaaccagucucugauau

SEQ ID NO: 491208 - RNA, 19 nt, Artificial Sequence
  Description of Artificial Sequence: Synthetic oligonucleotide
  Antisense Strand to SEQ ID NO: 491207
auaucagagacugguuuac

SEQ ID NO: 491209 - RNA, 19 nt, Artificial Sequence
  Description of Artificial Sequence: Synthetic oligonucleotide
  Sense strand starting at position 701 of SEQ ID NO: 317442
agucucugauaucuuaaag

SEQ ID NO: 491210 - RNA, 19 nt, Artificial Sequence
  Description of Artificial Sequence: Synthetic oligonucleotide
  Antisense Strand to SEQ ID NO: 491209
cuuuaagauaucagagacu

SEQ ID NO: 491211 - RNA, 19 nt, Artificial Sequence
  Description of Artificial Sequence: Synthetic oligonucleotide
  Sense strand starting at position 867 of SEQ ID NO: 317442
uuauaacauggccaaagua

SEQ ID NO: 491212 - RNA, 19 nt, Artificial Sequence
  Description of Artificial Sequence: Synthetic oligonucleotide
  Antisense Strand to SEQ ID NO: 491211
uacuuuggccauguuauaa

SEQ ID NO: 491213 - RNA, 19 nt, Artificial Sequence
  Description of Artificial Sequence: Synthetic oligonucleotide
  Sense strand starting at position 876 of SEQ ID NO: 317442
ggccaaaguauuuggcuua

SEQ ID NO: 491214 - RNA, 19 nt, Artificial Sequence
  Description of Artificial Sequence: Synthetic oligonucleotide
  Antisense Strand to SEQ ID NO: 491213
uaagccaaauacuuuggcc

SEQ ID NO: 491215 - RNA, 19 nt, Artificial Sequence
  Description of Artificial Sequence: Synthetic oligonucleotide
  Sense strand starting at position 905 of SEQ ID NO: 317442
aaucuuacacgugaaaugu

SEQ ID NO: 491216 - RNA, 19 nt, Artificial Sequence
  Description of Artificial Sequence: Synthetic oligonucleotide
  Antisense Strand to SEQ ID NO: 491215
acauuucacguguaagauu

SEQ ID NO: 491217 - RNA, 19 nt, Artificial Sequence
  Description of Artificial Sequence: Synthetic oligonucleotide
  Sense strand starting at position 1034 of SEQ ID NO: 317442
aagaguuaguaaccggaaa

SEQ ID NO: 491218 - RNA, 19 nt, Artificial Sequence
  Description of Artificial Sequence: Synthetic oligonucleotide
  Antisense Strand to SEQ ID NO: 491217
uuuccgguuacuaacucuu

SEQ ID NO: 491219 - RNA, 19 nt, Artificial Sequence
  Description of Artificial Sequence: Synthetic oligonucleotide
  Sense strand starting at position 1035 of SEQ ID NO: 317442
agaguuaguaaccggaaag

SEQ ID NO: 491220 - RNA, 19 nt, Artificial Sequence
  Description of Artificial Sequence: Synthetic oligonucleotide
  Antisense Strand to SEQ ID NO: 491219
cuuuccgguuacuaacucu

SEQ ID NO: 491221 - RNA, 19 nt, Artificial Sequence
  Description of Artificial Sequence: Synthetic oligonucleotide
  Sense strand starting at position 1169 of SEQ ID NO: 317442
ggccuugacucuuuaauaa

SEQ ID NO: 491222 - RNA, 19 nt, Artificial Sequence
  Description of Artificial Sequence: Synthetic oligonucleotide
  Antisense Strand to SEQ ID NO: 491221
uuauuaaagagucaaggcc

SEQ ID NO: 491223 - RNA, 19 nt, Artificial Sequence
  Description of Artificial Sequence: Synthetic oligonucleotide
  Sense strand starting at position 1367 of SEQ ID NO: 317442
ugacacucagauugucaga

SEQ ID NO: 491224 - RNA, 19 nt, Artificial Sequence
  Description of Artificial Sequence: Synthetic oligonucleotide
  Antisense Strand to SEQ ID NO: 491223
ucugacaaucugaguguca

SEQ ID NO: 491225 - RNA, 19 nt, Artificial Sequence
  Description of Artificial Sequence: Synthetic oligonucleotide
  Sense strand starting at position 1571 of SEQ ID NO: 317442
ggugacuggcaauagugaa

SEQ ID NO: 491226 - RNA, 19 nt, Artificial Sequence
  Description of Artificial Sequence: Synthetic oligonucleotide
  Antisense Strand to SEQ ID NO: 491225
uucacuauugccagucacc

SEQ ID NO: 491227 - RNA, 19 nt, Artificial Sequence
  Description of Artificial Sequence: Synthetic oligonucleotide
  Sense strand starting at position 1583 of SEQ ID NO: 317442
uagugaaugucaguacaua

SEQ ID NO: 491228 - RNA, 19 nt, Artificial Sequence
  Description of Artificial Sequence: Synthetic oligonucleotide
  Antisense Strand to SEQ ID NO: 491227
uauguacugacauucacua

SEQ ID NO: 491229 - RNA, 19 nt, Artificial Sequence
  Description of Artificial Sequence: Synthetic oligonucleotide
  Sense strand starting at position 1584 of SEQ ID NO: 317442
agugaaugucaguacauau

SEQ ID NO: 491230 - RNA, 19 nt, Artificial Sequence
  Description of Artificial Sequence: Synthetic oligonucleotide
  Antisense Strand to SEQ ID NO: 491229
auauguacugacauucacu

SEQ ID NO: 491231 - RNA, 19 nt, Artificial Sequence
  Description of Artificial Sequence: Synthetic oligonucleotide
  Sense strand starting at position 2123 of SEQ ID NO: 317442
ggaaggaucgguggaaugu

SEQ ID NO: 491232 - RNA, 19 nt, Artificial Sequence
  Description of Artificial Sequence: Synthetic oligonucleotide
  Antisense Strand to SEQ ID NO: 491231
acauuccaccgauccuucc

SEQ ID NO: 491233 - RNA, 19 nt, Artificial Sequence
  Description of Artificial Sequence: Synthetic oligonucleotide
  Sense strand starting at position 2228 of SEQ ID NO: 317442
gacagaggaugucuccuaa

SEQ ID NO: 491234 - RNA, 19 nt, Artificial Sequence
  Description of Artificial Sequence: Synthetic oligonucleotide
  Antisense Strand to SEQ ID NO: 491233
uuaggagacauccucuguc

SEQ ID NO: 491235 - RNA, 19 nt, Artificial Sequence
  Description of Artificial Sequence: Synthetic oligonucleotide
  Sense strand starting at position 2314 of SEQ ID NO: 317442
ggugguuaggcuuggauuu

SEQ ID NO: 491236 - RNA, 19 nt, Artificial Sequence
  Description of Artificial Sequence: Synthetic oligonucleotide
  Antisense Strand to SEQ ID NO: 491235
aaauccaagccuaaccacc

SEQ ID NO: 491237 - RNA, 19 nt, Artificial Sequence
  Description of Artificial Sequence: Synthetic oligonucleotide
  Sense strand starting at position 2315 of SEQ ID NO: 317442
gugguuaggcuuggauuua

SEQ ID NO: 491238 - RNA, 19 nt, Artificial Sequence
  Description of Artificial Sequence: Synthetic oligonucleotide
  Antisense Strand to SEQ ID NO: 491237
uaaauccaagccuaaccac

SEQ ID NO: 491239 - RNA, 19 nt, Artificial Sequence
  Description of Artificial Sequence: Synthetic oligonucleotide
  Sense strand starting at position 2466 of SEQ ID NO: 317442
uugggaagugauuaggcuu

SEQ ID NO: 491240 - RNA, 19 nt, Artificial Sequence
  Description of Artificial Sequence: Synthetic oligonucleotide
  Antisense Strand to SEQ ID NO: 491239
aagccuaaucacuucccaa

SEQ ID NO: 491241 - RNA, 19 nt, Artificial Sequence
  Description of Artificial Sequence: Synthetic oligonucleotide
  Sense strand starting at position 2698 of SEQ ID NO: 317442
uguucagacguaggagaaa

SEQ ID NO: 491242 - RNA, 19 nt, Artificial Sequence
  Description of Artificial Sequence: Synthetic oligonucleotide
  Antisense Strand to SEQ ID NO: 491241
uuucuccuacgucugaaca

SEQ ID NO: 491243 - RNA, 19 nt, Artificial Sequence
  Description of Artificial Sequence: Synthetic oligonucleotide
  Sense strand starting at position 2745 of SEQ ID NO: 317442
uguaauugccauuaaauag

SEQ ID NO: 491244 - RNA, 19 nt, Artificial Sequence
  Description of Artificial Sequence: Synthetic oligonucleotide
  Antisense Strand to SEQ ID NO: 491243
cuauuuaauggcaauuaca

SEQ ID NO: 491245 - RNA, 19 nt, Artificial Sequence
  Description of Artificial Sequence: Synthetic oligonucleotide
  Sense strand starting at position 2774 of SEQ ID NO: 317442
auaggaaagugccuaauaa

SEQ ID NO: 491246 - RNA, 19 nt, Artificial Sequence
  Description of Artificial Sequence: Synthetic oligonucleotide
  Antisense Strand to SEQ ID NO: 491245
uuauuaggcacuuuccuau

SEQ ID NO: 491247 - RNA, 19 nt, Artificial Sequence
  Description of Artificial Sequence: Synthetic oligonucleotide
  Sense strand starting at position 2795 of SEQ ID NO: 317442
auguauuguuacucugaga

SEQ ID NO: 491248 - RNA, 19 nt, Artificial Sequence
  Description of Artificial Sequence: Synthetic oligonucleotide
  Antisense Strand to SEQ ID NO: 491247
ucucagaguaacaauacau

SEQ ID NO: 491249 - RNA, 19 nt, Artificial Sequence
  Description of Artificial Sequence: Synthetic oligonucleotide
  Sense strand starting at position 3062 of SEQ ID NO: 317442
gcguguauaguguuuaaca

SEQ ID NO: 491250 - RNA, 19 nt, Artificial Sequence
  Description of Artificial Sequence: Synthetic oligonucleotide
  Antisense Strand to SEQ ID NO: 491249
uguuaaacacuauacacgc

SEQ ID NO: 491251 - RNA, 19 nt, Artificial Sequence
  Description of Artificial Sequence: Synthetic oligonucleotide
  Sense strand starting at position 3093 of SEQ ID NO: 317442
ugaaguaaaugaguaguaa

SEQ ID NO: 491252 - RNA, 19 nt, Artificial Sequence
  Description of Artificial Sequence: Synthetic oligonucleotide
  Antisense Strand to SEQ ID NO: 491251
uuacuacucauuuacuuca

SEQ ID NO: 491253 - RNA, 19 nt, Artificial Sequence
  Description of Artificial Sequence: Synthetic oligonucleotide
  Sense strand starting at position 3122 of SEQ ID NO: 317442
ccaugacuguuacuaucau

SEQ ID NO: 491254 - RNA, 19 nt, Artificial Sequence
  Description of Artificial Sequence: Synthetic oligonucleotide
  Antisense Strand to SEQ ID NO: 491253
augauaguaacagucaugg

SEQ ID NO: 491255 - RNA, 19 nt, Artificial Sequence
  Description of Artificial Sequence: Synthetic oligonucleotide
  Sense strand starting at position 3280 of SEQ ID NO: 317442
cgaacauugcuccacugaa

SEQ ID NO: 491256 - RNA, 19 nt, Artificial Sequence
  Description of Artificial Sequence: Synthetic oligonucleotide
  Antisense Strand to SEQ ID NO: 491255
uucaguggagcaauguucg

SEQ ID NO: 491257 - RNA, 19 nt, Artificial Sequence
  Description of Artificial Sequence: Synthetic oligonucleotide
  Sense strand starting at position 3352 of SEQ ID NO: 317442
auugaaugcuauccuuaug

SEQ ID NO: 491258 - RNA, 19 nt, Artificial Sequence
  Description of Artificial Sequence: Synthetic oligonucleotide
  Antisense Strand to SEQ ID NO: 491257
cauaaggauagcauucaau

SEQ ID NO: 491259 - RNA, 19 nt, Artificial Sequence
  Description of Artificial Sequence: Synthetic oligonucleotide
  Sense strand starting at position 3458 of SEQ ID NO: 317442
acaauuagaucuguguauc

SEQ ID NO: 491260 - RNA, 19 nt, Artificial Sequence
  Description of Artificial Sequence: Synthetic oligonucleotide
  Antisense Strand to SEQ ID NO: 491259
gauacacagaucuaauugu

SEQ ID NO: 491261 - RNA, 19 nt, Artificial Sequence
  Description of Artificial Sequence: Synthetic oligonucleotide
  Sense strand starting at position 3461 of SEQ ID NO: 317442
auuagaucuguguaucaua

SEQ ID NO: 491262 - RNA, 19 nt, Artificial Sequence
  Description of Artificial Sequence: Synthetic oligonucleotide
  Antisense Strand to SEQ ID NO: 491261
uaugauacacagaucuaau

SEQ ID NO: 491263 - RNA, 19 nt, Artificial Sequence
  Description of Artificial Sequence: Synthetic oligonucleotide
  Sense strand starting at position 3472 of SEQ ID NO: 317442
guaucauagcacuaagaua

SEQ ID NO: 491264 - RNA, 19 nt, Artificial Sequence
  Description of Artificial Sequence: Synthetic oligonucleotide
  Antisense Strand to SEQ ID NO: 491263
uaucuuagugcuaugauac

SEQ ID NO: 491265 - RNA, 19 nt, Artificial Sequence
  Description of Artificial Sequence: Synthetic oligonucleotide
  Sense strand starting at position 3560 of SEQ ID NO: 317442
agugaaguauuucaaggag

SEQ ID NO: 491266 - RNA, 19 nt, Artificial Sequence
  Description of Artificial Sequence: Synthetic oligonucleotide
  Antisense Strand to SEQ ID NO: 491265
cuccuugaaauacuucacu

SEQ ID NO: 491267 - RNA, 19 nt, Artificial Sequence
  Description of Artificial Sequence: Synthetic oligonucleotide
  Sense strand starting at position 3649 of SEQ ID NO: 317442
ggaagaggucacuggugau

SEQ ID NO: 491268 - RNA, 19 nt, Artificial Sequence
  Description of Artificial Sequence: Synthetic oligonucleotide
  Antisense Strand to SEQ ID NO: 491267
aucaccagugaccucuucc

SEQ ID NO: 491269 - RNA, 19 nt, Artificial Sequence
  Description of Artificial Sequence: Synthetic oligonucleotide
  Sense strand starting at position 3747 of SEQ ID NO: 317442
gcacuuauaggguauucuu

SEQ ID NO: 491270 - RNA, 19 nt, Artificial Sequence
  Description of Artificial Sequence: Synthetic oligonucleotide
  Antisense Strand to SEQ ID NO: 491269
aagaauacccuauaagugc

SEQ ID NO: 491271 - RNA, 19 nt, Artificial Sequence
  Description of Artificial Sequence: Synthetic oligonucleotide
  Sense strand starting at position 3847 of SEQ ID NO: 317442
gaaguauuacagcauguuu

SEQ ID NO: 491272 - RNA, 19 nt, Artificial Sequence
  Description of Artificial Sequence: Synthetic oligonucleotide
  Antisense Strand to SEQ ID NO: 491271
aaacaugcuguaauacuuc

SEQ ID NO: 491273 - RNA, 19 nt, Artificial Sequence
  Description of Artificial Sequence: Synthetic oligonucleotide
  Sense strand starting at position 3864 of SEQ ID NO: 317442
uuguauauucuaggaaaug

SEQ ID NO: 491274 - RNA, 19 nt, Artificial Sequence
  Description of Artificial Sequence: Synthetic oligonucleotide
  Antisense Strand to SEQ ID NO: 491273
cauuuccuagaauauacaa

SEQ ID NO: 491275 - RNA, 19 nt, Artificial Sequence
  Description of Artificial Sequence: Synthetic oligonucleotide
  Sense strand starting at position 3963 of SEQ ID NO: 317442
gaugaaauccagugcacaa

SEQ ID NO: 491276 - RNA, 19 nt, Artificial Sequence
  Description of Artificial Sequence: Synthetic oligonucleotide
  Antisense Strand to SEQ ID NO: 491275
uugugcacuggauuucauc

SEQ ID NO: 491277 - RNA, 19 nt, Artificial Sequence
  Description of Artificial Sequence: Synthetic oligonucleotide
  Sense strand starting at position 59 of SEQ ID NO: 317443
uccacagauuggguauagu

SEQ ID NO: 491278 - RNA, 19 nt, Artificial Sequence
  Description of Artificial Sequence: Synthetic oligonucleotide
  Antisense Strand to SEQ ID NO: 491277
acuauacccaaucugugga

SEQ ID NO: 491279 - RNA, 19 nt, Artificial Sequence
  Description of Artificial Sequence: Synthetic oligonucleotide
  Sense strand starting at position 69 of SEQ ID NO: 317443
ggguauagucucuaaacgu

SEQ ID NO: 491280 - RNA, 19 nt, Artificial Sequence
  Description of Artificial Sequence: Synthetic oligonucleotide
  Antisense Strand to SEQ ID NO: 491279
acguuuagagacuauaccc

SEQ ID NO: 491281 - RNA, 19 nt, Artificial Sequence
  Description of Artificial Sequence: Synthetic oligonucleotide
  Sense strand starting at position 77 of SEQ ID NO: 317443
ucucuaaacgugcaaggaa

SEQ ID NO: 491282 - RNA, 19 nt, Artificial Sequence
  Description of Artificial Sequence: Synthetic oligonucleotide
  Antisense Strand to SEQ ID NO: 491281
uuccuugcacguuuagaga

SEQ ID NO: 491283 - RNA, 19 nt, Artificial Sequence
  Description of Artificial Sequence: Synthetic oligonucleotide
  Sense strand starting at position 102 of SEQ ID NO: 317443
aaaguuggcugguccaaca

SEQ ID NO: 491284 - RNA, 19 nt, Artificial Sequence
  Description of Artificial Sequence: Synthetic oligonucleotide
  Antisense Strand to SEQ ID NO: 491283
uguuggaccagccaacuuu

SEQ ID NO: 491285 - RNA, 19 nt, Artificial Sequence
  Description of Artificial Sequence: Synthetic oligonucleotide
  Sense strand starting at position 188 of SEQ ID NO: 317443
uugauauucuuaguccaug

SEQ ID NO: 491286 - RNA, 19 nt, Artificial Sequence
  Description of Artificial Sequence: Synthetic oligonucleotide
  Antisense Strand to SEQ ID NO: 491285
cauggacuaagaauaucaa

SEQ ID NO: 491287 - RNA, 19 nt, Artificial Sequence
  Description of Artificial Sequence: Synthetic oligonucleotide
  Sense strand starting at position 215 of SEQ ID NO: 317443
ugggacaccugaguaguua

SEQ ID NO: 491288 - RNA, 19 nt, Artificial Sequence
  Description of Artificial Sequence: Synthetic oligonucleotide
  Antisense Strand to SEQ ID NO: 491287
uaacuacucagguguccca

SEQ ID NO: 491289 - RNA, 19 nt, Artificial Sequence
  Description of Artificial Sequence: Synthetic oligonucleotide
  Sense strand starting at position 248 of SEQ ID NO: 317443
caaacagugcuguagguuu

SEQ ID NO: 491290 - RNA, 19 nt, Artificial Sequence
  Description of Artificial Sequence: Synthetic oligonucleotide
  Antisense Strand to SEQ ID NO: 491289
aaaccuacagcacuguuug

SEQ ID NO: 491291 - RNA, 19 nt, Artificial Sequence
  Description of Artificial Sequence: Synthetic oligonucleotide
  Sense strand starting at position 285 of SEQ ID NO: 317443
auuauuuccuaugcguaaa

SEQ ID NO: 491292 - RNA, 19 nt, Artificial Sequence
  Description of Artificial Sequence: Synthetic oligonucleotide
  Antisense Strand to SEQ ID NO: 491291
uuuacgcauaggaaauaau

SEQ ID NO: 491293 - RNA, 19 nt, Artificial Sequence
  Description of Artificial Sequence: Synthetic oligonucleotide
  Sense strand starting at position 1186 of SEQ ID NO: 317443
uuugucugugaggaucuau

SEQ ID NO: 491294 - RNA, 19 nt, Artificial Sequence
  Description of Artificial Sequence: Synthetic oligonucleotide
  Antisense Strand to SEQ ID NO: 491293
auagauccucacagacaaa

SEQ ID NO: 491295 - RNA, 19 nt, Artificial Sequence
  Description of Artificial Sequence: Synthetic oligonucleotide
  Sense strand starting at position 1257 of SEQ ID NO: 317443
cagucugaaccauggauau

SEQ ID NO: 491296 - RNA, 19 nt, Artificial Sequence
  Description of Artificial Sequence: Synthetic oligonucleotide
  Antisense Strand to SEQ ID NO: 491295
auauccaugguucagacug

SEQ ID NO: 491297 - RNA, 19 nt, Artificial Sequence
  Description of Artificial Sequence: Synthetic oligonucleotide
  Sense strand starting at position 1323 of SEQ ID NO: 317443
augaaacuucccugccaug

SEQ ID NO: 491298 - RNA, 19 nt, Artificial Sequence
  Description of Artificial Sequence: Synthetic oligonucleotide
  Antisense Strand to SEQ ID NO: 491297
cauggcagggaaguuucau

SEQ ID NO: 491299 - RNA, 19 nt, Artificial Sequence
  Description of Artificial Sequence: Synthetic oligonucleotide
  Sense strand starting at position 2418 of SEQ ID NO: 317443
gauuuacugagaugcgugu

SEQ ID NO: 491300 - RNA, 19 nt, Artificial Sequence
  Description of Artificial Sequence: Synthetic oligonucleotide
  Antisense Strand to SEQ ID NO: 491299
acacgcaucucaguaaauc

SEQ ID NO: 491301 - RNA, 19 nt, Artificial Sequence
  Description of Artificial Sequence: Synthetic oligonucleotide
  Sense strand starting at position 2424 of SEQ ID NO: 317443
cugagaugcgugucguguu

SEQ ID NO: 491302 - RNA, 19 nt, Artificial Sequence
  Description of Artificial Sequence: Synthetic oligonucleotide
  Antisense Strand to SEQ ID NO: 491301
aacacgacacgcaucucag

SEQ ID NO: 491303 - RNA, 19 nt, Artificial Sequence
  Description of Artificial Sequence: Synthetic oligonucleotide
  Sense strand starting at position 2437 of SEQ ID NO: 317443
cguguucuugcgcuuuauc

SEQ ID NO: 491304 - RNA, 19 nt, Artificial Sequence
  Description of Artificial Sequence: Synthetic oligonucleotide
  Antisense Strand to SEQ ID NO: 491303
gauaaagcgcaagaacacg

SEQ ID NO: 491305 - RNA, 19 nt, Artificial Sequence
  Description of Artificial Sequence: Synthetic oligonucleotide
  Sense strand starting at position 2438 of SEQ ID NO: 317443
guguucuugcgcuuuaucu

SEQ ID NO: 491306 - RNA, 19 nt, Artificial Sequence
  Description of Artificial Sequence: Synthetic oligonucleotide
  Antisense Strand to SEQ ID NO: 491305
agauaaagcgcaagaacac

SEQ ID NO: 491307 - RNA, 19 nt, Artificial Sequence
  Description of Artificial Sequence: Synthetic oligonucleotide
  Sense strand starting at position 2439 of SEQ ID NO: 317443
uguucuugcgcuuuaucuu

SEQ ID NO: 491308 - RNA, 19 nt, Artificial Sequence
  Description of Artificial Sequence: Synthetic oligonucleotide
  Antisense Strand to SEQ ID NO: 491307
aagauaaagcgcaagaaca

SEQ ID NO: 491309 - RNA, 19 nt, Artificial Sequence
  Description of Artificial Sequence: Synthetic oligonucleotide
  Sense strand starting at position 2684 of SEQ ID NO: 317443
aggcauuaugaauagcuuu

SEQ ID NO: 491310 - RNA, 19 nt, Artificial Sequence
  Description of Artificial Sequence: Synthetic oligonucleotide
  Antisense Strand to SEQ ID NO: 491309
aaagcuauucauaaugccu

SEQ ID NO: 491311 - RNA, 19 nt, Artificial Sequence
  Description of Artificial Sequence: Synthetic oligonucleotide
  Sense strand starting at position 2716 of SEQ ID NO: 317443
uuagaacaaugucuuaguu

SEQ ID NO: 491312 - RNA, 19 nt, Artificial Sequence
  Description of Artificial Sequence: Synthetic oligonucleotide
  Antisense Strand to SEQ ID NO: 491311
aacuaagacauuguucuaa

SEQ ID NO: 491313 - RNA, 19 nt, Artificial Sequence
  Description of Artificial Sequence: Synthetic oligonucleotide
  Sense strand starting at position 2737 of SEQ ID NO: 317443
aagcucuuauguuugagga

SEQ ID NO: 491314 - RNA, 19 nt, Artificial Sequence
  Description of Artificial Sequence: Synthetic oligonucleotide
  Antisense Strand to SEQ ID NO: 491313
uccucaaacauaagagcuu

SEQ ID NO: 491315 - RNA, 19 nt, Artificial Sequence
  Description of Artificial Sequence: Synthetic oligonucleotide
  Sense strand starting at position 2738 of SEQ ID NO: 317443
agcucuuauguuugaggaa

SEQ ID NO: 491316 - RNA, 19 nt, Artificial Sequence
  Description of Artificial Sequence: Synthetic oligonucleotide
  Antisense Strand to SEQ ID NO: 491315
uuccucaaacauaagagcu

SEQ ID NO: 491317 - RNA, 19 nt, Artificial Sequence
  Description of Artificial Sequence: Synthetic oligonucleotide
  Sense strand starting at position 2812 of SEQ ID NO: 317443
aggagauccuuagcauaca

SEQ ID NO: 491318 - RNA, 19 nt, Artificial Sequence
  Description of Artificial Sequence: Synthetic oligonucleotide
  Antisense Strand to SEQ ID NO: 491317
uguaugcuaaggaucuccu

SEQ ID NO: 491319 - RNA, 19 nt, Artificial Sequence
  Description of Artificial Sequence: Synthetic oligonucleotide
  Sense strand starting at position 2836 of SEQ ID NO: 317443
cagagaaggguuugcaacu

SEQ ID NO: 491320 - RNA, 19 nt, Artificial Sequence
  Description of Artificial Sequence: Synthetic oligonucleotide
  Antisense Strand to SEQ ID NO: 491319
aguugcaaacccuucucug

SEQ ID NO: 491321 - RNA, 19 nt, Artificial Sequence
  Description of Artificial Sequence: Synthetic oligonucleotide
  Sense strand starting at position 2837 of SEQ ID NO: 317443
agagaaggguuugcaacuu

SEQ ID NO: 491322 - RNA, 19 nt, Artificial Sequence
  Description of Artificial Sequence: Synthetic oligonucleotide
  Antisense Strand to SEQ ID NO: 491321
aaguugcaaacccuucucu

SEQ ID NO: 491323 - RNA, 19 nt, Artificial Sequence
  Description of Artificial Sequence: Synthetic oligonucleotide
  Sense strand starting at position 2933 of SEQ ID NO: 317443
guuuacuuuguccagauua

SEQ ID NO: 491324 - RNA, 19 nt, Artificial Sequence
  Description of Artificial Sequence: Synthetic oligonucleotide
  Antisense Strand to SEQ ID NO: 491323
uaaucuggacaaaguaaac

SEQ ID NO: 491325 - RNA, 19 nt, Artificial Sequence
  Description of Artificial Sequence: Synthetic oligonucleotide
  Sense strand starting at position 2935 of SEQ ID NO: 317443
uuacuuuguccagauuaca

SEQ ID NO: 491326 - RNA, 19 nt, Artificial Sequence
  Description of Artificial Sequence: Synthetic oligonucleotide
  Antisense Strand to SEQ ID NO: 491325
uguaaucuggacaaaguaa

SEQ ID NO: 491327 - RNA, 19 nt, Artificial Sequence
  Description of Artificial Sequence: Synthetic oligonucleotide
  Sense strand starting at position 2944 of SEQ ID NO: 317443
ccagauuacagccgaagau

SEQ ID NO: 491328 - RNA, 19 nt, Artificial Sequence
  Description of Artificial Sequence: Synthetic oligonucleotide
  Antisense Strand to SEQ ID NO: 491327
aucuucggcuguaaucugg

SEQ ID NO: 491329 - RNA, 19 nt, Artificial Sequence
  Description of Artificial Sequence: Synthetic oligonucleotide
  Sense strand starting at position 3010 of SEQ ID NO: 317443
cuuguaucuucucugaaug

SEQ ID NO: 491330 - RNA, 19 nt, Artificial Sequence
  Description of Artificial Sequence: Synthetic oligonucleotide
  Antisense Strand to SEQ ID NO: 491329
cauucagagaagauacaag

SEQ ID NO: 491331 - RNA, 19 nt, Artificial Sequence
  Description of Artificial Sequence: Synthetic oligonucleotide
  Sense strand starting at position 3015 of SEQ ID NO: 317443
aucuucucugaauggaauu

SEQ ID NO: 491332 - RNA, 19 nt, Artificial Sequence
  Description of Artificial Sequence: Synthetic oligonucleotide
  Antisense Strand to SEQ ID NO: 491331
aauuccauucagagaagau

SEQ ID NO: 491333 - RNA, 19 nt, Artificial Sequence
  Description of Artificial Sequence: Synthetic oligonucleotide
  Sense strand starting at position 3061 of SEQ ID NO: 317443
agucacauggccuaaggau

SEQ ID NO: 491334 - RNA, 19 nt, Artificial Sequence
  Description of Artificial Sequence: Synthetic oligonucleotide
  Antisense Strand to SEQ ID NO: 491333
auccuuaggccaugugacu

SEQ ID NO: 491335 - RNA, 19 nt, Artificial Sequence
  Description of Artificial Sequence: Synthetic oligonucleotide
  Sense strand starting at position 3223 of SEQ ID NO: 317443
ccaauuaagacccgaguga

SEQ ID NO: 491336 - RNA, 19 nt, Artificial Sequence
  Description of Artificial Sequence: Synthetic oligonucleotide
  Antisense Strand to SEQ ID NO: 491335
ucacucgggucuuaauugg

SEQ ID NO: 491337 - RNA, 19 nt, Artificial Sequence
  Description of Artificial Sequence: Synthetic oligonucleotide
  Sense strand starting at position 3234 of SEQ ID NO: 317443
ccgagugaggcugaauaaa

SEQ ID NO: 491338 - RNA, 19 nt, Artificial Sequence
  Description of Artificial Sequence: Synthetic oligonucleotide
  Antisense Strand to SEQ ID NO: 491337
uuuauucagccucacucgg

SEQ ID NO: 491339 - RNA, 19 nt, Artificial Sequence
  Description of Artificial Sequence: Synthetic oligonucleotide
  Sense strand starting at position 3265 of SEQ ID NO: 317443
uuuagcuaucuuuaaggaa

SEQ ID NO: 491340 - RNA, 19 nt, Artificial Sequence
  Description of Artificial Sequence: Synthetic oligonucleotide
  Antisense Strand to SEQ ID NO: 491339
uuccuuaaagauagcuaaa

SEQ ID NO: 491341 - RNA, 19 nt, Artificial Sequence
  Description of Artificial Sequence: Synthetic oligonucleotide
  Sense strand starting at position 3351 of SEQ ID NO: 317443
ugguuuaaaguguacaauu

SEQ ID NO: 491342 - RNA, 19 nt, Artificial Sequence
  Description of Artificial Sequence: Synthetic oligonucleotide
  Antisense Strand to SEQ ID NO: 491341
aauuguacacuuuaaacca

SEQ ID NO: 491343 - RNA, 19 nt, Artificial Sequence
  Description of Artificial Sequence: Synthetic oligonucleotide
  Sense strand starting at position 3379 of SEQ ID NO: 317443
uuaguauaugcacagaauu

SEQ ID NO: 491344 - RNA, 19 nt, Artificial Sequence
  Description of Artificial Sequence: Synthetic oligonucleotide
  Antisense Strand to SEQ ID NO: 491343
aauucugugcauauacuaa

SEQ ID NO: 491345 - RNA, 19 nt, Artificial Sequence
  Description of Artificial Sequence: Synthetic oligonucleotide
  Sense strand starting at position 3563 of SEQ ID NO: 317443
acuaauauauggucuuugu

SEQ ID NO: 491346 - RNA, 19 nt, Artificial Sequence
  Description of Artificial Sequence: Synthetic oligonucleotide
  Antisense Strand to SEQ ID NO: 491345
acaaagaccauauauuagu

SEQ ID NO: 491347 - RNA, 19 nt, Artificial Sequence
  Description of Artificial Sequence: Synthetic oligonucleotide
  Sense strand starting at position 3657 of SEQ ID NO: 317443
gcugaaucguacuccauuu

SEQ ID NO: 491348 - RNA, 19 nt, Artificial Sequence
  Description of Artificial Sequence: Synthetic oligonucleotide
  Antisense Strand to SEQ ID NO: 491347
aaauggaguacgauucagc

SEQ ID NO: 491349 - RNA, 19 nt, Artificial Sequence
  Description of Artificial Sequence: Synthetic oligonucleotide
  Sense strand starting at position 3808 of SEQ ID NO: 317443
cacaccuaagaguggaauu

SEQ ID NO: 491350 - RNA, 19 nt, Artificial Sequence
  Description of Artificial Sequence: Synthetic oligonucleotide
  Antisense Strand to SEQ ID NO: 491349
aauuccacucuuaggugug

SEQ ID NO: 491351 - RNA, 19 nt, Artificial Sequence
  Description of Artificial Sequence: Synthetic oligonucleotide
  Sense strand starting at position 3820 of SEQ ID NO: 317443
uggaauuggugagucauaa

SEQ ID NO: 491352 - RNA, 19 nt, Artificial Sequence
  Description of Artificial Sequence: Synthetic oligonucleotide
  Antisense Strand to SEQ ID NO: 491351
uuaugacucaccaauucca

SEQ ID NO: 491353 - RNA, 19 nt, Artificial Sequence
  Description of Artificial Sequence: Synthetic oligonucleotide
  Sense strand starting at position 3832 of SEQ ID NO: 317443
gucauaagauaacuguguu

SEQ ID NO: 491354 - RNA, 19 nt, Artificial Sequence
  Description of Artificial Sequence: Synthetic oligonucleotide
  Antisense Strand to SEQ ID NO: 491353
aacacaguuaucuuaugac

SEQ ID NO: 491355 - RNA, 19 nt, Artificial Sequence
  Description of Artificial Sequence: Synthetic oligonucleotide
  Sense strand starting at position 3835 of SEQ ID NO: 317443
auaagauaacuguguuuag

SEQ ID NO: 491356 - RNA, 19 nt, Artificial Sequence
  Description of Artificial Sequence: Synthetic oligonucleotide
  Antisense Strand to SEQ ID NO: 491355
cuaaacacaguuaucuuau

SEQ ID NO: 491357 - RNA, 19 nt, Artificial Sequence
  Description of Artificial Sequence: Synthetic oligonucleotide
  Sense strand starting at position 92 of SEQ ID NO: 317444
ucuagaauauguguaugau

SEQ ID NO: 491358 - RNA, 19 nt, Artificial Sequence
  Description of Artificial Sequence: Synthetic oligonucleotide
  Antisense Strand to SEQ ID NO: 491357
aucauacacauauucuaga

SEQ ID NO: 491359 - RNA, 19 nt, Artificial Sequence
  Description of Artificial Sequence: Synthetic oligonucleotide
  Sense strand starting at position 180 of SEQ ID NO: 317444
aggaaaugagagugguauc

SEQ ID NO: 491360 - RNA, 19 nt, Artificial Sequence
  Description of Artificial Sequence: Synthetic oligonucleotide
  Antisense Strand to SEQ ID NO: 491359
gauaccacucucauuuccu

SEQ ID NO: 491361 - RNA, 19 nt, Artificial Sequence
  Description of Artificial Sequence: Synthetic oligonucleotide
  Sense strand starting at position 181 of SEQ ID NO: 317444
ggaaaugagagugguaucu

SEQ ID NO: 491362 - RNA, 19 nt, Artificial Sequence
  Description of Artificial Sequence: Synthetic oligonucleotide
  Antisense Strand to SEQ ID NO: 491361
agauaccacucucauuucc

SEQ ID NO: 491363 - RNA, 19 nt, Artificial Sequence
  Description of Artificial Sequence: Synthetic oligonucleotide
  Sense strand starting at position 187 of SEQ ID NO: 317444
gagagugguaucuaaagca

SEQ ID NO: 491364 - RNA, 19 nt, Artificial Sequence
  Description of Artificial Sequence: Synthetic oligonucleotide
  Antisense Strand to SEQ ID NO: 491363
ugcuuuagauaccacucuc

SEQ ID NO: 491365 - RNA, 19 nt, Artificial Sequence
  Description of Artificial Sequence: Synthetic oligonucleotide
  Sense strand starting at position 194 of SEQ ID NO: 317444
guaucuaaagcauaaguga

SEQ ID NO: 491366 - RNA, 19 nt, Artificial Sequence
  Description of Artificial Sequence: Synthetic oligonucleotide
  Antisense Strand to SEQ ID NO: 491365
ucacuuaugcuuuagauac

SEQ ID NO: 491367 - RNA, 19 nt, Artificial Sequence
  Description of Artificial Sequence: Synthetic oligonucleotide
  Sense strand starting at position 270 of SEQ ID NO: 317444
ggcagaauucauggguaca

SEQ ID NO: 491368 - RNA, 19 nt, Artificial Sequence
  Description of Artificial Sequence: Synthetic oligonucleotide
  Antisense Strand to SEQ ID NO: 491367
uguacccaugaauucugcc

SEQ ID NO: 491369 - RNA, 19 nt, Artificial Sequence
  Description of Artificial Sequence: Synthetic oligonucleotide
  Sense strand starting at position 536 of SEQ ID NO: 317444
caguaugacugugcaauuu

SEQ ID NO: 491370 - RNA, 19 nt, Artificial Sequence
  Description of Artificial Sequence: Synthetic oligonucleotide
  Antisense Strand to SEQ ID NO: 491369
aaauugcacagucauacug

SEQ ID NO: 491371 - RNA, 19 nt, Artificial Sequence
  Description of Artificial Sequence: Synthetic oligonucleotide
  Sense strand starting at position 607 of SEQ ID NO: 317444
ggguuuaaucaggguugag

SEQ ID NO: 491372 - RNA, 19 nt, Artificial Sequence
  Description of Artificial Sequence: Synthetic oligonucleotide
  Antisense Strand to SEQ ID NO: 491371
cucaacccugauuaaaccc

SEQ ID NO: 491373 - RNA, 19 nt, Artificial Sequence
  Description of Artificial Sequence: Synthetic oligonucleotide
  Sense strand starting at position 629 of SEQ ID NO: 317444
uugucagaaguaugaugga

SEQ ID NO: 491374 - RNA, 19 nt, Artificial Sequence
  Description of Artificial Sequence: Synthetic oligonucleotide
  Antisense Strand to SEQ ID NO: 491373
uccaucauacuucugacaa

SEQ ID NO: 491375 - RNA, 19 nt, Artificial Sequence
  Description of Artificial Sequence: Synthetic oligonucleotide
  Sense strand starting at position 707 of SEQ ID NO: 317444
uggaaucgaggcuggauaa

SEQ ID NO: 491376 - RNA, 19 nt, Artificial Sequence
  Description of Artificial Sequence: Synthetic oligonucleotide
  Antisense Strand to SEQ ID NO: 491375
uuauccagccucgauucca

SEQ ID NO: 491377 - RNA, 19 nt, Artificial Sequence
  Description of Artificial Sequence: Synthetic oligonucleotide
  Sense strand starting at position 726 of SEQ ID NO: 317444
ggagcagucagugagaaca

SEQ ID NO: 491378 - RNA, 19 nt, Artificial Sequence
  Description of Artificial Sequence: Synthetic oligonucleotide
  Antisense Strand to SEQ ID NO: 491377
uguucucacugacugcucc

SEQ ID NO: 491379 - RNA, 19 nt, Artificial Sequence
  Description of Artificial Sequence: Synthetic oligonucleotide
  Sense strand starting at position 849 of SEQ ID NO: 317444
gagcaaggauguuuauaac

SEQ ID NO: 491380 - RNA, 19 nt, Artificial Sequence
  Description of Artificial Sequence: Synthetic oligonucleotide
  Antisense Strand to SEQ ID NO: 491379
guuauaaacauccuugcuc

SEQ ID NO: 491381 - RNA, 19 nt, Artificial Sequence
  Description of Artificial Sequence: Synthetic oligonucleotide
  Sense strand starting at position 946 of SEQ ID NO: 317444
uugaauacuugcucaauga

SEQ ID NO: 491382 - RNA, 19 nt, Artificial Sequence
  Description of Artificial Sequence: Synthetic oligonucleotide
  Antisense Strand to SEQ ID NO: 491381
ucauugagcaaguauucaa

SEQ ID NO: 491383 - RNA, 19 nt, Artificial Sequence
  Description of Artificial Sequence: Synthetic oligonucleotide
  Sense strand starting at position 1072 of SEQ ID NO: 317444
ucuuaagugcucuaauaag

SEQ ID NO: 491384 - RNA, 19 nt, Artificial Sequence
  Description of Artificial Sequence: Synthetic oligonucleotide
  Antisense Strand to SEQ ID NO: 491383
cuuauuagagcacuuaaga

SEQ ID NO: 491385 - RNA, 19 nt, Artificial Sequence
  Description of Artificial Sequence: Synthetic oligonucleotide
  Sense strand starting at position 1120 of SEQ ID NO: 317444
ugcaaugacuaacuguaga

SEQ ID NO: 491386 - RNA, 19 nt, Artificial Sequence
  Description of Artificial Sequence: Synthetic oligonucleotide
  Antisense Strand to SEQ ID NO: 491385
ucuacaguuagucauugca

SEQ ID NO: 491387 - RNA, 19 nt, Artificial Sequence
  Description of Artificial Sequence: Synthetic oligonucleotide
  Sense strand starting at position 1167 of SEQ ID NO: 317444
guaacaauagcucauuaga

SEQ ID NO: 491388 - RNA, 19 nt, Artificial Sequence
  Description of Artificial Sequence: Synthetic oligonucleotide
  Antisense Strand to SEQ ID NO: 491387
ucuaaugagcuauuguuac

SEQ ID NO: 491389 - RNA, 19 nt, Artificial Sequence
  Description of Artificial Sequence: Synthetic oligonucleotide
  Sense strand starting at position 1180 of SEQ ID NO: 317444
auuagauagcaguggaaga

SEQ ID NO: 491390 - RNA, 19 nt, Artificial Sequence
  Description of Artificial Sequence: Synthetic oligonucleotide
  Antisense Strand to SEQ ID NO: 491389
ucuuccacugcuaucuaau

SEQ ID NO: 491391 - RNA, 19 nt, Artificial Sequence
  Description of Artificial Sequence: Synthetic oligonucleotide
  Sense strand starting at position 1239 of SEQ ID NO: 317444
ccaucugagucccuugaaa

SEQ ID NO: 491392 - RNA, 19 nt, Artificial Sequence
  Description of Artificial Sequence: Synthetic oligonucleotide
  Antisense Strand to SEQ ID NO: 491391
uuucaagggacucagaugg

SEQ ID NO: 491393 - RNA, 19 nt, Artificial Sequence
  Description of Artificial Sequence: Synthetic oligonucleotide
  Sense strand starting at position 1285 of SEQ ID NO: 317444
agguaaaugacacgaguuc

SEQ ID NO: 491394 - RNA, 19 nt, Artificial Sequence
  Description of Artificial Sequence: Synthetic oligonucleotide
  Antisense Strand to SEQ ID NO: 491393
gaacucgugucauuuaccu

SEQ ID NO: 491395 - RNA, 19 nt, Artificial Sequence
  Description of Artificial Sequence: Synthetic oligonucleotide
  Sense strand starting at position 1286 of SEQ ID NO: 317444
gguaaaugacacgaguucu

SEQ ID NO: 491396 - RNA, 19 nt, Artificial Sequence
  Description of Artificial Sequence: Synthetic oligonucleotide
  Antisense Strand to SEQ ID NO: 491395
agaacucgugucauuuacc

SEQ ID NO: 491397 - RNA, 19 nt, Artificial Sequence
  Description of Artificial Sequence: Synthetic oligonucleotide
  Sense strand starting at position 2254 of SEQ ID NO: 317444
gagacaggucgguggagau

SEQ ID NO: 491398 - RNA, 19 nt, Artificial Sequence
  Description of Artificial Sequence: Synthetic oligonucleotide
  Antisense Strand to SEQ ID NO: 491397
aucuccaccgaccugucuc

SEQ ID NO: 491399 - RNA, 19 nt, Artificial Sequence
  Description of Artificial Sequence: Synthetic oligonucleotide
  Sense strand starting at position 2255 of SEQ ID NO: 317444
agacaggucgguggagaua

SEQ ID NO: 491400 - RNA, 19 nt, Artificial Sequence
  Description of Artificial Sequence: Synthetic oligonucleotide
  Antisense Strand to SEQ ID NO: 491399
uaucuccaccgaccugucu

SEQ ID NO: 491401 - RNA, 19 nt, Artificial Sequence
  Description of Artificial Sequence: Synthetic oligonucleotide
  Sense strand starting at position 2805 of SEQ ID NO: 317444
uauaaagggcuguaauuau

SEQ ID NO: 491402 - RNA, 19 nt, Artificial Sequence
  Description of Artificial Sequence: Synthetic oligonucleotide
  Antisense Strand to SEQ ID NO: 491401
auaauuacagcccuuuaua

SEQ ID NO: 491403 - RNA, 19 nt, Artificial Sequence
  Description of Artificial Sequence: Synthetic oligonucleotide
  Sense strand starting at position 2820 of SEQ ID NO: 317444
uuaucuugugaacaguaca

SEQ ID NO: 491404 - RNA, 19 nt, Artificial Sequence
  Description of Artificial Sequence: Synthetic oligonucleotide
  Antisense Strand to SEQ ID NO: 491403
uguacuguucacaagauaa

SEQ ID NO: 491405 - RNA, 19 nt, Artificial Sequence
  Description of Artificial Sequence: Synthetic oligonucleotide
  Sense strand starting at position 2823 of SEQ ID NO: 317444
ucuugugaacaguacaacu

SEQ ID NO: 491406 - RNA, 19 nt, Artificial Sequence
  Description of Artificial Sequence: Synthetic oligonucleotide
  Antisense Strand to SEQ ID NO: 491405
aguuguacuguucacaaga

SEQ ID NO: 491407 - RNA, 19 nt, Artificial Sequence
  Description of Artificial Sequence: Synthetic oligonucleotide
  Sense strand starting at position 2858 of SEQ ID NO: 317444
gggugcguccauuaauuug

SEQ ID NO: 491408 - RNA, 19 nt, Artificial Sequence
  Description of Artificial Sequence: Synthetic oligonucleotide
  Antisense Strand to SEQ ID NO: 491407
caaauuaauggacgcaccc

SEQ ID NO: 491409 - RNA, 19 nt, Artificial Sequence
  Description of Artificial Sequence: Synthetic oligonucleotide
  Sense strand starting at position 2872 of SEQ ID NO: 317444
auuuguuaacugugguauc

SEQ ID NO: 491410 - RNA, 19 nt, Artificial Sequence
  Description of Artificial Sequence: Synthetic oligonucleotide
  Antisense Strand to SEQ ID NO: 491409
gauaccacaguuaacaaau

SEQ ID NO: 491411 - RNA, 19 nt, Artificial Sequence
  Description of Artificial Sequence: Synthetic oligonucleotide
  Sense strand starting at position 2990 of SEQ ID NO: 317444
gucucucaauccuugagga

SEQ ID NO: 491412 - RNA, 19 nt, Artificial Sequence
  Description of Artificial Sequence: Synthetic oligonucleotide
  Antisense Strand to SEQ ID NO: 491411
uccucaaggauugagagac

SEQ ID NO: 491413 - RNA, 19 nt, Artificial Sequence
  Description of Artificial Sequence: Synthetic oligonucleotide
  Sense strand starting at position 2992 of SEQ ID NO: 317444
cucucaauccuugaggagu

SEQ ID NO: 491414 - RNA, 19 nt, Artificial Sequence
  Description of Artificial Sequence: Synthetic oligonucleotide
  Antisense Strand to SEQ ID NO: 491413
acuccucaaggauugagag

SEQ ID NO: 491415 - RNA, 19 nt, Artificial Sequence
  Description of Artificial Sequence: Synthetic oligonucleotide
  Sense strand starting at position 3054 of SEQ ID NO: 317444
aauagaagugguggaguuu

SEQ ID NO: 491416 - RNA, 19 nt, Artificial Sequence
  Description of Artificial Sequence: Synthetic oligonucleotide
  Antisense Strand to SEQ ID NO: 491415
aaacuccaccacuucuauu

SEQ ID NO: 491417 - RNA, 19 nt, Artificial Sequence
  Description of Artificial Sequence: Synthetic oligonucleotide
  Sense strand starting at position 3108 of SEQ ID NO: 317444
gguguugaggaauaaguug

SEQ ID NO: 491418 - RNA, 19 nt, Artificial Sequence
  Description of Artificial Sequence: Synthetic oligonucleotide
  Antisense Strand to SEQ ID NO: 491417
caacuuauuccucaacacc

SEQ ID NO: 491419 - RNA, 19 nt, Artificial Sequence
  Description of Artificial Sequence: Synthetic oligonucleotide
  Sense strand starting at position 3239 of SEQ ID NO: 317444
uugugaauguuaucuggaa

SEQ ID NO: 491420 - RNA, 19 nt, Artificial Sequence
  Description of Artificial Sequence: Synthetic oligonucleotide
  Antisense Strand to SEQ ID NO: 491419
uuccagauaacauucacaa

SEQ ID NO: 491421 - RNA, 19 nt, Artificial Sequence
  Description of Artificial Sequence: Synthetic oligonucleotide
  Sense strand starting at position 3240 of SEQ ID NO: 317444
ugugaauguuaucuggaau

SEQ ID NO: 491422 - RNA, 19 nt, Artificial Sequence
  Description of Artificial Sequence: Synthetic oligonucleotide
  Antisense Strand to SEQ ID NO: 491421
auuccagauaacauucaca

SEQ ID NO: 491423 - RNA, 19 nt, Artificial Sequence
  Description of Artificial Sequence: Synthetic oligonucleotide
  Sense strand starting at position 3246 of SEQ ID NO: 317444
uguuaucuggaauggaacu

SEQ ID NO: 491424 - RNA, 19 nt, Artificial Sequence
  Description of Artificial Sequence: Synthetic oligonucleotide
  Antisense Strand to SEQ ID NO: 491423
aguuccauuccagauaaca

SEQ ID NO: 491425 - RNA, 19 nt, Artificial Sequence
  Description of Artificial Sequence: Synthetic oligonucleotide
  Sense strand starting at position 3247 of SEQ ID NO: 317444
guuaucuggaauggaacua

SEQ ID NO: 491426 - RNA, 19 nt, Artificial Sequence
  Description of Artificial Sequence: Synthetic oligonucleotide
  Antisense Strand to SEQ ID NO: 491425
uaguuccauuccagauaac

SEQ ID NO: 491427 - RNA, 19 nt, Artificial Sequence
  Description of Artificial Sequence: Synthetic oligonucleotide
  Sense strand starting at position 3284 of SEQ ID NO: 317444
gugcguauaugaaucggaa

SEQ ID NO: 491428 - RNA, 19 nt, Artificial Sequence
  Description of Artificial Sequence: Synthetic oligonucleotide
  Antisense Strand to SEQ ID NO: 491427
uuccgauucauauacgcac

SEQ ID NO: 491429 - RNA, 19 nt, Artificial Sequence
  Description of Artificial Sequence: Synthetic oligonucleotide
  Sense strand starting at position 3322 of SEQ ID NO: 317444
gauagagauguguguaaua

SEQ ID NO: 491430 - RNA, 19 nt, Artificial Sequence
  Description of Artificial Sequence: Synthetic oligonucleotide
  Antisense Strand to SEQ ID NO: 491429
uauuacacacaucucuauc

SEQ ID NO: 491431 - RNA, 19 nt, Artificial Sequence
  Description of Artificial Sequence: Synthetic oligonucleotide
  Sense strand starting at position 3324 of SEQ ID NO: 317444
uagagauguguguaauauu

SEQ ID NO: 491432 - RNA, 19 nt, Artificial Sequence
  Description of Artificial Sequence: Synthetic oligonucleotide
  Antisense Strand to SEQ ID NO: 491431
aauauuacacacaucucua

SEQ ID NO: 491433 - RNA, 19 nt, Artificial Sequence
  Description of Artificial Sequence: Synthetic oligonucleotide
  Sense strand starting at position 3503 of SEQ ID NO: 317444
caugaaaugucuucgaaag

SEQ ID NO: 491434 - RNA, 19 nt, Artificial Sequence
  Description of Artificial Sequence: Synthetic oligonucleotide
  Antisense Strand to SEQ ID NO: 491433
cuuucgaagacauuucaug

SEQ ID NO: 491435 - RNA, 19 nt, Artificial Sequence
  Description of Artificial Sequence: Synthetic oligonucleotide
  Sense strand starting at position 3687 of SEQ ID NO: 317444
ggugccacuguauaucaaa

SEQ ID NO: 491436 - RNA, 19 nt, Artificial Sequence
  Description of Artificial Sequence: Synthetic oligonucleotide
  Antisense Strand to SEQ ID NO: 491435
uuugauauacaguggcacc

SEQ ID NO: 491437 - RNA, 19 nt, Artificial Sequence
  Description of Artificial Sequence: Synthetic oligonucleotide
  Sense strand starting at position 146 of SEQ ID NO: 317445
ugggaacucugucucugaa

SEQ ID NO: 491438 - RNA, 19 nt, Artificial Sequence
  Description of Artificial Sequence: Synthetic oligonucleotide
  Antisense Strand to SEQ ID NO: 491437
uucagagacagaguuccca

SEQ ID NO: 491439 - RNA, 19 nt, Artificial Sequence
  Description of Artificial Sequence: Synthetic oligonucleotide
  Sense strand starting at position 148 of SEQ ID NO: 317445
ggaacucugucucugaaag

SEQ ID NO: 491440 - RNA, 19 nt, Artificial Sequence
  Description of Artificial Sequence: Synthetic oligonucleotide
  Antisense Strand to SEQ ID NO: 491439
cuuucagagacagaguucc

SEQ ID NO: 491441 - RNA, 19 nt, Artificial Sequence
  Description of Artificial Sequence: Synthetic oligonucleotide
  Sense strand starting at position 149 of SEQ ID NO: 317445
gaacucugucucugaaagc

SEQ ID NO: 491442 - RNA, 19 nt, Artificial Sequence
  Description of Artificial Sequence: Synthetic oligonucleotide
  Antisense Strand to SEQ ID NO: 491441
gcuuucagagacagaguuc

SEQ ID NO: 491443 - RNA, 19 nt, Artificial Sequence
  Description of Artificial Sequence: Synthetic oligonucleotide
  Sense strand starting at position 217 of SEQ ID NO: 317445
gcuggacaucaggauguau

SEQ ID NO: 491444 - RNA, 19 nt, Artificial Sequence
  Description of Artificial Sequence: Synthetic oligonucleotide
  Antisense Strand to SEQ ID NO: 491443
auacauccugauguccagc

SEQ ID NO: 491445 - RNA, 19 nt, Artificial Sequence
  Description of Artificial Sequence: Synthetic oligonucleotide
  Sense strand starting at position 219 of SEQ ID NO: 317445
uggacaucaggauguauac

SEQ ID NO: 491446 - RNA, 19 nt, Artificial Sequence
  Description of Artificial Sequence: Synthetic oligonucleotide
  Antisense Strand to SEQ ID NO: 491445
guauacauccugaugucca

SEQ ID NO: 491447 - RNA, 19 nt, Artificial Sequence
  Description of Artificial Sequence: Synthetic oligonucleotide
  Sense strand starting at position 249 of SEQ ID NO: 317445
gaggcuuagaguugggaag

SEQ ID NO: 491448 - RNA, 19 nt, Artificial Sequence
  Description of Artificial Sequence: Synthetic oligonucleotide
  Antisense Strand to SEQ ID NO: 491447
cuucccaacucuaagccuc

SEQ ID NO: 491449 - RNA, 19 nt, Artificial Sequence
  Description of Artificial Sequence: Synthetic oligonucleotide
  Sense strand starting at position 250 of SEQ ID NO: 317445
aggcuuagaguugggaaga

SEQ ID NO: 491450 - RNA, 19 nt, Artificial Sequence
  Description of Artificial Sequence: Synthetic oligonucleotide
  Antisense Strand to SEQ ID NO: 491449
ucuucccaacucuaagccu

SEQ ID NO: 491451 - RNA, 19 nt, Artificial Sequence
  Description of Artificial Sequence: Synthetic oligonucleotide
  Sense strand starting at position 270 of SEQ ID NO: 317445
aagaguuagaucgagggca

SEQ ID NO: 491452 - RNA, 19 nt, Artificial Sequence
  Description of Artificial Sequence: Synthetic oligonucleotide
  Antisense Strand to SEQ ID NO: 491451
ugcccucgaucuaacucuu

SEQ ID NO: 491453 - RNA, 19 nt, Artificial Sequence
  Description of Artificial Sequence: Synthetic oligonucleotide
  Sense strand starting at position 271 of SEQ ID NO: 317445
agaguuagaucgagggcaa

SEQ ID NO: 491454 - RNA, 19 nt, Artificial Sequence
  Description of Artificial Sequence: Synthetic oligonucleotide
  Antisense Strand to SEQ ID NO: 491453
uugcccucgaucuaacucu

SEQ ID NO: 491455 - RNA, 19 nt, Artificial Sequence
  Description of Artificial Sequence: Synthetic oligonucleotide
  Sense strand starting at position 272 of SEQ ID NO: 317445
gaguuagaucgagggcaag

SEQ ID NO: 491456 - RNA, 19 nt, Artificial Sequence
  Description of Artificial Sequence: Synthetic oligonucleotide
  Antisense Strand to SEQ ID NO: 491455
cuugcccucgaucuaacuc

SEQ ID NO: 491457 - RNA, 19 nt, Artificial Sequence
  Description of Artificial Sequence: Synthetic oligonucleotide
  Sense strand starting at position 319 of SEQ ID NO: 317445
aauggauacguguagaggu

SEQ ID NO: 491458 - RNA, 19 nt, Artificial Sequence
  Description of Artificial Sequence: Synthetic oligonucleotide
  Antisense Strand to SEQ ID NO: 491457
accucuacacguauccauu

SEQ ID NO: 491459 - RNA, 19 nt, Artificial Sequence
  Description of Artificial Sequence: Synthetic oligonucleotide
  Sense strand starting at position 546 of SEQ ID NO: 317445
gucuaagcaguuuaacaga

SEQ ID NO: 491460 - RNA, 19 nt, Artificial Sequence
  Description of Artificial Sequence: Synthetic oligonucleotide
  Antisense Strand to SEQ ID NO: 491459
ucuguuaaacugcuuagac

SEQ ID NO: 491461 - RNA, 19 nt, Artificial Sequence
  Description of Artificial Sequence: Synthetic oligonucleotide
  Sense strand starting at position 604 of SEQ ID NO: 317445
uuucucaugcuuuaagaag

SEQ ID NO: 491462 - RNA, 19 nt, Artificial Sequence
  Description of Artificial Sequence: Synthetic oligonucleotide
  Antisense Strand to SEQ ID NO: 491461
cuucuuaaagcaugagaaa

SEQ ID NO: 491463 - RNA, 19 nt, Artificial Sequence
  Description of Artificial Sequence: Synthetic oligonucleotide
  Sense strand starting at position 660 of SEQ ID NO: 317445
ucugcucuggauggugaaa

SEQ ID NO: 491464 - RNA, 19 nt, Artificial Sequence
  Description of Artificial Sequence: Synthetic oligonucleotide
  Antisense Strand to SEQ ID NO: 491463
uuucaccauccagagcaga

SEQ ID NO: 491465 - RNA, 19 nt, Artificial Sequence
  Description of Artificial Sequence: Synthetic oligonucleotide
  Sense strand starting at position 744 of SEQ ID NO: 317445
aagaguaugucuuugggug

SEQ ID NO: 491466 - RNA, 19 nt, Artificial Sequence
  Description of Artificial Sequence: Synthetic oligonucleotide
  Antisense Strand to SEQ ID NO: 491465
cacccaaagacauacucuu

SEQ ID NO: 491467 - RNA, 19 nt, Artificial Sequence
  Description of Artificial Sequence: Synthetic oligonucleotide
  Sense strand starting at position 898 of SEQ ID NO: 317445
ccugaaguguggcucugaa

SEQ ID NO: 491468 - RNA, 19 nt, Artificial Sequence
  Description of Artificial Sequence: Synthetic oligonucleotide
  Antisense Strand to SEQ ID NO: 491467
uucagagccacacuucagg

SEQ ID NO: 491469 - RNA, 19 nt, Artificial Sequence
  Description of Artificial Sequence: Synthetic oligonucleotide
  Sense strand starting at position 913 of SEQ ID NO: 317445
ugaagauauuugugaacuc

SEQ ID NO: 491470 - RNA, 19 nt, Artificial Sequence
  Description of Artificial Sequence: Synthetic oligonucleotide
  Antisense Strand to SEQ ID NO: 491469
gaguucacaaauaucuuca

SEQ ID NO: 491471 - RNA, 19 nt, Artificial Sequence
  Description of Artificial Sequence: Synthetic oligonucleotide
  Sense strand starting at position 914 of SEQ ID NO: 317445
gaagauauuugugaacucu

SEQ ID NO: 491472 - RNA, 19 nt, Artificial Sequence
  Description of Artificial Sequence: Synthetic oligonucleotide
  Antisense Strand to SEQ ID NO: 491471
agaguucacaaauaucuuc

SEQ ID NO: 491473 - RNA, 19 nt, Artificial Sequence
  Description of Artificial Sequence: Synthetic oligonucleotide
  Sense strand starting at position 938 of SEQ ID NO: 317445
agcuguuuggcagaauuaa

SEQ ID NO: 491474 - RNA, 19 nt, Artificial Sequence
  Description of Artificial Sequence: Synthetic oligonucleotide
  Antisense Strand to SEQ ID NO: 491473
uuaauucugccaaacagcu

SEQ ID NO: 491475 - RNA, 19 nt, Artificial Sequence
  Description of Artificial Sequence: Synthetic oligonucleotide
  Sense strand starting at position 1271 of SEQ ID NO: 317445
gagucaggucuaggaccaa

SEQ ID NO: 491476 - RNA, 19 nt, Artificial Sequence
  Description of Artificial Sequence: Synthetic oligonucleotide
  Antisense Strand to SEQ ID NO: 491475
uugguccuagaccugacuc

SEQ ID NO: 491477 - RNA, 19 nt, Artificial Sequence
  Description of Artificial Sequence: Synthetic oligonucleotide
  Sense strand starting at position 1405 of SEQ ID NO: 317445
ggagccacacugcauaaau

SEQ ID NO: 491478 - RNA, 19 nt, Artificial Sequence
  Description of Artificial Sequence: Synthetic oligonucleotide
  Antisense Strand to SEQ ID NO: 491477
auuuaugcaguguggcucc

SEQ ID NO: 491479 - RNA, 19 nt, Artificial Sequence
  Description of Artificial Sequence: Synthetic oligonucleotide
  Sense strand starting at position 1546 of SEQ ID NO: 317445
ggaggugcugucuauaauu

SEQ ID NO: 491480 - RNA, 19 nt, Artificial Sequence
  Description of Artificial Sequence: Synthetic oligonucleotide
  Antisense Strand to SEQ ID NO: 491479
aauuauagacagcaccucc

SEQ ID NO: 491481 - RNA, 19 nt, Artificial Sequence
  Description of Artificial Sequence: Synthetic oligonucleotide
  Sense strand starting at position 1668 of SEQ ID NO: 317445
cugucuuugcgggauaaac

SEQ ID NO: 491482 - RNA, 19 nt, Artificial Sequence
  Description of Artificial Sequence: Synthetic oligonucleotide
  Antisense Strand to SEQ ID NO: 491481
guuuaucccgcaaagacag

SEQ ID NO: 491483 - RNA, 19 nt, Artificial Sequence
  Description of Artificial Sequence: Synthetic oligonucleotide
  Sense strand starting at position 2208 of SEQ ID NO: 317445
gcccgauuggcgagcuaga

SEQ ID NO: 491484 - RNA, 19 nt, Artificial Sequence
  Description of Artificial Sequence: Synthetic oligonucleotide
  Antisense Strand to SEQ ID NO: 491483
ucuagcucgccaaucgggc

SEQ ID NO: 491485 - RNA, 19 nt, Artificial Sequence
  Description of Artificial Sequence: Synthetic oligonucleotide
  Sense strand starting at position 2319 of SEQ ID NO: 317445
uaaucuuucggugacucca

SEQ ID NO: 491486 - RNA, 19 nt, Artificial Sequence
  Description of Artificial Sequence: Synthetic oligonucleotide
  Antisense Strand to SEQ ID NO: 491485
uggagucaccgaaagauua

SEQ ID NO: 491487 - RNA, 19 nt, Artificial Sequence
  Description of Artificial Sequence: Synthetic oligonucleotide
  Sense strand starting at position 2705 of SEQ ID NO: 317445
ucaggaguccuuuauagcu

SEQ ID NO: 491488 - RNA, 19 nt, Artificial Sequence
  Description of Artificial Sequence: Synthetic oligonucleotide
  Antisense Strand to SEQ ID NO: 491487
agcuauaaaggacuccuga

SEQ ID NO: 491489 - RNA, 19 nt, Artificial Sequence
  Description of Artificial Sequence: Synthetic oligonucleotide
  Sense strand starting at position 2710 of SEQ ID NO: 317445
aguccuuuauagcuuagaa

SEQ ID NO: 491490 - RNA, 19 nt, Artificial Sequence
  Description of Artificial Sequence: Synthetic oligonucleotide
  Antisense Strand to SEQ ID NO: 491489
uucuaagcuauaaaggacu

SEQ ID NO: 491491 - RNA, 19 nt, Artificial Sequence
  Description of Artificial Sequence: Synthetic oligonucleotide
  Sense strand starting at position 2712 of SEQ ID NO: 317445
uccuuuauagcuuagaaga

SEQ ID NO: 491492 - RNA, 19 nt, Artificial Sequence
  Description of Artificial Sequence: Synthetic oligonucleotide
  Antisense Strand to SEQ ID NO: 491491
ucuucuaagcuauaaagga

SEQ ID NO: 491493 - RNA, 19 nt, Artificial Sequence
  Description of Artificial Sequence: Synthetic oligonucleotide
  Sense strand starting at position 2741 of SEQ ID NO: 317445
accuuucugccucagugaa

SEQ ID NO: 491494 - RNA, 19 nt, Artificial Sequence
  Description of Artificial Sequence: Synthetic oligonucleotide
  Antisense Strand to SEQ ID NO: 491493
uucacugaggcagaaaggu

SEQ ID NO: 491495 - RNA, 19 nt, Artificial Sequence
  Description of Artificial Sequence: Synthetic oligonucleotide
  Sense strand starting at position 2767 of SEQ ID NO: 317445
ggaaucaccuaagugugaa

SEQ ID NO: 491496 - RNA, 19 nt, Artificial Sequence
  Description of Artificial Sequence: Synthetic oligonucleotide
  Antisense Strand to SEQ ID NO: 491495
uucacacuuaggugauucc

SEQ ID NO: 491497 - RNA, 19 nt, Artificial Sequence
  Description of Artificial Sequence: Synthetic oligonucleotide
  Sense strand starting at position 2770 of SEQ ID NO: 317445
aucaccuaagugugaagaa

SEQ ID NO: 491498 - RNA, 19 nt, Artificial Sequence
  Description of Artificial Sequence: Synthetic oligonucleotide
  Antisense Strand to SEQ ID NO: 491497
uucuucacacuuaggugau

SEQ ID NO: 491499 - RNA, 19 nt, Artificial Sequence
  Description of Artificial Sequence: Synthetic oligonucleotide
  Sense strand starting at position 3086 of SEQ ID NO: 317445
gugagacucuguuuaaaga

SEQ ID NO: 491500 - RNA, 19 nt, Artificial Sequence
  Description of Artificial Sequence: Synthetic oligonucleotide
  Antisense Strand to SEQ ID NO: 491499
ucuuuaaacagagucucac

SEQ ID NO: 491501 - RNA, 19 nt, Artificial Sequence
  Description of Artificial Sequence: Synthetic oligonucleotide
  Sense strand starting at position 3695 of SEQ ID NO: 317445
aaacuuggcuuggcugaga

SEQ ID NO: 491502 - RNA, 19 nt, Artificial Sequence
  Description of Artificial Sequence: Synthetic oligonucleotide
  Antisense Strand to SEQ ID NO: 491501
ucucagccaagccaaguuu

SEQ ID NO: 491503 - RNA, 19 nt, Artificial Sequence
  Description of Artificial Sequence: Synthetic oligonucleotide
  Sense strand starting at position 3725 of SEQ ID NO: 317445
uacuucuucgcaugggaaa

SEQ ID NO: 491504 - RNA, 19 nt, Artificial Sequence
  Description of Artificial Sequence: Synthetic oligonucleotide
  Antisense Strand to SEQ ID NO: 491503
uuucccaugcgaagaagua

SEQ ID NO: 491505 - RNA, 19 nt, Artificial Sequence
  Description of Artificial Sequence: Synthetic oligonucleotide
  Sense strand starting at position 3726 of SEQ ID NO: 317445
acuucuucgcaugggaaac

SEQ ID NO: 491506 - RNA, 19 nt, Artificial Sequence
  Description of Artificial Sequence: Synthetic oligonucleotide
  Antisense Strand to SEQ ID NO: 491505
guuucccaugcgaagaagu

SEQ ID NO: 491507 - RNA, 19 nt, Artificial Sequence
  Description of Artificial Sequence: Synthetic oligonucleotide
  Sense strand starting at position 3790 of SEQ ID NO: 317445
uguccuugaguucaggaga

SEQ ID NO: 491508 - RNA, 19 nt, Artificial Sequence
  Description of Artificial Sequence: Synthetic oligonucleotide
  Antisense Strand to SEQ ID NO: 491507
ucuccugaacucaaggaca

SEQ ID NO: 491509 - RNA, 19 nt, Artificial Sequence
  Description of Artificial Sequence: Synthetic oligonucleotide
  Sense strand starting at position 3860 of SEQ ID NO: 317445
accugauaaagaggugcua

SEQ ID NO: 491510 - RNA, 19 nt, Artificial Sequence
  Description of Artificial Sequence: Synthetic oligonucleotide
  Antisense Strand to SEQ ID NO: 491509
uagcaccucuuuaucaggu

SEQ ID NO: 491511 - RNA, 19 nt, Artificial Sequence
  Description of Artificial Sequence: Synthetic oligonucleotide
  Sense strand starting at position 3900 of SEQ ID NO: 317445
cugugucagagcuagguau

SEQ ID NO: 491512 - RNA, 19 nt, Artificial Sequence
  Description of Artificial Sequence: Synthetic oligonucleotide
  Antisense Strand to SEQ ID NO: 491511
auaccuagcucugacacag

SEQ ID NO: 491513 - RNA, 19 nt, Artificial Sequence
  Description of Artificial Sequence: Synthetic oligonucleotide
  Sense strand starting at position 3904 of SEQ ID NO: 317445
gucagagcuagguauaauc

SEQ ID NO: 491514 - RNA, 19 nt, Artificial Sequence
  Description of Artificial Sequence: Synthetic oligonucleotide
  Antisense Strand to SEQ ID NO: 491513
gauuauaccuagcucugac

SEQ ID NO: 491515 - RNA, 19 nt, Artificial Sequence
  Description of Artificial Sequence: Synthetic oligonucleotide
  Sense strand starting at position 3914 of SEQ ID NO: 317445
gguauaaucaaguacagug

SEQ ID NO: 491516 - RNA, 19 nt, Artificial Sequence
  Description of Artificial Sequence: Synthetic oligonucleotide
  Antisense Strand to SEQ ID NO: 491515
cacuguacuugauuauacc

SEQ ID NO: 491517 - RNA, 19 nt, Artificial Sequence
  Description of Artificial Sequence: Synthetic oligonucleotide
  Sense strand starting at position 1985 of SEQ ID NO: 317446
caaggucuacgugaaucua

SEQ ID NO: 491518 - RNA, 19 nt, Artificial Sequence
  Description of Artificial Sequence: Synthetic oligonucleotide
  Antisense Strand to SEQ ID NO: 491517
uagauucacguagaccuug

SEQ ID NO: 491519 - RNA, 19 nt, Artificial Sequence
  Description of Artificial Sequence: Synthetic oligonucleotide
  Sense strand starting at position 1993 of SEQ ID NO: 317446
acgugaaucuacuugcuau

SEQ ID NO: 491520 - RNA, 19 nt, Artificial Sequence
  Description of Artificial Sequence: Synthetic oligonucleotide
  Antisense Strand to SEQ ID NO: 491519
auagcaaguagauucacgu

SEQ ID NO: 491521 - RNA, 19 nt, Artificial Sequence
  Description of Artificial Sequence: Synthetic oligonucleotide
  Sense strand starting at position 2178 of SEQ ID NO: 317446
uugccauccuugcagguaa

SEQ ID NO: 491522 - RNA, 19 nt, Artificial Sequence
  Description of Artificial Sequence: Synthetic oligonucleotide
  Antisense Strand to SEQ ID NO: 491521
uuaccugcaaggauggcaa

SEQ ID NO: 491523 - RNA, 19 nt, Artificial Sequence
  Description of Artificial Sequence: Synthetic oligonucleotide
  Sense strand starting at position 2190 of SEQ ID NO: 317446
cagguaauguucuuugcca

SEQ ID NO: 491524 - RNA, 19 nt, Artificial Sequence
  Description of Artificial Sequence: Synthetic oligonucleotide
  Antisense Strand to SEQ ID NO: 491523
uggcaaagaacauuaccug

SEQ ID NO: 491525 - RNA, 19 nt, Artificial Sequence
  Description of Artificial Sequence: Synthetic oligonucleotide
  Sense strand starting at position 2191 of SEQ ID NO: 317446
agguaauguucuuugccag

SEQ ID NO: 491526 - RNA, 19 nt, Artificial Sequence
  Description of Artificial Sequence: Synthetic oligonucleotide
  Antisense Strand to SEQ ID NO: 491525
cuggcaaagaacauuaccu

SEQ ID NO: 491527 - RNA, 19 nt, Artificial Sequence
  Description of Artificial Sequence: Synthetic oligonucleotide
  Sense strand starting at position 2192 of SEQ ID NO: 317446
gguaauguucuuugccaga

SEQ ID NO: 491528 - RNA, 19 nt, Artificial Sequence
  Description of Artificial Sequence: Synthetic oligonucleotide
  Antisense Strand to SEQ ID NO: 491527
ucuggcaaagaacauuacc

SEQ ID NO: 491529 - RNA, 19 nt, Artificial Sequence
  Description of Artificial Sequence: Synthetic oligonucleotide
  Sense strand starting at position 2197 of SEQ ID NO: 317446
uguucuuugccagaauagc

SEQ ID NO: 491530 - RNA, 19 nt, Artificial Sequence
  Description of Artificial Sequence: Synthetic oligonucleotide
  Antisense Strand to SEQ ID NO: 491529
gcuauucuggcaaagaaca

SEQ ID NO: 491531 - RNA, 19 nt, Artificial Sequence
  Description of Artificial Sequence: Synthetic oligonucleotide
  Sense strand starting at position 2216 of SEQ ID NO: 317446
cacuaaaucucagguggaa

SEQ ID NO: 491532 - RNA, 19 nt, Artificial Sequence
  Description of Artificial Sequence: Synthetic oligonucleotide
  Antisense Strand to SEQ ID NO: 491531
uuccaccugagauuuagug

SEQ ID NO: 491533 - RNA, 19 nt, Artificial Sequence
  Description of Artificial Sequence: Synthetic oligonucleotide
  Sense strand starting at position 2218 of SEQ ID NO: 317446
cuaaaucucagguggaagu

SEQ ID NO: 491534 - RNA, 19 nt, Artificial Sequence
  Description of Artificial Sequence: Synthetic oligonucleotide
  Antisense Strand to SEQ ID NO: 491533
acuuccaccugagauuuag

SEQ ID NO: 491535 - RNA, 19 nt, Artificial Sequence
  Description of Artificial Sequence: Synthetic oligonucleotide
  Sense strand starting at position 2219 of SEQ ID NO: 317446
uaaaucucagguggaagua

SEQ ID NO: 491536 - RNA, 19 nt, Artificial Sequence
  Description of Artificial Sequence: Synthetic oligonucleotide
  Antisense Strand to SEQ ID NO: 491535
uacuuccaccugagauuua

SEQ ID NO: 491537 - RNA, 19 nt, Artificial Sequence
  Description of Artificial Sequence: Synthetic oligonucleotide
  Sense strand starting at position 2243 of SEQ ID NO: 317446
ggaaaugugcuagggagua

SEQ ID NO: 491538 - RNA, 19 nt, Artificial Sequence
  Description of Artificial Sequence: Synthetic oligonucleotide
  Antisense Strand to SEQ ID NO: 491537
uacucccuagcacauuucc

SEQ ID NO: 491539 - RNA, 19 nt, Artificial Sequence
  Description of Artificial Sequence: Synthetic oligonucleotide
  Sense strand starting at position 2257 of SEQ ID NO: 317446
gaguaaacaguuuaaguca

SEQ ID NO: 491540 - RNA, 19 nt, Artificial Sequence
  Description of Artificial Sequence: Synthetic oligonucleotide
  Antisense Strand to SEQ ID NO: 491539
ugacuuaaacuguuuacuc

SEQ ID NO: 491541 - RNA, 19 nt, Artificial Sequence
  Description of Artificial Sequence: Synthetic oligonucleotide
  Sense strand starting at position 2334 of SEQ ID NO: 317446
cuauguggucuuugucaag

SEQ ID NO: 491542 - RNA, 19 nt, Artificial Sequence
  Description of Artificial Sequence: Synthetic oligonucleotide
  Antisense Strand to SEQ ID NO: 491541
cuugacaaagaccacauag

SEQ ID NO: 491543 - RNA, 19 nt, Artificial Sequence
  Description of Artificial Sequence: Synthetic oligonucleotide
  Sense strand starting at position 2341 of SEQ ID NO: 317446
gucuuugucaagcagugga

SEQ ID NO: 491544 - RNA, 19 nt, Artificial Sequence
  Description of Artificial Sequence: Synthetic oligonucleotide
  Antisense Strand to SEQ ID NO: 491543
uccacugcuugacaaagac

SEQ ID NO: 491545 - RNA, 19 nt, Artificial Sequence
  Description of Artificial Sequence: Synthetic oligonucleotide
  Sense strand starting at position 2364 of SEQ ID NO: 317446
auggaaugcugucucucua

SEQ ID NO: 491546 - RNA, 19 nt, Artificial Sequence
  Description of Artificial Sequence: Synthetic oligonucleotide
  Antisense Strand to SEQ ID NO: 491545
uagagagacagcauuccau

SEQ ID NO: 491547 - RNA, 19 nt, Artificial Sequence
  Description of Artificial Sequence: Synthetic oligonucleotide
  Sense strand starting at position 2398 of SEQ ID NO: 317446
auagguugcgcaagugagu

SEQ ID NO: 491548 - RNA, 19 nt, Artificial Sequence
  Description of Artificial Sequence: Synthetic oligonucleotide
  Antisense Strand to SEQ ID NO: 491547
acucacuugcgcaaccuau

SEQ ID NO: 491549 - RNA, 19 nt, Artificial Sequence
  Description of Artificial Sequence: Synthetic oligonucleotide
  Sense strand starting at position 2411 of SEQ ID NO: 317446
gugagugcuuguggaaauc

SEQ ID NO: 491550 - RNA, 19 nt, Artificial Sequence
  Description of Artificial Sequence: Synthetic oligonucleotide
  Antisense Strand to SEQ ID NO: 491549
gauuuccacaagcacucac

SEQ ID NO: 491551 - RNA, 19 nt, Artificial Sequence
  Description of Artificial Sequence: Synthetic oligonucleotide
  Sense strand starting at position 2421 of SEQ ID NO: 317446
guggaaaucauacgcaaga

SEQ ID NO: 491552 - RNA, 19 nt, Artificial Sequence
  Description of Artificial Sequence: Synthetic oligonucleotide
  Antisense Strand to SEQ ID NO: 491551
ucuugcguaugauuuccac

SEQ ID NO: 491553 - RNA, 19 nt, Artificial Sequence
  Description of Artificial Sequence: Synthetic oligonucleotide
  Sense strand starting at position 2455 of SEQ ID NO: 317446
agaagugaacagugcaaau

SEQ ID NO: 491554 - RNA, 19 nt, Artificial Sequence
  Description of Artificial Sequence: Synthetic oligonucleotide
  Antisense Strand to SEQ ID NO: 491553
auuugcacuguucacuucu

SEQ ID NO: 491555 - RNA, 19 nt, Artificial Sequence
  Description of Artificial Sequence: Synthetic oligonucleotide
  Sense strand starting at position 2466 of SEQ ID NO: 317446
gugcaaauaaggugaaagu

SEQ ID NO: 491556 - RNA, 19 nt, Artificial Sequence
  Description of Artificial Sequence: Synthetic oligonucleotide
  Antisense Strand to SEQ ID NO: 491555
acuuucaccuuauuugcac

SEQ ID NO: 491557 - RNA, 19 nt, Artificial Sequence
  Description of Artificial Sequence: Synthetic oligonucleotide
  Sense strand starting at position 2555 of SEQ ID NO: 317446
guggacaugugaugucaca

SEQ ID NO: 491558 - RNA, 19 nt, Artificial Sequence
  Description of Artificial Sequence: Synthetic oligonucleotide
  Antisense Strand to SEQ ID NO: 491557
ugugacaucacauguccac

SEQ ID NO: 491559 - RNA, 19 nt, Artificial Sequence
  Description of Artificial Sequence: Synthetic oligonucleotide
  Sense strand starting at position 2597 of SEQ ID NO: 317446
acugcaucgguggaaauga

SEQ ID NO: 491560 - RNA, 19 nt, Artificial Sequence
  Description of Artificial Sequence: Synthetic oligonucleotide
  Antisense Strand to SEQ ID NO: 491559
ucauuuccaccgaugcagu

SEQ ID NO: 491561 - RNA, 19 nt, Artificial Sequence
  Description of Artificial Sequence: Synthetic oligonucleotide
  Sense strand starting at position 2649 of SEQ ID NO: 317446
cggugaagaugauguuaca

SEQ ID NO: 491562 - RNA, 19 nt, Artificial Sequence
  Description of Artificial Sequence: Synthetic oligonucleotide
  Antisense Strand to SEQ ID NO: 491561
uguaacaucaucuucaccg

SEQ ID NO: 491563 - RNA, 19 nt, Artificial Sequence
  Description of Artificial Sequence: Synthetic oligonucleotide
  Sense strand starting at position 2652 of SEQ ID NO: 317446
ugaagaugauguuacaaua

SEQ ID NO: 491564 - RNA, 19 nt, Artificial Sequence
  Description of Artificial Sequence: Synthetic oligonucleotide
  Antisense Strand to SEQ ID NO: 491563
uauuguaacaucaucuuca

SEQ ID NO: 491565 - RNA, 19 nt, Artificial Sequence
  Description of Artificial Sequence: Synthetic oligonucleotide
  Sense strand starting at position 2663 of SEQ ID NO: 317446
uuacaauaauccuggugaa

SEQ ID NO: 491566 - RNA, 19 nt, Artificial Sequence
  Description of Artificial Sequence: Synthetic oligonucleotide
  Antisense Strand to SEQ ID NO: 491565
uucaccaggauuauuguaa

SEQ ID NO: 491567 - RNA, 19 nt, Artificial Sequence
  Description of Artificial Sequence: Synthetic oligonucleotide
  Sense strand starting at position 2793 of SEQ ID NO: 317446
caggaucuguggcauuauc

SEQ ID NO: 491568 - RNA, 19 nt, Artificial Sequence
  Description of Artificial Sequence: Synthetic oligonucleotide
  Antisense Strand to SEQ ID NO: 491567
gauaaugccacagauccug

SEQ ID NO: 491569 - RNA, 19 nt, Artificial Sequence
  Description of Artificial Sequence: Synthetic oligonucleotide
  Sense strand starting at position 2820 of SEQ ID NO: 317446
uccugcaacuauguugaga

SEQ ID NO: 491570 - RNA, 19 nt, Artificial Sequence
  Description of Artificial Sequence: Synthetic oligonucleotide
  Antisense Strand to SEQ ID NO: 491569
ucucaacauaguugcagga

SEQ ID NO: 491571 - RNA, 19 nt, Artificial Sequence
  Description of Artificial Sequence: Synthetic oligonucleotide
  Sense strand starting at position 2822 of SEQ ID NO: 317446
cugcaacuauguugagaaa

SEQ ID NO: 491572 - RNA, 19 nt, Artificial Sequence
  Description of Artificial Sequence: Synthetic oligonucleotide
  Antisense Strand to SEQ ID NO: 491571
uuucucaacauaguugcag

SEQ ID NO: 491573 - RNA, 19 nt, Artificial Sequence
  Description of Artificial Sequence: Synthetic oligonucleotide
  Sense strand starting at position 2847 of SEQ ID NO: 317446
gccuccuaucaaugugaua

SEQ ID NO: 491574 - RNA, 19 nt, Artificial Sequence
  Description of Artificial Sequence: Synthetic oligonucleotide
  Antisense Strand to SEQ ID NO: 491573
uaucacauugauaggaggc

SEQ ID NO: 491575 - RNA, 19 nt, Artificial Sequence
  Description of Artificial Sequence: Synthetic oligonucleotide
  Sense strand starting at position 2852 of SEQ ID NO: 317446
cuaucaaugugauagcuaa

SEQ ID NO: 491576 - RNA, 19 nt, Artificial Sequence
  Description of Artificial Sequence: Synthetic oligonucleotide
  Antisense Strand to SEQ ID NO: 491575
uuagcuaucacauugauag

SEQ ID NO: 491577 - RNA, 19 nt, Artificial Sequence
  Description of Artificial Sequence: Synthetic oligonucleotide
  Sense strand starting at position 2860 of SEQ ID NO: 317446
gugauagcuaaauacgaca

SEQ ID NO: 491578 - RNA, 19 nt, Artificial Sequence
  Description of Artificial Sequence: Synthetic oligonucleotide
  Antisense Strand to SEQ ID NO: 491577
ugucguauuuagcuaucac

SEQ ID NO: 491579 - RNA, 19 nt, Artificial Sequence
  Description of Artificial Sequence: Synthetic oligonucleotide
  Sense strand starting at position 2863 of SEQ ID NO: 317446
auagcuaaauacgacaaau

SEQ ID NO: 491580 - RNA, 19 nt, Artificial Sequence
  Description of Artificial Sequence: Synthetic oligonucleotide
  Antisense Strand to SEQ ID NO: 491579
auuugucguauuuagcuau

SEQ ID NO: 491581 - RNA, 19 nt, Artificial Sequence
  Description of Artificial Sequence: Synthetic oligonucleotide
  Sense strand starting at position 2936 of SEQ ID NO: 317446
uccugaaauuaagagguca

SEQ ID NO: 491582 - RNA, 19 nt, Artificial Sequence
  Description of Artificial Sequence: Synthetic oligonucleotide
  Antisense Strand to SEQ ID NO: 491581
ugaccucuuaauuucagga

SEQ ID NO: 491583 - RNA, 19 nt, Artificial Sequence
  Description of Artificial Sequence: Synthetic oligonucleotide
  Sense strand starting at position 3061 of SEQ ID NO: 317446
ccaggaugucacugcugca

SEQ ID NO: 491584 - RNA, 19 nt, Artificial Sequence
  Description of Artificial Sequence: Synthetic oligonucleotide
  Antisense Strand to SEQ ID NO: 491583
ugcagcagugacauccugg

SEQ ID NO: 491585 - RNA, 19 nt, Artificial Sequence
  Description of Artificial Sequence: Synthetic oligonucleotide
  Sense strand starting at position 3185 of SEQ ID NO: 317446
aauggagucuccugaggca

SEQ ID NO: 491586 - RNA, 19 nt, Artificial Sequence
  Description of Artificial Sequence: Synthetic oligonucleotide
  Antisense Strand to SEQ ID NO: 491585
ugccucaggagacuccauu

SEQ ID NO: 491587 - RNA, 19 nt, Artificial Sequence
  Description of Artificial Sequence: Synthetic oligonucleotide
  Sense strand starting at position 3814 of SEQ ID NO: 317446
gggcguucgcucggcaaca

SEQ ID NO: 491588 - RNA, 19 nt, Artificial Sequence
  Description of Artificial Sequence: Synthetic oligonucleotide
  Antisense Strand to SEQ ID NO: 491587
uguugccgagcgaacgccc

SEQ ID NO: 491589 - RNA, 19 nt, Artificial Sequence
  Description of Artificial Sequence: Synthetic oligonucleotide
  Sense strand starting at position 3905 of SEQ ID NO: 317446
cggugcugaugcuccgaaa

SEQ ID NO: 491590 - RNA, 19 nt, Artificial Sequence
  Description of Artificial Sequence: Synthetic oligonucleotide
  Antisense Strand to SEQ ID NO: 491589
uuucggagcaucagcaccg

SEQ ID NO: 491591 - RNA, 19 nt, Artificial Sequence
  Description of Artificial Sequence: Synthetic oligonucleotide
  Sense strand starting at position 3916 of SEQ ID NO: 317446
cuccgaaacucgucacagu

SEQ ID NO: 491592 - RNA, 19 nt, Artificial Sequence
  Description of Artificial Sequence: Synthetic oligonucleotide
  Antisense Strand to SEQ ID NO: 491591
acugugacgaguuucggag

SEQ ID NO: 491593 - RNA, 19 nt, Artificial Sequence
  Description of Artificial Sequence: Synthetic oligonucleotide
  Sense strand starting at position 147 of SEQ ID NO: 317447
ccuucagggcaguggaaau

SEQ ID NO: 491594 - RNA, 19 nt, Artificial Sequence
  Description of Artificial Sequence: Synthetic oligonucleotide
  Antisense Strand to SEQ ID NO: 491593
auuuccacugcccugaagg

SEQ ID NO: 491595 - RNA, 19 nt, Artificial Sequence
  Description of Artificial Sequence: Synthetic oligonucleotide
  Sense strand starting at position 173 of SEQ ID NO: 317447
agauuaauccuguguauau

SEQ ID NO: 491596 - RNA, 19 nt, Artificial Sequence
  Description of Artificial Sequence: Synthetic oligonucleotide
  Antisense Strand to SEQ ID NO: 491595
auauacacaggauuaaucu

SEQ ID NO: 491597 - RNA, 19 nt, Artificial Sequence
  Description of Artificial Sequence: Synthetic oligonucleotide
  Sense strand starting at position 223 of SEQ ID NO: 317447
ggauuaaucguacacagua

SEQ ID NO: 491598 - RNA, 19 nt, Artificial Sequence
  Description of Artificial Sequence: Synthetic oligonucleotide
  Antisense Strand to SEQ ID NO: 491597
uacuguguacgauuaaucc

SEQ ID NO: 491599 - RNA, 19 nt, Artificial Sequence
  Description of Artificial Sequence: Synthetic oligonucleotide
  Sense strand starting at position 251 of SEQ ID NO: 317447
acugaagaguaucuaacuu

SEQ ID NO: 491600 - RNA, 19 nt, Artificial Sequence
  Description of Artificial Sequence: Synthetic oligonucleotide
  Antisense Strand to SEQ ID NO: 491599
aaguuagauacucuucagu

SEQ ID NO: 491601 - RNA, 19 nt, Artificial Sequence
  Description of Artificial Sequence: Synthetic oligonucleotide
  Sense strand starting at position 255 of SEQ ID NO: 317447
aagaguaucuaacuugguu

SEQ ID NO: 491602 - RNA, 19 nt, Artificial Sequence
  Description of Artificial Sequence: Synthetic oligonucleotide
  Antisense Strand to SEQ ID NO: 491601
aaccaaguuagauacucuu

SEQ ID NO: 491603 - RNA, 19 nt, Artificial Sequence
  Description of Artificial Sequence: Synthetic oligonucleotide
  Sense strand starting at position 415 of SEQ ID NO: 317447
acagucuaauaguuagacu

SEQ ID NO: 491604 - RNA, 19 nt, Artificial Sequence
  Description of Artificial Sequence: Synthetic oligonucleotide
  Antisense Strand to SEQ ID NO: 491603
agucuaacuauuagacugu

SEQ ID NO: 491605 - RNA, 19 nt, Artificial Sequence
  Description of Artificial Sequence: Synthetic oligonucleotide
  Sense strand starting at position 544 of SEQ ID NO: 317447
cgcugaguccuaccguaca

SEQ ID NO: 491606 - RNA, 19 nt, Artificial Sequence
  Description of Artificial Sequence: Synthetic oligonucleotide
  Antisense Strand to SEQ ID NO: 491605
uguacgguaggacucagcg

SEQ ID NO: 491607 - RNA, 19 nt, Artificial Sequence
  Description of Artificial Sequence: Synthetic oligonucleotide
  Sense strand starting at position 547 of SEQ ID NO: 317447
ugaguccuaccguacacuu

SEQ ID NO: 491608 - RNA, 19 nt, Artificial Sequence
  Description of Artificial Sequence: Synthetic oligonucleotide
  Antisense Strand to SEQ ID NO: 491607
aaguguacgguaggacuca

SEQ ID NO: 491609 - RNA, 19 nt, Artificial Sequence
  Description of Artificial Sequence: Synthetic oligonucleotide
  Sense strand starting at position 713 of SEQ ID NO: 317447
ccaacaagauggcuuugua

SEQ ID NO: 491610 - RNA, 19 nt, Artificial Sequence
  Description of Artificial Sequence: Synthetic oligonucleotide
  Antisense Strand to SEQ ID NO: 491609
uacaaagccaucuuguugg

SEQ ID NO: 491611 - RNA, 19 nt, Artificial Sequence
  Description of Artificial Sequence: Synthetic oligonucleotide
  Sense strand starting at position 716 of SEQ ID NO: 317447
acaagauggcuuuguacag

SEQ ID NO: 491612 - RNA, 19 nt, Artificial Sequence
  Description of Artificial Sequence: Synthetic oligonucleotide
  Antisense Strand to SEQ ID NO: 491611
cuguacaaagccaucuugu

SEQ ID NO: 491613 - RNA, 19 nt, Artificial Sequence
  Description of Artificial Sequence: Synthetic oligonucleotide
  Sense strand starting at position 717 of SEQ ID NO: 317447
caagauggcuuuguacaga

SEQ ID NO: 491614 - RNA, 19 nt, Artificial Sequence
  Description of Artificial Sequence: Synthetic oligonucleotide
  Antisense Strand to SEQ ID NO: 491613
ucuguacaaagccaucuug

SEQ ID NO: 491615 - RNA, 19 nt, Artificial Sequence
  Description of Artificial Sequence: Synthetic oligonucleotide
  Sense strand starting at position 876 of SEQ ID NO: 317447
ggugguauccuagagagcu

SEQ ID NO: 491616 - RNA, 19 nt, Artificial Sequence
  Description of Artificial Sequence: Synthetic oligonucleotide
  Antisense Strand to SEQ ID NO: 491615
agcucucuaggauaccacc

SEQ ID NO: 491617 - RNA, 19 nt, Artificial Sequence
  Description of Artificial Sequence: Synthetic oligonucleotide
  Sense strand starting at position 903 of SEQ ID NO: 317447
auuguuauacauuggaaac

SEQ ID NO: 491618 - RNA, 19 nt, Artificial Sequence
  Description of Artificial Sequence: Synthetic oligonucleotide
  Antisense Strand to SEQ ID NO: 491617
guuuccaauguauaacaau

SEQ ID NO: 491619 - RNA, 19 nt, Artificial Sequence
  Description of Artificial Sequence: Synthetic oligonucleotide
  Sense strand starting at position 931 of SEQ ID NO: 317447
gccauagguguuuacuauu

SEQ ID NO: 491620 - RNA, 19 nt, Artificial Sequence
  Description of Artificial Sequence: Synthetic oligonucleotide
  Antisense Strand to SEQ ID NO: 491619
aauaguaaacaccuauggc

SEQ ID NO: 491621 - RNA, 19 nt, Artificial Sequence
  Description of Artificial Sequence: Synthetic oligonucleotide
  Sense strand starting at position 964 of SEQ ID NO: 317447
agauaccugccagggauau

SEQ ID NO: 491622 - RNA, 19 nt, Artificial Sequence
  Description of Artificial Sequence: Synthetic oligonucleotide
  Antisense Strand to SEQ ID NO: 491621
auaucccuggcagguaucu

SEQ ID NO: 491623 - RNA, 19 nt, Artificial Sequence
  Description of Artificial Sequence: Synthetic oligonucleotide
  Sense strand starting at position 965 of SEQ ID NO: 317447
gauaccugccagggauauu

SEQ ID NO: 491624 - RNA, 19 nt, Artificial Sequence
  Description of Artificial Sequence: Synthetic oligonucleotide
  Antisense Strand to SEQ ID NO: 491623
aauaucccuggcagguauc

SEQ ID NO: 491625 - RNA, 19 nt, Artificial Sequence
  Description of Artificial Sequence: Synthetic oligonucleotide
  Sense strand starting at position 992 of SEQ ID NO: 317447
cugaaacucccuggaaauc

SEQ ID NO: 491626 - RNA, 19 nt, Artificial Sequence
  Description of Artificial Sequence: Synthetic oligonucleotide
  Antisense Strand to SEQ ID NO: 491625
gauuuccagggaguuucag

SEQ ID NO: 491627 - RNA, 19 nt, Artificial Sequence
  Description of Artificial Sequence: Synthetic oligonucleotide
  Sense strand starting at position 1001 of SEQ ID NO: 317447
ccuggaaaucuguagaggu

SEQ ID NO: 491628 - RNA, 19 nt, Artificial Sequence
  Description of Artificial Sequence: Synthetic oligonucleotide
  Antisense Strand to SEQ ID NO: 491627
accucuacagauuuccagg

SEQ ID NO: 491629 - RNA, 19 nt, Artificial Sequence
  Description of Artificial Sequence: Synthetic oligonucleotide
  Sense strand starting at position 1096 of SEQ ID NO: 317447
cggucuaaagaaggguaaa

SEQ ID NO: 491630 - RNA, 19 nt, Artificial Sequence
  Description of Artificial Sequence: Synthetic oligonucleotide
  Antisense Strand to SEQ ID NO: 491629
uuuacccuucuuuagaccg

SEQ ID NO: 491631 - RNA, 19 nt, Artificial Sequence
  Description of Artificial Sequence: Synthetic oligonucleotide
  Sense strand starting at position 1110 of SEQ ID NO: 317447
guaaaucucgccgugugca

SEQ ID NO: 491632 - RNA, 19 nt, Artificial Sequence
  Description of Artificial Sequence: Synthetic oligonucleotide
  Antisense Strand to SEQ ID NO: 491631
ugcacacggcgagauuuac

SEQ ID NO: 491633 - RNA, 19 nt, Artificial Sequence
  Description of Artificial Sequence: Synthetic oligonucleotide
  Sense strand starting at position 1128 of SEQ ID NO: 317447
acaguuacccuucgcauuu

SEQ ID NO: 491634 - RNA, 19 nt, Artificial Sequence
  Description of Artificial Sequence: Synthetic oligonucleotide
  Antisense Strand to SEQ ID NO: 491633
aaaugcgaaggguaacugu

SEQ ID NO: 491635 - RNA, 19 nt, Artificial Sequence
  Description of Artificial Sequence: Synthetic oligonucleotide
  Sense strand starting at position 1205 of SEQ ID NO: 317447
agcaguucgaagggauauu

SEQ ID NO: 491636 - RNA, 19 nt, Artificial Sequence
  Description of Artificial Sequence: Synthetic oligonucleotide
  Antisense Strand to SEQ ID NO: 491635
aauaucccuucgaacugcu

SEQ ID NO: 491637 - RNA, 19 nt, Artificial Sequence
  Description of Artificial Sequence: Synthetic oligonucleotide
  Sense strand starting at position 1215 of SEQ ID NO: 317447
agggauauucugugaugga

SEQ ID NO: 491638 - RNA, 19 nt, Artificial Sequence
  Description of Artificial Sequence: Synthetic oligonucleotide
  Antisense Strand to SEQ ID NO: 491637
uccaucacagaauaucccu

SEQ ID NO: 491639 - RNA, 19 nt, Artificial Sequence
  Description of Artificial Sequence: Synthetic oligonucleotide
  Sense strand starting at position 1219 of SEQ ID NO: 317447
auauucugugauggaccaa

SEQ ID NO: 491640 - RNA, 19 nt, Artificial Sequence
  Description of Artificial Sequence: Synthetic oligonucleotide
  Antisense Strand to SEQ ID NO: 491639
uugguccaucacagaauau

SEQ ID NO: 491641 - RNA, 19 nt, Artificial Sequence
  Description of Artificial Sequence: Synthetic oligonucleotide
  Sense strand starting at position 1243 of SEQ ID NO: 317447
ugguacaguguguaaauga

SEQ ID NO: 491642 - RNA, 19 nt, Artificial Sequence
  Description of Artificial Sequence: Synthetic oligonucleotide
  Antisense Strand to SEQ ID NO: 491641
ucauuuacacacuguacca

SEQ ID NO: 491643 - RNA, 19 nt, Artificial Sequence
  Description of Artificial Sequence: Synthetic oligonucleotide
  Sense strand starting at position 1361 of SEQ ID NO: 317447
uacgaagggcucugagaga

SEQ ID NO: 491644 - RNA, 19 nt, Artificial Sequence
  Description of Artificial Sequence: Synthetic oligonucleotide
  Antisense Strand to SEQ ID NO: 491643
ucucucagagcccuucgua

SEQ ID NO: 491645 - RNA, 19 nt, Artificial Sequence
  Description of Artificial Sequence: Synthetic oligonucleotide
  Sense strand starting at position 1391 of SEQ ID NO: 317447
agcaguuuccgugacagaa

SEQ ID NO: 491646 - RNA, 19 nt, Artificial Sequence
  Description of Artificial Sequence: Synthetic oligonucleotide
  Antisense Strand to SEQ ID NO: 491645
uucugucacggaaacugcu

SEQ ID NO: 491647 - RNA, 19 nt, Artificial Sequence
  Description of Artificial Sequence: Synthetic oligonucleotide
  Sense strand starting at position 1395 of SEQ ID NO: 317447
guuuccgugacagaacaau

SEQ ID NO: 491648 - RNA, 19 nt, Artificial Sequence
  Description of Artificial Sequence: Synthetic oligonucleotide
  Antisense Strand to SEQ ID NO: 491647
auuguucugucacggaaac

SEQ ID NO: 491649 - RNA, 19 nt, Artificial Sequence
  Description of Artificial Sequence: Synthetic oligonucleotide
  Sense strand starting at position 2666 of SEQ ID NO: 317447
gaaacagucgagugaaggu

SEQ ID NO: 491650 - RNA, 19 nt, Artificial Sequence
  Description of Artificial Sequence: Synthetic oligonucleotide
  Antisense Strand to SEQ ID NO: 491649
accuucacucgacuguuuc

SEQ ID NO: 491651 - RNA, 19 nt, Artificial Sequence
  Description of Artificial Sequence: Synthetic oligonucleotide
  Sense strand starting at position 2724 of SEQ ID NO: 317447
gcauacauugggugggaaa

SEQ ID NO: 491652 - RNA, 19 nt, Artificial Sequence
  Description of Artificial Sequence: Synthetic oligonucleotide
  Antisense Strand to SEQ ID NO: 491651
uuucccacccaauguaugc

SEQ ID NO: 491653 - RNA, 19 nt, Artificial Sequence
  Description of Artificial Sequence: Synthetic oligonucleotide
  Sense strand starting at position 2763 of SEQ ID NO: 317447
uccggaccuuucuugacaa

SEQ ID NO: 491654 - RNA, 19 nt, Artificial Sequence
  Description of Artificial Sequence: Synthetic oligonucleotide
  Antisense Strand to SEQ ID NO: 491653
uugucaagaaagguccgga

SEQ ID NO: 491655 - RNA, 19 nt, Artificial Sequence
  Description of Artificial Sequence: Synthetic oligonucleotide
  Sense strand starting at position 2988 of SEQ ID NO: 317447
gggaguuguucgauugucu

SEQ ID NO: 491656 - RNA, 19 nt, Artificial Sequence
  Description of Artificial Sequence: Synthetic oligonucleotide
  Antisense Strand to SEQ ID NO: 491655
agacaaucgaacaacuccc

SEQ ID NO: 491657 - RNA, 19 nt, Artificial Sequence
  Description of Artificial Sequence: Synthetic oligonucleotide
  Sense strand starting at position 3038 of SEQ ID NO: 317447
uguuuacgugucuaggaaa

SEQ ID NO: 491658 - RNA, 19 nt, Artificial Sequence
  Description of Artificial Sequence: Synthetic oligonucleotide
  Antisense Strand to SEQ ID NO: 491657
uuuccuagacacguaaaca

SEQ ID NO: 491659 - RNA, 19 nt, Artificial Sequence
  Description of Artificial Sequence: Synthetic oligonucleotide
  Sense strand starting at position 3152 of SEQ ID NO: 317447
ucuugagcccuuugauuuc

SEQ ID NO: 491660 - RNA, 19 nt, Artificial Sequence
  Description of Artificial Sequence: Synthetic oligonucleotide
  Antisense Strand to SEQ ID NO: 491659
gaaaucaaagggcucaaga

SEQ ID NO: 491661 - RNA, 19 nt, Artificial Sequence
  Description of Artificial Sequence: Synthetic oligonucleotide
  Sense strand starting at position 3380 of SEQ ID NO: 317447
uuaacuuaauuggcauaga

SEQ ID NO: 491662 - RNA, 19 nt, Artificial Sequence
  Description of Artificial Sequence: Synthetic oligonucleotide
  Antisense Strand to SEQ ID NO: 491661
ucuaugccaauuaaguuaa

SEQ ID NO: 491663 - RNA, 19 nt, Artificial Sequence
  Description of Artificial Sequence: Synthetic oligonucleotide
  Sense strand starting at position 3408 of SEQ ID NO: 317447
cagaaaugguuaccuuaag

SEQ ID NO: 491664 - RNA, 19 nt, Artificial Sequence
  Description of Artificial Sequence: Synthetic oligonucleotide
  Antisense Strand to SEQ ID NO: 491663
cuuaagguaaccauuucug

SEQ ID NO: 491665 - RNA, 19 nt, Artificial Sequence
  Description of Artificial Sequence: Synthetic oligonucleotide
  Sense strand starting at position 3409 of SEQ ID NO: 317447
agaaaugguuaccuuaagu

SEQ ID NO: 491666 - RNA, 19 nt, Artificial Sequence
  Description of Artificial Sequence: Synthetic oligonucleotide
  Antisense Strand to SEQ ID NO: 491665
acuuaagguaaccauuucu

SEQ ID NO: 491667 - RNA, 19 nt, Artificial Sequence
  Description of Artificial Sequence: Synthetic oligonucleotide
  Sense strand starting at position 3422 of SEQ ID NO: 317447
uuaagucagccgucuguua

SEQ ID NO: 491668 - RNA, 19 nt, Artificial Sequence
  Description of Artificial Sequence: Synthetic oligonucleotide
  Antisense Strand to SEQ ID NO: 491667
uaacagacggcugacuuaa

SEQ ID NO: 491669 - RNA, 19 nt, Artificial Sequence
  Description of Artificial Sequence: Synthetic oligonucleotide
  Sense strand starting at position 3804 of SEQ ID NO: 317447
gcggcuacagauuacuaua

SEQ ID NO: 491670 - RNA, 19 nt, Artificial Sequence
  Description of Artificial Sequence: Synthetic oligonucleotide
  Antisense Strand to SEQ ID NO: 491669
uauaguaaucuguagccgc

SEQ ID NO: 491671 - RNA, 19 nt, Artificial Sequence
  Description of Artificial Sequence: Synthetic oligonucleotide
  Sense strand starting at position 3806 of SEQ ID NO: 317447
ggcuacagauuacuauauu

SEQ ID NO: 491672 - RNA, 19 nt, Artificial Sequence
  Description of Artificial Sequence: Synthetic oligonucleotide
  Antisense Strand to SEQ ID NO: 491671
aauauaguaaucuguagcc

SEQ ID NO: 491673 - RNA, 19 nt, Artificial Sequence
  Description of Artificial Sequence: Synthetic oligonucleotide
  Sense strand starting at position 128 of SEQ ID NO: 317448
ccaccuucccuguagugau

SEQ ID NO: 491674 - RNA, 19 nt, Artificial Sequence
  Description of Artificial Sequence: Synthetic oligonucleotide
  Antisense Strand to SEQ ID NO: 491673
aucacuacagggaaggugg

SEQ ID NO: 491675 - RNA, 19 nt, Artificial Sequence
  Description of Artificial Sequence: Synthetic oligonucleotide
  Sense strand starting at position 220 of SEQ ID NO: 317448
gguaaaugggucgaugaca

SEQ ID NO: 491676 - RNA, 19 nt, Artificial Sequence
  Description of Artificial Sequence: Synthetic oligonucleotide
  Antisense Strand to SEQ ID NO: 491675
ugucaucgacccauuuacc

SEQ ID NO: 491677 - RNA, 19 nt, Artificial Sequence
  Description of Artificial Sequence: Synthetic oligonucleotide
  Sense strand starting at position 242 of SEQ ID NO: 317448
acagaaauaccuuguugag

SEQ ID NO: 491678 - RNA, 19 nt, Artificial Sequence
  Description of Artificial Sequence: Synthetic oligonucleotide
  Antisense Strand to SEQ ID NO: 491677
cucaacaagguauuucugu

SEQ ID NO: 491679 - RNA, 19 nt, Artificial Sequence
  Description of Artificial Sequence: Synthetic oligonucleotide
  Sense strand starting at position 317 of SEQ ID NO: 317448
gugacuuuaucauugacac

SEQ ID NO: 491680 - RNA, 19 nt, Artificial Sequence
  Description of Artificial Sequence: Synthetic oligonucleotide
  Antisense Strand to SEQ ID NO: 491679
gugucaaugauaaagucac

SEQ ID NO: 491681 - RNA, 19 nt, Artificial Sequence
  Description of Artificial Sequence: Synthetic oligonucleotide
  Sense strand starting at position 473 of SEQ ID NO: 317448
auggcaucacuuggauaga

SEQ ID NO: 491682 - RNA, 19 nt, Artificial Sequence
  Description of Artificial Sequence: Synthetic oligonucleotide
  Antisense Strand to SEQ ID NO: 491681
ucuauccaagugaugccau

SEQ ID NO: 491683 - RNA, 19 nt, Artificial Sequence
  Description of Artificial Sequence: Synthetic oligonucleotide
  Sense strand starting at position 503 of SEQ ID NO: 317448
uugggaaugcuucggaaca

SEQ ID NO: 491684 - RNA, 19 nt, Artificial Sequence
  Description of Artificial Sequence: Synthetic oligonucleotide
  Antisense Strand to SEQ ID NO: 491683
uguuccgaagcauucccaa

SEQ ID NO: 491685 - RNA, 19 nt, Artificial Sequence
  Description of Artificial Sequence: Synthetic oligonucleotide
  Sense strand starting at position 594 of SEQ ID NO: 317448
gguugauauuggcuugaga

SEQ ID NO: 491686 - RNA, 19 nt, Artificial Sequence
  Description of Artificial Sequence: Synthetic oligonucleotide
  Antisense Strand to SEQ ID NO: 491685
ucucaagccaauaucaacc

SEQ ID NO: 491687 - RNA, 19 nt, Artificial Sequence
  Description of Artificial Sequence: Synthetic oligonucleotide
  Sense strand starting at position 596 of SEQ ID NO: 317448
uugauauuggcuugagaaa

SEQ ID NO: 491688 - RNA, 19 nt, Artificial Sequence
  Description of Artificial Sequence: Synthetic oligonucleotide
  Antisense Strand to SEQ ID NO: 491687
uuucucaagccaauaucaa

SEQ ID NO: 491689 - RNA, 19 nt, Artificial Sequence
  Description of Artificial Sequence: Synthetic oligonucleotide
  Sense strand starting at position 633 of SEQ ID NO: 317448
gaucgaaugcucuaguaaa

SEQ ID NO: 491690 - RNA, 19 nt, Artificial Sequence
  Description of Artificial Sequence: Synthetic oligonucleotide
  Antisense Strand to SEQ ID NO: 491689
uuuacuagagcauucgauc

SEQ ID NO: 491691 - RNA, 19 nt, Artificial Sequence
  Description of Artificial Sequence: Synthetic oligonucleotide
  Sense strand starting at position 763 of SEQ ID NO: 317448
guguucuuuccugaauauc

SEQ ID NO: 491692 - RNA, 19 nt, Artificial Sequence
  Description of Artificial Sequence: Synthetic oligonucleotide
  Antisense Strand to SEQ ID NO: 491691
gauauucaggaaagaacac

SEQ ID NO: 491693 - RNA, 19 nt, Artificial Sequence
  Description of Artificial Sequence: Synthetic oligonucleotide
  Sense strand starting at position 843 of SEQ ID NO: 317448
ccaguuuagccagagccaa

SEQ ID NO: 491694 - RNA, 19 nt, Artificial Sequence
  Description of Artificial Sequence: Synthetic oligonucleotide
  Antisense Strand to SEQ ID NO: 491693
uuggcucuggcuaaacugg

SEQ ID NO: 491695 - RNA, 19 nt, Artificial Sequence
  Description of Artificial Sequence: Synthetic oligonucleotide
  Sense strand starting at position 937 of SEQ ID NO: 317448
gcuuauuugaggugagucu

SEQ ID NO: 491696 - RNA, 19 nt, Artificial Sequence
  Description of Artificial Sequence: Synthetic oligonucleotide
  Antisense Strand to SEQ ID NO: 491695
agacucaccucaaauaagc

SEQ ID NO: 491697 - RNA, 19 nt, Artificial Sequence
  Description of Artificial Sequence: Synthetic oligonucleotide
  Sense strand starting at position 944 of SEQ ID NO: 317448
ugaggugagucuuccacag

SEQ ID NO: 491698 - RNA, 19 nt, Artificial Sequence
  Description of Artificial Sequence: Synthetic oligonucleotide
  Antisense Strand to SEQ ID NO: 491697
cuguggaagacucaccuca

SEQ ID NO: 491699 - RNA, 19 nt, Artificial Sequence
  Description of Artificial Sequence: Synthetic oligonucleotide
  Sense strand starting at position 974 of SEQ ID NO: 317448
augagauucucauuggucu

SEQ ID NO: 491700 - RNA, 19 nt, Artificial Sequence
  Description of Artificial Sequence: Synthetic oligonucleotide
  Antisense Strand to SEQ ID NO: 491699
agaccaaugagaaucucau

SEQ ID NO: 491701 - RNA, 19 nt, Artificial Sequence
  Description of Artificial Sequence: Synthetic oligonucleotide
  Sense strand starting at position 975 of SEQ ID NO: 317448
ugagauucucauuggucug

SEQ ID NO: 491702 - RNA, 19 nt, Artificial Sequence
  Description of Artificial Sequence: Synthetic oligonucleotide
  Antisense Strand to SEQ ID NO: 491701
cagaccaaugagaaucuca

SEQ ID NO: 491703 - RNA, 19 nt, Artificial Sequence
  Description of Artificial Sequence: Synthetic oligonucleotide
  Sense strand starting at position 982 of SEQ ID NO: 317448
cucauuggucuguaucuga

SEQ ID NO: 491704 - RNA, 19 nt, Artificial Sequence
  Description of Artificial Sequence: Synthetic oligonucleotide
  Antisense Strand to SEQ ID NO: 491703
ucagauacagaccaaugag

SEQ ID NO: 491705 - RNA, 19 nt, Artificial Sequence
  Description of Artificial Sequence: Synthetic oligonucleotide
  Sense strand starting at position 1102 of SEQ ID NO: 317448
ggucuuggcaacuauagca

SEQ ID NO: 491706 - RNA, 19 nt, Artificial Sequence
  Description of Artificial Sequence: Synthetic oligonucleotide
  Antisense Strand to SEQ ID NO: 491705
ugcuauaguugccaagacc

SEQ ID NO: 491707 - RNA, 19 nt, Artificial Sequence
  Description of Artificial Sequence: Synthetic oligonucleotide
  Sense strand starting at position 1180 of SEQ ID NO: 317448
auggccauccacuaaguaa

SEQ ID NO: 491708 - RNA, 19 nt, Artificial Sequence
  Description of Artificial Sequence: Synthetic oligonucleotide
  Antisense Strand to SEQ ID NO: 491707
uuacuuaguggauggccau

SEQ ID NO: 491709 - RNA, 19 nt, Artificial Sequence
  Description of Artificial Sequence: Synthetic oligonucleotide
  Sense strand starting at position 2192 of SEQ ID NO: 317448
ggaagcgauuugucaggcu

SEQ ID NO: 491710 - RNA, 19 nt, Artificial Sequence
  Description of Artificial Sequence: Synthetic oligonucleotide
  Antisense Strand to SEQ ID NO: 491709
agccugacaaaucgcuucc

SEQ ID NO: 491711 - RNA, 19 nt, Artificial Sequence
  Description of Artificial Sequence: Synthetic oligonucleotide
  Sense strand starting at position 2224 of SEQ ID NO: 317448
gcauuaacacuauauccga

SEQ ID NO: 491712 - RNA, 19 nt, Artificial Sequence
  Description of Artificial Sequence: Synthetic oligonucleotide
  Antisense Strand to SEQ ID NO: 491711
ucggauauaguguuaaugc

SEQ ID NO: 491713 - RNA, 19 nt, Artificial Sequence
  Description of Artificial Sequence: Synthetic oligonucleotide
  Sense strand starting at position 2470 of SEQ ID NO: 317448
aguacuauuucuguguuga

SEQ ID NO: 491714 - RNA, 19 nt, Artificial Sequence
  Description of Artificial Sequence: Synthetic oligonucleotide
  Antisense Strand to SEQ ID NO: 491713
ucaacacagaaauaguacu

SEQ ID NO: 491715 - RNA, 19 nt, Artificial Sequence
  Description of Artificial Sequence: Synthetic oligonucleotide
  Sense strand starting at position 2471 of SEQ ID NO: 317448
guacuauuucuguguugaa

SEQ ID NO: 491716 - RNA, 19 nt, Artificial Sequence
  Description of Artificial Sequence: Synthetic oligonucleotide
  Antisense Strand to SEQ ID NO: 491715
uucaacacagaaauaguac

SEQ ID NO: 491717 - RNA, 19 nt, Artificial Sequence
  Description of Artificial Sequence: Synthetic oligonucleotide
  Sense strand starting at position 2525 of SEQ ID NO: 317448
cuccaugaguuccuaccua

SEQ ID NO: 491718 - RNA, 19 nt, Artificial Sequence
  Description of Artificial Sequence: Synthetic oligonucleotide
  Antisense Strand to SEQ ID NO: 491717
uagguaggaacucauggag

SEQ ID NO: 491719 - RNA, 19 nt, Artificial Sequence
  Description of Artificial Sequence: Synthetic oligonucleotide
  Sense strand starting at position 2529 of SEQ ID NO: 317448
augaguuccuaccuaagga

SEQ ID NO: 491720 - RNA, 19 nt, Artificial Sequence
  Description of Artificial Sequence: Synthetic oligonucleotide
  Antisense Strand to SEQ ID NO: 491719
uccuuagguaggaacucau

SEQ ID NO: 491721 - RNA, 19 nt, Artificial Sequence
  Description of Artificial Sequence: Synthetic oligonucleotide
  Sense strand starting at position 2628 of SEQ ID NO: 317448
gggacuuuccacugggaug

SEQ ID NO: 491722 - RNA, 19 nt, Artificial Sequence
  Description of Artificial Sequence: Synthetic oligonucleotide
  Antisense Strand to SEQ ID NO: 491721
caucccaguggaaaguccc

SEQ ID NO: 491723 - RNA, 19 nt, Artificial Sequence
  Description of Artificial Sequence: Synthetic oligonucleotide
  Sense strand starting at position 2648 of SEQ ID NO: 317448
cccaaauaagucuaguacu

SEQ ID NO: 491724 - RNA, 19 nt, Artificial Sequence
  Description of Artificial Sequence: Synthetic oligonucleotide
  Antisense Strand to SEQ ID NO: 491723
aguacuagacuuauuuggg

SEQ ID NO: 491725 - RNA, 19 nt, Artificial Sequence
  Description of Artificial Sequence: Synthetic oligonucleotide
  Sense strand starting at position 2656 of SEQ ID NO: 317448
agucuaguacuccacuuua

SEQ ID NO: 491726 - RNA, 19 nt, Artificial Sequence
  Description of Artificial Sequence: Synthetic oligonucleotide
  Antisense Strand to SEQ ID NO: 491725
uaaaguggaguacuagacu

SEQ ID NO: 491727 - RNA, 19 nt, Artificial Sequence
  Description of Artificial Sequence: Synthetic oligonucleotide
  Sense strand starting at position 2760 of SEQ ID NO: 317448
ugaaucacugaauggucaa

SEQ ID NO: 491728 - RNA, 19 nt, Artificial Sequence
  Description of Artificial Sequence: Synthetic oligonucleotide
  Antisense Strand to SEQ ID NO: 491727
uugaccauucagugauuca

SEQ ID NO: 491729 - RNA, 19 nt, Artificial Sequence
  Description of Artificial Sequence: Synthetic oligonucleotide
  Sense strand starting at position 3217 of SEQ ID NO: 317448
augguuugucaucaauaaa

SEQ ID NO: 491730 - RNA, 19 nt, Artificial Sequence
  Description of Artificial Sequence: Synthetic oligonucleotide
  Antisense Strand to SEQ ID NO: 491729
uuuauugaugacaaaccau

SEQ ID NO: 491731 - RNA, 19 nt, Artificial Sequence
  Description of Artificial Sequence: Synthetic oligonucleotide
  Sense strand starting at position 3301 of SEQ ID NO: 317448
ugguuucuugagcaauaau

SEQ ID NO: 491732 - RNA, 19 nt, Artificial Sequence
  Description of Artificial Sequence: Synthetic oligonucleotide
  Antisense Strand to SEQ ID NO: 491731
auuauugcucaagaaacca

SEQ ID NO: 491733 - RNA, 19 nt, Artificial Sequence
  Description of Artificial Sequence: Synthetic oligonucleotide
  Sense strand starting at position 3447 of SEQ ID NO: 317448
ugauuauaauggguaguca

SEQ ID NO: 491734 - RNA, 19 nt, Artificial Sequence
  Description of Artificial Sequence: Synthetic oligonucleotide
  Antisense Strand to SEQ ID NO: 491733
ugacuacccauuauaauca

SEQ ID NO: 491735 - RNA, 19 nt, Artificial Sequence
  Description of Artificial Sequence: Synthetic oligonucleotide
  Sense strand starting at position 3455 of SEQ ID NO: 317448
auggguagucaagguuaau

SEQ ID NO: 491736 - RNA, 19 nt, Artificial Sequence
  Description of Artificial Sequence: Synthetic oligonucleotide
  Antisense Strand to SEQ ID NO: 491735
auuaaccuugacuacccau

SEQ ID NO: 491737 - RNA, 19 nt, Artificial Sequence
  Description of Artificial Sequence: Synthetic oligonucleotide
  Sense strand starting at position 3458 of SEQ ID NO: 317448
gguagucaagguuaauaac

SEQ ID NO: 491738 - RNA, 19 nt, Artificial Sequence
  Description of Artificial Sequence: Synthetic oligonucleotide
  Antisense Strand to SEQ ID NO: 491737
guuauuaaccuugacuacc

SEQ ID NO: 491739 - RNA, 19 nt, Artificial Sequence
  Description of Artificial Sequence: Synthetic oligonucleotide
  Sense strand starting at position 3501 of SEQ ID NO: 317448
agugguucucaacauuagu

SEQ ID NO: 491740 - RNA, 19 nt, Artificial Sequence
  Description of Artificial Sequence: Synthetic oligonucleotide
  Antisense Strand to SEQ ID NO: 491739
acuaauguugagaaccacu

SEQ ID NO: 491741 - RNA, 19 nt, Artificial Sequence
  Description of Artificial Sequence: Synthetic oligonucleotide
  Sense strand starting at position 3523 of SEQ ID NO: 317448
aguuuagaauuaucuggga

SEQ ID NO: 491742 - RNA, 19 nt, Artificial Sequence
  Description of Artificial Sequence: Synthetic oligonucleotide
  Antisense Strand to SEQ ID NO: 491741
ucccagauaauucuaaacu

SEQ ID NO: 491743 - RNA, 19 nt, Artificial Sequence
  Description of Artificial Sequence: Synthetic oligonucleotide
  Sense strand starting at position 3527 of SEQ ID NO: 317448
uagaauuaucugggaaguu

SEQ ID NO: 491744 - RNA, 19 nt, Artificial Sequence
  Description of Artificial Sequence: Synthetic oligonucleotide
  Antisense Strand to SEQ ID NO: 491743
aacuucccagauaauucua

SEQ ID NO: 491745 - RNA, 19 nt, Artificial Sequence
  Description of Artificial Sequence: Synthetic oligonucleotide
  Sense strand starting at position 3607 of SEQ ID NO: 317448
agaucuaggcgucaguaau

SEQ ID NO: 491746 - RNA, 19 nt, Artificial Sequence
  Description of Artificial Sequence: Synthetic oligonucleotide
  Antisense Strand to SEQ ID NO: 491745
auuacugacgccuagaucu

SEQ ID NO: 491747 - RNA, 19 nt, Artificial Sequence
  Description of Artificial Sequence: Synthetic oligonucleotide
  Sense strand starting at position 3850 of SEQ ID NO: 317448
gaauguuggcauuggagaa

SEQ ID NO: 491748 - RNA, 19 nt, Artificial Sequence
  Description of Artificial Sequence: Synthetic oligonucleotide
  Antisense Strand to SEQ ID NO: 491747
uucuccaaugccaacauuc

SEQ ID NO: 491749 - RNA, 19 nt, Artificial Sequence
  Description of Artificial Sequence: Synthetic oligonucleotide
  Sense strand starting at position 3873 of SEQ ID NO: 317448
uuaagaggucaucauguau

SEQ ID NO: 491750 - RNA, 19 nt, Artificial Sequence
  Description of Artificial Sequence: Synthetic oligonucleotide
  Antisense Strand to SEQ ID NO: 491749
auacaugaugaccucuuaa

SEQ ID NO: 491751 - RNA, 19 nt, Artificial Sequence
  Description of Artificial Sequence: Synthetic oligonucleotide
  Sense strand starting at position 3880 of SEQ ID NO: 317448
gucaucauguauccauaac

SEQ ID NO: 491752 - RNA, 19 nt, Artificial Sequence
  Description of Artificial Sequence: Synthetic oligonucleotide
  Antisense Strand to SEQ ID NO: 491751
guuauggauacaugaugac

SEQ ID NO: 491753 - RNA, 19 nt, Artificial Sequence
  Description of Artificial Sequence: Synthetic oligonucleotide
  Sense strand starting at position 53 of SEQ ID NO: 317449
ucugcagaacccuagauau

SEQ ID NO: 491754 - RNA, 19 nt, Artificial Sequence
  Description of Artificial Sequence: Synthetic oligonucleotide
  Antisense Strand to SEQ ID NO: 491753
auaucuaggguucugcaga

SEQ ID NO: 491755 - RNA, 19 nt, Artificial Sequence
  Description of Artificial Sequence: Synthetic oligonucleotide
  Sense strand starting at position 139 of SEQ ID NO: 317449
cgugccuuccgcuuacaaa

SEQ ID NO: 491756 - RNA, 19 nt, Artificial Sequence
  Description of Artificial Sequence: Synthetic oligonucleotide
  Antisense Strand to SEQ ID NO: 491755
uuuguaagcggaaggcacg

SEQ ID NO: 491757 - RNA, 19 nt, Artificial Sequence
  Description of Artificial Sequence: Synthetic oligonucleotide
  Sense strand starting at position 518 of SEQ ID NO: 317449
ggguguuagcuggaaggaa

SEQ ID NO: 491758 - RNA, 19 nt, Artificial Sequence
  Description of Artificial Sequence: Synthetic oligonucleotide
  Antisense Strand to SEQ ID NO: 491757
uuccuuccagcuaacaccc

SEQ ID NO: 491759 - RNA, 19 nt, Artificial Sequence
  Description of Artificial Sequence: Synthetic oligonucleotide
  Sense strand starting at position 519 of SEQ ID NO: 317449
gguguuagcuggaaggaag

SEQ ID NO: 491760 - RNA, 19 nt, Artificial Sequence
  Description of Artificial Sequence: Synthetic oligonucleotide
  Antisense Strand to SEQ ID NO: 491759
cuuccuuccagcuaacacc

SEQ ID NO: 491761 - RNA, 19 nt, Artificial Sequence
  Description of Artificial Sequence: Synthetic oligonucleotide
  Sense strand starting at position 597 of SEQ ID NO: 317449
gggcaaaugcaucagaauc

SEQ ID NO: 491762 - RNA, 19 nt, Artificial Sequence
  Description of Artificial Sequence: Synthetic oligonucleotide
  Antisense Strand to SEQ ID NO: 491761
gauucugaugcauuugccc

SEQ ID NO: 491763 - RNA, 19 nt, Artificial Sequence
  Description of Artificial Sequence: Synthetic oligonucleotide
  Sense strand starting at position 628 of SEQ ID NO: 317449
gaguucuuccgagauuguc

SEQ ID NO: 491764 - RNA, 19 nt, Artificial Sequence
  Description of Artificial Sequence: Synthetic oligonucleotide
  Antisense Strand to SEQ ID NO: 491763
gacaaucucggaagaacuc

SEQ ID NO: 491765 - RNA, 19 nt, Artificial Sequence
  Description of Artificial Sequence: Synthetic oligonucleotide
  Sense strand starting at position 705 of SEQ ID NO: 317449
ggugucuccagguagcaau

SEQ ID NO: 491766 - RNA, 19 nt, Artificial Sequence
  Description of Artificial Sequence: Synthetic oligonucleotide
  Antisense Strand to SEQ ID NO: 491765
auugcuaccuggagacacc

SEQ ID NO: 491767 - RNA, 19 nt, Artificial Sequence
  Description of Artificial Sequence: Synthetic oligonucleotide
  Sense strand starting at position 724 of SEQ ID NO: 317449
gccauccuccuguaucuuu

SEQ ID NO: 491768 - RNA, 19 nt, Artificial Sequence
  Description of Artificial Sequence: Synthetic oligonucleotide
  Antisense Strand to SEQ ID NO: 491767
aaagauacaggaggauggc

SEQ ID NO: 491769 - RNA, 19 nt, Artificial Sequence
  Description of Artificial Sequence: Synthetic oligonucleotide
  Sense strand starting at position 816 of SEQ ID NO: 317449
gugucccuuccauaugcau

SEQ ID NO: 491770 - RNA, 19 nt, Artificial Sequence
  Description of Artificial Sequence: Synthetic oligonucleotide
  Antisense Strand to SEQ ID NO: 491769
augcauauggaagggacac

SEQ ID NO: 491771 - RNA, 19 nt, Artificial Sequence
  Description of Artificial Sequence: Synthetic oligonucleotide
  Sense strand starting at position 983 of SEQ ID NO: 317449
ggcacagaacucuagucaa

SEQ ID NO: 491772 - RNA, 19 nt, Artificial Sequence
  Description of Artificial Sequence: Synthetic oligonucleotide
  Antisense Strand to SEQ ID NO: 491771
uugacuagaguucugugcc

SEQ ID NO: 491773 - RNA, 19 nt, Artificial Sequence
  Description of Artificial Sequence: Synthetic oligonucleotide
  Sense strand starting at position 986 of SEQ ID NO: 317449
acagaacucuagucaacug

SEQ ID NO: 491774 - RNA, 19 nt, Artificial Sequence
  Description of Artificial Sequence: Synthetic oligonucleotide
  Antisense Strand to SEQ ID NO: 491773
caguugacuagaguucugu

SEQ ID NO: 491775 - RNA, 19 nt, Artificial Sequence
  Description of Artificial Sequence: Synthetic oligonucleotide
  Sense strand starting at position 2203 of SEQ ID NO: 317449
gcgcgcugacaauuccauu

SEQ ID NO: 491776 - RNA, 19 nt, Artificial Sequence
  Description of Artificial Sequence: Synthetic oligonucleotide
  Antisense Strand to SEQ ID NO: 491775
aauggaauugucagcgcgc

SEQ ID NO: 491777 - RNA, 19 nt, Artificial Sequence
  Description of Artificial Sequence: Synthetic oligonucleotide
  Sense strand starting at position 2297 of SEQ ID NO: 317449
gucaguugagagugccaga

SEQ ID NO: 491778 - RNA, 19 nt, Artificial Sequence
  Description of Artificial Sequence: Synthetic oligonucleotide
  Antisense Strand to SEQ ID NO: 491777
ucuggcacucucaacugac

SEQ ID NO: 491779 - RNA, 19 nt, Artificial Sequence
  Description of Artificial Sequence: Synthetic oligonucleotide
  Sense strand starting at position 2324 of SEQ ID NO: 317449
ggagcgaaggaucgugaua

SEQ ID NO: 491780 - RNA, 19 nt, Artificial Sequence
  Description of Artificial Sequence: Synthetic oligonucleotide
  Antisense Strand to SEQ ID NO: 491779
uaucacgauccuucgcucc

SEQ ID NO: 491781 - RNA, 19 nt, Artificial Sequence
  Description of Artificial Sequence: Synthetic oligonucleotide
  Sense strand starting at position 2337 of SEQ ID NO: 317449
gugauaacuuagcugcaaa

SEQ ID NO: 491782 - RNA, 19 nt, Artificial Sequence
  Description of Artificial Sequence: Synthetic oligonucleotide
  Antisense Strand to SEQ ID NO: 491781
uuugcagcuaaguuaucac

SEQ ID NO: 491783 - RNA, 19 nt, Artificial Sequence
  Description of Artificial Sequence: Synthetic oligonucleotide
  Sense strand starting at position 2389 of SEQ ID NO: 317449
guguguauuucuuuccuuu

SEQ ID NO: 491784 - RNA, 19 nt, Artificial Sequence
  Description of Artificial Sequence: Synthetic oligonucleotide
  Antisense Strand to SEQ ID NO: 491783
aaaggaaagaaauacacac

SEQ ID NO: 491785 - RNA, 19 nt, Artificial Sequence
  Description of Artificial Sequence: Synthetic oligonucleotide
  Sense strand starting at position 2411 of SEQ ID NO: 317449
gcuguuuaaccuuagagca

SEQ ID NO: 491786 - RNA, 19 nt, Artificial Sequence
  Description of Artificial Sequence: Synthetic oligonucleotide
  Antisense Strand to SEQ ID NO: 491785
ugcucuaagguuaaacagc

SEQ ID NO: 491787 - RNA, 19 nt, Artificial Sequence
  Description of Artificial Sequence: Synthetic oligonucleotide
  Sense strand starting at position 2487 of SEQ ID NO: 317449
gacuacuguuggucuccua

SEQ ID NO: 491788 - RNA, 19 nt, Artificial Sequence
  Description of Artificial Sequence: Synthetic oligonucleotide
  Antisense Strand to SEQ ID NO: 491787
uaggagaccaacaguaguc

SEQ ID NO: 491789 - RNA, 19 nt, Artificial Sequence
  Description of Artificial Sequence: Synthetic oligonucleotide
  Sense strand starting at position 2703 of SEQ ID NO: 317449
ugagcagaguugcucagua

SEQ ID NO: 491790 - RNA, 19 nt, Artificial Sequence
  Description of Artificial Sequence: Synthetic oligonucleotide
  Antisense Strand to SEQ ID NO: 491789
uacugagcaacucugcuca

SEQ ID NO: 491791 - RNA, 19 nt, Artificial Sequence
  Description of Artificial Sequence: Synthetic oligonucleotide
  Sense strand starting at position 2705 of SEQ ID NO: 317449
agcagaguugcucaguauc

SEQ ID NO: 491792 - RNA, 19 nt, Artificial Sequence
  Description of Artificial Sequence: Synthetic oligonucleotide
  Antisense Strand to SEQ ID NO: 491791
gauacugagcaacucugcu

SEQ ID NO: 491793 - RNA, 19 nt, Artificial Sequence
  Description of Artificial Sequence: Synthetic oligonucleotide
  Sense strand starting at position 2707 of SEQ ID NO: 317449
cagaguugcucaguauccu

SEQ ID NO: 491794 - RNA, 19 nt, Artificial Sequence
  Description of Artificial Sequence: Synthetic oligonucleotide
  Antisense Strand to SEQ ID NO: 491793
aggauacugagcaacucug

SEQ ID NO: 491795 - RNA, 19 nt, Artificial Sequence
  Description of Artificial Sequence: Synthetic oligonucleotide
  Sense strand starting at position 2708 of SEQ ID NO: 317449
agaguugcucaguauccuu

SEQ ID NO: 491796 - RNA, 19 nt, Artificial Sequence
  Description of Artificial Sequence: Synthetic oligonucleotide
  Antisense Strand to SEQ ID NO: 491795
aaggauacugagcaacucu

SEQ ID NO: 491797 - RNA, 19 nt, Artificial Sequence
  Description of Artificial Sequence: Synthetic oligonucleotide
  Sense strand starting at position 2788 of SEQ ID NO: 317449
cgagguaaaccacauguca

SEQ ID NO: 491798 - RNA, 19 nt, Artificial Sequence
  Description of Artificial Sequence: Synthetic oligonucleotide
  Antisense Strand to SEQ ID NO: 491797
ugacaugugguuuaccucg

SEQ ID NO: 491799 - RNA, 19 nt, Artificial Sequence
  Description of Artificial Sequence: Synthetic oligonucleotide
  Sense strand starting at position 2964 of SEQ ID NO: 317449
uuccaagggacuggugauu

SEQ ID NO: 491800 - RNA, 19 nt, Artificial Sequence
  Description of Artificial Sequence: Synthetic oligonucleotide
  Antisense Strand to SEQ ID NO: 491799
aaucaccagucccuuggaa

SEQ ID NO: 491801 - RNA, 19 nt, Artificial Sequence
  Description of Artificial Sequence: Synthetic oligonucleotide
  Sense strand starting at position 3100 of SEQ ID NO: 317449
agaggaauguaugaaggua

SEQ ID NO: 491802 - RNA, 19 nt, Artificial Sequence
  Description of Artificial Sequence: Synthetic oligonucleotide
  Antisense Strand to SEQ ID NO: 491801
uaccuucauacauuccucu

SEQ ID NO: 491803 - RNA, 19 nt, Artificial Sequence
  Description of Artificial Sequence: Synthetic oligonucleotide
  Sense strand starting at position 3176 of SEQ ID NO: 317449
aagucaucuuugguuugga

SEQ ID NO: 491804 - RNA, 19 nt, Artificial Sequence
  Description of Artificial Sequence: Synthetic oligonucleotide
  Antisense Strand to SEQ ID NO: 491803
uccaaaccaaagaugacuu

SEQ ID NO: 491805 - RNA, 19 nt, Artificial Sequence
  Description of Artificial Sequence: Synthetic oligonucleotide
  Sense strand starting at position 3179 of SEQ ID NO: 317449
ucaucuuugguuuggagau

SEQ ID NO: 491806 - RNA, 19 nt, Artificial Sequence
  Description of Artificial Sequence: Synthetic oligonucleotide
  Antisense Strand to SEQ ID NO: 491805
aucuccaaaccaaagauga

SEQ ID NO: 491807 - RNA, 19 nt, Artificial Sequence
  Description of Artificial Sequence: Synthetic oligonucleotide
  Sense strand starting at position 3181 of SEQ ID NO: 317449
aucuuugguuuggagauuu

SEQ ID NO: 491808 - RNA, 19 nt, Artificial Sequence
  Description of Artificial Sequence: Synthetic oligonucleotide
  Antisense Strand to SEQ ID NO: 491807
aaaucuccaaaccaaagau

SEQ ID NO: 491809 - RNA, 19 nt, Artificial Sequence
  Description of Artificial Sequence: Synthetic oligonucleotide
  Sense strand starting at position 3311 of SEQ ID NO: 317449
gaccaaguguucuuugcaa

SEQ ID NO: 491810 - RNA, 19 nt, Artificial Sequence
  Description of Artificial Sequence: Synthetic oligonucleotide
  Antisense Strand to SEQ ID NO: 491809
uugcaaagaacacuugguc

SEQ ID NO: 491811 - RNA, 19 nt, Artificial Sequence
  Description of Artificial Sequence: Synthetic oligonucleotide
  Sense strand starting at position 3360 of SEQ ID NO: 317449
gauggagcuucccuuccau

SEQ ID NO: 491812 - RNA, 19 nt, Artificial Sequence
  Description of Artificial Sequence: Synthetic oligonucleotide
  Antisense Strand to SEQ ID NO: 491811
auggaagggaagcuccauc

SEQ ID NO: 491813 - RNA, 19 nt, Artificial Sequence
  Description of Artificial Sequence: Synthetic oligonucleotide
  Sense strand starting at position 3468 of SEQ ID NO: 317449
ugaaaucucuugcugaguc

SEQ ID NO: 491814 - RNA, 19 nt, Artificial Sequence
  Description of Artificial Sequence: Synthetic oligonucleotide
  Antisense Strand to SEQ ID NO: 491813
gacucagcaagagauuuca

SEQ ID NO: 491815 - RNA, 19 nt, Artificial Sequence
  Description of Artificial Sequence: Synthetic oligonucleotide
  Sense strand starting at position 3476 of SEQ ID NO: 317449
cuugcugagucauucucaa

SEQ ID NO: 491816 - RNA, 19 nt, Artificial Sequence
  Description of Artificial Sequence: Synthetic oligonucleotide
  Antisense Strand to SEQ ID NO: 491815
uugagaaugacucagcaag

SEQ ID NO: 491817 - RNA, 19 nt, Artificial Sequence
  Description of Artificial Sequence: Synthetic oligonucleotide
  Sense strand starting at position 3554 of SEQ ID NO: 317449
ugcagagcucaacaagaau

SEQ ID NO: 491818 - RNA, 19 nt, Artificial Sequence
  Description of Artificial Sequence: Synthetic oligonucleotide
  Antisense Strand to SEQ ID NO: 491817
auucuuguugagcucugca

SEQ ID NO: 491819 - RNA, 19 nt, Artificial Sequence
  Description of Artificial Sequence: Synthetic oligonucleotide
  Sense strand starting at position 3565 of SEQ ID NO: 317449
acaagaauauguccugcuu

SEQ ID NO: 491820 - RNA, 19 nt, Artificial Sequence
  Description of Artificial Sequence: Synthetic oligonucleotide
  Antisense Strand to SEQ ID NO: 491819
aagcaggacauauucuugu

SEQ ID NO: 491821 - RNA, 19 nt, Artificial Sequence
  Description of Artificial Sequence: Synthetic oligonucleotide
  Sense strand starting at position 3606 of SEQ ID NO: 317449
augcauaugucaucuagag

SEQ ID NO: 491822 - RNA, 19 nt, Artificial Sequence
  Description of Artificial Sequence: Synthetic oligonucleotide
  Antisense Strand to SEQ ID NO: 491821
cucuagaugacauaugcau

SEQ ID NO: 491823 - RNA, 19 nt, Artificial Sequence
  Description of Artificial Sequence: Synthetic oligonucleotide
  Sense strand starting at position 3608 of SEQ ID NO: 317449
gcauaugucaucuagagga

SEQ ID NO: 491824 - RNA, 19 nt, Artificial Sequence
  Description of Artificial Sequence: Synthetic oligonucleotide
  Antisense Strand to SEQ ID NO: 491823
uccucuagaugacauaugc

SEQ ID NO: 491825 - RNA, 19 nt, Artificial Sequence
  Description of Artificial Sequence: Synthetic oligonucleotide
  Sense strand starting at position 3622 of SEQ ID NO: 317449
gaggauuccugcucuugag

SEQ ID NO: 491826 - RNA, 19 nt, Artificial Sequence
  Description of Artificial Sequence: Synthetic oligonucleotide
  Antisense Strand to SEQ ID NO: 491825
cucaagagcaggaauccuc

SEQ ID NO: 491827 - RNA, 19 nt, Artificial Sequence
  Description of Artificial Sequence: Synthetic oligonucleotide
  Sense strand starting at position 3683 of SEQ ID NO: 317449
gucccuuguuaaucuaaau

SEQ ID NO: 491828 - RNA, 19 nt, Artificial Sequence
  Description of Artificial Sequence: Synthetic oligonucleotide
  Antisense Strand to SEQ ID NO: 491827
auuuagauuaacaagggac

SEQ ID NO: 491829 - RNA, 19 nt, Artificial Sequence
  Description of Artificial Sequence: Synthetic oligonucleotide
  Sense strand starting at position 3779 of SEQ ID NO: 317449
acuuacuuugcaggaauaa

SEQ ID NO: 491830 - RNA, 19 nt, Artificial Sequence
  Description of Artificial Sequence: Synthetic oligonucleotide
  Antisense Strand to SEQ ID NO: 491829
uuauuccugcaaaguaagu

SEQ ID NO: 491831 - RNA, 19 nt, Artificial Sequence
  Description of Artificial Sequence: Synthetic oligonucleotide
  Sense strand starting at position 3973 of SEQ ID NO: 317449
acaggaauguuucuuuaca

SEQ ID NO: 491832 - RNA, 19 nt, Artificial Sequence
  Description of Artificial Sequence: Synthetic oligonucleotide
  Antisense Strand to SEQ ID NO: 491831
uguaaagaaacauuccugu

SEQ ID NO: 491833 - RNA, 19 nt, Artificial Sequence
  Description of Artificial Sequence: Synthetic oligonucleotide
  Sense strand starting at position 42 of SEQ ID NO: 317450
agaagcuuaccauagccau

SEQ ID NO: 491834 - RNA, 19 nt, Artificial Sequence
  Description of Artificial Sequence: Synthetic oligonucleotide
  Antisense Strand to SEQ ID NO: 491833
auggcuaugguaagcuucu

SEQ ID NO: 491835 - RNA, 19 nt, Artificial Sequence
  Description of Artificial Sequence: Synthetic oligonucleotide
  Sense strand starting at position 94 of SEQ ID NO: 317450
cacuauuguccguaaaugg

SEQ ID NO: 491836 - RNA, 19 nt, Artificial Sequence
  Description of Artificial Sequence: Synthetic oligonucleotide
  Antisense Strand to SEQ ID NO: 491835
ccauuuacggacaauagug

SEQ ID NO: 491837 - RNA, 19 nt, Artificial Sequence
  Description of Artificial Sequence: Synthetic oligonucleotide
  Sense strand starting at position 141 of SEQ ID NO: 317450
ugcauuggcagccagagaa

SEQ ID NO: 491838 - RNA, 19 nt, Artificial Sequence
  Description of Artificial Sequence: Synthetic oligonucleotide
  Antisense Strand to SEQ ID NO: 491837
uucucuggcugccaaugca

SEQ ID NO: 491839 - RNA, 19 nt, Artificial Sequence
  Description of Artificial Sequence: Synthetic oligonucleotide
  Sense strand starting at position 829 of SEQ ID NO: 317450
cuuccaggaucuuugaauu

SEQ ID NO: 491840 - RNA, 19 nt, Artificial Sequence
  Description of Artificial Sequence: Synthetic oligonucleotide
  Antisense Strand to SEQ ID NO: 491839
aauucaaagauccuggaag

SEQ ID NO: 491841 - RNA, 19 nt, Artificial Sequence
  Description of Artificial Sequence: Synthetic oligonucleotide
  Sense strand starting at position 920 of SEQ ID NO: 317450
cgucuuaaugaccaugacu

SEQ ID NO: 491842 - RNA, 19 nt, Artificial Sequence
  Description of Artificial Sequence: Synthetic oligonucleotide
  Antisense Strand to SEQ ID NO: 491841
agucauggucauuaagacg

SEQ ID NO: 491843 - RNA, 19 nt, Artificial Sequence
  Description of Artificial Sequence: Synthetic oligonucleotide
  Sense strand starting at position 922 of SEQ ID NO: 317450
ucuuaaugaccaugacuga

SEQ ID NO: 491844 - RNA, 19 nt, Artificial Sequence
  Description of Artificial Sequence: Synthetic oligonucleotide
  Antisense Strand to SEQ ID NO: 491843
ucagucauggucauuaaga

SEQ ID NO: 491845 - RNA, 19 nt, Artificial Sequence
  Description of Artificial Sequence: Synthetic oligonucleotide
  Sense strand starting at position 933 of SEQ ID NO: 317450
augacugagccucaucuau

SEQ ID NO: 491846 - RNA, 19 nt, Artificial Sequence
  Description of Artificial Sequence: Synthetic oligonucleotide
  Antisense Strand to SEQ ID NO: 491845
auagaugaggcucagucau

SEQ ID NO: 491847 - RNA, 19 nt, Artificial Sequence
  Description of Artificial Sequence: Synthetic oligonucleotide
  Sense strand starting at position 1204 of SEQ ID NO: 317450
aguuuaguccuguaaauau

SEQ ID NO: 491848 - RNA, 19 nt, Artificial Sequence
  Description of Artificial Sequence: Synthetic oligonucleotide
  Antisense Strand to SEQ ID NO: 491847
auauuuacaggacuaaacu

SEQ ID NO: 491849 - RNA, 19 nt, Artificial Sequence
  Description of Artificial Sequence: Synthetic oligonucleotide
  Sense strand starting at position 1230 of SEQ ID NO: 317450
gggccuucucugcacaaga

SEQ ID NO: 491850 - RNA, 19 nt, Artificial Sequence
  Description of Artificial Sequence: Synthetic oligonucleotide
  Antisense Strand to SEQ ID NO: 491849
ucuugugcagagaaggccc

SEQ ID NO: 491851 - RNA, 19 nt, Artificial Sequence
  Description of Artificial Sequence: Synthetic oligonucleotide
  Sense strand starting at position 1380 of SEQ ID NO: 317450
uuggauguagccugggaaa

SEQ ID NO: 491852 - RNA, 19 nt, Artificial Sequence
  Description of Artificial Sequence: Synthetic oligonucleotide
  Antisense Strand to SEQ ID NO: 491851
uuucccaggcuacauccaa

SEQ ID NO: 491853 - RNA, 19 nt, Artificial Sequence
  Description of Artificial Sequence: Synthetic oligonucleotide
  Sense strand starting at position 1382 of SEQ ID NO: 317450
ggauguagccugggaaaca

SEQ ID NO: 491854 - RNA, 19 nt, Artificial Sequence
  Description of Artificial Sequence: Synthetic oligonucleotide
  Antisense Strand to SEQ ID NO: 491853
uguuucccaggcuacaucc

SEQ ID NO: 491855 - RNA, 19 nt, Artificial Sequence
  Description of Artificial Sequence: Synthetic oligonucleotide
  Sense strand starting at position 1555 of SEQ ID NO: 317450
ccgggaguaacugacuuau

SEQ ID NO: 491856 - RNA, 19 nt, Artificial Sequence
  Description of Artificial Sequence: Synthetic oligonucleotide
  Antisense Strand to SEQ ID NO: 491855
auaagucaguuacucccgg

SEQ ID NO: 491857 - RNA, 19 nt, Artificial Sequence
  Description of Artificial Sequence: Synthetic oligonucleotide
  Sense strand starting at position 1557 of SEQ ID NO: 317450
gggaguaacugacuuauau

SEQ ID NO: 491858 - RNA, 19 nt, Artificial Sequence
  Description of Artificial Sequence: Synthetic oligonucleotide
  Antisense Strand to SEQ ID NO: 491857
auauaagucaguuacuccc

SEQ ID NO: 491859 - RNA, 19 nt, Artificial Sequence
  Description of Artificial Sequence: Synthetic oligonucleotide
  Sense strand starting at position 1581 of SEQ ID NO: 317450
uuucuuuaacacugagaag

SEQ ID NO: 491860 - RNA, 19 nt, Artificial Sequence
  Description of Artificial Sequence: Synthetic oligonucleotide
  Antisense Strand to SEQ ID NO: 491859
cuucucaguguuaaagaaa

SEQ ID NO: 491861 - RNA, 19 nt, Artificial Sequence
  Description of Artificial Sequence: Synthetic oligonucleotide
  Sense strand starting at position 1602 of SEQ ID NO: 317450
aauacaaauggcgggauua

SEQ ID NO: 491862 - RNA, 19 nt, Artificial Sequence
  Description of Artificial Sequence: Synthetic oligonucleotide
  Antisense Strand to SEQ ID NO: 491861
uaaucccgccauuuguauu

SEQ ID NO: 491863 - RNA, 19 nt, Artificial Sequence
  Description of Artificial Sequence: Synthetic oligonucleotide
  Sense strand starting at position 1681 of SEQ ID NO: 317450
acgugugugacccaaauau

SEQ ID NO: 491864 - RNA, 19 nt, Artificial Sequence
  Description of Artificial Sequence: Synthetic oligonucleotide
  Antisense Strand to SEQ ID NO: 491863
auauuugggucacacacgu

SEQ ID NO: 491865 - RNA, 19 nt, Artificial Sequence
  Description of Artificial Sequence: Synthetic oligonucleotide
  Sense strand starting at position 1769 of SEQ ID NO: 317450
gggacuuucucugauuuag

SEQ ID NO: 491866 - RNA, 19 nt, Artificial Sequence
  Description of Artificial Sequence: Synthetic oligonucleotide
  Antisense Strand to SEQ ID NO: 491865
cuaaaucagagaaaguccc

SEQ ID NO: 491867 - RNA, 19 nt, Artificial Sequence
  Description of Artificial Sequence: Synthetic oligonucleotide
  Sense strand starting at position 1891 of SEQ ID NO: 317450
uugagacuucuguacuuaa

SEQ ID NO: 491868 - RNA, 19 nt, Artificial Sequence
  Description of Artificial Sequence: Synthetic oligonucleotide
  Antisense Strand to SEQ ID NO: 491867
uuaaguacagaagucucaa

SEQ ID NO: 491869 - RNA, 19 nt, Artificial Sequence
  Description of Artificial Sequence: Synthetic oligonucleotide
  Sense strand starting at position 1948 of SEQ ID NO: 317450
gaauguguugcuuaccaag

SEQ ID NO: 491870 - RNA, 19 nt, Artificial Sequence
  Description of Artificial Sequence: Synthetic oligonucleotide
  Antisense Strand to SEQ ID NO: 491869
cuugguaagcaacacauuc

SEQ ID NO: 491871 - RNA, 19 nt, Artificial Sequence
  Description of Artificial Sequence: Synthetic oligonucleotide
  Sense strand starting at position 1971 of SEQ ID NO: 317450
ccugcuugucuguuccauu

SEQ ID NO: 491872 - RNA, 19 nt, Artificial Sequence
  Description of Artificial Sequence: Synthetic oligonucleotide
  Antisense Strand to SEQ ID NO: 491871
aauggaacagacaagcagg

SEQ ID NO: 491873 - RNA, 19 nt, Artificial Sequence
  Description of Artificial Sequence: Synthetic oligonucleotide
  Sense strand starting at position 1972 of SEQ ID NO: 317450
cugcuugucuguuccauuu

SEQ ID NO: 491874 - RNA, 19 nt, Artificial Sequence
  Description of Artificial Sequence: Synthetic oligonucleotide
  Antisense Strand to SEQ ID NO: 491873
aaauggaacagacaagcag

SEQ ID NO: 491875 - RNA, 19 nt, Artificial Sequence
  Description of Artificial Sequence: Synthetic oligonucleotide
  Sense strand starting at position 1978 of SEQ ID NO: 317450
gucuguuccauuuggcagu

SEQ ID NO: 491876 - RNA, 19 nt, Artificial Sequence
  Description of Artificial Sequence: Synthetic oligonucleotide
  Antisense Strand to SEQ ID NO: 491875
acugccaaauggaacagac

SEQ ID NO: 491877 - RNA, 19 nt, Artificial Sequence
  Description of Artificial Sequence: Synthetic oligonucleotide
  Sense strand starting at position 2094 of SEQ ID NO: 317450
accgaauuccacuggaauu

SEQ ID NO: 491878 - RNA, 19 nt, Artificial Sequence
  Description of Artificial Sequence: Synthetic oligonucleotide
  Antisense Strand to SEQ ID NO: 491877
aauuccaguggaauucggu

SEQ ID NO: 491879 - RNA, 19 nt, Artificial Sequence
  Description of Artificial Sequence: Synthetic oligonucleotide
  Sense strand starting at position 2175 of SEQ ID NO: 317450
accugauaggccuguauua

SEQ ID NO: 491880 - RNA, 19 nt, Artificial Sequence
  Description of Artificial Sequence: Synthetic oligonucleotide
  Antisense Strand to SEQ ID NO: 491879
uaauacaggccuaucaggu

SEQ ID NO: 491881 - RNA, 19 nt, Artificial Sequence
  Description of Artificial Sequence: Synthetic oligonucleotide
  Sense strand starting at position 2177 of SEQ ID NO: 317450
cugauaggccuguauuaaa

SEQ ID NO: 491882 - RNA, 19 nt, Artificial Sequence
  Description of Artificial Sequence: Synthetic oligonucleotide
  Antisense Strand to SEQ ID NO: 491881
uuuaauacaggccuaucag

SEQ ID NO: 491883 - RNA, 19 nt, Artificial Sequence
  Description of Artificial Sequence: Synthetic oligonucleotide
  Sense strand starting at position 2289 of SEQ ID NO: 317450
agaucauaauuggcugaau

SEQ ID NO: 491884 - RNA, 19 nt, Artificial Sequence
  Description of Artificial Sequence: Synthetic oligonucleotide
  Antisense Strand to SEQ ID NO: 491883
auucagccaauuaugaucu

SEQ ID NO: 491885 - RNA, 19 nt, Artificial Sequence
  Description of Artificial Sequence: Synthetic oligonucleotide
  Sense strand starting at position 2291 of SEQ ID NO: 317450
aucauaauuggcugaauuc

SEQ ID NO: 491886 - RNA, 19 nt, Artificial Sequence
  Description of Artificial Sequence: Synthetic oligonucleotide
  Antisense Strand to SEQ ID NO: 491885
gaauucagccaauuaugau

SEQ ID NO: 491887 - RNA, 19 nt, Artificial Sequence
  Description of Artificial Sequence: Synthetic oligonucleotide
  Sense strand starting at position 3016 of SEQ ID NO: 317450
gaauuuguuuaauagagga

SEQ ID NO: 491888 - RNA, 19 nt, Artificial Sequence
  Description of Artificial Sequence: Synthetic oligonucleotide
  Antisense Strand to SEQ ID NO: 491887
uccucuauuaaacaaauuc

SEQ ID NO: 491889 - RNA, 19 nt, Artificial Sequence
  Description of Artificial Sequence: Synthetic oligonucleotide
  Sense strand starting at position 3036 of SEQ ID NO: 317450
auauguuaugucuacagau

SEQ ID NO: 491890 - RNA, 19 nt, Artificial Sequence
  Description of Artificial Sequence: Synthetic oligonucleotide
  Antisense Strand to SEQ ID NO: 491889
aucuguagacauaacauau

SEQ ID NO: 491891 - RNA, 19 nt, Artificial Sequence
  Description of Artificial Sequence: Synthetic oligonucleotide
  Sense strand starting at position 3038 of SEQ ID NO: 317450
auguuaugucuacagauau

SEQ ID NO: 491892 - RNA, 19 nt, Artificial Sequence
  Description of Artificial Sequence: Synthetic oligonucleotide
  Antisense Strand to SEQ ID NO: 491891
auaucuguagacauaacau

SEQ ID NO: 491893 - RNA, 19 nt, Artificial Sequence
  Description of Artificial Sequence: Synthetic oligonucleotide
  Sense strand starting at position 3128 of SEQ ID NO: 317450
aggugucuuugacuaagaa

SEQ ID NO: 491894 - RNA, 19 nt, Artificial Sequence
  Description of Artificial Sequence: Synthetic oligonucleotide
  Antisense Strand to SEQ ID NO: 491893
uucuuagucaaagacaccu

SEQ ID NO: 491895 - RNA, 19 nt, Artificial Sequence
  Description of Artificial Sequence: Synthetic oligonucleotide
  Sense strand starting at position 3129 of SEQ ID NO: 317450
ggugucuuugacuaagaau

SEQ ID NO: 491896 - RNA, 19 nt, Artificial Sequence
  Description of Artificial Sequence: Synthetic oligonucleotide
  Antisense Strand to SEQ ID NO: 491895
auucuuagucaaagacacc

SEQ ID NO: 491897 - RNA, 19 nt, Artificial Sequence
  Description of Artificial Sequence: Synthetic oligonucleotide
  Sense strand starting at position 3132 of SEQ ID NO: 317450
gucuuugacuaagaauuua

SEQ ID NO: 491898 - RNA, 19 nt, Artificial Sequence
  Description of Artificial Sequence: Synthetic oligonucleotide
  Antisense Strand to SEQ ID NO: 491897
uaaauucuuagucaaagac

SEQ ID NO: 491899 - RNA, 19 nt, Artificial Sequence
  Description of Artificial Sequence: Synthetic oligonucleotide
  Sense strand starting at position 3166 of SEQ ID NO: 317450
aggcauugacuuugugaau

SEQ ID NO: 491900 - RNA, 19 nt, Artificial Sequence
  Description of Artificial Sequence: Synthetic oligonucleotide
  Antisense Strand to SEQ ID NO: 491899
auucacaaagucaaugccu

SEQ ID NO: 491901 - RNA, 19 nt, Artificial Sequence
  Description of Artificial Sequence: Synthetic oligonucleotide
  Sense strand starting at position 3167 of SEQ ID NO: 317450
ggcauugacuuugugaauc

SEQ ID NO: 491902 - RNA, 19 nt, Artificial Sequence
  Description of Artificial Sequence: Synthetic oligonucleotide
  Antisense Strand to SEQ ID NO: 491901
gauucacaaagucaaugcc

SEQ ID NO: 491903 - RNA, 19 nt, Artificial Sequence
  Description of Artificial Sequence: Synthetic oligonucleotide
  Sense strand starting at position 3290 of SEQ ID NO: 317450
cucccaguuguguacauga

SEQ ID NO: 491904 - RNA, 19 nt, Artificial Sequence
  Description of Artificial Sequence: Synthetic oligonucleotide
  Antisense Strand to SEQ ID NO: 491903
ucauguacacaacugggag

SEQ ID NO: 491905 - RNA, 19 nt, Artificial Sequence
  Description of Artificial Sequence: Synthetic oligonucleotide
  Sense strand starting at position 3292 of SEQ ID NO: 317450
cccaguuguguacaugauu

SEQ ID NO: 491906 - RNA, 19 nt, Artificial Sequence
  Description of Artificial Sequence: Synthetic oligonucleotide
  Antisense Strand to SEQ ID NO: 491905
aaucauguacacaacuggg

SEQ ID NO: 491907 - RNA, 19 nt, Artificial Sequence
  Description of Artificial Sequence: Synthetic oligonucleotide
  Sense strand starting at position 3295 of SEQ ID NO: 317450
aguuguguacaugauuaca

SEQ ID NO: 491908 - RNA, 19 nt, Artificial Sequence
  Description of Artificial Sequence: Synthetic oligonucleotide
  Antisense Strand to SEQ ID NO: 491907
uguaaucauguacacaacu

SEQ ID NO: 491909 - RNA, 19 nt, Artificial Sequence
  Description of Artificial Sequence: Synthetic oligonucleotide
  Sense strand starting at position 3396 of SEQ ID NO: 317450
agauguaaucuguaguuag

SEQ ID NO: 491910 - RNA, 19 nt, Artificial Sequence
  Description of Artificial Sequence: Synthetic oligonucleotide
  Antisense Strand to SEQ ID NO: 491909
cuaacuacagauuacaucu

SEQ ID NO: 491911 - RNA, 19 nt, Artificial Sequence
  Description of Artificial Sequence: Synthetic oligonucleotide
  Sense strand starting at position 3513 of SEQ ID NO: 317450
ccguuuaaaguguauaauu

SEQ ID NO: 491912 - RNA, 19 nt, Artificial Sequence
  Description of Artificial Sequence: Synthetic oligonucleotide
  Antisense Strand to SEQ ID NO: 491911
aauuauacacuuuaaacgg

SEQ ID NO: 491913 - RNA, 19 nt, Artificial Sequence
  Description of Artificial Sequence: Synthetic oligonucleotide
  Sense strand starting at position 7 of SEQ ID NO: 317451
gaacucugcgcugagaagu

SEQ ID NO: 491914 - RNA, 19 nt, Artificial Sequence
  Description of Artificial Sequence: Synthetic oligonucleotide
  Antisense Strand to SEQ ID NO: 491913
acuucucagcgcagaguuc

SEQ ID NO: 491915 - RNA, 19 nt, Artificial Sequence
  Description of Artificial Sequence: Synthetic oligonucleotide
  Sense strand starting at position 71 of SEQ ID NO: 317451
cagucuuaucugggacuac

SEQ ID NO: 491916 - RNA, 19 nt, Artificial Sequence
  Description of Artificial Sequence: Synthetic oligonucleotide
  Antisense Strand to SEQ ID NO: 491915
guagucccagauaagacug

SEQ ID NO: 491917 - RNA, 19 nt, Artificial Sequence
  Description of Artificial Sequence: Synthetic oligonucleotide
  Sense strand starting at position 271 of SEQ ID NO: 317451
cucccaaaugggugugauu

SEQ ID NO: 491918 - RNA, 19 nt, Artificial Sequence
  Description of Artificial Sequence: Synthetic oligonucleotide
  Antisense Strand to SEQ ID NO: 491917
aaucacacccauuugggag

SEQ ID NO: 491919 - RNA, 19 nt, Artificial Sequence
  Description of Artificial Sequence: Synthetic oligonucleotide
  Sense strand starting at position 273 of SEQ ID NO: 317451
cccaaaugggugugauuag

SEQ ID NO: 491920 - RNA, 19 nt, Artificial Sequence
  Description of Artificial Sequence: Synthetic oligonucleotide
  Antisense Strand to SEQ ID NO: 491919
cuaaucacacccauuuggg

SEQ ID NO: 491921 - RNA, 19 nt, Artificial Sequence
  Description of Artificial Sequence: Synthetic oligonucleotide
  Sense strand starting at position 550 of SEQ ID NO: 317451
ggugauguagucuauaaau

SEQ ID NO: 491922 - RNA, 19 nt, Artificial Sequence
  Description of Artificial Sequence: Synthetic oligonucleotide
  Antisense Strand to SEQ ID NO: 491921
auuuauagacuacaucacc

SEQ ID NO: 491923 - RNA, 19 nt, Artificial Sequence
  Description of Artificial Sequence: Synthetic oligonucleotide
  Sense strand starting at position 787 of SEQ ID NO: 317451
uugaauguugaaugaucuu

SEQ ID NO: 491924 - RNA, 19 nt, Artificial Sequence
  Description of Artificial Sequence: Synthetic oligonucleotide
  Antisense Strand to SEQ ID NO: 491923
aagaucauucaacauucaa

SEQ ID NO: 491925 - RNA, 19 nt, Artificial Sequence
  Description of Artificial Sequence: Synthetic oligonucleotide
  Sense strand starting at position 793 of SEQ ID NO: 317451
guugaaugaucuuugcaac

SEQ ID NO: 491926 - RNA, 19 nt, Artificial Sequence
  Description of Artificial Sequence: Synthetic oligonucleotide
  Antisense Strand to SEQ ID NO: 491925
guugcaaagaucauucaac

SEQ ID NO: 491927 - RNA, 19 nt, Artificial Sequence
  Description of Artificial Sequence: Synthetic oligonucleotide
  Sense strand starting at position 794 of SEQ ID NO: 317451
uugaaugaucuuugcaaca

SEQ ID NO: 491928 - RNA, 19 nt, Artificial Sequence
  Description of Artificial Sequence: Synthetic oligonucleotide
  Antisense Strand to SEQ ID NO: 491927
uguugcaaagaucauucaa

SEQ ID NO: 491929 - RNA, 19 nt, Artificial Sequence
  Description of Artificial Sequence: Synthetic oligonucleotide
  Sense strand starting at position 816 of SEQ ID NO: 317451
gaguaagaaugacuucuuu

SEQ ID NO: 491930 - RNA, 19 nt, Artificial Sequence
  Description of Artificial Sequence: Synthetic oligonucleotide
  Antisense Strand to SEQ ID NO: 491929
aaagaagucauucuuacuc

SEQ ID NO: 491931 - RNA, 19 nt, Artificial Sequence
  Description of Artificial Sequence: Synthetic oligonucleotide
  Sense strand starting at position 836 of SEQ ID NO: 317451
caguauuuccuacgugucu

SEQ ID NO: 491932 - RNA, 19 nt, Artificial Sequence
  Description of Artificial Sequence: Synthetic oligonucleotide
  Antisense Strand to SEQ ID NO: 491931
agacacguaggaaauacug

SEQ ID NO: 491933 - RNA, 19 nt, Artificial Sequence
  Description of Artificial Sequence: Synthetic oligonucleotide
  Sense strand starting at position 838 of SEQ ID NO: 317451
guauuuccuacgugucuga

SEQ ID NO: 491934 - RNA, 19 nt, Artificial Sequence
  Description of Artificial Sequence: Synthetic oligonucleotide
  Antisense Strand to SEQ ID NO: 491933
ucagacacguaggaaauac

SEQ ID NO: 491935 - RNA, 19 nt, Artificial Sequence
  Description of Artificial Sequence: Synthetic oligonucleotide
  Sense strand starting at position 849 of SEQ ID NO: 317451
gugucugacauggagcuaa

SEQ ID NO: 491936 - RNA, 19 nt, Artificial Sequence
  Description of Artificial Sequence: Synthetic oligonucleotide
  Antisense Strand to SEQ ID NO: 491935
uuagcuccaugucagacac

SEQ ID NO: 491937 - RNA, 19 nt, Artificial Sequence
  Description of Artificial Sequence: Synthetic oligonucleotide
  Sense strand starting at position 1075 of SEQ ID NO: 317451
cuugaaaugagguggcuua

SEQ ID NO: 491938 - RNA, 19 nt, Artificial Sequence
  Description of Artificial Sequence: Synthetic oligonucleotide
  Antisense Strand to SEQ ID NO: 491937
uaagccaccucauuucaag

SEQ ID NO: 491939 - RNA, 19 nt, Artificial Sequence
  Description of Artificial Sequence: Synthetic oligonucleotide
  Sense strand starting at position 1076 of SEQ ID NO: 317451
uugaaaugagguggcuuaa

SEQ ID NO: 491940 - RNA, 19 nt, Artificial Sequence
  Description of Artificial Sequence: Synthetic oligonucleotide
  Antisense Strand to SEQ ID NO: 491939
uuaagccaccucauuucaa

SEQ ID NO: 491941 - RNA, 19 nt, Artificial Sequence
  Description of Artificial Sequence: Synthetic oligonucleotide
  Sense strand starting at position 1128 of SEQ ID NO: 317451
gguugaauccauugaucug

SEQ ID NO: 491942 - RNA, 19 nt, Artificial Sequence
  Description of Artificial Sequence: Synthetic oligonucleotide
  Antisense Strand to SEQ ID NO: 491941
cagaucaauggauucaacc

SEQ ID NO: 491943 - RNA, 19 nt, Artificial Sequence
  Description of Artificial Sequence: Synthetic oligonucleotide
  Sense strand starting at position 1248 of SEQ ID NO: 317451
ucaagagacuuugccuaca

SEQ ID NO: 491944 - RNA, 19 nt, Artificial Sequence
  Description of Artificial Sequence: Synthetic oligonucleotide
  Antisense Strand to SEQ ID NO: 491943
uguaggcaaagucucuuga

SEQ ID NO: 491945 - RNA, 19 nt, Artificial Sequence
  Description of Artificial Sequence: Synthetic oligonucleotide
  Sense strand starting at position 1251 of SEQ ID NO: 317451
agagacuuugccuacaugu

SEQ ID NO: 491946 - RNA, 19 nt, Artificial Sequence
  Description of Artificial Sequence: Synthetic oligonucleotide
  Antisense Strand to SEQ ID NO: 491945
acauguaggcaaagucucu

SEQ ID NO: 491947 - RNA, 19 nt, Artificial Sequence
  Description of Artificial Sequence: Synthetic oligonucleotide
  Sense strand starting at position 1253 of SEQ ID NO: 317451
agacuuugccuacauguau

SEQ ID NO: 491948 - RNA, 19 nt, Artificial Sequence
  Description of Artificial Sequence: Synthetic oligonucleotide
  Antisense Strand to SEQ ID NO: 491947
auacauguaggcaaagucu

SEQ ID NO: 491949 - RNA, 19 nt, Artificial Sequence
  Description of Artificial Sequence: Synthetic oligonucleotide
  Sense strand starting at position 1355 of SEQ ID NO: 317451
guagguggucugggagaaa

SEQ ID NO: 491950 - RNA, 19 nt, Artificial Sequence
  Description of Artificial Sequence: Synthetic oligonucleotide
  Antisense Strand to SEQ ID NO: 491949
uuucucccagaccaccuac

SEQ ID NO: 491951 - RNA, 19 nt, Artificial Sequence
  Description of Artificial Sequence: Synthetic oligonucleotide
  Sense strand starting at position 1478 of SEQ ID NO: 317451
ugcauuguacaagauccau

SEQ ID NO: 491952 - RNA, 19 nt, Artificial Sequence
  Description of Artificial Sequence: Synthetic oligonucleotide
  Antisense Strand to SEQ ID NO: 491951
auggaucuuguacaaugca

SEQ ID NO: 491953 - RNA, 19 nt, Artificial Sequence
  Description of Artificial Sequence: Synthetic oligonucleotide
  Sense strand starting at position 1586 of SEQ ID NO: 317451
gguuucauccagcagaggu

SEQ ID NO: 491954 - RNA, 19 nt, Artificial Sequence
  Description of Artificial Sequence: Synthetic oligonucleotide
  Antisense Strand to SEQ ID NO: 491953
accucugcuggaugaaacc

SEQ ID NO: 491955 - RNA, 19 nt, Artificial Sequence
  Description of Artificial Sequence: Synthetic oligonucleotide
  Sense strand starting at position 1593 of SEQ ID NO: 317451
uccagcagagguuaacaua

SEQ ID NO: 491956 - RNA, 19 nt, Artificial Sequence
  Description of Artificial Sequence: Synthetic oligonucleotide
  Antisense Strand to SEQ ID NO: 491955
uauguuaaccucugcugga

SEQ ID NO: 491957 - RNA, 19 nt, Artificial Sequence
  Description of Artificial Sequence: Synthetic oligonucleotide
  Sense strand starting at position 1688 of SEQ ID NO: 317451
agguuugauccgcaaucag

SEQ ID NO: 491958 - RNA, 19 nt, Artificial Sequence
  Description of Artificial Sequence: Synthetic oligonucleotide
  Antisense Strand to SEQ ID NO: 491957
cugauugcggaucaaaccu

SEQ ID NO: 491959 - RNA, 19 nt, Artificial Sequence
  Description of Artificial Sequence: Synthetic oligonucleotide
  Sense strand starting at position 1724 of SEQ ID NO: 317451
ucucaagcaucugcaagaa

SEQ ID NO: 491960 - RNA, 19 nt, Artificial Sequence
  Description of Artificial Sequence: Synthetic oligonucleotide
  Antisense Strand to SEQ ID NO: 491959
uucuugcagaugcuugaga

SEQ ID NO: 491961 - RNA, 19 nt, Artificial Sequence
  Description of Artificial Sequence: Synthetic oligonucleotide
  Sense strand starting at position 1736 of SEQ ID NO: 317451
gcaagaaauuccucagauc

SEQ ID NO: 491962 - RNA, 19 nt, Artificial Sequence
  Description of Artificial Sequence: Synthetic oligonucleotide
  Antisense Strand to SEQ ID NO: 491961
gaucugaggaauuucuugc

SEQ ID NO: 491963 - RNA, 19 nt, Artificial Sequence
  Description of Artificial Sequence: Synthetic oligonucleotide
  Sense strand starting at position 1968 of SEQ ID NO: 317451
guggaugauucguugacac

SEQ ID NO: 491964 - RNA, 19 nt, Artificial Sequence
  Description of Artificial Sequence: Synthetic oligonucleotide
  Antisense Strand to SEQ ID NO: 491963
gugucaacgaaucauccac

SEQ ID NO: 491965 - RNA, 19 nt, Artificial Sequence
  Description of Artificial Sequence: Synthetic oligonucleotide
  Sense strand starting at position 1978 of SEQ ID NO: 317451
cguugacacggucagaauu

SEQ ID NO: 491966 - RNA, 19 nt, Artificial Sequence
  Description of Artificial Sequence: Synthetic oligonucleotide
  Antisense Strand to SEQ ID NO: 491965
aauucugaccgugucaacg

SEQ ID NO: 491967 - RNA, 19 nt, Artificial Sequence
  Description of Artificial Sequence: Synthetic oligonucleotide
  Sense strand starting at position 2006 of SEQ ID NO: 317451
agggaauugaaucgagguu

SEQ ID NO: 491968 - RNA, 19 nt, Artificial Sequence
  Description of Artificial Sequence: Synthetic oligonucleotide
  Antisense Strand to SEQ ID NO: 491967
aaccucgauucaauucccu

SEQ ID NO: 491969 - RNA, 19 nt, Artificial Sequence
  Description of Artificial Sequence: Synthetic oligonucleotide
  Sense strand starting at position 2112 of SEQ ID NO: 317451
uuaaauuguggucaaauac

SEQ ID NO: 491970 - RNA, 19 nt, Artificial Sequence
  Description of Artificial Sequence: Synthetic oligonucleotide
  Antisense Strand to SEQ ID NO: 491969
guauuugaccacaauuuaa

SEQ ID NO: 491971 - RNA, 19 nt, Artificial Sequence
  Description of Artificial Sequence: Synthetic oligonucleotide
  Sense strand starting at position 2942 of SEQ ID NO: 317451
gaacguggugcacaaauau

SEQ ID NO: 491972 - RNA, 19 nt, Artificial Sequence
  Description of Artificial Sequence: Synthetic oligonucleotide
  Antisense Strand to SEQ ID NO: 491971
auauuugugcaccacguuc

SEQ ID NO: 491973 - RNA, 19 nt, Artificial Sequence
  Description of Artificial Sequence: Synthetic oligonucleotide
  Sense strand starting at position 2965 of SEQ ID NO: 317451
uuaaguugguacuuaacau

SEQ ID NO: 491974 - RNA, 19 nt, Artificial Sequence
  Description of Artificial Sequence: Synthetic oligonucleotide
  Antisense Strand to SEQ ID NO: 491973
auguuaaguaccaacuuaa

SEQ ID NO: 491975 - RNA, 19 nt, Artificial Sequence
  Description of Artificial Sequence: Synthetic oligonucleotide
  Sense strand starting at position 3006 of SEQ ID NO: 317451
guggaauucacggaucgua

SEQ ID NO: 491976 - RNA, 19 nt, Artificial Sequence
  Description of Artificial Sequence: Synthetic oligonucleotide
  Antisense Strand to SEQ ID NO: 491975
uacgauccgugaauuccac

SEQ ID NO: 491977 - RNA, 19 nt, Artificial Sequence
  Description of Artificial Sequence: Synthetic oligonucleotide
  Sense strand starting at position 3078 of SEQ ID NO: 317451
cuuagagcucuuugaugau

SEQ ID NO: 491978 - RNA, 19 nt, Artificial Sequence
  Description of Artificial Sequence: Synthetic oligonucleotide
  Antisense Strand to SEQ ID NO: 491977
aucaucaaagagcucuaag

SEQ ID NO: 491979 - RNA, 19 nt, Artificial Sequence
  Description of Artificial Sequence: Synthetic oligonucleotide
  Sense strand starting at position 3171 of SEQ ID NO: 317451
uaggaauggugacuccaua

SEQ ID NO: 491980 - RNA, 19 nt, Artificial Sequence
  Description of Artificial Sequence: Synthetic oligonucleotide
  Antisense Strand to SEQ ID NO: 491979
uauggagucaccauuccua

SEQ ID NO: 491981 - RNA, 19 nt, Artificial Sequence
  Description of Artificial Sequence: Synthetic oligonucleotide
  Sense strand starting at position 3311 of SEQ ID NO: 317451
gugagugguggguaagcaa

SEQ ID NO: 491982 - RNA, 19 nt, Artificial Sequence
  Description of Artificial Sequence: Synthetic oligonucleotide
  Antisense Strand to SEQ ID NO: 491981
uugcuuacccaccacucac

SEQ ID NO: 491983 - RNA, 19 nt, Artificial Sequence
  Description of Artificial Sequence: Synthetic oligonucleotide
  Sense strand starting at position 3729 of SEQ ID NO: 317451
ccaugaaauugguccuggu

SEQ ID NO: 491984 - RNA, 19 nt, Artificial Sequence
  Description of Artificial Sequence: Synthetic oligonucleotide
  Antisense Strand to SEQ ID NO: 491983
accaggaccaauuucaugg

SEQ ID NO: 491985 - RNA, 19 nt, Artificial Sequence
  Description of Artificial Sequence: Synthetic oligonucleotide
  Sense strand starting at position 3757 of SEQ ID NO: 317451
auuggagaccucugaccua

SEQ ID NO: 491986 - RNA, 19 nt, Artificial Sequence
  Description of Artificial Sequence: Synthetic oligonucleotide
  Antisense Strand to SEQ ID NO: 491985
uaggucagaggucuccaau

SEQ ID NO: 491987 - RNA, 19 nt, Artificial Sequence
  Description of Artificial Sequence: Synthetic oligonucleotide
  Sense strand starting at position 3786 of SEQ ID NO: 317451
cuugaagugaagugguaaa

SEQ ID NO: 491988 - RNA, 19 nt, Artificial Sequence
  Description of Artificial Sequence: Synthetic oligonucleotide
  Antisense Strand to SEQ ID NO: 491987
uuuaccacuucacuucaag

SEQ ID NO: 491989 - RNA, 19 nt, Artificial Sequence
  Description of Artificial Sequence: Synthetic oligonucleotide
  Sense strand starting at position 3833 of SEQ ID NO: 317451
ucgcaaaguacggaucaau

SEQ ID NO: 491990 - RNA, 19 nt, Artificial Sequence
  Description of Artificial Sequence: Synthetic oligonucleotide
  Antisense Strand to SEQ ID NO: 491989
auugauccguacuuugcga

SEQ ID NO: 491991 - RNA, 19 nt, Artificial Sequence
  Description of Artificial Sequence: Synthetic oligonucleotide
  Sense strand starting at position 3908 of SEQ ID NO: 317451
gcuggagaucacgaguaaa

SEQ ID NO: 491992 - RNA, 19 nt, Artificial Sequence
  Description of Artificial Sequence: Synthetic oligonucleotide
  Antisense Strand to SEQ ID NO: 491991
uuuacucgugaucuccagc

SEQ ID NO: 491993 - RNA, 19 nt, Artificial Sequence
  Description of Artificial Sequence: Synthetic oligonucleotide
  Sense strand starting at position 23 of SEQ ID NO: 317452
aguguugagagguggaauu

SEQ ID NO: 491994 - RNA, 19 nt, Artificial Sequence
  Description of Artificial Sequence: Synthetic oligonucleotide
  Antisense Strand to SEQ ID NO: 491993
aauuccaccucucaacacu

SEQ ID NO: 491995 - RNA, 19 nt, Artificial Sequence
  Description of Artificial Sequence: Synthetic oligonucleotide
  Sense strand starting at position 154 of SEQ ID NO: 317452
uuagguuaugaaggcugua

SEQ ID NO: 491996 - RNA, 19 nt, Artificial Sequence
  Description of Artificial Sequence: Synthetic oligonucleotide
  Antisense Strand to SEQ ID NO: 491995
uacagccuucauaaccuaa

SEQ ID NO: 491997 - RNA, 19 nt, Artificial Sequence
  Description of Artificial Sequence: Synthetic oligonucleotide
  Sense strand starting at position 184 of SEQ ID NO: 317452
ggauuaauguuaucaccaa

SEQ ID NO: 491998 - RNA, 19 nt, Artificial Sequence
  Description of Artificial Sequence: Synthetic oligonucleotide
  Antisense Strand to SEQ ID NO: 491997
uuggugauaacauuaaucc

SEQ ID NO: 491999 - RNA, 19 nt, Artificial Sequence
  Description of Artificial Sequence: Synthetic oligonucleotide
  Sense strand starting at position 215 of SEQ ID NO: 317452
uugugagaaugaguuuguu

SEQ ID NO: 492000 - RNA, 19 nt, Artificial Sequence
  Description of Artificial Sequence: Synthetic oligonucleotide
  Antisense Strand to SEQ ID NO: 491999
aacaaacucauucucacaa

SEQ ID NO: 492001 - RNA, 19 nt, Artificial Sequence
  Description of Artificial Sequence: Synthetic oligonucleotide
  Sense strand starting at position 218 of SEQ ID NO: 317452
ugagaaugaguuuguuaua

SEQ ID NO: 492002 - RNA, 19 nt, Artificial Sequence
  Description of Artificial Sequence: Synthetic oligonucleotide
  Antisense Strand to SEQ ID NO: 492001
uauaacaaacucauucuca

SEQ ID NO: 492003 - RNA, 19 nt, Artificial Sequence
  Description of Artificial Sequence: Synthetic oligonucleotide
  Sense strand starting at position 219 of SEQ ID NO: 317452
gagaaugaguuuguuauaa

SEQ ID NO: 492004 - RNA, 19 nt, Artificial Sequence
  Description of Artificial Sequence: Synthetic oligonucleotide
  Antisense Strand to SEQ ID NO: 492003
uuauaacaaacucauucuc

SEQ ID NO: 492005 - RNA, 19 nt, Artificial Sequence
  Description of Artificial Sequence: Synthetic oligonucleotide
  Sense strand starting at position 291 of SEQ ID NO: 317452
guuauaauguagccagaug

SEQ ID NO: 492006 - RNA, 19 nt, Artificial Sequence
  Description of Artificial Sequence: Synthetic oligonucleotide
  Antisense Strand to SEQ ID NO: 492005
caucuggcuacauuauaac

SEQ ID NO: 492007 - RNA, 19 nt, Artificial Sequence
  Description of Artificial Sequence: Synthetic oligonucleotide
  Sense strand starting at position 433 of SEQ ID NO: 317452
cugugacaacuauguacuu

SEQ ID NO: 492008 - RNA, 19 nt, Artificial Sequence
  Description of Artificial Sequence: Synthetic oligonucleotide
  Antisense Strand to SEQ ID NO: 492007
aaguacauaguugucacag

SEQ ID NO: 492009 - RNA, 19 nt, Artificial Sequence
  Description of Artificial Sequence: Synthetic oligonucleotide
  Sense strand starting at position 536 of SEQ ID NO: 317452
cuacucuguuaguuuauca

SEQ ID NO: 492010 - RNA, 19 nt, Artificial Sequence
  Description of Artificial Sequence: Synthetic oligonucleotide
  Antisense Strand to SEQ ID NO: 492009
ugauaaacuaacagaguag

SEQ ID NO: 492011 - RNA, 19 nt, Artificial Sequence
  Description of Artificial Sequence: Synthetic oligonucleotide
  Sense strand starting at position 575 of SEQ ID NO: 317452
auuaacugauagcuuagaa

SEQ ID NO: 492012 - RNA, 19 nt, Artificial Sequence
  Description of Artificial Sequence: Synthetic oligonucleotide
  Antisense Strand to SEQ ID NO: 492011
uucuaagcuaucaguuaau

SEQ ID NO: 492013 - RNA, 19 nt, Artificial Sequence
  Description of Artificial Sequence: Synthetic oligonucleotide
  Sense strand starting at position 641 of SEQ ID NO: 317452
auggguacauuauaaagaa

SEQ ID NO: 492014 - RNA, 19 nt, Artificial Sequence
  Description of Artificial Sequence: Synthetic oligonucleotide
  Antisense Strand to SEQ ID NO: 492013
uucuuuauaauguacccau

SEQ ID NO: 492015 - RNA, 19 nt, Artificial Sequence
  Description of Artificial Sequence: Synthetic oligonucleotide
  Sense strand starting at position 663 of SEQ ID NO: 317452
aaagauguuccuugcuuag

SEQ ID NO: 492016 - RNA, 19 nt, Artificial Sequence
  Description of Artificial Sequence: Synthetic oligonucleotide
  Antisense Strand to SEQ ID NO: 492015
cuaagcaaggaacaucuuu

SEQ ID NO: 492017 - RNA, 19 nt, Artificial Sequence
  Description of Artificial Sequence: Synthetic oligonucleotide
  Sense strand starting at position 665 of SEQ ID NO: 317452
agauguuccuugcuuagaa

SEQ ID NO: 492018 - RNA, 19 nt, Artificial Sequence
  Description of Artificial Sequence: Synthetic oligonucleotide
  Antisense Strand to SEQ ID NO: 492017
uucuaagcaaggaacaucu

SEQ ID NO: 492019 - RNA, 19 nt, Artificial Sequence
  Description of Artificial Sequence: Synthetic oligonucleotide
  Sense strand starting at position 666 of SEQ ID NO: 317452
gauguuccuugcuuagaac

SEQ ID NO: 492020 - RNA, 19 nt, Artificial Sequence
  Description of Artificial Sequence: Synthetic oligonucleotide
  Antisense Strand to SEQ ID NO: 492019
guucuaagcaaggaacauc

SEQ ID NO: 492021 - RNA, 19 nt, Artificial Sequence
  Description of Artificial Sequence: Synthetic oligonucleotide
  Sense strand starting at position 667 of SEQ ID NO: 317452
auguuccuugcuuagaaca

SEQ ID NO: 492022 - RNA, 19 nt, Artificial Sequence
  Description of Artificial Sequence: Synthetic oligonucleotide
  Antisense Strand to SEQ ID NO: 492021
uguucuaagcaaggaacau

SEQ ID NO: 492023 - RNA, 19 nt, Artificial Sequence
  Description of Artificial Sequence: Synthetic oligonucleotide
  Sense strand starting at position 818 of SEQ ID NO: 317452
acaguugcucuuugguaaa

SEQ ID NO: 492024 - RNA, 19 nt, Artificial Sequence
  Description of Artificial Sequence: Synthetic oligonucleotide
  Antisense Strand to SEQ ID NO: 492023
uuuaccaaagagcaacugu

SEQ ID NO: 492025 - RNA, 19 nt, Artificial Sequence
  Description of Artificial Sequence: Synthetic oligonucleotide
  Sense strand starting at position 858 of SEQ ID NO: 317452
agauuaaagucaucucagc

SEQ ID NO: 492026 - RNA, 19 nt, Artificial Sequence
  Description of Artificial Sequence: Synthetic oligonucleotide
  Antisense Strand to SEQ ID NO: 492025
gcugagaugacuuuaaucu

SEQ ID NO: 492027 - RNA, 19 nt, Artificial Sequence
  Description of Artificial Sequence: Synthetic oligonucleotide
  Sense strand starting at position 888 of SEQ ID NO: 317452
ugucuacacccagauuacu

SEQ ID NO: 492028 - RNA, 19 nt, Artificial Sequence
  Description of Artificial Sequence: Synthetic oligonucleotide
  Antisense Strand to SEQ ID NO: 492027
aguaaucuggguguagaca

SEQ ID NO: 492029 - RNA, 19 nt, Artificial Sequence
  Description of Artificial Sequence: Synthetic oligonucleotide
  Sense strand starting at position 986 of SEQ ID NO: 317452
agacuuuccuggcuugcau

SEQ ID NO: 492030 - RNA, 19 nt, Artificial Sequence
  Description of Artificial Sequence: Synthetic oligonucleotide
  Antisense Strand to SEQ ID NO: 492029
augcaagccaggaaagucu

SEQ ID NO: 492031 - RNA, 19 nt, Artificial Sequence
  Description of Artificial Sequence: Synthetic oligonucleotide
  Sense strand starting at position 997 of SEQ ID NO: 317452
gcuugcauuuaaguucuaa

SEQ ID NO: 492032 - RNA, 19 nt, Artificial Sequence
  Description of Artificial Sequence: Synthetic oligonucleotide
  Antisense Strand to SEQ ID NO: 492031
uuagaacuuaaaugcaagc

SEQ ID NO: 492033 - RNA, 19 nt, Artificial Sequence
  Description of Artificial Sequence: Synthetic oligonucleotide
  Sense strand starting at position 1037 of SEQ ID NO: 317452
aguugaagaaguuguaaag

SEQ ID NO: 492034 - RNA, 19 nt, Artificial Sequence
  Description of Artificial Sequence: Synthetic oligonucleotide
  Antisense Strand to SEQ ID NO: 492033
cuuuacaacuucuucaacu

SEQ ID NO: 492035 - RNA, 19 nt, Artificial Sequence
  Description of Artificial Sequence: Synthetic oligonucleotide
  Sense strand starting at position 1075 of SEQ ID NO: 317452
acuugaaggacucgacuuu

SEQ ID NO: 492036 - RNA, 19 nt, Artificial Sequence
  Description of Artificial Sequence: Synthetic oligonucleotide
  Antisense Strand to SEQ ID NO: 492035
aaagucgaguccuucaagu

SEQ ID NO: 492037 - RNA, 19 nt, Artificial Sequence
  Description of Artificial Sequence: Synthetic oligonucleotide
  Sense strand starting at position 1081 of SEQ ID NO: 317452
aggacucgacuuugcuuaa

SEQ ID NO: 492038 - RNA, 19 nt, Artificial Sequence
  Description of Artificial Sequence: Synthetic oligonucleotide
  Antisense Strand to SEQ ID NO: 492037
uuaagcaaagucgaguccu

SEQ ID NO: 492039 - RNA, 19 nt, Artificial Sequence
  Description of Artificial Sequence: Synthetic oligonucleotide
  Sense strand starting at position 1082 of SEQ ID NO: 317452
ggacucgacuuugcuuaaa

SEQ ID NO: 492040 - RNA, 19 nt, Artificial Sequence
  Description of Artificial Sequence: Synthetic oligonucleotide
  Antisense Strand to SEQ ID NO: 492039
uuuaagcaaagucgagucc

SEQ ID NO: 492041 - RNA, 19 nt, Artificial Sequence
  Description of Artificial Sequence: Synthetic oligonucleotide
  Sense strand starting at position 1093 of SEQ ID NO: 317452
ugcuuaaacgcuguaaguu

SEQ ID NO: 492042 - RNA, 19 nt, Artificial Sequence
  Description of Artificial Sequence: Synthetic oligonucleotide
  Antisense Strand to SEQ ID NO: 492041
aacuuacagcguuuaagca

SEQ ID NO: 492043 - RNA, 19 nt, Artificial Sequence
  Description of Artificial Sequence: Synthetic oligonucleotide
  Sense strand starting at position 1189 of SEQ ID NO: 317452
agaggucagacuuggguua

SEQ ID NO: 492044 - RNA, 19 nt, Artificial Sequence
  Description of Artificial Sequence: Synthetic oligonucleotide
  Antisense Strand to SEQ ID NO: 492043
uaacccaagucugaccucu

SEQ ID NO: 492045 - RNA, 19 nt, Artificial Sequence
  Description of Artificial Sequence: Synthetic oligonucleotide
  Sense strand starting at position 1338 of SEQ ID NO: 317452
guugaaagccuuuacccaa

SEQ ID NO: 492046 - RNA, 19 nt, Artificial Sequence
  Description of Artificial Sequence: Synthetic oligonucleotide
  Antisense Strand to SEQ ID NO: 492045
uuggguaaaggcuuucaac

SEQ ID NO: 492047 - RNA, 19 nt, Artificial Sequence
  Description of Artificial Sequence: Synthetic oligonucleotide
  Sense strand starting at position 2303 of SEQ ID NO: 317452
gcggagguuccaggucaga

SEQ ID NO: 492048 - RNA, 19 nt, Artificial Sequence
  Description of Artificial Sequence: Synthetic oligonucleotide
  Antisense Strand to SEQ ID NO: 492047
ucugaccuggaaccuccgc

SEQ ID NO: 492049 - RNA, 19 nt, Artificial Sequence
  Description of Artificial Sequence: Synthetic oligonucleotide
  Sense strand starting at position 2491 of SEQ ID NO: 317452
cgaacucaggcucaugaau

SEQ ID NO: 492050 - RNA, 19 nt, Artificial Sequence
  Description of Artificial Sequence: Synthetic oligonucleotide
  Antisense Strand to SEQ ID NO: 492049
auucaugagccugaguucg

SEQ ID NO: 492051 - RNA, 19 nt, Artificial Sequence
  Description of Artificial Sequence: Synthetic oligonucleotide
  Sense strand starting at position 2893 of SEQ ID NO: 317452
cacgguuaggaauauguau

SEQ ID NO: 492052 - RNA, 19 nt, Artificial Sequence
  Description of Artificial Sequence: Synthetic oligonucleotide
  Antisense Strand to SEQ ID NO: 492051
auacauauuccuaaccgug

SEQ ID NO: 492053 - RNA, 19 nt, Artificial Sequence
  Description of Artificial Sequence: Synthetic oligonucleotide
  Sense strand starting at position 2895 of SEQ ID NO: 317452
cgguuaggaauauguauaa

SEQ ID NO: 492054 - RNA, 19 nt, Artificial Sequence
  Description of Artificial Sequence: Synthetic oligonucleotide
  Antisense Strand to SEQ ID NO: 492053
uuauacauauuccuaaccg

SEQ ID NO: 492055 - RNA, 19 nt, Artificial Sequence
  Description of Artificial Sequence: Synthetic oligonucleotide
  Sense strand starting at position 3063 of SEQ ID NO: 317452
uguauaacauaugacagaa

SEQ ID NO: 492056 - RNA, 19 nt, Artificial Sequence
  Description of Artificial Sequence: Synthetic oligonucleotide
  Antisense Strand to SEQ ID NO: 492055
uucugucauauguuauaca

SEQ ID NO: 492057 - RNA, 19 nt, Artificial Sequence
  Description of Artificial Sequence: Synthetic oligonucleotide
  Sense strand starting at position 3106 of SEQ ID NO: 317452
ccuuaaauccagggcuguu

SEQ ID NO: 492058 - RNA, 19 nt, Artificial Sequence
  Description of Artificial Sequence: Synthetic oligonucleotide
  Antisense Strand to SEQ ID NO: 492057
aacagcccuggauuuaagg

SEQ ID NO: 492059 - RNA, 19 nt, Artificial Sequence
  Description of Artificial Sequence: Synthetic oligonucleotide
  Sense strand starting at position 3153 of SEQ ID NO: 317452
cucucugaugguuggaaca

SEQ ID NO: 492060 - RNA, 19 nt, Artificial Sequence
  Description of Artificial Sequence: Synthetic oligonucleotide
  Antisense Strand to SEQ ID NO: 492059
uguuccaaccaucagagag

SEQ ID NO: 492061 - RNA, 19 nt, Artificial Sequence
  Description of Artificial Sequence: Synthetic oligonucleotide
  Sense strand starting at position 3220 of SEQ ID NO: 317452
guauacaggucacuaucuu

SEQ ID NO: 492062 - RNA, 19 nt, Artificial Sequence
  Description of Artificial Sequence: Synthetic oligonucleotide
  Antisense Strand to SEQ ID NO: 492061
aagauagugaccuguauac

SEQ ID NO: 492063 - RNA, 19 nt, Artificial Sequence
  Description of Artificial Sequence: Synthetic oligonucleotide
  Sense strand starting at position 3224 of SEQ ID NO: 317452
acaggucacuaucuuacua

SEQ ID NO: 492064 - RNA, 19 nt, Artificial Sequence
  Description of Artificial Sequence: Synthetic oligonucleotide
  Antisense Strand to SEQ ID NO: 492063
uaguaagauagugaccugu

SEQ ID NO: 492065 - RNA, 19 nt, Artificial Sequence
  Description of Artificial Sequence: Synthetic oligonucleotide
  Sense strand starting at position 3430 of SEQ ID NO: 317452
ugaugcuauugcucuauaa

SEQ ID NO: 492066 - RNA, 19 nt, Artificial Sequence
  Description of Artificial Sequence: Synthetic oligonucleotide
  Antisense Strand to SEQ ID NO: 492065
uuauagagcaauagcauca

SEQ ID NO: 492067 - RNA, 19 nt, Artificial Sequence
  Description of Artificial Sequence: Synthetic oligonucleotide
  Sense strand starting at position 3458 of SEQ ID NO: 317452
caauuagaauugucuggca

SEQ ID NO: 492068 - RNA, 19 nt, Artificial Sequence
  Description of Artificial Sequence: Synthetic oligonucleotide
  Antisense Strand to SEQ ID NO: 492067
ugccagacaauucuaauug

SEQ ID NO: 492069 - RNA, 19 nt, Artificial Sequence
  Description of Artificial Sequence: Synthetic oligonucleotide
  Sense strand starting at position 3522 of SEQ ID NO: 317452
gcauauauugaagguaguu

SEQ ID NO: 492070 - RNA, 19 nt, Artificial Sequence
  Description of Artificial Sequence: Synthetic oligonucleotide
  Antisense Strand to SEQ ID NO: 492069
aacuaccuucaauauaugc

SEQ ID NO: 492071 - RNA, 19 nt, Artificial Sequence
  Description of Artificial Sequence: Synthetic oligonucleotide
  Sense strand starting at position 3538 of SEQ ID NO: 317452
guuguacacuguccacaaa

SEQ ID NO: 492072 - RNA, 19 nt, Artificial Sequence
  Description of Artificial Sequence: Synthetic oligonucleotide
  Antisense Strand to SEQ ID NO: 492071
uuuguggacaguguacaac

SEQ ID NO: 492073 - RNA, 19 nt, Artificial Sequence
  Description of Artificial Sequence: Synthetic oligonucleotide
  Sense strand starting at position 647 of SEQ ID NO: 317453
gugacacugaggugugaga

SEQ ID NO: 492074 - RNA, 19 nt, Artificial Sequence
  Description of Artificial Sequence: Synthetic oligonucleotide
  Antisense Strand to SEQ ID NO: 492073
ucucacaccucagugucac

SEQ ID NO: 492075 - RNA, 19 nt, Artificial Sequence
  Description of Artificial Sequence: Synthetic oligonucleotide
  Sense strand starting at position 649 of SEQ ID NO: 317453
gacacugaggugugagaau

SEQ ID NO: 492076 - RNA, 19 nt, Artificial Sequence
  Description of Artificial Sequence: Synthetic oligonucleotide
  Antisense Strand to SEQ ID NO: 492075
auucucacaccucaguguc

SEQ ID NO: 492077 - RNA, 19 nt, Artificial Sequence
  Description of Artificial Sequence: Synthetic oligonucleotide
  Sense strand starting at position 875 of SEQ ID NO: 317453
aguuuauagccauacgauc

SEQ ID NO: 492078 - RNA, 19 nt, Artificial Sequence
  Description of Artificial Sequence: Synthetic oligonucleotide
  Antisense Strand to SEQ ID NO: 492077
gaucguauggcuauaaacu

SEQ ID NO: 492079 - RNA, 19 nt, Artificial Sequence
  Description of Artificial Sequence: Synthetic oligonucleotide
  Sense strand starting at position 884 of SEQ ID NO: 317453
ccauacgaucuguaugaaa

SEQ ID NO: 492080 - RNA, 19 nt, Artificial Sequence
  Description of Artificial Sequence: Synthetic oligonucleotide
  Antisense Strand to SEQ ID NO: 492079
uuucauacagaucguaugg

SEQ ID NO: 492081 - RNA, 19 nt, Artificial Sequence
  Description of Artificial Sequence: Synthetic oligonucleotide
  Sense strand starting at position 902 of SEQ ID NO: 317453
aagguuauucuaggacaug

SEQ ID NO: 492082 - RNA, 19 nt, Artificial Sequence
  Description of Artificial Sequence: Synthetic oligonucleotide
  Antisense Strand to SEQ ID NO: 492081
cauguccuagaauaaccuu

SEQ ID NO: 492083 - RNA, 19 nt, Artificial Sequence
  Description of Artificial Sequence: Synthetic oligonucleotide
  Sense strand starting at position 943 of SEQ ID NO: 317453
gcaguuaaaggaugaaaug

SEQ ID NO: 492084 - RNA, 19 nt, Artificial Sequence
  Description of Artificial Sequence: Synthetic oligonucleotide
  Antisense Strand to SEQ ID NO: 492083
cauuucauccuuuaacugc

SEQ ID NO: 492085 - RNA, 19 nt, Artificial Sequence
  Description of Artificial Sequence: Synthetic oligonucleotide
  Sense strand starting at position 1085 of SEQ ID NO: 317453
acauucuuuguccaaguga

SEQ ID NO: 492086 - RNA, 19 nt, Artificial Sequence
  Description of Artificial Sequence: Synthetic oligonucleotide
  Antisense Strand to SEQ ID NO: 492085
ucacuuggacaaagaaugu

SEQ ID NO: 492087 - RNA, 19 nt, Artificial Sequence
  Description of Artificial Sequence: Synthetic oligonucleotide
  Sense strand starting at position 1104 of SEQ ID NO: 317453
gagacaauauugccugaug

SEQ ID NO: 492088 - RNA, 19 nt, Artificial Sequence
  Description of Artificial Sequence: Synthetic oligonucleotide
  Antisense Strand to SEQ ID NO: 492087
caucaggcaauauugucuc

SEQ ID NO: 492089 - RNA, 19 nt, Artificial Sequence
  Description of Artificial Sequence: Synthetic oligonucleotide
  Sense strand starting at position 1107 of SEQ ID NO: 317453
acaauauugccugaugguu

SEQ ID NO: 492090 - RNA, 19 nt, Artificial Sequence
  Description of Artificial Sequence: Synthetic oligonucleotide
  Antisense Strand to SEQ ID NO: 492089
aaccaucaggcaauauugu

SEQ ID NO: 492091 - RNA, 19 nt, Artificial Sequence
  Description of Artificial Sequence: Synthetic oligonucleotide
  Sense strand starting at position 1143 of SEQ ID NO: 317453
ggcagacuaccuggaguua

SEQ ID NO: 492092 - RNA, 19 nt, Artificial Sequence
  Description of Artificial Sequence: Synthetic oligonucleotide
  Antisense Strand to SEQ ID NO: 492091
uaacuccagguagucugcc

SEQ ID NO: 492093 - RNA, 19 nt, Artificial Sequence
  Description of Artificial Sequence: Synthetic oligonucleotide
  Sense strand starting at position 1144 of SEQ ID NO: 317453
gcagacuaccuggaguuaa

SEQ ID NO: 492094 - RNA, 19 nt, Artificial Sequence
  Description of Artificial Sequence: Synthetic oligonucleotide
  Antisense Strand to SEQ ID NO: 492093
uuaacuccagguagucugc

SEQ ID NO: 492095 - RNA, 19 nt, Artificial Sequence
  Description of Artificial Sequence: Synthetic oligonucleotide
  Sense strand starting at position 1250 of SEQ ID NO: 317453
cguaaucaucuguaaaccu

SEQ ID NO: 492096 - RNA, 19 nt, Artificial Sequence
  Description of Artificial Sequence: Synthetic oligonucleotide
  Antisense Strand to SEQ ID NO: 492095
agguuuacagaugauuacg

SEQ ID NO: 492097 - RNA, 19 nt, Artificial Sequence
  Description of Artificial Sequence: Synthetic oligonucleotide
  Sense strand starting at position 1257 of SEQ ID NO: 317453
aucuguaaaccugggaauc

SEQ ID NO: 492098 - RNA, 19 nt, Artificial Sequence
  Description of Artificial Sequence: Synthetic oligonucleotide
  Antisense Strand to SEQ ID NO: 492097
gauucccagguuuacagau

SEQ ID NO: 492099 - RNA, 19 nt, Artificial Sequence
  Description of Artificial Sequence: Synthetic oligonucleotide
  Sense strand starting at position 1258 of SEQ ID NO: 317453
ucuguaaaccugggaauca

SEQ ID NO: 492100 - RNA, 19 nt, Artificial Sequence
  Description of Artificial Sequence: Synthetic oligonucleotide
  Antisense Strand to SEQ ID NO: 492099
ugauucccagguuuacaga

SEQ ID NO: 492101 - RNA, 19 nt, Artificial Sequence
  Description of Artificial Sequence: Synthetic oligonucleotide
  Sense strand starting at position 1314 of SEQ ID NO: 317453
cacaauugccgauaccagu

SEQ ID NO: 492102 - RNA, 19 nt, Artificial Sequence
  Description of Artificial Sequence: Synthetic oligonucleotide
  Antisense Strand to SEQ ID NO: 492101
acugguaucggcaauugug

SEQ ID NO: 492103 - RNA, 19 nt, Artificial Sequence
  Description of Artificial Sequence: Synthetic oligonucleotide
  Sense strand starting at position 1423 of SEQ ID NO: 317453
cuaggcauaccugaauguu

SEQ ID NO: 492104 - RNA, 19 nt, Artificial Sequence
  Description of Artificial Sequence: Synthetic oligonucleotide
  Antisense Strand to SEQ ID NO: 492103
aacauucagguaugccuag

SEQ ID NO: 492105 - RNA, 19 nt, Artificial Sequence
  Description of Artificial Sequence: Synthetic oligonucleotide
  Sense strand starting at position 1693 of SEQ ID NO: 317453
gugcuauuacuuguguucu

SEQ ID NO: 492106 - RNA, 19 nt, Artificial Sequence
  Description of Artificial Sequence: Synthetic oligonucleotide
  Antisense Strand to SEQ ID NO: 492105
agaacacaaguaauagcac

SEQ ID NO: 492107 - RNA, 19 nt, Artificial Sequence
  Description of Artificial Sequence: Synthetic oligonucleotide
  Sense strand starting at position 1874 of SEQ ID NO: 317453
ccaguaagaacgugaaaug

SEQ ID NO: 492108 - RNA, 19 nt, Artificial Sequence
  Description of Artificial Sequence: Synthetic oligonucleotide
  Antisense Strand to SEQ ID NO: 492107
cauuucacguucuuacugg

SEQ ID NO: 492109 - RNA, 19 nt, Artificial Sequence
  Description of Artificial Sequence: Synthetic oligonucleotide
  Sense strand starting at position 2174 of SEQ ID NO: 317453
uugaaagggucacagauuu

SEQ ID NO: 492110 - RNA, 19 nt, Artificial Sequence
  Description of Artificial Sequence: Synthetic oligonucleotide
  Antisense Strand to SEQ ID NO: 492109
aaaucugugacccuuucaa

SEQ ID NO: 492111 - RNA, 19 nt, Artificial Sequence
  Description of Artificial Sequence: Synthetic oligonucleotide
  Sense strand starting at position 2243 of SEQ ID NO: 317453
ucuggaccucugcaaguua

SEQ ID NO: 492112 - RNA, 19 nt, Artificial Sequence
  Description of Artificial Sequence: Synthetic oligonucleotide
  Antisense Strand to SEQ ID NO: 492111
uaacuugcagagguccaga

SEQ ID NO: 492113 - RNA, 19 nt, Artificial Sequence
  Description of Artificial Sequence: Synthetic oligonucleotide
  Sense strand starting at position 2310 of SEQ ID NO: 317453
gucagaauugaguagugua

SEQ ID NO: 492114 - RNA, 19 nt, Artificial Sequence
  Description of Artificial Sequence: Synthetic oligonucleotide
  Antisense Strand to SEQ ID NO: 492113
uacacuacucaauucugac

SEQ ID NO: 492115 - RNA, 19 nt, Artificial Sequence
  Description of Artificial Sequence: Synthetic oligonucleotide
  Sense strand starting at position 2558 of SEQ ID NO: 317453
agaucaguaugcccagaaa

SEQ ID NO: 492116 - RNA, 19 nt, Artificial Sequence
  Description of Artificial Sequence: Synthetic oligonucleotide
  Antisense Strand to SEQ ID NO: 492115
uuucugggcauacugaucu

SEQ ID NO: 492117 - RNA, 19 nt, Artificial Sequence
  Description of Artificial Sequence: Synthetic oligonucleotide
  Sense strand starting at position 2593 of SEQ ID NO: 317453
gaauuucguucuuaauuug

SEQ ID NO: 492118 - RNA, 19 nt, Artificial Sequence
  Description of Artificial Sequence: Synthetic oligonucleotide
  Antisense Strand to SEQ ID NO: 492117
caaauuaagaacgaaauuc

SEQ ID NO: 492119 - RNA, 19 nt, Artificial Sequence
  Description of Artificial Sequence: Synthetic oligonucleotide
  Sense strand starting at position 2599 of SEQ ID NO: 317453
cguucuuaauuugcuuuaa

SEQ ID NO: 492120 - RNA, 19 nt, Artificial Sequence
  Description of Artificial Sequence: Synthetic oligonucleotide
  Antisense Strand to SEQ ID NO: 492119
uuaaagcaaauuaagaacg

SEQ ID NO: 492121 - RNA, 19 nt, Artificial Sequence
  Description of Artificial Sequence: Synthetic oligonucleotide
  Sense strand starting at position 2756 of SEQ ID NO: 317453
cuaacucccuuguuugaga

SEQ ID NO: 492122 - RNA, 19 nt, Artificial Sequence
  Description of Artificial Sequence: Synthetic oligonucleotide
  Antisense Strand to SEQ ID NO: 492121
ucucaaacaagggaguuag

SEQ ID NO: 492123 - RNA, 19 nt, Artificial Sequence
  Description of Artificial Sequence: Synthetic oligonucleotide
  Sense strand starting at position 2883 of SEQ ID NO: 317453
uggcauuagcuugaacuca

SEQ ID NO: 492124 - RNA, 19 nt, Artificial Sequence
  Description of Artificial Sequence: Synthetic oligonucleotide
  Antisense Strand to SEQ ID NO: 492123
ugaguucaagcuaaugcca

SEQ ID NO: 492125 - RNA, 19 nt, Artificial Sequence
  Description of Artificial Sequence: Synthetic oligonucleotide
  Sense strand starting at position 2895 of SEQ ID NO: 317453
gaacucauugcagagcuga

SEQ ID NO: 492126 - RNA, 19 nt, Artificial Sequence
  Description of Artificial Sequence: Synthetic oligonucleotide
  Antisense Strand to SEQ ID NO: 492125
ucagcucugcaaugaguuc

SEQ ID NO: 492127 - RNA, 19 nt, Artificial Sequence
  Description of Artificial Sequence: Synthetic oligonucleotide
  Sense strand starting at position 2927 of SEQ ID NO: 317453
gcgugcaucauggugcaaa

SEQ ID NO: 492128 - RNA, 19 nt, Artificial Sequence
  Description of Artificial Sequence: Synthetic oligonucleotide
  Antisense Strand to SEQ ID NO: 492127
uuugcaccaugaugcacgc

SEQ ID NO: 492129 - RNA, 19 nt, Artificial Sequence
  Description of Artificial Sequence: Synthetic oligonucleotide
  Sense strand starting at position 3025 of SEQ ID NO: 317453
uugugacaucuguaacaua

SEQ ID NO: 492130 - RNA, 19 nt, Artificial Sequence
  Description of Artificial Sequence: Synthetic oligonucleotide
  Antisense Strand to SEQ ID NO: 492129
uauguuacagaugucacaa

SEQ ID NO: 492131 - RNA, 19 nt, Artificial Sequence
  Description of Artificial Sequence: Synthetic oligonucleotide
  Sense strand starting at position 3087 of SEQ ID NO: 317453
acaucuauccauugggaug

SEQ ID NO: 492132 - RNA, 19 nt, Artificial Sequence
  Description of Artificial Sequence: Synthetic oligonucleotide
  Antisense Strand to SEQ ID NO: 492131
caucccaauggauagaugu

SEQ ID NO: 492133 - RNA, 19 nt, Artificial Sequence
  Description of Artificial Sequence: Synthetic oligonucleotide
  Sense strand starting at position 3162 of SEQ ID NO: 317453
cagggugagguuuauucuu

SEQ ID NO: 492134 - RNA, 19 nt, Artificial Sequence
  Description of Artificial Sequence: Synthetic oligonucleotide
  Antisense Strand to SEQ ID NO: 492133
aagaauaaaccucacccug

SEQ ID NO: 492135 - RNA, 19 nt, Artificial Sequence
  Description of Artificial Sequence: Synthetic oligonucleotide
  Sense strand starting at position 3236 of SEQ ID NO: 317453
gaaagagacucguccucag

SEQ ID NO: 492136 - RNA, 19 nt, Artificial Sequence
  Description of Artificial Sequence: Synthetic oligonucleotide
  Antisense Strand to SEQ ID NO: 492135
cugaggacgagucucuuuc

SEQ ID NO: 492137 - RNA, 19 nt, Artificial Sequence
  Description of Artificial Sequence: Synthetic oligonucleotide
  Sense strand starting at position 3239 of SEQ ID NO: 317453
agagacucguccucagaau

SEQ ID NO: 492138 - RNA, 19 nt, Artificial Sequence
  Description of Artificial Sequence: Synthetic oligonucleotide
  Antisense Strand to SEQ ID NO: 492137
auucugaggacgagucucu

SEQ ID NO: 492139 - RNA, 19 nt, Artificial Sequence
  Description of Artificial Sequence: Synthetic oligonucleotide
  Sense strand starting at position 3240 of SEQ ID NO: 317453
gagacucguccucagaauu

SEQ ID NO: 492140 - RNA, 19 nt, Artificial Sequence
  Description of Artificial Sequence: Synthetic oligonucleotide
  Antisense Strand to SEQ ID NO: 492139
aauucugaggacgagucuc

SEQ ID NO: 492141 - RNA, 19 nt, Artificial Sequence
  Description of Artificial Sequence: Synthetic oligonucleotide
  Sense strand starting at position 3312 of SEQ ID NO: 317453
agcuuugaccagugggaua

SEQ ID NO: 492142 - RNA, 19 nt, Artificial Sequence
  Description of Artificial Sequence: Synthetic oligonucleotide
  Antisense Strand to SEQ ID NO: 492141
uaucccacuggucaaagcu

SEQ ID NO: 492143 - RNA, 19 nt, Artificial Sequence
  Description of Artificial Sequence: Synthetic oligonucleotide
  Sense strand starting at position 3314 of SEQ ID NO: 317453
cuuugaccagugggauauu

SEQ ID NO: 492144 - RNA, 19 nt, Artificial Sequence
  Description of Artificial Sequence: Synthetic oligonucleotide
  Antisense Strand to SEQ ID NO: 492143
aauaucccacuggucaaag

SEQ ID NO: 492145 - RNA, 19 nt, Artificial Sequence
  Description of Artificial Sequence: Synthetic oligonucleotide
  Sense strand starting at position 3532 of SEQ ID NO: 317453
acgacuuugguugacuaau

SEQ ID NO: 492146 - RNA, 19 nt, Artificial Sequence
  Description of Artificial Sequence: Synthetic oligonucleotide
  Antisense Strand to SEQ ID NO: 492145
auuagucaaccaaagucgu

SEQ ID NO: 492147 - RNA, 19 nt, Artificial Sequence
  Description of Artificial Sequence: Synthetic oligonucleotide
  Sense strand starting at position 3534 of SEQ ID NO: 317453
gacuuugguugacuaauga

SEQ ID NO: 492148 - RNA, 19 nt, Artificial Sequence
  Description of Artificial Sequence: Synthetic oligonucleotide
  Antisense Strand to SEQ ID NO: 492147
ucauuagucaaccaaaguc

SEQ ID NO: 492149 - RNA, 19 nt, Artificial Sequence
  Description of Artificial Sequence: Synthetic oligonucleotide
  Sense strand starting at position 3575 of SEQ ID NO: 317453
uauugauggucuccugaug

SEQ ID NO: 492150 - RNA, 19 nt, Artificial Sequence
  Description of Artificial Sequence: Synthetic oligonucleotide
  Antisense Strand to SEQ ID NO: 492149
caucaggagaccaucaaua

SEQ ID NO: 492151 - RNA, 19 nt, Artificial Sequence
  Description of Artificial Sequence: Synthetic oligonucleotide
  Sense strand starting at position 3731 of SEQ ID NO: 317453
uggugauuggagcaauagu

SEQ ID NO: 492152 - RNA, 19 nt, Artificial Sequence
  Description of Artificial Sequence: Synthetic oligonucleotide
  Antisense Strand to SEQ ID NO: 492151
acuauugcuccaaucacca

SEQ ID NO: 492153 - RNA, 19 nt, Artificial Sequence
  Description of Artificial Sequence: Synthetic oligonucleotide
  Sense strand starting at position 517 of SEQ ID NO: 317454
aauagugguucucugaauc

SEQ ID NO: 492154 - RNA, 19 nt, Artificial Sequence
  Description of Artificial Sequence: Synthetic oligonucleotide
  Antisense Strand to SEQ ID NO: 492153
gauucagagaaccacuauu

SEQ ID NO: 492155 - RNA, 19 nt, Artificial Sequence
  Description of Artificial Sequence: Synthetic oligonucleotide
  Sense strand starting at position 644 of SEQ ID NO: 317454
aagaguugucuuuauagcu

SEQ ID NO: 492156 - RNA, 19 nt, Artificial Sequence
  Description of Artificial Sequence: Synthetic oligonucleotide
  Antisense Strand to SEQ ID NO: 492155
agcuauaaagacaacucuu

SEQ ID NO: 492157 - RNA, 19 nt, Artificial Sequence
  Description of Artificial Sequence: Synthetic oligonucleotide
  Sense strand starting at position 853 of SEQ ID NO: 317454
gcuggucagcuguccuuau

SEQ ID NO: 492158 - RNA, 19 nt, Artificial Sequence
  Description of Artificial Sequence: Synthetic oligonucleotide
  Antisense Strand to SEQ ID NO: 492157
auaaggacagcugaccagc

SEQ ID NO: 492159 - RNA, 19 nt, Artificial Sequence
  Description of Artificial Sequence: Synthetic oligonucleotide
  Sense strand starting at position 889 of SEQ ID NO: 317454
acgcaauauuccuccagag

SEQ ID NO: 492160 - RNA, 19 nt, Artificial Sequence
  Description of Artificial Sequence: Synthetic oligonucleotide
  Antisense Strand to SEQ ID NO: 492159
cucuggaggaauauugcgu

SEQ ID NO: 492161 - RNA, 19 nt, Artificial Sequence
  Description of Artificial Sequence: Synthetic oligonucleotide
  Sense strand starting at position 924 of SEQ ID NO: 317454
gcaguuccuagggaauaca

SEQ ID NO: 492162 - RNA, 19 nt, Artificial Sequence
  Description of Artificial Sequence: Synthetic oligonucleotide
  Antisense Strand to SEQ ID NO: 492161
uguauucccuaggaacugc

SEQ ID NO: 492163 - RNA, 19 nt, Artificial Sequence
  Description of Artificial Sequence: Synthetic oligonucleotide
  Sense strand starting at position 1056 of SEQ ID NO: 317454
acagguaaaugcucuugau

SEQ ID NO: 492164 - RNA, 19 nt, Artificial Sequence
  Description of Artificial Sequence: Synthetic oligonucleotide
  Antisense Strand to SEQ ID NO: 492163
aucaagagcauuuaccugu

SEQ ID NO: 492165 - RNA, 19 nt, Artificial Sequence
  Description of Artificial Sequence: Synthetic oligonucleotide
  Sense strand starting at position 1763 of SEQ ID NO: 317454
cauccugcucgugaaauuc

SEQ ID NO: 492166 - RNA, 19 nt, Artificial Sequence
  Description of Artificial Sequence: Synthetic oligonucleotide
  Antisense Strand to SEQ ID NO: 492165
gaauuucacgagcaggaug

SEQ ID NO: 492167 - RNA, 19 nt, Artificial Sequence
  Description of Artificial Sequence: Synthetic oligonucleotide
  Sense strand starting at position 1877 of SEQ ID NO: 317454
agcaaacuugcuuacuuga

SEQ ID NO: 492168 - RNA, 19 nt, Artificial Sequence
  Description of Artificial Sequence: Synthetic oligonucleotide
  Antisense Strand to SEQ ID NO: 492167
ucaaguaagcaaguuugcu

SEQ ID NO: 492169 - RNA, 19 nt, Artificial Sequence
  Description of Artificial Sequence: Synthetic oligonucleotide
  Sense strand starting at position 1976 of SEQ ID NO: 317454
cuuguaaaugaacggaaau

SEQ ID NO: 492170 - RNA, 19 nt, Artificial Sequence
  Description of Artificial Sequence: Synthetic oligonucleotide
  Antisense Strand to SEQ ID NO: 492169
auuuccguucauuuacaag

SEQ ID NO: 492171 - RNA, 19 nt, Artificial Sequence
  Description of Artificial Sequence: Synthetic oligonucleotide
  Sense strand starting at position 1977 of SEQ ID NO: 317454
uuguaaaugaacggaaaua

SEQ ID NO: 492172 - RNA, 19 nt, Artificial Sequence
  Description of Artificial Sequence: Synthetic oligonucleotide
  Antisense Strand to SEQ ID NO: 492171
uauuuccguucauuuacaa

SEQ ID NO: 492173 - RNA, 19 nt, Artificial Sequence
  Description of Artificial Sequence: Synthetic oligonucleotide
  Sense strand starting at position 2022 of SEQ ID NO: 317454
guucuuaaaguugaguaaa

SEQ ID NO: 492174 - RNA, 19 nt, Artificial Sequence
  Description of Artificial Sequence: Synthetic oligonucleotide
  Antisense Strand to SEQ ID NO: 492173
uuuacucaacuuuaagaac

SEQ ID NO: 492175 - RNA, 19 nt, Artificial Sequence
  Description of Artificial Sequence: Synthetic oligonucleotide
  Sense strand starting at position 2033 of SEQ ID NO: 317454
ugaguaaagcgguaccuua

SEQ ID NO: 492176 - RNA, 19 nt, Artificial Sequence
  Description of Artificial Sequence: Synthetic oligonucleotide
  Antisense Strand to SEQ ID NO: 492175
uaagguaccgcuuuacuca

SEQ ID NO: 492177 - RNA, 19 nt, Artificial Sequence
  Description of Artificial Sequence: Synthetic oligonucleotide
  Sense strand starting at position 2177 of SEQ ID NO: 317454
uucuaauucgugugaggaa

SEQ ID NO: 492178 - RNA, 19 nt, Artificial Sequence
  Description of Artificial Sequence: Synthetic oligonucleotide
  Antisense Strand to SEQ ID NO: 492177
uuccucacacgaauuagaa

SEQ ID NO: 492179 - RNA, 19 nt, Artificial Sequence
  Description of Artificial Sequence: Synthetic oligonucleotide
  Sense strand starting at position 2280 of SEQ ID NO: 317454
uuugucaccugaguggaaa

SEQ ID NO: 492180 - RNA, 19 nt, Artificial Sequence
  Description of Artificial Sequence: Synthetic oligonucleotide
  Antisense Strand to SEQ ID NO: 492179
uuuccacucaggugacaaa

SEQ ID NO: 492181 - RNA, 19 nt, Artificial Sequence
  Description of Artificial Sequence: Synthetic oligonucleotide
  Sense strand starting at position 2355 of SEQ ID NO: 317454
ugcaguuucccuuaucaag

SEQ ID NO: 492182 - RNA, 19 nt, Artificial Sequence
  Description of Artificial Sequence: Synthetic oligonucleotide
  Antisense Strand to SEQ ID NO: 492181
cuugauaagggaaacugca

SEQ ID NO: 492183 - RNA, 19 nt, Artificial Sequence
  Description of Artificial Sequence: Synthetic oligonucleotide
  Sense strand starting at position 2470 of SEQ ID NO: 317454
aaaguuuacugguugauac

SEQ ID NO: 492184 - RNA, 19 nt, Artificial Sequence
  Description of Artificial Sequence: Synthetic oligonucleotide
  Antisense Strand to SEQ ID NO: 492183
guaucaaccaguaaacuuu

SEQ ID NO: 492185 - RNA, 19 nt, Artificial Sequence
  Description of Artificial Sequence: Synthetic oligonucleotide
  Sense strand starting at position 2471 of SEQ ID NO: 317454
aaguuuacugguugauaca

SEQ ID NO: 492186 - RNA, 19 nt, Artificial Sequence
  Description of Artificial Sequence: Synthetic oligonucleotide
  Antisense Strand to SEQ ID NO: 492185
uguaucaaccaguaaacuu

SEQ ID NO: 492187 - RNA, 19 nt, Artificial Sequence
  Description of Artificial Sequence: Synthetic oligonucleotide
  Sense strand starting at position 2472 of SEQ ID NO: 317454
aguuuacugguugauacau

SEQ ID NO: 492188 - RNA, 19 nt, Artificial Sequence
  Description of Artificial Sequence: Synthetic oligonucleotide
  Antisense Strand to SEQ ID NO: 492187
auguaucaaccaguaaacu

SEQ ID NO: 492189 - RNA, 19 nt, Artificial Sequence
  Description of Artificial Sequence: Synthetic oligonucleotide
  Sense strand starting at position 2553 of SEQ ID NO: 317454
gguguuauuaaaugguuua

SEQ ID NO: 492190 - RNA, 19 nt, Artificial Sequence
  Description of Artificial Sequence: Synthetic oligonucleotide
  Antisense Strand to SEQ ID NO: 492189
uaaaccauuuaauaacacc

SEQ ID NO: 492191 - RNA, 19 nt, Artificial Sequence
  Description of Artificial Sequence: Synthetic oligonucleotide
  Sense strand starting at position 2554 of SEQ ID NO: 317454
guguuauuaaaugguuuag

SEQ ID NO: 492192 - RNA, 19 nt, Artificial Sequence
  Description of Artificial Sequence: Synthetic oligonucleotide
  Antisense Strand to SEQ ID NO: 492191
cuaaaccauuuaauaacac

SEQ ID NO: 492193 - RNA, 19 nt, Artificial Sequence
  Description of Artificial Sequence: Synthetic oligonucleotide
  Sense strand starting at position 2677 of SEQ ID NO: 317454
ggcugauuaccagaagucu

SEQ ID NO: 492194 - RNA, 19 nt, Artificial Sequence
  Description of Artificial Sequence: Synthetic oligonucleotide
  Antisense Strand to SEQ ID NO: 492193
agacuucugguaaucagcc

SEQ ID NO: 492195 - RNA, 19 nt, Artificial Sequence
  Description of Artificial Sequence: Synthetic oligonucleotide
  Sense strand starting at position 2685 of SEQ ID NO: 317454
accagaagucucugguuaa

SEQ ID NO: 492196 - RNA, 19 nt, Artificial Sequence
  Description of Artificial Sequence: Synthetic oligonucleotide
  Antisense Strand to SEQ ID NO: 492195
uuaaccagagacuucuggu

SEQ ID NO: 492197 - RNA, 19 nt, Artificial Sequence
  Description of Artificial Sequence: Synthetic oligonucleotide
  Sense strand starting at position 2688 of SEQ ID NO: 317454
agaagucucugguuaaaca

SEQ ID NO: 492198 - RNA, 19 nt, Artificial Sequence
  Description of Artificial Sequence: Synthetic oligonucleotide
  Antisense Strand to SEQ ID NO: 492197
uguuuaaccagagacuucu

SEQ ID NO: 492199 - RNA, 19 nt, Artificial Sequence
  Description of Artificial Sequence: Synthetic oligonucleotide
  Sense strand starting at position 2707 of SEQ ID NO: 317454
gagacuucugguggacagu

SEQ ID NO: 492200 - RNA, 19 nt, Artificial Sequence
  Description of Artificial Sequence: Synthetic oligonucleotide
  Antisense Strand to SEQ ID NO: 492199
acuguccaccagaagucuc

SEQ ID NO: 492201 - RNA, 19 nt, Artificial Sequence
  Description of Artificial Sequence: Synthetic oligonucleotide
  Sense strand starting at position 2708 of SEQ ID NO: 317454
agacuucugguggacagua

SEQ ID NO: 492202 - RNA, 19 nt, Artificial Sequence
  Description of Artificial Sequence: Synthetic oligonucleotide
  Antisense Strand to SEQ ID NO: 492201
uacuguccaccagaagucu

SEQ ID NO: 492203 - RNA, 19 nt, Artificial Sequence
  Description of Artificial Sequence: Synthetic oligonucleotide
  Sense strand starting at position 2740 of SEQ ID NO: 317454
agacuucuugcuuaacuga

SEQ ID NO: 492204 - RNA, 19 nt, Artificial Sequence
  Description of Artificial Sequence: Synthetic oligonucleotide
  Antisense Strand to SEQ ID NO: 492203
ucaguuaagcaagaagucu

SEQ ID NO: 492205 - RNA, 19 nt, Artificial Sequence
  Description of Artificial Sequence: Synthetic oligonucleotide
  Sense strand starting at position 2889 of SEQ ID NO: 317454
guuggacaucuccguaaga

SEQ ID NO: 492206 - RNA, 19 nt, Artificial Sequence
  Description of Artificial Sequence: Synthetic oligonucleotide
  Antisense Strand to SEQ ID NO: 492205
ucuuacggagauguccaac

SEQ ID NO: 492207 - RNA, 19 nt, Artificial Sequence
  Description of Artificial Sequence: Synthetic oligonucleotide
  Sense strand starting at position 2890 of SEQ ID NO: 317454
uuggacaucuccguaagaa

SEQ ID NO: 492208 - RNA, 19 nt, Artificial Sequence
  Description of Artificial Sequence: Synthetic oligonucleotide
  Antisense Strand to SEQ ID NO: 492207
uucuuacggagauguccaa

SEQ ID NO: 492209 - RNA, 19 nt, Artificial Sequence
  Description of Artificial Sequence: Synthetic oligonucleotide
  Sense strand starting at position 2891 of SEQ ID NO: 317454
uggacaucuccguaagaau

SEQ ID NO: 492210 - RNA, 19 nt, Artificial Sequence
  Description of Artificial Sequence: Synthetic oligonucleotide
  Antisense Strand to SEQ ID NO: 492209
auucuuacggagaugucca

SEQ ID NO: 492211 - RNA, 19 nt, Artificial Sequence
  Description of Artificial Sequence: Synthetic oligonucleotide
  Sense strand starting at position 3051 of SEQ ID NO: 317454
gccagaaagcagcagguau

SEQ ID NO: 492212 - RNA, 19 nt, Artificial Sequence
  Description of Artificial Sequence: Synthetic oligonucleotide
  Antisense Strand to SEQ ID NO: 492211
auaccugcugcuuucuggc

SEQ ID NO: 492213 - RNA, 19 nt, Artificial Sequence
  Description of Artificial Sequence: Synthetic oligonucleotide
  Sense strand starting at position 3140 of SEQ ID NO: 317454
ucaaguaaccguggacuaa

SEQ ID NO: 492214 - RNA, 19 nt, Artificial Sequence
  Description of Artificial Sequence: Synthetic oligonucleotide
  Antisense Strand to SEQ ID NO: 492213
uuaguccacgguuacuuga

SEQ ID NO: 492215 - RNA, 19 nt, Artificial Sequence
  Description of Artificial Sequence: Synthetic oligonucleotide
  Sense strand starting at position 3141 of SEQ ID NO: 317454
caaguaaccguggacuaaa

SEQ ID NO: 492216 - RNA, 19 nt, Artificial Sequence
  Description of Artificial Sequence: Synthetic oligonucleotide
  Antisense Strand to SEQ ID NO: 492215
uuuaguccacgguuacuug

SEQ ID NO: 492217 - RNA, 19 nt, Artificial Sequence
  Description of Artificial Sequence: Synthetic oligonucleotide
  Sense strand starting at position 3203 of SEQ ID NO: 317454
ugacaugucucauuaggag

SEQ ID NO: 492218 - RNA, 19 nt, Artificial Sequence
  Description of Artificial Sequence: Synthetic oligonucleotide
  Antisense Strand to SEQ ID NO: 492217
cuccuaaugagacauguca

SEQ ID NO: 492219 - RNA, 19 nt, Artificial Sequence
  Description of Artificial Sequence: Synthetic oligonucleotide
  Sense strand starting at position 3209 of SEQ ID NO: 317454
gucucauuaggagauugca

SEQ ID NO: 492220 - RNA, 19 nt, Artificial Sequence
  Description of Artificial Sequence: Synthetic oligonucleotide
  Antisense Strand to SEQ ID NO: 492219
ugcaaucuccuaaugagac

SEQ ID NO: 492221 - RNA, 19 nt, Artificial Sequence
  Description of Artificial Sequence: Synthetic oligonucleotide
  Sense strand starting at position 3252 of SEQ ID NO: 317454
aggagacuauucuugucga

SEQ ID NO: 492222 - RNA, 19 nt, Artificial Sequence
  Description of Artificial Sequence: Synthetic oligonucleotide
  Antisense Strand to SEQ ID NO: 492221
ucgacaagaauagucuccu

SEQ ID NO: 492223 - RNA, 19 nt, Artificial Sequence
  Description of Artificial Sequence: Synthetic oligonucleotide
  Sense strand starting at position 3321 of SEQ ID NO: 317454
ucaaguaauagcgaagaug

SEQ ID NO: 492224 - RNA, 19 nt, Artificial Sequence
  Description of Artificial Sequence: Synthetic oligonucleotide
  Antisense Strand to SEQ ID NO: 492223
caucuucgcuauuacuuga

SEQ ID NO: 492225 - RNA, 19 nt, Artificial Sequence
  Description of Artificial Sequence: Synthetic oligonucleotide
  Sense strand starting at position 3332 of SEQ ID NO: 317454
cgaagauggcaaugacagu

SEQ ID NO: 492226 - RNA, 19 nt, Artificial Sequence
  Description of Artificial Sequence: Synthetic oligonucleotide
  Antisense Strand to SEQ ID NO: 492225
acugucauugccaucuucg

SEQ ID NO: 492227 - RNA, 19 nt, Artificial Sequence
  Description of Artificial Sequence: Synthetic oligonucleotide
  Sense strand starting at position 3339 of SEQ ID NO: 317454
ggcaaugacaguuaagcaa

SEQ ID NO: 492228 - RNA, 19 nt, Artificial Sequence
  Description of Artificial Sequence: Synthetic oligonucleotide
  Antisense Strand to SEQ ID NO: 492227
uugcuuaacugucauugcc

SEQ ID NO: 492229 - RNA, 19 nt, Artificial Sequence
  Description of Artificial Sequence: Synthetic oligonucleotide
  Sense strand starting at position 3532 of SEQ ID NO: 317454
aggaguuuggugcaaauca

SEQ ID NO: 492230 - RNA, 19 nt, Artificial Sequence
  Description of Artificial Sequence: Synthetic oligonucleotide
  Antisense Strand to SEQ ID NO: 492229
ugauuugcaccaaacuccu

SEQ ID NO: 492231 - RNA, 19 nt, Artificial Sequence
  Description of Artificial Sequence: Synthetic oligonucleotide
  Sense strand starting at position 3573 of SEQ ID NO: 317454
ggguaaagauuucaggaua

SEQ ID NO: 492232 - RNA, 19 nt, Artificial Sequence
  Description of Artificial Sequence: Synthetic oligonucleotide
  Antisense Strand to SEQ ID NO: 492231
uauccugaaaucuuuaccc

SEQ ID NO: 492233 - RNA, 19 nt, Artificial Sequence
  Description of Artificial Sequence: Synthetic oligonucleotide
  Sense strand starting at position 54 of SEQ ID NO: 317455
agcaaagauuuacaauaag

SEQ ID NO: 492234 - RNA, 19 nt, Artificial Sequence
  Description of Artificial Sequence: Synthetic oligonucleotide
  Antisense Strand to SEQ ID NO: 492233
cuuauuguaaaucuuugcu

SEQ ID NO: 492235 - RNA, 19 nt, Artificial Sequence
  Description of Artificial Sequence: Synthetic oligonucleotide
  Sense strand starting at position 71 of SEQ ID NO: 317455
agagaacauuaaugagcaa

SEQ ID NO: 492236 - RNA, 19 nt, Artificial Sequence
  Description of Artificial Sequence: Synthetic oligonucleotide
  Antisense Strand to SEQ ID NO: 492235
uugcucauuaauguucucu

SEQ ID NO: 492237 - RNA, 19 nt, Artificial Sequence
  Description of Artificial Sequence: Synthetic oligonucleotide
  Sense strand starting at position 117 of SEQ ID NO: 317455
guacacuguuacuauuuau

SEQ ID NO: 492238 - RNA, 19 nt, Artificial Sequence
  Description of Artificial Sequence: Synthetic oligonucleotide
  Antisense Strand to SEQ ID NO: 492237
auaaauaguaacaguguac

SEQ ID NO: 492239 - RNA, 19 nt, Artificial Sequence
  Description of Artificial Sequence: Synthetic oligonucleotide
  Sense strand starting at position 225 of SEQ ID NO: 317455
guacuauuguuaucccaau

SEQ ID NO: 492240 - RNA, 19 nt, Artificial Sequence
  Description of Artificial Sequence: Synthetic oligonucleotide
  Antisense Strand to SEQ ID NO: 492239
auugggauaacaauaguac

SEQ ID NO: 492241 - RNA, 19 nt, Artificial Sequence
  Description of Artificial Sequence: Synthetic oligonucleotide
  Sense strand starting at position 325 of SEQ ID NO: 317455
cauucugagcuguacugaa

SEQ ID NO: 492242 - RNA, 19 nt, Artificial Sequence
  Description of Artificial Sequence: Synthetic oligonucleotide
  Antisense Strand to SEQ ID NO: 492241
uucaguacagcucagaaug

SEQ ID NO: 492243 - RNA, 19 nt, Artificial Sequence
  Description of Artificial Sequence: Synthetic oligonucleotide
  Sense strand starting at position 490 of SEQ ID NO: 317455
aagcucugauagucaagga

SEQ ID NO: 492244 - RNA, 19 nt, Artificial Sequence
  Description of Artificial Sequence: Synthetic oligonucleotide
  Antisense Strand to SEQ ID NO: 492243
uccuugacuaucagagcuu

SEQ ID NO: 492245 - RNA, 19 nt, Artificial Sequence
  Description of Artificial Sequence: Synthetic oligonucleotide
  Sense strand starting at position 823 of SEQ ID NO: 317455
acaauaucguaacuucuga

SEQ ID NO: 492246 - RNA, 19 nt, Artificial Sequence
  Description of Artificial Sequence: Synthetic oligonucleotide
  Antisense Strand to SEQ ID NO: 492245
ucagaaguuacgauauugu

SEQ ID NO: 492247 - RNA, 19 nt, Artificial Sequence
  Description of Artificial Sequence: Synthetic oligonucleotide
  Sense strand starting at position 830 of SEQ ID NO: 317455
cguaacuucugaccagauu

SEQ ID NO: 492248 - RNA, 19 nt, Artificial Sequence
  Description of Artificial Sequence: Synthetic oligonucleotide
  Antisense Strand to SEQ ID NO: 492247
aaucuggucagaaguuacg

SEQ ID NO: 492249 - RNA, 19 nt, Artificial Sequence
  Description of Artificial Sequence: Synthetic oligonucleotide
  Sense strand starting at position 903 of SEQ ID NO: 317455
gcauguuucuaugcaagaa

SEQ ID NO: 492250 - RNA, 19 nt, Artificial Sequence
  Description of Artificial Sequence: Synthetic oligonucleotide
  Antisense Strand to SEQ ID NO: 492249
uucuugcauagaaacaugc

SEQ ID NO: 492251 - RNA, 19 nt, Artificial Sequence
  Description of Artificial Sequence: Synthetic oligonucleotide
  Sense strand starting at position 907 of SEQ ID NO: 317455
guuucuaugcaagaauuac

SEQ ID NO: 492252 - RNA, 19 nt, Artificial Sequence
  Description of Artificial Sequence: Synthetic oligonucleotide
  Antisense Strand to SEQ ID NO: 492251
guaauucuugcauagaaac

SEQ ID NO: 492253 - RNA, 19 nt, Artificial Sequence
  Description of Artificial Sequence: Synthetic oligonucleotide
  Sense strand starting at position 932 of SEQ ID NO: 317455
gaacacaacgauuacguaa

SEQ ID NO: 492254 - RNA, 19 nt, Artificial Sequence
  Description of Artificial Sequence: Synthetic oligonucleotide
  Antisense Strand to SEQ ID NO: 492253
uuacguaaucguuguguuc

SEQ ID NO: 492255 - RNA, 19 nt, Artificial Sequence
  Description of Artificial Sequence: Synthetic oligonucleotide
  Sense strand starting at position 1040 of SEQ ID NO: 317455
agauaauguuugcuucuua

SEQ ID NO: 492256 - RNA, 19 nt, Artificial Sequence
  Description of Artificial Sequence: Synthetic oligonucleotide
  Antisense Strand to SEQ ID NO: 492255
uaagaagcaaacauuaucu

SEQ ID NO: 492257 - RNA, 19 nt, Artificial Sequence
  Description of Artificial Sequence: Synthetic oligonucleotide
  Sense strand starting at position 1044 of SEQ ID NO: 317455
aauguuugcuucuuaaggu

SEQ ID NO: 492258 - RNA, 19 nt, Artificial Sequence
  Description of Artificial Sequence: Synthetic oligonucleotide
  Antisense Strand to SEQ ID NO: 492257
accuuaagaagcaaacauu

SEQ ID NO: 492259 - RNA, 19 nt, Artificial Sequence
  Description of Artificial Sequence: Synthetic oligonucleotide
  Sense strand starting at position 1054 of SEQ ID NO: 317455
ucuuaagguuuccugaaag

SEQ ID NO: 492260 - RNA, 19 nt, Artificial Sequence
  Description of Artificial Sequence: Synthetic oligonucleotide
  Antisense Strand to SEQ ID NO: 492259
cuuucaggaaaccuuaaga

SEQ ID NO: 492261 - RNA, 19 nt, Artificial Sequence
  Description of Artificial Sequence: Synthetic oligonucleotide
  Sense strand starting at position 1170 of SEQ ID NO: 317455
cuugaaaugugcuuuagua

SEQ ID NO: 492262 - RNA, 19 nt, Artificial Sequence
  Description of Artificial Sequence: Synthetic oligonucleotide
  Antisense Strand to SEQ ID NO: 492261
uacuaaagcacauuucaag

SEQ ID NO: 492263 - RNA, 19 nt, Artificial Sequence
  Description of Artificial Sequence: Synthetic oligonucleotide
  Sense strand starting at position 1172 of SEQ ID NO: 317455
ugaaaugugcuuuaguaac

SEQ ID NO: 492264 - RNA, 19 nt, Artificial Sequence
  Description of Artificial Sequence: Synthetic oligonucleotide
  Antisense Strand to SEQ ID NO: 492263
guuacuaaagcacauuuca

SEQ ID NO: 492265 - RNA, 19 nt, Artificial Sequence
  Description of Artificial Sequence: Synthetic oligonucleotide
  Sense strand starting at position 1393 of SEQ ID NO: 317455
caaacuccucgaugcguua

SEQ ID NO: 492266 - RNA, 19 nt, Artificial Sequence
  Description of Artificial Sequence: Synthetic oligonucleotide
  Antisense Strand to SEQ ID NO: 492265
uaacgcaucgaggaguuug

SEQ ID NO: 492267 - RNA, 19 nt, Artificial Sequence
  Description of Artificial Sequence: Synthetic oligonucleotide
  Sense strand starting at position 1396 of SEQ ID NO: 317455
acuccucgaugcguuacaa

SEQ ID NO: 492268 - RNA, 19 nt, Artificial Sequence
  Description of Artificial Sequence: Synthetic oligonucleotide
  Antisense Strand to SEQ ID NO: 492267
uuguaacgcaucgaggagu

SEQ ID NO: 492269 - RNA, 19 nt, Artificial Sequence
  Description of Artificial Sequence: Synthetic oligonucleotide
  Sense strand starting at position 1445 of SEQ ID NO: 317455
agugacuagcgagaaguua

SEQ ID NO: 492270 - RNA, 19 nt, Artificial Sequence
  Description of Artificial Sequence: Synthetic oligonucleotide
  Antisense Strand to SEQ ID NO: 492269
uaacuucucgcuagucacu

SEQ ID NO: 492271 - RNA, 19 nt, Artificial Sequence
  Description of Artificial Sequence: Synthetic oligonucleotide
  Sense strand starting at position 2266 of SEQ ID NO: 317455
acuagauuaccuugggcaa

SEQ ID NO: 492272 - RNA, 19 nt, Artificial Sequence
  Description of Artificial Sequence: Synthetic oligonucleotide
  Antisense Strand to SEQ ID NO: 492271
uugcccaagguaaucuagu

SEQ ID NO: 492273 - RNA, 19 nt, Artificial Sequence
  Description of Artificial Sequence: Synthetic oligonucleotide
  Sense strand starting at position 2662 of SEQ ID NO: 317455
aguuucuuuauccggaaag

SEQ ID NO: 492274 - RNA, 19 nt, Artificial Sequence
  Description of Artificial Sequence: Synthetic oligonucleotide
  Antisense Strand to SEQ ID NO: 492273
cuuuccggauaaagaaacu

SEQ ID NO: 492275 - RNA, 19 nt, Artificial Sequence
  Description of Artificial Sequence: Synthetic oligonucleotide
  Sense strand starting at position 2738 of SEQ ID NO: 317455
augugagagucuuuguuuc

SEQ ID NO: 492276 - RNA, 19 nt, Artificial Sequence
  Description of Artificial Sequence: Synthetic oligonucleotide
  Antisense Strand to SEQ ID NO: 492275
gaaacaaagacucucacau

SEQ ID NO: 492277 - RNA, 19 nt, Artificial Sequence
  Description of Artificial Sequence: Synthetic oligonucleotide
  Sense strand starting at position 2767 of SEQ ID NO: 317455
guuagaauuccguagacaa

SEQ ID NO: 492278 - RNA, 19 nt, Artificial Sequence
  Description of Artificial Sequence: Synthetic oligonucleotide
  Antisense Strand to SEQ ID NO: 492277
uugucuacggaauucuaac

SEQ ID NO: 492279 - RNA, 19 nt, Artificial Sequence
  Description of Artificial Sequence: Synthetic oligonucleotide
  Sense strand starting at position 2965 of SEQ ID NO: 317455
uacacaugguggucucuau

SEQ ID NO: 492280 - RNA, 19 nt, Artificial Sequence
  Description of Artificial Sequence: Synthetic oligonucleotide
  Antisense Strand to SEQ ID NO: 492279
auagagaccaccaugugua

SEQ ID NO: 492281 - RNA, 19 nt, Artificial Sequence
  Description of Artificial Sequence: Synthetic oligonucleotide
  Sense strand starting at position 2969 of SEQ ID NO: 317455
caugguggucucuauaaag

SEQ ID NO: 492282 - RNA, 19 nt, Artificial Sequence
  Description of Artificial Sequence: Synthetic oligonucleotide
  Antisense Strand to SEQ ID NO: 492281
cuuuauagagaccaccaug

SEQ ID NO: 492283 - RNA, 19 nt, Artificial Sequence
  Description of Artificial Sequence: Synthetic oligonucleotide
  Sense strand starting at position 3000 of SEQ ID NO: 317455
agugauaauugagcagaga

SEQ ID NO: 492284 - RNA, 19 nt, Artificial Sequence
  Description of Artificial Sequence: Synthetic oligonucleotide
  Antisense Strand to SEQ ID NO: 492283
ucucugcucaauuaucacu

SEQ ID NO: 492285 - RNA, 19 nt, Artificial Sequence
  Description of Artificial Sequence: Synthetic oligonucleotide
  Sense strand starting at position 3071 of SEQ ID NO: 317455
gcuggugugccuugauaug

SEQ ID NO: 492286 - RNA, 19 nt, Artificial Sequence
  Description of Artificial Sequence: Synthetic oligonucleotide
  Antisense Strand to SEQ ID NO: 492285
cauaucaaggcacaccagc

SEQ ID NO: 492287 - RNA, 19 nt, Artificial Sequence
  Description of Artificial Sequence: Synthetic oligonucleotide
  Sense strand starting at position 3089 of SEQ ID NO: 317455
gugugugcagcuguuaaca

SEQ ID NO: 492288 - RNA, 19 nt, Artificial Sequence
  Description of Artificial Sequence: Synthetic oligonucleotide
  Antisense Strand to SEQ ID NO: 492287
uguuaacagcugcacacac

SEQ ID NO: 492289 - RNA, 19 nt, Artificial Sequence
  Description of Artificial Sequence: Synthetic oligonucleotide
  Sense strand starting at position 3098 of SEQ ID NO: 317455
gcuguuaacaguugagggu

SEQ ID NO: 492290 - RNA, 19 nt, Artificial Sequence
  Description of Artificial Sequence: Synthetic oligonucleotide
  Antisense Strand to SEQ ID NO: 492289
acccucaacuguuaacagc

SEQ ID NO: 492291 - RNA, 19 nt, Artificial Sequence
  Description of Artificial Sequence: Synthetic oligonucleotide
  Sense strand starting at position 3298 of SEQ ID NO: 317455
gagguuucccauuggucuu

SEQ ID NO: 492292 - RNA, 19 nt, Artificial Sequence
  Description of Artificial Sequence: Synthetic oligonucleotide
  Antisense Strand to SEQ ID NO: 492291
aagaccaaugggaaaccuc

SEQ ID NO: 492293 - RNA, 19 nt, Artificial Sequence
  Description of Artificial Sequence: Synthetic oligonucleotide
  Sense strand starting at position 3317 of SEQ ID NO: 317455
ccacaagucugauugguug

SEQ ID NO: 492294 - RNA, 19 nt, Artificial Sequence
  Description of Artificial Sequence: Synthetic oligonucleotide
  Antisense Strand to SEQ ID NO: 492293
caaccaaucagacuugugg

SEQ ID NO: 492295 - RNA, 19 nt, Artificial Sequence
  Description of Artificial Sequence: Synthetic oligonucleotide
  Sense strand starting at position 3321 of SEQ ID NO: 317455
aagucugauugguugagga

SEQ ID NO: 492296 - RNA, 19 nt, Artificial Sequence
  Description of Artificial Sequence: Synthetic oligonucleotide
  Antisense Strand to SEQ ID NO: 492295
uccucaaccaaucagacuu

SEQ ID NO: 492297 - RNA, 19 nt, Artificial Sequence
  Description of Artificial Sequence: Synthetic oligonucleotide
  Sense strand starting at position 3584 of SEQ ID NO: 317455
acaagaguguguccagaag

SEQ ID NO: 492298 - RNA, 19 nt, Artificial Sequence
  Description of Artificial Sequence: Synthetic oligonucleotide
  Antisense Strand to SEQ ID NO: 492297
cuucuggacacacucuugu

SEQ ID NO: 492299 - RNA, 19 nt, Artificial Sequence
  Description of Artificial Sequence: Synthetic oligonucleotide
  Sense strand starting at position 3648 of SEQ ID NO: 317455
gugugaaucuaugcaauga

SEQ ID NO: 492300 - RNA, 19 nt, Artificial Sequence
  Description of Artificial Sequence: Synthetic oligonucleotide
  Antisense Strand to SEQ ID NO: 492299
ucauugcauagauucacac

SEQ ID NO: 492301 - RNA, 19 nt, Artificial Sequence
  Description of Artificial Sequence: Synthetic oligonucleotide
  Sense strand starting at position 3652 of SEQ ID NO: 317455
gaaucuaugcaaugaaggu

SEQ ID NO: 492302 - RNA, 19 nt, Artificial Sequence
  Description of Artificial Sequence: Synthetic oligonucleotide
  Antisense Strand to SEQ ID NO: 492301
accuucauugcauagauuc

SEQ ID NO: 492303 - RNA, 19 nt, Artificial Sequence
  Description of Artificial Sequence: Synthetic oligonucleotide
  Sense strand starting at position 3661 of SEQ ID NO: 317455
caaugaaggucaccuuuga

SEQ ID NO: 492304 - RNA, 19 nt, Artificial Sequence
  Description of Artificial Sequence: Synthetic oligonucleotide
  Antisense Strand to SEQ ID NO: 492303
ucaaaggugaccuucauug

SEQ ID NO: 492305 - RNA, 19 nt, Artificial Sequence
  Description of Artificial Sequence: Synthetic oligonucleotide
  Sense strand starting at position 3665 of SEQ ID NO: 317455
gaaggucaccuuugaauau

SEQ ID NO: 492306 - RNA, 19 nt, Artificial Sequence
  Description of Artificial Sequence: Synthetic oligonucleotide
  Antisense Strand to SEQ ID NO: 492305
auauucaaaggugaccuuc

SEQ ID NO: 492307 - RNA, 19 nt, Artificial Sequence
  Description of Artificial Sequence: Synthetic oligonucleotide
  Sense strand starting at position 3777 of SEQ ID NO: 317455
augugaauaucauagagca

SEQ ID NO: 492308 - RNA, 19 nt, Artificial Sequence
  Description of Artificial Sequence: Synthetic oligonucleotide
  Antisense Strand to SEQ ID NO: 492307
ugcucuaugauauucacau

SEQ ID NO: 492309 - RNA, 19 nt, Artificial Sequence
  Description of Artificial Sequence: Synthetic oligonucleotide
  Sense strand starting at position 3830 of SEQ ID NO: 317455
ccaccuaagcuguauggua

SEQ ID NO: 492310 - RNA, 19 nt, Artificial Sequence
  Description of Artificial Sequence: Synthetic oligonucleotide
  Antisense Strand to SEQ ID NO: 492309
uaccauacagcuuaggugg

SEQ ID NO: 492311 - RNA, 19 nt, Artificial Sequence
  Description of Artificial Sequence: Synthetic oligonucleotide
  Sense strand starting at position 3978 of SEQ ID NO: 317455
ugggaucaccauuguaaug

SEQ ID NO: 492312 - RNA, 19 nt, Artificial Sequence
  Description of Artificial Sequence: Synthetic oligonucleotide
  Antisense Strand to SEQ ID NO: 492311
cauuacaauggugauccca

SEQ ID NO: 492313 - RNA, 19 nt, Artificial Sequence
  Description of Artificial Sequence: Synthetic oligonucleotide
  Sense strand starting at position 361 of SEQ ID NO: 317456
caaugucaccuggaaaugu

SEQ ID NO: 492314 - RNA, 19 nt, Artificial Sequence
  Description of Artificial Sequence: Synthetic oligonucleotide
  Antisense Strand to SEQ ID NO: 492313
acauuuccaggugacauug

SEQ ID NO: 492315 - RNA, 19 nt, Artificial Sequence
  Description of Artificial Sequence: Synthetic oligonucleotide
  Sense strand starting at position 365 of SEQ ID NO: 317456
gucaccuggaaauguaaga

SEQ ID NO: 492316 - RNA, 19 nt, Artificial Sequence
  Description of Artificial Sequence: Synthetic oligonucleotide
  Antisense Strand to SEQ ID NO: 492315
ucuuacauuuccaggugac

SEQ ID NO: 492317 - RNA, 19 nt, Artificial Sequence
  Description of Artificial Sequence: Synthetic oligonucleotide
  Sense strand starting at position 411 of SEQ ID NO: 317456
cuaggaaaguaauuagucu

SEQ ID NO: 492318 - RNA, 19 nt, Artificial Sequence
  Description of Artificial Sequence: Synthetic oligonucleotide
  Antisense Strand to SEQ ID NO: 492317
agacuaauuacuuuccuag

SEQ ID NO: 492319 - RNA, 19 nt, Artificial Sequence
  Description of Artificial Sequence: Synthetic oligonucleotide
  Sense strand starting at position 415 of SEQ ID NO: 317456
gaaaguaauuagucuuguu

SEQ ID NO: 492320 - RNA, 19 nt, Artificial Sequence
  Description of Artificial Sequence: Synthetic oligonucleotide
  Antisense Strand to SEQ ID NO: 492319
aacaagacuaauuacuuuc

SEQ ID NO: 492321 - RNA, 19 nt, Artificial Sequence
  Description of Artificial Sequence: Synthetic oligonucleotide
  Sense strand starting at position 424 of SEQ ID NO: 317456
uagucuuguuaauuaggaa

SEQ ID NO: 492322 - RNA, 19 nt, Artificial Sequence
  Description of Artificial Sequence: Synthetic oligonucleotide
  Antisense Strand to SEQ ID NO: 492321
uuccuaauuaacaagacua

SEQ ID NO: 492323 - RNA, 19 nt, Artificial Sequence
  Description of Artificial Sequence: Synthetic oligonucleotide
  Sense strand starting at position 481 of SEQ ID NO: 317456
guggucuuccaagaacacu

SEQ ID NO: 492324 - RNA, 19 nt, Artificial Sequence
  Description of Artificial Sequence: Synthetic oligonucleotide
  Antisense Strand to SEQ ID NO: 492323
aguguucuuggaagaccac

SEQ ID NO: 492325 - RNA, 19 nt, Artificial Sequence
  Description of Artificial Sequence: Synthetic oligonucleotide
  Sense strand starting at position 556 of SEQ ID NO: 317456
aguggaaugguuugaucuc

SEQ ID NO: 492326 - RNA, 19 nt, Artificial Sequence
  Description of Artificial Sequence: Synthetic oligonucleotide
  Antisense Strand to SEQ ID NO: 492325
gagaucaaaccauuccacu

SEQ ID NO: 492327 - RNA, 19 nt, Artificial Sequence
  Description of Artificial Sequence: Synthetic oligonucleotide
  Sense strand starting at position 982 of SEQ ID NO: 317456
auggaugauuucuauuaag

SEQ ID NO: 492328 - RNA, 19 nt, Artificial Sequence
  Description of Artificial Sequence: Synthetic oligonucleotide
  Antisense Strand to SEQ ID NO: 492327
cuuaauagaaaucauccau

SEQ ID NO: 492329 - RNA, 19 nt, Artificial Sequence
  Description of Artificial Sequence: Synthetic oligonucleotide
  Sense strand starting at position 1026 of SEQ ID NO: 317456
cuagguucacgugagaauc

SEQ ID NO: 492330 - RNA, 19 nt, Artificial Sequence
  Description of Artificial Sequence: Synthetic oligonucleotide
  Antisense Strand to SEQ ID NO: 492329
gauucucacgugaaccuag

SEQ ID NO: 492331 - RNA, 19 nt, Artificial Sequence
  Description of Artificial Sequence: Synthetic oligonucleotide
  Sense strand starting at position 1036 of SEQ ID NO: 317456
gugagaaucaaugguccac

SEQ ID NO: 492332 - RNA, 19 nt, Artificial Sequence
  Description of Artificial Sequence: Synthetic oligonucleotide
  Antisense Strand to SEQ ID NO: 492331
guggaccauugauucucac

SEQ ID NO: 492333 - RNA, 19 nt, Artificial Sequence
  Description of Artificial Sequence: Synthetic oligonucleotide
  Sense strand starting at position 1038 of SEQ ID NO: 317456
gagaaucaaugguccacau

SEQ ID NO: 492334 - RNA, 19 nt, Artificial Sequence
  Description of Artificial Sequence: Synthetic oligonucleotide
  Antisense Strand to SEQ ID NO: 492333
auguggaccauugauucuc

SEQ ID NO: 492335 - RNA, 19 nt, Artificial Sequence
  Description of Artificial Sequence: Synthetic oligonucleotide
  Sense strand starting at position 1107 of SEQ ID NO: 317456
cguaauauucugggauauc

SEQ ID NO: 492336 - RNA, 19 nt, Artificial Sequence
  Description of Artificial Sequence: Synthetic oligonucleotide
  Antisense Strand to SEQ ID NO: 492335
gauaucccagaauauuacg

SEQ ID NO: 492337 - RNA, 19 nt, Artificial Sequence
  Description of Artificial Sequence: Synthetic oligonucleotide
  Sense strand starting at position 1187 of SEQ ID NO: 317456
guaauaaauggacgugguu

SEQ ID NO: 492338 - RNA, 19 nt, Artificial Sequence
  Description of Artificial Sequence: Synthetic oligonucleotide
  Antisense Strand to SEQ ID NO: 492337
aaccacguccauuuauuac

SEQ ID NO: 492339 - RNA, 19 nt, Artificial Sequence
  Description of Artificial Sequence: Synthetic oligonucleotide
  Sense strand starting at position 1237 of SEQ ID NO: 317456
ugaaguaucugucucccau

SEQ ID NO: 492340 - RNA, 19 nt, Artificial Sequence
  Description of Artificial Sequence: Synthetic oligonucleotide
  Antisense Strand to SEQ ID NO: 492339
augggagacagauacuuca

SEQ ID NO: 492341 - RNA, 19 nt, Artificial Sequence
  Description of Artificial Sequence: Synthetic oligonucleotide
  Sense strand starting at position 1443 of SEQ ID NO: 317456
ugaugugucagguauacau

SEQ ID NO: 492342 - RNA, 19 nt, Artificial Sequence
  Description of Artificial Sequence: Synthetic oligonucleotide
  Antisense Strand to SEQ ID NO: 492341
auguauaccugacacauca

SEQ ID NO: 492343 - RNA, 19 nt, Artificial Sequence
  Description of Artificial Sequence: Synthetic oligonucleotide
  Sense strand starting at position 1445 of SEQ ID NO: 317456
augugucagguauacauau

SEQ ID NO: 492344 - RNA, 19 nt, Artificial Sequence
  Description of Artificial Sequence: Synthetic oligonucleotide
  Antisense Strand to SEQ ID NO: 492343
auauguauaccugacacau

SEQ ID NO: 492345 - RNA, 19 nt, Artificial Sequence
  Description of Artificial Sequence: Synthetic oligonucleotide
  Sense strand starting at position 1513 of SEQ ID NO: 317456
ccaguaauucgcuauuaca

SEQ ID NO: 492346 - RNA, 19 nt, Artificial Sequence
  Description of Artificial Sequence: Synthetic oligonucleotide
  Antisense Strand to SEQ ID NO: 492345
uguaauagcgaauuacugg

SEQ ID NO: 492347 - RNA, 19 nt, Artificial Sequence
  Description of Artificial Sequence: Synthetic oligonucleotide
  Sense strand starting at position 1589 of SEQ ID NO: 317456
ucugguaaauccuuaagac

SEQ ID NO: 492348 - RNA, 19 nt, Artificial Sequence
  Description of Artificial Sequence: Synthetic oligonucleotide
  Antisense Strand to SEQ ID NO: 492347
gucuuaaggauuuaccaga

SEQ ID NO: 492349 - RNA, 19 nt, Artificial Sequence
  Description of Artificial Sequence: Synthetic oligonucleotide
  Sense strand starting at position 2060 of SEQ ID NO: 317456
guucucuucgcuguuuagu

SEQ ID NO: 492350 - RNA, 19 nt, Artificial Sequence
  Description of Artificial Sequence: Synthetic oligonucleotide
  Antisense Strand to SEQ ID NO: 492349
acuaaacagcgaagagaac

SEQ ID NO: 492351 - RNA, 19 nt, Artificial Sequence
  Description of Artificial Sequence: Synthetic oligonucleotide
  Sense strand starting at position 2073 of SEQ ID NO: 317456
uuuaguuagcgagcagcua

SEQ ID NO: 492352 - RNA, 19 nt, Artificial Sequence
  Description of Artificial Sequence: Synthetic oligonucleotide
  Antisense Strand to SEQ ID NO: 492351
uagcugcucgcuaacuaaa

SEQ ID NO: 492353 - RNA, 19 nt, Artificial Sequence
  Description of Artificial Sequence: Synthetic oligonucleotide
  Sense strand starting at position 2127 of SEQ ID NO: 317456
cggcaagugugauuugaau

SEQ ID NO: 492354 - RNA, 19 nt, Artificial Sequence
  Description of Artificial Sequence: Synthetic oligonucleotide
  Antisense Strand to SEQ ID NO: 492353
auucaaaucacacuugccg

SEQ ID NO: 492355 - RNA, 19 nt, Artificial Sequence
  Description of Artificial Sequence: Synthetic oligonucleotide
  Sense strand starting at position 2168 of SEQ ID NO: 317456
guggaagaguucccaaguu

SEQ ID NO: 492356 - RNA, 19 nt, Artificial Sequence
  Description of Artificial Sequence: Synthetic oligonucleotide
  Antisense Strand to SEQ ID NO: 492355
aacuugggaacucuuccac

SEQ ID NO: 492357 - RNA, 19 nt, Artificial Sequence
  Description of Artificial Sequence: Synthetic oligonucleotide
  Sense strand starting at position 2377 of SEQ ID NO: 317456
ucaggagucguccagcaag

SEQ ID NO: 492358 - RNA, 19 nt, Artificial Sequence
  Description of Artificial Sequence: Synthetic oligonucleotide
  Antisense Strand to SEQ ID NO: 492357
cuugcuggacgacuccuga

SEQ ID NO: 492359 - RNA, 19 nt, Artificial Sequence
  Description of Artificial Sequence: Synthetic oligonucleotide
  Sense strand starting at position 2380 of SEQ ID NO: 317456
ggagucguccagcaagacu

SEQ ID NO: 492360 - RNA, 19 nt, Artificial Sequence
  Description of Artificial Sequence: Synthetic oligonucleotide
  Antisense Strand to SEQ ID NO: 492359
agucuugcuggacgacucc

SEQ ID NO: 492361 - RNA, 19 nt, Artificial Sequence
  Description of Artificial Sequence: Synthetic oligonucleotide
  Sense strand starting at position 2458 of SEQ ID NO: 317456
ggcccugggcauuaaauaa

SEQ ID NO: 492362 - RNA, 19 nt, Artificial Sequence
  Description of Artificial Sequence: Synthetic oligonucleotide
  Antisense Strand to SEQ ID NO: 492361
uuauuuaaugcccagggcc

SEQ ID NO: 492363 - RNA, 19 nt, Artificial Sequence
  Description of Artificial Sequence: Synthetic oligonucleotide
  Sense strand starting at position 2514 of SEQ ID NO: 317456
agauuuguugugcguuuca

SEQ ID NO: 492364 - RNA, 19 nt, Artificial Sequence
  Description of Artificial Sequence: Synthetic oligonucleotide
  Antisense Strand to SEQ ID NO: 492363
ugaaacgcacaacaaaucu

SEQ ID NO: 492365 - RNA, 19 nt, Artificial Sequence
  Description of Artificial Sequence: Synthetic oligonucleotide
  Sense strand starting at position 2736 of SEQ ID NO: 317456
gcgugucaugugcugagaa

SEQ ID NO: 492366 - RNA, 19 nt, Artificial Sequence
  Description of Artificial Sequence: Synthetic oligonucleotide
  Antisense Strand to SEQ ID NO: 492365
uucucagcacaugacacgc

SEQ ID NO: 492367 - RNA, 19 nt, Artificial Sequence
  Description of Artificial Sequence: Synthetic oligonucleotide
  Sense strand starting at position 2738 of SEQ ID NO: 317456
gugucaugugcugagaaau

SEQ ID NO: 492368 - RNA, 19 nt, Artificial Sequence
  Description of Artificial Sequence: Synthetic oligonucleotide
  Antisense Strand to SEQ ID NO: 492367
auuucucagcacaugacac

SEQ ID NO: 492369 - RNA, 19 nt, Artificial Sequence
  Description of Artificial Sequence: Synthetic oligonucleotide
  Sense strand starting at position 2748 of SEQ ID NO: 317456
cugagaaauggugggcuua

SEQ ID NO: 492370 - RNA, 19 nt, Artificial Sequence
  Description of Artificial Sequence: Synthetic oligonucleotide
  Antisense Strand to SEQ ID NO: 492369
uaagcccaccauuucucag

SEQ ID NO: 492371 - RNA, 19 nt, Artificial Sequence
  Description of Artificial Sequence: Synthetic oligonucleotide
  Sense strand starting at position 2841 of SEQ ID NO: 317456
augaguaagacauggccuu

SEQ ID NO: 492372 - RNA, 19 nt, Artificial Sequence
  Description of Artificial Sequence: Synthetic oligonucleotide
  Antisense Strand to SEQ ID NO: 492371
aaggccaugucuuacucau

SEQ ID NO: 492373 - RNA, 19 nt, Artificial Sequence
  Description of Artificial Sequence: Synthetic oligonucleotide
  Sense strand starting at position 2865 of SEQ ID NO: 317456
ugaggagcuccuuguccaa

SEQ ID NO: 492374 - RNA, 19 nt, Artificial Sequence
  Description of Artificial Sequence: Synthetic oligonucleotide
  Antisense Strand to SEQ ID NO: 492373
uuggacaaggagcuccuca

SEQ ID NO: 492375 - RNA, 19 nt, Artificial Sequence
  Description of Artificial Sequence: Synthetic oligonucleotide
  Sense strand starting at position 2868 of SEQ ID NO: 317456
ggagcuccuuguccaaaga

SEQ ID NO: 492376 - RNA, 19 nt, Artificial Sequence
  Description of Artificial Sequence: Synthetic oligonucleotide
  Antisense Strand to SEQ ID NO: 492375
ucuuuggacaaggagcucc

SEQ ID NO: 492377 - RNA, 19 nt, Artificial Sequence
  Description of Artificial Sequence: Synthetic oligonucleotide
  Sense strand starting at position 2869 of SEQ ID NO: 317456
gagcuccuuguccaaagaa

SEQ ID NO: 492378 - RNA, 19 nt, Artificial Sequence
  Description of Artificial Sequence: Synthetic oligonucleotide
  Antisense Strand to SEQ ID NO: 492377
uucuuuggacaaggagcuc

SEQ ID NO: 492379 - RNA, 19 nt, Artificial Sequence
  Description of Artificial Sequence: Synthetic oligonucleotide
  Sense strand starting at position 2894 of SEQ ID NO: 317456
agagguauauuacaagaaa

SEQ ID NO: 492380 - RNA, 19 nt, Artificial Sequence
  Description of Artificial Sequence: Synthetic oligonucleotide
  Antisense Strand to SEQ ID NO: 492379
uuucuuguaauauaccucu

SEQ ID NO: 492381 - RNA, 19 nt, Artificial Sequence
  Description of Artificial Sequence: Synthetic oligonucleotide
  Sense strand starting at position 2996 of SEQ ID NO: 317456
agaagaaucuaguagagga

SEQ ID NO: 492382 - RNA, 19 nt, Artificial Sequence
  Description of Artificial Sequence: Synthetic oligonucleotide
  Antisense Strand to SEQ ID NO: 492381
uccucuacuagauucuucu

SEQ ID NO: 492383 - RNA, 19 nt, Artificial Sequence
  Description of Artificial Sequence: Synthetic oligonucleotide
  Sense strand starting at position 3124 of SEQ ID NO: 317456
gugguuucaggugaguuga

SEQ ID NO: 492384 - RNA, 19 nt, Artificial Sequence
  Description of Artificial Sequence: Synthetic oligonucleotide
  Antisense Strand to SEQ ID NO: 492383
ucaacucaccugaaaccac

SEQ ID NO: 492385 - RNA, 19 nt, Artificial Sequence
  Description of Artificial Sequence: Synthetic oligonucleotide
  Sense strand starting at position 3126 of SEQ ID NO: 317456
gguuucaggugaguugaau

SEQ ID NO: 492386 - RNA, 19 nt, Artificial Sequence
  Description of Artificial Sequence: Synthetic oligonucleotide
  Antisense Strand to SEQ ID NO: 492385
auucaacucaccugaaacc

SEQ ID NO: 492387 - RNA, 19 nt, Artificial Sequence
  Description of Artificial Sequence: Synthetic oligonucleotide
  Sense strand starting at position 3185 of SEQ ID NO: 317456
auuaguaggcacuguuuaa

SEQ ID NO: 492388 - RNA, 19 nt, Artificial Sequence
  Description of Artificial Sequence: Synthetic oligonucleotide
  Antisense Strand to SEQ ID NO: 492387
uuaaacagugccuacuaau

SEQ ID NO: 492389 - RNA, 19 nt, Artificial Sequence
  Description of Artificial Sequence: Synthetic oligonucleotide
  Sense strand starting at position 3195 of SEQ ID NO: 317456
acuguuuaauaucuucgau

SEQ ID NO: 492390 - RNA, 19 nt, Artificial Sequence
  Description of Artificial Sequence: Synthetic oligonucleotide
  Antisense Strand to SEQ ID NO: 492389
aucgaagauauuaaacagu

SEQ ID NO: 492391 - RNA, 19 nt, Artificial Sequence
  Description of Artificial Sequence: Synthetic oligonucleotide
  Sense strand starting at position 3798 of SEQ ID NO: 317456
uuagaagccuuguuaacag

SEQ ID NO: 492392 - RNA, 19 nt, Artificial Sequence
  Description of Artificial Sequence: Synthetic oligonucleotide
  Antisense Strand to SEQ ID NO: 492391
cuguuaacaaggcuucuaa

SEQ ID NO: 492393 - RNA, 19 nt, Artificial Sequence
  Description of Artificial Sequence: Synthetic oligonucleotide
  Sense strand starting at position 285 of SEQ ID NO: 317457
agguguggcugccacaauu

SEQ ID NO: 492394 - RNA, 19 nt, Artificial Sequence
  Description of Artificial Sequence: Synthetic oligonucleotide
  Antisense Strand to SEQ ID NO: 492393
aauuguggcagccacaccu

SEQ ID NO: 492395 - RNA, 19 nt, Artificial Sequence
  Description of Artificial Sequence: Synthetic oligonucleotide
  Sense strand starting at position 677 of SEQ ID NO: 317457
ccaccuguccgucauccaa

SEQ ID NO: 492396 - RNA, 19 nt, Artificial Sequence
  Description of Artificial Sequence: Synthetic oligonucleotide
  Antisense Strand to SEQ ID NO: 492395
uuggaugacggacaggugg

SEQ ID NO: 492397 - RNA, 19 nt, Artificial Sequence
  Description of Artificial Sequence: Synthetic oligonucleotide
  Sense strand starting at position 1050 of SEQ ID NO: 317457
ugcccaagguucugaacuu

SEQ ID NO: 492398 - RNA, 19 nt, Artificial Sequence
  Description of Artificial Sequence: Synthetic oligonucleotide
  Antisense Strand to SEQ ID NO: 492397
aaguucagaaccuugggca

SEQ ID NO: 492399 - RNA, 19 nt, Artificial Sequence
  Description of Artificial Sequence: Synthetic oligonucleotide
  Sense strand starting at position 1491 of SEQ ID NO: 317457
ccgggaagcugucgagcua

SEQ ID NO: 492400 - RNA, 19 nt, Artificial Sequence
  Description of Artificial Sequence: Synthetic oligonucleotide
  Antisense Strand to SEQ ID NO: 492399
uagcucgacagcuucccgg

SEQ ID NO: 492401 - RNA, 19 nt, Artificial Sequence
  Description of Artificial Sequence: Synthetic oligonucleotide
  Sense strand starting at position 1858 of SEQ ID NO: 317457
gaaacuuaggccugagcga

SEQ ID NO: 492402 - RNA, 19 nt, Artificial Sequence
  Description of Artificial Sequence: Synthetic oligonucleotide
  Antisense Strand to SEQ ID NO: 492401
ucgcucaggccuaaguuuc

SEQ ID NO: 492403 - RNA, 19 nt, Artificial Sequence
  Description of Artificial Sequence: Synthetic oligonucleotide
  Sense strand starting at position 1910 of SEQ ID NO: 317457
aguugcggaacucgaaauu

SEQ ID NO: 492404 - RNA, 19 nt, Artificial Sequence
  Description of Artificial Sequence: Synthetic oligonucleotide
  Antisense Strand to SEQ ID NO: 492403
aauuucgaguuccgcaacu

SEQ ID NO: 492405 - RNA, 19 nt, Artificial Sequence
  Description of Artificial Sequence: Synthetic oligonucleotide
  Sense strand starting at position 2103 of SEQ ID NO: 317457
cgcugauuggccgcgcgaa

SEQ ID NO: 492406 - RNA, 19 nt, Artificial Sequence
  Description of Artificial Sequence: Synthetic oligonucleotide
  Antisense Strand to SEQ ID NO: 492405
uucgcgcggccaaucagcg

SEQ ID NO: 492407 - RNA, 19 nt, Artificial Sequence
  Description of Artificial Sequence: Synthetic oligonucleotide
  Sense strand starting at position 2771 of SEQ ID NO: 317457
ccucuugugcaccagagua

SEQ ID NO: 492408 - RNA, 19 nt, Artificial Sequence
  Description of Artificial Sequence: Synthetic oligonucleotide
  Antisense Strand to SEQ ID NO: 492407
uacucuggugcacaagagg

SEQ ID NO: 492409 - RNA, 19 nt, Artificial Sequence
  Description of Artificial Sequence: Synthetic oligonucleotide
  Sense strand starting at position 2918 of SEQ ID NO: 317457
gaaggcuuccuccgaguca

SEQ ID NO: 492410 - RNA, 19 nt, Artificial Sequence
  Description of Artificial Sequence: Synthetic oligonucleotide
  Antisense Strand to SEQ ID NO: 492409
ugacucggaggaagccuuc

SEQ ID NO: 492411 - RNA, 19 nt, Artificial Sequence
  Description of Artificial Sequence: Synthetic oligonucleotide
  Sense strand starting at position 2933 of SEQ ID NO: 317457
gucacuuucucccugaguu

SEQ ID NO: 492412 - RNA, 19 nt, Artificial Sequence
  Description of Artificial Sequence: Synthetic oligonucleotide
  Antisense Strand to SEQ ID NO: 492411
aacucagggagaaagugac

SEQ ID NO: 492413 - RNA, 19 nt, Artificial Sequence
  Description of Artificial Sequence: Synthetic oligonucleotide
  Sense strand starting at position 2934 of SEQ ID NO: 317457
ucacuuucucccugaguuc

SEQ ID NO: 492414 - RNA, 19 nt, Artificial Sequence
  Description of Artificial Sequence: Synthetic oligonucleotide
  Antisense Strand to SEQ ID NO: 492413
gaacucagggagaaaguga

SEQ ID NO: 492415 - RNA, 19 nt, Artificial Sequence
  Description of Artificial Sequence: Synthetic oligonucleotide
  Sense strand starting at position 3002 of SEQ ID NO: 317457
cccaguuauucagggcgaa

SEQ ID NO: 492416 - RNA, 19 nt, Artificial Sequence
  Description of Artificial Sequence: Synthetic oligonucleotide
  Antisense Strand to SEQ ID NO: 492415
uucgcccugaauaacuggg

SEQ ID NO: 492417 - RNA, 19 nt, Artificial Sequence
  Description of Artificial Sequence: Synthetic oligonucleotide
  Sense strand starting at position 3003 of SEQ ID NO: 317457
ccaguuauucagggcgaaa

SEQ ID NO: 492418 - RNA, 19 nt, Artificial Sequence
  Description of Artificial Sequence: Synthetic oligonucleotide
  Antisense Strand to SEQ ID NO: 492417
uuucgcccugaauaacugg

SEQ ID NO: 492419 - RNA, 19 nt, Artificial Sequence
  Description of Artificial Sequence: Synthetic oligonucleotide
  Sense strand starting at position 3022 of SEQ ID NO: 317457
accuaagcgucguccguaa

SEQ ID NO: 492420 - RNA, 19 nt, Artificial Sequence
  Description of Artificial Sequence: Synthetic oligonucleotide
  Antisense Strand to SEQ ID NO: 492419
uuacggacgacgcuuaggu

SEQ ID NO: 492421 - RNA, 19 nt, Artificial Sequence
  Description of Artificial Sequence: Synthetic oligonucleotide
  Sense strand starting at position 3033 of SEQ ID NO: 317457
guccguaagucccauaugu

SEQ ID NO: 492422 - RNA, 19 nt, Artificial Sequence
  Description of Artificial Sequence: Synthetic oligonucleotide
  Antisense Strand to SEQ ID NO: 492421
acauaugggacuuacggac

SEQ ID NO: 492423 - RNA, 19 nt, Artificial Sequence
  Description of Artificial Sequence: Synthetic oligonucleotide
  Sense strand starting at position 3341 of SEQ ID NO: 317457
cuacgucauucccuagacu

SEQ ID NO: 492424 - RNA, 19 nt, Artificial Sequence
  Description of Artificial Sequence: Synthetic oligonucleotide
  Antisense Strand to SEQ ID NO: 492423
agucuagggaaugacguag

SEQ ID NO: 492425 - RNA, 19 nt, Artificial Sequence
  Description of Artificial Sequence: Synthetic oligonucleotide
  Sense strand starting at position 3550 of SEQ ID NO: 317457
ggucuugucccgcugccua

SEQ ID NO: 492426 - RNA, 19 nt, Artificial Sequence
  Description of Artificial Sequence: Synthetic oligonucleotide
  Antisense Strand to SEQ ID NO: 492425
uaggcagcgggacaagacc

SEQ ID NO: 492427 - RNA, 19 nt, Artificial Sequence
  Description of Artificial Sequence: Synthetic oligonucleotide
  Sense strand starting at position 3717 of SEQ ID NO: 317457
ucucuugacuucugcuuga

SEQ ID NO: 492428 - RNA, 19 nt, Artificial Sequence
  Description of Artificial Sequence: Synthetic oligonucleotide
  Antisense Strand to SEQ ID NO: 492427
ucaagcagaagucaagaga

SEQ ID NO: 492429 - RNA, 19 nt, Artificial Sequence
  Description of Artificial Sequence: Synthetic oligonucleotide
  Sense strand starting at position 3721 of SEQ ID NO: 317457
uugacuucugcuugauaua

SEQ ID NO: 492430 - RNA, 19 nt, Artificial Sequence
  Description of Artificial Sequence: Synthetic oligonucleotide
  Antisense Strand to SEQ ID NO: 492429
uauaucaagcagaagucaa

SEQ ID NO: 492431 - RNA, 19 nt, Artificial Sequence
  Description of Artificial Sequence: Synthetic oligonucleotide
  Sense strand starting at position 3722 of SEQ ID NO: 317457
ugacuucugcuugauauag

SEQ ID NO: 492432 - RNA, 19 nt, Artificial Sequence
  Description of Artificial Sequence: Synthetic oligonucleotide
  Antisense Strand to SEQ ID NO: 492431
cuauaucaagcagaaguca

SEQ ID NO: 492433 - RNA, 19 nt, Artificial Sequence
  Description of Artificial Sequence: Synthetic oligonucleotide
  Sense strand starting at position 3724 of SEQ ID NO: 317457
acuucugcuugauauagua

SEQ ID NO: 492434 - RNA, 19 nt, Artificial Sequence
  Description of Artificial Sequence: Synthetic oligonucleotide
  Antisense Strand to SEQ ID NO: 492433
uacuauaucaagcagaagu

SEQ ID NO: 492435 - RNA, 19 nt, Artificial Sequence
  Description of Artificial Sequence: Synthetic oligonucleotide
  Sense strand starting at position 3732 of SEQ ID NO: 317457
uugauauaguaauacagca

SEQ ID NO: 492436 - RNA, 19 nt, Artificial Sequence
  Description of Artificial Sequence: Synthetic oligonucleotide
  Antisense Strand to SEQ ID NO: 492435
ugcuguauuacuauaucaa

SEQ ID NO: 492437 - RNA, 19 nt, Artificial Sequence
  Description of Artificial Sequence: Synthetic oligonucleotide
  Sense strand starting at position 3737 of SEQ ID NO: 317457
auaguaauacagcaguaga

SEQ ID NO: 492438 - RNA, 19 nt, Artificial Sequence
  Description of Artificial Sequence: Synthetic oligonucleotide
  Antisense Strand to SEQ ID NO: 492437
ucuacugcuguauuacuau

SEQ ID NO: 492439 - RNA, 19 nt, Artificial Sequence
  Description of Artificial Sequence: Synthetic oligonucleotide
  Sense strand starting at position 3740 of SEQ ID NO: 317457
guaauacagcaguagagau

SEQ ID NO: 492440 - RNA, 19 nt, Artificial Sequence
  Description of Artificial Sequence: Synthetic oligonucleotide
  Antisense Strand to SEQ ID NO: 492439
aucucuacugcuguauuac

SEQ ID NO: 492441 - RNA, 19 nt, Artificial Sequence
  Description of Artificial Sequence: Synthetic oligonucleotide
  Sense strand starting at position 3864 of SEQ ID NO: 317457
gagugagucucugaagcaa

SEQ ID NO: 492442 - RNA, 19 nt, Artificial Sequence
  Description of Artificial Sequence: Synthetic oligonucleotide
  Antisense Strand to SEQ ID NO: 492441
uugcuucagagacucacuc

SEQ ID NO: 492443 - RNA, 19 nt, Artificial Sequence
  Description of Artificial Sequence: Synthetic oligonucleotide
  Sense strand starting at position 3899 of SEQ ID NO: 317457
gaggcuuucucugccaaga

SEQ ID NO: 492444 - RNA, 19 nt, Artificial Sequence
  Description of Artificial Sequence: Synthetic oligonucleotide
  Antisense Strand to SEQ ID NO: 492443
ucuuggcagagaaagccuc

SEQ ID NO: 492445 - RNA, 19 nt, Artificial Sequence
  Description of Artificial Sequence: Synthetic oligonucleotide
  Sense strand starting at position 3901 of SEQ ID NO: 317457
ggcuuucucugccaagaga

SEQ ID NO: 492446 - RNA, 19 nt, Artificial Sequence
  Description of Artificial Sequence: Synthetic oligonucleotide
  Antisense Strand to SEQ ID NO: 492445
ucucuuggcagagaaagcc

SEQ ID NO: 492447 - RNA, 19 nt, Artificial Sequence
  Description of Artificial Sequence: Synthetic oligonucleotide
  Sense strand starting at position 3930 of SEQ ID NO: 317457
aggugugaguuccagagca

SEQ ID NO: 492448 - RNA, 19 nt, Artificial Sequence
  Description of Artificial Sequence: Synthetic oligonucleotide
  Antisense Strand to SEQ ID NO: 492447
ugcucuggaacucacaccu

SEQ ID NO: 492449 - RNA, 19 nt, Artificial Sequence
  Description of Artificial Sequence: Synthetic oligonucleotide
  Sense strand starting at position 3932 of SEQ ID NO: 317457
gugugaguuccagagcaau

SEQ ID NO: 492450 - RNA, 19 nt, Artificial Sequence
  Description of Artificial Sequence: Synthetic oligonucleotide
  Antisense Strand to SEQ ID NO: 492449
auugcucuggaacucacac

SEQ ID NO: 492451 - RNA, 19 nt, Artificial Sequence
  Description of Artificial Sequence: Synthetic oligonucleotide
  Sense strand starting at position 65 of SEQ ID NO: 317458
uuaguuucccgagauacau

SEQ ID NO: 492452 - RNA, 19 nt, Artificial Sequence
  Description of Artificial Sequence: Synthetic oligonucleotide
  Antisense Strand to SEQ ID NO: 492451
auguaucucgggaaacuaa

SEQ ID NO: 492453 - RNA, 19 nt, Artificial Sequence
  Description of Artificial Sequence: Synthetic oligonucleotide
  Sense strand starting at position 331 of SEQ ID NO: 317458
uuuaaagguccauguauug

SEQ ID NO: 492454 - RNA, 19 nt, Artificial Sequence
  Description of Artificial Sequence: Synthetic oligonucleotide
  Antisense Strand to SEQ ID NO: 492453
caauacauggaccuuuaaa

SEQ ID NO: 492455 - RNA, 19 nt, Artificial Sequence
  Description of Artificial Sequence: Synthetic oligonucleotide
  Sense strand starting at position 357 of SEQ ID NO: 317458
uguguucuugcagagaaua

SEQ ID NO: 492456 - RNA, 19 nt, Artificial Sequence
  Description of Artificial Sequence: Synthetic oligonucleotide
  Antisense Strand to SEQ ID NO: 492455
uauucucugcaagaacaca

SEQ ID NO: 492457 - RNA, 19 nt, Artificial Sequence
  Description of Artificial Sequence: Synthetic oligonucleotide
  Sense strand starting at position 544 of SEQ ID NO: 317458
ccucuauagggaugugguu

SEQ ID NO: 492458 - RNA, 19 nt, Artificial Sequence
  Description of Artificial Sequence: Synthetic oligonucleotide
  Antisense Strand to SEQ ID NO: 492457
aaccacaucccuauagagg

SEQ ID NO: 492459 - RNA, 19 nt, Artificial Sequence
  Description of Artificial Sequence: Synthetic oligonucleotide
  Sense strand starting at position 550 of SEQ ID NO: 317458
uagggaugugguugaggaa

SEQ ID NO: 492460 - RNA, 19 nt, Artificial Sequence
  Description of Artificial Sequence: Synthetic oligonucleotide
  Antisense Strand to SEQ ID NO: 492459
uuccucaaccacaucccua

SEQ ID NO: 492461 - RNA, 19 nt, Artificial Sequence
  Description of Artificial Sequence: Synthetic oligonucleotide
  Sense strand starting at position 633 of SEQ ID NO: 317458
uacuguuaggcucaaagag

SEQ ID NO: 492462 - RNA, 19 nt, Artificial Sequence
  Description of Artificial Sequence: Synthetic oligonucleotide
  Antisense Strand to SEQ ID NO: 492461
cucuuugagccuaacagua

SEQ ID NO: 492463 - RNA, 19 nt, Artificial Sequence
  Description of Artificial Sequence: Synthetic oligonucleotide
  Sense strand starting at position 666 of SEQ ID NO: 317458
agugacuuacauggguuau

SEQ ID NO: 492464 - RNA, 19 nt, Artificial Sequence
  Description of Artificial Sequence: Synthetic oligonucleotide
  Antisense Strand to SEQ ID NO: 492463
auaacccauguaagucacu

SEQ ID NO: 492465 - RNA, 19 nt, Artificial Sequence
  Description of Artificial Sequence: Synthetic oligonucleotide
  Sense strand starting at position 667 of SEQ ID NO: 317458
gugacuuacauggguuaug

SEQ ID NO: 492466 - RNA, 19 nt, Artificial Sequence
  Description of Artificial Sequence: Synthetic oligonucleotide
  Antisense Strand to SEQ ID NO: 492465
cauaacccauguaagucac

SEQ ID NO: 492467 - RNA, 19 nt, Artificial Sequence
  Description of Artificial Sequence: Synthetic oligonucleotide
  Sense strand starting at position 814 of SEQ ID NO: 317458
cugggugauagcuaacaca

SEQ ID NO: 492468 - RNA, 19 nt, Artificial Sequence
  Description of Artificial Sequence: Synthetic oligonucleotide
  Antisense Strand to SEQ ID NO: 492467
uguguuagcuaucacccag

SEQ ID NO: 492469 - RNA, 19 nt, Artificial Sequence
  Description of Artificial Sequence: Synthetic oligonucleotide
  Sense strand starting at position 879 of SEQ ID NO: 317458
ccuuuauguguacauugau

SEQ ID NO: 492470 - RNA, 19 nt, Artificial Sequence
  Description of Artificial Sequence: Synthetic oligonucleotide
  Antisense Strand to SEQ ID NO: 492469
aucaauguacacauaaagg

SEQ ID NO: 492471 - RNA, 19 nt, Artificial Sequence
  Description of Artificial Sequence: Synthetic oligonucleotide
  Sense strand starting at position 882 of SEQ ID NO: 317458
uuauguguacauugauaga

SEQ ID NO: 492472 - RNA, 19 nt, Artificial Sequence
  Description of Artificial Sequence: Synthetic oligonucleotide
  Antisense Strand to SEQ ID NO: 492471
ucuaucaauguacacauaa

SEQ ID NO: 492473 - RNA, 19 nt, Artificial Sequence
  Description of Artificial Sequence: Synthetic oligonucleotide
  Sense strand starting at position 1042 of SEQ ID NO: 317458
aucaguuauuaccuauaga

SEQ ID NO: 492474 - RNA, 19 nt, Artificial Sequence
  Description of Artificial Sequence: Synthetic oligonucleotide
  Antisense Strand to SEQ ID NO: 492473
ucuauagguaauaacugau

SEQ ID NO: 492475 - RNA, 19 nt, Artificial Sequence
  Description of Artificial Sequence: Synthetic oligonucleotide
  Sense strand starting at position 1097 of SEQ ID NO: 317458
cagagcaugugaucuuauu

SEQ ID NO: 492476 - RNA, 19 nt, Artificial Sequence
  Description of Artificial Sequence: Synthetic oligonucleotide
  Antisense Strand to SEQ ID NO: 492475
aauaagaucacaugcucug

SEQ ID NO: 492477 - RNA, 19 nt, Artificial Sequence
  Description of Artificial Sequence: Synthetic oligonucleotide
  Sense strand starting at position 1121 of SEQ ID NO: 317458
gugaauuggcaauaacuua

SEQ ID NO: 492478 - RNA, 19 nt, Artificial Sequence
  Description of Artificial Sequence: Synthetic oligonucleotide
  Antisense Strand to SEQ ID NO: 492477
uaaguuauugccaauucac

SEQ ID NO: 492479 - RNA, 19 nt, Artificial Sequence
  Description of Artificial Sequence: Synthetic oligonucleotide
  Sense strand starting at position 1390 of SEQ ID NO: 317458
uuaaacuucuacgcagacu

SEQ ID NO: 492480 - RNA, 19 nt, Artificial Sequence
  Description of Artificial Sequence: Synthetic oligonucleotide
  Antisense Strand to SEQ ID NO: 492479
agucugcguagaaguuuaa

SEQ ID NO: 492481 - RNA, 19 nt, Artificial Sequence
  Description of Artificial Sequence: Synthetic oligonucleotide
  Sense strand starting at position 1420 of SEQ ID NO: 317458
cguauuugguauguucuga

SEQ ID NO: 492482 - RNA, 19 nt, Artificial Sequence
  Description of Artificial Sequence: Synthetic oligonucleotide
  Antisense Strand to SEQ ID NO: 492481
ucagaacauaccaaauacg

SEQ ID NO: 492483 - RNA, 19 nt, Artificial Sequence
  Description of Artificial Sequence: Synthetic oligonucleotide
  Sense strand starting at position 1428 of SEQ ID NO: 317458
guauguucugaucaauacu

SEQ ID NO: 492484 - RNA, 19 nt, Artificial Sequence
  Description of Artificial Sequence: Synthetic oligonucleotide
  Antisense Strand to SEQ ID NO: 492483
aguauugaucagaacauac

SEQ ID NO: 492485 - RNA, 19 nt, Artificial Sequence
  Description of Artificial Sequence: Synthetic oligonucleotide
  Sense strand starting at position 1537 of SEQ ID NO: 317458
uuaacagugcuugaaugua

SEQ ID NO: 492486 - RNA, 19 nt, Artificial Sequence
  Description of Artificial Sequence: Synthetic oligonucleotide
  Antisense Strand to SEQ ID NO: 492485
uacauucaagcacuguuaa

SEQ ID NO: 492487 - RNA, 19 nt, Artificial Sequence
  Description of Artificial Sequence: Synthetic oligonucleotide
  Sense strand starting at position 2130 of SEQ ID NO: 317458
ggaaacucucagcauguca

SEQ ID NO: 492488 - RNA, 19 nt, Artificial Sequence
  Description of Artificial Sequence: Synthetic oligonucleotide
  Antisense Strand to SEQ ID NO: 492487
ugacaugcugagaguuucc

SEQ ID NO: 492489 - RNA, 19 nt, Artificial Sequence
  Description of Artificial Sequence: Synthetic oligonucleotide
  Sense strand starting at position 2161 of SEQ ID NO: 317458
gucacagagggagguauua

SEQ ID NO: 492490 - RNA, 19 nt, Artificial Sequence
  Description of Artificial Sequence: Synthetic oligonucleotide
  Antisense Strand to SEQ ID NO: 492489
uaauaccucccucugugac

SEQ ID NO: 492491 - RNA, 19 nt, Artificial Sequence
  Description of Artificial Sequence: Synthetic oligonucleotide
  Sense strand starting at position 2171 of SEQ ID NO: 317458
gagguauuauuugugcagu

SEQ ID NO: 492492 - RNA, 19 nt, Artificial Sequence
  Description of Artificial Sequence: Synthetic oligonucleotide
  Antisense Strand to SEQ ID NO: 492491
acugcacaaauaauaccuc

SEQ ID NO: 492493 - RNA, 19 nt, Artificial Sequence
  Description of Artificial Sequence: Synthetic oligonucleotide
  Sense strand starting at position 2173 of SEQ ID NO: 317458
gguauuauuugugcaguuu

SEQ ID NO: 492494 - RNA, 19 nt, Artificial Sequence
  Description of Artificial Sequence: Synthetic oligonucleotide
  Antisense Strand to SEQ ID NO: 492493
aaacugcacaaauaauacc

SEQ ID NO: 492495 - RNA, 19 nt, Artificial Sequence
  Description of Artificial Sequence: Synthetic oligonucleotide
  Sense strand starting at position 2174 of SEQ ID NO: 317458
guauuauuugugcaguuua

SEQ ID NO: 492496 - RNA, 19 nt, Artificial Sequence
  Description of Artificial Sequence: Synthetic oligonucleotide
  Antisense Strand to SEQ ID NO: 492495
uaaacugcacaaauaauac

SEQ ID NO: 492497 - RNA, 19 nt, Artificial Sequence
  Description of Artificial Sequence: Synthetic oligonucleotide
  Sense strand starting at position 2778 of SEQ ID NO: 317458
agaagccuucucugaggaa

SEQ ID NO: 492498 - RNA, 19 nt, Artificial Sequence
  Description of Artificial Sequence: Synthetic oligonucleotide
  Antisense Strand to SEQ ID NO: 492497
uuccucagagaaggcuucu

SEQ ID NO: 492499 - RNA, 19 nt, Artificial Sequence
  Description of Artificial Sequence: Synthetic oligonucleotide
  Sense strand starting at position 2827 of SEQ ID NO: 317458
ugguaauggguguagcauu

SEQ ID NO: 492500 - RNA, 19 nt, Artificial Sequence
  Description of Artificial Sequence: Synthetic oligonucleotide
  Antisense Strand to SEQ ID NO: 492499
aaugcuacacccauuacca

SEQ ID NO: 492501 - RNA, 19 nt, Artificial Sequence
  Description of Artificial Sequence: Synthetic oligonucleotide
  Sense strand starting at position 2893 of SEQ ID NO: 317458
gaaggaaguucugccuuaa

SEQ ID NO: 492502 - RNA, 19 nt, Artificial Sequence
  Description of Artificial Sequence: Synthetic oligonucleotide
  Antisense Strand to SEQ ID NO: 492501
uuaaggcagaacuuccuuc

SEQ ID NO: 492503 - RNA, 19 nt, Artificial Sequence
  Description of Artificial Sequence: Synthetic oligonucleotide
  Sense strand starting at position 3166 of SEQ ID NO: 317458
gaucaugugguuuauucuu

SEQ ID NO: 492504 - RNA, 19 nt, Artificial Sequence
  Description of Artificial Sequence: Synthetic oligonucleotide
  Antisense Strand to SEQ ID NO: 492503
aagaauaaaccacaugauc

SEQ ID NO: 492505 - RNA, 19 nt, Artificial Sequence
  Description of Artificial Sequence: Synthetic oligonucleotide
  Sense strand starting at position 3201 of SEQ ID NO: 317458
gaaacugaagcuuguguca

SEQ ID NO: 492506 - RNA, 19 nt, Artificial Sequence
  Description of Artificial Sequence: Synthetic oligonucleotide
  Antisense Strand to SEQ ID NO: 492505
ugacacaagcuucaguuuc

SEQ ID NO: 492507 - RNA, 19 nt, Artificial Sequence
  Description of Artificial Sequence: Synthetic oligonucleotide
  Sense strand starting at position 3214 of SEQ ID NO: 317458
gugucagcauuugcugaga

SEQ ID NO: 492508 - RNA, 19 nt, Artificial Sequence
  Description of Artificial Sequence: Synthetic oligonucleotide
  Antisense Strand to SEQ ID NO: 492507
ucucagcaaaugcugacac

SEQ ID NO: 492509 - RNA, 19 nt, Artificial Sequence
  Description of Artificial Sequence: Synthetic oligonucleotide
  Sense strand starting at position 3219 of SEQ ID NO: 317458
agcauuugcugagaauuuc

SEQ ID NO: 492510 - RNA, 19 nt, Artificial Sequence
  Description of Artificial Sequence: Synthetic oligonucleotide
  Antisense Strand to SEQ ID NO: 492509
gaaauucucagcaaaugcu

SEQ ID NO: 492511 - RNA, 19 nt, Artificial Sequence
  Description of Artificial Sequence: Synthetic oligonucleotide
  Sense strand starting at position 3262 of SEQ ID NO: 317458
cugaauuaggccugagaag

SEQ ID NO: 492512 - RNA, 19 nt, Artificial Sequence
  Description of Artificial Sequence: Synthetic oligonucleotide
  Antisense Strand to SEQ ID NO: 492511
cuucucaggccuaauucag

SEQ ID NO: 492513 - RNA, 19 nt, Artificial Sequence
  Description of Artificial Sequence: Synthetic oligonucleotide
  Sense strand starting at position 3288 of SEQ ID NO: 317458
agggauaugcuaggccauu

SEQ ID NO: 492514 - RNA, 19 nt, Artificial Sequence
  Description of Artificial Sequence: Synthetic oligonucleotide
  Antisense Strand to SEQ ID NO: 492513
aauggccuagcauaucccu

SEQ ID NO: 492515 - RNA, 19 nt, Artificial Sequence
  Description of Artificial Sequence: Synthetic oligonucleotide
  Sense strand starting at position 3379 of SEQ ID NO: 317458
aauuguuucguauacauga

SEQ ID NO: 492516 - RNA, 19 nt, Artificial Sequence
  Description of Artificial Sequence: Synthetic oligonucleotide
  Antisense Strand to SEQ ID NO: 492515
ucauguauacgaaacaauu

SEQ ID NO: 492517 - RNA, 19 nt, Artificial Sequence
  Description of Artificial Sequence: Synthetic oligonucleotide
  Sense strand starting at position 3403 of SEQ ID NO: 317458
uaaacagaauggucuguau

SEQ ID NO: 492518 - RNA, 19 nt, Artificial Sequence
  Description of Artificial Sequence: Synthetic oligonucleotide
  Antisense Strand to SEQ ID NO: 492517
auacagaccauucuguuua

SEQ ID NO: 492519 - RNA, 19 nt, Artificial Sequence
  Description of Artificial Sequence: Synthetic oligonucleotide
  Sense strand starting at position 3405 of SEQ ID NO: 317458
aacagaauggucuguauug

SEQ ID NO: 492520 - RNA, 19 nt, Artificial Sequence
  Description of Artificial Sequence: Synthetic oligonucleotide
  Antisense Strand to SEQ ID NO: 492519
caauacagaccauucuguu

SEQ ID NO: 492521 - RNA, 19 nt, Artificial Sequence
  Description of Artificial Sequence: Synthetic oligonucleotide
  Sense strand starting at position 3465 of SEQ ID NO: 317458
uagcuucgucuguuagcaa

SEQ ID NO: 492522 - RNA, 19 nt, Artificial Sequence
  Description of Artificial Sequence: Synthetic oligonucleotide
  Antisense Strand to SEQ ID NO: 492521
uugcuaacagacgaagcua

SEQ ID NO: 492523 - RNA, 19 nt, Artificial Sequence
  Description of Artificial Sequence: Synthetic oligonucleotide
  Sense strand starting at position 3479 of SEQ ID NO: 317458
agcaauauuucucauggaa

SEQ ID NO: 492524 - RNA, 19 nt, Artificial Sequence
  Description of Artificial Sequence: Synthetic oligonucleotide
  Antisense Strand to SEQ ID NO: 492523
uuccaugagaaauauugcu

SEQ ID NO: 492525 - RNA, 19 nt, Artificial Sequence
  Description of Artificial Sequence: Synthetic oligonucleotide
  Sense strand starting at position 3771 of SEQ ID NO: 317458
auugaugucauaggacaug

SEQ ID NO: 492526 - RNA, 19 nt, Artificial Sequence
  Description of Artificial Sequence: Synthetic oligonucleotide
  Antisense Strand to SEQ ID NO: 492525
cauguccuaugacaucaau

SEQ ID NO: 492527 - RNA, 19 nt, Artificial Sequence
  Description of Artificial Sequence: Synthetic oligonucleotide
  Sense strand starting at position 3835 of SEQ ID NO: 317458
agcuuaucaggacagcaaa

SEQ ID NO: 492528 - RNA, 19 nt, Artificial Sequence
  Description of Artificial Sequence: Synthetic oligonucleotide
  Antisense Strand to SEQ ID NO: 492527
uuugcuguccugauaagcu

SEQ ID NO: 492529 - RNA, 19 nt, Artificial Sequence
  Description of Artificial Sequence: Synthetic oligonucleotide
  Sense strand starting at position 3892 of SEQ ID NO: 317458
caguauuuggccuauugcu

SEQ ID NO: 492530 - RNA, 19 nt, Artificial Sequence
  Description of Artificial Sequence: Synthetic oligonucleotide
  Antisense Strand to SEQ ID NO: 492529
agcaauaggccaaauacug

SEQ ID NO: 492531 - RNA, 19 nt, Artificial Sequence
  Description of Artificial Sequence: Synthetic oligonucleotide
  Sense strand starting at position 20 of SEQ ID NO: 317459
agggccuucucucuugaca

SEQ ID NO: 492532 - RNA, 19 nt, Artificial Sequence
  Description of Artificial Sequence: Synthetic oligonucleotide
  Antisense Strand to SEQ ID NO: 492531
ugucaagagagaaggcccu

SEQ ID NO: 492533 - RNA, 19 nt, Artificial Sequence
  Description of Artificial Sequence: Synthetic oligonucleotide
  Sense strand starting at position 78 of SEQ ID NO: 317459
ggucauugugaacaugauu

SEQ ID NO: 492534 - RNA, 19 nt, Artificial Sequence
  Description of Artificial Sequence: Synthetic oligonucleotide
  Antisense Strand to SEQ ID NO: 492533
aaucauguucacaaugacc

SEQ ID NO: 492535 - RNA, 19 nt, Artificial Sequence
  Description of Artificial Sequence: Synthetic oligonucleotide
  Sense strand starting at position 84 of SEQ ID NO: 317459
ugugaacaugauuguggua

SEQ ID NO: 492536 - RNA, 19 nt, Artificial Sequence
  Description of Artificial Sequence: Synthetic oligonucleotide
  Antisense Strand to SEQ ID NO: 492535
uaccacaaucauguucaca

SEQ ID NO: 492537 - RNA, 19 nt, Artificial Sequence
  Description of Artificial Sequence: Synthetic oligonucleotide
  Sense strand starting at position 97 of SEQ ID NO: 317459
gugguaguucuacaacaaa

SEQ ID NO: 492538 - RNA, 19 nt, Artificial Sequence
  Description of Artificial Sequence: Synthetic oligonucleotide
  Antisense Strand to SEQ ID NO: 492537
uuuguuguagaacuaccac

SEQ ID NO: 492539 - RNA, 19 nt, Artificial Sequence
  Description of Artificial Sequence: Synthetic oligonucleotide
  Sense strand starting at position 116 of SEQ ID NO: 317459
ggcuaaauagaacgcauua

SEQ ID NO: 492540 - RNA, 19 nt, Artificial Sequence
  Description of Artificial Sequence: Synthetic oligonucleotide
  Antisense Strand to SEQ ID NO: 492539
uaaugcguucuauuuagcc

SEQ ID NO: 492541 - RNA, 19 nt, Artificial Sequence
  Description of Artificial Sequence: Synthetic oligonucleotide
  Sense strand starting at position 210 of SEQ ID NO: 317459
guaagaaaugcaugaauua

SEQ ID NO: 492542 - RNA, 19 nt, Artificial Sequence
  Description of Artificial Sequence: Synthetic oligonucleotide
  Antisense Strand to SEQ ID NO: 492541
uaauucaugcauuucuuac

SEQ ID NO: 492543 - RNA, 19 nt, Artificial Sequence
  Description of Artificial Sequence: Synthetic oligonucleotide
  Sense strand starting at position 342 of SEQ ID NO: 317459
auuugugaaugucauaaca

SEQ ID NO: 492544 - RNA, 19 nt, Artificial Sequence
  Description of Artificial Sequence: Synthetic oligonucleotide
  Antisense Strand to SEQ ID NO: 492543
uguuaugacauucacaaau

SEQ ID NO: 492545 - RNA, 19 nt, Artificial Sequence
  Description of Artificial Sequence: Synthetic oligonucleotide
  Sense strand starting at position 364 of SEQ ID NO: 317459
aucaacuagucauuauugu

SEQ ID NO: 492546 - RNA, 19 nt, Artificial Sequence
  Description of Artificial Sequence: Synthetic oligonucleotide
  Antisense Strand to SEQ ID NO: 492545
acaauaaugacuaguugau

SEQ ID NO: 492547 - RNA, 19 nt, Artificial Sequence
  Description of Artificial Sequence: Synthetic oligonucleotide
  Sense strand starting at position 365 of SEQ ID NO: 317459
ucaacuagucauuauuguu

SEQ ID NO: 492548 - RNA, 19 nt, Artificial Sequence
  Description of Artificial Sequence: Synthetic oligonucleotide
  Antisense Strand to SEQ ID NO: 492547
aacaauaaugacuaguuga

SEQ ID NO: 492549 - RNA, 19 nt, Artificial Sequence
  Description of Artificial Sequence: Synthetic oligonucleotide
  Sense strand starting at position 613 of SEQ ID NO: 317459
auacaugagagcugagacu

SEQ ID NO: 492550 - RNA, 19 nt, Artificial Sequence
  Description of Artificial Sequence: Synthetic oligonucleotide
  Antisense Strand to SEQ ID NO: 492549
agucucagcucucauguau

SEQ ID NO: 492551 - RNA, 19 nt, Artificial Sequence
  Description of Artificial Sequence: Synthetic oligonucleotide
  Sense strand starting at position 689 of SEQ ID NO: 317459
cuuuaaguaggucaguuua

SEQ ID NO: 492552 - RNA, 19 nt, Artificial Sequence
  Description of Artificial Sequence: Synthetic oligonucleotide
  Antisense Strand to SEQ ID NO: 492551
uaaacugaccuacuuaaag

SEQ ID NO: 492553 - RNA, 19 nt, Artificial Sequence
  Description of Artificial Sequence: Synthetic oligonucleotide
  Sense strand starting at position 710 of SEQ ID NO: 317459
gacugcuaccauggaguuu

SEQ ID NO: 492554 - RNA, 19 nt, Artificial Sequence
  Description of Artificial Sequence: Synthetic oligonucleotide
  Antisense Strand to SEQ ID NO: 492553
aaacuccaugguagcaguc

SEQ ID NO: 492555 - RNA, 19 nt, Artificial Sequence
  Description of Artificial Sequence: Synthetic oligonucleotide
  Sense strand starting at position 756 of SEQ ID NO: 317459
augaacugcugcccagaau

SEQ ID NO: 492556 - RNA, 19 nt, Artificial Sequence
  Description of Artificial Sequence: Synthetic oligonucleotide
  Antisense Strand to SEQ ID NO: 492555
auucugggcagcaguucau

SEQ ID NO: 492557 - RNA, 19 nt, Artificial Sequence
  Description of Artificial Sequence: Synthetic oligonucleotide
  Sense strand starting at position 870 of SEQ ID NO: 317459
uccaauaacuguuugguuu

SEQ ID NO: 492558 - RNA, 19 nt, Artificial Sequence
  Description of Artificial Sequence: Synthetic oligonucleotide
  Antisense Strand to SEQ ID NO: 492557
aaaccaaacaguuauugga

SEQ ID NO: 492559 - RNA, 19 nt, Artificial Sequence
  Description of Artificial Sequence: Synthetic oligonucleotide
  Sense strand starting at position 895 of SEQ ID NO: 317459
ucaacauggcauugguaua

SEQ ID NO: 492560 - RNA, 19 nt, Artificial Sequence
  Description of Artificial Sequence: Synthetic oligonucleotide
  Antisense Strand to SEQ ID NO: 492559
uauaccaaugccauguuga

SEQ ID NO: 492561 - RNA, 19 nt, Artificial Sequence
  Description of Artificial Sequence: Synthetic oligonucleotide
  Sense strand starting at position 953 of SEQ ID NO: 317459
guggguucacucgggaaga

SEQ ID NO: 492562 - RNA, 19 nt, Artificial Sequence
  Description of Artificial Sequence: Synthetic oligonucleotide
  Antisense Strand to SEQ ID NO: 492561
ucuucccgagugaacccac

SEQ ID NO: 492563 - RNA, 19 nt, Artificial Sequence
  Description of Artificial Sequence: Synthetic oligonucleotide
  Sense strand starting at position 1071 of SEQ ID NO: 317459
cagugaaaugugugggaca

SEQ ID NO: 492564 - RNA, 19 nt, Artificial Sequence
  Description of Artificial Sequence: Synthetic oligonucleotide
  Antisense Strand to SEQ ID NO: 492563
ugucccacacauuucacug

SEQ ID NO: 492565 - RNA, 19 nt, Artificial Sequence
  Description of Artificial Sequence: Synthetic oligonucleotide
  Sense strand starting at position 1073 of SEQ ID NO: 317459
gugaaaugugugggacauc

SEQ ID NO: 492566 - RNA, 19 nt, Artificial Sequence
  Description of Artificial Sequence: Synthetic oligonucleotide
  Antisense Strand to SEQ ID NO: 492565
gaugucccacacauuucac

SEQ ID NO: 492567 - RNA, 19 nt, Artificial Sequence
  Description of Artificial Sequence: Synthetic oligonucleotide
  Sense strand starting at position 2302 of SEQ ID NO: 317459
ccgccuggugguuauuuau

SEQ ID NO: 492568 - RNA, 19 nt, Artificial Sequence
  Description of Artificial Sequence: Synthetic oligonucleotide
  Antisense Strand to SEQ ID NO: 492567
auaaauaaccaccaggcgg

SEQ ID NO: 492569 - RNA, 19 nt, Artificial Sequence
  Description of Artificial Sequence: Synthetic oligonucleotide
  Sense strand starting at position 2578 of SEQ ID NO: 317459
gucugaguccgucauaaac

SEQ ID NO: 492570 - RNA, 19 nt, Artificial Sequence
  Description of Artificial Sequence: Synthetic oligonucleotide
  Antisense Strand to SEQ ID NO: 492569
guuuaugacggacucagac

SEQ ID NO: 492571 - RNA, 19 nt, Artificial Sequence
  Description of Artificial Sequence: Synthetic oligonucleotide
  Sense strand starting at position 3273 of SEQ ID NO: 317459
cugcaauuaacguucgguu

SEQ ID NO: 492572 - RNA, 19 nt, Artificial Sequence
  Description of Artificial Sequence: Synthetic oligonucleotide
  Antisense Strand to SEQ ID NO: 492571
aaccgaacguuaauugcag

SEQ ID NO: 492573 - RNA, 19 nt, Artificial Sequence
  Description of Artificial Sequence: Synthetic oligonucleotide
  Sense strand starting at position 3318 of SEQ ID NO: 317459
uugugauuauugucuacua

SEQ ID NO: 492574 - RNA, 19 nt, Artificial Sequence
  Description of Artificial Sequence: Synthetic oligonucleotide
  Antisense Strand to SEQ ID NO: 492573
uaguagacaauaaucacaa

SEQ ID NO: 492575 - RNA, 19 nt, Artificial Sequence
  Description of Artificial Sequence: Synthetic oligonucleotide
  Sense strand starting at position 3319 of SEQ ID NO: 317459
ugugauuauugucuacuau

SEQ ID NO: 492576 - RNA, 19 nt, Artificial Sequence
  Description of Artificial Sequence: Synthetic oligonucleotide
  Antisense Strand to SEQ ID NO: 492575
auaguagacaauaaucaca

SEQ ID NO: 492577 - RNA, 19 nt, Artificial Sequence
  Description of Artificial Sequence: Synthetic oligonucleotide
  Sense strand starting at position 3320 of SEQ ID NO: 317459
gugauuauugucuacuaug

SEQ ID NO: 492578 - RNA, 19 nt, Artificial Sequence
  Description of Artificial Sequence: Synthetic oligonucleotide
  Antisense Strand to SEQ ID NO: 492577
cauaguagacaauaaucac

SEQ ID NO: 492579 - RNA, 19 nt, Artificial Sequence
  Description of Artificial Sequence: Synthetic oligonucleotide
  Sense strand starting at position 3331 of SEQ ID NO: 317459
cuacuauguguauauugau

SEQ ID NO: 492580 - RNA, 19 nt, Artificial Sequence
  Description of Artificial Sequence: Synthetic oligonucleotide
  Antisense Strand to SEQ ID NO: 492579
aucaauauacacauaguag

SEQ ID NO: 492581 - RNA, 19 nt, Artificial Sequence
  Description of Artificial Sequence: Synthetic oligonucleotide
  Sense strand starting at position 3365 of SEQ ID NO: 317459
guauguugauuucuuguua

SEQ ID NO: 492582 - RNA, 19 nt, Artificial Sequence
  Description of Artificial Sequence: Synthetic oligonucleotide
  Antisense Strand to SEQ ID NO: 492581
uaacaagaaaucaacauac

SEQ ID NO: 492583 - RNA, 19 nt, Artificial Sequence
  Description of Artificial Sequence: Synthetic oligonucleotide
  Sense strand starting at position 3369 of SEQ ID NO: 317459
guugauuucuuguuacugu

SEQ ID NO: 492584 - RNA, 19 nt, Artificial Sequence
  Description of Artificial Sequence: Synthetic oligonucleotide
  Antisense Strand to SEQ ID NO: 492583
acaguaacaagaaaucaac

SEQ ID NO: 492585 - RNA, 19 nt, Artificial Sequence
  Description of Artificial Sequence: Synthetic oligonucleotide
  Sense strand starting at position 3415 of SEQ ID NO: 317459
uccugagaccagggaucuu

SEQ ID NO: 492586 - RNA, 19 nt, Artificial Sequence
  Description of Artificial Sequence: Synthetic oligonucleotide
  Antisense Strand to SEQ ID NO: 492585
aagaucccuggucucagga

SEQ ID NO: 492587 - RNA, 19 nt, Artificial Sequence
  Description of Artificial Sequence: Synthetic oligonucleotide
  Sense strand starting at position 3463 of SEQ ID NO: 317459
gugggacuguuauccauuc

SEQ ID NO: 492588 - RNA, 19 nt, Artificial Sequence
  Description of Artificial Sequence: Synthetic oligonucleotide
  Antisense Strand to SEQ ID NO: 492587
gaauggauaacagucccac

SEQ ID NO: 492589 - RNA, 19 nt, Artificial Sequence
  Description of Artificial Sequence: Synthetic oligonucleotide
  Sense strand starting at position 3504 of SEQ ID NO: 317459
acugaaucuuagucuagac

SEQ ID NO: 492590 - RNA, 19 nt, Artificial Sequence
  Description of Artificial Sequence: Synthetic oligonucleotide
  Antisense Strand to SEQ ID NO: 492589
gucuagacuaagauucagu

SEQ ID NO: 492591 - RNA, 19 nt, Artificial Sequence
  Description of Artificial Sequence: Synthetic oligonucleotide
  Sense strand starting at position 3514 of SEQ ID NO: 317459
agucuagacucccuugaaa

SEQ ID NO: 492592 - RNA, 19 nt, Artificial Sequence
  Description of Artificial Sequence: Synthetic oligonucleotide
  Antisense Strand to SEQ ID NO: 492591
uuucaagggagucuagacu

SEQ ID NO: 492593 - RNA, 19 nt, Artificial Sequence
  Description of Artificial Sequence: Synthetic oligonucleotide
  Sense strand starting at position 3516 of SEQ ID NO: 317459
ucuagacucccuugaaagu

SEQ ID NO: 492594 - RNA, 19 nt, Artificial Sequence
  Description of Artificial Sequence: Synthetic oligonucleotide
  Antisense Strand to SEQ ID NO: 492593
acuuucaagggagucuaga

SEQ ID NO: 492595 - RNA, 19 nt, Artificial Sequence
  Description of Artificial Sequence: Synthetic oligonucleotide
  Sense strand starting at position 3527 of SEQ ID NO: 317459
uugaaaguauaugcucaau

SEQ ID NO: 492596 - RNA, 19 nt, Artificial Sequence
  Description of Artificial Sequence: Synthetic oligonucleotide
  Antisense Strand to SEQ ID NO: 492595
auugagcauauacuuucaa

SEQ ID NO: 492597 - RNA, 19 nt, Artificial Sequence
  Description of Artificial Sequence: Synthetic oligonucleotide
  Sense strand starting at position 3550 of SEQ ID NO: 317459
ugggaauuagcuuaugugu

SEQ ID NO: 492598 - RNA, 19 nt, Artificial Sequence
  Description of Artificial Sequence: Synthetic oligonucleotide
  Antisense Strand to SEQ ID NO: 492597
acacauaagcuaauuccca

SEQ ID NO: 492599 - RNA, 19 nt, Artificial Sequence
  Description of Artificial Sequence: Synthetic oligonucleotide
  Sense strand starting at position 3604 of SEQ ID NO: 317459
cccucaaaguggucugacu

SEQ ID NO: 492600 - RNA, 19 nt, Artificial Sequence
  Description of Artificial Sequence: Synthetic oligonucleotide
  Antisense Strand to SEQ ID NO: 492599
agucagaccacuuugaggg

SEQ ID NO: 492601 - RNA, 19 nt, Artificial Sequence
  Description of Artificial Sequence: Synthetic oligonucleotide
  Sense strand starting at position 3715 of SEQ ID NO: 317459
gaaagaguccucuagcuag

SEQ ID NO: 492602 - RNA, 19 nt, Artificial Sequence
  Description of Artificial Sequence: Synthetic oligonucleotide
  Antisense Strand to SEQ ID NO: 492601
cuagcuagaggacucuuuc

SEQ ID NO: 492603 - RNA, 19 nt, Artificial Sequence
  Description of Artificial Sequence: Synthetic oligonucleotide
  Sense strand starting at position 3718 of SEQ ID NO: 317459
agaguccucuagcuagauc

SEQ ID NO: 492604 - RNA, 19 nt, Artificial Sequence
  Description of Artificial Sequence: Synthetic oligonucleotide
  Antisense Strand to SEQ ID NO: 492603
gaucuagcuagaggacucu

SEQ ID NO: 492605 - RNA, 19 nt, Artificial Sequence
  Description of Artificial Sequence: Synthetic oligonucleotide
  Sense strand starting at position 3772 of SEQ ID NO: 317459
agaauuagcugucccucaa

SEQ ID NO: 492606 - RNA, 19 nt, Artificial Sequence
  Description of Artificial Sequence: Synthetic oligonucleotide
  Antisense Strand to SEQ ID NO: 492605
uugagggacagcuaauucu

SEQ ID NO: 492607 - RNA, 19 nt, Artificial Sequence
  Description of Artificial Sequence: Synthetic oligonucleotide
  Sense strand starting at position 3926 of SEQ ID NO: 317459
caaagaaccgcaggugauu

SEQ ID NO: 492608 - RNA, 19 nt, Artificial Sequence
  Description of Artificial Sequence: Synthetic oligonucleotide
  Antisense Strand to SEQ ID NO: 492607
aaucaccugcgguucuuug

SEQ ID NO: 492609 - RNA, 19 nt, Artificial Sequence
  Description of Artificial Sequence: Synthetic oligonucleotide
  Sense strand starting at position 3966 of SEQ ID NO: 317459
acucccuuucuugggaaua

SEQ ID NO: 492610 - RNA, 19 nt, Artificial Sequence
  Description of Artificial Sequence: Synthetic oligonucleotide
  Antisense Strand to SEQ ID NO: 492609
uauucccaagaaagggagu

SEQ ID NO: 492611 - RNA, 19 nt, Artificial Sequence
  Description of Artificial Sequence: Synthetic oligonucleotide
  Sense strand starting at position 72 of SEQ ID NO: 317460
ggaagaugugcacgaucag

SEQ ID NO: 492612 - RNA, 19 nt, Artificial Sequence
  Description of Artificial Sequence: Synthetic oligonucleotide
  Antisense Strand to SEQ ID NO: 492611
cugaucgugcacaucuucc

SEQ ID NO: 492613 - RNA, 19 nt, Artificial Sequence
  Description of Artificial Sequence: Synthetic oligonucleotide
  Sense strand starting at position 73 of SEQ ID NO: 317460
gaagaugugcacgaucaga

SEQ ID NO: 492614 - RNA, 19 nt, Artificial Sequence
  Description of Artificial Sequence: Synthetic oligonucleotide
  Antisense Strand to SEQ ID NO: 492613
ucugaucgugcacaucuuc

SEQ ID NO: 492615 - RNA, 19 nt, Artificial Sequence
  Description of Artificial Sequence: Synthetic oligonucleotide
  Sense strand starting at position 148 of SEQ ID NO: 317460
uccugaauugcagacacua

SEQ ID NO: 492616 - RNA, 19 nt, Artificial Sequence
  Description of Artificial Sequence: Synthetic oligonucleotide
  Antisense Strand to SEQ ID NO: 492615
uagugucugcaauucagga

SEQ ID NO: 492617 - RNA, 19 nt, Artificial Sequence
  Description of Artificial Sequence: Synthetic oligonucleotide
  Sense strand starting at position 215 of SEQ ID NO: 317460
auuaguauuaagggagugu

SEQ ID NO: 492618 - RNA, 19 nt, Artificial Sequence
  Description of Artificial Sequence: Synthetic oligonucleotide
  Antisense Strand to SEQ ID NO: 492617
acacucccuuaauacuaau

SEQ ID NO: 492619 - RNA, 19 nt, Artificial Sequence
  Description of Artificial Sequence: Synthetic oligonucleotide
  Sense strand starting at position 216 of SEQ ID NO: 317460
uuaguauuaagggaguguu

SEQ ID NO: 492620 - RNA, 19 nt, Artificial Sequence
  Description of Artificial Sequence: Synthetic oligonucleotide
  Antisense Strand to SEQ ID NO: 492619
aacacucccuuaauacuaa

SEQ ID NO: 492621 - RNA, 19 nt, Artificial Sequence
  Description of Artificial Sequence: Synthetic oligonucleotide
  Sense strand starting at position 250 of SEQ ID NO: 317460
aguguugugcaauagaaga

SEQ ID NO: 492622 - RNA, 19 nt, Artificial Sequence
  Description of Artificial Sequence: Synthetic oligonucleotide
  Antisense Strand to SEQ ID NO: 492621
ucuucuauugcacaacacu

SEQ ID NO: 492623 - RNA, 19 nt, Artificial Sequence
  Description of Artificial Sequence: Synthetic oligonucleotide
  Sense strand starting at position 404 of SEQ ID NO: 317460
cucaaagaacucuggagua

SEQ ID NO: 492624 - RNA, 19 nt, Artificial Sequence
  Description of Artificial Sequence: Synthetic oligonucleotide
  Antisense Strand to SEQ ID NO: 492623
uacuccagaguucuuugag

SEQ ID NO: 492625 - RNA, 19 nt, Artificial Sequence
  Description of Artificial Sequence: Synthetic oligonucleotide
  Sense strand starting at position 794 of SEQ ID NO: 317460
aaagaacuguagcuugaga

SEQ ID NO: 492626 - RNA, 19 nt, Artificial Sequence
  Description of Artificial Sequence: Synthetic oligonucleotide
  Antisense Strand to SEQ ID NO: 492625
ucucaagcuacaguucuuu

SEQ ID NO: 492627 - RNA, 19 nt, Artificial Sequence
  Description of Artificial Sequence: Synthetic oligonucleotide
  Sense strand starting at position 796 of SEQ ID NO: 317460
agaacuguagcuugagaac

SEQ ID NO: 492628 - RNA, 19 nt, Artificial Sequence
  Description of Artificial Sequence: Synthetic oligonucleotide
  Antisense Strand to SEQ ID NO: 492627
guucucaagcuacaguucu

SEQ ID NO: 492629 - RNA, 19 nt, Artificial Sequence
  Description of Artificial Sequence: Synthetic oligonucleotide
  Sense strand starting at position 885 of SEQ ID NO: 317460
gccaguguauuugcccaaa

SEQ ID NO: 492630 - RNA, 19 nt, Artificial Sequence
  Description of Artificial Sequence: Synthetic oligonucleotide
  Antisense Strand to SEQ ID NO: 492629
uuugggcaaauacacuggc

SEQ ID NO: 492631 - RNA, 19 nt, Artificial Sequence
  Description of Artificial Sequence: Synthetic oligonucleotide
  Sense strand starting at position 1023 of SEQ ID NO: 317460
accuuugauugguuccaau

SEQ ID NO: 492632 - RNA, 19 nt, Artificial Sequence
  Description of Artificial Sequence: Synthetic oligonucleotide
  Antisense Strand to SEQ ID NO: 492631
auuggaaccaaucaaaggu

SEQ ID NO: 492633 - RNA, 19 nt, Artificial Sequence
  Description of Artificial Sequence: Synthetic oligonucleotide
  Sense strand starting at position 1130 of SEQ ID NO: 317460
gaaagaccuuacuugaugu

SEQ ID NO: 492634 - RNA, 19 nt, Artificial Sequence
  Description of Artificial Sequence: Synthetic oligonucleotide
  Antisense Strand to SEQ ID NO: 492633
acaucaaguaaggucuuuc

SEQ ID NO: 492635 - RNA, 19 nt, Artificial Sequence
  Description of Artificial Sequence: Synthetic oligonucleotide
  Sense strand starting at position 1419 of SEQ ID NO: 317460
cccauuaaagcugguaaau

SEQ ID NO: 492636 - RNA, 19 nt, Artificial Sequence
  Description of Artificial Sequence: Synthetic oligonucleotide
  Antisense Strand to SEQ ID NO: 492635
auuuaccagcuuuaauggg

SEQ ID NO: 492637 - RNA, 19 nt, Artificial Sequence
  Description of Artificial Sequence: Synthetic oligonucleotide
  Sense strand starting at position 1829 of SEQ ID NO: 317460
acgugaacauuuccuguuu

SEQ ID NO: 492638 - RNA, 19 nt, Artificial Sequence
  Description of Artificial Sequence: Synthetic oligonucleotide
  Antisense Strand to SEQ ID NO: 492637
aaacaggaaauguucacgu

SEQ ID NO: 492639 - RNA, 19 nt, Artificial Sequence
  Description of Artificial Sequence: Synthetic oligonucleotide
  Sense strand starting at position 1864 of SEQ ID NO: 317460
ggugcugacuugaaggaga

SEQ ID NO: 492640 - RNA, 19 nt, Artificial Sequence
  Description of Artificial Sequence: Synthetic oligonucleotide
  Antisense Strand to SEQ ID NO: 492639
ucuccuucaagucagcacc

SEQ ID NO: 492641 - RNA, 19 nt, Artificial Sequence
  Description of Artificial Sequence: Synthetic oligonucleotide
  Sense strand starting at position 1907 of SEQ ID NO: 317460
ugauguaauucugcaggag

SEQ ID NO: 492642 - RNA, 19 nt, Artificial Sequence
  Description of Artificial Sequence: Synthetic oligonucleotide
  Antisense Strand to SEQ ID NO: 492641
cuccugcagaauuacauca

SEQ ID NO: 492643 - RNA, 19 nt, Artificial Sequence
  Description of Artificial Sequence: Synthetic oligonucleotide
  Sense strand starting at position 2172 of SEQ ID NO: 317460
gaagcuguccuguagaacu

SEQ ID NO: 492644 - RNA, 19 nt, Artificial Sequence
  Description of Artificial Sequence: Synthetic oligonucleotide
  Antisense Strand to SEQ ID NO: 492643
aguucuacaggacagcuuc

SEQ ID NO: 492645 - RNA, 19 nt, Artificial Sequence
  Description of Artificial Sequence: Synthetic oligonucleotide
  Sense strand starting at position 2185 of SEQ ID NO: 317460
agaacuuucugcccugaug

SEQ ID NO: 492646 - RNA, 19 nt, Artificial Sequence
  Description of Artificial Sequence: Synthetic oligonucleotide
  Antisense Strand to SEQ ID NO: 492645
caucagggcagaaaguucu

SEQ ID NO: 492647 - RNA, 19 nt, Artificial Sequence
  Description of Artificial Sequence: Synthetic oligonucleotide
  Sense strand starting at position 2188 of SEQ ID NO: 317460
acuuucugcccugauggaa

SEQ ID NO: 492648 - RNA, 19 nt, Artificial Sequence
  Description of Artificial Sequence: Synthetic oligonucleotide
  Antisense Strand to SEQ ID NO: 492647
uuccaucagggcagaaagu

SEQ ID NO: 492649 - RNA, 19 nt, Artificial Sequence
  Description of Artificial Sequence: Synthetic oligonucleotide
  Sense strand starting at position 2214 of SEQ ID NO: 317460
aagucugcgccgucugaua

SEQ ID NO: 492650 - RNA, 19 nt, Artificial Sequence
  Description of Artificial Sequence: Synthetic oligonucleotide
  Antisense Strand to SEQ ID NO: 492649
uaucagacggcgcagacuu

SEQ ID NO: 492651 - RNA, 19 nt, Artificial Sequence
  Description of Artificial Sequence: Synthetic oligonucleotide
  Sense strand starting at position 2269 of SEQ ID NO: 317460
gaggcuagugcugauggaa

SEQ ID NO: 492652 - RNA, 19 nt, Artificial Sequence
  Description of Artificial Sequence: Synthetic oligonucleotide
  Antisense Strand to SEQ ID NO: 492651
uuccaucagcacuagccuc

SEQ ID NO: 492653 - RNA, 19 nt, Artificial Sequence
  Description of Artificial Sequence: Synthetic oligonucleotide
  Sense strand starting at position 2272 of SEQ ID NO: 317460
gcuagugcugauggaauuu

SEQ ID NO: 492654 - RNA, 19 nt, Artificial Sequence
  Description of Artificial Sequence: Synthetic oligonucleotide
  Antisense Strand to SEQ ID NO: 492653
aaauuccaucagcacuagc

SEQ ID NO: 492655 - RNA, 19 nt, Artificial Sequence
  Description of Artificial Sequence: Synthetic oligonucleotide
  Sense strand starting at position 2337 of SEQ ID NO: 317460
guggcugcuguguuggaua

SEQ ID NO: 492656 - RNA, 19 nt, Artificial Sequence
  Description of Artificial Sequence: Synthetic oligonucleotide
  Antisense Strand to SEQ ID NO: 492655
uauccaacacagcagccac

SEQ ID NO: 492657 - RNA, 19 nt, Artificial Sequence
  Description of Artificial Sequence: Synthetic oligonucleotide
  Sense strand starting at position 2563 of SEQ ID NO: 317460
gagaauaugcucugagggu

SEQ ID NO: 492658 - RNA, 19 nt, Artificial Sequence
  Description of Artificial Sequence: Synthetic oligonucleotide
  Antisense Strand to SEQ ID NO: 492657
acccucagagcauauucuc

SEQ ID NO: 492659 - RNA, 19 nt, Artificial Sequence
  Description of Artificial Sequence: Synthetic oligonucleotide
  Sense strand starting at position 2714 of SEQ ID NO: 317460
aaagguugugucuaguaua

SEQ ID NO: 492660 - RNA, 19 nt, Artificial Sequence
  Description of Artificial Sequence: Synthetic oligonucleotide
  Antisense Strand to SEQ ID NO: 492659
uauacuagacacaaccuuu

SEQ ID NO: 492661 - RNA, 19 nt, Artificial Sequence
  Description of Artificial Sequence: Synthetic oligonucleotide
  Sense strand starting at position 2724 of SEQ ID NO: 317460
ucuaguauacaguggagau

SEQ ID NO: 492662 - RNA, 19 nt, Artificial Sequence
  Description of Artificial Sequence: Synthetic oligonucleotide
  Antisense Strand to SEQ ID NO: 492661
aucuccacuguauacuaga

SEQ ID NO: 492663 - RNA, 19 nt, Artificial Sequence
  Description of Artificial Sequence: Synthetic oligonucleotide
  Sense strand starting at position 2725 of SEQ ID NO: 317460
cuaguauacaguggagauu

SEQ ID NO: 492664 - RNA, 19 nt, Artificial Sequence
  Description of Artificial Sequence: Synthetic oligonucleotide
  Antisense Strand to SEQ ID NO: 492663
aaucuccacuguauacuag

SEQ ID NO: 492665 - RNA, 19 nt, Artificial Sequence
  Description of Artificial Sequence: Synthetic oligonucleotide
  Sense strand starting at position 2728 of SEQ ID NO: 317460
guauacaguggagauuagu

SEQ ID NO: 492666 - RNA, 19 nt, Artificial Sequence
  Description of Artificial Sequence: Synthetic oligonucleotide
  Antisense Strand to SEQ ID NO: 492665
acuaaucuccacuguauac

SEQ ID NO: 492667 - RNA, 19 nt, Artificial Sequence
  Description of Artificial Sequence: Synthetic oligonucleotide
  Sense strand starting at position 2747 of SEQ ID NO: 317460
guguguuggguguucuauu

SEQ ID NO: 492668 - RNA, 19 nt, Artificial Sequence
  Description of Artificial Sequence: Synthetic oligonucleotide
  Antisense Strand to SEQ ID NO: 492667
aauagaacacccaacacac

SEQ ID NO: 492669 - RNA, 19 nt, Artificial Sequence
  Description of Artificial Sequence: Synthetic oligonucleotide
  Sense strand starting at position 2786 of SEQ ID NO: 317460
agguuuagggccuaagcau

SEQ ID NO: 492670 - RNA, 19 nt, Artificial Sequence
  Description of Artificial Sequence: Synthetic oligonucleotide
  Antisense Strand to SEQ ID NO: 492669
augcuuaggcccuaaaccu

SEQ ID NO: 492671 - RNA, 19 nt, Artificial Sequence
  Description of Artificial Sequence: Synthetic oligonucleotide
  Sense strand starting at position 2923 of SEQ ID NO: 317460
ucaugacuucccgucguuu

SEQ ID NO: 492672 - RNA, 19 nt, Artificial Sequence
  Description of Artificial Sequence: Synthetic oligonucleotide
  Antisense Strand to SEQ ID NO: 492671
aaacgacgggaagucauga

SEQ ID NO: 492673 - RNA, 19 nt, Artificial Sequence
  Description of Artificial Sequence: Synthetic oligonucleotide
  Sense strand starting at position 2969 of SEQ ID NO: 317460
guaugaggugacuggaauu

SEQ ID NO: 492674 - RNA, 19 nt, Artificial Sequence
  Description of Artificial Sequence: Synthetic oligonucleotide
  Antisense Strand to SEQ ID NO: 492673
aauuccagucaccucauac

SEQ ID NO: 492675 - RNA, 19 nt, Artificial Sequence
  Description of Artificial Sequence: Synthetic oligonucleotide
  Sense strand starting at position 3077 of SEQ ID NO: 317460
caagaaauagguuggugau

SEQ ID NO: 492676 - RNA, 19 nt, Artificial Sequence
  Description of Artificial Sequence: Synthetic oligonucleotide
  Antisense Strand to SEQ ID NO: 492675
aucaccaaccuauuucuug

SEQ ID NO: 492677 - RNA, 19 nt, Artificial Sequence
  Description of Artificial Sequence: Synthetic oligonucleotide
  Sense strand starting at position 3078 of SEQ ID NO: 317460
aagaaauagguuggugauu

SEQ ID NO: 492678 - RNA, 19 nt, Artificial Sequence
  Description of Artificial Sequence: Synthetic oligonucleotide
  Antisense Strand to SEQ ID NO: 492677
aaucaccaaccuauuucuu

SEQ ID NO: 492679 - RNA, 19 nt, Artificial Sequence
  Description of Artificial Sequence: Synthetic oligonucleotide
  Sense strand starting at position 3102 of SEQ ID NO: 317460
aaggaucaguuuguuaaug

SEQ ID NO: 492680 - RNA, 19 nt, Artificial Sequence
  Description of Artificial Sequence: Synthetic oligonucleotide
  Antisense Strand to SEQ ID NO: 492679
cauuaacaaacugauccuu

SEQ ID NO: 492681 - RNA, 19 nt, Artificial Sequence
  Description of Artificial Sequence: Synthetic oligonucleotide
  Sense strand starting at position 3372 of SEQ ID NO: 317460
cguguuucugcagcuguga

SEQ ID NO: 492682 - RNA, 19 nt, Artificial Sequence
  Description of Artificial Sequence: Synthetic oligonucleotide
  Antisense Strand to SEQ ID NO: 492681
ucacagcugcagaaacacg

SEQ ID NO: 492683 - RNA, 19 nt, Artificial Sequence
  Description of Artificial Sequence: Synthetic oligonucleotide
  Sense strand starting at position 3713 of SEQ ID NO: 317460
acuaaaucagagugaggua

SEQ ID NO: 492684 - RNA, 19 nt, Artificial Sequence
  Description of Artificial Sequence: Synthetic oligonucleotide
  Antisense Strand to SEQ ID NO: 492683
uaccucacucugauuuagu

SEQ ID NO: 492685 - RNA, 19 nt, Artificial Sequence
  Description of Artificial Sequence: Synthetic oligonucleotide
  Sense strand starting at position 3799 of SEQ ID NO: 317460
cuaagacccuuagcaugau

SEQ ID NO: 492686 - RNA, 19 nt, Artificial Sequence
  Description of Artificial Sequence: Synthetic oligonucleotide
  Antisense Strand to SEQ ID NO: 492685
aucaugcuaagggucuuag

SEQ ID NO: 492687 - RNA, 19 nt, Artificial Sequence
  Description of Artificial Sequence: Synthetic oligonucleotide
  Sense strand starting at position 3802 of SEQ ID NO: 317460
agacccuuagcaugauuaa

SEQ ID NO: 492688 - RNA, 19 nt, Artificial Sequence
  Description of Artificial Sequence: Synthetic oligonucleotide
  Antisense Strand to SEQ ID NO: 492687
uuaaucaugcuaagggucu

SEQ ID NO: 492689 - RNA, 19 nt, Artificial Sequence
  Description of Artificial Sequence: Synthetic oligonucleotide
  Sense strand starting at position 3863 of SEQ ID NO: 317460
augguagcaccucaaugau

SEQ ID NO: 492690 - RNA, 19 nt, Artificial Sequence
  Description of Artificial Sequence: Synthetic oligonucleotide
  Antisense Strand to SEQ ID NO: 492689
aucauugaggugcuaccau

SEQ ID NO: 492691 - RNA, 19 nt, Artificial Sequence
  Description of Artificial Sequence: Synthetic oligonucleotide
  Sense strand starting at position 8 of SEQ ID NO: 317461
gugggaaauuaucuaaugu

SEQ ID NO: 492692 - RNA, 19 nt, Artificial Sequence
  Description of Artificial Sequence: Synthetic oligonucleotide
  Antisense Strand to SEQ ID NO: 492691
acauuagauaauuucccac

SEQ ID NO: 492693 - RNA, 19 nt, Artificial Sequence
  Description of Artificial Sequence: Synthetic oligonucleotide
  Sense strand starting at position 18 of SEQ ID NO: 317461
aucuaaugucuugggccaa

SEQ ID NO: 492694 - RNA, 19 nt, Artificial Sequence
  Description of Artificial Sequence: Synthetic oligonucleotide
  Antisense Strand to SEQ ID NO: 492693
uuggcccaagacauuagau

SEQ ID NO: 492695 - RNA, 19 nt, Artificial Sequence
  Description of Artificial Sequence: Synthetic oligonucleotide
  Sense strand starting at position 112 of SEQ ID NO: 317461
uuaggcaaacuuuaguauu

SEQ ID NO: 492696 - RNA, 19 nt, Artificial Sequence
  Description of Artificial Sequence: Synthetic oligonucleotide
  Antisense Strand to SEQ ID NO: 492695
aauacuaaaguuugccuaa

SEQ ID NO: 492697 - RNA, 19 nt, Artificial Sequence
  Description of Artificial Sequence: Synthetic oligonucleotide
  Sense strand starting at position 152 of SEQ ID NO: 317461
uauggucuuugugucuaaa

SEQ ID NO: 492698 - RNA, 19 nt, Artificial Sequence
  Description of Artificial Sequence: Synthetic oligonucleotide
  Antisense Strand to SEQ ID NO: 492697
uuuagacacaaagaccaua

SEQ ID NO: 492699 - RNA, 19 nt, Artificial Sequence
  Description of Artificial Sequence: Synthetic oligonucleotide
  Sense strand starting at position 191 of SEQ ID NO: 317461
aguuaugacuuagcuuauc

SEQ ID NO: 492700 - RNA, 19 nt, Artificial Sequence
  Description of Artificial Sequence: Synthetic oligonucleotide
  Antisense Strand to SEQ ID NO: 492699
gauaagcuaagucauaacu

SEQ ID NO: 492701 - RNA, 19 nt, Artificial Sequence
  Description of Artificial Sequence: Synthetic oligonucleotide
  Sense strand starting at position 241 of SEQ ID NO: 317461
cuuacugaagauugaguau

SEQ ID NO: 492702 - RNA, 19 nt, Artificial Sequence
  Description of Artificial Sequence: Synthetic oligonucleotide
  Antisense Strand to SEQ ID NO: 492701
auacucaaucuucaguaag

SEQ ID NO: 492703 - RNA, 19 nt, Artificial Sequence
  Description of Artificial Sequence: Synthetic oligonucleotide
  Sense strand starting at position 244 of SEQ ID NO: 317461
acugaagauugaguauauc

SEQ ID NO: 492704 - RNA, 19 nt, Artificial Sequence
  Description of Artificial Sequence: Synthetic oligonucleotide
  Antisense Strand to SEQ ID NO: 492703
gauauacucaaucuucagu

SEQ ID NO: 492705 - RNA, 19 nt, Artificial Sequence
  Description of Artificial Sequence: Synthetic oligonucleotide
  Sense strand starting at position 250 of SEQ ID NO: 317461
gauugaguauaucugcauc

SEQ ID NO: 492706 - RNA, 19 nt, Artificial Sequence
  Description of Artificial Sequence: Synthetic oligonucleotide
  Antisense Strand to SEQ ID NO: 492705
gaugcagauauacucaauc

SEQ ID NO: 492707 - RNA, 19 nt, Artificial Sequence
  Description of Artificial Sequence: Synthetic oligonucleotide
  Sense strand starting at position 253 of SEQ ID NO: 317461
ugaguauaucugcaucaca

SEQ ID NO: 492708 - RNA, 19 nt, Artificial Sequence
  Description of Artificial Sequence: Synthetic oligonucleotide
  Antisense Strand to SEQ ID NO: 492707
ugugaugcagauauacuca

SEQ ID NO: 492709 - RNA, 19 nt, Artificial Sequence
  Description of Artificial Sequence: Synthetic oligonucleotide
  Sense strand starting at position 256 of SEQ ID NO: 317461
guauaucugcaucacauau

SEQ ID NO: 492710 - RNA, 19 nt, Artificial Sequence
  Description of Artificial Sequence: Synthetic oligonucleotide
  Antisense Strand to SEQ ID NO: 492709
auaugugaugcagauauac

SEQ ID NO: 492711 - RNA, 19 nt, Artificial Sequence
  Description of Artificial Sequence: Synthetic oligonucleotide
  Sense strand starting at position 308 of SEQ ID NO: 317461
agggccgaaugauuauuaa

SEQ ID NO: 492712 - RNA, 19 nt, Artificial Sequence
  Description of Artificial Sequence: Synthetic oligonucleotide
  Antisense Strand to SEQ ID NO: 492711
uuaauaaucauucggcccu

SEQ ID NO: 492713 - RNA, 19 nt, Artificial Sequence
  Description of Artificial Sequence: Synthetic oligonucleotide
  Sense strand starting at position 377 of SEQ ID NO: 317461
agacacugauucuugcaau

SEQ ID NO: 492714 - RNA, 19 nt, Artificial Sequence
  Description of Artificial Sequence: Synthetic oligonucleotide
  Antisense Strand to SEQ ID NO: 492713
auugcaagaaucagugucu

SEQ ID NO: 492715 - RNA, 19 nt, Artificial Sequence
  Description of Artificial Sequence: Synthetic oligonucleotide
  Sense strand starting at position 383 of SEQ ID NO: 317461
ugauucuugcaaugaguua

SEQ ID NO: 492716 - RNA, 19 nt, Artificial Sequence
  Description of Artificial Sequence: Synthetic oligonucleotide
  Antisense Strand to SEQ ID NO: 492715
uaacucauugcaagaauca

SEQ ID NO: 492717 - RNA, 19 nt, Artificial Sequence
  Description of Artificial Sequence: Synthetic oligonucleotide
  Sense strand starting at position 388 of SEQ ID NO: 317461
cuugcaaugaguuaggagu

SEQ ID NO: 492718 - RNA, 19 nt, Artificial Sequence
  Description of Artificial Sequence: Synthetic oligonucleotide
  Antisense Strand to SEQ ID NO: 492717
acuccuaacucauugcaag

SEQ ID NO: 492719 - RNA, 19 nt, Artificial Sequence
  Description of Artificial Sequence: Synthetic oligonucleotide
  Sense strand starting at position 406 of SEQ ID NO: 317461
ucaguuuggcuuuguggau

SEQ ID NO: 492720 - RNA, 19 nt, Artificial Sequence
  Description of Artificial Sequence: Synthetic oligonucleotide
  Antisense Strand to SEQ ID NO: 492719
auccacaaagccaaacuga

SEQ ID NO: 492721 - RNA, 19 nt, Artificial Sequence
  Description of Artificial Sequence: Synthetic oligonucleotide
  Sense strand starting at position 427 of SEQ ID NO: 317461
gguagaagcucaccagauu

SEQ ID NO: 492722 - RNA, 19 nt, Artificial Sequence
  Description of Artificial Sequence: Synthetic oligonucleotide
  Antisense Strand to SEQ ID NO: 492721
aaucuggugagcuucuacc

SEQ ID NO: 492723 - RNA, 19 nt, Artificial Sequence
  Description of Artificial Sequence: Synthetic oligonucleotide
  Sense strand starting at position 511 of SEQ ID NO: 317461
ggcccuggaucuuuagaag

SEQ ID NO: 492724 - RNA, 19 nt, Artificial Sequence
  Description of Artificial Sequence: Synthetic oligonucleotide
  Antisense Strand to SEQ ID NO: 492723
cuucuaaagauccagggcc

SEQ ID NO: 492725 - RNA, 19 nt, Artificial Sequence
  Description of Artificial Sequence: Synthetic oligonucleotide
  Sense strand starting at position 520 of SEQ ID NO: 317461
ucuuuagaaguuuagucau

SEQ ID NO: 492726 - RNA, 19 nt, Artificial Sequence
  Description of Artificial Sequence: Synthetic oligonucleotide
  Antisense Strand to SEQ ID NO: 492725
augacuaaacuucuaaaga

SEQ ID NO: 492727 - RNA, 19 nt, Artificial Sequence
  Description of Artificial Sequence: Synthetic oligonucleotide
  Sense strand starting at position 523 of SEQ ID NO: 317461
uuagaaguuuagucauaac

SEQ ID NO: 492728 - RNA, 19 nt, Artificial Sequence
  Description of Artificial Sequence: Synthetic oligonucleotide
  Antisense Strand to SEQ ID NO: 492727
guuaugacuaaacuucuaa

SEQ ID NO: 492729 - RNA, 19 nt, Artificial Sequence
  Description of Artificial Sequence: Synthetic oligonucleotide
  Sense strand starting at position 551 of SEQ ID NO: 317461
cgugaaaccaugcgucauc

SEQ ID NO: 492730 - RNA, 19 nt, Artificial Sequence
  Description of Artificial Sequence: Synthetic oligonucleotide
  Antisense Strand to SEQ ID NO: 492729
gaugacgcaugguuucacg

SEQ ID NO: 492731 - RNA, 19 nt, Artificial Sequence
  Description of Artificial Sequence: Synthetic oligonucleotide
  Sense strand starting at position 751 of SEQ ID NO: 317461
uaacauuagcgagagggua

SEQ ID NO: 492732 - RNA, 19 nt, Artificial Sequence
  Description of Artificial Sequence: Synthetic oligonucleotide
  Antisense Strand to SEQ ID NO: 492731
uacccucucgcuaauguua

SEQ ID NO: 492733 - RNA, 19 nt, Artificial Sequence
  Description of Artificial Sequence: Synthetic oligonucleotide
  Sense strand starting at position 776 of SEQ ID NO: 317461
gcauacugguacucgaguu

SEQ ID NO: 492734 - RNA, 19 nt, Artificial Sequence
  Description of Artificial Sequence: Synthetic oligonucleotide
  Antisense Strand to SEQ ID NO: 492733
aacucgaguaccaguaugc

SEQ ID NO: 492735 - RNA, 19 nt, Artificial Sequence
  Description of Artificial Sequence: Synthetic oligonucleotide
  Sense strand starting at position 972 of SEQ ID NO: 317461
ugacucucacuguaacguu

SEQ ID NO: 492736 - RNA, 19 nt, Artificial Sequence
  Description of Artificial Sequence: Synthetic oligonucleotide
  Antisense Strand to SEQ ID NO: 492735
aacguuacagugagaguca

SEQ ID NO: 492737 - RNA, 19 nt, Artificial Sequence
  Description of Artificial Sequence: Synthetic oligonucleotide
  Sense strand starting at position 1049 of SEQ ID NO: 317461
cgugguugguggcuagaau

SEQ ID NO: 492738 - RNA, 19 nt, Artificial Sequence
  Description of Artificial Sequence: Synthetic oligonucleotide
  Antisense Strand to SEQ ID NO: 492737
auucuagccaccaaccacg

SEQ ID NO: 492739 - RNA, 19 nt, Artificial Sequence
  Description of Artificial Sequence: Synthetic oligonucleotide
  Sense strand starting at position 1050 of SEQ ID NO: 317461
gugguugguggcuagaaua

SEQ ID NO: 492740 - RNA, 19 nt, Artificial Sequence
  Description of Artificial Sequence: Synthetic oligonucleotide
  Antisense Strand to SEQ ID NO: 492739
uauucuagccaccaaccac

SEQ ID NO: 492741 - RNA, 19 nt, Artificial Sequence
  Description of Artificial Sequence: Synthetic oligonucleotide
  Sense strand starting at position 1057 of SEQ ID NO: 317461
guggcuagaauaugaguaa

SEQ ID NO: 492742 - RNA, 19 nt, Artificial Sequence
  Description of Artificial Sequence: Synthetic oligonucleotide
  Antisense Strand to SEQ ID NO: 492741
uuacucauauucuagccac

SEQ ID NO: 492743 - RNA, 19 nt, Artificial Sequence
  Description of Artificial Sequence: Synthetic oligonucleotide
  Sense strand starting at position 1060 of SEQ ID NO: 317461
gcuagaauaugaguaagga

SEQ ID NO: 492744 - RNA, 19 nt, Artificial Sequence
  Description of Artificial Sequence: Synthetic oligonucleotide
  Antisense Strand to SEQ ID NO: 492743
uccuuacucauauucuagc

SEQ ID NO: 492745 - RNA, 19 nt, Artificial Sequence
  Description of Artificial Sequence: Synthetic oligonucleotide
  Sense strand starting at position 1091 of SEQ ID NO: 317461
agggauuccucccuccaaa

SEQ ID NO: 492746 - RNA, 19 nt, Artificial Sequence
  Description of Artificial Sequence: Synthetic oligonucleotide
  Antisense Strand to SEQ ID NO: 492745
uuuggagggaggaaucccu

SEQ ID NO: 492747 - RNA, 19 nt, Artificial Sequence
  Description of Artificial Sequence: Synthetic oligonucleotide
  Sense strand starting at position 1308 of SEQ ID NO: 317461
guucgaaaguggcuaaacu

SEQ ID NO: 492748 - RNA, 19 nt, Artificial Sequence
  Description of Artificial Sequence: Synthetic oligonucleotide
  Antisense Strand to SEQ ID NO: 492747
aguuuagccacuuucgaac

SEQ ID NO: 492749 - RNA, 19 nt, Artificial Sequence
  Description of Artificial Sequence: Synthetic oligonucleotide
  Sense strand starting at position 1319 of SEQ ID NO: 317461
gcuaaacugcauuauccga

SEQ ID NO: 492750 - RNA, 19 nt, Artificial Sequence
  Description of Artificial Sequence: Synthetic oligonucleotide
  Antisense Strand to SEQ ID NO: 492749
ucggauaaugcaguuuagc

SEQ ID NO: 492751 - RNA, 19 nt, Artificial Sequence
  Description of Artificial Sequence: Synthetic oligonucleotide
  Sense strand starting at position 1348 of SEQ ID NO: 317461
uuuccacuccuuggguaua

SEQ ID NO: 492752 - RNA, 19 nt, Artificial Sequence
  Description of Artificial Sequence: Synthetic oligonucleotide
  Antisense Strand to SEQ ID NO: 492751
uauacccaaggaguggaaa

SEQ ID NO: 492753 - RNA, 19 nt, Artificial Sequence
  Description of Artificial Sequence: Synthetic oligonucleotide
  Sense strand starting at position 1393 of SEQ ID NO: 317461
gcuugcaguuguccaaagu

SEQ ID NO: 492754 - RNA, 19 nt, Artificial Sequence
  Description of Artificial Sequence: Synthetic oligonucleotide
  Antisense Strand to SEQ ID NO: 492753
acuuuggacaacugcaagc

SEQ ID NO: 492755 - RNA, 19 nt, Artificial Sequence
  Description of Artificial Sequence: Synthetic oligonucleotide
  Sense strand starting at position 3623 of SEQ ID NO: 317461
auauaaaugucagauacug

SEQ ID NO: 492756 - RNA, 19 nt, Artificial Sequence
  Description of Artificial Sequence: Synthetic oligonucleotide
  Antisense Strand to SEQ ID NO: 492755
caguaucugacauuuauau

SEQ ID NO: 492757 - RNA, 19 nt, Artificial Sequence
  Description of Artificial Sequence: Synthetic oligonucleotide
  Sense strand starting at position 3715 of SEQ ID NO: 317461
ucaagcaucuuagugcaua

SEQ ID NO: 492758 - RNA, 19 nt, Artificial Sequence
  Description of Artificial Sequence: Synthetic oligonucleotide
  Antisense Strand to SEQ ID NO: 492757
uaugcacuaagaugcuuga

SEQ ID NO: 492759 - RNA, 19 nt, Artificial Sequence
  Description of Artificial Sequence: Synthetic oligonucleotide
  Sense strand starting at position 3718 of SEQ ID NO: 317461
agcaucuuagugcauaagu

SEQ ID NO: 492760 - RNA, 19 nt, Artificial Sequence
  Description of Artificial Sequence: Synthetic oligonucleotide
  Antisense Strand to SEQ ID NO: 492759
acuuaugcacuaagaugcu

SEQ ID NO: 492761 - RNA, 19 nt, Artificial Sequence
  Description of Artificial Sequence: Synthetic oligonucleotide
  Sense strand starting at position 3720 of SEQ ID NO: 317461
caucuuagugcauaaguga

SEQ ID NO: 492762 - RNA, 19 nt, Artificial Sequence
  Description of Artificial Sequence: Synthetic oligonucleotide
  Antisense Strand to SEQ ID NO: 492761
ucacuuaugcacuaagaug

SEQ ID NO: 492763 - RNA, 19 nt, Artificial Sequence
  Description of Artificial Sequence: Synthetic oligonucleotide
  Sense strand starting at position 3723 of SEQ ID NO: 317461
cuuagugcauaagugagaa

SEQ ID NO: 492764 - RNA, 19 nt, Artificial Sequence
  Description of Artificial Sequence: Synthetic oligonucleotide
  Antisense Strand to SEQ ID NO: 492763
uucucacuuaugcacuaag

SEQ ID NO: 492765 - RNA, 19 nt, Artificial Sequence
  Description of Artificial Sequence: Synthetic oligonucleotide
  Sense strand starting at position 3727 of SEQ ID NO: 317461
gugcauaagugagaagaau

SEQ ID NO: 492766 - RNA, 19 nt, Artificial Sequence
  Description of Artificial Sequence: Synthetic oligonucleotide
  Antisense Strand to SEQ ID NO: 492765
auucuucucacuuaugcac

SEQ ID NO: 492767 - RNA, 19 nt, Artificial Sequence
  Description of Artificial Sequence: Synthetic oligonucleotide
  Sense strand starting at position 3815 of SEQ ID NO: 317461
gcuggagcuggcucguaau

SEQ ID NO: 492768 - RNA, 19 nt, Artificial Sequence
  Description of Artificial Sequence: Synthetic oligonucleotide
  Antisense Strand to SEQ ID NO: 492767
auuacgagccagcuccagc

SEQ ID NO: 492769 - RNA, 19 nt, Artificial Sequence
  Description of Artificial Sequence: Synthetic oligonucleotide
  Sense strand starting at position 3826 of SEQ ID NO: 317461
cucguaaugacucacagga

SEQ ID NO: 492770 - RNA, 19 nt, Artificial Sequence
  Description of Artificial Sequence: Synthetic oligonucleotide
  Antisense Strand to SEQ ID NO: 492769
uccugugagucauuacgag

SEQ ID NO: 492771 - RNA, 19 nt, Artificial Sequence
  Description of Artificial Sequence: Synthetic oligonucleotide
  Sense strand starting at position 60 of SEQ ID NO: 317462
cuaagaauuucucugugcu

SEQ ID NO: 492772 - RNA, 19 nt, Artificial Sequence
  Description of Artificial Sequence: Synthetic oligonucleotide
  Antisense Strand to SEQ ID NO: 492771
agcacagagaaauucuuag

SEQ ID NO: 492773 - RNA, 19 nt, Artificial Sequence
  Description of Artificial Sequence: Synthetic oligonucleotide
  Sense strand starting at position 120 of SEQ ID NO: 317462
ugcuucucacuuugagaaa

SEQ ID NO: 492774 - RNA, 19 nt, Artificial Sequence
  Description of Artificial Sequence: Synthetic oligonucleotide
  Antisense Strand to SEQ ID NO: 492773
uuucucaaagugagaagca

SEQ ID NO: 492775 - RNA, 19 nt, Artificial Sequence
  Description of Artificial Sequence: Synthetic oligonucleotide
  Sense strand starting at position 197 of SEQ ID NO: 317462
agucaccaguucucauaaa

SEQ ID NO: 492776 - RNA, 19 nt, Artificial Sequence
  Description of Artificial Sequence: Synthetic oligonucleotide
  Antisense Strand to SEQ ID NO: 492775
uuuaugagaacuggugacu

SEQ ID NO: 492777 - RNA, 19 nt, Artificial Sequence
  Description of Artificial Sequence: Synthetic oligonucleotide
  Sense strand starting at position 245 of SEQ ID NO: 317462
uugggaugauuaccugguu

SEQ ID NO: 492778 - RNA, 19 nt, Artificial Sequence
  Description of Artificial Sequence: Synthetic oligonucleotide
  Antisense Strand to SEQ ID NO: 492777
aaccagguaaucaucccaa

SEQ ID NO: 492779 - RNA, 19 nt, Artificial Sequence
  Description of Artificial Sequence: Synthetic oligonucleotide
  Sense strand starting at position 246 of SEQ ID NO: 317462
ugggaugauuaccugguuu

SEQ ID NO: 492780 - RNA, 19 nt, Artificial Sequence
  Description of Artificial Sequence: Synthetic oligonucleotide
  Antisense Strand to SEQ ID NO: 492779
aaaccagguaaucauccca

SEQ ID NO: 492781 - RNA, 19 nt, Artificial Sequence
  Description of Artificial Sequence: Synthetic oligonucleotide
  Sense strand starting at position 299 of SEQ ID NO: 317462
gguguagaucgauagcuag

SEQ ID NO: 492782 - RNA, 19 nt, Artificial Sequence
  Description of Artificial Sequence: Synthetic oligonucleotide
  Antisense Strand to SEQ ID NO: 492781
cuagcuaucgaucuacacc

SEQ ID NO: 492783 - RNA, 19 nt, Artificial Sequence
  Description of Artificial Sequence: Synthetic oligonucleotide
  Sense strand starting at position 341 of SEQ ID NO: 317462
gauagaaccuacuccggau

SEQ ID NO: 492784 - RNA, 19 nt, Artificial Sequence
  Description of Artificial Sequence: Synthetic oligonucleotide
  Antisense Strand to SEQ ID NO: 492783
auccggaguagguucuauc

SEQ ID NO: 492785 - RNA, 19 nt, Artificial Sequence
  Description of Artificial Sequence: Synthetic oligonucleotide
  Sense strand starting at position 514 of SEQ ID NO: 317462
accaaauuguagucauagu

SEQ ID NO: 492786 - RNA, 19 nt, Artificial Sequence
  Description of Artificial Sequence: Synthetic oligonucleotide
  Antisense Strand to SEQ ID NO: 492785
acuaugacuacaauuuggu

SEQ ID NO: 492787 - RNA, 19 nt, Artificial Sequence
  Description of Artificial Sequence: Synthetic oligonucleotide
  Sense strand starting at position 561 of SEQ ID NO: 317462
gcuacuuagcaucauguaa

SEQ ID NO: 492788 - RNA, 19 nt, Artificial Sequence
  Description of Artificial Sequence: Synthetic oligonucleotide
  Antisense Strand to SEQ ID NO: 492787
uuacaugaugcuaaguagc

SEQ ID NO: 492789 - RNA, 19 nt, Artificial Sequence
  Description of Artificial Sequence: Synthetic oligonucleotide
  Sense strand starting at position 1065 of SEQ ID NO: 317462
uaaguuaucugugugaaau

SEQ ID NO: 492790 - RNA, 19 nt, Artificial Sequence
  Description of Artificial Sequence: Synthetic oligonucleotide
  Antisense Strand to SEQ ID NO: 492789
auuucacacagauaacuua

SEQ ID NO: 492791 - RNA, 19 nt, Artificial Sequence
  Description of Artificial Sequence: Synthetic oligonucleotide
  Sense strand starting at position 1066 of SEQ ID NO: 317462
aaguuaucugugugaaaua

SEQ ID NO: 492792 - RNA, 19 nt, Artificial Sequence
  Description of Artificial Sequence: Synthetic oligonucleotide
  Antisense Strand to SEQ ID NO: 492791
uauuucacacagauaacuu

SEQ ID NO: 492793 - RNA, 19 nt, Artificial Sequence
  Description of Artificial Sequence: Synthetic oligonucleotide
  Sense strand starting at position 1084 of SEQ ID NO: 317462
aguuguaguaaagggaauu

SEQ ID NO: 492794 - RNA, 19 nt, Artificial Sequence
  Description of Artificial Sequence: Synthetic oligonucleotide
  Antisense Strand to SEQ ID NO: 492793
aauucccuuuacuacaacu

SEQ ID NO: 492795 - RNA, 19 nt, Artificial Sequence
  Description of Artificial Sequence: Synthetic oligonucleotide
  Sense strand starting at position 1541 of SEQ ID NO: 317462
uuguaaucucaaugucuga

SEQ ID NO: 492796 - RNA, 19 nt, Artificial Sequence
  Description of Artificial Sequence: Synthetic oligonucleotide
  Antisense Strand to SEQ ID NO: 492795
ucagacauugagauuacaa

SEQ ID NO: 492797 - RNA, 19 nt, Artificial Sequence
  Description of Artificial Sequence: Synthetic oligonucleotide
  Sense strand starting at position 1593 of SEQ ID NO: 317462
uuagguaugcuaugauaau

SEQ ID NO: 492798 - RNA, 19 nt, Artificial Sequence
  Description of Artificial Sequence: Synthetic oligonucleotide
  Antisense Strand to SEQ ID NO: 492797
auuaucauagcauaccuaa

SEQ ID NO: 492799 - RNA, 19 nt, Artificial Sequence
  Description of Artificial Sequence: Synthetic oligonucleotide
  Sense strand starting at position 1619 of SEQ ID NO: 317462
uaugaauuagguuacugua

SEQ ID NO: 492800 - RNA, 19 nt, Artificial Sequence
  Description of Artificial Sequence: Synthetic oligonucleotide
  Antisense Strand to SEQ ID NO: 492799
uacaguaaccuaauucaua

SEQ ID NO: 492801 - RNA, 19 nt, Artificial Sequence
  Description of Artificial Sequence: Synthetic oligonucleotide
  Sense strand starting at position 1629 of SEQ ID NO: 317462
guuacuguacuauauaaca

SEQ ID NO: 492802 - RNA, 19 nt, Artificial Sequence
  Description of Artificial Sequence: Synthetic oligonucleotide
  Antisense Strand to SEQ ID NO: 492801
uguuauauaguacaguaac

SEQ ID NO: 492803 - RNA, 19 nt, Artificial Sequence
  Description of Artificial Sequence: Synthetic oligonucleotide
  Sense strand starting at position 2124 of SEQ ID NO: 317462
uugucuuucuaagcaagaa

SEQ ID NO: 492804 - RNA, 19 nt, Artificial Sequence
  Description of Artificial Sequence: Synthetic oligonucleotide
  Antisense Strand to SEQ ID NO: 492803
uucuugcuuagaaagacaa

SEQ ID NO: 492805 - RNA, 19 nt, Artificial Sequence
  Description of Artificial Sequence: Synthetic oligonucleotide
  Sense strand starting at position 2128 of SEQ ID NO: 317462
cuuucuaagcaagaaaggu

SEQ ID NO: 492806 - RNA, 19 nt, Artificial Sequence
  Description of Artificial Sequence: Synthetic oligonucleotide
  Antisense Strand to SEQ ID NO: 492805
accuuucuugcuuagaaag

SEQ ID NO: 492807 - RNA, 19 nt, Artificial Sequence
  Description of Artificial Sequence: Synthetic oligonucleotide
  Sense strand starting at position 2315 of SEQ ID NO: 317462
ugaguccagacuggucaau

SEQ ID NO: 492808 - RNA, 19 nt, Artificial Sequence
  Description of Artificial Sequence: Synthetic oligonucleotide
  Antisense Strand to SEQ ID NO: 492807
auugaccagucuggacuca

SEQ ID NO: 492809 - RNA, 19 nt, Artificial Sequence
  Description of Artificial Sequence: Synthetic oligonucleotide
  Sense strand starting at position 2317 of SEQ ID NO: 317462
aguccagacuggucaauag

SEQ ID NO: 492810 - RNA, 19 nt, Artificial Sequence
  Description of Artificial Sequence: Synthetic oligonucleotide
  Antisense Strand to SEQ ID NO: 492809
cuauugaccagucuggacu

SEQ ID NO: 492811 - RNA, 19 nt, Artificial Sequence
  Description of Artificial Sequence: Synthetic oligonucleotide
  Sense strand starting at position 2497 of SEQ ID NO: 317462
ugagaucccuucucaagag

SEQ ID NO: 492812 - RNA, 19 nt, Artificial Sequence
  Description of Artificial Sequence: Synthetic oligonucleotide
  Antisense Strand to SEQ ID NO: 492811
cucuugagaagggaucuca

SEQ ID NO: 492813 - RNA, 19 nt, Artificial Sequence
  Description of Artificial Sequence: Synthetic oligonucleotide
  Sense strand starting at position 2580 of SEQ ID NO: 317462
cuuauuaaaugauugucga

SEQ ID NO: 492814 - RNA, 19 nt, Artificial Sequence
  Description of Artificial Sequence: Synthetic oligonucleotide
  Antisense Strand to SEQ ID NO: 492813
ucgacaaucauuuaauaag

SEQ ID NO: 492815 - RNA, 19 nt, Artificial Sequence
  Description of Artificial Sequence: Synthetic oligonucleotide
  Sense strand starting at position 2713 of SEQ ID NO: 317462
uuugcauuuguuugguuga

SEQ ID NO: 492816 - RNA, 19 nt, Artificial Sequence
  Description of Artificial Sequence: Synthetic oligonucleotide
  Antisense Strand to SEQ ID NO: 492815
ucaaccaaacaaaugcaaa

SEQ ID NO: 492817 - RNA, 19 nt, Artificial Sequence
  Description of Artificial Sequence: Synthetic oligonucleotide
  Sense strand starting at position 2715 of SEQ ID NO: 317462
ugcauuuguuugguugaca

SEQ ID NO: 492818 - RNA, 19 nt, Artificial Sequence
  Description of Artificial Sequence: Synthetic oligonucleotide
  Antisense Strand to SEQ ID NO: 492817
ugucaaccaaacaaaugca

SEQ ID NO: 492819 - RNA, 19 nt, Artificial Sequence
  Description of Artificial Sequence: Synthetic oligonucleotide
  Sense strand starting at position 2716 of SEQ ID NO: 317462
gcauuuguuugguugacag

SEQ ID NO: 492820 - RNA, 19 nt, Artificial Sequence
  Description of Artificial Sequence: Synthetic oligonucleotide
  Antisense Strand to SEQ ID NO: 492819
cugucaaccaaacaaaugc

SEQ ID NO: 492821 - RNA, 19 nt, Artificial Sequence
  Description of Artificial Sequence: Synthetic oligonucleotide
  Sense strand starting at position 2723 of SEQ ID NO: 317462
uuugguugacaguaauucu

SEQ ID NO: 492822 - RNA, 19 nt, Artificial Sequence
  Description of Artificial Sequence: Synthetic oligonucleotide
  Antisense Strand to SEQ ID NO: 492821
agaauuacugucaaccaaa

SEQ ID NO: 492823 - RNA, 19 nt, Artificial Sequence
  Description of Artificial Sequence: Synthetic oligonucleotide
  Sense strand starting at position 2726 of SEQ ID NO: 317462
gguugacaguaauucuaaa

SEQ ID NO: 492824 - RNA, 19 nt, Artificial Sequence
  Description of Artificial Sequence: Synthetic oligonucleotide
  Antisense Strand to SEQ ID NO: 492823
uuuagaauuacugucaacc

SEQ ID NO: 492825 - RNA, 19 nt, Artificial Sequence
  Description of Artificial Sequence: Synthetic oligonucleotide
  Sense strand starting at position 2750 of SEQ ID NO: 317462
uuaauauuugcuggcaauu

SEQ ID NO: 492826 - RNA, 19 nt, Artificial Sequence
  Description of Artificial Sequence: Synthetic oligonucleotide
  Antisense Strand to SEQ ID NO: 492825
aauugccagcaaauauuaa

SEQ ID NO: 492827 - RNA, 19 nt, Artificial Sequence
  Description of Artificial Sequence: Synthetic oligonucleotide
  Sense strand starting at position 2811 of SEQ ID NO: 317462
gcauuuauauccuuccugu

SEQ ID NO: 492828 - RNA, 19 nt, Artificial Sequence
  Description of Artificial Sequence: Synthetic oligonucleotide
  Antisense Strand to SEQ ID NO: 492827
acaggaaggauauaaaugc

SEQ ID NO: 492829 - RNA, 19 nt, Artificial Sequence
  Description of Artificial Sequence: Synthetic oligonucleotide
  Sense strand starting at position 2814 of SEQ ID NO: 317462
uuuauauccuuccuguuga

SEQ ID NO: 492830 - RNA, 19 nt, Artificial Sequence
  Description of Artificial Sequence: Synthetic oligonucleotide
  Antisense Strand to SEQ ID NO: 492829
ucaacaggaaggauauaaa

SEQ ID NO: 492831 - RNA, 19 nt, Artificial Sequence
  Description of Artificial Sequence: Synthetic oligonucleotide
  Sense strand starting at position 2825 of SEQ ID NO: 317462
ccuguugaucuauaagacu

SEQ ID NO: 492832 - RNA, 19 nt, Artificial Sequence
  Description of Artificial Sequence: Synthetic oligonucleotide
  Antisense Strand to SEQ ID NO: 492831
agucuuauagaucaacagg

SEQ ID NO: 492833 - RNA, 19 nt, Artificial Sequence
  Description of Artificial Sequence: Synthetic oligonucleotide
  Sense strand starting at position 3461 of SEQ ID NO: 317462
ggcaacaucugacucucua

SEQ ID NO: 492834 - RNA, 19 nt, Artificial Sequence
  Description of Artificial Sequence: Synthetic oligonucleotide
  Antisense Strand to SEQ ID NO: 492833
uagagagucagauguugcc

SEQ ID NO: 492835 - RNA, 19 nt, Artificial Sequence
  Description of Artificial Sequence: Synthetic oligonucleotide
  Sense strand starting at position 3483 of SEQ ID NO: 317462
uccuguuaggguugaugau

SEQ ID NO: 492836 - RNA, 19 nt, Artificial Sequence
  Description of Artificial Sequence: Synthetic oligonucleotide
  Antisense Strand to SEQ ID NO: 492835
aucaucaacccuaacagga

SEQ ID NO: 492837 - RNA, 19 nt, Artificial Sequence
  Description of Artificial Sequence: Synthetic oligonucleotide
  Sense strand starting at position 3484 of SEQ ID NO: 317462
ccuguuaggguugaugaua

SEQ ID NO: 492838 - RNA, 19 nt, Artificial Sequence
  Description of Artificial Sequence: Synthetic oligonucleotide
  Antisense Strand to SEQ ID NO: 492837
uaucaucaacccuaacagg

SEQ ID NO: 492839 - RNA, 19 nt, Artificial Sequence
  Description of Artificial Sequence: Synthetic oligonucleotide
  Sense strand starting at position 3511 of SEQ ID NO: 317462
ggcccacaucuccauaguu

SEQ ID NO: 492840 - RNA, 19 nt, Artificial Sequence
  Description of Artificial Sequence: Synthetic oligonucleotide
  Antisense Strand to SEQ ID NO: 492839
aacuauggagaugugggcc

SEQ ID NO: 492841 - RNA, 19 nt, Artificial Sequence
  Description of Artificial Sequence: Synthetic oligonucleotide
  Sense strand starting at position 3619 of SEQ ID NO: 317462
gcuagaaauggcuacaaau

SEQ ID NO: 492842 - RNA, 19 nt, Artificial Sequence
  Description of Artificial Sequence: Synthetic oligonucleotide
  Antisense Strand to SEQ ID NO: 492841
auuuguagccauuucuagc

SEQ ID NO: 492843 - RNA, 19 nt, Artificial Sequence
  Description of Artificial Sequence: Synthetic oligonucleotide
  Sense strand starting at position 3628 of SEQ ID NO: 317462
ggcuacaaaucugcaauua

SEQ ID NO: 492844 - RNA, 19 nt, Artificial Sequence
  Description of Artificial Sequence: Synthetic oligonucleotide
  Antisense Strand to SEQ ID NO: 492843
uaauugcagauuuguagcc

SEQ ID NO: 492845 - RNA, 19 nt, Artificial Sequence
  Description of Artificial Sequence: Synthetic oligonucleotide
  Sense strand starting at position 3725 of SEQ ID NO: 317462
gcuacuacgcuaguguuua

SEQ ID NO: 492846 - RNA, 19 nt, Artificial Sequence
  Description of Artificial Sequence: Synthetic oligonucleotide
  Antisense Strand to SEQ ID NO: 492845
uaaacacuagcguaguagc

SEQ ID NO: 492847 - RNA, 19 nt, Artificial Sequence
  Description of Artificial Sequence: Synthetic oligonucleotide
  Sense strand starting at position 3853 of SEQ ID NO: 317462
cuguguuagauacaaaugu

SEQ ID NO: 492848 - RNA, 19 nt, Artificial Sequence
  Description of Artificial Sequence: Synthetic oligonucleotide
  Antisense Strand to SEQ ID NO: 492847
acauuuguaucuaacacag

SEQ ID NO: 492849 - RNA, 19 nt, Artificial Sequence
  Description of Artificial Sequence: Synthetic oligonucleotide
  Sense strand starting at position 3903 of SEQ ID NO: 317462
ggugcucuacccuaggaaa

SEQ ID NO: 492850 - RNA, 19 nt, Artificial Sequence
  Description of Artificial Sequence: Synthetic oligonucleotide
  Antisense Strand to SEQ ID NO: 492849
uuuccuaggguagagcacc

SEQ ID NO: 492851 - RNA, 19 nt, Artificial Sequence
  Description of Artificial Sequence: Synthetic oligonucleotide
  Sense strand starting at position 73 of SEQ ID NO: 317463
ggaucaauuagagguugca

SEQ ID NO: 492852 - RNA, 19 nt, Artificial Sequence
  Description of Artificial Sequence: Synthetic oligonucleotide
  Antisense Strand to SEQ ID NO: 492851
ugcaaccucuaauugaucc

SEQ ID NO: 492853 - RNA, 19 nt, Artificial Sequence
  Description of Artificial Sequence: Synthetic oligonucleotide
  Sense strand starting at position 287 of SEQ ID NO: 317463
aggaaagggucagauaaau

SEQ ID NO: 492854 - RNA, 19 nt, Artificial Sequence
  Description of Artificial Sequence: Synthetic oligonucleotide
  Antisense Strand to SEQ ID NO: 492853
auuuaucugacccuuuccu

SEQ ID NO: 492855 - RNA, 19 nt, Artificial Sequence
  Description of Artificial Sequence: Synthetic oligonucleotide
  Sense strand starting at position 534 of SEQ ID NO: 317463
caagaaagcgguggcuaaa

SEQ ID NO: 492856 - RNA, 19 nt, Artificial Sequence
  Description of Artificial Sequence: Synthetic oligonucleotide
  Antisense Strand to SEQ ID NO: 492855
uuuagccaccgcuuucuug

SEQ ID NO: 492857 - RNA, 19 nt, Artificial Sequence
  Description of Artificial Sequence: Synthetic oligonucleotide
  Sense strand starting at position 570 of SEQ ID NO: 317463
ggagccagaucagaagaaa

SEQ ID NO: 492858 - RNA, 19 nt, Artificial Sequence
  Description of Artificial Sequence: Synthetic oligonucleotide
  Antisense Strand to SEQ ID NO: 492857
uuucuucugaucuggcucc

SEQ ID NO: 492859 - RNA, 19 nt, Artificial Sequence
  Description of Artificial Sequence: Synthetic oligonucleotide
  Sense strand starting at position 621 of SEQ ID NO: 317463
gaaauuaguggaggcaacu

SEQ ID NO: 492860 - RNA, 19 nt, Artificial Sequence
  Description of Artificial Sequence: Synthetic oligonucleotide
  Antisense Strand to SEQ ID NO: 492859
aguugccuccacuaauuuc

SEQ ID NO: 492861 - RNA, 19 nt, Artificial Sequence
  Description of Artificial Sequence: Synthetic oligonucleotide
  Sense strand starting at position 682 of SEQ ID NO: 317463
aagauuaguuacguggaga

SEQ ID NO: 492862 - RNA, 19 nt, Artificial Sequence
  Description of Artificial Sequence: Synthetic oligonucleotide
  Antisense Strand to SEQ ID NO: 492861
ucuccacguaacuaaucuu

SEQ ID NO: 492863 - RNA, 19 nt, Artificial Sequence
  Description of Artificial Sequence: Synthetic oligonucleotide
  Sense strand starting at position 683 of SEQ ID NO: 317463
agauuaguuacguggagau

SEQ ID NO: 492864 - RNA, 19 nt, Artificial Sequence
  Description of Artificial Sequence: Synthetic oligonucleotide
  Antisense Strand to SEQ ID NO: 492863
aucuccacguaacuaaucu

SEQ ID NO: 492865 - RNA, 19 nt, Artificial Sequence
  Description of Artificial Sequence: Synthetic oligonucleotide
  Sense strand starting at position 959 of SEQ ID NO: 317463
uguacugccggagacuaau

SEQ ID NO: 492866 - RNA, 19 nt, Artificial Sequence
  Description of Artificial Sequence: Synthetic oligonucleotide
  Antisense Strand to SEQ ID NO: 492865
auuagucuccggcaguaca

SEQ ID NO: 492867 - RNA, 19 nt, Artificial Sequence
  Description of Artificial Sequence: Synthetic oligonucleotide
  Sense strand starting at position 1098 of SEQ ID NO: 317463
agcaguuuggcauaagcua

SEQ ID NO: 492868 - RNA, 19 nt, Artificial Sequence
  Description of Artificial Sequence: Synthetic oligonucleotide
  Antisense Strand to SEQ ID NO: 492867
uagcuuaugccaaacugcu

SEQ ID NO: 492869 - RNA, 19 nt, Artificial Sequence
  Description of Artificial Sequence: Synthetic oligonucleotide
  Sense strand starting at position 1124 of SEQ ID NO: 317463
aaugaaauggccgauguga

SEQ ID NO: 492870 - RNA, 19 nt, Artificial Sequence
  Description of Artificial Sequence: Synthetic oligonucleotide
  Antisense Strand to SEQ ID NO: 492869
ucacaucggccauuucauu

SEQ ID NO: 492871 - RNA, 19 nt, Artificial Sequence
  Description of Artificial Sequence: Synthetic oligonucleotide
  Sense strand starting at position 1126 of SEQ ID NO: 317463
ugaaauggccgaugugaug

SEQ ID NO: 492872 - RNA, 19 nt, Artificial Sequence
  Description of Artificial Sequence: Synthetic oligonucleotide
  Antisense Strand to SEQ ID NO: 492871
caucacaucggccauuuca

SEQ ID NO: 492873 - RNA, 19 nt, Artificial Sequence
  Description of Artificial Sequence: Synthetic oligonucleotide
  Sense strand starting at position 1137 of SEQ ID NO: 317463
augugaugauccucaggga

SEQ ID NO: 492874 - RNA, 19 nt, Artificial Sequence
  Description of Artificial Sequence: Synthetic oligonucleotide
  Antisense Strand to SEQ ID NO: 492873
ucccugaggaucaucacau

SEQ ID NO: 492875 - RNA, 19 nt, Artificial Sequence
  Description of Artificial Sequence: Synthetic oligonucleotide
  Sense strand starting at position 1202 of SEQ ID NO: 317463
ggaugagucuuucuagcua

SEQ ID NO: 492876 - RNA, 19 nt, Artificial Sequence
  Description of Artificial Sequence: Synthetic oligonucleotide
  Antisense Strand to SEQ ID NO: 492875
uagcuagaaagacucaucc

SEQ ID NO: 492877 - RNA, 19 nt, Artificial Sequence
  Description of Artificial Sequence: Synthetic oligonucleotide
  Sense strand starting at position 1275 of SEQ ID NO: 317463
uccggagaucaacguuuau

SEQ ID NO: 492878 - RNA, 19 nt, Artificial Sequence
  Description of Artificial Sequence: Synthetic oligonucleotide
  Antisense Strand to SEQ ID NO: 492877
auaaacguugaucuccgga

SEQ ID NO: 492879 - RNA, 19 nt, Artificial Sequence
  Description of Artificial Sequence: Synthetic oligonucleotide
  Sense strand starting at position 2240 of SEQ ID NO: 317463
cagagccuuccgccguaau

SEQ ID NO: 492880 - RNA, 19 nt, Artificial Sequence
  Description of Artificial Sequence: Synthetic oligonucleotide
  Antisense Strand to SEQ ID NO: 492879
auuacggcggaaggcucug

SEQ ID NO: 492881 - RNA, 19 nt, Artificial Sequence
  Description of Artificial Sequence: Synthetic oligonucleotide
  Sense strand starting at position 2242 of SEQ ID NO: 317463
gagccuuccgccguaaugu

SEQ ID NO: 492882 - RNA, 19 nt, Artificial Sequence
  Description of Artificial Sequence: Synthetic oligonucleotide
  Antisense Strand to SEQ ID NO: 492881
acauuacggcggaaggcuc

SEQ ID NO: 492883 - RNA, 19 nt, Artificial Sequence
  Description of Artificial Sequence: Synthetic oligonucleotide
  Sense strand starting at position 2277 of SEQ ID NO: 317463
cugcgcuuagucucucuua

SEQ ID NO: 492884 - RNA, 19 nt, Artificial Sequence
  Description of Artificial Sequence: Synthetic oligonucleotide
  Antisense Strand to SEQ ID NO: 492883
uaagagagacuaagcgcag

SEQ ID NO: 492885 - RNA, 19 nt, Artificial Sequence
  Description of Artificial Sequence: Synthetic oligonucleotide
  Sense strand starting at position 2279 of SEQ ID NO: 317463
gcgcuuagucucucuuaga

SEQ ID NO: 492886 - RNA, 19 nt, Artificial Sequence
  Description of Artificial Sequence: Synthetic oligonucleotide
  Antisense Strand to SEQ ID NO: 492885
ucuaagagagacuaagcgc

SEQ ID NO: 492887 - RNA, 19 nt, Artificial Sequence
  Description of Artificial Sequence: Synthetic oligonucleotide
  Sense strand starting at position 2308 of SEQ ID NO: 317463
gugcgagcgccucugguua

SEQ ID NO: 492888 - RNA, 19 nt, Artificial Sequence
  Description of Artificial Sequence: Synthetic oligonucleotide
  Antisense Strand to SEQ ID NO: 492887
uaaccagaggcgcucgcac

SEQ ID NO: 492889 - RNA, 19 nt, Artificial Sequence
  Description of Artificial Sequence: Synthetic oligonucleotide
  Sense strand starting at position 2637 of SEQ ID NO: 317463
uuugaaauggacuguuuaa

SEQ ID NO: 492890 - RNA, 19 nt, Artificial Sequence
  Description of Artificial Sequence: Synthetic oligonucleotide
  Antisense Strand to SEQ ID NO: 492889
uuaaacaguccauuucaaa

SEQ ID NO: 492891 - RNA, 19 nt, Artificial Sequence
  Description of Artificial Sequence: Synthetic oligonucleotide
  Sense strand starting at position 2669 of SEQ ID NO: 317463
uggagcuuugagugggcaa

SEQ ID NO: 492892 - RNA, 19 nt, Artificial Sequence
  Description of Artificial Sequence: Synthetic oligonucleotide
  Antisense Strand to SEQ ID NO: 492891
uugcccacucaaagcucca

SEQ ID NO: 492893 - RNA, 19 nt, Artificial Sequence
  Description of Artificial Sequence: Synthetic oligonucleotide
  Sense strand starting at position 2671 of SEQ ID NO: 317463
gagcuuugagugggcaaga

SEQ ID NO: 492894 - RNA, 19 nt, Artificial Sequence
  Description of Artificial Sequence: Synthetic oligonucleotide
  Antisense Strand to SEQ ID NO: 492893
ucuugcccacucaaagcuc

SEQ ID NO: 492895 - RNA, 19 nt, Artificial Sequence
  Description of Artificial Sequence: Synthetic oligonucleotide
  Sense strand starting at position 2713 of SEQ ID NO: 317463
uugaguuaggcuugagaau

SEQ ID NO: 492896 - RNA, 19 nt, Artificial Sequence
  Description of Artificial Sequence: Synthetic oligonucleotide
  Antisense Strand to SEQ ID NO: 492895
auucucaagccuaacucaa

SEQ ID NO: 492897 - RNA, 19 nt, Artificial Sequence
  Description of Artificial Sequence: Synthetic oligonucleotide
  Sense strand starting at position 2863 of SEQ ID NO: 317463
guaaaccuguacucaguaa

SEQ ID NO: 492898 - RNA, 19 nt, Artificial Sequence
  Description of Artificial Sequence: Synthetic oligonucleotide
  Antisense Strand to SEQ ID NO: 492897
uuacugaguacagguuuac

SEQ ID NO: 492899 - RNA, 19 nt, Artificial Sequence
  Description of Artificial Sequence: Synthetic oligonucleotide
  Sense strand starting at position 2890 of SEQ ID NO: 317463
ggaaguuuaucacuaacug

SEQ ID NO: 492900 - RNA, 19 nt, Artificial Sequence
  Description of Artificial Sequence: Synthetic oligonucleotide
  Antisense Strand to SEQ ID NO: 492899
caguuagugauaaacuucc

SEQ ID NO: 492901 - RNA, 19 nt, Artificial Sequence
  Description of Artificial Sequence: Synthetic oligonucleotide
  Sense strand starting at position 2930 of SEQ ID NO: 317463
aaacaaucugugggaaagu

SEQ ID NO: 492902 - RNA, 19 nt, Artificial Sequence
  Description of Artificial Sequence: Synthetic oligonucleotide
  Antisense Strand to SEQ ID NO: 492901
acuuucccacagauuguuu

SEQ ID NO: 492903 - RNA, 19 nt, Artificial Sequence
  Description of Artificial Sequence: Synthetic oligonucleotide
  Sense strand starting at position 2949 of SEQ ID NO: 317463
gggcaaaccuacuuugagu

SEQ ID NO: 492904 - RNA, 19 nt, Artificial Sequence
  Description of Artificial Sequence: Synthetic oligonucleotide
  Antisense Strand to SEQ ID NO: 492903
acucaaaguagguuugccc

SEQ ID NO: 492905 - RNA, 19 nt, Artificial Sequence
  Description of Artificial Sequence: Synthetic oligonucleotide
  Sense strand starting at position 2975 of SEQ ID NO: 317463
agauacaguguuugucaca

SEQ ID NO: 492906 - RNA, 19 nt, Artificial Sequence
  Description of Artificial Sequence: Synthetic oligonucleotide
  Antisense Strand to SEQ ID NO: 492905
ugugacaaacacuguaucu

SEQ ID NO: 492907 - RNA, 19 nt, Artificial Sequence
  Description of Artificial Sequence: Synthetic oligonucleotide
  Sense strand starting at position 2982 of SEQ ID NO: 317463
guguuugucacaggauaau

SEQ ID NO: 492908 - RNA, 19 nt, Artificial Sequence
  Description of Artificial Sequence: Synthetic oligonucleotide
  Antisense Strand to SEQ ID NO: 492907
auuauccugugacaaacac

SEQ ID NO: 492909 - RNA, 19 nt, Artificial Sequence
  Description of Artificial Sequence: Synthetic oligonucleotide
  Sense strand starting at position 3193 of SEQ ID NO: 317463
gcggcuaacuuuguaauuu

SEQ ID NO: 492910 - RNA, 19 nt, Artificial Sequence
  Description of Artificial Sequence: Synthetic oligonucleotide
  Antisense Strand to SEQ ID NO: 492909
aaauuacaaaguuagccgc

SEQ ID NO: 492911 - RNA, 19 nt, Artificial Sequence
  Description of Artificial Sequence: Synthetic oligonucleotide
  Sense strand starting at position 3442 of SEQ ID NO: 317463
aacacauggcguuacagaa

SEQ ID NO: 492912 - RNA, 19 nt, Artificial Sequence
  Description of Artificial Sequence: Synthetic oligonucleotide
  Antisense Strand to SEQ ID NO: 492911
uucuguaacgccauguguu

SEQ ID NO: 492913 - RNA, 19 nt, Artificial Sequence
  Description of Artificial Sequence: Synthetic oligonucleotide
  Sense strand starting at position 3501 of SEQ ID NO: 317463
ucuauuacuguguaaguag

SEQ ID NO: 492914 - RNA, 19 nt, Artificial Sequence
  Description of Artificial Sequence: Synthetic oligonucleotide
  Antisense Strand to SEQ ID NO: 492913
cuacuuacacaguaauaga

SEQ ID NO: 492915 - RNA, 19 nt, Artificial Sequence
  Description of Artificial Sequence: Synthetic oligonucleotide
  Sense strand starting at position 3576 of SEQ ID NO: 317463
cuuaacagcguuuaaucaa

SEQ ID NO: 492916 - RNA, 19 nt, Artificial Sequence
  Description of Artificial Sequence: Synthetic oligonucleotide
  Antisense Strand to SEQ ID NO: 492915
uugauuaaacgcuguuaag

SEQ ID NO: 492917 - RNA, 19 nt, Artificial Sequence
  Description of Artificial Sequence: Synthetic oligonucleotide
  Sense strand starting at position 3603 of SEQ ID NO: 317463
cccaaagaaugaucugcaa

SEQ ID NO: 492918 - RNA, 19 nt, Artificial Sequence
  Description of Artificial Sequence: Synthetic oligonucleotide
  Antisense Strand to SEQ ID NO: 492917
uugcagaucauucuuuggg

SEQ ID NO: 492919 - RNA, 19 nt, Artificial Sequence
  Description of Artificial Sequence: Synthetic oligonucleotide
  Sense strand starting at position 3783 of SEQ ID NO: 317463
ccacuugugauuggccaga

SEQ ID NO: 492920 - RNA, 19 nt, Artificial Sequence
  Description of Artificial Sequence: Synthetic oligonucleotide
  Antisense Strand to SEQ ID NO: 492919
ucuggccaaucacaagugg

SEQ ID NO: 492921 - RNA, 19 nt, Artificial Sequence
  Description of Artificial Sequence: Synthetic oligonucleotide
  Sense strand starting at position 3785 of SEQ ID NO: 317463
acuugugauuggccagaac

SEQ ID NO: 492922 - RNA, 19 nt, Artificial Sequence
  Description of Artificial Sequence: Synthetic oligonucleotide
  Antisense Strand to SEQ ID NO: 492921
guucuggccaaucacaagu

SEQ ID NO: 492923 - RNA, 19 nt, Artificial Sequence
  Description of Artificial Sequence: Synthetic oligonucleotide
  Sense strand starting at position 3788 of SEQ ID NO: 317463
ugugauuggccagaacucu

SEQ ID NO: 492924 - RNA, 19 nt, Artificial Sequence
  Description of Artificial Sequence: Synthetic oligonucleotide
  Antisense Strand to SEQ ID NO: 492923
agaguucuggccaaucaca

SEQ ID NO: 492925 - RNA, 19 nt, Artificial Sequence
  Description of Artificial Sequence: Synthetic oligonucleotide
  Sense strand starting at position 3794 of SEQ ID NO: 317463
uggccagaacucugugauu

SEQ ID NO: 492926 - RNA, 19 nt, Artificial Sequence
  Description of Artificial Sequence: Synthetic oligonucleotide
  Antisense Strand to SEQ ID NO: 492925
aaucacagaguucuggcca

SEQ ID NO: 492927 - RNA, 19 nt, Artificial Sequence
  Description of Artificial Sequence: Synthetic oligonucleotide
  Sense strand starting at position 3796 of SEQ ID NO: 317463
gccagaacucugugauugg

SEQ ID NO: 492928 - RNA, 19 nt, Artificial Sequence
  Description of Artificial Sequence: Synthetic oligonucleotide
  Antisense Strand to SEQ ID NO: 492927
ccaaucacagaguucuggc

SEQ ID NO: 492929 - RNA, 19 nt, Artificial Sequence
  Description of Artificial Sequence: Synthetic oligonucleotide
  Sense strand starting at position 3800 of SEQ ID NO: 317463
gaacucugugauugguaca

SEQ ID NO: 492930 - RNA, 19 nt, Artificial Sequence
  Description of Artificial Sequence: Synthetic oligonucleotide
  Antisense Strand to SEQ ID NO: 492929
uguaccaaucacagaguuc

SEQ ID NO: 492931 - RNA, 19 nt, Artificial Sequence
  Description of Artificial Sequence: Synthetic oligonucleotide
  Sense strand starting at position 89 of SEQ ID NO: 317464
acugucuauucucugaaga

SEQ ID NO: 492932 - RNA, 19 nt, Artificial Sequence
  Description of Artificial Sequence: Synthetic oligonucleotide
  Antisense Strand to SEQ ID NO: 492931
ucuucagagaauagacagu

SEQ ID NO: 492933 - RNA, 19 nt, Artificial Sequence
  Description of Artificial Sequence: Synthetic oligonucleotide
  Sense strand starting at position 90 of SEQ ID NO: 317464
cugucuauucucugaagau

SEQ ID NO: 492934 - RNA, 19 nt, Artificial Sequence
  Description of Artificial Sequence: Synthetic oligonucleotide
  Antisense Strand to SEQ ID NO: 492933
aucuucagagaauagacag

SEQ ID NO: 492935 - RNA, 19 nt, Artificial Sequence
  Description of Artificial Sequence: Synthetic oligonucleotide
  Sense strand starting at position 114 of SEQ ID NO: 317464
ccucuuuaugucuaguaca

SEQ ID NO: 492936 - RNA, 19 nt, Artificial Sequence
  Description of Artificial Sequence: Synthetic oligonucleotide
  Antisense Strand to SEQ ID NO: 492935
uguacuagacauaaagagg

SEQ ID NO: 492937 - RNA, 19 nt, Artificial Sequence
  Description of Artificial Sequence: Synthetic oligonucleotide
  Sense strand starting at position 214 of SEQ ID NO: 317464
agggauucuuuccugagcu

SEQ ID NO: 492938 - RNA, 19 nt, Artificial Sequence
  Description of Artificial Sequence: Synthetic oligonucleotide
  Antisense Strand to SEQ ID NO: 492937
agcucaggaaagaaucccu

SEQ ID NO: 492939 - RNA, 19 nt, Artificial Sequence
  Description of Artificial Sequence: Synthetic oligonucleotide
  Sense strand starting at position 216 of SEQ ID NO: 317464
ggauucuuuccugagcucu

SEQ ID NO: 492940 - RNA, 19 nt, Artificial Sequence
  Description of Artificial Sequence: Synthetic oligonucleotide
  Antisense Strand to SEQ ID NO: 492939
agagcucaggaaagaaucc

SEQ ID NO: 492941 - RNA, 19 nt, Artificial Sequence
  Description of Artificial Sequence: Synthetic oligonucleotide
  Sense strand starting at position 239 of SEQ ID NO: 317464
ccuucuauuccacagucga

SEQ ID NO: 492942 - RNA, 19 nt, Artificial Sequence
  Description of Artificial Sequence: Synthetic oligonucleotide
  Antisense Strand to SEQ ID NO: 492941
ucgacuguggaauagaagg

SEQ ID NO: 492943 - RNA, 19 nt, Artificial Sequence
  Description of Artificial Sequence: Synthetic oligonucleotide
  Sense strand starting at position 331 of SEQ ID NO: 317464
gaauaauggcauuguugag

SEQ ID NO: 492944 - RNA, 19 nt, Artificial Sequence
  Description of Artificial Sequence: Synthetic oligonucleotide
  Antisense Strand to SEQ ID NO: 492943
cucaacaaugccauuauuc

SEQ ID NO: 492945 - RNA, 19 nt, Artificial Sequence
  Description of Artificial Sequence: Synthetic oligonucleotide
  Sense strand starting at position 439 of SEQ ID NO: 317464
ggguguuguaagcaauaaa

SEQ ID NO: 492946 - RNA, 19 nt, Artificial Sequence
  Description of Artificial Sequence: Synthetic oligonucleotide
  Antisense Strand to SEQ ID NO: 492945
uuuauugcuuacaacaccc

SEQ ID NO: 492947 - RNA, 19 nt, Artificial Sequence
  Description of Artificial Sequence: Synthetic oligonucleotide
  Sense strand starting at position 442 of SEQ ID NO: 317464
uguuguaagcaauaaauca

SEQ ID NO: 492948 - RNA, 19 nt, Artificial Sequence
  Description of Artificial Sequence: Synthetic oligonucleotide
  Antisense Strand to SEQ ID NO: 492947
ugauuuauugcuuacaaca

SEQ ID NO: 492949 - RNA, 19 nt, Artificial Sequence
  Description of Artificial Sequence: Synthetic oligonucleotide
  Sense strand starting at position 449 of SEQ ID NO: 317464
agcaauaaaucagugccua

SEQ ID NO: 492950 - RNA, 19 nt, Artificial Sequence
  Description of Artificial Sequence: Synthetic oligonucleotide
  Antisense Strand to SEQ ID NO: 492949
uaggcacugauuuauugcu

SEQ ID NO: 492951 - RNA, 19 nt, Artificial Sequence
  Description of Artificial Sequence: Synthetic oligonucleotide
  Sense strand starting at position 450 of SEQ ID NO: 317464
gcaauaaaucagugccuaa

SEQ ID NO: 492952 - RNA, 19 nt, Artificial Sequence
  Description of Artificial Sequence: Synthetic oligonucleotide
  Antisense Strand to SEQ ID NO: 492951
uuaggcacugauuuauugc

SEQ ID NO: 492953 - RNA, 19 nt, Artificial Sequence
  Description of Artificial Sequence: Synthetic oligonucleotide
  Sense strand starting at position 635 of SEQ ID NO: 317464
ugaugugagcuuuagaauc

SEQ ID NO: 492954 - RNA, 19 nt, Artificial Sequence
  Description of Artificial Sequence: Synthetic oligonucleotide
  Antisense Strand to SEQ ID NO: 492953
gauucuaaagcucacauca

SEQ ID NO: 492955 - RNA, 19 nt, Artificial Sequence
  Description of Artificial Sequence: Synthetic oligonucleotide
  Sense strand starting at position 752 of SEQ ID NO: 317464
ggcaaaugacugugucuua

SEQ ID NO: 492956 - RNA, 19 nt, Artificial Sequence
  Description of Artificial Sequence: Synthetic oligonucleotide
  Antisense Strand to SEQ ID NO: 492955
uaagacacagucauuugcc

SEQ ID NO: 492957 - RNA, 19 nt, Artificial Sequence
  Description of Artificial Sequence: Synthetic oligonucleotide
  Sense strand starting at position 759 of SEQ ID NO: 317464
gacugugucuuaccucaag

SEQ ID NO: 492958 - RNA, 19 nt, Artificial Sequence
  Description of Artificial Sequence: Synthetic oligonucleotide
  Antisense Strand to SEQ ID NO: 492957
cuugagguaagacacaguc

SEQ ID NO: 492959 - RNA, 19 nt, Artificial Sequence
  Description of Artificial Sequence: Synthetic oligonucleotide
  Sense strand starting at position 762 of SEQ ID NO: 317464
ugugucuuaccucaaggga

SEQ ID NO: 492960 - RNA, 19 nt, Artificial Sequence
  Description of Artificial Sequence: Synthetic oligonucleotide
  Antisense Strand to SEQ ID NO: 492959
ucccuugagguaagacaca

SEQ ID NO: 492961 - RNA, 19 nt, Artificial Sequence
  Description of Artificial Sequence: Synthetic oligonucleotide
  Sense strand starting at position 778 of SEQ ID NO: 317464
ggaccacucuagguaauug

SEQ ID NO: 492962 - RNA, 19 nt, Artificial Sequence
  Description of Artificial Sequence: Synthetic oligonucleotide
  Antisense Strand to SEQ ID NO: 492961
caauuaccuagaguggucc

SEQ ID NO: 492963 - RNA, 19 nt, Artificial Sequence
  Description of Artificial Sequence: Synthetic oligonucleotide
  Sense strand starting at position 782 of SEQ ID NO: 317464
cacucuagguaauugguaa

SEQ ID NO: 492964 - RNA, 19 nt, Artificial Sequence
  Description of Artificial Sequence: Synthetic oligonucleotide
  Antisense Strand to SEQ ID NO: 492963
uuaccaauuaccuagagug

SEQ ID NO: 492965 - RNA, 19 nt, Artificial Sequence
  Description of Artificial Sequence: Synthetic oligonucleotide
  Sense strand starting at position 1159 of SEQ ID NO: 317464
uggcaucagucuuuaaaug

SEQ ID NO: 492966 - RNA, 19 nt, Artificial Sequence
  Description of Artificial Sequence: Synthetic oligonucleotide
  Antisense Strand to SEQ ID NO: 492965
cauuuaaagacugaugcca

SEQ ID NO: 492967 - RNA, 19 nt, Artificial Sequence
  Description of Artificial Sequence: Synthetic oligonucleotide
  Sense strand starting at position 1160 of SEQ ID NO: 317464
ggcaucagucuuuaaauga

SEQ ID NO: 492968 - RNA, 19 nt, Artificial Sequence
  Description of Artificial Sequence: Synthetic oligonucleotide
  Antisense Strand to SEQ ID NO: 492967
ucauuuaaagacugaugcc

SEQ ID NO: 492969 - RNA, 19 nt, Artificial Sequence
  Description of Artificial Sequence: Synthetic oligonucleotide
  Sense strand starting at position 1249 of SEQ ID NO: 317464
cauugucugugagccauuu

SEQ ID NO: 492970 - RNA, 19 nt, Artificial Sequence
  Description of Artificial Sequence: Synthetic oligonucleotide
  Antisense Strand to SEQ ID NO: 492969
aaauggcucacagacaaug

SEQ ID NO: 492971 - RNA, 19 nt, Artificial Sequence
  Description of Artificial Sequence: Synthetic oligonucleotide
  Sense strand starting at position 1257 of SEQ ID NO: 317464
gugagccauuuccuuauua

SEQ ID NO: 492972 - RNA, 19 nt, Artificial Sequence
  Description of Artificial Sequence: Synthetic oligonucleotide
  Antisense Strand to SEQ ID NO: 492971
uaauaaggaaauggcucac

SEQ ID NO: 492973 - RNA, 19 nt, Artificial Sequence
  Description of Artificial Sequence: Synthetic oligonucleotide
  Sense strand starting at position 2597 of SEQ ID NO: 317464
gguacuuucuugucauaag

SEQ ID NO: 492974 - RNA, 19 nt, Artificial Sequence
  Description of Artificial Sequence: Synthetic oligonucleotide
  Antisense Strand to SEQ ID NO: 492973
cuuaugacaagaaaguacc

SEQ ID NO: 492975 - RNA, 19 nt, Artificial Sequence
  Description of Artificial Sequence: Synthetic oligonucleotide
  Sense strand starting at position 2608 of SEQ ID NO: 317464
gucauaagaguagggucaa

SEQ ID NO: 492976 - RNA, 19 nt, Artificial Sequence
  Description of Artificial Sequence: Synthetic oligonucleotide
  Antisense Strand to SEQ ID NO: 492975
uugacccuacucuuaugac

SEQ ID NO: 492977 - RNA, 19 nt, Artificial Sequence
  Description of Artificial Sequence: Synthetic oligonucleotide
  Sense strand starting at position 2889 of SEQ ID NO: 317464
ucuacaguccagggaacuu

SEQ ID NO: 492978 - RNA, 19 nt, Artificial Sequence
  Description of Artificial Sequence: Synthetic oligonucleotide
  Antisense Strand to SEQ ID NO: 492977
aaguucccuggacuguaga

SEQ ID NO: 492979 - RNA, 19 nt, Artificial Sequence
  Description of Artificial Sequence: Synthetic oligonucleotide
  Sense strand starting at position 3032 of SEQ ID NO: 317464
uucucuucccggugaacau

SEQ ID NO: 492980 - RNA, 19 nt, Artificial Sequence
  Description of Artificial Sequence: Synthetic oligonucleotide
  Antisense Strand to SEQ ID NO: 492979
auguucaccgggaagagaa

SEQ ID NO: 492981 - RNA, 19 nt, Artificial Sequence
  Description of Artificial Sequence: Synthetic oligonucleotide
  Sense strand starting at position 3044 of SEQ ID NO: 317464
ugaacaucuacucguguga

SEQ ID NO: 492982 - RNA, 19 nt, Artificial Sequence
  Description of Artificial Sequence: Synthetic oligonucleotide
  Antisense Strand to SEQ ID NO: 492981
ucacacgaguagauguuca

SEQ ID NO: 492983 - RNA, 19 nt, Artificial Sequence
  Description of Artificial Sequence: Synthetic oligonucleotide
  Sense strand starting at position 3057 of SEQ ID NO: 317464
gugugauuccguguguagu

SEQ ID NO: 492984 - RNA, 19 nt, Artificial Sequence
  Description of Artificial Sequence: Synthetic oligonucleotide
  Antisense Strand to SEQ ID NO: 492983
acuacacacggaaucacac

SEQ ID NO: 492985 - RNA, 19 nt, Artificial Sequence
  Description of Artificial Sequence: Synthetic oligonucleotide
  Sense strand starting at position 3092 of SEQ ID NO: 317464
gugguugugaccuauauag

SEQ ID NO: 492986 - RNA, 19 nt, Artificial Sequence
  Description of Artificial Sequence: Synthetic oligonucleotide
  Antisense Strand to SEQ ID NO: 492985
cuauauaggucacaaccac

SEQ ID NO: 492987 - RNA, 19 nt, Artificial Sequence
  Description of Artificial Sequence: Synthetic oligonucleotide
  Sense strand starting at position 3135 of SEQ ID NO: 317464
cggcuuaaguccucuugag

SEQ ID NO: 492988 - RNA, 19 nt, Artificial Sequence
  Description of Artificial Sequence: Synthetic oligonucleotide
  Antisense Strand to SEQ ID NO: 492987
cucaagaggacuuaagccg

SEQ ID NO: 492989 - RNA, 19 nt, Artificial Sequence
  Description of Artificial Sequence: Synthetic oligonucleotide
  Sense strand starting at position 3296 of SEQ ID NO: 317464
ggaggugugucauauuuca

SEQ ID NO: 492990 - RNA, 19 nt, Artificial Sequence
  Description of Artificial Sequence: Synthetic oligonucleotide
  Antisense Strand to SEQ ID NO: 492989
ugaaauaugacacaccucc

SEQ ID NO: 492991 - RNA, 19 nt, Artificial Sequence
  Description of Artificial Sequence: Synthetic oligonucleotide
  Sense strand starting at position 3322 of SEQ ID NO: 317464
ugaaguuuaugggcuaaac

SEQ ID NO: 492992 - RNA, 19 nt, Artificial Sequence
  Description of Artificial Sequence: Synthetic oligonucleotide
  Antisense Strand to SEQ ID NO: 492991
guuuagcccauaaacuuca

SEQ ID NO: 492993 - RNA, 19 nt, Artificial Sequence
  Description of Artificial Sequence: Synthetic oligonucleotide
  Sense strand starting at position 3496 of SEQ ID NO: 317464
aggagacuaucccagaauu

SEQ ID NO: 492994 - RNA, 19 nt, Artificial Sequence
  Description of Artificial Sequence: Synthetic oligonucleotide
  Antisense Strand to SEQ ID NO: 492993
aauucugggauagucuccu

SEQ ID NO: 492995 - RNA, 19 nt, Artificial Sequence
  Description of Artificial Sequence: Synthetic oligonucleotide
  Sense strand starting at position 3549 of SEQ ID NO: 317464
acuguagcauuaucacaca

SEQ ID NO: 492996 - RNA, 19 nt, Artificial Sequence
  Description of Artificial Sequence: Synthetic oligonucleotide
  Antisense Strand to SEQ ID NO: 492995
ugugugauaaugcuacagu

SEQ ID NO: 492997 - RNA, 19 nt, Artificial Sequence
  Description of Artificial Sequence: Synthetic oligonucleotide
  Sense strand starting at position 3603 of SEQ ID NO: 317464
uggguaugauuuggucaga

SEQ ID NO: 492998 - RNA, 19 nt, Artificial Sequence
  Description of Artificial Sequence: Synthetic oligonucleotide
  Antisense Strand to SEQ ID NO: 492997
ucugaccaaaucauaccca

SEQ ID NO: 492999 - RNA, 19 nt, Artificial Sequence
  Description of Artificial Sequence: Synthetic oligonucleotide
  Sense strand starting at position 3608 of SEQ ID NO: 317464
augauuuggucagaaaguc

SEQ ID NO: 493000 - RNA, 19 nt, Artificial Sequence
  Description of Artificial Sequence: Synthetic oligonucleotide
  Antisense Strand to SEQ ID NO: 492999
gacuuucugaccaaaucau

SEQ ID NO: 493001 - RNA, 19 nt, Artificial Sequence
  Description of Artificial Sequence: Synthetic oligonucleotide
  Sense strand starting at position 3742 of SEQ ID NO: 317464
uuaagaaguuuauugugga

SEQ ID NO: 493002 - RNA, 19 nt, Artificial Sequence
  Description of Artificial Sequence: Synthetic oligonucleotide
  Antisense Strand to SEQ ID NO: 493001
uccacaauaaacuucuuaa

SEQ ID NO: 493003 - RNA, 19 nt, Artificial Sequence
  Description of Artificial Sequence: Synthetic oligonucleotide
  Sense strand starting at position 3749 of SEQ ID NO: 317464
guuuauuguggacaggacu

SEQ ID NO: 493004 - RNA, 19 nt, Artificial Sequence
  Description of Artificial Sequence: Synthetic oligonucleotide
  Antisense Strand to SEQ ID NO: 493003
aguccuguccacaauaaac

SEQ ID NO: 493005 - RNA, 19 nt, Artificial Sequence
  Description of Artificial Sequence: Synthetic oligonucleotide
  Sense strand starting at position 3878 of SEQ ID NO: 317464
agaagauggcacggaucuu

SEQ ID NO: 493006 - RNA, 19 nt, Artificial Sequence
  Description of Artificial Sequence: Synthetic oligonucleotide
  Antisense Strand to SEQ ID NO: 493005
aagauccgugccaucuucu

SEQ ID NO: 493007 - RNA, 19 nt, Artificial Sequence
  Description of Artificial Sequence: Synthetic oligonucleotide
  Sense strand starting at position 3890 of SEQ ID NO: 317464
ggaucuuggugggagggau

SEQ ID NO: 493008 - RNA, 19 nt, Artificial Sequence
  Description of Artificial Sequence: Synthetic oligonucleotide
  Antisense Strand to SEQ ID NO: 493007
aucccucccaccaagaucc

SEQ ID NO: 493009 - RNA, 19 nt, Artificial Sequence
  Description of Artificial Sequence: Synthetic oligonucleotide
  Sense strand starting at position 3937 of SEQ ID NO: 317464
gaggaagauucguauaaag

SEQ ID NO: 493010 - RNA, 19 nt, Artificial Sequence
  Description of Artificial Sequence: Synthetic oligonucleotide
  Antisense Strand to SEQ ID NO: 493009
cuuuauacgaaucuuccuc

SEQ ID NO: 493011 - RNA, 19 nt, Artificial Sequence
  Description of Artificial Sequence: Synthetic oligonucleotide
  Sense strand starting at position 533 of SEQ ID NO: 317465
uaugcuaguaugggaaagu

SEQ ID NO: 493012 - RNA, 19 nt, Artificial Sequence
  Description of Artificial Sequence: Synthetic oligonucleotide
  Antisense Strand to SEQ ID NO: 493011
acuuucccauacuagcaua

SEQ ID NO: 493013 - RNA, 19 nt, Artificial Sequence
  Description of Artificial Sequence: Synthetic oligonucleotide
  Sense strand starting at position 778 of SEQ ID NO: 317465
cuuguaguacauuacugau

SEQ ID NO: 493014 - RNA, 19 nt, Artificial Sequence
  Description of Artificial Sequence: Synthetic oligonucleotide
  Antisense Strand to SEQ ID NO: 493013
aucaguaauguacuacaag

SEQ ID NO: 493015 - RNA, 19 nt, Artificial Sequence
  Description of Artificial Sequence: Synthetic oligonucleotide
  Sense strand starting at position 863 of SEQ ID NO: 317465
agagcuaauuuccacagua

SEQ ID NO: 493016 - RNA, 19 nt, Artificial Sequence
  Description of Artificial Sequence: Synthetic oligonucleotide
  Antisense Strand to SEQ ID NO: 493015
uacuguggaaauuagcucu

SEQ ID NO: 493017 - RNA, 19 nt, Artificial Sequence
  Description of Artificial Sequence: Synthetic oligonucleotide
  Sense strand starting at position 980 of SEQ ID NO: 317465
ugaccuaguuucguccaau

SEQ ID NO: 493018 - RNA, 19 nt, Artificial Sequence
  Description of Artificial Sequence: Synthetic oligonucleotide
  Antisense Strand to SEQ ID NO: 493017
auuggacgaaacuagguca

SEQ ID NO: 493019 - RNA, 19 nt, Artificial Sequence
  Description of Artificial Sequence: Synthetic oligonucleotide
  Sense strand starting at position 981 of SEQ ID NO: 317465
gaccuaguuucguccaaug

SEQ ID NO: 493020 - RNA, 19 nt, Artificial Sequence
  Description of Artificial Sequence: Synthetic oligonucleotide
  Antisense Strand to SEQ ID NO: 493019
cauuggacgaaacuagguc

SEQ ID NO: 493021 - RNA, 19 nt, Artificial Sequence
  Description of Artificial Sequence: Synthetic oligonucleotide
  Sense strand starting at position 1047 of SEQ ID NO: 317465
acugaugaauacuugcaaa

SEQ ID NO: 493022 - RNA, 19 nt, Artificial Sequence
  Description of Artificial Sequence: Synthetic oligonucleotide
  Antisense Strand to SEQ ID NO: 493021
uuugcaaguauucaucagu

SEQ ID NO: 493023 - RNA, 19 nt, Artificial Sequence
  Description of Artificial Sequence: Synthetic oligonucleotide
  Sense strand starting at position 1130 of SEQ ID NO: 317465
uguagcaugacuugaagaa

SEQ ID NO: 493024 - RNA, 19 nt, Artificial Sequence
  Description of Artificial Sequence: Synthetic oligonucleotide
  Antisense Strand to SEQ ID NO: 493023
uucuucaagucaugcuaca

SEQ ID NO: 493025 - RNA, 19 nt, Artificial Sequence
  Description of Artificial Sequence: Synthetic oligonucleotide
  Sense strand starting at position 1140 of SEQ ID NO: 317465
cuugaagaaccgugaacaa

SEQ ID NO: 493026 - RNA, 19 nt, Artificial Sequence
  Description of Artificial Sequence: Synthetic oligonucleotide
  Antisense Strand to SEQ ID NO: 493025
uuguucacgguucuucaag

SEQ ID NO: 493027 - RNA, 19 nt, Artificial Sequence
  Description of Artificial Sequence: Synthetic oligonucleotide
  Sense strand starting at position 1167 of SEQ ID NO: 317465
acagguuuauauccuaaga

SEQ ID NO: 493028 - RNA, 19 nt, Artificial Sequence
  Description of Artificial Sequence: Synthetic oligonucleotide
  Antisense Strand to SEQ ID NO: 493027
ucuuaggauauaaaccugu

SEQ ID NO: 493029 - RNA, 19 nt, Artificial Sequence
  Description of Artificial Sequence: Synthetic oligonucleotide
  Sense strand starting at position 1239 of SEQ ID NO: 317465
aagggugucucuuucccaa

SEQ ID NO: 493030 - RNA, 19 nt, Artificial Sequence
  Description of Artificial Sequence: Synthetic oligonucleotide
  Antisense Strand to SEQ ID NO: 493029
uugggaaagagacacccuu

SEQ ID NO: 493031 - RNA, 19 nt, Artificial Sequence
  Description of Artificial Sequence: Synthetic oligonucleotide
  Sense strand starting at position 2161 of SEQ ID NO: 317465
cguggaaguggguggaauu

SEQ ID NO: 493032 - RNA, 19 nt, Artificial Sequence
  Description of Artificial Sequence: Synthetic oligonucleotide
  Antisense Strand to SEQ ID NO: 493031
aauuccacccacuuccacg

SEQ ID NO: 493033 - RNA, 19 nt, Artificial Sequence
  Description of Artificial Sequence: Synthetic oligonucleotide
  Sense strand starting at position 2197 of SEQ ID NO: 317465
gggcuauugcaaggauucu

SEQ ID NO: 493034 - RNA, 19 nt, Artificial Sequence
  Description of Artificial Sequence: Synthetic oligonucleotide
  Antisense Strand to SEQ ID NO: 493033
agaauccuugcaauagccc

SEQ ID NO: 493035 - RNA, 19 nt, Artificial Sequence
  Description of Artificial Sequence: Synthetic oligonucleotide
  Sense strand starting at position 2214 of SEQ ID NO: 317465
cuggaagcugcgggaauua

SEQ ID NO: 493036 - RNA, 19 nt, Artificial Sequence
  Description of Artificial Sequence: Synthetic oligonucleotide
  Antisense Strand to SEQ ID NO: 493035
uaauucccgcagcuuccag

SEQ ID NO: 493037 - RNA, 19 nt, Artificial Sequence
  Description of Artificial Sequence: Synthetic oligonucleotide
  Sense strand starting at position 2224 of SEQ ID NO: 317465
cgggaauuauuugaggaca

SEQ ID NO: 493038 - RNA, 19 nt, Artificial Sequence
  Description of Artificial Sequence: Synthetic oligonucleotide
  Antisense Strand to SEQ ID NO: 493037
uguccucaaauaauucccg

SEQ ID NO: 493039 - RNA, 19 nt, Artificial Sequence
  Description of Artificial Sequence: Synthetic oligonucleotide
  Sense strand starting at position 2226 of SEQ ID NO: 317465
ggaauuauuugaggacacu

SEQ ID NO: 493040 - RNA, 19 nt, Artificial Sequence
  Description of Artificial Sequence: Synthetic oligonucleotide
  Antisense Strand to SEQ ID NO: 493039
aguguccucaaauaauucc

SEQ ID NO: 493041 - RNA, 19 nt, Artificial Sequence
  Description of Artificial Sequence: Synthetic oligonucleotide
  Sense strand starting at position 2270 of SEQ ID NO: 317465
gcuggcguuauuccaguuu

SEQ ID NO: 493042 - RNA, 19 nt, Artificial Sequence
  Description of Artificial Sequence: Synthetic oligonucleotide
  Antisense Strand to SEQ ID NO: 493041
aaacuggaauaacgccagc

SEQ ID NO: 493043 - RNA, 19 nt, Artificial Sequence
  Description of Artificial Sequence: Synthetic oligonucleotide
  Sense strand starting at position 2276 of SEQ ID NO: 317465
guuauuccaguuuaaagaa

SEQ ID NO: 493044 - RNA, 19 nt, Artificial Sequence
  Description of Artificial Sequence: Synthetic oligonucleotide
  Antisense Strand to SEQ ID NO: 493043
uucuuuaaacuggaauaac

SEQ ID NO: 493045 - RNA, 19 nt, Artificial Sequence
  Description of Artificial Sequence: Synthetic oligonucleotide
  Sense strand starting at position 2483 of SEQ ID NO: 317465
auuucuggauccuacagaa

SEQ ID NO: 493046 - RNA, 19 nt, Artificial Sequence
  Description of Artificial Sequence: Synthetic oligonucleotide
  Antisense Strand to SEQ ID NO: 493045
uucuguaggauccagaaau

SEQ ID NO: 493047 - RNA, 19 nt, Artificial Sequence
  Description of Artificial Sequence: Synthetic oligonucleotide
  Sense strand starting at position 2544 of SEQ ID NO: 317465
uagggaaugucccuucuac

SEQ ID NO: 493048 - RNA, 19 nt, Artificial Sequence
  Description of Artificial Sequence: Synthetic oligonucleotide
  Antisense Strand to SEQ ID NO: 493047
guagaagggacauucccua

SEQ ID NO: 493049 - RNA, 19 nt, Artificial Sequence
  Description of Artificial Sequence: Synthetic oligonucleotide
  Sense strand starting at position 2642 of SEQ ID NO: 317465
gcuuaaagccuuuagcuaa

SEQ ID NO: 493050 - RNA, 19 nt, Artificial Sequence
  Description of Artificial Sequence: Synthetic oligonucleotide
  Antisense Strand to SEQ ID NO: 493049
uuagcuaaaggcuuuaagc

SEQ ID NO: 493051 - RNA, 19 nt, Artificial Sequence
  Description of Artificial Sequence: Synthetic oligonucleotide
  Sense strand starting at position 2832 of SEQ ID NO: 317465
aaagucaaguggcugauaa

SEQ ID NO: 493052 - RNA, 19 nt, Artificial Sequence
  Description of Artificial Sequence: Synthetic oligonucleotide
  Antisense Strand to SEQ ID NO: 493051
uuaucagccacuugacuuu

SEQ ID NO: 493053 - RNA, 19 nt, Artificial Sequence
  Description of Artificial Sequence: Synthetic oligonucleotide
  Sense strand starting at position 2833 of SEQ ID NO: 317465
aagucaaguggcugauaaa

SEQ ID NO: 493054 - RNA, 19 nt, Artificial Sequence
  Description of Artificial Sequence: Synthetic oligonucleotide
  Antisense Strand to SEQ ID NO: 493053
uuuaucagccacuugacuu

SEQ ID NO: 493055 - RNA, 19 nt, Artificial Sequence
  Description of Artificial Sequence: Synthetic oligonucleotide
  Sense strand starting at position 2834 of SEQ ID NO: 317465
agucaaguggcugauaaau

SEQ ID NO: 493056 - RNA, 19 nt, Artificial Sequence
  Description of Artificial Sequence: Synthetic oligonucleotide
  Antisense Strand to SEQ ID NO: 493055
auuuaucagccacuugacu

SEQ ID NO: 493057 - RNA, 19 nt, Artificial Sequence
  Description of Artificial Sequence: Synthetic oligonucleotide
  Sense strand starting at position 2836 of SEQ ID NO: 317465
ucaaguggcugauaaauuu

SEQ ID NO: 493058 - RNA, 19 nt, Artificial Sequence
  Description of Artificial Sequence: Synthetic oligonucleotide
  Antisense Strand to SEQ ID NO: 493057
aaauuuaucagccacuuga

SEQ ID NO: 493059 - RNA, 19 nt, Artificial Sequence
  Description of Artificial Sequence: Synthetic oligonucleotide
  Sense strand starting at position 2860 of SEQ ID NO: 317465
ggcucacugagcuaguuaa

SEQ ID NO: 493060 - RNA, 19 nt, Artificial Sequence
  Description of Artificial Sequence: Synthetic oligonucleotide
  Antisense Strand to SEQ ID NO: 493059
uuaacuagcucagugagcc

SEQ ID NO: 493061 - RNA, 19 nt, Artificial Sequence
  Description of Artificial Sequence: Synthetic oligonucleotide
  Sense strand starting at position 2870 of SEQ ID NO: 317465
gcuaguuaagugguagugu

SEQ ID NO: 493062 - RNA, 19 nt, Artificial Sequence
  Description of Artificial Sequence: Synthetic oligonucleotide
  Antisense Strand to SEQ ID NO: 493061
acacuaccacuuaacuagc

SEQ ID NO: 493063 - RNA, 19 nt, Artificial Sequence
  Description of Artificial Sequence: Synthetic oligonucleotide
  Sense strand starting at position 2892 of SEQ ID NO: 317465
gauagcaaccuuggucuuu

SEQ ID NO: 493064 - RNA, 19 nt, Artificial Sequence
  Description of Artificial Sequence: Synthetic oligonucleotide
  Antisense Strand to SEQ ID NO: 493063
aaagaccaagguugcuauc

SEQ ID NO: 493065 - RNA, 19 nt, Artificial Sequence
  Description of Artificial Sequence: Synthetic oligonucleotide
  Sense strand starting at position 2898 of SEQ ID NO: 317465
aaccuuggucuuugugacu

SEQ ID NO: 493066 - RNA, 19 nt, Artificial Sequence
  Description of Artificial Sequence: Synthetic oligonucleotide
  Antisense Strand to SEQ ID NO: 493065
agucacaaagaccaagguu

SEQ ID NO: 493067 - RNA, 19 nt, Artificial Sequence
  Description of Artificial Sequence: Synthetic oligonucleotide
  Sense strand starting at position 2976 of SEQ ID NO: 317465
gccuaaugaccauacggau

SEQ ID NO: 493068 - RNA, 19 nt, Artificial Sequence
  Description of Artificial Sequence: Synthetic oligonucleotide
  Antisense Strand to SEQ ID NO: 493067
auccguauggucauuaggc

SEQ ID NO: 493069 - RNA, 19 nt, Artificial Sequence
  Description of Artificial Sequence: Synthetic oligonucleotide
  Sense strand starting at position 3107 of SEQ ID NO: 317465
acuucucaguuguuaacau

SEQ ID NO: 493070 - RNA, 19 nt, Artificial Sequence
  Description of Artificial Sequence: Synthetic oligonucleotide
  Antisense Strand to SEQ ID NO: 493069
auguuaacaacugagaagu

SEQ ID NO: 493071 - RNA, 19 nt, Artificial Sequence
  Description of Artificial Sequence: Synthetic oligonucleotide
  Sense strand starting at position 3175 of SEQ ID NO: 317465
uuauguuuguucuuccuaa

SEQ ID NO: 493072 - RNA, 19 nt, Artificial Sequence
  Description of Artificial Sequence: Synthetic oligonucleotide
  Antisense Strand to SEQ ID NO: 493071
uuaggaagaacaaacauaa

SEQ ID NO: 493073 - RNA, 19 nt, Artificial Sequence
  Description of Artificial Sequence: Synthetic oligonucleotide
  Sense strand starting at position 3562 of SEQ ID NO: 317465
augcuugcucuguuguuaa

SEQ ID NO: 493074 - RNA, 19 nt, Artificial Sequence
  Description of Artificial Sequence: Synthetic oligonucleotide
  Antisense Strand to SEQ ID NO: 493073
uuaacaacagagcaagcau

SEQ ID NO: 493075 - RNA, 19 nt, Artificial Sequence
  Description of Artificial Sequence: Synthetic oligonucleotide
  Sense strand starting at position 3643 of SEQ ID NO: 317465
acucuuuacuuguuuggua

SEQ ID NO: 493076 - RNA, 19 nt, Artificial Sequence
  Description of Artificial Sequence: Synthetic oligonucleotide
  Antisense Strand to SEQ ID NO: 493075
uaccaaacaaguaaagagu

SEQ ID NO: 493077 - RNA, 19 nt, Artificial Sequence
  Description of Artificial Sequence: Synthetic oligonucleotide
  Sense strand starting at position 3645 of SEQ ID NO: 317465
ucuuuacuuguuugguaca

SEQ ID NO: 493078 - RNA, 19 nt, Artificial Sequence
  Description of Artificial Sequence: Synthetic oligonucleotide
  Antisense Strand to SEQ ID NO: 493077
uguaccaaacaaguaaaga

SEQ ID NO: 493079 - RNA, 19 nt, Artificial Sequence
  Description of Artificial Sequence: Synthetic oligonucleotide
  Sense strand starting at position 3647 of SEQ ID NO: 317465
uuuacuuguuugguacaca

SEQ ID NO: 493080 - RNA, 19 nt, Artificial Sequence
  Description of Artificial Sequence: Synthetic oligonucleotide
  Antisense Strand to SEQ ID NO: 493079
uguguaccaaacaaguaaa

SEQ ID NO: 493081 - RNA, 19 nt, Artificial Sequence
  Description of Artificial Sequence: Synthetic oligonucleotide
  Sense strand starting at position 3650 of SEQ ID NO: 317465
acuuguuugguacacagua

SEQ ID NO: 493082 - RNA, 19 nt, Artificial Sequence
  Description of Artificial Sequence: Synthetic oligonucleotide
  Antisense Strand to SEQ ID NO: 493081
uacuguguaccaaacaagu

SEQ ID NO: 493083 - RNA, 19 nt, Artificial Sequence
  Description of Artificial Sequence: Synthetic oligonucleotide
  Sense strand starting at position 3665 of SEQ ID NO: 317465
aguagaggcuaucuuggau

SEQ ID NO: 493084 - RNA, 19 nt, Artificial Sequence
  Description of Artificial Sequence: Synthetic oligonucleotide
  Antisense Strand to SEQ ID NO: 493083
auccaagauagccucuacu

SEQ ID NO: 493085 - RNA, 19 nt, Artificial Sequence
  Description of Artificial Sequence: Synthetic oligonucleotide
  Sense strand starting at position 3750 of SEQ ID NO: 317465
auucuuucucaugggcaaa

SEQ ID NO: 493086 - RNA, 19 nt, Artificial Sequence
  Description of Artificial Sequence: Synthetic oligonucleotide
  Antisense Strand to SEQ ID NO: 493085
uuugcccaugagaaagaau

SEQ ID NO: 493087 - RNA, 19 nt, Artificial Sequence
  Description of Artificial Sequence: Synthetic oligonucleotide
  Sense strand starting at position 3753 of SEQ ID NO: 317465
cuuucucaugggcaaacuu

SEQ ID NO: 493088 - RNA, 19 nt, Artificial Sequence
  Description of Artificial Sequence: Synthetic oligonucleotide
  Antisense Strand to SEQ ID NO: 493087
aaguuugcccaugagaaag

SEQ ID NO: 493089 - RNA, 19 nt, Artificial Sequence
  Description of Artificial Sequence: Synthetic oligonucleotide
  Sense strand starting at position 3976 of SEQ ID NO: 317465
ggaauucuucuauggugaa

SEQ ID NO: 493090 - RNA, 19 nt, Artificial Sequence
  Description of Artificial Sequence: Synthetic oligonucleotide
  Antisense Strand to SEQ ID NO: 493089
uucaccauagaagaauucc

SEQ ID NO: 493091 - RNA, 19 nt, Artificial Sequence
  Description of Artificial Sequence: Synthetic oligonucleotide
  Sense strand starting at position 61 of SEQ ID NO: 317466
ucauuuaagugucuguaac

SEQ ID NO: 493092 - RNA, 19 nt, Artificial Sequence
  Description of Artificial Sequence: Synthetic oligonucleotide
  Antisense Strand to SEQ ID NO: 493091
guuacagacacuuaaauga

SEQ ID NO: 493093 - RNA, 19 nt, Artificial Sequence
  Description of Artificial Sequence: Synthetic oligonucleotide
  Sense strand starting at position 109 of SEQ ID NO: 317466
ucuugaaggcuaggaauca

SEQ ID NO: 493094 - RNA, 19 nt, Artificial Sequence
  Description of Artificial Sequence: Synthetic oligonucleotide
  Antisense Strand to SEQ ID NO: 493093
ugauuccuagccuucaaga

SEQ ID NO: 493095 - RNA, 19 nt, Artificial Sequence
  Description of Artificial Sequence: Synthetic oligonucleotide
  Sense strand starting at position 541 of SEQ ID NO: 317466
gaagcagauuucuaguacu

SEQ ID NO: 493096 - RNA, 19 nt, Artificial Sequence
  Description of Artificial Sequence: Synthetic oligonucleotide
  Antisense Strand to SEQ ID NO: 493095
aguacuagaaaucugcuuc

SEQ ID NO: 493097 - RNA, 19 nt, Artificial Sequence
  Description of Artificial Sequence: Synthetic oligonucleotide
  Sense strand starting at position 544 of SEQ ID NO: 317466
gcagauuucuaguacuaua

SEQ ID NO: 493098 - RNA, 19 nt, Artificial Sequence
  Description of Artificial Sequence: Synthetic oligonucleotide
  Antisense Strand to SEQ ID NO: 493097
uauaguacuagaaaucugc

SEQ ID NO: 493099 - RNA, 19 nt, Artificial Sequence
  Description of Artificial Sequence: Synthetic oligonucleotide
  Sense strand starting at position 549 of SEQ ID NO: 317466
uuucuaguacuauaugcau

SEQ ID NO: 493100 - RNA, 19 nt, Artificial Sequence
  Description of Artificial Sequence: Synthetic oligonucleotide
  Antisense Strand to SEQ ID NO: 493099
augcauauaguacuagaaa

SEQ ID NO: 493101 - RNA, 19 nt, Artificial Sequence
  Description of Artificial Sequence: Synthetic oligonucleotide
  Sense strand starting at position 702 of SEQ ID NO: 317466
ucaugaagcucagccuuaa

SEQ ID NO: 493102 - RNA, 19 nt, Artificial Sequence
  Description of Artificial Sequence: Synthetic oligonucleotide
  Antisense Strand to SEQ ID NO: 493101
uuaaggcugagcuucauga

SEQ ID NO: 493103 - RNA, 19 nt, Artificial Sequence
  Description of Artificial Sequence: Synthetic oligonucleotide
  Sense strand starting at position 836 of SEQ ID NO: 317466
uuagaaauuguuuggucuu

SEQ ID NO: 493104 - RNA, 19 nt, Artificial Sequence
  Description of Artificial Sequence: Synthetic oligonucleotide
  Antisense Strand to SEQ ID NO: 493103
aagaccaaacaauuucuaa

SEQ ID NO: 493105 - RNA, 19 nt, Artificial Sequence
  Description of Artificial Sequence: Synthetic oligonucleotide
  Sense strand starting at position 838 of SEQ ID NO: 317466
agaaauuguuuggucuuua

SEQ ID NO: 493106 - RNA, 19 nt, Artificial Sequence
  Description of Artificial Sequence: Synthetic oligonucleotide
  Antisense Strand to SEQ ID NO: 493105
uaaagaccaaacaauuucu

SEQ ID NO: 493107 - RNA, 19 nt, Artificial Sequence
  Description of Artificial Sequence: Synthetic oligonucleotide
  Sense strand starting at position 839 of SEQ ID NO: 317466
gaaauuguuuggucuuuau

SEQ ID NO: 493108 - RNA, 19 nt, Artificial Sequence
  Description of Artificial Sequence: Synthetic oligonucleotide
  Antisense Strand to SEQ ID NO: 493107
auaaagaccaaacaauuuc

SEQ ID NO: 493109 - RNA, 19 nt, Artificial Sequence
  Description of Artificial Sequence: Synthetic oligonucleotide
  Sense strand starting at position 876 of SEQ ID NO: 317466
cugguuacugcacaagaau

SEQ ID NO: 493110 - RNA, 19 nt, Artificial Sequence
  Description of Artificial Sequence: Synthetic oligonucleotide
  Antisense Strand to SEQ ID NO: 493109
auucuugugcaguaaccag

SEQ ID NO: 493111 - RNA, 19 nt, Artificial Sequence
  Description of Artificial Sequence: Synthetic oligonucleotide
  Sense strand starting at position 879 of SEQ ID NO: 317466
guuacugcacaagaaucua

SEQ ID NO: 493112 - RNA, 19 nt, Artificial Sequence
  Description of Artificial Sequence: Synthetic oligonucleotide
  Antisense Strand to SEQ ID NO: 493111
uagauucuugugcaguaac

SEQ ID NO: 493113 - RNA, 19 nt, Artificial Sequence
  Description of Artificial Sequence: Synthetic oligonucleotide
  Sense strand starting at position 998 of SEQ ID NO: 317466
ccaaauuagugcuuuacag

SEQ ID NO: 493114 - RNA, 19 nt, Artificial Sequence
  Description of Artificial Sequence: Synthetic oligonucleotide
  Antisense Strand to SEQ ID NO: 493113
cuguaaagcacuaauuugg

SEQ ID NO: 493115 - RNA, 19 nt, Artificial Sequence
  Description of Artificial Sequence: Synthetic oligonucleotide
  Sense strand starting at position 1159 of SEQ ID NO: 317466
gcuaccauucuguacuaua

SEQ ID NO: 493116 - RNA, 19 nt, Artificial Sequence
  Description of Artificial Sequence: Synthetic oligonucleotide
  Antisense Strand to SEQ ID NO: 493115
uauaguacagaaugguagc

SEQ ID NO: 493117 - RNA, 19 nt, Artificial Sequence
  Description of Artificial Sequence: Synthetic oligonucleotide
  Sense strand starting at position 1173 of SEQ ID NO: 317466
cuauacacgcuguaaacua

SEQ ID NO: 493118 - RNA, 19 nt, Artificial Sequence
  Description of Artificial Sequence: Synthetic oligonucleotide
  Antisense Strand to SEQ ID NO: 493117
uaguuuacagcguguauag

SEQ ID NO: 493119 - RNA, 19 nt, Artificial Sequence
  Description of Artificial Sequence: Synthetic oligonucleotide
  Sense strand starting at position 1230 of SEQ ID NO: 317466
uugguaaucugguuugaau

SEQ ID NO: 493120 - RNA, 19 nt, Artificial Sequence
  Description of Artificial Sequence: Synthetic oligonucleotide
  Antisense Strand to SEQ ID NO: 493119
auucaaaccagauuaccaa

SEQ ID NO: 493121 - RNA, 19 nt, Artificial Sequence
  Description of Artificial Sequence: Synthetic oligonucleotide
  Sense strand starting at position 1232 of SEQ ID NO: 317466
gguaaucugguuugaaucu

SEQ ID NO: 493122 - RNA, 19 nt, Artificial Sequence
  Description of Artificial Sequence: Synthetic oligonucleotide
  Antisense Strand to SEQ ID NO: 493121
agauucaaaccagauuacc

SEQ ID NO: 493123 - RNA, 19 nt, Artificial Sequence
  Description of Artificial Sequence: Synthetic oligonucleotide
  Sense strand starting at position 1272 of SEQ ID NO: 317466
guauuccuaccaugcuaga

SEQ ID NO: 493124 - RNA, 19 nt, Artificial Sequence
  Description of Artificial Sequence: Synthetic oligonucleotide
  Antisense Strand to SEQ ID NO: 493123
ucuagcaugguaggaauac

SEQ ID NO: 493125 - RNA, 19 nt, Artificial Sequence
  Description of Artificial Sequence: Synthetic oligonucleotide
  Sense strand starting at position 1325 of SEQ ID NO: 317466
ggguuuccaggccaugaua

SEQ ID NO: 493126 - RNA, 19 nt, Artificial Sequence
  Description of Artificial Sequence: Synthetic oligonucleotide
  Antisense Strand to SEQ ID NO: 493125
uaucauggccuggaaaccc

SEQ ID NO: 493127 - RNA, 19 nt, Artificial Sequence
  Description of Artificial Sequence: Synthetic oligonucleotide
  Sense strand starting at position 1336 of SEQ ID NO: 317466
ccaugauagcgacaggucu

SEQ ID NO: 493128 - RNA, 19 nt, Artificial Sequence
  Description of Artificial Sequence: Synthetic oligonucleotide
  Antisense Strand to SEQ ID NO: 493127
agaccugucgcuaucaugg

SEQ ID NO: 493129 - RNA, 19 nt, Artificial Sequence
  Description of Artificial Sequence: Synthetic oligonucleotide
  Sense strand starting at position 1380 of SEQ ID NO: 317466
cgucguugucacuccaagu

SEQ ID NO: 493130 - RNA, 19 nt, Artificial Sequence
  Description of Artificial Sequence: Synthetic oligonucleotide
  Antisense Strand to SEQ ID NO: 493129
acuuggagugacaacgacg

SEQ ID NO: 493131 - RNA, 19 nt, Artificial Sequence
  Description of Artificial Sequence: Synthetic oligonucleotide
  Sense strand starting at position 1549 of SEQ ID NO: 317466
cugccaguuccgggaucaa

SEQ ID NO: 493132 - RNA, 19 nt, Artificial Sequence
  Description of Artificial Sequence: Synthetic oligonucleotide
  Antisense Strand to SEQ ID NO: 493131
uugaucccggaacuggcag

SEQ ID NO: 493133 - RNA, 19 nt, Artificial Sequence
  Description of Artificial Sequence: Synthetic oligonucleotide
  Sense strand starting at position 2187 of SEQ ID NO: 317466
cgcucuuacccagagacuu

SEQ ID NO: 493134 - RNA, 19 nt, Artificial Sequence
  Description of Artificial Sequence: Synthetic oligonucleotide
  Antisense Strand to SEQ ID NO: 493133
aagucucuggguaagagcg

SEQ ID NO: 493135 - RNA, 19 nt, Artificial Sequence
  Description of Artificial Sequence: Synthetic oligonucleotide
  Sense strand starting at position 2218 of SEQ ID NO: 317466
augccuuccuaguccaaga

SEQ ID NO: 493136 - RNA, 19 nt, Artificial Sequence
  Description of Artificial Sequence: Synthetic oligonucleotide
  Antisense Strand to SEQ ID NO: 493135
ucuuggacuaggaaggcau

SEQ ID NO: 493137 - RNA, 19 nt, Artificial Sequence
  Description of Artificial Sequence: Synthetic oligonucleotide
  Sense strand starting at position 2220 of SEQ ID NO: 317466
gccuuccuaguccaagaau

SEQ ID NO: 493138 - RNA, 19 nt, Artificial Sequence
  Description of Artificial Sequence: Synthetic oligonucleotide
  Antisense Strand to SEQ ID NO: 493137
auucuuggacuaggaaggc

SEQ ID NO: 493139 - RNA, 19 nt, Artificial Sequence
  Description of Artificial Sequence: Synthetic oligonucleotide
  Sense strand starting at position 2317 of SEQ ID NO: 317466
gcucuacgccuagguagaa

SEQ ID NO: 493140 - RNA, 19 nt, Artificial Sequence
  Description of Artificial Sequence: Synthetic oligonucleotide
  Antisense Strand to SEQ ID NO: 493139
uucuaccuaggcguagagc

SEQ ID NO: 493141 - RNA, 19 nt, Artificial Sequence
  Description of Artificial Sequence: Synthetic oligonucleotide
  Sense strand starting at position 2449 of SEQ ID NO: 317466
uacggcguucguuuauuaa

SEQ ID NO: 493142 - RNA, 19 nt, Artificial Sequence
  Description of Artificial Sequence: Synthetic oligonucleotide
  Antisense Strand to SEQ ID NO: 493141
uuaauaaacgaacgccgua

SEQ ID NO: 493143 - RNA, 19 nt, Artificial Sequence
  Description of Artificial Sequence: Synthetic oligonucleotide
  Sense strand starting at position 2451 of SEQ ID NO: 317466
cggcguucguuuauuaaga

SEQ ID NO: 493144 - RNA, 19 nt, Artificial Sequence
  Description of Artificial Sequence: Synthetic oligonucleotide
  Antisense Strand to SEQ ID NO: 493143
ucuuaauaaacgaacgccg

SEQ ID NO: 493145 - RNA, 19 nt, Artificial Sequence
  Description of Artificial Sequence: Synthetic oligonucleotide
  Sense strand starting at position 2728 of SEQ ID NO: 317466
cggagagaacuuugauauc

SEQ ID NO: 493146 - RNA, 19 nt, Artificial Sequence
  Description of Artificial Sequence: Synthetic oligonucleotide
  Antisense Strand to SEQ ID NO: 493145
gauaucaaaguucucuccg

SEQ ID NO: 493147 - RNA, 19 nt, Artificial Sequence
  Description of Artificial Sequence: Synthetic oligonucleotide
  Sense strand starting at position 2731 of SEQ ID NO: 317466
agagaacuuugauaucagu

SEQ ID NO: 493148 - RNA, 19 nt, Artificial Sequence
  Description of Artificial Sequence: Synthetic oligonucleotide
  Antisense Strand to SEQ ID NO: 493147
acugauaucaaaguucucu

SEQ ID NO: 493149 - RNA, 19 nt, Artificial Sequence
  Description of Artificial Sequence: Synthetic oligonucleotide
  Sense strand starting at position 3076 of SEQ ID NO: 317466
uuuguacauugaguauagu

SEQ ID NO: 493150 - RNA, 19 nt, Artificial Sequence
  Description of Artificial Sequence: Synthetic oligonucleotide
  Antisense Strand to SEQ ID NO: 493149
acuauacucaauguacaaa

SEQ ID NO: 493151 - RNA, 19 nt, Artificial Sequence
  Description of Artificial Sequence: Synthetic oligonucleotide
  Sense strand starting at position 3084 of SEQ ID NO: 317466
uugaguauagugugaucca

SEQ ID NO: 493152 - RNA, 19 nt, Artificial Sequence
  Description of Artificial Sequence: Synthetic oligonucleotide
  Antisense Strand to SEQ ID NO: 493151
uggaucacacuauacucaa

SEQ ID NO: 493153 - RNA, 19 nt, Artificial Sequence
  Description of Artificial Sequence: Synthetic oligonucleotide
  Sense strand starting at position 3087 of SEQ ID NO: 317466
aguauagugugauccaguu

SEQ ID NO: 493154 - RNA, 19 nt, Artificial Sequence
  Description of Artificial Sequence: Synthetic oligonucleotide
  Antisense Strand to SEQ ID NO: 493153
aacuggaucacacuauacu

SEQ ID NO: 493155 - RNA, 19 nt, Artificial Sequence
  Description of Artificial Sequence: Synthetic oligonucleotide
  Sense strand starting at position 3099 of SEQ ID NO: 317466
uccaguuuaggauguguga

SEQ ID NO: 493156 - RNA, 19 nt, Artificial Sequence
  Description of Artificial Sequence: Synthetic oligonucleotide
  Antisense Strand to SEQ ID NO: 493155
ucacacauccuaaacugga

SEQ ID NO: 493157 - RNA, 19 nt, Artificial Sequence
  Description of Artificial Sequence: Synthetic oligonucleotide
  Sense strand starting at position 3101 of SEQ ID NO: 317466
caguuuaggaugugugaga

SEQ ID NO: 493158 - RNA, 19 nt, Artificial Sequence
  Description of Artificial Sequence: Synthetic oligonucleotide
  Antisense Strand to SEQ ID NO: 493157
ucucacacauccuaaacug

SEQ ID NO: 493159 - RNA, 19 nt, Artificial Sequence
  Description of Artificial Sequence: Synthetic oligonucleotide
  Sense strand starting at position 3102 of SEQ ID NO: 317466
aguuuaggaugugugagau

SEQ ID NO: 493160 - RNA, 19 nt, Artificial Sequence
  Description of Artificial Sequence: Synthetic oligonucleotide
  Antisense Strand to SEQ ID NO: 493159
aucucacacauccuaaacu

SEQ ID NO: 493161 - RNA, 19 nt, Artificial Sequence
  Description of Artificial Sequence: Synthetic oligonucleotide
  Sense strand starting at position 3153 of SEQ ID NO: 317466
gguguaagacuccacguga

SEQ ID NO: 493162 - RNA, 19 nt, Artificial Sequence
  Description of Artificial Sequence: Synthetic oligonucleotide
  Antisense Strand to SEQ ID NO: 493161
ucacguggagucuuacacc

SEQ ID NO: 493163 - RNA, 19 nt, Artificial Sequence
  Description of Artificial Sequence: Synthetic oligonucleotide
  Sense strand starting at position 3246 of SEQ ID NO: 317466
cugagauucuaugaauuau

SEQ ID NO: 493164 - RNA, 19 nt, Artificial Sequence
  Description of Artificial Sequence: Synthetic oligonucleotide
  Antisense Strand to SEQ ID NO: 493163
auaauucauagaaucucag

SEQ ID NO: 493165 - RNA, 19 nt, Artificial Sequence
  Description of Artificial Sequence: Synthetic oligonucleotide
  Sense strand starting at position 3807 of SEQ ID NO: 317466
cuagauacuuuguugccua

SEQ ID NO: 493166 - RNA, 19 nt, Artificial Sequence
  Description of Artificial Sequence: Synthetic oligonucleotide
  Antisense Strand to SEQ ID NO: 493165
uaggcaacaaaguaucuag

SEQ ID NO: 493167 - RNA, 19 nt, Artificial Sequence
  Description of Artificial Sequence: Synthetic oligonucleotide
  Sense strand starting at position 3887 of SEQ ID NO: 317466
guaauuccauguuuacuaa

SEQ ID NO: 493168 - RNA, 19 nt, Artificial Sequence
  Description of Artificial Sequence: Synthetic oligonucleotide
  Antisense Strand to SEQ ID NO: 493167
uuaguaaacauggaauuac

SEQ ID NO: 493169 - RNA, 19 nt, Artificial Sequence
  Description of Artificial Sequence: Synthetic oligonucleotide
  Sense strand starting at position 3927 of SEQ ID NO: 317466
uuucuaaguuguuuccaaa

SEQ ID NO: 493170 - RNA, 19 nt, Artificial Sequence
  Description of Artificial Sequence: Synthetic oligonucleotide
  Antisense Strand to SEQ ID NO: 493169
uuuggaaacaacuuagaaa

SEQ ID NO: 493171 - RNA, 19 nt, Artificial Sequence
  Description of Artificial Sequence: Synthetic oligonucleotide
  Sense strand starting at position 26 of SEQ ID NO: 317467
agaguaaacuguccaacca

SEQ ID NO: 493172 - RNA, 19 nt, Artificial Sequence
  Description of Artificial Sequence: Synthetic oligonucleotide
  Antisense Strand to SEQ ID NO: 493171
ugguuggacaguuuacucu

SEQ ID NO: 493173 - RNA, 19 nt, Artificial Sequence
  Description of Artificial Sequence: Synthetic oligonucleotide
  Sense strand starting at position 66 of SEQ ID NO: 317467
ucacuagaucuuuggguga

SEQ ID NO: 493174 - RNA, 19 nt, Artificial Sequence
  Description of Artificial Sequence: Synthetic oligonucleotide
  Antisense Strand to SEQ ID NO: 493173
ucacccaaagaucuaguga

SEQ ID NO: 493175 - RNA, 19 nt, Artificial Sequence
  Description of Artificial Sequence: Synthetic oligonucleotide
  Sense strand starting at position 88 of SEQ ID NO: 317467
auuguugaggagcaauauu

SEQ ID NO: 493176 - RNA, 19 nt, Artificial Sequence
  Description of Artificial Sequence: Synthetic oligonucleotide
  Antisense Strand to SEQ ID NO: 493175
aauauugcuccucaacaau

SEQ ID NO: 493177 - RNA, 19 nt, Artificial Sequence
  Description of Artificial Sequence: Synthetic oligonucleotide
  Sense strand starting at position 219 of SEQ ID NO: 317467
uucugcaaugaugggauaa

SEQ ID NO: 493178 - RNA, 19 nt, Artificial Sequence
  Description of Artificial Sequence: Synthetic oligonucleotide
  Antisense Strand to SEQ ID NO: 493177
uuaucccaucauugcagaa

SEQ ID NO: 493179 - RNA, 19 nt, Artificial Sequence
  Description of Artificial Sequence: Synthetic oligonucleotide
  Sense strand starting at position 504 of SEQ ID NO: 317467
gggacuaugcugggacuau

SEQ ID NO: 493180 - RNA, 19 nt, Artificial Sequence
  Description of Artificial Sequence: Synthetic oligonucleotide
  Antisense Strand to SEQ ID NO: 493179
auagucccagcauaguccc

SEQ ID NO: 493181 - RNA, 19 nt, Artificial Sequence
  Description of Artificial Sequence: Synthetic oligonucleotide
  Sense strand starting at position 542 of SEQ ID NO: 317467
cggcuaauuuauguuuguu

SEQ ID NO: 493182 - RNA, 19 nt, Artificial Sequence
  Description of Artificial Sequence: Synthetic oligonucleotide
  Antisense Strand to SEQ ID NO: 493181
aacaaacauaaauuagccg

SEQ ID NO: 493183 - RNA, 19 nt, Artificial Sequence
  Description of Artificial Sequence: Synthetic oligonucleotide
  Sense strand starting at position 721 of SEQ ID NO: 317467
ccgccuaauuucuuugauu

SEQ ID NO: 493184 - RNA, 19 nt, Artificial Sequence
  Description of Artificial Sequence: Synthetic oligonucleotide
  Antisense Strand to SEQ ID NO: 493183
aaucaaagaaauuaggcgg

SEQ ID NO: 493185 - RNA, 19 nt, Artificial Sequence
  Description of Artificial Sequence: Synthetic oligonucleotide
  Sense strand starting at position 1036 of SEQ ID NO: 317467
caaugcuccgggcacaaau

SEQ ID NO: 493186 - RNA, 19 nt, Artificial Sequence
  Description of Artificial Sequence: Synthetic oligonucleotide
  Antisense Strand to SEQ ID NO: 493185
auuugugcccggagcauug

SEQ ID NO: 493187 - RNA, 19 nt, Artificial Sequence
  Description of Artificial Sequence: Synthetic oligonucleotide
  Sense strand starting at position 1053 of SEQ ID NO: 317467
auaacuuguuagcuccaga

SEQ ID NO: 493188 - RNA, 19 nt, Artificial Sequence
  Description of Artificial Sequence: Synthetic oligonucleotide
  Antisense Strand to SEQ ID NO: 493187
ucuggagcuaacaaguuau

SEQ ID NO: 493189 - RNA, 19 nt, Artificial Sequence
  Description of Artificial Sequence: Synthetic oligonucleotide
  Sense strand starting at position 1056 of SEQ ID NO: 317467
acuuguuagcuccagauca

SEQ ID NO: 493190 - RNA, 19 nt, Artificial Sequence
  Description of Artificial Sequence: Synthetic oligonucleotide
  Antisense Strand to SEQ ID NO: 493189
ugaucuggagcuaacaagu

SEQ ID NO: 493191 - RNA, 19 nt, Artificial Sequence
  Description of Artificial Sequence: Synthetic oligonucleotide
  Sense strand starting at position 1064 of SEQ ID NO: 317467
gcuccagaucagcaucuua

SEQ ID NO: 493192 - RNA, 19 nt, Artificial Sequence
  Description of Artificial Sequence: Synthetic oligonucleotide
  Antisense Strand to SEQ ID NO: 493191
uaagaugcugaucuggagc

SEQ ID NO: 493193 - RNA, 19 nt, Artificial Sequence
  Description of Artificial Sequence: Synthetic oligonucleotide
  Sense strand starting at position 1183 of SEQ ID NO: 317467
uuguauaaacuaggcagaa

SEQ ID NO: 493194 - RNA, 19 nt, Artificial Sequence
  Description of Artificial Sequence: Synthetic oligonucleotide
  Antisense Strand to SEQ ID NO: 493193
uucugccuaguuuauacaa

SEQ ID NO: 493195 - RNA, 19 nt, Artificial Sequence
  Description of Artificial Sequence: Synthetic oligonucleotide
  Sense strand starting at position 1184 of SEQ ID NO: 317467
uguauaaacuaggcagaaa

SEQ ID NO: 493196 - RNA, 19 nt, Artificial Sequence
  Description of Artificial Sequence: Synthetic oligonucleotide
  Antisense Strand to SEQ ID NO: 493195
uuucugccuaguuuauaca

SEQ ID NO: 493197 - RNA, 19 nt, Artificial Sequence
  Description of Artificial Sequence: Synthetic oligonucleotide
  Sense strand starting at position 1339 of SEQ ID NO: 317467
gcccaauuuccauggcaua

SEQ ID NO: 493198 - RNA, 19 nt, Artificial Sequence
  Description of Artificial Sequence: Synthetic oligonucleotide
  Antisense Strand to SEQ ID NO: 493197
uaugccauggaaauugggc

SEQ ID NO: 493199 - RNA, 19 nt, Artificial Sequence
  Description of Artificial Sequence: Synthetic oligonucleotide
  Sense strand starting at position 1411 of SEQ ID NO: 317467
uguaguucccuccauaucu

SEQ ID NO: 493200 - RNA, 19 nt, Artificial Sequence
  Description of Artificial Sequence: Synthetic oligonucleotide
  Antisense Strand to SEQ ID NO: 493199
agauauggagggaacuaca

SEQ ID NO: 493201 - RNA, 19 nt, Artificial Sequence
  Description of Artificial Sequence: Synthetic oligonucleotide
  Sense strand starting at position 2111 of SEQ ID NO: 317467
ggcccagugagcuaagaaa

SEQ ID NO: 493202 - RNA, 19 nt, Artificial Sequence
  Description of Artificial Sequence: Synthetic oligonucleotide
  Antisense Strand to SEQ ID NO: 493201
uuucuuagcucacugggcc

SEQ ID NO: 493203 - RNA, 19 nt, Artificial Sequence
  Description of Artificial Sequence: Synthetic oligonucleotide
  Sense strand starting at position 2207 of SEQ ID NO: 317467
uccgcacuuccugauauag

SEQ ID NO: 493204 - RNA, 19 nt, Artificial Sequence
  Description of Artificial Sequence: Synthetic oligonucleotide
  Antisense Strand to SEQ ID NO: 493203
cuauaucaggaagugcgga

SEQ ID NO: 493205 - RNA, 19 nt, Artificial Sequence
  Description of Artificial Sequence: Synthetic oligonucleotide
  Sense strand starting at position 2364 of SEQ ID NO: 317467
agaggaauaugacacagau

SEQ ID NO: 493206 - RNA, 19 nt, Artificial Sequence
  Description of Artificial Sequence: Synthetic oligonucleotide
  Antisense Strand to SEQ ID NO: 493205
aucugugucauauuccucu

SEQ ID NO: 493207 - RNA, 19 nt, Artificial Sequence
  Description of Artificial Sequence: Synthetic oligonucleotide
  Sense strand starting at position 2416 of SEQ ID NO: 317467
cauagugauuguguaauau

SEQ ID NO: 493208 - RNA, 19 nt, Artificial Sequence
  Description of Artificial Sequence: Synthetic oligonucleotide
  Antisense Strand to SEQ ID NO: 493207
auauuacacaaucacuaug

SEQ ID NO: 493209 - RNA, 19 nt, Artificial Sequence
  Description of Artificial Sequence: Synthetic oligonucleotide
  Sense strand starting at position 2528 of SEQ ID NO: 317467
cuugaucuugaacgacaaa

SEQ ID NO: 493210 - RNA, 19 nt, Artificial Sequence
  Description of Artificial Sequence: Synthetic oligonucleotide
  Antisense Strand to SEQ ID NO: 493209
uuugucguucaagaucaag

SEQ ID NO: 493211 - RNA, 19 nt, Artificial Sequence
  Description of Artificial Sequence: Synthetic oligonucleotide
  Sense strand starting at position 2882 of SEQ ID NO: 317467
aacgucugauugguuacaa

SEQ ID NO: 493212 - RNA, 19 nt, Artificial Sequence
  Description of Artificial Sequence: Synthetic oligonucleotide
  Antisense Strand to SEQ ID NO: 493211
uuguaaccaaucagacguu

SEQ ID NO: 493213 - RNA, 19 nt, Artificial Sequence
  Description of Artificial Sequence: Synthetic oligonucleotide
  Sense strand starting at position 2883 of SEQ ID NO: 317467
acgucugauugguuacaaa

SEQ ID NO: 493214 - RNA, 19 nt, Artificial Sequence
  Description of Artificial Sequence: Synthetic oligonucleotide
  Antisense Strand to SEQ ID NO: 493213
uuuguaaccaaucagacgu

SEQ ID NO: 493215 - RNA, 19 nt, Artificial Sequence
  Description of Artificial Sequence: Synthetic oligonucleotide
  Sense strand starting at position 2931 of SEQ ID NO: 317467
cccaaaucugcgcagaaca

SEQ ID NO: 493216 - RNA, 19 nt, Artificial Sequence
  Description of Artificial Sequence: Synthetic oligonucleotide
  Antisense Strand to SEQ ID NO: 493215
uguucugcgcagauuuggg

SEQ ID NO: 493217 - RNA, 19 nt, Artificial Sequence
  Description of Artificial Sequence: Synthetic oligonucleotide
  Sense strand starting at position 2990 of SEQ ID NO: 317467
cacuuaagcguggacagua

SEQ ID NO: 493218 - RNA, 19 nt, Artificial Sequence
  Description of Artificial Sequence: Synthetic oligonucleotide
  Antisense Strand to SEQ ID NO: 493217
uacuguccacgcuuaagug

SEQ ID NO: 493219 - RNA, 19 nt, Artificial Sequence
  Description of Artificial Sequence: Synthetic oligonucleotide
  Sense strand starting at position 3031 of SEQ ID NO: 317467
cuaggaagucagcgagaaa

SEQ ID NO: 493220 - RNA, 19 nt, Artificial Sequence
  Description of Artificial Sequence: Synthetic oligonucleotide
  Antisense Strand to SEQ ID NO: 493219
uuucucgcugacuuccuag

SEQ ID NO: 493221 - RNA, 19 nt, Artificial Sequence
  Description of Artificial Sequence: Synthetic oligonucleotide
  Sense strand starting at position 3159 of SEQ ID NO: 317467
aguugagugugaccagaau

SEQ ID NO: 493222 - RNA, 19 nt, Artificial Sequence
  Description of Artificial Sequence: Synthetic oligonucleotide
  Antisense Strand to SEQ ID NO: 493221
auucuggucacacucaacu

SEQ ID NO: 493223 - RNA, 19 nt, Artificial Sequence
  Description of Artificial Sequence: Synthetic oligonucleotide
  Sense strand starting at position 3197 of SEQ ID NO: 317467
uugugaaagauuugcgcua

SEQ ID NO: 493224 - RNA, 19 nt, Artificial Sequence
  Description of Artificial Sequence: Synthetic oligonucleotide
  Antisense Strand to SEQ ID NO: 493223
uagcgcaaaucuuucacaa

SEQ ID NO: 493225 - RNA, 19 nt, Artificial Sequence
  Description of Artificial Sequence: Synthetic oligonucleotide
  Sense strand starting at position 3250 of SEQ ID NO: 317467
ugaacuugacccugaaauc

SEQ ID NO: 493226 - RNA, 19 nt, Artificial Sequence
  Description of Artificial Sequence: Synthetic oligonucleotide
  Antisense Strand to SEQ ID NO: 493225
gauuucagggucaaguuca

SEQ ID NO: 493227 - RNA, 19 nt, Artificial Sequence
  Description of Artificial Sequence: Synthetic oligonucleotide
  Sense strand starting at position 3290 of SEQ ID NO: 317467
uaaucagaagugugacauc

SEQ ID NO: 493228 - RNA, 19 nt, Artificial Sequence
  Description of Artificial Sequence: Synthetic oligonucleotide
  Antisense Strand to SEQ ID NO: 493227
gaugucacacuucugauua

SEQ ID NO: 493229 - RNA, 19 nt, Artificial Sequence
  Description of Artificial Sequence: Synthetic oligonucleotide
  Sense strand starting at position 3301 of SEQ ID NO: 317467
gugacauccugagauuuag

SEQ ID NO: 493230 - RNA, 19 nt, Artificial Sequence
  Description of Artificial Sequence: Synthetic oligonucleotide
  Antisense Strand to SEQ ID NO: 493229
cuaaaucucaggaugucac

SEQ ID NO: 493231 - RNA, 19 nt, Artificial Sequence
  Description of Artificial Sequence: Synthetic oligonucleotide
  Sense strand starting at position 3307 of SEQ ID NO: 317467
uccugagauuuagaaaguu

SEQ ID NO: 493232 - RNA, 19 nt, Artificial Sequence
  Description of Artificial Sequence: Synthetic oligonucleotide
  Antisense Strand to SEQ ID NO: 493231
aacuuucuaaaucucagga

SEQ ID NO: 493233 - RNA, 19 nt, Artificial Sequence
  Description of Artificial Sequence: Synthetic oligonucleotide
  Sense strand starting at position 3372 of SEQ ID NO: 317467
ucaggaaauucguugugaa

SEQ ID NO: 493234 - RNA, 19 nt, Artificial Sequence
  Description of Artificial Sequence: Synthetic oligonucleotide
  Antisense Strand to SEQ ID NO: 493233
uucacaacgaauuuccuga

SEQ ID NO: 493235 - RNA, 19 nt, Artificial Sequence
  Description of Artificial Sequence: Synthetic oligonucleotide
  Sense strand starting at position 3373 of SEQ ID NO: 317467
caggaaauucguugugaag

SEQ ID NO: 493236 - RNA, 19 nt, Artificial Sequence
  Description of Artificial Sequence: Synthetic oligonucleotide
  Antisense Strand to SEQ ID NO: 493235
cuucacaacgaauuuccug

SEQ ID NO: 493237 - RNA, 19 nt, Artificial Sequence
  Description of Artificial Sequence: Synthetic oligonucleotide
  Sense strand starting at position 3440 of SEQ ID NO: 317467
gucgacugacuggauagau

SEQ ID NO: 493238 - RNA, 19 nt, Artificial Sequence
  Description of Artificial Sequence: Synthetic oligonucleotide
  Antisense Strand to SEQ ID NO: 493237
aucuauccagucagucgac

SEQ ID NO: 493239 - RNA, 19 nt, Artificial Sequence
  Description of Artificial Sequence: Synthetic oligonucleotide
  Sense strand starting at position 3449 of SEQ ID NO: 317467
cuggauagaucccuuucuu

SEQ ID NO: 493240 - RNA, 19 nt, Artificial Sequence
  Description of Artificial Sequence: Synthetic oligonucleotide
  Antisense Strand to SEQ ID NO: 493239
aagaaagggaucuauccag

SEQ ID NO: 493241 - RNA, 19 nt, Artificial Sequence
  Description of Artificial Sequence: Synthetic oligonucleotide
  Sense strand starting at position 3560 of SEQ ID NO: 317467
acuacuuaggcguggaaag

SEQ ID NO: 493242 - RNA, 19 nt, Artificial Sequence
  Description of Artificial Sequence: Synthetic oligonucleotide
  Antisense Strand to SEQ ID NO: 493241
cuuuccacgccuaaguagu

SEQ ID NO: 493243 - RNA, 19 nt, Artificial Sequence
  Description of Artificial Sequence: Synthetic oligonucleotide
  Sense strand starting at position 3663 of SEQ ID NO: 317467
gaacaaacucuuuguggga

SEQ ID NO: 493244 - RNA, 19 nt, Artificial Sequence
  Description of Artificial Sequence: Synthetic oligonucleotide
  Antisense Strand to SEQ ID NO: 493243
ucccacaaagaguuuguuc

SEQ ID NO: 493245 - RNA, 19 nt, Artificial Sequence
  Description of Artificial Sequence: Synthetic oligonucleotide
  Sense strand starting at position 3679 of SEQ ID NO: 317467
ggaauaggauaccaaauua

SEQ ID NO: 493246 - RNA, 19 nt, Artificial Sequence
  Description of Artificial Sequence: Synthetic oligonucleotide
  Antisense Strand to SEQ ID NO: 493245
uaauuugguauccuauucc

SEQ ID NO: 493247 - RNA, 19 nt, Artificial Sequence
  Description of Artificial Sequence: Synthetic oligonucleotide
  Sense strand starting at position 3933 of SEQ ID NO: 317467
aguaacguucuccagauaa

SEQ ID NO: 493248 - RNA, 19 nt, Artificial Sequence
  Description of Artificial Sequence: Synthetic oligonucleotide
  Antisense Strand to SEQ ID NO: 493247
uuaucuggagaacguuacu

SEQ ID NO: 493249 - RNA, 19 nt, Artificial Sequence
  Description of Artificial Sequence: Synthetic oligonucleotide
  Sense strand starting at position 3935 of SEQ ID NO: 317467
uaacguucuccagauaaga

SEQ ID NO: 493250 - RNA, 19 nt, Artificial Sequence
  Description of Artificial Sequence: Synthetic oligonucleotide
  Antisense Strand to SEQ ID NO: 493249
ucuuaucuggagaacguua

SEQ ID NO: 493251 - RNA, 19 nt, Artificial Sequence
  Description of Artificial Sequence: Synthetic oligonucleotide
  Sense strand starting at position 319 of SEQ ID NO: 317468
gucacugaugucuggaaca

SEQ ID NO: 493252 - RNA, 19 nt, Artificial Sequence
  Description of Artificial Sequence: Synthetic oligonucleotide
  Antisense Strand to SEQ ID NO: 493251
uguuccagacaucagugac

SEQ ID NO: 493253 - RNA, 19 nt, Artificial Sequence
  Description of Artificial Sequence: Synthetic oligonucleotide
  Sense strand starting at position 340 of SEQ ID NO: 317468
ggcauugaccacugauucu

SEQ ID NO: 493254 - RNA, 19 nt, Artificial Sequence
  Description of Artificial Sequence: Synthetic oligonucleotide
  Antisense Strand to SEQ ID NO: 493253
agaaucaguggucaaugcc

SEQ ID NO: 493255 - RNA, 19 nt, Artificial Sequence
  Description of Artificial Sequence: Synthetic oligonucleotide
  Sense strand starting at position 438 of SEQ ID NO: 317468
ccauaauuaugagcuugau

SEQ ID NO: 493256 - RNA, 19 nt, Artificial Sequence
  Description of Artificial Sequence: Synthetic oligonucleotide
  Antisense Strand to SEQ ID NO: 493255
aucaagcucauaauuaugg

SEQ ID NO: 493257 - RNA, 19 nt, Artificial Sequence
  Description of Artificial Sequence: Synthetic oligonucleotide
  Sense strand starting at position 464 of SEQ ID NO: 317468
aagagugauuuggagaaua

SEQ ID NO: 493258 - RNA, 19 nt, Artificial Sequence
  Description of Artificial Sequence: Synthetic oligonucleotide
  Antisense Strand to SEQ ID NO: 493257
uauucuccaaaucacucuu

SEQ ID NO: 493259 - RNA, 19 nt, Artificial Sequence
  Description of Artificial Sequence: Synthetic oligonucleotide
  Sense strand starting at position 675 of SEQ ID NO: 317468
uggaguacugguuauguuu

SEQ ID NO: 493260 - RNA, 19 nt, Artificial Sequence
  Description of Artificial Sequence: Synthetic oligonucleotide
  Antisense Strand to SEQ ID NO: 493259
aaacauaaccaguacucca

SEQ ID NO: 493261 - RNA, 19 nt, Artificial Sequence
  Description of Artificial Sequence: Synthetic oligonucleotide
  Sense strand starting at position 735 of SEQ ID NO: 317468
gucaauuacuaugugauua

SEQ ID NO: 493262 - RNA, 19 nt, Artificial Sequence
  Description of Artificial Sequence: Synthetic oligonucleotide
  Antisense Strand to SEQ ID NO: 493261
uaaucacauaguaauugac

SEQ ID NO: 493263 - RNA, 19 nt, Artificial Sequence
  Description of Artificial Sequence: Synthetic oligonucleotide
  Sense strand starting at position 739 of SEQ ID NO: 317468
auuacuaugugauuacuga

SEQ ID NO: 493264 - RNA, 19 nt, Artificial Sequence
  Description of Artificial Sequence: Synthetic oligonucleotide
  Antisense Strand to SEQ ID NO: 493263
ucaguaaucacauaguaau

SEQ ID NO: 493265 - RNA, 19 nt, Artificial Sequence
  Description of Artificial Sequence: Synthetic oligonucleotide
  Sense strand starting at position 949 of SEQ ID NO: 317468
ccaugauucuggcuucuga

SEQ ID NO: 493266 - RNA, 19 nt, Artificial Sequence
  Description of Artificial Sequence: Synthetic oligonucleotide
  Antisense Strand to SEQ ID NO: 493265
ucagaagccagaaucaugg

SEQ ID NO: 493267 - RNA, 19 nt, Artificial Sequence
  Description of Artificial Sequence: Synthetic oligonucleotide
  Sense strand starting at position 1031 of SEQ ID NO: 317468
gggaguuaacgauacuugu

SEQ ID NO: 493268 - RNA, 19 nt, Artificial Sequence
  Description of Artificial Sequence: Synthetic oligonucleotide
  Antisense Strand to SEQ ID NO: 493267
acaaguaucguuaacuccc

SEQ ID NO: 493269 - RNA, 19 nt, Artificial Sequence
  Description of Artificial Sequence: Synthetic oligonucleotide
  Sense strand starting at position 1034 of SEQ ID NO: 317468
aguuaacgauacuugugau

SEQ ID NO: 493270 - RNA, 19 nt, Artificial Sequence
  Description of Artificial Sequence: Synthetic oligonucleotide
  Antisense Strand to SEQ ID NO: 493269
aucacaaguaucguuaacu

SEQ ID NO: 493271 - RNA, 19 nt, Artificial Sequence
  Description of Artificial Sequence: Synthetic oligonucleotide
  Sense strand starting at position 1130 of SEQ ID NO: 317468
aagucuaaacaauggugaa

SEQ ID NO: 493272 - RNA, 19 nt, Artificial Sequence
  Description of Artificial Sequence: Synthetic oligonucleotide
  Antisense Strand to SEQ ID NO: 493271
uucaccauuguuuagacuu

SEQ ID NO: 493273 - RNA, 19 nt, Artificial Sequence
  Description of Artificial Sequence: Synthetic oligonucleotide
  Sense strand starting at position 1430 of SEQ ID NO: 317468
gcauuagucccacaaggac

SEQ ID NO: 493274 - RNA, 19 nt, Artificial Sequence
  Description of Artificial Sequence: Synthetic oligonucleotide
  Antisense Strand to SEQ ID NO: 493273
guccuugugggacuaaugc

SEQ ID NO: 493275 - RNA, 19 nt, Artificial Sequence
  Description of Artificial Sequence: Synthetic oligonucleotide
  Sense strand starting at position 1505 of SEQ ID NO: 317468
uugucaauauugcugaaag

SEQ ID NO: 493276 - RNA, 19 nt, Artificial Sequence
  Description of Artificial Sequence: Synthetic oligonucleotide
  Antisense Strand to SEQ ID NO: 493275
cuuucagcaauauugacaa

SEQ ID NO: 493277 - RNA, 19 nt, Artificial Sequence
  Description of Artificial Sequence: Synthetic oligonucleotide
  Sense strand starting at position 1705 of SEQ ID NO: 317468
uuaauuaauccaggaugcu

SEQ ID NO: 493278 - RNA, 19 nt, Artificial Sequence
  Description of Artificial Sequence: Synthetic oligonucleotide
  Antisense Strand to SEQ ID NO: 493277
agcauccuggauuaauuaa

SEQ ID NO: 493279 - RNA, 19 nt, Artificial Sequence
  Description of Artificial Sequence: Synthetic oligonucleotide
  Sense strand starting at position 1719 of SEQ ID NO: 317468
augcuaugauaauuccaga

SEQ ID NO: 493280 - RNA, 19 nt, Artificial Sequence
  Description of Artificial Sequence: Synthetic oligonucleotide
  Antisense Strand to SEQ ID NO: 493279
ucuggaauuaucauagcau

SEQ ID NO: 493281 - RNA, 19 nt, Artificial Sequence
  Description of Artificial Sequence: Synthetic oligonucleotide
  Sense strand starting at position 1888 of SEQ ID NO: 317468
ggaagaauaugaucuugca

SEQ ID NO: 493282 - RNA, 19 nt, Artificial Sequence
  Description of Artificial Sequence: Synthetic oligonucleotide
  Antisense Strand to SEQ ID NO: 493281
ugcaagaucauauucuucc

SEQ ID NO: 493283 - RNA, 19 nt, Artificial Sequence
  Description of Artificial Sequence: Synthetic oligonucleotide
  Sense strand starting at position 1967 of SEQ ID NO: 317468
aagucuacggcucaaagaa

SEQ ID NO: 493284 - RNA, 19 nt, Artificial Sequence
  Description of Artificial Sequence: Synthetic oligonucleotide
  Antisense Strand to SEQ ID NO: 493283
uucuuugagccguagacuu

SEQ ID NO: 493285 - RNA, 19 nt, Artificial Sequence
  Description of Artificial Sequence: Synthetic oligonucleotide
  Sense strand starting at position 2023 of SEQ ID NO: 317468
guuugacaagucugaacag

SEQ ID NO: 493286 - RNA, 19 nt, Artificial Sequence
  Description of Artificial Sequence: Synthetic oligonucleotide
  Antisense Strand to SEQ ID NO: 493285
cuguucagacuugucaaac

SEQ ID NO: 493287 - RNA, 19 nt, Artificial Sequence
  Description of Artificial Sequence: Synthetic oligonucleotide
  Sense strand starting at position 2159 of SEQ ID NO: 317468
agauuagaaugagaaauac

SEQ ID NO: 493288 - RNA, 19 nt, Artificial Sequence
  Description of Artificial Sequence: Synthetic oligonucleotide
  Antisense Strand to SEQ ID NO: 493287
guauuucucauucuaaucu

SEQ ID NO: 493289 - RNA, 19 nt, Artificial Sequence
  Description of Artificial Sequence: Synthetic oligonucleotide
  Sense strand starting at position 2174 of SEQ ID NO: 317468
auaccuuaggaauguacua

SEQ ID NO: 493290 - RNA, 19 nt, Artificial Sequence
  Description of Artificial Sequence: Synthetic oligonucleotide
  Antisense Strand to SEQ ID NO: 493289
uaguacauuccuaagguau

SEQ ID NO: 493291 - RNA, 19 nt, Artificial Sequence
  Description of Artificial Sequence: Synthetic oligonucleotide
  Sense strand starting at position 2210 of SEQ ID NO: 317468
aagauuaugguagguauau

SEQ ID NO: 493292 - RNA, 19 nt, Artificial Sequence
  Description of Artificial Sequence: Synthetic oligonucleotide
  Antisense Strand to SEQ ID NO: 493291
auauaccuaccauaaucuu

SEQ ID NO: 493293 - RNA, 19 nt, Artificial Sequence
  Description of Artificial Sequence: Synthetic oligonucleotide
  Sense strand starting at position 2211 of SEQ ID NO: 317468
agauuaugguagguauaua

SEQ ID NO: 493294 - RNA, 19 nt, Artificial Sequence
  Description of Artificial Sequence: Synthetic oligonucleotide
  Antisense Strand to SEQ ID NO: 493293
uauauaccuaccauaaucu

SEQ ID NO: 493295 - RNA, 19 nt, Artificial Sequence
  Description of Artificial Sequence: Synthetic oligonucleotide
  Sense strand starting at position 2216 of SEQ ID NO: 317468
augguagguauauaaguau

SEQ ID NO: 493296 - RNA, 19 nt, Artificial Sequence
  Description of Artificial Sequence: Synthetic oligonucleotide
  Antisense Strand to SEQ ID NO: 493295
auacuuauauaccuaccau

SEQ ID NO: 493297 - RNA, 19 nt, Artificial Sequence
  Description of Artificial Sequence: Synthetic oligonucleotide
  Sense strand starting at position 2481 of SEQ ID NO: 317468
acagacauuuaucagaaug

SEQ ID NO: 493298 - RNA, 19 nt, Artificial Sequence
  Description of Artificial Sequence: Synthetic oligonucleotide
  Antisense Strand to SEQ ID NO: 493297
cauucugauaaaugucugu

SEQ ID NO: 493299 - RNA, 19 nt, Artificial Sequence
  Description of Artificial Sequence: Synthetic oligonucleotide
  Sense strand starting at position 2650 of SEQ ID NO: 317468
gguguuaaugcuuauaaug

SEQ ID NO: 493300 - RNA, 19 nt, Artificial Sequence
  Description of Artificial Sequence: Synthetic oligonucleotide
  Antisense Strand to SEQ ID NO: 493299
cauuauaagcauuaacacc

SEQ ID NO: 493301 - RNA, 19 nt, Artificial Sequence
  Description of Artificial Sequence: Synthetic oligonucleotide
  Sense strand starting at position 3227 of SEQ ID NO: 317468
cuucuagcacuuggagaaa

SEQ ID NO: 493302 - RNA, 19 nt, Artificial Sequence
  Description of Artificial Sequence: Synthetic oligonucleotide
  Antisense Strand to SEQ ID NO: 493301
uuucuccaagugcuagaag

SEQ ID NO: 493303 - RNA, 19 nt, Artificial Sequence
  Description of Artificial Sequence: Synthetic oligonucleotide
  Sense strand starting at position 3454 of SEQ ID NO: 317468
gaagaaacaucggcuauua

SEQ ID NO: 493304 - RNA, 19 nt, Artificial Sequence
  Description of Artificial Sequence: Synthetic oligonucleotide
  Antisense Strand to SEQ ID NO: 493303
uaauagccgauguuucuuc

SEQ ID NO: 493305 - RNA, 19 nt, Artificial Sequence
  Description of Artificial Sequence: Synthetic oligonucleotide
  Sense strand starting at position 3456 of SEQ ID NO: 317468
agaaacaucggcuauuauu

SEQ ID NO: 493306 - RNA, 19 nt, Artificial Sequence
  Description of Artificial Sequence: Synthetic oligonucleotide
  Antisense Strand to SEQ ID NO: 493305
aauaauagccgauguuucu

SEQ ID NO: 493307 - RNA, 19 nt, Artificial Sequence
  Description of Artificial Sequence: Synthetic oligonucleotide
  Sense strand starting at position 3529 of SEQ ID NO: 317468
aaccuuagugaagguuauu

SEQ ID NO: 493308 - RNA, 19 nt, Artificial Sequence
  Description of Artificial Sequence: Synthetic oligonucleotide
  Antisense Strand to SEQ ID NO: 493307
aauaaccuucacuaagguu

SEQ ID NO: 493309 - RNA, 19 nt, Artificial Sequence
  Description of Artificial Sequence: Synthetic oligonucleotide
  Sense strand starting at position 3532 of SEQ ID NO: 317468
cuuagugaagguuauucua

SEQ ID NO: 493310 - RNA, 19 nt, Artificial Sequence
  Description of Artificial Sequence: Synthetic oligonucleotide
  Antisense Strand to SEQ ID NO: 493309
uagaauaaccuucacuaag

SEQ ID NO: 493311 - RNA, 19 nt, Artificial Sequence
  Description of Artificial Sequence: Synthetic oligonucleotide
  Sense strand starting at position 3535 of SEQ ID NO: 317468
agugaagguuauucuagug

SEQ ID NO: 493312 - RNA, 19 nt, Artificial Sequence
  Description of Artificial Sequence: Synthetic oligonucleotide
  Antisense Strand to SEQ ID NO: 493311
cacuagaauaaccuucacu

SEQ ID NO: 493313 - RNA, 19 nt, Artificial Sequence
  Description of Artificial Sequence: Synthetic oligonucleotide
  Sense strand starting at position 3631 of SEQ ID NO: 317468
ggcauagugcuucauggaa

SEQ ID NO: 493314 - RNA, 19 nt, Artificial Sequence
  Description of Artificial Sequence: Synthetic oligonucleotide
  Antisense Strand to SEQ ID NO: 493313
uuccaugaagcacuaugcc

SEQ ID NO: 493315 - RNA, 19 nt, Artificial Sequence
  Description of Artificial Sequence: Synthetic oligonucleotide
  Sense strand starting at position 3683 of SEQ ID NO: 317468
ugacucugcuaguuaauuu

SEQ ID NO: 493316 - RNA, 19 nt, Artificial Sequence
  Description of Artificial Sequence: Synthetic oligonucleotide
  Antisense Strand to SEQ ID NO: 493315
aaauuaacuagcagaguca

SEQ ID NO: 493317 - RNA, 19 nt, Artificial Sequence
  Description of Artificial Sequence: Synthetic oligonucleotide
  Sense strand starting at position 3700 of SEQ ID NO: 317468
uugagcagauuacuuaaau

SEQ ID NO: 493318 - RNA, 19 nt, Artificial Sequence
  Description of Artificial Sequence: Synthetic oligonucleotide
  Antisense Strand to SEQ ID NO: 493317
auuuaaguaaucugcucaa

SEQ ID NO: 493319 - RNA, 19 nt, Artificial Sequence
  Description of Artificial Sequence: Synthetic oligonucleotide
  Sense strand starting at position 3701 of SEQ ID NO: 317468
ugagcagauuacuuaaauc

SEQ ID NO: 493320 - RNA, 19 nt, Artificial Sequence
  Description of Artificial Sequence: Synthetic oligonucleotide
  Antisense Strand to SEQ ID NO: 493319
gauuuaaguaaucugcuca

SEQ ID NO: 493321 - RNA, 19 nt, Artificial Sequence
  Description of Artificial Sequence: Synthetic oligonucleotide
  Sense strand starting at position 3794 of SEQ ID NO: 317468
ugcauaauguaugugaaac

SEQ ID NO: 493322 - RNA, 19 nt, Artificial Sequence
  Description of Artificial Sequence: Synthetic oligonucleotide
  Antisense Strand to SEQ ID NO: 493321
guuucacauacauuaugca

SEQ ID NO: 493323 - RNA, 19 nt, Artificial Sequence
  Description of Artificial Sequence: Synthetic oligonucleotide
  Sense strand starting at position 3804 of SEQ ID NO: 317468
augugaaacugucuagcaa

SEQ ID NO: 493324 - RNA, 19 nt, Artificial Sequence
  Description of Artificial Sequence: Synthetic oligonucleotide
  Antisense Strand to SEQ ID NO: 493323
uugcuagacaguuucacau

SEQ ID NO: 493325 - RNA, 19 nt, Artificial Sequence
  Description of Artificial Sequence: Synthetic oligonucleotide
  Sense strand starting at position 3805 of SEQ ID NO: 317468
ugugaaacugucuagcaaa

SEQ ID NO: 493326 - RNA, 19 nt, Artificial Sequence
  Description of Artificial Sequence: Synthetic oligonucleotide
  Antisense Strand to SEQ ID NO: 493325
uuugcuagacaguuucaca

SEQ ID NO: 493327 - RNA, 19 nt, Artificial Sequence
  Description of Artificial Sequence: Synthetic oligonucleotide
  Sense strand starting at position 3855 of SEQ ID NO: 317468
ggcagaaguccucauagac

SEQ ID NO: 493328 - RNA, 19 nt, Artificial Sequence
  Description of Artificial Sequence: Synthetic oligonucleotide
  Antisense Strand to SEQ ID NO: 493327
gucuaugaggacuucugcc

SEQ ID NO: 493329 - RNA, 19 nt, Artificial Sequence
  Description of Artificial Sequence: Synthetic oligonucleotide
  Sense strand starting at position 3968 of SEQ ID NO: 317468
ccguaaauggaaugaauaa

SEQ ID NO: 493330 - RNA, 19 nt, Artificial Sequence
  Description of Artificial Sequence: Synthetic oligonucleotide
  Antisense Strand to SEQ ID NO: 493329
uuauucauuccauuuacgg

SEQ ID NO: 493331 - RNA, 19 nt, Artificial Sequence
  Description of Artificial Sequence: Synthetic oligonucleotide
  Sense strand starting at position 53 of SEQ ID NO: 317469
ggcuuucugagacaugcau

SEQ ID NO: 493332 - RNA, 19 nt, Artificial Sequence
  Description of Artificial Sequence: Synthetic oligonucleotide
  Antisense Strand to SEQ ID NO: 493331
augcaugucucagaaagcc

SEQ ID NO: 493333 - RNA, 19 nt, Artificial Sequence
  Description of Artificial Sequence: Synthetic oligonucleotide
  Sense strand starting at position 59 of SEQ ID NO: 317469
cugagacaugcauauuagu

SEQ ID NO: 493334 - RNA, 19 nt, Artificial Sequence
  Description of Artificial Sequence: Synthetic oligonucleotide
  Antisense Strand to SEQ ID NO: 493333
acuaauaugcaugucucag

SEQ ID NO: 493335 - RNA, 19 nt, Artificial Sequence
  Description of Artificial Sequence: Synthetic oligonucleotide
  Sense strand starting at position 67 of SEQ ID NO: 317469
ugcauauuagucuaagaga

SEQ ID NO: 493336 - RNA, 19 nt, Artificial Sequence
  Description of Artificial Sequence: Synthetic oligonucleotide
  Antisense Strand to SEQ ID NO: 493335
ucucuuagacuaauaugca

SEQ ID NO: 493337 - RNA, 19 nt, Artificial Sequence
  Description of Artificial Sequence: Synthetic oligonucleotide
  Sense strand starting at position 226 of SEQ ID NO: 317469
ugacuauagcucugacaug

SEQ ID NO: 493338 - RNA, 19 nt, Artificial Sequence
  Description of Artificial Sequence: Synthetic oligonucleotide
  Antisense Strand to SEQ ID NO: 493337
caugucagagcuauaguca

SEQ ID NO: 493339 - RNA, 19 nt, Artificial Sequence
  Description of Artificial Sequence: Synthetic oligonucleotide
  Sense strand starting at position 352 of SEQ ID NO: 317469
aaauguagccucugggaau

SEQ ID NO: 493340 - RNA, 19 nt, Artificial Sequence
  Description of Artificial Sequence: Synthetic oligonucleotide
  Antisense Strand to SEQ ID NO: 493339
auucccagaggcuacauuu

SEQ ID NO: 493341 - RNA, 19 nt, Artificial Sequence
  Description of Artificial Sequence: Synthetic oligonucleotide
  Sense strand starting at position 951 of SEQ ID NO: 317469
aaugguggugaguacauua

SEQ ID NO: 493342 - RNA, 19 nt, Artificial Sequence
  Description of Artificial Sequence: Synthetic oligonucleotide
  Antisense Strand to SEQ ID NO: 493341
uaauguacucaccaccauu

SEQ ID NO: 493343 - RNA, 19 nt, Artificial Sequence
  Description of Artificial Sequence: Synthetic oligonucleotide
  Sense strand starting at position 958 of SEQ ID NO: 317469
gugaguacauuacuuacaa

SEQ ID NO: 493344 - RNA, 19 nt, Artificial Sequence
  Description of Artificial Sequence: Synthetic oligonucleotide
  Antisense Strand to SEQ ID NO: 493343
uuguaaguaauguacucac

SEQ ID NO: 493345 - RNA, 19 nt, Artificial Sequence
  Description of Artificial Sequence: Synthetic oligonucleotide
  Sense strand starting at position 1059 of SEQ ID NO: 317469
ugcuuuaggaguuaaacag

SEQ ID NO: 493346 - RNA, 19 nt, Artificial Sequence
  Description of Artificial Sequence: Synthetic oligonucleotide
  Antisense Strand to SEQ ID NO: 493345
cuguuuaacuccuaaagca

SEQ ID NO: 493347 - RNA, 19 nt, Artificial Sequence
  Description of Artificial Sequence: Synthetic oligonucleotide
  Sense strand starting at position 1066 of SEQ ID NO: 317469
ggaguuaaacagcaaagca

SEQ ID NO: 493348 - RNA, 19 nt, Artificial Sequence
  Description of Artificial Sequence: Synthetic oligonucleotide
  Antisense Strand to SEQ ID NO: 493347
ugcuuugcuguuuaacucc

SEQ ID NO: 493349 - RNA, 19 nt, Artificial Sequence
  Description of Artificial Sequence: Synthetic oligonucleotide
  Sense strand starting at position 1134 of SEQ ID NO: 317469
ugaauuagaugugccugaa

SEQ ID NO: 493350 - RNA, 19 nt, Artificial Sequence
  Description of Artificial Sequence: Synthetic oligonucleotide
  Antisense Strand to SEQ ID NO: 493349
uucaggcacaucuaauuca

SEQ ID NO: 493351 - RNA, 19 nt, Artificial Sequence
  Description of Artificial Sequence: Synthetic oligonucleotide
  Sense strand starting at position 1138 of SEQ ID NO: 317469
uuagaugugccugaauuau

SEQ ID NO: 493352 - RNA, 19 nt, Artificial Sequence
  Description of Artificial Sequence: Synthetic oligonucleotide
  Antisense Strand to SEQ ID NO: 493351
auaauucaggcacaucuaa

SEQ ID NO: 493353 - RNA, 19 nt, Artificial Sequence
  Description of Artificial Sequence: Synthetic oligonucleotide
  Sense strand starting at position 1256 of SEQ ID NO: 317469
gugagaauugugcauaagg

SEQ ID NO: 493354 - RNA, 19 nt, Artificial Sequence
  Description of Artificial Sequence: Synthetic oligonucleotide
  Antisense Strand to SEQ ID NO: 493353
ccuuaugcacaauucucac

SEQ ID NO: 493355 - RNA, 19 nt, Artificial Sequence
  Description of Artificial Sequence: Synthetic oligonucleotide
  Sense strand starting at position 1273 of SEQ ID NO: 317469
ggagcagagaaguguaaug

SEQ ID NO: 493356 - RNA, 19 nt, Artificial Sequence
  Description of Artificial Sequence: Synthetic oligonucleotide
  Antisense Strand to SEQ ID NO: 493355
cauuacacuucucugcucc

SEQ ID NO: 493357 - RNA, 19 nt, Artificial Sequence
  Description of Artificial Sequence: Synthetic oligonucleotide
  Sense strand starting at position 1398 of SEQ ID NO: 317469
gcaguuugccuguugcuaa

SEQ ID NO: 493358 - RNA, 19 nt, Artificial Sequence
  Description of Artificial Sequence: Synthetic oligonucleotide
  Antisense Strand to SEQ ID NO: 493357
uuagcaacaggcaaacugc

SEQ ID NO: 493359 - RNA, 19 nt, Artificial Sequence
  Description of Artificial Sequence: Synthetic oligonucleotide
  Sense strand starting at position 1553 of SEQ ID NO: 317469
ucuuaugagugauuguaaa

SEQ ID NO: 493360 - RNA, 19 nt, Artificial Sequence
  Description of Artificial Sequence: Synthetic oligonucleotide
  Antisense Strand to SEQ ID NO: 493359
uuuacaaucacucauaaga

SEQ ID NO: 493361 - RNA, 19 nt, Artificial Sequence
  Description of Artificial Sequence: Synthetic oligonucleotide
  Sense strand starting at position 1704 of SEQ ID NO: 317469
gucuguagaccucagacaa

SEQ ID NO: 493362 - RNA, 19 nt, Artificial Sequence
  Description of Artificial Sequence: Synthetic oligonucleotide
  Antisense Strand to SEQ ID NO: 493361
uugucugaggucuacagac

SEQ ID NO: 493363 - RNA, 19 nt, Artificial Sequence
  Description of Artificial Sequence: Synthetic oligonucleotide
  Sense strand starting at position 1719 of SEQ ID NO: 317469
acaauagaguguuucuuaa

SEQ ID NO: 493364 - RNA, 19 nt, Artificial Sequence
  Description of Artificial Sequence: Synthetic oligonucleotide
  Antisense Strand to SEQ ID NO: 493363
uuaagaaacacucuauugu

SEQ ID NO: 493365 - RNA, 19 nt, Artificial Sequence
  Description of Artificial Sequence: Synthetic oligonucleotide
  Sense strand starting at position 1923 of SEQ ID NO: 317469
uaacgauaacgaugacaau

SEQ ID NO: 493366 - RNA, 19 nt, Artificial Sequence
  Description of Artificial Sequence: Synthetic oligonucleotide
  Antisense Strand to SEQ ID NO: 493365
auugucaucguuaucguua

SEQ ID NO: 493367 - RNA, 19 nt, Artificial Sequence
  Description of Artificial Sequence: Synthetic oligonucleotide
  Sense strand starting at position 1933 of SEQ ID NO: 317469
gaugacaaugcugguaaua

SEQ ID NO: 493368 - RNA, 19 nt, Artificial Sequence
  Description of Artificial Sequence: Synthetic oligonucleotide
  Antisense Strand to SEQ ID NO: 493367
uauuaccagcauugucauc

SEQ ID NO: 493369 - RNA, 19 nt, Artificial Sequence
  Description of Artificial Sequence: Synthetic oligonucleotide
  Sense strand starting at position 1942 of SEQ ID NO: 317469
gcugguaauagugaugaca

SEQ ID NO: 493370 - RNA, 19 nt, Artificial Sequence
  Description of Artificial Sequence: Synthetic oligonucleotide
  Antisense Strand to SEQ ID NO: 493369
ugucaucacuauuaccagc

SEQ ID NO: 493371 - RNA, 19 nt, Artificial Sequence
  Description of Artificial Sequence: Synthetic oligonucleotide
  Sense strand starting at position 2057 of SEQ ID NO: 317469
agaugaaacuugucugacu

SEQ ID NO: 493372 - RNA, 19 nt, Artificial Sequence
  Description of Artificial Sequence: Synthetic oligonucleotide
  Antisense Strand to SEQ ID NO: 493371
agucagacaaguuucaucu

SEQ ID NO: 493373 - RNA, 19 nt, Artificial Sequence
  Description of Artificial Sequence: Synthetic oligonucleotide
  Sense strand starting at position 2058 of SEQ ID NO: 317469
gaugaaacuugucugacua

SEQ ID NO: 493374 - RNA, 19 nt, Artificial Sequence
  Description of Artificial Sequence: Synthetic oligonucleotide
  Antisense Strand to SEQ ID NO: 493373
uagucagacaaguuucauc

SEQ ID NO: 493375 - RNA, 19 nt, Artificial Sequence
  Description of Artificial Sequence: Synthetic oligonucleotide
  Sense strand starting at position 2059 of SEQ ID NO: 317469
augaaacuugucugacuag

SEQ ID NO: 493376 - RNA, 19 nt, Artificial Sequence
  Description of Artificial Sequence: Synthetic oligonucleotide
  Antisense Strand to SEQ ID NO: 493375
cuagucagacaaguuucau

SEQ ID NO: 493377 - RNA, 19 nt, Artificial Sequence
  Description of Artificial Sequence: Synthetic oligonucleotide
  Sense strand starting at position 2076 of SEQ ID NO: 317469
aguguuaaugaccaucaca

SEQ ID NO: 493378 - RNA, 19 nt, Artificial Sequence
  Description of Artificial Sequence: Synthetic oligonucleotide
  Antisense Strand to SEQ ID NO: 493377
ugugauggucauuaacacu

SEQ ID NO: 493379 - RNA, 19 nt, Artificial Sequence
  Description of Artificial Sequence: Synthetic oligonucleotide
  Sense strand starting at position 2224 of SEQ ID NO: 317469
ggguaauccuaacucuaua

SEQ ID NO: 493380 - RNA, 19 nt, Artificial Sequence
  Description of Artificial Sequence: Synthetic oligonucleotide
  Antisense Strand to SEQ ID NO: 493379
uauagaguuaggauuaccc

SEQ ID NO: 493381 - RNA, 19 nt, Artificial Sequence
  Description of Artificial Sequence: Synthetic oligonucleotide
  Sense strand starting at position 2415 of SEQ ID NO: 317469
cuuaauuaccugugagaau

SEQ ID NO: 493382 - RNA, 19 nt, Artificial Sequence
  Description of Artificial Sequence: Synthetic oligonucleotide
  Antisense Strand to SEQ ID NO: 493381
auucucacagguaauuaag

SEQ ID NO: 493383 - RNA, 19 nt, Artificial Sequence
  Description of Artificial Sequence: Synthetic oligonucleotide
  Sense strand starting at position 2569 of SEQ ID NO: 317469
augugaguuccuuauauga

SEQ ID NO: 493384 - RNA, 19 nt, Artificial Sequence
  Description of Artificial Sequence: Synthetic oligonucleotide
  Antisense Strand to SEQ ID NO: 493383
ucauauaaggaacucacau

SEQ ID NO: 493385 - RNA, 19 nt, Artificial Sequence
  Description of Artificial Sequence: Synthetic oligonucleotide
  Sense strand starting at position 2576 of SEQ ID NO: 317469
uuccuuauaugaucuggau

SEQ ID NO: 493386 - RNA, 19 nt, Artificial Sequence
  Description of Artificial Sequence: Synthetic oligonucleotide
  Antisense Strand to SEQ ID NO: 493385
auccagaucauauaaggaa

SEQ ID NO: 493387 - RNA, 19 nt, Artificial Sequence
  Description of Artificial Sequence: Synthetic oligonucleotide
  Sense strand starting at position 2611 of SEQ ID NO: 317469
acuggauauuaaccaguua

SEQ ID NO: 493388 - RNA, 19 nt, Artificial Sequence
  Description of Artificial Sequence: Synthetic oligonucleotide
  Antisense Strand to SEQ ID NO: 493387
uaacugguuaauauccagu

SEQ ID NO: 493389 - RNA, 19 nt, Artificial Sequence
  Description of Artificial Sequence: Synthetic oligonucleotide
  Sense strand starting at position 2854 of SEQ ID NO: 317469
ugaggccuccuauaucaua

SEQ ID NO: 493390 - RNA, 19 nt, Artificial Sequence
  Description of Artificial Sequence: Synthetic oligonucleotide
  Antisense Strand to SEQ ID NO: 493389
uaugauauaggaggccuca

SEQ ID NO: 493391 - RNA, 19 nt, Artificial Sequence
  Description of Artificial Sequence: Synthetic oligonucleotide
  Sense strand starting at position 2988 of SEQ ID NO: 317469
cuguaaagugcccagacaa

SEQ ID NO: 493392 - RNA, 19 nt, Artificial Sequence
  Description of Artificial Sequence: Synthetic oligonucleotide
  Antisense Strand to SEQ ID NO: 493391
uugucugggcacuuuacag

SEQ ID NO: 493393 - RNA, 19 nt, Artificial Sequence
  Description of Artificial Sequence: Synthetic oligonucleotide
  Sense strand starting at position 3191 of SEQ ID NO: 317469
ugcagauuacaguagguca

SEQ ID NO: 493394 - RNA, 19 nt, Artificial Sequence
  Description of Artificial Sequence: Synthetic oligonucleotide
  Antisense Strand to SEQ ID NO: 493393
ugaccuacuguaaucugca

SEQ ID NO: 493395 - RNA, 19 nt, Artificial Sequence
  Description of Artificial Sequence: Synthetic oligonucleotide
  Sense strand starting at position 3196 of SEQ ID NO: 317469
auuacaguaggucaugauu

SEQ ID NO: 493396 - RNA, 19 nt, Artificial Sequence
  Description of Artificial Sequence: Synthetic oligonucleotide
  Antisense Strand to SEQ ID NO: 493395
aaucaugaccuacuguaau

SEQ ID NO: 493397 - RNA, 19 nt, Artificial Sequence
  Description of Artificial Sequence: Synthetic oligonucleotide
  Sense strand starting at position 3418 of SEQ ID NO: 317469
acuguuuaucagcaugaug

SEQ ID NO: 493398 - RNA, 19 nt, Artificial Sequence
  Description of Artificial Sequence: Synthetic oligonucleotide
  Antisense Strand to SEQ ID NO: 493397
caucaugcugauaaacagu

SEQ ID NO: 493399 - RNA, 19 nt, Artificial Sequence
  Description of Artificial Sequence: Synthetic oligonucleotide
  Sense strand starting at position 3486 of SEQ ID NO: 317469
ugauauaaggcacaucuuu

SEQ ID NO: 493400 - RNA, 19 nt, Artificial Sequence
  Description of Artificial Sequence: Synthetic oligonucleotide
  Antisense Strand to SEQ ID NO: 493399
aaagaugugccuuauauca

SEQ ID NO: 493401 - RNA, 19 nt, Artificial Sequence
  Description of Artificial Sequence: Synthetic oligonucleotide
  Sense strand starting at position 3593 of SEQ ID NO: 317469
guaggaauguuacugauug

SEQ ID NO: 493402 - RNA, 19 nt, Artificial Sequence
  Description of Artificial Sequence: Synthetic oligonucleotide
  Antisense Strand to SEQ ID NO: 493401
caaucaguaacauuccuac

SEQ ID NO: 493403 - RNA, 19 nt, Artificial Sequence
  Description of Artificial Sequence: Synthetic oligonucleotide
  Sense strand starting at position 3595 of SEQ ID NO: 317469
aggaauguuacugauuggu

SEQ ID NO: 493404 - RNA, 19 nt, Artificial Sequence
  Description of Artificial Sequence: Synthetic oligonucleotide
  Antisense Strand to SEQ ID NO: 493403
accaaucaguaacauuccu

SEQ ID NO: 493405 - RNA, 19 nt, Artificial Sequence
  Description of Artificial Sequence: Synthetic oligonucleotide
  Sense strand starting at position 3597 of SEQ ID NO: 317469
gaauguuacugauugguau

SEQ ID NO: 493406 - RNA, 19 nt, Artificial Sequence
  Description of Artificial Sequence: Synthetic oligonucleotide
  Antisense Strand to SEQ ID NO: 493405
auaccaaucaguaacauuc

SEQ ID NO: 493407 - RNA, 19 nt, Artificial Sequence
  Description of Artificial Sequence: Synthetic oligonucleotide
  Sense strand starting at position 3631 of SEQ ID NO: 317469
ccagcaaauuuguuuagcu

SEQ ID NO: 493408 - RNA, 19 nt, Artificial Sequence
  Description of Artificial Sequence: Synthetic oligonucleotide
  Antisense Strand to SEQ ID NO: 493407
agcuaaacaaauuugcugg

SEQ ID NO: 493409 - RNA, 19 nt, Artificial Sequence
  Description of Artificial Sequence: Synthetic oligonucleotide
  Sense strand starting at position 3891 of SEQ ID NO: 317469
ccauuacuggaaugcuuaa

SEQ ID NO: 493410 - RNA, 19 nt, Artificial Sequence
  Description of Artificial Sequence: Synthetic oligonucleotide
  Antisense Strand to SEQ ID NO: 493409
uuaagcauuccaguaaugg

SEQ ID NO: 493411 - RNA, 19 nt, Artificial Sequence
  Description of Artificial Sequence: Synthetic oligonucleotide
  Sense strand starting at position 143 of SEQ ID NO: 317470
ggaagagagcugggaguuu

SEQ ID NO: 493412 - RNA, 19 nt, Artificial Sequence
  Description of Artificial Sequence: Synthetic oligonucleotide
  Antisense Strand to SEQ ID NO: 493411
aaacucccagcucucuucc

SEQ ID NO: 493413 - RNA, 19 nt, Artificial Sequence
  Description of Artificial Sequence: Synthetic oligonucleotide
  Sense strand starting at position 458 of SEQ ID NO: 317470
gugucaaauuuccuguaca

SEQ ID NO: 493414 - RNA, 19 nt, Artificial Sequence
  Description of Artificial Sequence: Synthetic oligonucleotide
  Antisense Strand to SEQ ID NO: 493413
uguacaggaaauuugacac

SEQ ID NO: 493415 - RNA, 19 nt, Artificial Sequence
  Description of Artificial Sequence: Synthetic oligonucleotide
  Sense strand starting at position 598 of SEQ ID NO: 317470
acacuugacugcuuauaag

SEQ ID NO: 493416 - RNA, 19 nt, Artificial Sequence
  Description of Artificial Sequence: Synthetic oligonucleotide
  Antisense Strand to SEQ ID NO: 493415
cuuauaagcagucaagugu

SEQ ID NO: 493417 - RNA, 19 nt, Artificial Sequence
  Description of Artificial Sequence: Synthetic oligonucleotide
  Sense strand starting at position 708 of SEQ ID NO: 317470
acacuuauagaugguuuaa

SEQ ID NO: 493418 - RNA, 19 nt, Artificial Sequence
  Description of Artificial Sequence: Synthetic oligonucleotide
  Antisense Strand to SEQ ID NO: 493417
uuaaaccaucuauaagugu

SEQ ID NO: 493419 - RNA, 19 nt, Artificial Sequence
  Description of Artificial Sequence: Synthetic oligonucleotide
  Sense strand starting at position 710 of SEQ ID NO: 317470
acuuauagaugguuuaaga

SEQ ID NO: 493420 - RNA, 19 nt, Artificial Sequence
  Description of Artificial Sequence: Synthetic oligonucleotide
  Antisense Strand to SEQ ID NO: 493419
ucuuaaaccaucuauaagu

SEQ ID NO: 493421 - RNA, 19 nt, Artificial Sequence
  Description of Artificial Sequence: Synthetic oligonucleotide
  Sense strand starting at position 828 of SEQ ID NO: 317470
aaaguaguaguugaugagu

SEQ ID NO: 493422 - RNA, 19 nt, Artificial Sequence
  Description of Artificial Sequence: Synthetic oligonucleotide
  Antisense Strand to SEQ ID NO: 493421
acucaucaacuacuacuuu

SEQ ID NO: 493423 - RNA, 19 nt, Artificial Sequence
  Description of Artificial Sequence: Synthetic oligonucleotide
  Sense strand starting at position 831 of SEQ ID NO: 317470
guaguaguugaugaguaaa

SEQ ID NO: 493424 - RNA, 19 nt, Artificial Sequence
  Description of Artificial Sequence: Synthetic oligonucleotide
  Antisense Strand to SEQ ID NO: 493423
uuuacucaucaacuacuac

SEQ ID NO: 493425 - RNA, 19 nt, Artificial Sequence
  Description of Artificial Sequence: Synthetic oligonucleotide
  Sense strand starting at position 833 of SEQ ID NO: 317470
aguaguugaugaguaaaua

SEQ ID NO: 493426 - RNA, 19 nt, Artificial Sequence
  Description of Artificial Sequence: Synthetic oligonucleotide
  Antisense Strand to SEQ ID NO: 493425
uauuuacucaucaacuacu

SEQ ID NO: 493427 - RNA, 19 nt, Artificial Sequence
  Description of Artificial Sequence: Synthetic oligonucleotide
  Sense strand starting at position 834 of SEQ ID NO: 317470
guaguugaugaguaaauac

SEQ ID NO: 493428 - RNA, 19 nt, Artificial Sequence
  Description of Artificial Sequence: Synthetic oligonucleotide
  Antisense Strand to SEQ ID NO: 493427
guauuuacucaucaacuac

SEQ ID NO: 493429 - RNA, 19 nt, Artificial Sequence
  Description of Artificial Sequence: Synthetic oligonucleotide
  Sense strand starting at position 885 of SEQ ID NO: 317470
agaacaaacucaguaugua

SEQ ID NO: 493430 - RNA, 19 nt, Artificial Sequence
  Description of Artificial Sequence: Synthetic oligonucleotide
  Antisense Strand to SEQ ID NO: 493429
uacauacugaguuuguucu

SEQ ID NO: 493431 - RNA, 19 nt, Artificial Sequence
  Description of Artificial Sequence: Synthetic oligonucleotide
  Sense strand starting at position 888 of SEQ ID NO: 317470
acaaacucaguauguaaau

SEQ ID NO: 493432 - RNA, 19 nt, Artificial Sequence
  Description of Artificial Sequence: Synthetic oligonucleotide
  Antisense Strand to SEQ ID NO: 493431
auuuacauacugaguuugu

SEQ ID NO: 493433 - RNA, 19 nt, Artificial Sequence
  Description of Artificial Sequence: Synthetic oligonucleotide
  Sense strand starting at position 976 of SEQ ID NO: 317470
uuucuucuaucauuggaag

SEQ ID NO: 493434 - RNA, 19 nt, Artificial Sequence
  Description of Artificial Sequence: Synthetic oligonucleotide
  Antisense Strand to SEQ ID NO: 493433
cuuccaaugauagaagaaa

SEQ ID NO: 493435 - RNA, 19 nt, Artificial Sequence
  Description of Artificial Sequence: Synthetic oligonucleotide
  Sense strand starting at position 1303 of SEQ ID NO: 317470
gugugacuugauuaucuca

SEQ ID NO: 493436 - RNA, 19 nt, Artificial Sequence
  Description of Artificial Sequence: Synthetic oligonucleotide
  Antisense Strand to SEQ ID NO: 493435
ugagauaaucaagucacac

SEQ ID NO: 493437 - RNA, 19 nt, Artificial Sequence
  Description of Artificial Sequence: Synthetic oligonucleotide
  Sense strand starting at position 1305 of SEQ ID NO: 317470
gugacuugauuaucucaca

SEQ ID NO: 493438 - RNA, 19 nt, Artificial Sequence
  Description of Artificial Sequence: Synthetic oligonucleotide
  Antisense Strand to SEQ ID NO: 493437
ugugagauaaucaagucac

SEQ ID NO: 493439 - RNA, 19 nt, Artificial Sequence
  Description of Artificial Sequence: Synthetic oligonucleotide
  Sense strand starting at position 1404 of SEQ ID NO: 317470
ucuuaaauguuagcaagaa

SEQ ID NO: 493440 - RNA, 19 nt, Artificial Sequence
  Description of Artificial Sequence: Synthetic oligonucleotide
  Antisense Strand to SEQ ID NO: 493439
uucuugcuaacauuuaaga

SEQ ID NO: 493441 - RNA, 19 nt, Artificial Sequence
  Description of Artificial Sequence: Synthetic oligonucleotide
  Sense strand starting at position 1630 of SEQ ID NO: 317470
cgaaauguugcacaugaga

SEQ ID NO: 493442 - RNA, 19 nt, Artificial Sequence
  Description of Artificial Sequence: Synthetic oligonucleotide
  Antisense Strand to SEQ ID NO: 493441
ucucaugugcaacauuucg

SEQ ID NO: 493443 - RNA, 19 nt, Artificial Sequence
  Description of Artificial Sequence: Synthetic oligonucleotide
  Sense strand starting at position 1788 of SEQ ID NO: 317470
aagaguuucgaugaaguuu

SEQ ID NO: 493444 - RNA, 19 nt, Artificial Sequence
  Description of Artificial Sequence: Synthetic oligonucleotide
  Antisense Strand to SEQ ID NO: 493443
aaacuucaucgaaacucuu

SEQ ID NO: 493445 - RNA, 19 nt, Artificial Sequence
  Description of Artificial Sequence: Synthetic oligonucleotide
  Sense strand starting at position 2022 of SEQ ID NO: 317470
ugugaucuauaguugagga

SEQ ID NO: 493446 - RNA, 19 nt, Artificial Sequence
  Description of Artificial Sequence: Synthetic oligonucleotide
  Antisense Strand to SEQ ID NO: 493445
uccucaacuauagaucaca

SEQ ID NO: 493447 - RNA, 19 nt, Artificial Sequence
  Description of Artificial Sequence: Synthetic oligonucleotide
  Sense strand starting at position 2023 of SEQ ID NO: 317470
gugaucuauaguugaggac

SEQ ID NO: 493448 - RNA, 19 nt, Artificial Sequence
  Description of Artificial Sequence: Synthetic oligonucleotide
  Antisense Strand to SEQ ID NO: 493447
guccucaacuauagaucac

SEQ ID NO: 493449 - RNA, 19 nt, Artificial Sequence
  Description of Artificial Sequence: Synthetic oligonucleotide
  Sense strand starting at position 2268 of SEQ ID NO: 317470
ucaagaggauuugacacuu

SEQ ID NO: 493450 - RNA, 19 nt, Artificial Sequence
  Description of Artificial Sequence: Synthetic oligonucleotide
  Antisense Strand to SEQ ID NO: 493449
aagugucaaauccucuuga

SEQ ID NO: 493451 - RNA, 19 nt, Artificial Sequence
  Description of Artificial Sequence: Synthetic oligonucleotide
  Sense strand starting at position 2396 of SEQ ID NO: 317470
ucaucuguaugauuaaaug

SEQ ID NO: 493452 - RNA, 19 nt, Artificial Sequence
  Description of Artificial Sequence: Synthetic oligonucleotide
  Antisense Strand to SEQ ID NO: 493451
cauuuaaucauacagauga

SEQ ID NO: 493453 - RNA, 19 nt, Artificial Sequence
  Description of Artificial Sequence: Synthetic oligonucleotide
  Sense strand starting at position 2437 of SEQ ID NO: 317470
aacagagcauaauugagua

SEQ ID NO: 493454 - RNA, 19 nt, Artificial Sequence
  Description of Artificial Sequence: Synthetic oligonucleotide
  Antisense Strand to SEQ ID NO: 493453
uacucaauuaugcucuguu

SEQ ID NO: 493455 - RNA, 19 nt, Artificial Sequence
  Description of Artificial Sequence: Synthetic oligonucleotide
  Sense strand starting at position 2441 of SEQ ID NO: 317470
gagcauaauugaguagaug

SEQ ID NO: 493456 - RNA, 19 nt, Artificial Sequence
  Description of Artificial Sequence: Synthetic oligonucleotide
  Antisense Strand to SEQ ID NO: 493455
caucuacucaauuaugcuc

SEQ ID NO: 493457 - RNA, 19 nt, Artificial Sequence
  Description of Artificial Sequence: Synthetic oligonucleotide
  Sense strand starting at position 2450 of SEQ ID NO: 317470
ugaguagaugcacaaagua

SEQ ID NO: 493458 - RNA, 19 nt, Artificial Sequence
  Description of Artificial Sequence: Synthetic oligonucleotide
  Antisense Strand to SEQ ID NO: 493457
uacuuugugcaucuacuca

SEQ ID NO: 493459 - RNA, 19 nt, Artificial Sequence
  Description of Artificial Sequence: Synthetic oligonucleotide
  Sense strand starting at position 2598 of SEQ ID NO: 317470
aggguguuaggguaaggau

SEQ ID NO: 493460 - RNA, 19 nt, Artificial Sequence
  Description of Artificial Sequence: Synthetic oligonucleotide
  Antisense Strand to SEQ ID NO: 493459
auccuuacccuaacacccu

SEQ ID NO: 493461 - RNA, 19 nt, Artificial Sequence
  Description of Artificial Sequence: Synthetic oligonucleotide
  Sense strand starting at position 2680 of SEQ ID NO: 317470
ugcaaagaagcaggauaua

SEQ ID NO: 493462 - RNA, 19 nt, Artificial Sequence
  Description of Artificial Sequence: Synthetic oligonucleotide
  Antisense Strand to SEQ ID NO: 493461
uauauccugcuucuuugca

SEQ ID NO: 493463 - RNA, 19 nt, Artificial Sequence
  Description of Artificial Sequence: Synthetic oligonucleotide
  Sense strand starting at position 2693 of SEQ ID NO: 317470
gauauaaauuuggaagguu

SEQ ID NO: 493464 - RNA, 19 nt, Artificial Sequence
  Description of Artificial Sequence: Synthetic oligonucleotide
  Antisense Strand to SEQ ID NO: 493463
aaccuuccaaauuuauauc

SEQ ID NO: 493465 - RNA, 19 nt, Artificial Sequence
  Description of Artificial Sequence: Synthetic oligonucleotide
  Sense strand starting at position 2829 of SEQ ID NO: 317470
aauuguguagcuuaaggga

SEQ ID NO: 493466 - RNA, 19 nt, Artificial Sequence
  Description of Artificial Sequence: Synthetic oligonucleotide
  Antisense Strand to SEQ ID NO: 493465
ucccuuaagcuacacaauu

SEQ ID NO: 493467 - RNA, 19 nt, Artificial Sequence
  Description of Artificial Sequence: Synthetic oligonucleotide
  Sense strand starting at position 2871 of SEQ ID NO: 317470
agucacauguaucuacuaa

SEQ ID NO: 493468 - RNA, 19 nt, Artificial Sequence
  Description of Artificial Sequence: Synthetic oligonucleotide
  Antisense Strand to SEQ ID NO: 493467
uuaguagauacaugugacu

SEQ ID NO: 493469 - RNA, 19 nt, Artificial Sequence
  Description of Artificial Sequence: Synthetic oligonucleotide
  Sense strand starting at position 2910 of SEQ ID NO: 317470
ggaggucuuagaggacucu

SEQ ID NO: 493470 - RNA, 19 nt, Artificial Sequence
  Description of Artificial Sequence: Synthetic oligonucleotide
  Antisense Strand to SEQ ID NO: 493469
agaguccucuaagaccucc

SEQ ID NO: 493471 - RNA, 19 nt, Artificial Sequence
  Description of Artificial Sequence: Synthetic oligonucleotide
  Sense strand starting at position 3061 of SEQ ID NO: 317470
acaggaauaagugguuacu

SEQ ID NO: 493472 - RNA, 19 nt, Artificial Sequence
  Description of Artificial Sequence: Synthetic oligonucleotide
  Antisense Strand to SEQ ID NO: 493471
aguaaccacuuauuccugu

SEQ ID NO: 493473 - RNA, 19 nt, Artificial Sequence
  Description of Artificial Sequence: Synthetic oligonucleotide
  Sense strand starting at position 3063 of SEQ ID NO: 317470
aggaauaagugguuacuua

SEQ ID NO: 493474 - RNA, 19 nt, Artificial Sequence
  Description of Artificial Sequence: Synthetic oligonucleotide
  Antisense Strand to SEQ ID NO: 493473
uaaguaaccacuuauuccu

SEQ ID NO: 493475 - RNA, 19 nt, Artificial Sequence
  Description of Artificial Sequence: Synthetic oligonucleotide
  Sense strand starting at position 3067 of SEQ ID NO: 317470
auaagugguuacuuauaug

SEQ ID NO: 493476 - RNA, 19 nt, Artificial Sequence
  Description of Artificial Sequence: Synthetic oligonucleotide
  Antisense Strand to SEQ ID NO: 493475
cauauaaguaaccacuuau

SEQ ID NO: 493477 - RNA, 19 nt, Artificial Sequence
  Description of Artificial Sequence: Synthetic oligonucleotide
  Sense strand starting at position 3549 of SEQ ID NO: 317470
uguagaugauucuuugaau

SEQ ID NO: 493478 - RNA, 19 nt, Artificial Sequence
  Description of Artificial Sequence: Synthetic oligonucleotide
  Antisense Strand to SEQ ID NO: 493477
auucaaagaaucaucuaca

SEQ ID NO: 493479 - RNA, 19 nt, Artificial Sequence
  Description of Artificial Sequence: Synthetic oligonucleotide
  Sense strand starting at position 3550 of SEQ ID NO: 317470
guagaugauucuuugaaug

SEQ ID NO: 493480 - RNA, 19 nt, Artificial Sequence
  Description of Artificial Sequence: Synthetic oligonucleotide
  Antisense Strand to SEQ ID NO: 493479
cauucaaagaaucaucuac

SEQ ID NO: 493481 - RNA, 19 nt, Artificial Sequence
  Description of Artificial Sequence: Synthetic oligonucleotide
  Sense strand starting at position 3594 of SEQ ID NO: 317470
uuugucauccuacaguuga

SEQ ID NO: 493482 - RNA, 19 nt, Artificial Sequence
  Description of Artificial Sequence: Synthetic oligonucleotide
  Antisense Strand to SEQ ID NO: 493481
ucaacuguaggaugacaaa

SEQ ID NO: 493483 - RNA, 19 nt, Artificial Sequence
  Description of Artificial Sequence: Synthetic oligonucleotide
  Sense strand starting at position 3775 of SEQ ID NO: 317470
ucuuguaugucuuuauuuc

SEQ ID NO: 493484 - RNA, 19 nt, Artificial Sequence
  Description of Artificial Sequence: Synthetic oligonucleotide
  Antisense Strand to SEQ ID NO: 493483
gaaauaaagacauacaaga

SEQ ID NO: 493485 - RNA, 19 nt, Artificial Sequence
  Description of Artificial Sequence: Synthetic oligonucleotide
  Sense strand starting at position 3795 of SEQ ID NO: 317470
uggaauacucagcagcaaa

SEQ ID NO: 493486 - RNA, 19 nt, Artificial Sequence
  Description of Artificial Sequence: Synthetic oligonucleotide
  Antisense Strand to SEQ ID NO: 493485
uuugcugcugaguauucca

SEQ ID NO: 493487 - RNA, 19 nt, Artificial Sequence
  Description of Artificial Sequence: Synthetic oligonucleotide
  Sense strand starting at position 3831 of SEQ ID NO: 317470
gguacuuacucaucauaug

SEQ ID NO: 493488 - RNA, 19 nt, Artificial Sequence
  Description of Artificial Sequence: Synthetic oligonucleotide
  Antisense Strand to SEQ ID NO: 493487
cauaugaugaguaaguacc

SEQ ID NO: 493489 - RNA, 19 nt, Artificial Sequence
  Description of Artificial Sequence: Synthetic oligonucleotide
  Sense strand starting at position 3832 of SEQ ID NO: 317470
guacuuacucaucauaugu

SEQ ID NO: 493490 - RNA, 19 nt, Artificial Sequence
  Description of Artificial Sequence: Synthetic oligonucleotide
  Antisense Strand to SEQ ID NO: 493489
acauaugaugaguaaguac

SEQ ID NO: 493491 - RNA, 19 nt, Artificial Sequence
  Description of Artificial Sequence: Synthetic oligonucleotide
  Sense strand starting at position 4 of SEQ ID NO: 317471
gaugucgaugccuauaaau

SEQ ID NO: 493492 - RNA, 19 nt, Artificial Sequence
  Description of Artificial Sequence: Synthetic oligonucleotide
  Antisense Strand to SEQ ID NO: 493491
auuuauaggcaucgacauc

SEQ ID NO: 493493 - RNA, 19 nt, Artificial Sequence
  Description of Artificial Sequence: Synthetic oligonucleotide
  Sense strand starting at position 6 of SEQ ID NO: 317471
ugucgaugccuauaaauuc

SEQ ID NO: 493494 - RNA, 19 nt, Artificial Sequence
  Description of Artificial Sequence: Synthetic oligonucleotide
  Antisense Strand to SEQ ID NO: 493493
gaauuuauaggcaucgaca

SEQ ID NO: 493495 - RNA, 19 nt, Artificial Sequence
  Description of Artificial Sequence: Synthetic oligonucleotide
  Sense strand starting at position 355 of SEQ ID NO: 317471
ggagaaggcuauccgaaau

SEQ ID NO: 493496 - RNA, 19 nt, Artificial Sequence
  Description of Artificial Sequence: Synthetic oligonucleotide
  Antisense Strand to SEQ ID NO: 493495
auuucggauagccuucucc

SEQ ID NO: 493497 - RNA, 19 nt, Artificial Sequence
  Description of Artificial Sequence: Synthetic oligonucleotide
  Sense strand starting at position 383 of SEQ ID NO: 317471
aaggaaggagcaugcuauu

SEQ ID NO: 493498 - RNA, 19 nt, Artificial Sequence
  Description of Artificial Sequence: Synthetic oligonucleotide
  Antisense Strand to SEQ ID NO: 493497
aauagcaugcuccuuccuu

SEQ ID NO: 493499 - RNA, 19 nt, Artificial Sequence
  Description of Artificial Sequence: Synthetic oligonucleotide
  Sense strand starting at position 469 of SEQ ID NO: 317471
gucuacuuauauccuagga

SEQ ID NO: 493500 - RNA, 19 nt, Artificial Sequence
  Description of Artificial Sequence: Synthetic oligonucleotide
  Antisense Strand to SEQ ID NO: 493499
uccuaggauauaaguagac

SEQ ID NO: 493501 - RNA, 19 nt, Artificial Sequence
  Description of Artificial Sequence: Synthetic oligonucleotide
  Sense strand starting at position 711 of SEQ ID NO: 317471
agagauuauuugcaucuau

SEQ ID NO: 493502 - RNA, 19 nt, Artificial Sequence
  Description of Artificial Sequence: Synthetic oligonucleotide
  Antisense Strand to SEQ ID NO: 493501
auagaugcaaauaaucucu

SEQ ID NO: 493503 - RNA, 19 nt, Artificial Sequence
  Description of Artificial Sequence: Synthetic oligonucleotide
  Sense strand starting at position 725 of SEQ ID NO: 317471
ucuauucugcagcaggauu

SEQ ID NO: 493504 - RNA, 19 nt, Artificial Sequence
  Description of Artificial Sequence: Synthetic oligonucleotide
  Antisense Strand to SEQ ID NO: 493503
aauccugcugcagaauaga

SEQ ID NO: 493505 - RNA, 19 nt, Artificial Sequence
  Description of Artificial Sequence: Synthetic oligonucleotide
  Sense strand starting at position 868 of SEQ ID NO: 317471
auagauaaggcuuguaauc

SEQ ID NO: 493506 - RNA, 19 nt, Artificial Sequence
  Description of Artificial Sequence: Synthetic oligonucleotide
  Antisense Strand to SEQ ID NO: 493505
gauuacaagccuuaucuau

SEQ ID NO: 493507 - RNA, 19 nt, Artificial Sequence
  Description of Artificial Sequence: Synthetic oligonucleotide
  Sense strand starting at position 893 of SEQ ID NO: 317471
guauguuaaguuuauugga

SEQ ID NO: 493508 - RNA, 19 nt, Artificial Sequence
  Description of Artificial Sequence: Synthetic oligonucleotide
  Antisense Strand to SEQ ID NO: 493507
uccaauaaacuuaacauac

SEQ ID NO: 493509 - RNA, 19 nt, Artificial Sequence
  Description of Artificial Sequence: Synthetic oligonucleotide
  Sense strand starting at position 906 of SEQ ID NO: 317471
auuggaagcuuucuugaag

SEQ ID NO: 493510 - RNA, 19 nt, Artificial Sequence
  Description of Artificial Sequence: Synthetic oligonucleotide
  Antisense Strand to SEQ ID NO: 493509
cuucaagaaagcuuccaau

SEQ ID NO: 493511 - RNA, 19 nt, Artificial Sequence
  Description of Artificial Sequence: Synthetic oligonucleotide
  Sense strand starting at position 974 of SEQ ID NO: 317471
accaucauugguuguaaag

SEQ ID NO: 493512 - RNA, 19 nt, Artificial Sequence
  Description of Artificial Sequence: Synthetic oligonucleotide
  Antisense Strand to SEQ ID NO: 493511
cuuuacaaccaaugauggu

SEQ ID NO: 493513 - RNA, 19 nt, Artificial Sequence
  Description of Artificial Sequence: Synthetic oligonucleotide
  Sense strand starting at position 1310 of SEQ ID NO: 317471
guuacugauuaguuucuaa

SEQ ID NO: 493514 - RNA, 19 nt, Artificial Sequence
  Description of Artificial Sequence: Synthetic oligonucleotide
  Antisense Strand to SEQ ID NO: 493513
uuagaaacuaaucaguaac

SEQ ID NO: 493515 - RNA, 19 nt, Artificial Sequence
  Description of Artificial Sequence: Synthetic oligonucleotide
  Sense strand starting at position 1320 of SEQ ID NO: 317471
aguuucuaacuuugaaaga

SEQ ID NO: 493516 - RNA, 19 nt, Artificial Sequence
  Description of Artificial Sequence: Synthetic oligonucleotide
  Antisense Strand to SEQ ID NO: 493515
ucuuucaaaguuagaaacu

SEQ ID NO: 493517 - RNA, 19 nt, Artificial Sequence
  Description of Artificial Sequence: Synthetic oligonucleotide
  Sense strand starting at position 1354 of SEQ ID NO: 317471
caugacuuaucuuuggaga

SEQ ID NO: 493518 - RNA, 19 nt, Artificial Sequence
  Description of Artificial Sequence: Synthetic oligonucleotide
  Antisense Strand to SEQ ID NO: 493517
ucuccaaagauaagucaug

SEQ ID NO: 493519 - RNA, 19 nt, Artificial Sequence
  Description of Artificial Sequence: Synthetic oligonucleotide
  Sense strand starting at position 1385 of SEQ ID NO: 317471
ccaggcauaucaguggauu

SEQ ID NO: 493520 - RNA, 19 nt, Artificial Sequence
  Description of Artificial Sequence: Synthetic oligonucleotide
  Antisense Strand to SEQ ID NO: 493519
aauccacugauaugccugg

SEQ ID NO: 493521 - RNA, 19 nt, Artificial Sequence
  Description of Artificial Sequence: Synthetic oligonucleotide
  Sense strand starting at position 1568 of SEQ ID NO: 317471
aguguuucucaauaagaca

SEQ ID NO: 493522 - RNA, 19 nt, Artificial Sequence
  Description of Artificial Sequence: Synthetic oligonucleotide
  Antisense Strand to SEQ ID NO: 493521
ugucuuauugagaaacacu

SEQ ID NO: 493523 - RNA, 19 nt, Artificial Sequence
  Description of Artificial Sequence: Synthetic oligonucleotide
  Sense strand starting at position 1672 of SEQ ID NO: 317471
ccuuuacauuguguagaaa

SEQ ID NO: 493524 - RNA, 19 nt, Artificial Sequence
  Description of Artificial Sequence: Synthetic oligonucleotide
  Antisense Strand to SEQ ID NO: 493523
uuucuacacaauguaaagg

SEQ ID NO: 493525 - RNA, 19 nt, Artificial Sequence
  Description of Artificial Sequence: Synthetic oligonucleotide
  Sense strand starting at position 1673 of SEQ ID NO: 317471
cuuuacauuguguagaaac

SEQ ID NO: 493526 - RNA, 19 nt, Artificial Sequence
  Description of Artificial Sequence: Synthetic oligonucleotide
  Antisense Strand to SEQ ID NO: 493525
guuucuacacaauguaaag

SEQ ID NO: 493527 - RNA, 19 nt, Artificial Sequence
  Description of Artificial Sequence: Synthetic oligonucleotide
  Sense strand starting at position 2008 of SEQ ID NO: 317471
augacuuugugggcugaau

SEQ ID NO: 493528 - RNA, 19 nt, Artificial Sequence
  Description of Artificial Sequence: Synthetic oligonucleotide
  Antisense Strand to SEQ ID NO: 493527
auucagcccacaaagucau

SEQ ID NO: 493529 - RNA, 19 nt, Artificial Sequence
  Description of Artificial Sequence: Synthetic oligonucleotide
  Sense strand starting at position 2010 of SEQ ID NO: 317471
gacuuugugggcugaauug

SEQ ID NO: 493530 - RNA, 19 nt, Artificial Sequence
  Description of Artificial Sequence: Synthetic oligonucleotide
  Antisense Strand to SEQ ID NO: 493529
caauucagcccacaaaguc

SEQ ID NO: 493531 - RNA, 19 nt, Artificial Sequence
  Description of Artificial Sequence: Synthetic oligonucleotide
  Sense strand starting at position 2020 of SEQ ID NO: 317471
gcugaauugaagugaggaa

SEQ ID NO: 493532 - RNA, 19 nt, Artificial Sequence
  Description of Artificial Sequence: Synthetic oligonucleotide
  Antisense Strand to SEQ ID NO: 493531
uuccucacuucaauucagc

SEQ ID NO: 493533 - RNA, 19 nt, Artificial Sequence
  Description of Artificial Sequence: Synthetic oligonucleotide
  Sense strand starting at position 2228 of SEQ ID NO: 317471
cguauaaauuuggaaagaa

SEQ ID NO: 493534 - RNA, 19 nt, Artificial Sequence
  Description of Artificial Sequence: Synthetic oligonucleotide
  Antisense Strand to SEQ ID NO: 493533
uucuuuccaaauuuauacg

SEQ ID NO: 493535 - RNA, 19 nt, Artificial Sequence
  Description of Artificial Sequence: Synthetic oligonucleotide
  Sense strand starting at position 2268 of SEQ ID NO: 317471
accuucucuuguuuacaga

SEQ ID NO: 493536 - RNA, 19 nt, Artificial Sequence
  Description of Artificial Sequence: Synthetic oligonucleotide
  Antisense Strand to SEQ ID NO: 493535
ucuguaaacaagagaaggu

SEQ ID NO: 493537 - RNA, 19 nt, Artificial Sequence
  Description of Artificial Sequence: Synthetic oligonucleotide
  Sense strand starting at position 2501 of SEQ ID NO: 317471
uggcaucauucuucuagaa

SEQ ID NO: 493538 - RNA, 19 nt, Artificial Sequence
  Description of Artificial Sequence: Synthetic oligonucleotide
  Antisense Strand to SEQ ID NO: 493537
uucuagaagaaugaugcca

SEQ ID NO: 493539 - RNA, 19 nt, Artificial Sequence
  Description of Artificial Sequence: Synthetic oligonucleotide
  Sense strand starting at position 2687 of SEQ ID NO: 317471
uuguguuagguauaaucuc

SEQ ID NO: 493540 - RNA, 19 nt, Artificial Sequence
  Description of Artificial Sequence: Synthetic oligonucleotide
  Antisense Strand to SEQ ID NO: 493539
gagauuauaccuaacacaa

SEQ ID NO: 493541 - RNA, 19 nt, Artificial Sequence
  Description of Artificial Sequence: Synthetic oligonucleotide
  Sense strand starting at position 2826 of SEQ ID NO: 317471
gguugugaauucuuaacag

SEQ ID NO: 493542 - RNA, 19 nt, Artificial Sequence
  Description of Artificial Sequence: Synthetic oligonucleotide
  Antisense Strand to SEQ ID NO: 493541
cuguuaagaauucacaacc

SEQ ID NO: 493543 - RNA, 19 nt, Artificial Sequence
  Description of Artificial Sequence: Synthetic oligonucleotide
  Sense strand starting at position 3098 of SEQ ID NO: 317471
caagaaaccucugugcuga

SEQ ID NO: 493544 - RNA, 19 nt, Artificial Sequence
  Description of Artificial Sequence: Synthetic oligonucleotide
  Antisense Strand to SEQ ID NO: 493543
ucagcacagagguuucuug

SEQ ID NO: 493545 - RNA, 19 nt, Artificial Sequence
  Description of Artificial Sequence: Synthetic oligonucleotide
  Sense strand starting at position 3166 of SEQ ID NO: 317471
cuaggucacuuauccugau

SEQ ID NO: 493546 - RNA, 19 nt, Artificial Sequence
  Description of Artificial Sequence: Synthetic oligonucleotide
  Antisense Strand to SEQ ID NO: 493545
aucaggauaagugaccuag

SEQ ID NO: 493547 - RNA, 19 nt, Artificial Sequence
  Description of Artificial Sequence: Synthetic oligonucleotide
  Sense strand starting at position 3170 of SEQ ID NO: 317471
gucacuuauccugaugaau

SEQ ID NO: 493548 - RNA, 19 nt, Artificial Sequence
  Description of Artificial Sequence: Synthetic oligonucleotide
  Antisense Strand to SEQ ID NO: 493547
auucaucaggauaagugac

SEQ ID NO: 493549 - RNA, 19 nt, Artificial Sequence
  Description of Artificial Sequence: Synthetic oligonucleotide
  Sense strand starting at position 3181 of SEQ ID NO: 317471
ugaugaauagcauggauau

SEQ ID NO: 493550 - RNA, 19 nt, Artificial Sequence
  Description of Artificial Sequence: Synthetic oligonucleotide
  Antisense Strand to SEQ ID NO: 493549
auauccaugcuauucauca

SEQ ID NO: 493551 - RNA, 19 nt, Artificial Sequence
  Description of Artificial Sequence: Synthetic oligonucleotide
  Sense strand starting at position 3182 of SEQ ID NO: 317471
gaugaauagcauggauauu

SEQ ID NO: 493552 - RNA, 19 nt, Artificial Sequence
  Description of Artificial Sequence: Synthetic oligonucleotide
  Antisense Strand to SEQ ID NO: 493551
aauauccaugcuauucauc

SEQ ID NO: 493553 - RNA, 19 nt, Artificial Sequence
  Description of Artificial Sequence: Synthetic oligonucleotide
  Sense strand starting at position 3307 of SEQ ID NO: 317471
ggguuaugagauuaagcug

SEQ ID NO: 493554 - RNA, 19 nt, Artificial Sequence
  Description of Artificial Sequence: Synthetic oligonucleotide
  Antisense Strand to SEQ ID NO: 493553
cagcuuaaucucauaaccc

SEQ ID NO: 493555 - RNA, 19 nt, Artificial Sequence
  Description of Artificial Sequence: Synthetic oligonucleotide
  Sense strand starting at position 3315 of SEQ ID NO: 317471
agauuaagcuguucuuaua

SEQ ID NO: 493556 - RNA, 19 nt, Artificial Sequence
  Description of Artificial Sequence: Synthetic oligonucleotide
  Antisense Strand to SEQ ID NO: 493555
uauaagaacagcuuaaucu

SEQ ID NO: 493557 - RNA, 19 nt, Artificial Sequence
  Description of Artificial Sequence: Synthetic oligonucleotide
  Sense strand starting at position 3347 of SEQ ID NO: 317471
agugaaaucucugccaaug

SEQ ID NO: 493558 - RNA, 19 nt, Artificial Sequence
  Description of Artificial Sequence: Synthetic oligonucleotide
  Antisense Strand to SEQ ID NO: 493557
cauuggcagagauuucacu

SEQ ID NO: 493559 - RNA, 19 nt, Artificial Sequence
  Description of Artificial Sequence: Synthetic oligonucleotide
  Sense strand starting at position 3471 of SEQ ID NO: 317471
guaacuuugggccaagacu

SEQ ID NO: 493560 - RNA, 19 nt, Artificial Sequence
  Description of Artificial Sequence: Synthetic oligonucleotide
  Antisense Strand to SEQ ID NO: 493559
agucuuggcccaaaguuac

SEQ ID NO: 493561 - RNA, 19 nt, Artificial Sequence
  Description of Artificial Sequence: Synthetic oligonucleotide
  Sense strand starting at position 3693 of SEQ ID NO: 317471
uuaagagauuacgcauaug

SEQ ID NO: 493562 - RNA, 19 nt, Artificial Sequence
  Description of Artificial Sequence: Synthetic oligonucleotide
  Antisense Strand to SEQ ID NO: 493561
cauaugcguaaucucuuaa

SEQ ID NO: 493563 - RNA, 19 nt, Artificial Sequence
  Description of Artificial Sequence: Synthetic oligonucleotide
  Sense strand starting at position 3696 of SEQ ID NO: 317471
agagauuacgcauauguaa

SEQ ID NO: 493564 - RNA, 19 nt, Artificial Sequence
  Description of Artificial Sequence: Synthetic oligonucleotide
  Antisense Strand to SEQ ID NO: 493563
uuacauaugcguaaucucu

SEQ ID NO: 493565 - RNA, 19 nt, Artificial Sequence
  Description of Artificial Sequence: Synthetic oligonucleotide
  Sense strand starting at position 3699 of SEQ ID NO: 317471
gauuacgcauauguaaaua

SEQ ID NO: 493566 - RNA, 19 nt, Artificial Sequence
  Description of Artificial Sequence: Synthetic oligonucleotide
  Antisense Strand to SEQ ID NO: 493565
uauuuacauaugcguaauc

SEQ ID NO: 493567 - RNA, 19 nt, Artificial Sequence
  Description of Artificial Sequence: Synthetic oligonucleotide
  Sense strand starting at position 3704 of SEQ ID NO: 317471
cgcauauguaaauaaagga

SEQ ID NO: 493568 - RNA, 19 nt, Artificial Sequence
  Description of Artificial Sequence: Synthetic oligonucleotide
  Antisense Strand to SEQ ID NO: 493567
uccuuuauuuacauaugcg

SEQ ID NO: 493569 - RNA, 19 nt, Artificial Sequence
  Description of Artificial Sequence: Synthetic oligonucleotide
  Sense strand starting at position 3853 of SEQ ID NO: 317471
aaauuugaauggcaaggaa

SEQ ID NO: 493570 - RNA, 19 nt, Artificial Sequence
  Description of Artificial Sequence: Synthetic oligonucleotide
  Antisense Strand to SEQ ID NO: 493569
uuccuugccauucaaauuu

SEQ ID NO: 493571 - RNA, 19 nt, Artificial Sequence
  Description of Artificial Sequence: Synthetic oligonucleotide
  Sense strand starting at position 130 of SEQ ID NO: 317472
aagugaggucuugagaagu

SEQ ID NO: 493572 - RNA, 19 nt, Artificial Sequence
  Description of Artificial Sequence: Synthetic oligonucleotide
  Antisense Strand to SEQ ID NO: 493571
acuucucaagaccucacuu

SEQ ID NO: 493573 - RNA, 19 nt, Artificial Sequence
  Description of Artificial Sequence: Synthetic oligonucleotide
  Sense strand starting at position 280 of SEQ ID NO: 317472
acuagaucccuugggcaaa

SEQ ID NO: 493574 - RNA, 19 nt, Artificial Sequence
  Description of Artificial Sequence: Synthetic oligonucleotide
  Antisense Strand to SEQ ID NO: 493573
uuugcccaagggaucuagu

SEQ ID NO: 493575 - RNA, 19 nt, Artificial Sequence
  Description of Artificial Sequence: Synthetic oligonucleotide
  Sense strand starting at position 940 of SEQ ID NO: 317472
cuaucaugauggguuuaua

SEQ ID NO: 493576 - RNA, 19 nt, Artificial Sequence
  Description of Artificial Sequence: Synthetic oligonucleotide
  Antisense Strand to SEQ ID NO: 493575
uauaaacccaucaugauag

SEQ ID NO: 493577 - RNA, 19 nt, Artificial Sequence
  Description of Artificial Sequence: Synthetic oligonucleotide
  Sense strand starting at position 949 of SEQ ID NO: 317472
uggguuuauaugggagauu

SEQ ID NO: 493578 - RNA, 19 nt, Artificial Sequence
  Description of Artificial Sequence: Synthetic oligonucleotide
  Antisense Strand to SEQ ID NO: 493577
aaucucccauauaaaccca

SEQ ID NO: 493579 - RNA, 19 nt, Artificial Sequence
  Description of Artificial Sequence: Synthetic oligonucleotide
  Sense strand starting at position 950 of SEQ ID NO: 317472
ggguuuauaugggagauuu

SEQ ID NO: 493580 - RNA, 19 nt, Artificial Sequence
  Description of Artificial Sequence: Synthetic oligonucleotide
  Antisense Strand to SEQ ID NO: 493579
aaaucucccauauaaaccc

SEQ ID NO: 493581 - RNA, 19 nt, Artificial Sequence
  Description of Artificial Sequence: Synthetic oligonucleotide
  Sense strand starting at position 1046 of SEQ ID NO: 317472
uuaagagugccagagccua

SEQ ID NO: 493582 - RNA, 19 nt, Artificial Sequence
  Description of Artificial Sequence: Synthetic oligonucleotide
  Antisense Strand to SEQ ID NO: 493581
uaggcucuggcacucuuaa

SEQ ID NO: 493583 - RNA, 19 nt, Artificial Sequence
  Description of Artificial Sequence: Synthetic oligonucleotide
  Sense strand starting at position 1067 of SEQ ID NO: 317472
ggcuuuaaguauuuagguu

SEQ ID NO: 493584 - RNA, 19 nt, Artificial Sequence
  Description of Artificial Sequence: Synthetic oligonucleotide
  Antisense Strand to SEQ ID NO: 493583
aaccuaaauacuuaaagcc

SEQ ID NO: 493585 - RNA, 19 nt, Artificial Sequence
  Description of Artificial Sequence: Synthetic oligonucleotide
  Sense strand starting at position 1148 of SEQ ID NO: 317472
aaacaucagucagugcaga

SEQ ID NO: 493586 - RNA, 19 nt, Artificial Sequence
  Description of Artificial Sequence: Synthetic oligonucleotide
  Antisense Strand to SEQ ID NO: 493585
ucugcacugacugauguuu

SEQ ID NO: 493587 - RNA, 19 nt, Artificial Sequence
  Description of Artificial Sequence: Synthetic oligonucleotide
  Sense strand starting at position 1149 of SEQ ID NO: 317472
aacaucagucagugcagaa

SEQ ID NO: 493588 - RNA, 19 nt, Artificial Sequence
  Description of Artificial Sequence: Synthetic oligonucleotide
  Antisense Strand to SEQ ID NO: 493587
uucugcacugacugauguu

SEQ ID NO: 493589 - RNA, 19 nt, Artificial Sequence
  Description of Artificial Sequence: Synthetic oligonucleotide
  Sense strand starting at position 1163 of SEQ ID NO: 317472
cagaacaugugggaaauuu

SEQ ID NO: 493590 - RNA, 19 nt, Artificial Sequence
  Description of Artificial Sequence: Synthetic oligonucleotide
  Antisense Strand to SEQ ID NO: 493589
aaauuucccacauguucug

SEQ ID NO: 493591 - RNA, 19 nt, Artificial Sequence
  Description of Artificial Sequence: Synthetic oligonucleotide
  Sense strand starting at position 1222 of SEQ ID NO: 317472
cuagacuuagcacaaguuu

SEQ ID NO: 493592 - RNA, 19 nt, Artificial Sequence
  Description of Artificial Sequence: Synthetic oligonucleotide
  Antisense Strand to SEQ ID NO: 493591
aaacuugugcuaagucuag

SEQ ID NO: 493593 - RNA, 19 nt, Artificial Sequence
  Description of Artificial Sequence: Synthetic oligonucleotide
  Sense strand starting at position 1476 of SEQ ID NO: 317472
cuaucauaguuucuauuag

SEQ ID NO: 493594 - RNA, 19 nt, Artificial Sequence
  Description of Artificial Sequence: Synthetic oligonucleotide
  Antisense Strand to SEQ ID NO: 493593
cuaauagaaacuaugauag

SEQ ID NO: 493595 - RNA, 19 nt, Artificial Sequence
  Description of Artificial Sequence: Synthetic oligonucleotide
  Sense strand starting at position 1510 of SEQ ID NO: 317472
cuaguagacucuccucuua

SEQ ID NO: 493596 - RNA, 19 nt, Artificial Sequence
  Description of Artificial Sequence: Synthetic oligonucleotide
  Antisense Strand to SEQ ID NO: 493595
uaagaggagagucuacuag

SEQ ID NO: 493597 - RNA, 19 nt, Artificial Sequence
  Description of Artificial Sequence: Synthetic oligonucleotide
  Sense strand starting at position 1611 of SEQ ID NO: 317472
guaacuaaaugggcuauau

SEQ ID NO: 493598 - RNA, 19 nt, Artificial Sequence
  Description of Artificial Sequence: Synthetic oligonucleotide
  Antisense Strand to SEQ ID NO: 493597
auauagcccauuuaguuac

SEQ ID NO: 493599 - RNA, 19 nt, Artificial Sequence
  Description of Artificial Sequence: Synthetic oligonucleotide
  Sense strand starting at position 2059 of SEQ ID NO: 317472
acaaguuugacagguuuag

SEQ ID NO: 493600 - RNA, 19 nt, Artificial Sequence
  Description of Artificial Sequence: Synthetic oligonucleotide
  Antisense Strand to SEQ ID NO: 493599
cuaaaccugucaaacuugu

SEQ ID NO: 493601 - RNA, 19 nt, Artificial Sequence
  Description of Artificial Sequence: Synthetic oligonucleotide
  Sense strand starting at position 2071 of SEQ ID NO: 317472
gguuuagugagugagguau

SEQ ID NO: 493602 - RNA, 19 nt, Artificial Sequence
  Description of Artificial Sequence: Synthetic oligonucleotide
  Antisense Strand to SEQ ID NO: 493601
auaccucacucacuaaacc

SEQ ID NO: 493603 - RNA, 19 nt, Artificial Sequence
  Description of Artificial Sequence: Synthetic oligonucleotide
  Sense strand starting at position 2093 of SEQ ID NO: 317472
gucuucuagccugauaaga

SEQ ID NO: 493604 - RNA, 19 nt, Artificial Sequence
  Description of Artificial Sequence: Synthetic oligonucleotide
  Antisense Strand to SEQ ID NO: 493603
ucuuaucaggcuagaagac

SEQ ID NO: 493605 - RNA, 19 nt, Artificial Sequence
  Description of Artificial Sequence: Synthetic oligonucleotide
  Sense strand starting at position 2162 of SEQ ID NO: 317472
ugucaauauccgcauagag

SEQ ID NO: 493606 - RNA, 19 nt, Artificial Sequence
  Description of Artificial Sequence: Synthetic oligonucleotide
  Antisense Strand to SEQ ID NO: 493605
cucuaugcggauauugaca

SEQ ID NO: 493607 - RNA, 19 nt, Artificial Sequence
  Description of Artificial Sequence: Synthetic oligonucleotide
  Sense strand starting at position 2164 of SEQ ID NO: 317472
ucaauauccgcauagagaa

SEQ ID NO: 493608 - RNA, 19 nt, Artificial Sequence
  Description of Artificial Sequence: Synthetic oligonucleotide
  Antisense Strand to SEQ ID NO: 493607
uucucuaugcggauauuga

SEQ ID NO: 493609 - RNA, 19 nt, Artificial Sequence
  Description of Artificial Sequence: Synthetic oligonucleotide
  Sense strand starting at position 2179 of SEQ ID NO: 317472
agaagcuccaaguaguaga

SEQ ID NO: 493610 - RNA, 19 nt, Artificial Sequence
  Description of Artificial Sequence: Synthetic oligonucleotide
  Antisense Strand to SEQ ID NO: 493609
ucuacuacuuggagcuucu

SEQ ID NO: 493611 - RNA, 19 nt, Artificial Sequence
  Description of Artificial Sequence: Synthetic oligonucleotide
  Sense strand starting at position 2253 of SEQ ID NO: 317472
gaaguaugauaagcauuga

SEQ ID NO: 493612 - RNA, 19 nt, Artificial Sequence
  Description of Artificial Sequence: Synthetic oligonucleotide
  Antisense Strand to SEQ ID NO: 493611
ucaaugcuuaucauacuuc

SEQ ID NO: 493613 - RNA, 19 nt, Artificial Sequence
  Description of Artificial Sequence: Synthetic oligonucleotide
  Sense strand starting at position 2375 of SEQ ID NO: 317472
gucucuucccuuugaggga

SEQ ID NO: 493614 - RNA, 19 nt, Artificial Sequence
  Description of Artificial Sequence: Synthetic oligonucleotide
  Antisense Strand to SEQ ID NO: 493613
ucccucaaagggaagagac

SEQ ID NO: 493615 - RNA, 19 nt, Artificial Sequence
  Description of Artificial Sequence: Synthetic oligonucleotide
  Sense strand starting at position 2379 of SEQ ID NO: 317472
cuucccuuugagggaauaa

SEQ ID NO: 493616 - RNA, 19 nt, Artificial Sequence
  Description of Artificial Sequence: Synthetic oligonucleotide
  Antisense Strand to SEQ ID NO: 493615
uuauucccucaaagggaag

SEQ ID NO: 493617 - RNA, 19 nt, Artificial Sequence
  Description of Artificial Sequence: Synthetic oligonucleotide
  Sense strand starting at position 2470 of SEQ ID NO: 317472
gggacuuacuuuccuccua

SEQ ID NO: 493618 - RNA, 19 nt, Artificial Sequence
  Description of Artificial Sequence: Synthetic oligonucleotide
  Antisense Strand to SEQ ID NO: 493617
uaggaggaaaguaaguccc

SEQ ID NO: 493619 - RNA, 19 nt, Artificial Sequence
  Description of Artificial Sequence: Synthetic oligonucleotide
  Sense strand starting at position 2645 of SEQ ID NO: 317472
ggaauaacuuuguccaucu

SEQ ID NO: 493620 - RNA, 19 nt, Artificial Sequence
  Description of Artificial Sequence: Synthetic oligonucleotide
  Antisense Strand to SEQ ID NO: 493619
agauggacaaaguuauucc

SEQ ID NO: 493621 - RNA, 19 nt, Artificial Sequence
  Description of Artificial Sequence: Synthetic oligonucleotide
  Sense strand starting at position 2660 of SEQ ID NO: 317472
aucuuagugguaugaauuc

SEQ ID NO: 493622 - RNA, 19 nt, Artificial Sequence
  Description of Artificial Sequence: Synthetic oligonucleotide
  Antisense Strand to SEQ ID NO: 493621
gaauucauaccacuaagau

SEQ ID NO: 493623 - RNA, 19 nt, Artificial Sequence
  Description of Artificial Sequence: Synthetic oligonucleotide
  Sense strand starting at position 2667 of SEQ ID NO: 317472
ugguaugaauucccaguau

SEQ ID NO: 493624 - RNA, 19 nt, Artificial Sequence
  Description of Artificial Sequence: Synthetic oligonucleotide
  Antisense Strand to SEQ ID NO: 493623
auacugggaauucauacca

SEQ ID NO: 493625 - RNA, 19 nt, Artificial Sequence
  Description of Artificial Sequence: Synthetic oligonucleotide
  Sense strand starting at position 2918 of SEQ ID NO: 317472
auuauaaugcucugcaaag

SEQ ID NO: 493626 - RNA, 19 nt, Artificial Sequence
  Description of Artificial Sequence: Synthetic oligonucleotide
  Antisense Strand to SEQ ID NO: 493625
cuuugcagagcauuauaau

SEQ ID NO: 493627 - RNA, 19 nt, Artificial Sequence
  Description of Artificial Sequence: Synthetic oligonucleotide
  Sense strand starting at position 2920 of SEQ ID NO: 317472
uauaaugcucugcaaaggu

SEQ ID NO: 493628 - RNA, 19 nt, Artificial Sequence
  Description of Artificial Sequence: Synthetic oligonucleotide
  Antisense Strand to SEQ ID NO: 493627
accuuugcagagcauuaua

SEQ ID NO: 493629 - RNA, 19 nt, Artificial Sequence
  Description of Artificial Sequence: Synthetic oligonucleotide
  Sense strand starting at position 2983 of SEQ ID NO: 317472
aaugaaacagauugucagu

SEQ ID NO: 493630 - RNA, 19 nt, Artificial Sequence
  Description of Artificial Sequence: Synthetic oligonucleotide
  Antisense Strand to SEQ ID NO: 493629
acugacaaucuguuucauu

SEQ ID NO: 493631 - RNA, 19 nt, Artificial Sequence
  Description of Artificial Sequence: Synthetic oligonucleotide
  Sense strand starting at position 2988 of SEQ ID NO: 317472
aacagauugucaguuugua

SEQ ID NO: 493632 - RNA, 19 nt, Artificial Sequence
  Description of Artificial Sequence: Synthetic oligonucleotide
  Antisense Strand to SEQ ID NO: 493631
uacaaacugacaaucuguu

SEQ ID NO: 493633 - RNA, 19 nt, Artificial Sequence
  Description of Artificial Sequence: Synthetic oligonucleotide
  Sense strand starting at position 2992 of SEQ ID NO: 317472
gauugucaguuuguauaaa

SEQ ID NO: 493634 - RNA, 19 nt, Artificial Sequence
  Description of Artificial Sequence: Synthetic oligonucleotide
  Antisense Strand to SEQ ID NO: 493633
uuuauacaaacugacaauc

SEQ ID NO: 493635 - RNA, 19 nt, Artificial Sequence
  Description of Artificial Sequence: Synthetic oligonucleotide
  Sense strand starting at position 3013 of SEQ ID NO: 317472
ccaacaauaugacagaaga

SEQ ID NO: 493636 - RNA, 19 nt, Artificial Sequence
  Description of Artificial Sequence: Synthetic oligonucleotide
  Antisense Strand to SEQ ID NO: 493635
ucuucugucauauuguugg

SEQ ID NO: 493637 - RNA, 19 nt, Artificial Sequence
  Description of Artificial Sequence: Synthetic oligonucleotide
  Sense strand starting at position 3268 of SEQ ID NO: 317472
uguaguaguauuugugcua

SEQ ID NO: 493638 - RNA, 19 nt, Artificial Sequence
  Description of Artificial Sequence: Synthetic oligonucleotide
  Antisense Strand to SEQ ID NO: 493637
uagcacaaauacuacuaca

SEQ ID NO: 493639 - RNA, 19 nt, Artificial Sequence
  Description of Artificial Sequence: Synthetic oligonucleotide
  Sense strand starting at position 3269 of SEQ ID NO: 317472
guaguaguauuugugcuaa

SEQ ID NO: 493640 - RNA, 19 nt, Artificial Sequence
  Description of Artificial Sequence: Synthetic oligonucleotide
  Antisense Strand to SEQ ID NO: 493639
uuagcacaaauacuacuac

SEQ ID NO: 493641 - RNA, 19 nt, Artificial Sequence
  Description of Artificial Sequence: Synthetic oligonucleotide
  Sense strand starting at position 3271 of SEQ ID NO: 317472
aguaguauuugugcuaauu

SEQ ID NO: 493642 - RNA, 19 nt, Artificial Sequence
  Description of Artificial Sequence: Synthetic oligonucleotide
  Antisense Strand to SEQ ID NO: 493641
aauuagcacaaauacuacu

SEQ ID NO: 493643 - RNA, 19 nt, Artificial Sequence
  Description of Artificial Sequence: Synthetic oligonucleotide
  Sense strand starting at position 3273 of SEQ ID NO: 317472
uaguauuugugcuaauuug

SEQ ID NO: 493644 - RNA, 19 nt, Artificial Sequence
  Description of Artificial Sequence: Synthetic oligonucleotide
  Antisense Strand to SEQ ID NO: 493643
caaauuagcacaaauacua

SEQ ID NO: 493645 - RNA, 19 nt, Artificial Sequence
  Description of Artificial Sequence: Synthetic oligonucleotide
  Sense strand starting at position 3460 of SEQ ID NO: 317472
ggcuuaacugagggaaauu

SEQ ID NO: 493646 - RNA, 19 nt, Artificial Sequence
  Description of Artificial Sequence: Synthetic oligonucleotide
  Antisense Strand to SEQ ID NO: 493645
aauuucccucaguuaagcc

SEQ ID NO: 493647 - RNA, 19 nt, Artificial Sequence
  Description of Artificial Sequence: Synthetic oligonucleotide
  Sense strand starting at position 3953 of SEQ ID NO: 317472
augaauuaccuuugugaaa

SEQ ID NO: 493648 - RNA, 19 nt, Artificial Sequence
  Description of Artificial Sequence: Synthetic oligonucleotide
  Antisense Strand to SEQ ID NO: 493647
uuucacaaagguaauucau

SEQ ID NO: 493649 - RNA, 19 nt, Artificial Sequence
  Description of Artificial Sequence: Synthetic oligonucleotide
  Sense strand starting at position 3972 of SEQ ID NO: 317472
auaggaauguucuuaaccu

SEQ ID NO: 493650 - RNA, 19 nt, Artificial Sequence
  Description of Artificial Sequence: Synthetic oligonucleotide
  Antisense Strand to SEQ ID NO: 493649
agguuaagaacauuccuau

SEQ ID NO: 493651 - RNA, 19 nt, Artificial Sequence
  Description of Artificial Sequence: Synthetic oligonucleotide
  Sense strand starting at position 150 of SEQ ID NO: 317473
cuaucuuucgcagacuacu

SEQ ID NO: 493652 - RNA, 19 nt, Artificial Sequence
  Description of Artificial Sequence: Synthetic oligonucleotide
  Antisense Strand to SEQ ID NO: 493651
aguagucugcgaaagauag

SEQ ID NO: 493653 - RNA, 19 nt, Artificial Sequence
  Description of Artificial Sequence: Synthetic oligonucleotide
  Sense strand starting at position 182 of SEQ ID NO: 317473
uaguuucuuuccugggcaa

SEQ ID NO: 493654 - RNA, 19 nt, Artificial Sequence
  Description of Artificial Sequence: Synthetic oligonucleotide
  Antisense Strand to SEQ ID NO: 493653
uugcccaggaaagaaacua

SEQ ID NO: 493655 - RNA, 19 nt, Artificial Sequence
  Description of Artificial Sequence: Synthetic oligonucleotide
  Sense strand starting at position 183 of SEQ ID NO: 317473
aguuucuuuccugggcaaa

SEQ ID NO: 493656 - RNA, 19 nt, Artificial Sequence
  Description of Artificial Sequence: Synthetic oligonucleotide
  Antisense Strand to SEQ ID NO: 493655
uuugcccaggaaagaaacu

SEQ ID NO: 493657 - RNA, 19 nt, Artificial Sequence
  Description of Artificial Sequence: Synthetic oligonucleotide
  Sense strand starting at position 184 of SEQ ID NO: 317473
guuucuuuccugggcaaac

SEQ ID NO: 493658 - RNA, 19 nt, Artificial Sequence
  Description of Artificial Sequence: Synthetic oligonucleotide
  Antisense Strand to SEQ ID NO: 493657
guuugcccaggaaagaaac

SEQ ID NO: 493659 - RNA, 19 nt, Artificial Sequence
  Description of Artificial Sequence: Synthetic oligonucleotide
  Sense strand starting at position 185 of SEQ ID NO: 317473
uuucuuuccugggcaaacu

SEQ ID NO: 493660 - RNA, 19 nt, Artificial Sequence
  Description of Artificial Sequence: Synthetic oligonucleotide
  Antisense Strand to SEQ ID NO: 493659
aguuugcccaggaaagaaa

SEQ ID NO: 493661 - RNA, 19 nt, Artificial Sequence
  Description of Artificial Sequence: Synthetic oligonucleotide
  Sense strand starting at position 194 of SEQ ID NO: 317473
ugggcaaacuaggauaaua

SEQ ID NO: 493662 - RNA, 19 nt, Artificial Sequence
  Description of Artificial Sequence: Synthetic oligonucleotide
  Antisense Strand to SEQ ID NO: 493661
uauuauccuaguuugccca

SEQ ID NO: 493663 - RNA, 19 nt, Artificial Sequence
  Description of Artificial Sequence: Synthetic oligonucleotide
  Sense strand starting at position 205 of SEQ ID NO: 317473
ggauaauagccaugaauca

SEQ ID NO: 493664 - RNA, 19 nt, Artificial Sequence
  Description of Artificial Sequence: Synthetic oligonucleotide
  Antisense Strand to SEQ ID NO: 493663
ugauucauggcuauuaucc

SEQ ID NO: 493665 - RNA, 19 nt, Artificial Sequence
  Description of Artificial Sequence: Synthetic oligonucleotide
  Sense strand starting at position 241 of SEQ ID NO: 317473
cagagcucacccgaauguu

SEQ ID NO: 493666 - RNA, 19 nt, Artificial Sequence
  Description of Artificial Sequence: Synthetic oligonucleotide
  Antisense Strand to SEQ ID NO: 493665
aacauucgggugagcucug

SEQ ID NO: 493667 - RNA, 19 nt, Artificial Sequence
  Description of Artificial Sequence: Synthetic oligonucleotide
  Sense strand starting at position 307 of SEQ ID NO: 317473
gcuguugugguguuauagu

SEQ ID NO: 493668 - RNA, 19 nt, Artificial Sequence
  Description of Artificial Sequence: Synthetic oligonucleotide
  Antisense Strand to SEQ ID NO: 493667
acuauaacaccacaacagc

SEQ ID NO: 493669 - RNA, 19 nt, Artificial Sequence
  Description of Artificial Sequence: Synthetic oligonucleotide
  Sense strand starting at position 315 of SEQ ID NO: 317473
gguguuauaguuuaucauc

SEQ ID NO: 493670 - RNA, 19 nt, Artificial Sequence
  Description of Artificial Sequence: Synthetic oligonucleotide
  Antisense Strand to SEQ ID NO: 493669
gaugauaaacuauaacacc

SEQ ID NO: 493671 - RNA, 19 nt, Artificial Sequence
  Description of Artificial Sequence: Synthetic oligonucleotide
  Sense strand starting at position 370 of SEQ ID NO: 317473
agaagaaagucaggauuug

SEQ ID NO: 493672 - RNA, 19 nt, Artificial Sequence
  Description of Artificial Sequence: Synthetic oligonucleotide
  Antisense Strand to SEQ ID NO: 493671
caaauccugacuuucuucu

SEQ ID NO: 493673 - RNA, 19 nt, Artificial Sequence
  Description of Artificial Sequence: Synthetic oligonucleotide
  Sense strand starting at position 904 of SEQ ID NO: 317473
ugcucagccuugucucgaa

SEQ ID NO: 493674 - RNA, 19 nt, Artificial Sequence
  Description of Artificial Sequence: Synthetic oligonucleotide
  Antisense Strand to SEQ ID NO: 493673
uucgagacaaggcugagca

SEQ ID NO: 493675 - RNA, 19 nt, Artificial Sequence
  Description of Artificial Sequence: Synthetic oligonucleotide
  Sense strand starting at position 946 of SEQ ID NO: 317473
cgccuugccuccgaaagua

SEQ ID NO: 493676 - RNA, 19 nt, Artificial Sequence
  Description of Artificial Sequence: Synthetic oligonucleotide
  Antisense Strand to SEQ ID NO: 493675
uacuuucggaggcaaggcg

SEQ ID NO: 493677 - RNA, 19 nt, Artificial Sequence
  Description of Artificial Sequence: Synthetic oligonucleotide
  Sense strand starting at position 1005 of SEQ ID NO: 317473
uuguguccuuuaucagaca

SEQ ID NO: 493678 - RNA, 19 nt, Artificial Sequence
  Description of Artificial Sequence: Synthetic oligonucleotide
  Antisense Strand to SEQ ID NO: 493677
ugucugauaaaggacacaa

SEQ ID NO: 493679 - RNA, 19 nt, Artificial Sequence
  Description of Artificial Sequence: Synthetic oligonucleotide
  Sense strand starting at position 1035 of SEQ ID NO: 317473
ugccauugcucccagcaua

SEQ ID NO: 493680 - RNA, 19 nt, Artificial Sequence
  Description of Artificial Sequence: Synthetic oligonucleotide
  Antisense Strand to SEQ ID NO: 493679
uaugcugggagcaauggca

SEQ ID NO: 493681 - RNA, 19 nt, Artificial Sequence
  Description of Artificial Sequence: Synthetic oligonucleotide
  Sense strand starting at position 1292 of SEQ ID NO: 317473
cucggaauguguucccaca

SEQ ID NO: 493682 - RNA, 19 nt, Artificial Sequence
  Description of Artificial Sequence: Synthetic oligonucleotide
  Antisense Strand to SEQ ID NO: 493681
ugugggaacacauuccgag

SEQ ID NO: 493683 - RNA, 19 nt, Artificial Sequence
  Description of Artificial Sequence: Synthetic oligonucleotide
  Sense strand starting at position 1294 of SEQ ID NO: 317473
cggaauguguucccacaca

SEQ ID NO: 493684 - RNA, 19 nt, Artificial Sequence
  Description of Artificial Sequence: Synthetic oligonucleotide
  Antisense Strand to SEQ ID NO: 493683
ugugugggaacacauuccg

SEQ ID NO: 493685 - RNA, 19 nt, Artificial Sequence
  Description of Artificial Sequence: Synthetic oligonucleotide
  Sense strand starting at position 2616 of SEQ ID NO: 317473
ucugaggaguugucggaga

SEQ ID NO: 493686 - RNA, 19 nt, Artificial Sequence
  Description of Artificial Sequence: Synthetic oligonucleotide
  Antisense Strand to SEQ ID NO: 493685
ucuccgacaacuccucaga

SEQ ID NO: 493687 - RNA, 19 nt, Artificial Sequence
  Description of Artificial Sequence: Synthetic oligonucleotide
  Sense strand starting at position 2618 of SEQ ID NO: 317473
ugaggaguugucggagagu

SEQ ID NO: 493688 - RNA, 19 nt, Artificial Sequence
  Description of Artificial Sequence: Synthetic oligonucleotide
  Antisense Strand to SEQ ID NO: 493687
acucuccgacaacuccuca

SEQ ID NO: 493689 - RNA, 19 nt, Artificial Sequence
  Description of Artificial Sequence: Synthetic oligonucleotide
  Sense strand starting at position 2621 of SEQ ID NO: 317473
ggaguugucggagagucga

SEQ ID NO: 493690 - RNA, 19 nt, Artificial Sequence
  Description of Artificial Sequence: Synthetic oligonucleotide
  Antisense Strand to SEQ ID NO: 493689
ucgacucuccgacaacucc

SEQ ID NO: 493691 - RNA, 19 nt, Artificial Sequence
  Description of Artificial Sequence: Synthetic oligonucleotide
  Sense strand starting at position 2663 of SEQ ID NO: 317473
ucaucagccucugauggaa

SEQ ID NO: 493692 - RNA, 19 nt, Artificial Sequence
  Description of Artificial Sequence: Synthetic oligonucleotide
  Antisense Strand to SEQ ID NO: 493691
uuccaucagaggcugauga

SEQ ID NO: 493693 - RNA, 19 nt, Artificial Sequence
  Description of Artificial Sequence: Synthetic oligonucleotide
  Sense strand starting at position 2714 of SEQ ID NO: 317473
gagcuaagugugggucuga

SEQ ID NO: 493694 - RNA, 19 nt, Artificial Sequence
  Description of Artificial Sequence: Synthetic oligonucleotide
  Antisense Strand to SEQ ID NO: 493693
ucagacccacacuuagcuc

SEQ ID NO: 493695 - RNA, 19 nt, Artificial Sequence
  Description of Artificial Sequence: Synthetic oligonucleotide
  Sense strand starting at position 2715 of SEQ ID NO: 317473
agcuaagugugggucugaa

SEQ ID NO: 493696 - RNA, 19 nt, Artificial Sequence
  Description of Artificial Sequence: Synthetic oligonucleotide
  Antisense Strand to SEQ ID NO: 493695
uucagacccacacuuagcu

SEQ ID NO: 493697 - RNA, 19 nt, Artificial Sequence
  Description of Artificial Sequence: Synthetic oligonucleotide
  Sense strand starting at position 2816 of SEQ ID NO: 317473
gcauguguuccgucaccug

SEQ ID NO: 493698 - RNA, 19 nt, Artificial Sequence
  Description of Artificial Sequence: Synthetic oligonucleotide
  Antisense Strand to SEQ ID NO: 493697
caggugacggaacacaugc

SEQ ID NO: 493699 - RNA, 19 nt, Artificial Sequence
  Description of Artificial Sequence: Synthetic oligonucleotide
  Sense strand starting at position 3190 of SEQ ID NO: 317473
ugcagacgcugcuuuguaa

SEQ ID NO: 493700 - RNA, 19 nt, Artificial Sequence
  Description of Artificial Sequence: Synthetic oligonucleotide
  Antisense Strand to SEQ ID NO: 493699
uuacaaagcagcgucugca

SEQ ID NO: 493701 - RNA, 19 nt, Artificial Sequence
  Description of Artificial Sequence: Synthetic oligonucleotide
  Sense strand starting at position 3202 of SEQ ID NO: 317473
uuuguaagguggcuaguau

SEQ ID NO: 493702 - RNA, 19 nt, Artificial Sequence
  Description of Artificial Sequence: Synthetic oligonucleotide
  Antisense Strand to SEQ ID NO: 493701
auacuagccaccuuacaaa

SEQ ID NO: 493703 - RNA, 19 nt, Artificial Sequence
  Description of Artificial Sequence: Synthetic oligonucleotide
  Sense strand starting at position 3230 of SEQ ID NO: 317473
ggacaaccuuccugcuaga

SEQ ID NO: 493704 - RNA, 19 nt, Artificial Sequence
  Description of Artificial Sequence: Synthetic oligonucleotide
  Antisense Strand to SEQ ID NO: 493703
ucuagcaggaagguugucc

SEQ ID NO: 493705 - RNA, 19 nt, Artificial Sequence
  Description of Artificial Sequence: Synthetic oligonucleotide
  Sense strand starting at position 3243 of SEQ ID NO: 317473
gcuagaugcuguucuuaua

SEQ ID NO: 493706 - RNA, 19 nt, Artificial Sequence
  Description of Artificial Sequence: Synthetic oligonucleotide
  Antisense Strand to SEQ ID NO: 493705
uauaagaacagcaucuagc

SEQ ID NO: 493707 - RNA, 19 nt, Artificial Sequence
  Description of Artificial Sequence: Synthetic oligonucleotide
  Sense strand starting at position 3474 of SEQ ID NO: 317473
ugagcagcuucuugacuuu

SEQ ID NO: 493708 - RNA, 19 nt, Artificial Sequence
  Description of Artificial Sequence: Synthetic oligonucleotide
  Antisense Strand to SEQ ID NO: 493707
aaagucaagaagcugcuca

SEQ ID NO: 493709 - RNA, 19 nt, Artificial Sequence
  Description of Artificial Sequence: Synthetic oligonucleotide
  Sense strand starting at position 3486 of SEQ ID NO: 317473
ugacuuucuucccuuaugu

SEQ ID NO: 493710 - RNA, 19 nt, Artificial Sequence
  Description of Artificial Sequence: Synthetic oligonucleotide
  Antisense Strand to SEQ ID NO: 493709
acauaagggaagaaaguca

SEQ ID NO: 493711 - RNA, 19 nt, Artificial Sequence
  Description of Artificial Sequence: Synthetic oligonucleotide
  Sense strand starting at position 3488 of SEQ ID NO: 317473
acuuucuucccuuauguga

SEQ ID NO: 493712 - RNA, 19 nt, Artificial Sequence
  Description of Artificial Sequence: Synthetic oligonucleotide
  Antisense Strand to SEQ ID NO: 493711
ucacauaagggaagaaagu

SEQ ID NO: 493713 - RNA, 19 nt, Artificial Sequence
  Description of Artificial Sequence: Synthetic oligonucleotide
  Sense strand starting at position 3499 of SEQ ID NO: 317473
uuaugugauccacagccaa

SEQ ID NO: 493714 - RNA, 19 nt, Artificial Sequence
  Description of Artificial Sequence: Synthetic oligonucleotide
  Antisense Strand to SEQ ID NO: 493713
uuggcuguggaucacauaa

SEQ ID NO: 493715 - RNA, 19 nt, Artificial Sequence
  Description of Artificial Sequence: Synthetic oligonucleotide
  Sense strand starting at position 3520 of SEQ ID NO: 317473
cugagcugagccugggaaa

SEQ ID NO: 493716 - RNA, 19 nt, Artificial Sequence
  Description of Artificial Sequence: Synthetic oligonucleotide
  Antisense Strand to SEQ ID NO: 493715
uuucccaggcucagcucag

SEQ ID NO: 493717 - RNA, 19 nt, Artificial Sequence
  Description of Artificial Sequence: Synthetic oligonucleotide
  Sense strand starting at position 3591 of SEQ ID NO: 317473
gugcuuauggcccggacau

SEQ ID NO: 493718 - RNA, 19 nt, Artificial Sequence
  Description of Artificial Sequence: Synthetic oligonucleotide
  Antisense Strand to SEQ ID NO: 493717
auguccgggccauaagcac

SEQ ID NO: 493719 - RNA, 19 nt, Artificial Sequence
  Description of Artificial Sequence: Synthetic oligonucleotide
  Sense strand starting at position 3592 of SEQ ID NO: 317473
ugcuuauggcccggacauu

SEQ ID NO: 493720 - RNA, 19 nt, Artificial Sequence
  Description of Artificial Sequence: Synthetic oligonucleotide
  Antisense Strand to SEQ ID NO: 493719
aauguccgggccauaagca

SEQ ID NO: 493721 - RNA, 19 nt, Artificial Sequence
  Description of Artificial Sequence: Synthetic oligonucleotide
  Sense strand starting at position 3805 of SEQ ID NO: 317473
uggcuaugguuacaaacaa

SEQ ID NO: 493722 - RNA, 19 nt, Artificial Sequence
  Description of Artificial Sequence: Synthetic oligonucleotide
  Antisense Strand to SEQ ID NO: 493721
uuguuuguaaccauagcca

SEQ ID NO: 493723 - RNA, 19 nt, Artificial Sequence
  Description of Artificial Sequence: Synthetic oligonucleotide
  Sense strand starting at position 3872 of SEQ ID NO: 317473
agagcuguuagaggcuaau

SEQ ID NO: 493724 - RNA, 19 nt, Artificial Sequence
  Description of Artificial Sequence: Synthetic oligonucleotide
  Antisense Strand to SEQ ID NO: 493723
auuagccucuaacagcucu

SEQ ID NO: 493725 - RNA, 19 nt, Artificial Sequence
  Description of Artificial Sequence: Synthetic oligonucleotide
  Sense strand starting at position 3905 of SEQ ID NO: 317473
acgucauuccagugaccua

SEQ ID NO: 493726 - RNA, 19 nt, Artificial Sequence
  Description of Artificial Sequence: Synthetic oligonucleotide
  Antisense Strand to SEQ ID NO: 493725
uaggucacuggaaugacgu

SEQ ID NO: 493727 - RNA, 19 nt, Artificial Sequence
  Description of Artificial Sequence: Synthetic oligonucleotide
  Sense strand starting at position 19 of SEQ ID NO: 317474
agaagaaagucaggauuug

SEQ ID NO: 493728 - RNA, 19 nt, Artificial Sequence
  Description of Artificial Sequence: Synthetic oligonucleotide
  Antisense Strand to SEQ ID NO: 493727
caaauccugacuuucuucu

SEQ ID NO: 493729 - RNA, 19 nt, Artificial Sequence
  Description of Artificial Sequence: Synthetic oligonucleotide
  Sense strand starting at position 553 of SEQ ID NO: 317474
ugcucagccuugucucgaa

SEQ ID NO: 493730 - RNA, 19 nt, Artificial Sequence
  Description of Artificial Sequence: Synthetic oligonucleotide
  Antisense Strand to SEQ ID NO: 493729
uucgagacaaggcugagca

SEQ ID NO: 493731 - RNA, 19 nt, Artificial Sequence
  Description of Artificial Sequence: Synthetic oligonucleotide
  Sense strand starting at position 595 of SEQ ID NO: 317474
cgccuugccuccgaaagua

SEQ ID NO: 493732 - RNA, 19 nt, Artificial Sequence
  Description of Artificial Sequence: Synthetic oligonucleotide
  Antisense Strand to SEQ ID NO: 493731
uacuuucggaggcaaggcg

SEQ ID NO: 493733 - RNA, 19 nt, Artificial Sequence
  Description of Artificial Sequence: Synthetic oligonucleotide
  Sense strand starting at position 654 of SEQ ID NO: 317474
uuguguccuuuaucagaca

SEQ ID NO: 493734 - RNA, 19 nt, Artificial Sequence
  Description of Artificial Sequence: Synthetic oligonucleotide
  Antisense Strand to SEQ ID NO: 493733
ugucugauaaaggacacaa

SEQ ID NO: 493735 - RNA, 19 nt, Artificial Sequence
  Description of Artificial Sequence: Synthetic oligonucleotide
  Sense strand starting at position 684 of SEQ ID NO: 317474
ugccauugcucccagcaua

SEQ ID NO: 493736 - RNA, 19 nt, Artificial Sequence
  Description of Artificial Sequence: Synthetic oligonucleotide
  Antisense Strand to SEQ ID NO: 493735
uaugcugggagcaauggca

SEQ ID NO: 493737 - RNA, 19 nt, Artificial Sequence
  Description of Artificial Sequence: Synthetic oligonucleotide
  Sense strand starting at position 941 of SEQ ID NO: 317474
cucggaauguguucccaca

SEQ ID NO: 493738 - RNA, 19 nt, Artificial Sequence
  Description of Artificial Sequence: Synthetic oligonucleotide
  Antisense Strand to SEQ ID NO: 493737
ugugggaacacauuccgag

SEQ ID NO: 493739 - RNA, 19 nt, Artificial Sequence
  Description of Artificial Sequence: Synthetic oligonucleotide
  Sense strand starting at position 943 of SEQ ID NO: 317474
cggaauguguucccacaca

SEQ ID NO: 493740 - RNA, 19 nt, Artificial Sequence
  Description of Artificial Sequence: Synthetic oligonucleotide
  Antisense Strand to SEQ ID NO: 493739
ugugugggaacacauuccg

SEQ ID NO: 493741 - RNA, 19 nt, Artificial Sequence
  Description of Artificial Sequence: Synthetic oligonucleotide
  Sense strand starting at position 2265 of SEQ ID NO: 317474
ucugaggaguugucggaga

SEQ ID NO: 493742 - RNA, 19 nt, Artificial Sequence
  Description of Artificial Sequence: Synthetic oligonucleotide
  Antisense Strand to SEQ ID NO: 493741
ucuccgacaacuccucaga

SEQ ID NO: 493743 - RNA, 19 nt, Artificial Sequence
  Description of Artificial Sequence: Synthetic oligonucleotide
  Sense strand starting at position 2267 of SEQ ID NO: 317474
ugaggaguugucggagagu

SEQ ID NO: 493744 - RNA, 19 nt, Artificial Sequence
  Description of Artificial Sequence: Synthetic oligonucleotide
  Antisense Strand to SEQ ID NO: 493743
acucuccgacaacuccuca

SEQ ID NO: 493745 - RNA, 19 nt, Artificial Sequence
  Description of Artificial Sequence: Synthetic oligonucleotide
  Sense strand starting at position 2270 of SEQ ID NO: 317474
ggaguugucggagagucga

SEQ ID NO: 493746 - RNA, 19 nt, Artificial Sequence
  Description of Artificial Sequence: Synthetic oligonucleotide
  Antisense Strand to SEQ ID NO: 493745
ucgacucuccgacaacucc

SEQ ID NO: 493747 - RNA, 19 nt, Artificial Sequence
  Description of Artificial Sequence: Synthetic oligonucleotide
  Sense strand starting at position 2312 of SEQ ID NO: 317474
ucaucagccucugauggaa

SEQ ID NO: 493748 - RNA, 19 nt, Artificial Sequence
  Description of Artificial Sequence: Synthetic oligonucleotide
  Antisense Strand to SEQ ID NO: 493747
uuccaucagaggcugauga

SEQ ID NO: 493749 - RNA, 19 nt, Artificial Sequence
  Description of Artificial Sequence: Synthetic oligonucleotide
  Sense strand starting at position 2363 of SEQ ID NO: 317474
gagcuaagugugggucuga

SEQ ID NO: 493750 - RNA, 19 nt, Artificial Sequence
  Description of Artificial Sequence: Synthetic oligonucleotide
  Antisense Strand to SEQ ID NO: 493749
ucagacccacacuuagcuc

SEQ ID NO: 493751 - RNA, 19 nt, Artificial Sequence
  Description of Artificial Sequence: Synthetic oligonucleotide
  Sense strand starting at position 2364 of SEQ ID NO: 317474
agcuaagugugggucugaa

SEQ ID NO: 493752 - RNA, 19 nt, Artificial Sequence
  Description of Artificial Sequence: Synthetic oligonucleotide
  Antisense Strand to SEQ ID NO: 493751
uucagacccacacuuagcu

SEQ ID NO: 493753 - RNA, 19 nt, Artificial Sequence
  Description of Artificial Sequence: Synthetic oligonucleotide
  Sense strand starting at position 2465 of SEQ ID NO: 317474
gcauguguuccgucaccug

SEQ ID NO: 493754 - RNA, 19 nt, Artificial Sequence
  Description of Artificial Sequence: Synthetic oligonucleotide
  Antisense Strand to SEQ ID NO: 493753
caggugacggaacacaugc

SEQ ID NO: 493755 - RNA, 19 nt, Artificial Sequence
  Description of Artificial Sequence: Synthetic oligonucleotide
  Sense strand starting at position 2839 of SEQ ID NO: 317474
ugcagacgcugcuuuguaa

SEQ ID NO: 493756 - RNA, 19 nt, Artificial Sequence
  Description of Artificial Sequence: Synthetic oligonucleotide
  Antisense Strand to SEQ ID NO: 493755
uuacaaagcagcgucugca

SEQ ID NO: 493757 - RNA, 19 nt, Artificial Sequence
  Description of Artificial Sequence: Synthetic oligonucleotide
  Sense strand starting at position 2851 of SEQ ID NO: 317474
uuuguaagguggcuaguau

SEQ ID NO: 493758 - RNA, 19 nt, Artificial Sequence
  Description of Artificial Sequence: Synthetic oligonucleotide
  Antisense Strand to SEQ ID NO: 493757
auacuagccaccuuacaaa

SEQ ID NO: 493759 - RNA, 19 nt, Artificial Sequence
  Description of Artificial Sequence: Synthetic oligonucleotide
  Sense strand starting at position 2879 of SEQ ID NO: 317474
ggacaaccuuccugcuaga

SEQ ID NO: 493760 - RNA, 19 nt, Artificial Sequence
  Description of Artificial Sequence: Synthetic oligonucleotide
  Antisense Strand to SEQ ID NO: 493759
ucuagcaggaagguugucc

SEQ ID NO: 493761 - RNA, 19 nt, Artificial Sequence
  Description of Artificial Sequence: Synthetic oligonucleotide
  Sense strand starting at position 2892 of SEQ ID NO: 317474
gcuagaugcuguucuuaua

SEQ ID NO: 493762 - RNA, 19 nt, Artificial Sequence
  Description of Artificial Sequence: Synthetic oligonucleotide
  Antisense Strand to SEQ ID NO: 493761
uauaagaacagcaucuagc

SEQ ID NO: 493763 - RNA, 19 nt, Artificial Sequence
  Description of Artificial Sequence: Synthetic oligonucleotide
  Sense strand starting at position 3123 of SEQ ID NO: 317474
ugagcagcuucuugacuuu

SEQ ID NO: 493764 - RNA, 19 nt, Artificial Sequence
  Description of Artificial Sequence: Synthetic oligonucleotide
  Antisense Strand to SEQ ID NO: 493763
aaagucaagaagcugcuca

SEQ ID NO: 493765 - RNA, 19 nt, Artificial Sequence
  Description of Artificial Sequence: Synthetic oligonucleotide
  Sense strand starting at position 3135 of SEQ ID NO: 317474
ugacuuucuucccuuaugu

SEQ ID NO: 493766 - RNA, 19 nt, Artificial Sequence
  Description of Artificial Sequence: Synthetic oligonucleotide
  Antisense Strand to SEQ ID NO: 493765
acauaagggaagaaaguca

SEQ ID NO: 493767 - RNA, 19 nt, Artificial Sequence
  Description of Artificial Sequence: Synthetic oligonucleotide
  Sense strand starting at position 3137 of SEQ ID NO: 317474
acuuucuucccuuauguga

SEQ ID NO: 493768 - RNA, 19 nt, Artificial Sequence
  Description of Artificial Sequence: Synthetic oligonucleotide
  Antisense Strand to SEQ ID NO: 493767
ucacauaagggaagaaagu

SEQ ID NO: 493769 - RNA, 19 nt, Artificial Sequence
  Description of Artificial Sequence: Synthetic oligonucleotide
  Sense strand starting at position 3148 of SEQ ID NO: 317474
uuaugugauccacagccaa

SEQ ID NO: 493770 - RNA, 19 nt, Artificial Sequence
  Description of Artificial Sequence: Synthetic oligonucleotide
  Antisense Strand to SEQ ID NO: 493769
uuggcuguggaucacauaa

SEQ ID NO: 493771 - RNA, 19 nt, Artificial Sequence
  Description of Artificial Sequence: Synthetic oligonucleotide
  Sense strand starting at position 3169 of SEQ ID NO: 317474
cugagcugagccugggaaa

SEQ ID NO: 493772 - RNA, 19 nt, Artificial Sequence
  Description of Artificial Sequence: Synthetic oligonucleotide
  Antisense Strand to SEQ ID NO: 493771
uuucccaggcucagcucag

SEQ ID NO: 493773 - RNA, 19 nt, Artificial Sequence
  Description of Artificial Sequence: Synthetic oligonucleotide
  Sense strand starting at position 3240 of SEQ ID NO: 317474
gugcuuauggcccggacau

SEQ ID NO: 493774 - RNA, 19 nt, Artificial Sequence
  Description of Artificial Sequence: Synthetic oligonucleotide
  Antisense Strand to SEQ ID NO: 493773
auguccgggccauaagcac

SEQ ID NO: 493775 - RNA, 19 nt, Artificial Sequence
  Description of Artificial Sequence: Synthetic oligonucleotide
  Sense strand starting at position 3241 of SEQ ID NO: 317474
ugcuuauggcccggacauu

SEQ ID NO: 493776 - RNA, 19 nt, Artificial Sequence
  Description of Artificial Sequence: Synthetic oligonucleotide
  Antisense Strand to SEQ ID NO: 493775
aauguccgggccauaagca

SEQ ID NO: 493777 - RNA, 19 nt, Artificial Sequence
  Description of Artificial Sequence: Synthetic oligonucleotide
  Sense strand starting at position 3454 of SEQ ID NO: 317474
uggcuaugguuacaaacaa

SEQ ID NO: 493778 - RNA, 19 nt, Artificial Sequence
  Description of Artificial Sequence: Synthetic oligonucleotide
  Antisense Strand to SEQ ID NO: 493777
uuguuuguaaccauagcca

SEQ ID NO: 493779 - RNA, 19 nt, Artificial Sequence
  Description of Artificial Sequence: Synthetic oligonucleotide
  Sense strand starting at position 3521 of SEQ ID NO: 317474
agagcuguuagaggcuaau

SEQ ID NO: 493780 - RNA, 19 nt, Artificial Sequence
  Description of Artificial Sequence: Synthetic oligonucleotide
  Antisense Strand to SEQ ID NO: 493779
auuagccucuaacagcucu

SEQ ID NO: 493781 - RNA, 19 nt, Artificial Sequence
  Description of Artificial Sequence: Synthetic oligonucleotide
  Sense strand starting at position 3554 of SEQ ID NO: 317474
acgucauuccagugaccua

SEQ ID NO: 493782 - RNA, 19 nt, Artificial Sequence
  Description of Artificial Sequence: Synthetic oligonucleotide
  Antisense Strand to SEQ ID NO: 493781
uaggucacuggaaugacgu

SEQ ID NO: 493783 - RNA, 19 nt, Artificial Sequence
  Description of Artificial Sequence: Synthetic oligonucleotide
  Sense strand starting at position 3647 of SEQ ID NO: 317474
ucaggugugguguauugua

SEQ ID NO: 493784 - RNA, 19 nt, Artificial Sequence
  Description of Artificial Sequence: Synthetic oligonucleotide
  Antisense Strand to SEQ ID NO: 493783
uacaauacaccacaccuga

SEQ ID NO: 493785 - RNA, 19 nt, Artificial Sequence
  Description of Artificial Sequence: Synthetic oligonucleotide
  Sense strand starting at position 3677 of SEQ ID NO: 317474
uguacuguaucguauugau

SEQ ID NO: 493786 - RNA, 19 nt, Artificial Sequence
  Description of Artificial Sequence: Synthetic oligonucleotide
  Antisense Strand to SEQ ID NO: 493785
aucaauacgauacaguaca

SEQ ID NO: 493787 - RNA, 19 nt, Artificial Sequence
  Description of Artificial Sequence: Synthetic oligonucleotide
  Sense strand starting at position 3680 of SEQ ID NO: 317474
acuguaucguauugauuua

SEQ ID NO: 493788 - RNA, 19 nt, Artificial Sequence
  Description of Artificial Sequence: Synthetic oligonucleotide
  Antisense Strand to SEQ ID NO: 493787
uaaaucaauacgauacagu

SEQ ID NO: 493789 - RNA, 19 nt, Artificial Sequence
  Description of Artificial Sequence: Synthetic oligonucleotide
  Sense strand starting at position 48 of SEQ ID NO: 317475
gguaucaucuuuccuagaa

SEQ ID NO: 493790 - RNA, 19 nt, Artificial Sequence
  Description of Artificial Sequence: Synthetic oligonucleotide
  Antisense Strand to SEQ ID NO: 493789
uucuaggaaagaugauacc

SEQ ID NO: 493791 - RNA, 19 nt, Artificial Sequence
  Description of Artificial Sequence: Synthetic oligonucleotide
  Sense strand starting at position 49 of SEQ ID NO: 317475
guaucaucuuuccuagaag

SEQ ID NO: 493792 - RNA, 19 nt, Artificial Sequence
  Description of Artificial Sequence: Synthetic oligonucleotide
  Antisense Strand to SEQ ID NO: 493791
cuucuaggaaagaugauac

SEQ ID NO: 493793 - RNA, 19 nt, Artificial Sequence
  Description of Artificial Sequence: Synthetic oligonucleotide
  Sense strand starting at position 52 of SEQ ID NO: 317475
ucaucuuuccuagaaguug

SEQ ID NO: 493794 - RNA, 19 nt, Artificial Sequence
  Description of Artificial Sequence: Synthetic oligonucleotide
  Antisense Strand to SEQ ID NO: 493793
caacuucuaggaaagauga

SEQ ID NO: 493795 - RNA, 19 nt, Artificial Sequence
  Description of Artificial Sequence: Synthetic oligonucleotide
  Sense strand starting at position 121 of SEQ ID NO: 317475
agagguugucaguauaaua

SEQ ID NO: 493796 - RNA, 19 nt, Artificial Sequence
  Description of Artificial Sequence: Synthetic oligonucleotide
  Antisense Strand to SEQ ID NO: 493795
uauuauacugacaaccucu

SEQ ID NO: 493797 - RNA, 19 nt, Artificial Sequence
  Description of Artificial Sequence: Synthetic oligonucleotide
  Sense strand starting at position 267 of SEQ ID NO: 317475
cgagucuuuccguugaggu

SEQ ID NO: 493798 - RNA, 19 nt, Artificial Sequence
  Description of Artificial Sequence: Synthetic oligonucleotide
  Antisense Strand to SEQ ID NO: 493797
accucaacggaaagacucg

SEQ ID NO: 493799 - RNA, 19 nt, Artificial Sequence
  Description of Artificial Sequence: Synthetic oligonucleotide
  Sense strand starting at position 411 of SEQ ID NO: 317475
gaauguaauugauugaggu

SEQ ID NO: 493800 - RNA, 19 nt, Artificial Sequence
  Description of Artificial Sequence: Synthetic oligonucleotide
  Antisense Strand to SEQ ID NO: 493799
accucaaucaauuacauuc

SEQ ID NO: 493801 - RNA, 19 nt, Artificial Sequence
  Description of Artificial Sequence: Synthetic oligonucleotide
  Sense strand starting at position 507 of SEQ ID NO: 317475
guuagaguagccuauugga

SEQ ID NO: 493802 - RNA, 19 nt, Artificial Sequence
  Description of Artificial Sequence: Synthetic oligonucleotide
  Antisense Strand to SEQ ID NO: 493801
uccaauaggcuacucuaac

SEQ ID NO: 493803 - RNA, 19 nt, Artificial Sequence
  Description of Artificial Sequence: Synthetic oligonucleotide
  Sense strand starting at position 522 of SEQ ID NO: 317475
uggaaauccuuggcucaaa

SEQ ID NO: 493804 - RNA, 19 nt, Artificial Sequence
  Description of Artificial Sequence: Synthetic oligonucleotide
  Antisense Strand to SEQ ID NO: 493803
uuugagccaaggauuucca

SEQ ID NO: 493805 - RNA, 19 nt, Artificial Sequence
  Description of Artificial Sequence: Synthetic oligonucleotide
  Sense strand starting at position 659 of SEQ ID NO: 317475
ucagaacccuaguuuaaga

SEQ ID NO: 493806 - RNA, 19 nt, Artificial Sequence
  Description of Artificial Sequence: Synthetic oligonucleotide
  Antisense Strand to SEQ ID NO: 493805
ucuuaaacuaggguucuga

SEQ ID NO: 493807 - RNA, 19 nt, Artificial Sequence
  Description of Artificial Sequence: Synthetic oligonucleotide
  Sense strand starting at position 770 of SEQ ID NO: 317475
gaaauauuggccuguagaa

SEQ ID NO: 493808 - RNA, 19 nt, Artificial Sequence
  Description of Artificial Sequence: Synthetic oligonucleotide
  Antisense Strand to SEQ ID NO: 493807
uucuacaggccaauauuuc

SEQ ID NO: 493809 - RNA, 19 nt, Artificial Sequence
  Description of Artificial Sequence: Synthetic oligonucleotide
  Sense strand starting at position 772 of SEQ ID NO: 317475
aauauuggccuguagaaua

SEQ ID NO: 493810 - RNA, 19 nt, Artificial Sequence
  Description of Artificial Sequence: Synthetic oligonucleotide
  Antisense Strand to SEQ ID NO: 493809
uauucuacaggccaauauu

SEQ ID NO: 493811 - RNA, 19 nt, Artificial Sequence
  Description of Artificial Sequence: Synthetic oligonucleotide
  Sense strand starting at position 796 of SEQ ID NO: 317475
ucagcuauuuagucucuca

SEQ ID NO: 493812 - RNA, 19 nt, Artificial Sequence
  Description of Artificial Sequence: Synthetic oligonucleotide
  Antisense Strand to SEQ ID NO: 493811
ugagagacuaaauagcuga

SEQ ID NO: 493813 - RNA, 19 nt, Artificial Sequence
  Description of Artificial Sequence: Synthetic oligonucleotide
  Sense strand starting at position 989 of SEQ ID NO: 317475
ccuguuucucuuuaccaga

SEQ ID NO: 493814 - RNA, 19 nt, Artificial Sequence
  Description of Artificial Sequence: Synthetic oligonucleotide
  Antisense Strand to SEQ ID NO: 493813
ucugguaaagagaaacagg

SEQ ID NO: 493815 - RNA, 19 nt, Artificial Sequence
  Description of Artificial Sequence: Synthetic oligonucleotide
  Sense strand starting at position 1076 of SEQ ID NO: 317475
ccaagaacaguuuaucugu

SEQ ID NO: 493816 - RNA, 19 nt, Artificial Sequence
  Description of Artificial Sequence: Synthetic oligonucleotide
  Antisense Strand to SEQ ID NO: 493815
acagauaaacuguucuugg

SEQ ID NO: 493817 - RNA, 19 nt, Artificial Sequence
  Description of Artificial Sequence: Synthetic oligonucleotide
  Sense strand starting at position 1124 of SEQ ID NO: 317475
auauaugaugcuuaggcau

SEQ ID NO: 493818 - RNA, 19 nt, Artificial Sequence
  Description of Artificial Sequence: Synthetic oligonucleotide
  Antisense Strand to SEQ ID NO: 493817
augccuaagcaucauauau

SEQ ID NO: 493819 - RNA, 19 nt, Artificial Sequence
  Description of Artificial Sequence: Synthetic oligonucleotide
  Sense strand starting at position 1179 of SEQ ID NO: 317475
gaguauagggucugaaucu

SEQ ID NO: 493820 - RNA, 19 nt, Artificial Sequence
  Description of Artificial Sequence: Synthetic oligonucleotide
  Antisense Strand to SEQ ID NO: 493819
agauucagacccuauacuc

SEQ ID NO: 493821 - RNA, 19 nt, Artificial Sequence
  Description of Artificial Sequence: Synthetic oligonucleotide
  Sense strand starting at position 1465 of SEQ ID NO: 317475
aguuguuuccuaggagaaa

SEQ ID NO: 493822 - RNA, 19 nt, Artificial Sequence
  Description of Artificial Sequence: Synthetic oligonucleotide
  Antisense Strand to SEQ ID NO: 493821
uuucuccuaggaaacaacu

SEQ ID NO: 493823 - RNA, 19 nt, Artificial Sequence
  Description of Artificial Sequence: Synthetic oligonucleotide
  Sense strand starting at position 1515 of SEQ ID NO: 317475
aaggcuugucaauggaaau

SEQ ID NO: 493824 - RNA, 19 nt, Artificial Sequence
  Description of Artificial Sequence: Synthetic oligonucleotide
  Antisense Strand to SEQ ID NO: 493823
auuuccauugacaagccuu

SEQ ID NO: 493825 - RNA, 19 nt, Artificial Sequence
  Description of Artificial Sequence: Synthetic oligonucleotide
  Sense strand starting at position 1619 of SEQ ID NO: 317475
auagauaggccauacuguu

SEQ ID NO: 493826 - RNA, 19 nt, Artificial Sequence
  Description of Artificial Sequence: Synthetic oligonucleotide
  Antisense Strand to SEQ ID NO: 493825
aacaguauggccuaucuau

SEQ ID NO: 493827 - RNA, 19 nt, Artificial Sequence
  Description of Artificial Sequence: Synthetic oligonucleotide
  Sense strand starting at position 1749 of SEQ ID NO: 317475
guauuagaagcauauaauc

SEQ ID NO: 493828 - RNA, 19 nt, Artificial Sequence
  Description of Artificial Sequence: Synthetic oligonucleotide
  Antisense Strand to SEQ ID NO: 493827
gauuauaugcuucuaauac

SEQ ID NO: 493829 - RNA, 19 nt, Artificial Sequence
  Description of Artificial Sequence: Synthetic oligonucleotide
  Sense strand starting at position 1800 of SEQ ID NO: 317475
ucagauugauuggugaaca

SEQ ID NO: 493830 - RNA, 19 nt, Artificial Sequence
  Description of Artificial Sequence: Synthetic oligonucleotide
  Antisense Strand to SEQ ID NO: 493829
uguucaccaaucaaucuga

SEQ ID NO: 493831 - RNA, 19 nt, Artificial Sequence
  Description of Artificial Sequence: Synthetic oligonucleotide
  Sense strand starting at position 1828 of SEQ ID NO: 317475
uaucgucguguuucucauu

SEQ ID NO: 493832 - RNA, 19 nt, Artificial Sequence
  Description of Artificial Sequence: Synthetic oligonucleotide
  Antisense Strand to SEQ ID NO: 493831
aaugagaaacacgacgaua

SEQ ID NO: 493833 - RNA, 19 nt, Artificial Sequence
  Description of Artificial Sequence: Synthetic oligonucleotide
  Sense strand starting at position 1894 of SEQ ID NO: 317475
ggacaugaggcucagaugu

SEQ ID NO: 493834 - RNA, 19 nt, Artificial Sequence
  Description of Artificial Sequence: Synthetic oligonucleotide
  Antisense Strand to SEQ ID NO: 493833
acaucugagccucaugucc

SEQ ID NO: 493835 - RNA, 19 nt, Artificial Sequence
  Description of Artificial Sequence: Synthetic oligonucleotide
  Sense strand starting at position 2098 of SEQ ID NO: 317475
ggcucagugaguuaaggaa

SEQ ID NO: 493836 - RNA, 19 nt, Artificial Sequence
  Description of Artificial Sequence: Synthetic oligonucleotide
  Antisense Strand to SEQ ID NO: 493835
uuccuuaacucacugagcc

SEQ ID NO: 493837 - RNA, 19 nt, Artificial Sequence
  Description of Artificial Sequence: Synthetic oligonucleotide
  Sense strand starting at position 2133 of SEQ ID NO: 317475
agaaauuguccaggagcaa

SEQ ID NO: 493838 - RNA, 19 nt, Artificial Sequence
  Description of Artificial Sequence: Synthetic oligonucleotide
  Antisense Strand to SEQ ID NO: 493837
uugcuccuggacaauuucu

SEQ ID NO: 493839 - RNA, 19 nt, Artificial Sequence
  Description of Artificial Sequence: Synthetic oligonucleotide
  Sense strand starting at position 2198 of SEQ ID NO: 317475
aguugucagacugacaugu

SEQ ID NO: 493840 - RNA, 19 nt, Artificial Sequence
  Description of Artificial Sequence: Synthetic oligonucleotide
  Antisense Strand to SEQ ID NO: 493839
acaugucagucugacaacu

SEQ ID NO: 493841 - RNA, 19 nt, Artificial Sequence
  Description of Artificial Sequence: Synthetic oligonucleotide
  Sense strand starting at position 2243 of SEQ ID NO: 317475
gaaugaguucuccaggagu

SEQ ID NO: 493842 - RNA, 19 nt, Artificial Sequence
  Description of Artificial Sequence: Synthetic oligonucleotide
  Antisense Strand to SEQ ID NO: 493841
acuccuggagaacucauuc

SEQ ID NO: 493843 - RNA, 19 nt, Artificial Sequence
  Description of Artificial Sequence: Synthetic oligonucleotide
  Sense strand starting at position 2370 of SEQ ID NO: 317475
ggaagugguaauggacaau

SEQ ID NO: 493844 - RNA, 19 nt, Artificial Sequence
  Description of Artificial Sequence: Synthetic oligonucleotide
  Antisense Strand to SEQ ID NO: 493843
auuguccauuaccacuucc

SEQ ID NO: 493845 - RNA, 19 nt, Artificial Sequence
  Description of Artificial Sequence: Synthetic oligonucleotide
  Sense strand starting at position 2409 of SEQ ID NO: 317475
cuguacuuccgacagaauu

SEQ ID NO: 493846 - RNA, 19 nt, Artificial Sequence
  Description of Artificial Sequence: Synthetic oligonucleotide
  Antisense Strand to SEQ ID NO: 493845
aauucugucggaaguacag

SEQ ID NO: 493847 - RNA, 19 nt, Artificial Sequence
  Description of Artificial Sequence: Synthetic oligonucleotide
  Sense strand starting at position 2524 of SEQ ID NO: 317475
ugucaugggacuuacagua

SEQ ID NO: 493848 - RNA, 19 nt, Artificial Sequence
  Description of Artificial Sequence: Synthetic oligonucleotide
  Antisense Strand to SEQ ID NO: 493847
uacuguaagucccaugaca

SEQ ID NO: 493849 - RNA, 19 nt, Artificial Sequence
  Description of Artificial Sequence: Synthetic oligonucleotide
  Sense strand starting at position 2667 of SEQ ID NO: 317475
gaguuaggcccaugggaaa

SEQ ID NO: 493850 - RNA, 19 nt, Artificial Sequence
  Description of Artificial Sequence: Synthetic oligonucleotide
  Antisense Strand to SEQ ID NO: 493849
uuucccaugggccuaacuc

SEQ ID NO: 493851 - RNA, 19 nt, Artificial Sequence
  Description of Artificial Sequence: Synthetic oligonucleotide
  Sense strand starting at position 2850 of SEQ ID NO: 317475
cggcuugugacagcuguuu

SEQ ID NO: 493852 - RNA, 19 nt, Artificial Sequence
  Description of Artificial Sequence: Synthetic oligonucleotide
  Antisense Strand to SEQ ID NO: 493851
aaacagcugucacaagccg

SEQ ID NO: 493853 - RNA, 19 nt, Artificial Sequence
  Description of Artificial Sequence: Synthetic oligonucleotide
  Sense strand starting at position 2889 of SEQ ID NO: 317475
augguagccaguuacuaga

SEQ ID NO: 493854 - RNA, 19 nt, Artificial Sequence
  Description of Artificial Sequence: Synthetic oligonucleotide
  Antisense Strand to SEQ ID NO: 493853
ucuaguaacuggcuaccau

SEQ ID NO: 493855 - RNA, 19 nt, Artificial Sequence
  Description of Artificial Sequence: Synthetic oligonucleotide
  Sense strand starting at position 3074 of SEQ ID NO: 317475
cugauagagugacugcaau

SEQ ID NO: 493856 - RNA, 19 nt, Artificial Sequence
  Description of Artificial Sequence: Synthetic oligonucleotide
  Antisense Strand to SEQ ID NO: 493855
auugcagucacucuaucag

SEQ ID NO: 493857 - RNA, 19 nt, Artificial Sequence
  Description of Artificial Sequence: Synthetic oligonucleotide
  Sense strand starting at position 3226 of SEQ ID NO: 317475
cgaaauuacacauggaguc

SEQ ID NO: 493858 - RNA, 19 nt, Artificial Sequence
  Description of Artificial Sequence: Synthetic oligonucleotide
  Antisense Strand to SEQ ID NO: 493857
gacuccauguguaauuucg

SEQ ID NO: 493859 - RNA, 19 nt, Artificial Sequence
  Description of Artificial Sequence: Synthetic oligonucleotide
  Sense strand starting at position 3236 of SEQ ID NO: 317475
cauggaguccuggaguauc

SEQ ID NO: 493860 - RNA, 19 nt, Artificial Sequence
  Description of Artificial Sequence: Synthetic oligonucleotide
  Antisense Strand to SEQ ID NO: 493859
gauacuccaggacuccaug

SEQ ID NO: 493861 - RNA, 19 nt, Artificial Sequence
  Description of Artificial Sequence: Synthetic oligonucleotide
  Sense strand starting at position 3344 of SEQ ID NO: 317475
acaaaugacuuggcuaauu

SEQ ID NO: 493862 - RNA, 19 nt, Artificial Sequence
  Description of Artificial Sequence: Synthetic oligonucleotide
  Antisense Strand to SEQ ID NO: 493861
aauuagccaagucauuugu

SEQ ID NO: 493863 - RNA, 19 nt, Artificial Sequence
  Description of Artificial Sequence: Synthetic oligonucleotide
  Sense strand starting at position 3349 of SEQ ID NO: 317475
ugacuuggcuaauuaauga

SEQ ID NO: 493864 - RNA, 19 nt, Artificial Sequence
  Description of Artificial Sequence: Synthetic oligonucleotide
  Antisense Strand to SEQ ID NO: 493863
ucauuaauuagccaaguca

SEQ ID NO: 493865 - RNA, 19 nt, Artificial Sequence
  Description of Artificial Sequence: Synthetic oligonucleotide
  Sense strand starting at position 3356 of SEQ ID NO: 317475
gcuaauuaaugacugaucu

SEQ ID NO: 493866 - RNA, 19 nt, Artificial Sequence
  Description of Artificial Sequence: Synthetic oligonucleotide
  Antisense Strand to SEQ ID NO: 493865
agaucagucauuaauuagc

SEQ ID NO: 493867 - RNA, 19 nt, Artificial Sequence
  Description of Artificial Sequence: Synthetic oligonucleotide
  Sense strand starting at position 3800 of SEQ ID NO: 317475
uuauucuauccaggaagua

SEQ ID NO: 493868 - RNA, 19 nt, Artificial Sequence
  Description of Artificial Sequence: Synthetic oligonucleotide
  Antisense Strand to SEQ ID NO: 493867
uacuuccuggauagaauaa

SEQ ID NO: 493869 - RNA, 19 nt, Artificial Sequence
  Description of Artificial Sequence: Synthetic oligonucleotide
  Sense strand starting at position 87 of SEQ ID NO: 317476
ggaguacaacuaugaguaa

SEQ ID NO: 493870 - RNA, 19 nt, Artificial Sequence
  Description of Artificial Sequence: Synthetic oligonucleotide
  Antisense Strand to SEQ ID NO: 493869
uuacucauaguuguacucc

SEQ ID NO: 493871 - RNA, 19 nt, Artificial Sequence
  Description of Artificial Sequence: Synthetic oligonucleotide
  Sense strand starting at position 90 of SEQ ID NO: 317476
guacaacuaugaguaauag

SEQ ID NO: 493872 - RNA, 19 nt, Artificial Sequence
  Description of Artificial Sequence: Synthetic oligonucleotide
  Antisense Strand to SEQ ID NO: 493871
cuauuacucauaguuguac

SEQ ID NO: 493873 - RNA, 19 nt, Artificial Sequence
  Description of Artificial Sequence: Synthetic oligonucleotide
  Sense strand starting at position 144 of SEQ ID NO: 317476
acaagaaagcaguguuuag

SEQ ID NO: 493874 - RNA, 19 nt, Artificial Sequence
  Description of Artificial Sequence: Synthetic oligonucleotide
  Antisense Strand to SEQ ID NO: 493873
cuaaacacugcuuucuugu

SEQ ID NO: 493875 - RNA, 19 nt, Artificial Sequence
  Description of Artificial Sequence: Synthetic oligonucleotide
  Sense strand starting at position 211 of SEQ ID NO: 317476
caaagugaggucuaagguu

SEQ ID NO: 493876 - RNA, 19 nt, Artificial Sequence
  Description of Artificial Sequence: Synthetic oligonucleotide
  Antisense Strand to SEQ ID NO: 493875
aaccuuagaccucacuuug

SEQ ID NO: 493877 - RNA, 19 nt, Artificial Sequence
  Description of Artificial Sequence: Synthetic oligonucleotide
  Sense strand starting at position 583 of SEQ ID NO: 317476
acuggaagccaaugauaau

SEQ ID NO: 493878 - RNA, 19 nt, Artificial Sequence
  Description of Artificial Sequence: Synthetic oligonucleotide
  Antisense Strand to SEQ ID NO: 493877
auuaucauuggcuuccagu

SEQ ID NO: 493879 - RNA, 19 nt, Artificial Sequence
  Description of Artificial Sequence: Synthetic oligonucleotide
  Sense strand starting at position 987 of SEQ ID NO: 317476
agguuaaggccugauucag

SEQ ID NO: 493880 - RNA, 19 nt, Artificial Sequence
  Description of Artificial Sequence: Synthetic oligonucleotide
  Antisense Strand to SEQ ID NO: 493879
cugaaucaggccuuaaccu

SEQ ID NO: 493881 - RNA, 19 nt, Artificial Sequence
  Description of Artificial Sequence: Synthetic oligonucleotide
  Sense strand starting at position 1075 of SEQ ID NO: 317476
cagggcauugaucgagauu

SEQ ID NO: 493882 - RNA, 19 nt, Artificial Sequence
  Description of Artificial Sequence: Synthetic oligonucleotide
  Antisense Strand to SEQ ID NO: 493881
aaucucgaucaaugcccug

SEQ ID NO: 493883 - RNA, 19 nt, Artificial Sequence
  Description of Artificial Sequence: Synthetic oligonucleotide
  Sense strand starting at position 1076 of SEQ ID NO: 317476
agggcauugaucgagauuc

SEQ ID NO: 493884 - RNA, 19 nt, Artificial Sequence
  Description of Artificial Sequence: Synthetic oligonucleotide
  Antisense Strand to SEQ ID NO: 493883
gaaucucgaucaaugcccu

SEQ ID NO: 493885 - RNA, 19 nt, Artificial Sequence
  Description of Artificial Sequence: Synthetic oligonucleotide
  Sense strand starting at position 1078 of SEQ ID NO: 317476
ggcauugaucgagauuccu

SEQ ID NO: 493886 - RNA, 19 nt, Artificial Sequence
  Description of Artificial Sequence: Synthetic oligonucleotide
  Antisense Strand to SEQ ID NO: 493885
aggaaucucgaucaaugcc

SEQ ID NO: 493887 - RNA, 19 nt, Artificial Sequence
  Description of Artificial Sequence: Synthetic oligonucleotide
  Sense strand starting at position 1101 of SEQ ID NO: 317476
agaacaaaguucucagcau

SEQ ID NO: 493888 - RNA, 19 nt, Artificial Sequence
  Description of Artificial Sequence: Synthetic oligonucleotide
  Antisense Strand to SEQ ID NO: 493887
augcugagaacuuuguucu

SEQ ID NO: 493889 - RNA, 19 nt, Artificial Sequence
  Description of Artificial Sequence: Synthetic oligonucleotide
  Sense strand starting at position 1241 of SEQ ID NO: 317476
uuccuugcaggauaguuua

SEQ ID NO: 493890 - RNA, 19 nt, Artificial Sequence
  Description of Artificial Sequence: Synthetic oligonucleotide
  Antisense Strand to SEQ ID NO: 493889
uaaacuauccugcaaggaa

SEQ ID NO: 493891 - RNA, 19 nt, Artificial Sequence
  Description of Artificial Sequence: Synthetic oligonucleotide
  Sense strand starting at position 1273 of SEQ ID NO: 317476
aaauuauuccuagggaagu

SEQ ID NO: 493892 - RNA, 19 nt, Artificial Sequence
  Description of Artificial Sequence: Synthetic oligonucleotide
  Antisense Strand to SEQ ID NO: 493891
acuucccuaggaauaauuu

SEQ ID NO: 493893 - RNA, 19 nt, Artificial Sequence
  Description of Artificial Sequence: Synthetic oligonucleotide
  Sense strand starting at position 1403 of SEQ ID NO: 317476
ucuauagcaccaugaagaa

SEQ ID NO: 493894 - RNA, 19 nt, Artificial Sequence
  Description of Artificial Sequence: Synthetic oligonucleotide
  Antisense Strand to SEQ ID NO: 493893
uucuucauggugcuauaga

SEQ ID NO: 493895 - RNA, 19 nt, Artificial Sequence
  Description of Artificial Sequence: Synthetic oligonucleotide
  Sense strand starting at position 1479 of SEQ ID NO: 317476
uugcuuaaucaagauuguu

SEQ ID NO: 493896 - RNA, 19 nt, Artificial Sequence
  Description of Artificial Sequence: Synthetic oligonucleotide
  Antisense Strand to SEQ ID NO: 493895
aacaaucuugauuaagcaa

SEQ ID NO: 493897 - RNA, 19 nt, Artificial Sequence
  Description of Artificial Sequence: Synthetic oligonucleotide
  Sense strand starting at position 1782 of SEQ ID NO: 317476
auuacugaguuccugauca

SEQ ID NO: 493898 - RNA, 19 nt, Artificial Sequence
  Description of Artificial Sequence: Synthetic oligonucleotide
  Antisense Strand to SEQ ID NO: 493897
ugaucaggaacucaguaau

SEQ ID NO: 493899 - RNA, 19 nt, Artificial Sequence
  Description of Artificial Sequence: Synthetic oligonucleotide
  Sense strand starting at position 1784 of SEQ ID NO: 317476
uacugaguuccugaucagu

SEQ ID NO: 493900 - RNA, 19 nt, Artificial Sequence
  Description of Artificial Sequence: Synthetic oligonucleotide
  Antisense Strand to SEQ ID NO: 493899
acugaucaggaacucagua

SEQ ID NO: 493901 - RNA, 19 nt, Artificial Sequence
  Description of Artificial Sequence: Synthetic oligonucleotide
  Sense strand starting at position 1787 of SEQ ID NO: 317476
ugaguuccugaucaguuau

SEQ ID NO: 493902 - RNA, 19 nt, Artificial Sequence
  Description of Artificial Sequence: Synthetic oligonucleotide
  Antisense Strand to SEQ ID NO: 493901
auaacugaucaggaacuca

SEQ ID NO: 493903 - RNA, 19 nt, Artificial Sequence
  Description of Artificial Sequence: Synthetic oligonucleotide
  Sense strand starting at position 1869 of SEQ ID NO: 317476
ugguaaguaagcgaaauga

SEQ ID NO: 493904 - RNA, 19 nt, Artificial Sequence
  Description of Artificial Sequence: Synthetic oligonucleotide
  Antisense Strand to SEQ ID NO: 493903
ucauuucgcuuacuuacca

SEQ ID NO: 493905 - RNA, 19 nt, Artificial Sequence
  Description of Artificial Sequence: Synthetic oligonucleotide
  Sense strand starting at position 1895 of SEQ ID NO: 317476
ggcacaagacauuauguua

SEQ ID NO: 493906 - RNA, 19 nt, Artificial Sequence
  Description of Artificial Sequence: Synthetic oligonucleotide
  Antisense Strand to SEQ ID NO: 493905
uaacauaaugucuugugcc

SEQ ID NO: 493907 - RNA, 19 nt, Artificial Sequence
  Description of Artificial Sequence: Synthetic oligonucleotide
  Sense strand starting at position 1920 of SEQ ID NO: 317476
auguucuauccugaaaguc

SEQ ID NO: 493908 - RNA, 19 nt, Artificial Sequence
  Description of Artificial Sequence: Synthetic oligonucleotide
  Antisense Strand to SEQ ID NO: 493907
gacuuucaggauagaacau

SEQ ID NO: 493909 - RNA, 19 nt, Artificial Sequence
  Description of Artificial Sequence: Synthetic oligonucleotide
  Sense strand starting at position 1978 of SEQ ID NO: 317476
ggagaccugucuuuaagac

SEQ ID NO: 493910 - RNA, 19 nt, Artificial Sequence
  Description of Artificial Sequence: Synthetic oligonucleotide
  Antisense Strand to SEQ ID NO: 493909
gucuuaaagacaggucucc

SEQ ID NO: 493911 - RNA, 19 nt, Artificial Sequence
  Description of Artificial Sequence: Synthetic oligonucleotide
  Sense strand starting at position 2020 of SEQ ID NO: 317476
gugguuuaaguagaaacau

SEQ ID NO: 493912 - RNA, 19 nt, Artificial Sequence
  Description of Artificial Sequence: Synthetic oligonucleotide
  Antisense Strand to SEQ ID NO: 493911
auguuucuacuuaaaccac

SEQ ID NO: 493913 - RNA, 19 nt, Artificial Sequence
  Description of Artificial Sequence: Synthetic oligonucleotide
  Sense strand starting at position 2295 of SEQ ID NO: 317476
guuagaucagcuuaauagg

SEQ ID NO: 493914 - RNA, 19 nt, Artificial Sequence
  Description of Artificial Sequence: Synthetic oligonucleotide
  Antisense Strand to SEQ ID NO: 493913
ccuauuaagcugaucuaac

SEQ ID NO: 493915 - RNA, 19 nt, Artificial Sequence
  Description of Artificial Sequence: Synthetic oligonucleotide
  Sense strand starting at position 2482 of SEQ ID NO: 317476
gaaauaagcugguuaccuu

SEQ ID NO: 493916 - RNA, 19 nt, Artificial Sequence
  Description of Artificial Sequence: Synthetic oligonucleotide
  Antisense Strand to SEQ ID NO: 493915
aagguaaccagcuuauuuc

SEQ ID NO: 493917 - RNA, 19 nt, Artificial Sequence
  Description of Artificial Sequence: Synthetic oligonucleotide
  Sense strand starting at position 2507 of SEQ ID NO: 317476
auaggacuugcugaguguu

SEQ ID NO: 493918 - RNA, 19 nt, Artificial Sequence
  Description of Artificial Sequence: Synthetic oligonucleotide
  Antisense Strand to SEQ ID NO: 493917
aacacucagcaaguccuau

SEQ ID NO: 493919 - RNA, 19 nt, Artificial Sequence
  Description of Artificial Sequence: Synthetic oligonucleotide
  Sense strand starting at position 2575 of SEQ ID NO: 317476
ggcacuauaucauuaggaa

SEQ ID NO: 493920 - RNA, 19 nt, Artificial Sequence
  Description of Artificial Sequence: Synthetic oligonucleotide
  Antisense Strand to SEQ ID NO: 493919
uuccuaaugauauagugcc

SEQ ID NO: 493921 - RNA, 19 nt, Artificial Sequence
  Description of Artificial Sequence: Synthetic oligonucleotide
  Sense strand starting at position 2629 of SEQ ID NO: 317476
cugcauaaucauuaguagu

SEQ ID NO: 493922 - RNA, 19 nt, Artificial Sequence
  Description of Artificial Sequence: Synthetic oligonucleotide
  Antisense Strand to SEQ ID NO: 493921
acuacuaaugauuaugcag

SEQ ID NO: 493923 - RNA, 19 nt, Artificial Sequence
  Description of Artificial Sequence: Synthetic oligonucleotide
  Sense strand starting at position 2706 of SEQ ID NO: 317476
ugaugaagugccuaauagu

SEQ ID NO: 493924 - RNA, 19 nt, Artificial Sequence
  Description of Artificial Sequence: Synthetic oligonucleotide
  Antisense Strand to SEQ ID NO: 493923
acuauuaggcacuucauca

SEQ ID NO: 493925 - RNA, 19 nt, Artificial Sequence
  Description of Artificial Sequence: Synthetic oligonucleotide
  Sense strand starting at position 2772 of SEQ ID NO: 317476
uugucagauaggcauggua

SEQ ID NO: 493926 - RNA, 19 nt, Artificial Sequence
  Description of Artificial Sequence: Synthetic oligonucleotide
  Antisense Strand to SEQ ID NO: 493925
uaccaugccuaucugacaa

SEQ ID NO: 493927 - RNA, 19 nt, Artificial Sequence
  Description of Artificial Sequence: Synthetic oligonucleotide
  Sense strand starting at position 2774 of SEQ ID NO: 317476
gucagauaggcaugguaag

SEQ ID NO: 493928 - RNA, 19 nt, Artificial Sequence
  Description of Artificial Sequence: Synthetic oligonucleotide
  Antisense Strand to SEQ ID NO: 493927
cuuaccaugccuaucugac

SEQ ID NO: 493929 - RNA, 19 nt, Artificial Sequence
  Description of Artificial Sequence: Synthetic oligonucleotide
  Sense strand starting at position 2775 of SEQ ID NO: 317476
ucagauaggcaugguaaga

SEQ ID NO: 493930 - RNA, 19 nt, Artificial Sequence
  Description of Artificial Sequence: Synthetic oligonucleotide
  Antisense Strand to SEQ ID NO: 493929
ucuuaccaugccuaucuga

SEQ ID NO: 493931 - RNA, 19 nt, Artificial Sequence
  Description of Artificial Sequence: Synthetic oligonucleotide
  Sense strand starting at position 2819 of SEQ ID NO: 317476
ggcgauaugcuggaggaga

SEQ ID NO: 493932 - RNA, 19 nt, Artificial Sequence
  Description of Artificial Sequence: Synthetic oligonucleotide
  Antisense Strand to SEQ ID NO: 493931
ucuccuccagcauaucgcc

SEQ ID NO: 493933 - RNA, 19 nt, Artificial Sequence
  Description of Artificial Sequence: Synthetic oligonucleotide
  Sense strand starting at position 2949 of SEQ ID NO: 317476
acagacaugccuugggaaa

SEQ ID NO: 493934 - RNA, 19 nt, Artificial Sequence
  Description of Artificial Sequence: Synthetic oligonucleotide
  Antisense Strand to SEQ ID NO: 493933
uuucccaaggcaugucugu

SEQ ID NO: 493935 - RNA, 19 nt, Artificial Sequence
  Description of Artificial Sequence: Synthetic oligonucleotide
  Sense strand starting at position 2950 of SEQ ID NO: 317476
cagacaugccuugggaaau

SEQ ID NO: 493936 - RNA, 19 nt, Artificial Sequence
  Description of Artificial Sequence: Synthetic oligonucleotide
  Antisense Strand to SEQ ID NO: 493935
auuucccaaggcaugucug

SEQ ID NO: 493937 - RNA, 19 nt, Artificial Sequence
  Description of Artificial Sequence: Synthetic oligonucleotide
  Sense strand starting at position 2956 of SEQ ID NO: 317476
ugccuugggaaaugugaga

SEQ ID NO: 493938 - RNA, 19 nt, Artificial Sequence
  Description of Artificial Sequence: Synthetic oligonucleotide
  Antisense Strand to SEQ ID NO: 493937
ucucacauuucccaaggca

SEQ ID NO: 493939 - RNA, 19 nt, Artificial Sequence
  Description of Artificial Sequence: Synthetic oligonucleotide
  Sense strand starting at position 3021 of SEQ ID NO: 317476
uaucaauccugguugguaa

SEQ ID NO: 493940 - RNA, 19 nt, Artificial Sequence
  Description of Artificial Sequence: Synthetic oligonucleotide
  Antisense Strand to SEQ ID NO: 493939
uuaccaaccaggauugaua

SEQ ID NO: 493941 - RNA, 19 nt, Artificial Sequence
  Description of Artificial Sequence: Synthetic oligonucleotide
  Sense strand starting at position 3022 of SEQ ID NO: 317476
aucaauccugguugguaaa

SEQ ID NO: 493942 - RNA, 19 nt, Artificial Sequence
  Description of Artificial Sequence: Synthetic oligonucleotide
  Antisense Strand to SEQ ID NO: 493941
uuuaccaaccaggauugau

SEQ ID NO: 493943 - RNA, 19 nt, Artificial Sequence
  Description of Artificial Sequence: Synthetic oligonucleotide
  Sense strand starting at position 3210 of SEQ ID NO: 317476
uccuuaaccugaguuauga

SEQ ID NO: 493944 - RNA, 19 nt, Artificial Sequence
  Description of Artificial Sequence: Synthetic oligonucleotide
  Antisense Strand to SEQ ID NO: 493943
ucauaacucagguuaagga

SEQ ID NO: 493945 - RNA, 19 nt, Artificial Sequence
  Description of Artificial Sequence: Synthetic oligonucleotide
  Sense strand starting at position 3530 of SEQ ID NO: 317476
acagaaugcuaugcaaauu

SEQ ID NO: 493946 - RNA, 19 nt, Artificial Sequence
  Description of Artificial Sequence: Synthetic oligonucleotide
  Antisense Strand to SEQ ID NO: 493945
aauuugcauagcauucugu

SEQ ID NO: 493947 - RNA, 19 nt, Artificial Sequence
  Description of Artificial Sequence: Synthetic oligonucleotide
  Sense strand starting at position 3729 of SEQ ID NO: 317476
ugggauaacucagcuacuu

SEQ ID NO: 493948 - RNA, 19 nt, Artificial Sequence
  Description of Artificial Sequence: Synthetic oligonucleotide
  Antisense Strand to SEQ ID NO: 493947
aaguagcugaguuauccca

SEQ ID NO: 493949 - RNA, 19 nt, Artificial Sequence
  Description of Artificial Sequence: Synthetic oligonucleotide
  Sense strand starting at position 42 of SEQ ID NO: 317477
ucuucugugggucaauaaa

SEQ ID NO: 493950 - RNA, 19 nt, Artificial Sequence
  Description of Artificial Sequence: Synthetic oligonucleotide
  Antisense Strand to SEQ ID NO: 493949
uuuauugacccacagaaga

SEQ ID NO: 493951 - RNA, 19 nt, Artificial Sequence
  Description of Artificial Sequence: Synthetic oligonucleotide
  Sense strand starting at position 78 of SEQ ID NO: 317477
ugcucuugaccucaagaag

SEQ ID NO: 493952 - RNA, 19 nt, Artificial Sequence
  Description of Artificial Sequence: Synthetic oligonucleotide
  Antisense Strand to SEQ ID NO: 493951
cuucuugaggucaagagca

SEQ ID NO: 493953 - RNA, 19 nt, Artificial Sequence
  Description of Artificial Sequence: Synthetic oligonucleotide
  Sense strand starting at position 199 of SEQ ID NO: 317477
ggacccauucuggguuaga

SEQ ID NO: 493954 - RNA, 19 nt, Artificial Sequence
  Description of Artificial Sequence: Synthetic oligonucleotide
  Antisense Strand to SEQ ID NO: 493953
ucuaacccagaaugggucc

SEQ ID NO: 493955 - RNA, 19 nt, Artificial Sequence
  Description of Artificial Sequence: Synthetic oligonucleotide
  Sense strand starting at position 200 of SEQ ID NO: 317477
gacccauucuggguuagaa

SEQ ID NO: 493956 - RNA, 19 nt, Artificial Sequence
  Description of Artificial Sequence: Synthetic oligonucleotide
  Antisense Strand to SEQ ID NO: 493955
uucuaacccagaauggguc

SEQ ID NO: 493957 - RNA, 19 nt, Artificial Sequence
  Description of Artificial Sequence: Synthetic oligonucleotide
  Sense strand starting at position 280 of SEQ ID NO: 317477
ucuugaggucaucagcaaa

SEQ ID NO: 493958 - RNA, 19 nt, Artificial Sequence
  Description of Artificial Sequence: Synthetic oligonucleotide
  Antisense Strand to SEQ ID NO: 493957
uuugcugaugaccucaaga

SEQ ID NO: 493959 - RNA, 19 nt, Artificial Sequence
  Description of Artificial Sequence: Synthetic oligonucleotide
  Sense strand starting at position 283 of SEQ ID NO: 317477
ugaggucaucagcaaagua

SEQ ID NO: 493960 - RNA, 19 nt, Artificial Sequence
  Description of Artificial Sequence: Synthetic oligonucleotide
  Antisense Strand to SEQ ID NO: 493959
uacuuugcugaugaccuca

SEQ ID NO: 493961 - RNA, 19 nt, Artificial Sequence
  Description of Artificial Sequence: Synthetic oligonucleotide
  Sense strand starting at position 330 of SEQ ID NO: 317477
ggugguucccaccacaaga

SEQ ID NO: 493962 - RNA, 19 nt, Artificial Sequence
  Description of Artificial Sequence: Synthetic oligonucleotide
  Antisense Strand to SEQ ID NO: 493961
ucuuguggugggaaccacc

SEQ ID NO: 493963 - RNA, 19 nt, Artificial Sequence
  Description of Artificial Sequence: Synthetic oligonucleotide
  Sense strand starting at position 351 of SEQ ID NO: 317477
acaucaaagucaccguuaa

SEQ ID NO: 493964 - RNA, 19 nt, Artificial Sequence
  Description of Artificial Sequence: Synthetic oligonucleotide
  Antisense Strand to SEQ ID NO: 493963
uuaacggugacuuugaugu

SEQ ID NO: 493965 - RNA, 19 nt, Artificial Sequence
  Description of Artificial Sequence: Synthetic oligonucleotide
  Sense strand starting at position 487 of SEQ ID NO: 317477
auucccauucuagggaaua

SEQ ID NO: 493966 - RNA, 19 nt, Artificial Sequence
  Description of Artificial Sequence: Synthetic oligonucleotide
  Antisense Strand to SEQ ID NO: 493965
uauucccuagaaugggaau

SEQ ID NO: 493967 - RNA, 19 nt, Artificial Sequence
  Description of Artificial Sequence: Synthetic oligonucleotide
  Sense strand starting at position 848 of SEQ ID NO: 317477
cuaggaauggcauguaagu

SEQ ID NO: 493968 - RNA, 19 nt, Artificial Sequence
  Description of Artificial Sequence: Synthetic oligonucleotide
  Antisense Strand to SEQ ID NO: 493967
acuuacaugccauuccuag

SEQ ID NO: 493969 - RNA, 19 nt, Artificial Sequence
  Description of Artificial Sequence: Synthetic oligonucleotide
  Sense strand starting at position 885 of SEQ ID NO: 317477
gcuuucucuggagauuaau

SEQ ID NO: 493970 - RNA, 19 nt, Artificial Sequence
  Description of Artificial Sequence: Synthetic oligonucleotide
  Antisense Strand to SEQ ID NO: 493969
auuaaucuccagagaaagc

SEQ ID NO: 493971 - RNA, 19 nt, Artificial Sequence
  Description of Artificial Sequence: Synthetic oligonucleotide
  Sense strand starting at position 994 of SEQ ID NO: 317477
guauuuacuuugcuuuaca

SEQ ID NO: 493972 - RNA, 19 nt, Artificial Sequence
  Description of Artificial Sequence: Synthetic oligonucleotide
  Antisense Strand to SEQ ID NO: 493971
uguaaagcaaaguaaauac

SEQ ID NO: 493973 - RNA, 19 nt, Artificial Sequence
  Description of Artificial Sequence: Synthetic oligonucleotide
  Sense strand starting at position 1024 of SEQ ID NO: 317477
aggcaucugauuugcagua

SEQ ID NO: 493974 - RNA, 19 nt, Artificial Sequence
  Description of Artificial Sequence: Synthetic oligonucleotide
  Antisense Strand to SEQ ID NO: 493973
uacugcaaaucagaugccu

SEQ ID NO: 493975 - RNA, 19 nt, Artificial Sequence
  Description of Artificial Sequence: Synthetic oligonucleotide
  Sense strand starting at position 1025 of SEQ ID NO: 317477
ggcaucugauuugcaguaa

SEQ ID NO: 493976 - RNA, 19 nt, Artificial Sequence
  Description of Artificial Sequence: Synthetic oligonucleotide
  Antisense Strand to SEQ ID NO: 493975
uuacugcaaaucagaugcc

SEQ ID NO: 493977 - RNA, 19 nt, Artificial Sequence
  Description of Artificial Sequence: Synthetic oligonucleotide
  Sense strand starting at position 1537 of SEQ ID NO: 317477
auguacugguuacuuagau

SEQ ID NO: 493978 - RNA, 19 nt, Artificial Sequence
  Description of Artificial Sequence: Synthetic oligonucleotide
  Antisense Strand to SEQ ID NO: 493977
aucuaaguaaccaguacau

SEQ ID NO: 493979 - RNA, 19 nt, Artificial Sequence
  Description of Artificial Sequence: Synthetic oligonucleotide
  Sense strand starting at position 1538 of SEQ ID NO: 317477
uguacugguuacuuagaua

SEQ ID NO: 493980 - RNA, 19 nt, Artificial Sequence
  Description of Artificial Sequence: Synthetic oligonucleotide
  Antisense Strand to SEQ ID NO: 493979
uaucuaaguaaccaguaca

SEQ ID NO: 493981 - RNA, 19 nt, Artificial Sequence
  Description of Artificial Sequence: Synthetic oligonucleotide
  Sense strand starting at position 1595 of SEQ ID NO: 317477
agcaaaucuuagcuaaaga

SEQ ID NO: 493982 - RNA, 19 nt, Artificial Sequence
  Description of Artificial Sequence: Synthetic oligonucleotide
  Antisense Strand to SEQ ID NO: 493981
ucuuuagcuaagauuugcu

SEQ ID NO: 493983 - RNA, 19 nt, Artificial Sequence
  Description of Artificial Sequence: Synthetic oligonucleotide
  Sense strand starting at position 1621 of SEQ ID NO: 317477
cuagccauuucuguucuua

SEQ ID NO: 493984 - RNA, 19 nt, Artificial Sequence
  Description of Artificial Sequence: Synthetic oligonucleotide
  Antisense Strand to SEQ ID NO: 493983
uaagaacagaaauggcuag

SEQ ID NO: 493985 - RNA, 19 nt, Artificial Sequence
  Description of Artificial Sequence: Synthetic oligonucleotide
  Sense strand starting at position 1623 of SEQ ID NO: 317477
agccauuucuguucuuauu

SEQ ID NO: 493986 - RNA, 19 nt, Artificial Sequence
  Description of Artificial Sequence: Synthetic oligonucleotide
  Antisense Strand to SEQ ID NO: 493985
aauaagaacagaaauggcu

SEQ ID NO: 493987 - RNA, 19 nt, Artificial Sequence
  Description of Artificial Sequence: Synthetic oligonucleotide
  Sense strand starting at position 1671 of SEQ ID NO: 317477
ccaucaaugcuagauguga

SEQ ID NO: 493988 - RNA, 19 nt, Artificial Sequence
  Description of Artificial Sequence: Synthetic oligonucleotide
  Antisense Strand to SEQ ID NO: 493987
ucacaucuagcauugaugg

SEQ ID NO: 493989 - RNA, 19 nt, Artificial Sequence
  Description of Artificial Sequence: Synthetic oligonucleotide
  Sense strand starting at position 1679 of SEQ ID NO: 317477
gcuagaugugaucaacuca

SEQ ID NO: 493990 - RNA, 19 nt, Artificial Sequence
  Description of Artificial Sequence: Synthetic oligonucleotide
  Antisense Strand to SEQ ID NO: 493989
ugaguugaucacaucuagc

SEQ ID NO: 493991 - RNA, 19 nt, Artificial Sequence
  Description of Artificial Sequence: Synthetic oligonucleotide
  Sense strand starting at position 1947 of SEQ ID NO: 317477
aacagaagugacuguggau

SEQ ID NO: 493992 - RNA, 19 nt, Artificial Sequence
  Description of Artificial Sequence: Synthetic oligonucleotide
  Antisense Strand to SEQ ID NO: 493991
auccacagucacuucuguu

SEQ ID NO: 493993 - RNA, 19 nt, Artificial Sequence
  Description of Artificial Sequence: Synthetic oligonucleotide
  Sense strand starting at position 2038 of SEQ ID NO: 317477
uucccaggaugucucaaau

SEQ ID NO: 493994 - RNA, 19 nt, Artificial Sequence
  Description of Artificial Sequence: Synthetic oligonucleotide
  Antisense Strand to SEQ ID NO: 493993
auuugagacauccugggaa

SEQ ID NO: 493995 - RNA, 19 nt, Artificial Sequence
  Description of Artificial Sequence: Synthetic oligonucleotide
  Sense strand starting at position 2164 of SEQ ID NO: 317477
cacagaaagccugggcaau

SEQ ID NO: 493996 - RNA, 19 nt, Artificial Sequence
  Description of Artificial Sequence: Synthetic oligonucleotide
  Antisense Strand to SEQ ID NO: 493995
auugcccaggcuuucugug

SEQ ID NO: 493997 - RNA, 19 nt, Artificial Sequence
  Description of Artificial Sequence: Synthetic oligonucleotide
  Sense strand starting at position 2232 of SEQ ID NO: 317477
agagcaauuagguaacugu

SEQ ID NO: 493998 - RNA, 19 nt, Artificial Sequence
  Description of Artificial Sequence: Synthetic oligonucleotide
  Antisense Strand to SEQ ID NO: 493997
acaguuaccuaauugcucu

SEQ ID NO: 493999 - RNA, 19 nt, Artificial Sequence
  Description of Artificial Sequence: Synthetic oligonucleotide
  Sense strand starting at position 2315 of SEQ ID NO: 317477
uguagcuugguagaacuua

SEQ ID NO: 494000 - RNA, 19 nt, Artificial Sequence
  Description of Artificial Sequence: Synthetic oligonucleotide
  Antisense Strand to SEQ ID NO: 493999
uaaguucuaccaagcuaca

SEQ ID NO: 494001 - RNA, 19 nt, Artificial Sequence
  Description of Artificial Sequence: Synthetic oligonucleotide
  Sense strand starting at position 2449 of SEQ ID NO: 317477
ucuauauuggcagaaaggu

SEQ ID NO: 494002 - RNA, 19 nt, Artificial Sequence
  Description of Artificial Sequence: Synthetic oligonucleotide
  Antisense Strand to SEQ ID NO: 494001
accuuucugccaauauaga

SEQ ID NO: 494003 - RNA, 19 nt, Artificial Sequence
  Description of Artificial Sequence: Synthetic oligonucleotide
  Sense strand starting at position 2464 of SEQ ID NO: 317477
agguuaaacuugucucaag

SEQ ID NO: 494004 - RNA, 19 nt, Artificial Sequence
  Description of Artificial Sequence: Synthetic oligonucleotide
  Antisense Strand to SEQ ID NO: 494003
cuugagacaaguuuaaccu

SEQ ID NO: 494005 - RNA, 19 nt, Artificial Sequence
  Description of Artificial Sequence: Synthetic oligonucleotide
  Sense strand starting at position 2511 of SEQ ID NO: 317477
uccagauugucuccaugac

SEQ ID NO: 494006 - RNA, 19 nt, Artificial Sequence
  Description of Artificial Sequence: Synthetic oligonucleotide
  Antisense Strand to SEQ ID NO: 494005
gucauggagacaaucugga

SEQ ID NO: 494007 - RNA, 19 nt, Artificial Sequence
  Description of Artificial Sequence: Synthetic oligonucleotide
  Sense strand starting at position 2512 of SEQ ID NO: 317477
ccagauugucuccaugacu

SEQ ID NO: 494008 - RNA, 19 nt, Artificial Sequence
  Description of Artificial Sequence: Synthetic oligonucleotide
  Antisense Strand to SEQ ID NO: 494007
agucauggagacaaucugg

SEQ ID NO: 494009 - RNA, 19 nt, Artificial Sequence
  Description of Artificial Sequence: Synthetic oligonucleotide
  Sense strand starting at position 2524 of SEQ ID NO: 317477
caugacucauuugaaguga

SEQ ID NO: 494010 - RNA, 19 nt, Artificial Sequence
  Description of Artificial Sequence: Synthetic oligonucleotide
  Antisense Strand to SEQ ID NO: 494009
ucacuucaaaugagucaug

SEQ ID NO: 494011 - RNA, 19 nt, Artificial Sequence
  Description of Artificial Sequence: Synthetic oligonucleotide
  Sense strand starting at position 2538 of SEQ ID NO: 317477
agugaaaucuucucaugga

SEQ ID NO: 494012 - RNA, 19 nt, Artificial Sequence
  Description of Artificial Sequence: Synthetic oligonucleotide
  Antisense Strand to SEQ ID NO: 494011
uccaugagaagauuucacu

SEQ ID NO: 494013 - RNA, 19 nt, Artificial Sequence
  Description of Artificial Sequence: Synthetic oligonucleotide
  Sense strand starting at position 2976 of SEQ ID NO: 317477
aaaugagugagaugguucu

SEQ ID NO: 494014 - RNA, 19 nt, Artificial Sequence
  Description of Artificial Sequence: Synthetic oligonucleotide
  Antisense Strand to SEQ ID NO: 494013
agaaccaucucacucauuu

SEQ ID NO: 494015 - RNA, 19 nt, Artificial Sequence
  Description of Artificial Sequence: Synthetic oligonucleotide
  Sense strand starting at position 3153 of SEQ ID NO: 317477
augcauuacgauuacauau

SEQ ID NO: 494016 - RNA, 19 nt, Artificial Sequence
  Description of Artificial Sequence: Synthetic oligonucleotide
  Antisense Strand to SEQ ID NO: 494015
auauguaaucguaaugcau

SEQ ID NO: 494017 - RNA, 19 nt, Artificial Sequence
  Description of Artificial Sequence: Synthetic oligonucleotide
  Sense strand starting at position 3697 of SEQ ID NO: 317477
ugguaacauugaccuagaa

SEQ ID NO: 494018 - RNA, 19 nt, Artificial Sequence
  Description of Artificial Sequence: Synthetic oligonucleotide
  Antisense Strand to SEQ ID NO: 494017
uucuaggucaauguuacca

SEQ ID NO: 494019 - RNA, 19 nt, Artificial Sequence
  Description of Artificial Sequence: Synthetic oligonucleotide
  Sense strand starting at position 3883 of SEQ ID NO: 317477
uucuguuaugcagauaaac

SEQ ID NO: 494020 - RNA, 19 nt, Artificial Sequence
  Description of Artificial Sequence: Synthetic oligonucleotide
  Antisense Strand to SEQ ID NO: 494019
guuuaucugcauaacagaa

SEQ ID NO: 494021 - RNA, 19 nt, Artificial Sequence
  Description of Artificial Sequence: Synthetic oligonucleotide
  Sense strand starting at position 3913 of SEQ ID NO: 317477
uuucuauuagcucaagaga

SEQ ID NO: 494022 - RNA, 19 nt, Artificial Sequence
  Description of Artificial Sequence: Synthetic oligonucleotide
  Antisense Strand to SEQ ID NO: 494021
ucucuugagcuaauagaaa

SEQ ID NO: 494023 - RNA, 19 nt, Artificial Sequence
  Description of Artificial Sequence: Synthetic oligonucleotide
  Sense strand starting at position 3924 of SEQ ID NO: 317477
ucaagagagccauaugguu

SEQ ID NO: 494024 - RNA, 19 nt, Artificial Sequence
  Description of Artificial Sequence: Synthetic oligonucleotide
  Antisense Strand to SEQ ID NO: 494023
aaccauauggcucucuuga

SEQ ID NO: 494025 - RNA, 19 nt, Artificial Sequence
  Description of Artificial Sequence: Synthetic oligonucleotide
  Sense strand starting at position 3954 of SEQ ID NO: 317477
aguaauaacucuucugaag

SEQ ID NO: 494026 - RNA, 19 nt, Artificial Sequence
  Description of Artificial Sequence: Synthetic oligonucleotide
  Antisense Strand to SEQ ID NO: 494025
cuucagaagaguuauuacu

SEQ ID NO: 494027 - RNA, 19 nt, Artificial Sequence
  Description of Artificial Sequence: Synthetic oligonucleotide
  Sense strand starting at position 3966 of SEQ ID NO: 317477
ucugaagagccacaaguuu

SEQ ID NO: 494028 - RNA, 19 nt, Artificial Sequence
  Description of Artificial Sequence: Synthetic oligonucleotide
  Antisense Strand to SEQ ID NO: 494027
aaacuuguggcucuucaga

SEQ ID NO: 494029 - RNA, 19 nt, Artificial Sequence
  Description of Artificial Sequence: Synthetic oligonucleotide
  Sense strand starting at position 313 of SEQ ID NO: 317478
auaaucuugcuaggagaga

SEQ ID NO: 494030 - RNA, 19 nt, Artificial Sequence
  Description of Artificial Sequence: Synthetic oligonucleotide
  Antisense Strand to SEQ ID NO: 494029
ucucuccuagcaagauuau

SEQ ID NO: 494031 - RNA, 19 nt, Artificial Sequence
  Description of Artificial Sequence: Synthetic oligonucleotide
  Sense strand starting at position 406 of SEQ ID NO: 317478
cucugcaaaucauuaggaa

SEQ ID NO: 494032 - RNA, 19 nt, Artificial Sequence
  Description of Artificial Sequence: Synthetic oligonucleotide
  Antisense Strand to SEQ ID NO: 494031
uuccuaaugauuugcagag

SEQ ID NO: 494033 - RNA, 19 nt, Artificial Sequence
  Description of Artificial Sequence: Synthetic oligonucleotide
  Sense strand starting at position 786 of SEQ ID NO: 317478
uuagaagaucucgaccguu

SEQ ID NO: 494034 - RNA, 19 nt, Artificial Sequence
  Description of Artificial Sequence: Synthetic oligonucleotide
  Antisense Strand to SEQ ID NO: 494033
aacggucgagaucuucuaa

SEQ ID NO: 494035 - RNA, 19 nt, Artificial Sequence
  Description of Artificial Sequence: Synthetic oligonucleotide
  Sense strand starting at position 813 of SEQ ID NO: 317478
auacaugaggccugaauau

SEQ ID NO: 494036 - RNA, 19 nt, Artificial Sequence
  Description of Artificial Sequence: Synthetic oligonucleotide
  Antisense Strand to SEQ ID NO: 494035
auauucaggccucauguau

SEQ ID NO: 494037 - RNA, 19 nt, Artificial Sequence
  Description of Artificial Sequence: Synthetic oligonucleotide
  Sense strand starting at position 860 of SEQ ID NO: 317478
gagaguaauuaaguuccau

SEQ ID NO: 494038 - RNA, 19 nt, Artificial Sequence
  Description of Artificial Sequence: Synthetic oligonucleotide
  Antisense Strand to SEQ ID NO: 494037
auggaacuuaauuacucuc

SEQ ID NO: 494039 - RNA, 19 nt, Artificial Sequence
  Description of Artificial Sequence: Synthetic oligonucleotide
  Sense strand starting at position 1278 of SEQ ID NO: 317478
gcaugaaaccaguaagcca

SEQ ID NO: 494040 - RNA, 19 nt, Artificial Sequence
  Description of Artificial Sequence: Synthetic oligonucleotide
  Antisense Strand to SEQ ID NO: 494039
uggcuuacugguuucaugc

SEQ ID NO: 494041 - RNA, 19 nt, Artificial Sequence
  Description of Artificial Sequence: Synthetic oligonucleotide
  Sense strand starting at position 1322 of SEQ ID NO: 317478
uugaaaugucaucaugcua

SEQ ID NO: 494042 - RNA, 19 nt, Artificial Sequence
  Description of Artificial Sequence: Synthetic oligonucleotide
  Antisense Strand to SEQ ID NO: 494041
uagcaugaugacauuucaa

SEQ ID NO: 494043 - RNA, 19 nt, Artificial Sequence
  Description of Artificial Sequence: Synthetic oligonucleotide
  Sense strand starting at position 1346 of SEQ ID NO: 317478
acgagccuuccauauaaga

SEQ ID NO: 494044 - RNA, 19 nt, Artificial Sequence
  Description of Artificial Sequence: Synthetic oligonucleotide
  Antisense Strand to SEQ ID NO: 494043
ucuuauauggaaggcucgu

SEQ ID NO: 494045 - RNA, 19 nt, Artificial Sequence
  Description of Artificial Sequence: Synthetic oligonucleotide
  Sense strand starting at position 1355 of SEQ ID NO: 317478
ccauauaagaguugggucu

SEQ ID NO: 494046 - RNA, 19 nt, Artificial Sequence
  Description of Artificial Sequence: Synthetic oligonucleotide
  Antisense Strand to SEQ ID NO: 494045
agacccaacucuuauaugg

SEQ ID NO: 494047 - RNA, 19 nt, Artificial Sequence
  Description of Artificial Sequence: Synthetic oligonucleotide
  Sense strand starting at position 1521 of SEQ ID NO: 317478
ugaauuguggcaugaauaa

SEQ ID NO: 494048 - RNA, 19 nt, Artificial Sequence
  Description of Artificial Sequence: Synthetic oligonucleotide
  Antisense Strand to SEQ ID NO: 494047
uuauucaugccacaauuca

SEQ ID NO: 494049 - RNA, 19 nt, Artificial Sequence
  Description of Artificial Sequence: Synthetic oligonucleotide
  Sense strand starting at position 1642 of SEQ ID NO: 317478
caacacugugcugaagagu

SEQ ID NO: 494050 - RNA, 19 nt, Artificial Sequence
  Description of Artificial Sequence: Synthetic oligonucleotide
  Antisense Strand to SEQ ID NO: 494049
acucuucagcacaguguug

SEQ ID NO: 494051 - RNA, 19 nt, Artificial Sequence
  Description of Artificial Sequence: Synthetic oligonucleotide
  Sense strand starting at position 1648 of SEQ ID NO: 317478
ugugcugaagagugagaaa

SEQ ID NO: 494052 - RNA, 19 nt, Artificial Sequence
  Description of Artificial Sequence: Synthetic oligonucleotide
  Antisense Strand to SEQ ID NO: 494051
uuucucacucuucagcaca

SEQ ID NO: 494053 - RNA, 19 nt, Artificial Sequence
  Description of Artificial Sequence: Synthetic oligonucleotide
  Sense strand starting at position 1756 of SEQ ID NO: 317478
ggaugaauuccuggcugag

SEQ ID NO: 494054 - RNA, 19 nt, Artificial Sequence
  Description of Artificial Sequence: Synthetic oligonucleotide
  Antisense Strand to SEQ ID NO: 494053
cucagccaggaauucaucc

SEQ ID NO: 494055 - RNA, 19 nt, Artificial Sequence
  Description of Artificial Sequence: Synthetic oligonucleotide
  Sense strand starting at position 1758 of SEQ ID NO: 317478
augaauuccuggcugagaa

SEQ ID NO: 494056 - RNA, 19 nt, Artificial Sequence
  Description of Artificial Sequence: Synthetic oligonucleotide
  Antisense Strand to SEQ ID NO: 494055
uucucagccaggaauucau

SEQ ID NO: 494057 - RNA, 19 nt, Artificial Sequence
  Description of Artificial Sequence: Synthetic oligonucleotide
  Sense strand starting at position 1759 of SEQ ID NO: 317478
ugaauuccuggcugagaac

SEQ ID NO: 494058 - RNA, 19 nt, Artificial Sequence
  Description of Artificial Sequence: Synthetic oligonucleotide
  Antisense Strand to SEQ ID NO: 494057
guucucagccaggaauuca

SEQ ID NO: 494059 - RNA, 19 nt, Artificial Sequence
  Description of Artificial Sequence: Synthetic oligonucleotide
  Sense strand starting at position 2423 of SEQ ID NO: 317478
ccuaguaaggguuagagca

SEQ ID NO: 494060 - RNA, 19 nt, Artificial Sequence
  Description of Artificial Sequence: Synthetic oligonucleotide
  Antisense Strand to SEQ ID NO: 494059
ugcucuaacccuuacuagg

SEQ ID NO: 494061 - RNA, 19 nt, Artificial Sequence
  Description of Artificial Sequence: Synthetic oligonucleotide
  Sense strand starting at position 2489 of SEQ ID NO: 317478
cgcuguauugucucuuauu

SEQ ID NO: 494062 - RNA, 19 nt, Artificial Sequence
  Description of Artificial Sequence: Synthetic oligonucleotide
  Antisense Strand to SEQ ID NO: 494061
aauaagagacaauacagcg

SEQ ID NO: 494063 - RNA, 19 nt, Artificial Sequence
  Description of Artificial Sequence: Synthetic oligonucleotide
  Sense strand starting at position 2525 of SEQ ID NO: 317478
ggaaauauuuacuagguca

SEQ ID NO: 494064 - RNA, 19 nt, Artificial Sequence
  Description of Artificial Sequence: Synthetic oligonucleotide
  Antisense Strand to SEQ ID NO: 494063
ugaccuaguaaauauuucc

SEQ ID NO: 494065 - RNA, 19 nt, Artificial Sequence
  Description of Artificial Sequence: Synthetic oligonucleotide
  Sense strand starting at position 2650 of SEQ ID NO: 317478
guauuaguucauggaaagg

SEQ ID NO: 494066 - RNA, 19 nt, Artificial Sequence
  Description of Artificial Sequence: Synthetic oligonucleotide
  Antisense Strand to SEQ ID NO: 494065
ccuuuccaugaacuaauac

SEQ ID NO: 494067 - RNA, 19 nt, Artificial Sequence
  Description of Artificial Sequence: Synthetic oligonucleotide
  Sense strand starting at position 2724 of SEQ ID NO: 317478
ccucauaugucauuugugu

SEQ ID NO: 494068 - RNA, 19 nt, Artificial Sequence
  Description of Artificial Sequence: Synthetic oligonucleotide
  Antisense Strand to SEQ ID NO: 494067
acacaaaugacauaugagg

SEQ ID NO: 494069 - RNA, 19 nt, Artificial Sequence
  Description of Artificial Sequence: Synthetic oligonucleotide
  Sense strand starting at position 2726 of SEQ ID NO: 317478
ucauaugucauuuguguag

SEQ ID NO: 494070 - RNA, 19 nt, Artificial Sequence
  Description of Artificial Sequence: Synthetic oligonucleotide
  Antisense Strand to SEQ ID NO: 494069
cuacacaaaugacauauga

SEQ ID NO: 494071 - RNA, 19 nt, Artificial Sequence
  Description of Artificial Sequence: Synthetic oligonucleotide
  Sense strand starting at position 2729 of SEQ ID NO: 317478
uaugucauuuguguagguu

SEQ ID NO: 494072 - RNA, 19 nt, Artificial Sequence
  Description of Artificial Sequence: Synthetic oligonucleotide
  Antisense Strand to SEQ ID NO: 494071
aaccuacacaaaugacaua

SEQ ID NO: 494073 - RNA, 19 nt, Artificial Sequence
  Description of Artificial Sequence: Synthetic oligonucleotide
  Sense strand starting at position 2730 of SEQ ID NO: 317478
augucauuuguguagguuu

SEQ ID NO: 494074 - RNA, 19 nt, Artificial Sequence
  Description of Artificial Sequence: Synthetic oligonucleotide
  Antisense Strand to SEQ ID NO: 494073
aaaccuacacaaaugacau

SEQ ID NO: 494075 - RNA, 19 nt, Artificial Sequence
  Description of Artificial Sequence: Synthetic oligonucleotide
  Sense strand starting at position 2749 of SEQ ID NO: 317478
ugcauauauggaggaauug

SEQ ID NO: 494076 - RNA, 19 nt, Artificial Sequence
  Description of Artificial Sequence: Synthetic oligonucleotide
  Antisense Strand to SEQ ID NO: 494075
caauuccuccauauaugca

SEQ ID NO: 494077 - RNA, 19 nt, Artificial Sequence
  Description of Artificial Sequence: Synthetic oligonucleotide
  Sense strand starting at position 2761 of SEQ ID NO: 317478
ggaauugugaauugaaguu

SEQ ID NO: 494078 - RNA, 19 nt, Artificial Sequence
  Description of Artificial Sequence: Synthetic oligonucleotide
  Antisense Strand to SEQ ID NO: 494077
aacuucaauucacaauucc

SEQ ID NO: 494079 - RNA, 19 nt, Artificial Sequence
  Description of Artificial Sequence: Synthetic oligonucleotide
  Sense strand starting at position 2833 of SEQ ID NO: 317478
guagaauccucauugaaca

SEQ ID NO: 494080 - RNA, 19 nt, Artificial Sequence
  Description of Artificial Sequence: Synthetic oligonucleotide
  Antisense Strand to SEQ ID NO: 494079
uguucaaugaggauucuac

SEQ ID NO: 494081 - RNA, 19 nt, Artificial Sequence
  Description of Artificial Sequence: Synthetic oligonucleotide
  Sense strand starting at position 2903 of SEQ ID NO: 317478
cuaaacuugcccuaaggau

SEQ ID NO: 494082 - RNA, 19 nt, Artificial Sequence
  Description of Artificial Sequence: Synthetic oligonucleotide
  Antisense Strand to SEQ ID NO: 494081
auccuuagggcaaguuuag

SEQ ID NO: 494083 - RNA, 19 nt, Artificial Sequence
  Description of Artificial Sequence: Synthetic oligonucleotide
  Sense strand starting at position 2970 of SEQ ID NO: 317478
agguuaagguacucuagga

SEQ ID NO: 494084 - RNA, 19 nt, Artificial Sequence
  Description of Artificial Sequence: Synthetic oligonucleotide
  Antisense Strand to SEQ ID NO: 494083
uccuagaguaccuuaaccu

SEQ ID NO: 494085 - RNA, 19 nt, Artificial Sequence
  Description of Artificial Sequence: Synthetic oligonucleotide
  Sense strand starting at position 3203 of SEQ ID NO: 317478
ggguguggaccauacacau

SEQ ID NO: 494086 - RNA, 19 nt, Artificial Sequence
  Description of Artificial Sequence: Synthetic oligonucleotide
  Antisense Strand to SEQ ID NO: 494085
auguguaugguccacaccc

SEQ ID NO: 494087 - RNA, 19 nt, Artificial Sequence
  Description of Artificial Sequence: Synthetic oligonucleotide
  Sense strand starting at position 3232 of SEQ ID NO: 317478
ugagaaauguaccuaguau

SEQ ID NO: 494088 - RNA, 19 nt, Artificial Sequence
  Description of Artificial Sequence: Synthetic oligonucleotide
  Antisense Strand to SEQ ID NO: 494087
auacuagguacauuucuca

SEQ ID NO: 494089 - RNA, 19 nt, Artificial Sequence
  Description of Artificial Sequence: Synthetic oligonucleotide
  Sense strand starting at position 3456 of SEQ ID NO: 317478
uuacucuuggucugaagac

SEQ ID NO: 494090 - RNA, 19 nt, Artificial Sequence
  Description of Artificial Sequence: Synthetic oligonucleotide
  Antisense Strand to SEQ ID NO: 494089
gucuucagaccaagaguaa

SEQ ID NO: 494091 - RNA, 19 nt, Artificial Sequence
  Description of Artificial Sequence: Synthetic oligonucleotide
  Sense strand starting at position 3544 of SEQ ID NO: 317478
uccaucuacgagugagaaa

SEQ ID NO: 494092 - RNA, 19 nt, Artificial Sequence
  Description of Artificial Sequence: Synthetic oligonucleotide
  Antisense Strand to SEQ ID NO: 494091
uuucucacucguagaugga

SEQ ID NO: 494093 - RNA, 19 nt, Artificial Sequence
  Description of Artificial Sequence: Synthetic oligonucleotide
  Sense strand starting at position 3611 of SEQ ID NO: 317478
cagguaaaguuccuagauu

SEQ ID NO: 494094 - RNA, 19 nt, Artificial Sequence
  Description of Artificial Sequence: Synthetic oligonucleotide
  Antisense Strand to SEQ ID NO: 494093
aaucuaggaacuuuaccug

SEQ ID NO: 494095 - RNA, 19 nt, Artificial Sequence
  Description of Artificial Sequence: Synthetic oligonucleotide
  Sense strand starting at position 3630 of SEQ ID NO: 317478
uugguuugaguccaaucuu

SEQ ID NO: 494096 - RNA, 19 nt, Artificial Sequence
  Description of Artificial Sequence: Synthetic oligonucleotide
  Antisense Strand to SEQ ID NO: 494095
aagauuggacucaaaccaa

SEQ ID NO: 494097 - RNA, 19 nt, Artificial Sequence
  Description of Artificial Sequence: Synthetic oligonucleotide
  Sense strand starting at position 3645 of SEQ ID NO: 317478
ucuuccuuucuaggaaaug

SEQ ID NO: 494098 - RNA, 19 nt, Artificial Sequence
  Description of Artificial Sequence: Synthetic oligonucleotide
  Antisense Strand to SEQ ID NO: 494097
cauuuccuagaaaggaaga

SEQ ID NO: 494099 - RNA, 19 nt, Artificial Sequence
  Description of Artificial Sequence: Synthetic oligonucleotide
  Sense strand starting at position 3706 of SEQ ID NO: 317478
guugauuuguuucuguaug

SEQ ID NO: 494100 - RNA, 19 nt, Artificial Sequence
  Description of Artificial Sequence: Synthetic oligonucleotide
  Antisense Strand to SEQ ID NO: 494099
cauacagaaacaaaucaac

SEQ ID NO: 494101 - RNA, 19 nt, Artificial Sequence
  Description of Artificial Sequence: Synthetic oligonucleotide
  Sense strand starting at position 3708 of SEQ ID NO: 317478
ugauuuguuucuguauguu

SEQ ID NO: 494102 - RNA, 19 nt, Artificial Sequence
  Description of Artificial Sequence: Synthetic oligonucleotide
  Antisense Strand to SEQ ID NO: 494101
aacauacagaaacaaauca

SEQ ID NO: 494103 - RNA, 19 nt, Artificial Sequence
  Description of Artificial Sequence: Synthetic oligonucleotide
  Sense strand starting at position 3865 of SEQ ID NO: 317478
aggaauuaacguugaauaa

SEQ ID NO: 494104 - RNA, 19 nt, Artificial Sequence
  Description of Artificial Sequence: Synthetic oligonucleotide
  Antisense Strand to SEQ ID NO: 494103
uuauucaacguuaauuccu

SEQ ID NO: 494105 - RNA, 19 nt, Artificial Sequence
  Description of Artificial Sequence: Synthetic oligonucleotide
  Sense strand starting at position 3886 of SEQ ID NO: 317478
aaguuuacagguggaauca

SEQ ID NO: 494106 - RNA, 19 nt, Artificial Sequence
  Description of Artificial Sequence: Synthetic oligonucleotide
  Antisense Strand to SEQ ID NO: 494105
ugauuccaccuguaaacuu

SEQ ID NO: 494107 - RNA, 19 nt, Artificial Sequence
  Description of Artificial Sequence: Synthetic oligonucleotide
  Sense strand starting at position 3917 of SEQ ID NO: 317478
augaaucaguuucugauua

SEQ ID NO: 494108 - RNA, 19 nt, Artificial Sequence
  Description of Artificial Sequence: Synthetic oligonucleotide
  Antisense Strand to SEQ ID NO: 494107
uaaucagaaacugauucau

SEQ ID NO: 494109 - RNA, 19 nt, Artificial Sequence
  Description of Artificial Sequence: Synthetic oligonucleotide
  Sense strand starting at position 24 of SEQ ID NO: 317479
agguuaauuuaggaaagac

SEQ ID NO: 494110 - RNA, 19 nt, Artificial Sequence
  Description of Artificial Sequence: Synthetic oligonucleotide
  Antisense Strand to SEQ ID NO: 494109
gucuuuccuaaauuaaccu

SEQ ID NO: 494111 - RNA, 19 nt, Artificial Sequence
  Description of Artificial Sequence: Synthetic oligonucleotide
  Sense strand starting at position 101 of SEQ ID NO: 317479
caaagcuugccagaaaugu

SEQ ID NO: 494112 - RNA, 19 nt, Artificial Sequence
  Description of Artificial Sequence: Synthetic oligonucleotide
  Antisense Strand to SEQ ID NO: 494111
acauuucuggcaagcuuug

SEQ ID NO: 494113 - RNA, 19 nt, Artificial Sequence
  Description of Artificial Sequence: Synthetic oligonucleotide
  Sense strand starting at position 109 of SEQ ID NO: 317479
gccagaaaugucuacaaca

SEQ ID NO: 494114 - RNA, 19 nt, Artificial Sequence
  Description of Artificial Sequence: Synthetic oligonucleotide
  Antisense Strand to SEQ ID NO: 494113
uguuguagacauuucuggc

SEQ ID NO: 494115 - RNA, 19 nt, Artificial Sequence
  Description of Artificial Sequence: Synthetic oligonucleotide
  Sense strand starting at position 183 of SEQ ID NO: 317479
aggauugcauguucagaga

SEQ ID NO: 494116 - RNA, 19 nt, Artificial Sequence
  Description of Artificial Sequence: Synthetic oligonucleotide
  Antisense Strand to SEQ ID NO: 494115
ucucugaacaugcaauccu

SEQ ID NO: 494117 - RNA, 19 nt, Artificial Sequence
  Description of Artificial Sequence: Synthetic oligonucleotide
  Sense strand starting at position 211 of SEQ ID NO: 317479
ucuaguucuggguaaugua

SEQ ID NO: 494118 - RNA, 19 nt, Artificial Sequence
  Description of Artificial Sequence: Synthetic oligonucleotide
  Antisense Strand to SEQ ID NO: 494117
uacauuacccagaacuaga

SEQ ID NO: 494119 - RNA, 19 nt, Artificial Sequence
  Description of Artificial Sequence: Synthetic oligonucleotide
  Sense strand starting at position 218 of SEQ ID NO: 317479
cuggguaauguaggaauga

SEQ ID NO: 494120 - RNA, 19 nt, Artificial Sequence
  Description of Artificial Sequence: Synthetic oligonucleotide
  Antisense Strand to SEQ ID NO: 494119
ucauuccuacauuacccag

SEQ ID NO: 494121 - RNA, 19 nt, Artificial Sequence
  Description of Artificial Sequence: Synthetic oligonucleotide
  Sense strand starting at position 652 of SEQ ID NO: 317479
agcuguggucuuuaaauau

SEQ ID NO: 494122 - RNA, 19 nt, Artificial Sequence
  Description of Artificial Sequence: Synthetic oligonucleotide
  Antisense Strand to SEQ ID NO: 494121
auauuuaaagaccacagcu

SEQ ID NO: 494123 - RNA, 19 nt, Artificial Sequence
  Description of Artificial Sequence: Synthetic oligonucleotide
  Sense strand starting at position 658 of SEQ ID NO: 317479
ggucuuuaaauauggaguu

SEQ ID NO: 494124 - RNA, 19 nt, Artificial Sequence
  Description of Artificial Sequence: Synthetic oligonucleotide
  Antisense Strand to SEQ ID NO: 494123
aacuccauauuuaaagacc

SEQ ID NO: 494125 - RNA, 19 nt, Artificial Sequence
  Description of Artificial Sequence: Synthetic oligonucleotide
  Sense strand starting at position 1088 of SEQ ID NO: 317479
cuuauucugcagcaaagga

SEQ ID NO: 494126 - RNA, 19 nt, Artificial Sequence
  Description of Artificial Sequence: Synthetic oligonucleotide
  Antisense Strand to SEQ ID NO: 494125
uccuuugcugcagaauaag

SEQ ID NO: 494127 - RNA, 19 nt, Artificial Sequence
  Description of Artificial Sequence: Synthetic oligonucleotide
  Sense strand starting at position 1181 of SEQ ID NO: 317479
ucagauauccaauggagca

SEQ ID NO: 494128 - RNA, 19 nt, Artificial Sequence
  Description of Artificial Sequence: Synthetic oligonucleotide
  Antisense Strand to SEQ ID NO: 494127
ugcuccauuggauaucuga

SEQ ID NO: 494129 - RNA, 19 nt, Artificial Sequence
  Description of Artificial Sequence: Synthetic oligonucleotide
  Sense strand starting at position 1228 of SEQ ID NO: 317479
gcagcuauagaaggugaau

SEQ ID NO: 494130 - RNA, 19 nt, Artificial Sequence
  Description of Artificial Sequence: Synthetic oligonucleotide
  Antisense Strand to SEQ ID NO: 494129
auucaccuucuauagcugc

SEQ ID NO: 494131 - RNA, 19 nt, Artificial Sequence
  Description of Artificial Sequence: Synthetic oligonucleotide
  Sense strand starting at position 1230 of SEQ ID NO: 317479
agcuauagaaggugaauaa

SEQ ID NO: 494132 - RNA, 19 nt, Artificial Sequence
  Description of Artificial Sequence: Synthetic oligonucleotide
  Antisense Strand to SEQ ID NO: 494131
uuauucaccuucuauagcu

SEQ ID NO: 494133 - RNA, 19 nt, Artificial Sequence
  Description of Artificial Sequence: Synthetic oligonucleotide
  Sense strand starting at position 1261 of SEQ ID NO: 317479
caaguaaugcaagggaagu

SEQ ID NO: 494134 - RNA, 19 nt, Artificial Sequence
  Description of Artificial Sequence: Synthetic oligonucleotide
  Antisense Strand to SEQ ID NO: 494133
acuucccuugcauuacuug

SEQ ID NO: 494135 - RNA, 19 nt, Artificial Sequence
  Description of Artificial Sequence: Synthetic oligonucleotide
  Sense strand starting at position 1284 of SEQ ID NO: 317479
uggaaacuagcgugaaaga

SEQ ID NO: 494136 - RNA, 19 nt, Artificial Sequence
  Description of Artificial Sequence: Synthetic oligonucleotide
  Antisense Strand to SEQ ID NO: 494135
ucuuucacgcuaguuucca

SEQ ID NO: 494137 - RNA, 19 nt, Artificial Sequence
  Description of Artificial Sequence: Synthetic oligonucleotide
  Sense strand starting at position 1410 of SEQ ID NO: 317479
ggcugcuaagaaugggauu

SEQ ID NO: 494138 - RNA, 19 nt, Artificial Sequence
  Description of Artificial Sequence: Synthetic oligonucleotide
  Antisense Strand to SEQ ID NO: 494137
aaucccauucuuagcagcc

SEQ ID NO: 494139 - RNA, 19 nt, Artificial Sequence
  Description of Artificial Sequence: Synthetic oligonucleotide
  Sense strand starting at position 1478 of SEQ ID NO: 317479
acgaaaugauguuucgaug

SEQ ID NO: 494140 - RNA, 19 nt, Artificial Sequence
  Description of Artificial Sequence: Synthetic oligonucleotide
  Antisense Strand to SEQ ID NO: 494139
caucgaaacaucauuucgu

SEQ ID NO: 494141 - RNA, 19 nt, Artificial Sequence
  Description of Artificial Sequence: Synthetic oligonucleotide
  Sense strand starting at position 1563 of SEQ ID NO: 317479
gguagcuccagugaggaaa

SEQ ID NO: 494142 - RNA, 19 nt, Artificial Sequence
  Description of Artificial Sequence: Synthetic oligonucleotide
  Antisense Strand to SEQ ID NO: 494141
uuuccucacuggagcuacc

SEQ ID NO: 494143 - RNA, 19 nt, Artificial Sequence
  Description of Artificial Sequence: Synthetic oligonucleotide
  Sense strand starting at position 1586 of SEQ ID NO: 317479
gagaaauaaccuugcaguc

SEQ ID NO: 494144 - RNA, 19 nt, Artificial Sequence
  Description of Artificial Sequence: Synthetic oligonucleotide
  Antisense Strand to SEQ ID NO: 494143
gacugcaagguuauuucuc

SEQ ID NO: 494145 - RNA, 19 nt, Artificial Sequence
  Description of Artificial Sequence: Synthetic oligonucleotide
  Sense strand starting at position 2667 of SEQ ID NO: 317479
uuaggcugaucaccuuuaa

SEQ ID NO: 494146 - RNA, 19 nt, Artificial Sequence
  Description of Artificial Sequence: Synthetic oligonucleotide
  Antisense Strand to SEQ ID NO: 494145
uuaaaggugaucagccuaa

SEQ ID NO: 494147 - RNA, 19 nt, Artificial Sequence
  Description of Artificial Sequence: Synthetic oligonucleotide
  Sense strand starting at position 2706 of SEQ ID NO: 317479
aaaucucuuggcuaguaga

SEQ ID NO: 494148 - RNA, 19 nt, Artificial Sequence
  Description of Artificial Sequence: Synthetic oligonucleotide
  Antisense Strand to SEQ ID NO: 494147
ucuacuagccaagagauuu

SEQ ID NO: 494149 - RNA, 19 nt, Artificial Sequence
  Description of Artificial Sequence: Synthetic oligonucleotide
  Sense strand starting at position 2726 of SEQ ID NO: 317479
ggcuaauugaguuaguuac

SEQ ID NO: 494150 - RNA, 19 nt, Artificial Sequence
  Description of Artificial Sequence: Synthetic oligonucleotide
  Antisense Strand to SEQ ID NO: 494149
guaacuaacucaauuagcc

SEQ ID NO: 494151 - RNA, 19 nt, Artificial Sequence
  Description of Artificial Sequence: Synthetic oligonucleotide
  Sense strand starting at position 2728 of SEQ ID NO: 317479
cuaauugaguuaguuacau

SEQ ID NO: 494152 - RNA, 19 nt, Artificial Sequence
  Description of Artificial Sequence: Synthetic oligonucleotide
  Antisense Strand to SEQ ID NO: 494151
auguaacuaacucaauuag

SEQ ID NO: 494153 - RNA, 19 nt, Artificial Sequence
  Description of Artificial Sequence: Synthetic oligonucleotide
  Sense strand starting at position 2739 of SEQ ID NO: 317479
aguuacauuucucauggaa

SEQ ID NO: 494154 - RNA, 19 nt, Artificial Sequence
  Description of Artificial Sequence: Synthetic oligonucleotide
  Antisense Strand to SEQ ID NO: 494153
uuccaugagaaauguaacu

SEQ ID NO: 494155 - RNA, 19 nt, Artificial Sequence
  Description of Artificial Sequence: Synthetic oligonucleotide
  Sense strand starting at position 2858 of SEQ ID NO: 317479
augguuuaugcucaaauau

SEQ ID NO: 494156 - RNA, 19 nt, Artificial Sequence
  Description of Artificial Sequence: Synthetic oligonucleotide
  Antisense Strand to SEQ ID NO: 494155
auauuugagcauaaaccau

SEQ ID NO: 494157 - RNA, 19 nt, Artificial Sequence
  Description of Artificial Sequence: Synthetic oligonucleotide
  Sense strand starting at position 2955 of SEQ ID NO: 317479
ggaaccuucuaacuuugau

SEQ ID NO: 494158 - RNA, 19 nt, Artificial Sequence
  Description of Artificial Sequence: Synthetic oligonucleotide
  Antisense Strand to SEQ ID NO: 494157
aucaaaguuagaagguucc

SEQ ID NO: 494159 - RNA, 19 nt, Artificial Sequence
  Description of Artificial Sequence: Synthetic oligonucleotide
  Sense strand starting at position 3078 of SEQ ID NO: 317479
aguauaaugcuugaaacuu

SEQ ID NO: 494160 - RNA, 19 nt, Artificial Sequence
  Description of Artificial Sequence: Synthetic oligonucleotide
  Antisense Strand to SEQ ID NO: 494159
aaguuucaagcauuauacu

SEQ ID NO: 494161 - RNA, 19 nt, Artificial Sequence
  Description of Artificial Sequence: Synthetic oligonucleotide
  Sense strand starting at position 3117 of SEQ ID NO: 317479
guaauagaaucucuggauu

SEQ ID NO: 494162 - RNA, 19 nt, Artificial Sequence
  Description of Artificial Sequence: Synthetic oligonucleotide
  Antisense Strand to SEQ ID NO: 494161
aauccagagauucuauuac

SEQ ID NO: 494163 - RNA, 19 nt, Artificial Sequence
  Description of Artificial Sequence: Synthetic oligonucleotide
  Sense strand starting at position 3123 of SEQ ID NO: 317479
gaaucucuggauuggaagu

SEQ ID NO: 494164 - RNA, 19 nt, Artificial Sequence
  Description of Artificial Sequence: Synthetic oligonucleotide
  Antisense Strand to SEQ ID NO: 494163
acuuccaauccagagauuc

SEQ ID NO: 494165 - RNA, 19 nt, Artificial Sequence
  Description of Artificial Sequence: Synthetic oligonucleotide
  Sense strand starting at position 3133 of SEQ ID NO: 317479
auuggaaguuaaccuuuaa

SEQ ID NO: 494166 - RNA, 19 nt, Artificial Sequence
  Description of Artificial Sequence: Synthetic oligonucleotide
  Antisense Strand to SEQ ID NO: 494165
uuaaagguuaacuuccaau

SEQ ID NO: 494167 - RNA, 19 nt, Artificial Sequence
  Description of Artificial Sequence: Synthetic oligonucleotide
  Sense strand starting at position 3205 of SEQ ID NO: 317479
auucuugccgggugaauuu

SEQ ID NO: 494168 - RNA, 19 nt, Artificial Sequence
  Description of Artificial Sequence: Synthetic oligonucleotide
  Antisense Strand to SEQ ID NO: 494167
aaauucacccggcaagaau

SEQ ID NO: 494169 - RNA, 19 nt, Artificial Sequence
  Description of Artificial Sequence: Synthetic oligonucleotide
  Sense strand starting at position 3266 of SEQ ID NO: 317479
gaacauacaguguaauguu

SEQ ID NO: 494170 - RNA, 19 nt, Artificial Sequence
  Description of Artificial Sequence: Synthetic oligonucleotide
  Antisense Strand to SEQ ID NO: 494169
aacauuacacuguauguuc

SEQ ID NO: 494171 - RNA, 19 nt, Artificial Sequence
  Description of Artificial Sequence: Synthetic oligonucleotide
  Sense strand starting at position 3322 of SEQ ID NO: 317479
uuuagaugguugcuagaaa

SEQ ID NO: 494172 - RNA, 19 nt, Artificial Sequence
  Description of Artificial Sequence: Synthetic oligonucleotide
  Antisense Strand to SEQ ID NO: 494171
uuucuagcaaccaucuaaa

SEQ ID NO: 494173 - RNA, 19 nt, Artificial Sequence
  Description of Artificial Sequence: Synthetic oligonucleotide
  Sense strand starting at position 3446 of SEQ ID NO: 317479
auguucugaucuuugaaga

SEQ ID NO: 494174 - RNA, 19 nt, Artificial Sequence
  Description of Artificial Sequence: Synthetic oligonucleotide
  Antisense Strand to SEQ ID NO: 494173
ucuucaaagaucagaacau

SEQ ID NO: 494175 - RNA, 19 nt, Artificial Sequence
  Description of Artificial Sequence: Synthetic oligonucleotide
  Sense strand starting at position 3447 of SEQ ID NO: 317479
uguucugaucuuugaagau

SEQ ID NO: 494176 - RNA, 19 nt, Artificial Sequence
  Description of Artificial Sequence: Synthetic oligonucleotide
  Antisense Strand to SEQ ID NO: 494175
aucuucaaagaucagaaca

SEQ ID NO: 494177 - RNA, 19 nt, Artificial Sequence
  Description of Artificial Sequence: Synthetic oligonucleotide
  Sense strand starting at position 3484 of SEQ ID NO: 317479
ucagaccuucucugaggaa

SEQ ID NO: 494178 - RNA, 19 nt, Artificial Sequence
  Description of Artificial Sequence: Synthetic oligonucleotide
  Antisense Strand to SEQ ID NO: 494177
uuccucagagaaggucuga

SEQ ID NO: 494179 - RNA, 19 nt, Artificial Sequence
  Description of Artificial Sequence: Synthetic oligonucleotide
  Sense strand starting at position 3716 of SEQ ID NO: 317479
uagguaucugaguauugau

SEQ ID NO: 494180 - RNA, 19 nt, Artificial Sequence
  Description of Artificial Sequence: Synthetic oligonucleotide
  Antisense Strand to SEQ ID NO: 494179
aucaauacucagauaccua

SEQ ID NO: 494181 - RNA, 19 nt, Artificial Sequence
  Description of Artificial Sequence: Synthetic oligonucleotide
  Sense strand starting at position 3924 of SEQ ID NO: 317479
ggaguaguacuauaucuug

SEQ ID NO: 494182 - RNA, 19 nt, Artificial Sequence
  Description of Artificial Sequence: Synthetic oligonucleotide
  Antisense Strand to SEQ ID NO: 494181
caagauauaguacuacucc

SEQ ID NO: 494183 - RNA, 19 nt, Artificial Sequence
  Description of Artificial Sequence: Synthetic oligonucleotide
  Sense strand starting at position 3930 of SEQ ID NO: 317479
guacuauaucuugaguaag

SEQ ID NO: 494184 - RNA, 19 nt, Artificial Sequence
  Description of Artificial Sequence: Synthetic oligonucleotide
  Antisense Strand to SEQ ID NO: 494183
cuuacucaagauauaguac

SEQ ID NO: 494185 - RNA, 19 nt, Artificial Sequence
  Description of Artificial Sequence: Synthetic oligonucleotide
  Sense strand starting at position 3932 of SEQ ID NO: 317479
acuauaucuugaguaaggu

SEQ ID NO: 494186 - RNA, 19 nt, Artificial Sequence
  Description of Artificial Sequence: Synthetic oligonucleotide
  Antisense Strand to SEQ ID NO: 494185
accuuacucaagauauagu

SEQ ID NO: 494187 - RNA, 19 nt, Artificial Sequence
  Description of Artificial Sequence: Synthetic oligonucleotide
  Sense strand starting at position 3933 of SEQ ID NO: 317479
cuauaucuugaguaagguu

SEQ ID NO: 494188 - RNA, 19 nt, Artificial Sequence
  Description of Artificial Sequence: Synthetic oligonucleotide
  Antisense Strand to SEQ ID NO: 494187
aaccuuacucaagauauag

SEQ ID NO: 494189 - RNA, 19 nt, Artificial Sequence
  Description of Artificial Sequence: Synthetic oligonucleotide
  Sense strand starting at position 361 of SEQ ID NO: 317480
gagaccauauguguccaua

SEQ ID NO: 494190 - RNA, 19 nt, Artificial Sequence
  Description of Artificial Sequence: Synthetic oligonucleotide
  Antisense Strand to SEQ ID NO: 494189
uauggacacauauggucuc

SEQ ID NO: 494191 - RNA, 19 nt, Artificial Sequence
  Description of Artificial Sequence: Synthetic oligonucleotide
  Sense strand starting at position 422 of SEQ ID NO: 317480
ggcaaauucuaagcuauac

SEQ ID NO: 494192 - RNA, 19 nt, Artificial Sequence
  Description of Artificial Sequence: Synthetic oligonucleotide
  Antisense Strand to SEQ ID NO: 494191
guauagcuuagaauuugcc

SEQ ID NO: 494193 - RNA, 19 nt, Artificial Sequence
  Description of Artificial Sequence: Synthetic oligonucleotide
  Sense strand starting at position 597 of SEQ ID NO: 317480
ucucuuaggcuaggaguua

SEQ ID NO: 494194 - RNA, 19 nt, Artificial Sequence
  Description of Artificial Sequence: Synthetic oligonucleotide
  Antisense Strand to SEQ ID NO: 494193
uaacuccuagccuaagaga

SEQ ID NO: 494195 - RNA, 19 nt, Artificial Sequence
  Description of Artificial Sequence: Synthetic oligonucleotide
  Sense strand starting at position 612 of SEQ ID NO: 317480
guuagauauuacuuugaug

SEQ ID NO: 494196 - RNA, 19 nt, Artificial Sequence
  Description of Artificial Sequence: Synthetic oligonucleotide
  Antisense Strand to SEQ ID NO: 494195
caucaaaguaauaucuaac

SEQ ID NO: 494197 - RNA, 19 nt, Artificial Sequence
  Description of Artificial Sequence: Synthetic oligonucleotide
  Sense strand starting at position 624 of SEQ ID NO: 317480
uuugauggauaucugauau

SEQ ID NO: 494198 - RNA, 19 nt, Artificial Sequence
  Description of Artificial Sequence: Synthetic oligonucleotide
  Antisense Strand to SEQ ID NO: 494197
auaucagauauccaucaaa

SEQ ID NO: 494199 - RNA, 19 nt, Artificial Sequence
  Description of Artificial Sequence: Synthetic oligonucleotide
  Sense strand starting at position 634 of SEQ ID NO: 317480
aucugauauuauccuguua

SEQ ID NO: 494200 - RNA, 19 nt, Artificial Sequence
  Description of Artificial Sequence: Synthetic oligonucleotide
  Antisense Strand to SEQ ID NO: 494199
uaacaggauaauaucagau

SEQ ID NO: 494201 - RNA, 19 nt, Artificial Sequence
  Description of Artificial Sequence: Synthetic oligonucleotide
  Sense strand starting at position 948 of SEQ ID NO: 317480
ccacgugacucugugaaac

SEQ ID NO: 494202 - RNA, 19 nt, Artificial Sequence
  Description of Artificial Sequence: Synthetic oligonucleotide
  Antisense Strand to SEQ ID NO: 494201
guuucacagagucacgugg

SEQ ID NO: 494203 - RNA, 19 nt, Artificial Sequence
  Description of Artificial Sequence: Synthetic oligonucleotide
  Sense strand starting at position 1562 of SEQ ID NO: 317480
aagguuauuuccuuugugu

SEQ ID NO: 494204 - RNA, 19 nt, Artificial Sequence
  Description of Artificial Sequence: Synthetic oligonucleotide
  Antisense Strand to SEQ ID NO: 494203
acacaaaggaaauaaccuu

SEQ ID NO: 494205 - RNA, 19 nt, Artificial Sequence
  Description of Artificial Sequence: Synthetic oligonucleotide
  Sense strand starting at position 1564 of SEQ ID NO: 317480
gguuauuuccuuugugugu

SEQ ID NO: 494206 - RNA, 19 nt, Artificial Sequence
  Description of Artificial Sequence: Synthetic oligonucleotide
  Antisense Strand to SEQ ID NO: 494205
acacacaaaggaaauaacc

SEQ ID NO: 494207 - RNA, 19 nt, Artificial Sequence
  Description of Artificial Sequence: Synthetic oligonucleotide
  Sense strand starting at position 2029 of SEQ ID NO: 317480
guuuaauaacugugucaga

SEQ ID NO: 494208 - RNA, 19 nt, Artificial Sequence
  Description of Artificial Sequence: Synthetic oligonucleotide
  Antisense Strand to SEQ ID NO: 494207
ucugacacaguuauuaaac

SEQ ID NO: 494209 - RNA, 19 nt, Artificial Sequence
  Description of Artificial Sequence: Synthetic oligonucleotide
  Sense strand starting at position 2294 of SEQ ID NO: 317480
gcgccuuuccaguuaaccu

SEQ ID NO: 494210 - RNA, 19 nt, Artificial Sequence
  Description of Artificial Sequence: Synthetic oligonucleotide
  Antisense Strand to SEQ ID NO: 494209
agguuaacuggaaaggcgc

SEQ ID NO: 494211 - RNA, 19 nt, Artificial Sequence
  Description of Artificial Sequence: Synthetic oligonucleotide
  Sense strand starting at position 2376 of SEQ ID NO: 317480
ucuggguaucggugggaua

SEQ ID NO: 494212 - RNA, 19 nt, Artificial Sequence
  Description of Artificial Sequence: Synthetic oligonucleotide
  Antisense Strand to SEQ ID NO: 494211
uaucccaccgauacccaga

SEQ ID NO: 494213 - RNA, 19 nt, Artificial Sequence
  Description of Artificial Sequence: Synthetic oligonucleotide
  Sense strand starting at position 2377 of SEQ ID NO: 317480
cuggguaucggugggauau

SEQ ID NO: 494214 - RNA, 19 nt, Artificial Sequence
  Description of Artificial Sequence: Synthetic oligonucleotide
  Antisense Strand to SEQ ID NO: 494213
auaucccaccgauacccag

SEQ ID NO: 494215 - RNA, 19 nt, Artificial Sequence
  Description of Artificial Sequence: Synthetic oligonucleotide
  Sense strand starting at position 2378 of SEQ ID NO: 317480
uggguaucggugggauauu

SEQ ID NO: 494216 - RNA, 19 nt, Artificial Sequence
  Description of Artificial Sequence: Synthetic oligonucleotide
  Antisense Strand to SEQ ID NO: 494215
aauaucccaccgauaccca

SEQ ID NO: 494217 - RNA, 19 nt, Artificial Sequence
  Description of Artificial Sequence: Synthetic oligonucleotide
  Sense strand starting at position 2390 of SEQ ID NO: 317480
ggauauucugcgcaccaug

SEQ ID NO: 494218 - RNA, 19 nt, Artificial Sequence
  Description of Artificial Sequence: Synthetic oligonucleotide
  Antisense Strand to SEQ ID NO: 494217
cauggugcgcagaauaucc

SEQ ID NO: 494219 - RNA, 19 nt, Artificial Sequence
  Description of Artificial Sequence: Synthetic oligonucleotide
  Sense strand starting at position 2602 of SEQ ID NO: 317480
aggaaucagugguucuguu

SEQ ID NO: 494220 - RNA, 19 nt, Artificial Sequence
  Description of Artificial Sequence: Synthetic oligonucleotide
  Antisense Strand to SEQ ID NO: 494219
aacagaaccacugauuccu

SEQ ID NO: 494221 - RNA, 19 nt, Artificial Sequence
  Description of Artificial Sequence: Synthetic oligonucleotide
  Sense strand starting at position 2639 of SEQ ID NO: 317480
aguaaaguacuccaccgaa

SEQ ID NO: 494222 - RNA, 19 nt, Artificial Sequence
  Description of Artificial Sequence: Synthetic oligonucleotide
  Antisense Strand to SEQ ID NO: 494221
uucgguggaguacuuuacu

SEQ ID NO: 494223 - RNA, 19 nt, Artificial Sequence
  Description of Artificial Sequence: Synthetic oligonucleotide
  Sense strand starting at position 2642 of SEQ ID NO: 317480
aaaguacuccaccgaaguu

SEQ ID NO: 494224 - RNA, 19 nt, Artificial Sequence
  Description of Artificial Sequence: Synthetic oligonucleotide
  Antisense Strand to SEQ ID NO: 494223
aacuucgguggaguacuuu

SEQ ID NO: 494225 - RNA, 19 nt, Artificial Sequence
  Description of Artificial Sequence: Synthetic oligonucleotide
  Sense strand starting at position 2850 of SEQ ID NO: 317480
gggugguuucccgggaaac

SEQ ID NO: 494226 - RNA, 19 nt, Artificial Sequence
  Description of Artificial Sequence: Synthetic oligonucleotide
  Antisense Strand to SEQ ID NO: 494225
guuucccgggaaaccaccc

SEQ ID NO: 494227 - RNA, 19 nt, Artificial Sequence
  Description of Artificial Sequence: Synthetic oligonucleotide
  Sense strand starting at position 2852 of SEQ ID NO: 317480
gugguuucccgggaaacuc

SEQ ID NO: 494228 - RNA, 19 nt, Artificial Sequence
  Description of Artificial Sequence: Synthetic oligonucleotide
  Antisense Strand to SEQ ID NO: 494227
gaguuucccgggaaaccac

SEQ ID NO: 494229 - RNA, 19 nt, Artificial Sequence
  Description of Artificial Sequence: Synthetic oligonucleotide
  Sense strand starting at position 2905 of SEQ ID NO: 317480
ccuugacaacugcgacuua

SEQ ID NO: 494230 - RNA, 19 nt, Artificial Sequence
  Description of Artificial Sequence: Synthetic oligonucleotide
  Antisense Strand to SEQ ID NO: 494229
uaagucgcaguugucaagg

SEQ ID NO: 494231 - RNA, 19 nt, Artificial Sequence
  Description of Artificial Sequence: Synthetic oligonucleotide
  Sense strand starting at position 2934 of SEQ ID NO: 317480
uucuaagaagaauguccau

SEQ ID NO: 494232 - RNA, 19 nt, Artificial Sequence
  Description of Artificial Sequence: Synthetic oligonucleotide
  Antisense Strand to SEQ ID NO: 494231
auggacauucuucuuagaa

SEQ ID NO: 494233 - RNA, 19 nt, Artificial Sequence
  Description of Artificial Sequence: Synthetic oligonucleotide
  Sense strand starting at position 2940 of SEQ ID NO: 317480
gaagaauguccaugaaugc

SEQ ID NO: 494234 - RNA, 19 nt, Artificial Sequence
  Description of Artificial Sequence: Synthetic oligonucleotide
  Antisense Strand to SEQ ID NO: 494233
gcauucauggacauucuuc

SEQ ID NO: 494235 - RNA, 19 nt, Artificial Sequence
  Description of Artificial Sequence: Synthetic oligonucleotide
  Sense strand starting at position 2994 of SEQ ID NO: 317480
ggugguugggcaggaauaa

SEQ ID NO: 494236 - RNA, 19 nt, Artificial Sequence
  Description of Artificial Sequence: Synthetic oligonucleotide
  Antisense Strand to SEQ ID NO: 494235
uuauuccugcccaaccacc

SEQ ID NO: 494237 - RNA, 19 nt, Artificial Sequence
  Description of Artificial Sequence: Synthetic oligonucleotide
  Sense strand starting at position 3006 of SEQ ID NO: 317480
ggaauaagacggcagugau

SEQ ID NO: 494238 - RNA, 19 nt, Artificial Sequence
  Description of Artificial Sequence: Synthetic oligonucleotide
  Antisense Strand to SEQ ID NO: 494237
aucacugccgucuuauucc

SEQ ID NO: 494239 - RNA, 19 nt, Artificial Sequence
  Description of Artificial Sequence: Synthetic oligonucleotide
  Sense strand starting at position 3103 of SEQ ID NO: 317480
cuucccuaccagugaguua

SEQ ID NO: 494240 - RNA, 19 nt, Artificial Sequence
  Description of Artificial Sequence: Synthetic oligonucleotide
  Antisense Strand to SEQ ID NO: 494239
uaacucacugguagggaag

SEQ ID NO: 494241 - RNA, 19 nt, Artificial Sequence
  Description of Artificial Sequence: Synthetic oligonucleotide
  Sense strand starting at position 3116 of SEQ ID NO: 317480
gaguuaauaccuggcuuua

SEQ ID NO: 494242 - RNA, 19 nt, Artificial Sequence
  Description of Artificial Sequence: Synthetic oligonucleotide
  Antisense Strand to SEQ ID NO: 494241
uaaagccagguauuaacuc

SEQ ID NO: 494243 - RNA, 19 nt, Artificial Sequence
  Description of Artificial Sequence: Synthetic oligonucleotide
  Sense strand starting at position 3126 of SEQ ID NO: 317480
cuggcuuuagaaugaauuc

SEQ ID NO: 494244 - RNA, 19 nt, Artificial Sequence
  Description of Artificial Sequence: Synthetic oligonucleotide
  Antisense Strand to SEQ ID NO: 494243
gaauucauucuaaagccag

SEQ ID NO: 494245 - RNA, 19 nt, Artificial Sequence
  Description of Artificial Sequence: Synthetic oligonucleotide
  Sense strand starting at position 3316 of SEQ ID NO: 317480
gaugaucucgugcacagaa

SEQ ID NO: 494246 - RNA, 19 nt, Artificial Sequence
  Description of Artificial Sequence: Synthetic oligonucleotide
  Antisense Strand to SEQ ID NO: 494245
uucugugcacgagaucauc

SEQ ID NO: 494247 - RNA, 19 nt, Artificial Sequence
  Description of Artificial Sequence: Synthetic oligonucleotide
  Sense strand starting at position 3318 of SEQ ID NO: 317480
ugaucucgugcacagaaau

SEQ ID NO: 494248 - RNA, 19 nt, Artificial Sequence
  Description of Artificial Sequence: Synthetic oligonucleotide
  Antisense Strand to SEQ ID NO: 494247
auuucugugcacgagauca

SEQ ID NO: 494249 - RNA, 19 nt, Artificial Sequence
  Description of Artificial Sequence: Synthetic oligonucleotide
  Sense strand starting at position 3371 of SEQ ID NO: 317480
aggccaugaugcuuaugaa

SEQ ID NO: 494250 - RNA, 19 nt, Artificial Sequence
  Description of Artificial Sequence: Synthetic oligonucleotide
  Antisense Strand to SEQ ID NO: 494249
uucauaagcaucauggccu

SEQ ID NO: 494251 - RNA, 19 nt, Artificial Sequence
  Description of Artificial Sequence: Synthetic oligonucleotide
  Sense strand starting at position 3372 of SEQ ID NO: 317480
ggccaugaugcuuaugaaa

SEQ ID NO: 494252 - RNA, 19 nt, Artificial Sequence
  Description of Artificial Sequence: Synthetic oligonucleotide
  Antisense Strand to SEQ ID NO: 494251
uuucauaagcaucauggcc

SEQ ID NO: 494253 - RNA, 19 nt, Artificial Sequence
  Description of Artificial Sequence: Synthetic oligonucleotide
  Sense strand starting at position 3435 of SEQ ID NO: 317480
uguagaugagacuaugcau

SEQ ID NO: 494254 - RNA, 19 nt, Artificial Sequence
  Description of Artificial Sequence: Synthetic oligonucleotide
  Antisense Strand to SEQ ID NO: 494253
augcauagucucaucuaca

SEQ ID NO: 494255 - RNA, 19 nt, Artificial Sequence
  Description of Artificial Sequence: Synthetic oligonucleotide
  Sense strand starting at position 3438 of SEQ ID NO: 317480
agaugagacuaugcauauu

SEQ ID NO: 494256 - RNA, 19 nt, Artificial Sequence
  Description of Artificial Sequence: Synthetic oligonucleotide
  Antisense Strand to SEQ ID NO: 494255
aauaugcauagucucaucu

SEQ ID NO: 494257 - RNA, 19 nt, Artificial Sequence
  Description of Artificial Sequence: Synthetic oligonucleotide
  Sense strand starting at position 3777 of SEQ ID NO: 317480
acagcuauuacagguguga

SEQ ID NO: 494258 - RNA, 19 nt, Artificial Sequence
  Description of Artificial Sequence: Synthetic oligonucleotide
  Antisense Strand to SEQ ID NO: 494257
ucacaccuguaauagcugu

SEQ ID NO: 494259 - RNA, 19 nt, Artificial Sequence
  Description of Artificial Sequence: Synthetic oligonucleotide
  Sense strand starting at position 3803 of SEQ ID NO: 317480
ccugaccucuaucuuguua

SEQ ID NO: 494260 - RNA, 19 nt, Artificial Sequence
  Description of Artificial Sequence: Synthetic oligonucleotide
  Antisense Strand to SEQ ID NO: 494259
uaacaagauagaggucagg

SEQ ID NO: 494261 - RNA, 19 nt, Artificial Sequence
  Description of Artificial Sequence: Synthetic oligonucleotide
  Sense strand starting at position 3909 of SEQ ID NO: 317480
gcauaagaagauuguauau

SEQ ID NO: 494262 - RNA, 19 nt, Artificial Sequence
  Description of Artificial Sequence: Synthetic oligonucleotide
  Antisense Strand to SEQ ID NO: 494261
auauacaaucuucuuaugc

SEQ ID NO: 494263 - RNA, 19 nt, Artificial Sequence
  Description of Artificial Sequence: Synthetic oligonucleotide
  Sense strand starting at position 3953 of SEQ ID NO: 317480
ugguuuauccuaugaucaa

SEQ ID NO: 494264 - RNA, 19 nt, Artificial Sequence
  Description of Artificial Sequence: Synthetic oligonucleotide
  Antisense Strand to SEQ ID NO: 494263
uugaucauaggauaaacca

SEQ ID NO: 494265 - RNA, 19 nt, Artificial Sequence
  Description of Artificial Sequence: Synthetic oligonucleotide
  Sense strand starting at position 3976 of SEQ ID NO: 317480
guauuccguauuugagcua

SEQ ID NO: 494266 - RNA, 19 nt, Artificial Sequence
  Description of Artificial Sequence: Synthetic oligonucleotide
  Antisense Strand to SEQ ID NO: 494265
uagcucaaauacggaauac

SEQ ID NO: 494267 - RNA, 19 nt, Artificial Sequence
  Description of Artificial Sequence: Synthetic oligonucleotide
  Sense strand starting at position 3979 of SEQ ID NO: 317480
uuccguauuugagcuauua

SEQ ID NO: 494268 - RNA, 19 nt, Artificial Sequence
  Description of Artificial Sequence: Synthetic oligonucleotide
  Antisense Strand to SEQ ID NO: 494267
uaauagcucaaauacggaa

SEQ ID NO: 494269 - RNA, 19 nt, Artificial Sequence
  Description of Artificial Sequence: Synthetic oligonucleotide
  Sense strand starting at position 49 of SEQ ID NO: 317481
agaagucaaucucugacuu

SEQ ID NO: 494270 - RNA, 19 nt, Artificial Sequence
  Description of Artificial Sequence: Synthetic oligonucleotide
  Antisense Strand to SEQ ID NO: 494269
aagucagagauugacuucu

SEQ ID NO: 494271 - RNA, 19 nt, Artificial Sequence
  Description of Artificial Sequence: Synthetic oligonucleotide
  Sense strand starting at position 62 of SEQ ID NO: 317481
ugacuuacagcacaaaguu

SEQ ID NO: 494272 - RNA, 19 nt, Artificial Sequence
  Description of Artificial Sequence: Synthetic oligonucleotide
  Antisense Strand to SEQ ID NO: 494271
aacuuugugcuguaaguca

SEQ ID NO: 494273 - RNA, 19 nt, Artificial Sequence
  Description of Artificial Sequence: Synthetic oligonucleotide
  Sense strand starting at position 97 of SEQ ID NO: 317481
cuuguaaucuaccugagga

SEQ ID NO: 494274 - RNA, 19 nt, Artificial Sequence
  Description of Artificial Sequence: Synthetic oligonucleotide
  Antisense Strand to SEQ ID NO: 494273
uccucagguagauuacaag

SEQ ID NO: 494275 - RNA, 19 nt, Artificial Sequence
  Description of Artificial Sequence: Synthetic oligonucleotide
  Sense strand starting at position 101 of SEQ ID NO: 317481
uaaucuaccugaggaagga

SEQ ID NO: 494276 - RNA, 19 nt, Artificial Sequence
  Description of Artificial Sequence: Synthetic oligonucleotide
  Antisense Strand to SEQ ID NO: 494275
uccuuccucagguagauua

SEQ ID NO: 494277 - RNA, 19 nt, Artificial Sequence
  Description of Artificial Sequence: Synthetic oligonucleotide
  Sense strand starting at position 266 of SEQ ID NO: 317481
ugaguuaaacugugggaca

SEQ ID NO: 494278 - RNA, 19 nt, Artificial Sequence
  Description of Artificial Sequence: Synthetic oligonucleotide
  Antisense Strand to SEQ ID NO: 494277
ugucccacaguuuaacuca

SEQ ID NO: 494279 - RNA, 19 nt, Artificial Sequence
  Description of Artificial Sequence: Synthetic oligonucleotide
  Sense strand starting at position 302 of SEQ ID NO: 317481
gugagaaugcauugaccug

SEQ ID NO: 494280 - RNA, 19 nt, Artificial Sequence
  Description of Artificial Sequence: Synthetic oligonucleotide
  Antisense Strand to SEQ ID NO: 494279
caggucaaugcauucucac

SEQ ID NO: 494281 - RNA, 19 nt, Artificial Sequence
  Description of Artificial Sequence: Synthetic oligonucleotide
  Sense strand starting at position 567 of SEQ ID NO: 317481
uguugcuuggcgucaaauu

SEQ ID NO: 494282 - RNA, 19 nt, Artificial Sequence
  Description of Artificial Sequence: Synthetic oligonucleotide
  Antisense Strand to SEQ ID NO: 494281
aauuugacgccaagcaaca

SEQ ID NO: 494283 - RNA, 19 nt, Artificial Sequence
  Description of Artificial Sequence: Synthetic oligonucleotide
  Sense strand starting at position 637 of SEQ ID NO: 317481
acagcaugguggcuuuaaa

SEQ ID NO: 494284 - RNA, 19 nt, Artificial Sequence
  Description of Artificial Sequence: Synthetic oligonucleotide
  Antisense Strand to SEQ ID NO: 494283
uuuaaagccaccaugcugu

SEQ ID NO: 494285 - RNA, 19 nt, Artificial Sequence
  Description of Artificial Sequence: Synthetic oligonucleotide
  Sense strand starting at position 795 of SEQ ID NO: 317481
ggcuccugucgauaacaaa

SEQ ID NO: 494286 - RNA, 19 nt, Artificial Sequence
  Description of Artificial Sequence: Synthetic oligonucleotide
  Antisense Strand to SEQ ID NO: 494285
uuuguuaucgacaggagcc

SEQ ID NO: 494287 - RNA, 19 nt, Artificial Sequence
  Description of Artificial Sequence: Synthetic oligonucleotide
  Sense strand starting at position 933 of SEQ ID NO: 317481
caggacucgagauguugua

SEQ ID NO: 494288 - RNA, 19 nt, Artificial Sequence
  Description of Artificial Sequence: Synthetic oligonucleotide
  Antisense Strand to SEQ ID NO: 494287
uacaacaucucgaguccug

SEQ ID NO: 494289 - RNA, 19 nt, Artificial Sequence
  Description of Artificial Sequence: Synthetic oligonucleotide
  Sense strand starting at position 1215 of SEQ ID NO: 317481
uucucacuuggguagucaa

SEQ ID NO: 494290 - RNA, 19 nt, Artificial Sequence
  Description of Artificial Sequence: Synthetic oligonucleotide
  Antisense Strand to SEQ ID NO: 494289
uugacuacccaagugagaa

SEQ ID NO: 494291 - RNA, 19 nt, Artificial Sequence
  Description of Artificial Sequence: Synthetic oligonucleotide
  Sense strand starting at position 1222 of SEQ ID NO: 317481
uuggguagucaaggacaaa

SEQ ID NO: 494292 - RNA, 19 nt, Artificial Sequence
  Description of Artificial Sequence: Synthetic oligonucleotide
  Antisense Strand to SEQ ID NO: 494291
uuuguccuugacuacccaa

SEQ ID NO: 494293 - RNA, 19 nt, Artificial Sequence
  Description of Artificial Sequence: Synthetic oligonucleotide
  Sense strand starting at position 1290 of SEQ ID NO: 317481
gggacauaguacccuuuga

SEQ ID NO: 494294 - RNA, 19 nt, Artificial Sequence
  Description of Artificial Sequence: Synthetic oligonucleotide
  Antisense Strand to SEQ ID NO: 494293
ucaaaggguacuauguccc

SEQ ID NO: 494295 - RNA, 19 nt, Artificial Sequence
  Description of Artificial Sequence: Synthetic oligonucleotide
  Sense strand starting at position 1428 of SEQ ID NO: 317481
agcagauauuagguccuuu

SEQ ID NO: 494296 - RNA, 19 nt, Artificial Sequence
  Description of Artificial Sequence: Synthetic oligonucleotide
  Antisense Strand to SEQ ID NO: 494295
aaaggaccuaauaucugcu

SEQ ID NO: 494297 - RNA, 19 nt, Artificial Sequence
  Description of Artificial Sequence: Synthetic oligonucleotide
  Sense strand starting at position 1461 of SEQ ID NO: 317481
ugaguuacaucggcuagca

SEQ ID NO: 494298 - RNA, 19 nt, Artificial Sequence
  Description of Artificial Sequence: Synthetic oligonucleotide
  Antisense Strand to SEQ ID NO: 494297
ugcuagccgauguaacuca

SEQ ID NO: 494299 - RNA, 19 nt, Artificial Sequence
  Description of Artificial Sequence: Synthetic oligonucleotide
  Sense strand starting at position 1521 of SEQ ID NO: 317481
gacugugacuaccuauguu

SEQ ID NO: 494300 - RNA, 19 nt, Artificial Sequence
  Description of Artificial Sequence: Synthetic oligonucleotide
  Antisense Strand to SEQ ID NO: 494299
aacauagguagucacaguc

SEQ ID NO: 494301 - RNA, 19 nt, Artificial Sequence
  Description of Artificial Sequence: Synthetic oligonucleotide
  Sense strand starting at position 1525 of SEQ ID NO: 317481
gugacuaccuauguuagga

SEQ ID NO: 494302 - RNA, 19 nt, Artificial Sequence
  Description of Artificial Sequence: Synthetic oligonucleotide
  Antisense Strand to SEQ ID NO: 494301
uccuaacauagguagucac

SEQ ID NO: 494303 - RNA, 19 nt, Artificial Sequence
  Description of Artificial Sequence: Synthetic oligonucleotide
  Sense strand starting at position 1527 of SEQ ID NO: 317481
gacuaccuauguuaggaaa

SEQ ID NO: 494304 - RNA, 19 nt, Artificial Sequence
  Description of Artificial Sequence: Synthetic oligonucleotide
  Antisense Strand to SEQ ID NO: 494303
uuuccuaacauagguaguc

SEQ ID NO: 494305 - RNA, 19 nt, Artificial Sequence
  Description of Artificial Sequence: Synthetic oligonucleotide
  Sense strand starting at position 1662 of SEQ ID NO: 317481
ucccuuccugccuggauua

SEQ ID NO: 494306 - RNA, 19 nt, Artificial Sequence
  Description of Artificial Sequence: Synthetic oligonucleotide
  Antisense Strand to SEQ ID NO: 494305
uaauccaggcaggaaggga

SEQ ID NO: 494307 - RNA, 19 nt, Artificial Sequence
  Description of Artificial Sequence: Synthetic oligonucleotide
  Sense strand starting at position 1663 of SEQ ID NO: 317481
cccuuccugccuggauuaa

SEQ ID NO: 494308 - RNA, 19 nt, Artificial Sequence
  Description of Artificial Sequence: Synthetic oligonucleotide
  Antisense Strand to SEQ ID NO: 494307
uuaauccaggcaggaaggg

SEQ ID NO: 494309 - RNA, 19 nt, Artificial Sequence
  Description of Artificial Sequence: Synthetic oligonucleotide
  Sense strand starting at position 1694 of SEQ ID NO: 317481
ugagcuuugucagcaaauc

SEQ ID NO: 494310 - RNA, 19 nt, Artificial Sequence
  Description of Artificial Sequence: Synthetic oligonucleotide
  Antisense Strand to SEQ ID NO: 494309
gauuugcugacaaagcuca

SEQ ID NO: 494311 - RNA, 19 nt, Artificial Sequence
  Description of Artificial Sequence: Synthetic oligonucleotide
  Sense strand starting at position 1961 of SEQ ID NO: 317481
caucaagcugccgaguuaa

SEQ ID NO: 494312 - RNA, 19 nt, Artificial Sequence
  Description of Artificial Sequence: Synthetic oligonucleotide
  Antisense Strand to SEQ ID NO: 494311
uuaacucggcagcuugaug

SEQ ID NO: 494313 - RNA, 19 nt, Artificial Sequence
  Description of Artificial Sequence: Synthetic oligonucleotide
  Sense strand starting at position 1979 of SEQ ID NO: 317481
aaggguggcccuuacuaaa

SEQ ID NO: 494314 - RNA, 19 nt, Artificial Sequence
  Description of Artificial Sequence: Synthetic oligonucleotide
  Antisense Strand to SEQ ID NO: 494313
uuuaguaagggccacccuu

SEQ ID NO: 494315 - RNA, 19 nt, Artificial Sequence
  Description of Artificial Sequence: Synthetic oligonucleotide
  Sense strand starting at position 2079 of SEQ ID NO: 317481
gggcucuguuugcuuaaga

SEQ ID NO: 494316 - RNA, 19 nt, Artificial Sequence
  Description of Artificial Sequence: Synthetic oligonucleotide
  Antisense Strand to SEQ ID NO: 494315
ucuuaagcaaacagagccc

SEQ ID NO: 494317 - RNA, 19 nt, Artificial Sequence
  Description of Artificial Sequence: Synthetic oligonucleotide
  Sense strand starting at position 2080 of SEQ ID NO: 317481
ggcucuguuugcuuaagau

SEQ ID NO: 494318 - RNA, 19 nt, Artificial Sequence
  Description of Artificial Sequence: Synthetic oligonucleotide
  Antisense Strand to SEQ ID NO: 494317
aucuuaagcaaacagagcc

SEQ ID NO: 494319 - RNA, 19 nt, Artificial Sequence
  Description of Artificial Sequence: Synthetic oligonucleotide
  Sense strand starting at position 2145 of SEQ ID NO: 317481
aagaguaagggcugaguua

SEQ ID NO: 494320 - RNA, 19 nt, Artificial Sequence
  Description of Artificial Sequence: Synthetic oligonucleotide
  Antisense Strand to SEQ ID NO: 494319
uaacucagcccuuacucuu

SEQ ID NO: 494321 - RNA, 19 nt, Artificial Sequence
  Description of Artificial Sequence: Synthetic oligonucleotide
  Sense strand starting at position 2146 of SEQ ID NO: 317481
agaguaagggcugaguuau

SEQ ID NO: 494322 - RNA, 19 nt, Artificial Sequence
  Description of Artificial Sequence: Synthetic oligonucleotide
  Antisense Strand to SEQ ID NO: 494321
auaacucagcccuuacucu

SEQ ID NO: 494323 - RNA, 19 nt, Artificial Sequence
  Description of Artificial Sequence: Synthetic oligonucleotide
  Sense strand starting at position 2152 of SEQ ID NO: 317481
agggcugaguuaucaucuu

SEQ ID NO: 494324 - RNA, 19 nt, Artificial Sequence
  Description of Artificial Sequence: Synthetic oligonucleotide
  Antisense Strand to SEQ ID NO: 494323
aagaugauaacucagcccu

SEQ ID NO: 494325 - RNA, 19 nt, Artificial Sequence
  Description of Artificial Sequence: Synthetic oligonucleotide
  Sense strand starting at position 2238 of SEQ ID NO: 317481
caggaaaguguuuguagac

SEQ ID NO: 494326 - RNA, 19 nt, Artificial Sequence
  Description of Artificial Sequence: Synthetic oligonucleotide
  Antisense Strand to SEQ ID NO: 494325
gucuacaaacacuuuccug

SEQ ID NO: 494327 - RNA, 19 nt, Artificial Sequence
  Description of Artificial Sequence: Synthetic oligonucleotide
  Sense strand starting at position 2239 of SEQ ID NO: 317481
aggaaaguguuuguagacu

SEQ ID NO: 494328 - RNA, 19 nt, Artificial Sequence
  Description of Artificial Sequence: Synthetic oligonucleotide
  Antisense Strand to SEQ ID NO: 494327
agucuacaaacacuuuccu

SEQ ID NO: 494329 - RNA, 19 nt, Artificial Sequence
  Description of Artificial Sequence: Synthetic oligonucleotide
  Sense strand starting at position 2328 of SEQ ID NO: 317481
gguuaauaaaugugguauu

SEQ ID NO: 494330 - RNA, 19 nt, Artificial Sequence
  Description of Artificial Sequence: Synthetic oligonucleotide
  Antisense Strand to SEQ ID NO: 494329
aauaccacauuuauuaacc

SEQ ID NO: 494331 - RNA, 19 nt, Artificial Sequence
  Description of Artificial Sequence: Synthetic oligonucleotide
  Sense strand starting at position 2338 of SEQ ID NO: 317481
ugugguauucaugagguca

SEQ ID NO: 494332 - RNA, 19 nt, Artificial Sequence
  Description of Artificial Sequence: Synthetic oligonucleotide
  Antisense Strand to SEQ ID NO: 494331
ugaccucaugaauaccaca

SEQ ID NO: 494333 - RNA, 19 nt, Artificial Sequence
  Description of Artificial Sequence: Synthetic oligonucleotide
  Sense strand starting at position 2386 of SEQ ID NO: 317481
ccaagaaaguuaguuugau

SEQ ID NO: 494334 - RNA, 19 nt, Artificial Sequence
  Description of Artificial Sequence: Synthetic oligonucleotide
  Antisense Strand to SEQ ID NO: 494333
aucaaacuaacuuucuugg

SEQ ID NO: 494335 - RNA, 19 nt, Artificial Sequence
  Description of Artificial Sequence: Synthetic oligonucleotide
  Sense strand starting at position 2387 of SEQ ID NO: 317481
caagaaaguuaguuugaug

SEQ ID NO: 494336 - RNA, 19 nt, Artificial Sequence
  Description of Artificial Sequence: Synthetic oligonucleotide
  Antisense Strand to SEQ ID NO: 494335
caucaaacuaacuuucuug

SEQ ID NO: 494337 - RNA, 19 nt, Artificial Sequence
  Description of Artificial Sequence: Synthetic oligonucleotide
  Sense strand starting at position 2429 of SEQ ID NO: 317481
cuaucugaucaggagcacu

SEQ ID NO: 494338 - RNA, 19 nt, Artificial Sequence
  Description of Artificial Sequence: Synthetic oligonucleotide
  Antisense Strand to SEQ ID NO: 494337
agugcuccugaucagauag

SEQ ID NO: 494339 - RNA, 19 nt, Artificial Sequence
  Description of Artificial Sequence: Synthetic oligonucleotide
  Sense strand starting at position 2462 of SEQ ID NO: 317481
agcaaacacuuguuugauu

SEQ ID NO: 494340 - RNA, 19 nt, Artificial Sequence
  Description of Artificial Sequence: Synthetic oligonucleotide
  Antisense Strand to SEQ ID NO: 494339
aaucaaacaaguguuugcu

SEQ ID NO: 494341 - RNA, 19 nt, Artificial Sequence
  Description of Artificial Sequence: Synthetic oligonucleotide
  Sense strand starting at position 2473 of SEQ ID NO: 317481
guuugauuggcacaucuuu

SEQ ID NO: 494342 - RNA, 19 nt, Artificial Sequence
  Description of Artificial Sequence: Synthetic oligonucleotide
  Antisense Strand to SEQ ID NO: 494341
aaagaugugccaaucaaac

SEQ ID NO: 494343 - RNA, 19 nt, Artificial Sequence
  Description of Artificial Sequence: Synthetic oligonucleotide
  Sense strand starting at position 2887 of SEQ ID NO: 317481
gcaagauugguacaucuuu

SEQ ID NO: 494344 - RNA, 19 nt, Artificial Sequence
  Description of Artificial Sequence: Synthetic oligonucleotide
  Antisense Strand to SEQ ID NO: 494343
aaagauguaccaaucuugc

SEQ ID NO: 494345 - RNA, 19 nt, Artificial Sequence
  Description of Artificial Sequence: Synthetic oligonucleotide
  Sense strand starting at position 2892 of SEQ ID NO: 317481
auugguacaucuuuagaac

SEQ ID NO: 494346 - RNA, 19 nt, Artificial Sequence
  Description of Artificial Sequence: Synthetic oligonucleotide
  Antisense Strand to SEQ ID NO: 494345
guucuaaagauguaccaau

SEQ ID NO: 494347 - RNA, 19 nt, Artificial Sequence
  Description of Artificial Sequence: Synthetic oligonucleotide
  Sense strand starting at position 3219 of SEQ ID NO: 317481
ucaguauauuuggaagaag

SEQ ID NO: 494348 - RNA, 19 nt, Artificial Sequence
  Description of Artificial Sequence: Synthetic oligonucleotide
  Antisense Strand to SEQ ID NO: 494347
cuucuuccaaauauacuga

SEQ ID NO: 494349 - RNA, 19 nt, Artificial Sequence
  Description of Artificial Sequence: Synthetic oligonucleotide
  Sense strand starting at position 3 of SEQ ID NO: 317482
gccuaaggauacccagaua

SEQ ID NO: 494350 - RNA, 19 nt, Artificial Sequence
  Description of Artificial Sequence: Synthetic oligonucleotide
  Antisense Strand to SEQ ID NO: 494349
uaucuggguauccuuaggc

SEQ ID NO: 494351 - RNA, 19 nt, Artificial Sequence
  Description of Artificial Sequence: Synthetic oligonucleotide
  Sense strand starting at position 34 of SEQ ID NO: 317482
auuucuuaguaagacaaag

SEQ ID NO: 494352 - RNA, 19 nt, Artificial Sequence
  Description of Artificial Sequence: Synthetic oligonucleotide
  Antisense Strand to SEQ ID NO: 494351
cuuugucuuacuaagaaau

SEQ ID NO: 494353 - RNA, 19 nt, Artificial Sequence
  Description of Artificial Sequence: Synthetic oligonucleotide
  Sense strand starting at position 117 of SEQ ID NO: 317482
aaauuaagucauugcagga

SEQ ID NO: 494354 - RNA, 19 nt, Artificial Sequence
  Description of Artificial Sequence: Synthetic oligonucleotide
  Antisense Strand to SEQ ID NO: 494353
uccugcaaugacuuaauuu

SEQ ID NO: 494355 - RNA, 19 nt, Artificial Sequence
  Description of Artificial Sequence: Synthetic oligonucleotide
  Sense strand starting at position 121 of SEQ ID NO: 317482
uaagucauugcaggacuau

SEQ ID NO: 494356 - RNA, 19 nt, Artificial Sequence
  Description of Artificial Sequence: Synthetic oligonucleotide
  Antisense Strand to SEQ ID NO: 494355
auaguccugcaaugacuua

SEQ ID NO: 494357 - RNA, 19 nt, Artificial Sequence
  Description of Artificial Sequence: Synthetic oligonucleotide
  Sense strand starting at position 122 of SEQ ID NO: 317482
aagucauugcaggacuaua

SEQ ID NO: 494358 - RNA, 19 nt, Artificial Sequence
  Description of Artificial Sequence: Synthetic oligonucleotide
  Antisense Strand to SEQ ID NO: 494357
uauaguccugcaaugacuu

SEQ ID NO: 494359 - RNA, 19 nt, Artificial Sequence
  Description of Artificial Sequence: Synthetic oligonucleotide
  Sense strand starting at position 127 of SEQ ID NO: 317482
auugcaggacuauaguauu

SEQ ID NO: 494360 - RNA, 19 nt, Artificial Sequence
  Description of Artificial Sequence: Synthetic oligonucleotide
  Antisense Strand to SEQ ID NO: 494359
aauacuauaguccugcaau

SEQ ID NO: 494361 - RNA, 19 nt, Artificial Sequence
  Description of Artificial Sequence: Synthetic oligonucleotide
  Sense strand starting at position 295 of SEQ ID NO: 317482
ugugucuuccuaggagaaa

SEQ ID NO: 494362 - RNA, 19 nt, Artificial Sequence
  Description of Artificial Sequence: Synthetic oligonucleotide
  Antisense Strand to SEQ ID NO: 494361
uuucuccuaggaagacaca

SEQ ID NO: 494363 - RNA, 19 nt, Artificial Sequence
  Description of Artificial Sequence: Synthetic oligonucleotide
  Sense strand starting at position 430 of SEQ ID NO: 317482
gggcgugcauuauuuaaca

SEQ ID NO: 494364 - RNA, 19 nt, Artificial Sequence
  Description of Artificial Sequence: Synthetic oligonucleotide
  Antisense Strand to SEQ ID NO: 494363
uguuaaauaaugcacgccc

SEQ ID NO: 494365 - RNA, 19 nt, Artificial Sequence
  Description of Artificial Sequence: Synthetic oligonucleotide
  Sense strand starting at position 446 of SEQ ID NO: 317482
acauuauaguggguuagga

SEQ ID NO: 494366 - RNA, 19 nt, Artificial Sequence
  Description of Artificial Sequence: Synthetic oligonucleotide
  Antisense Strand to SEQ ID NO: 494365
uccuaacccacuauaaugu

SEQ ID NO: 494367 - RNA, 19 nt, Artificial Sequence
  Description of Artificial Sequence: Synthetic oligonucleotide
  Sense strand starting at position 1094 of SEQ ID NO: 317482
ucagaauucggagggucga

SEQ ID NO: 494368 - RNA, 19 nt, Artificial Sequence
  Description of Artificial Sequence: Synthetic oligonucleotide
  Antisense Strand to SEQ ID NO: 494367
ucgacccuccgaauucuga

SEQ ID NO: 494369 - RNA, 19 nt, Artificial Sequence
  Description of Artificial Sequence: Synthetic oligonucleotide
  Sense strand starting at position 1110 of SEQ ID NO: 317482
cgagucaugcauuaugaau

SEQ ID NO: 494370 - RNA, 19 nt, Artificial Sequence
  Description of Artificial Sequence: Synthetic oligonucleotide
  Antisense Strand to SEQ ID NO: 494369
auucauaaugcaugacucg

SEQ ID NO: 494371 - RNA, 19 nt, Artificial Sequence
  Description of Artificial Sequence: Synthetic oligonucleotide
  Sense strand starting at position 1131 of SEQ ID NO: 317482
auggguuuccaaugguaac

SEQ ID NO: 494372 - RNA, 19 nt, Artificial Sequence
  Description of Artificial Sequence: Synthetic oligonucleotide
  Antisense Strand to SEQ ID NO: 494371
guuaccauuggaaacccau

SEQ ID NO: 494373 - RNA, 19 nt, Artificial Sequence
  Description of Artificial Sequence: Synthetic oligonucleotide
  Sense strand starting at position 1132 of SEQ ID NO: 317482
uggguuuccaaugguaacu

SEQ ID NO: 494374 - RNA, 19 nt, Artificial Sequence
  Description of Artificial Sequence: Synthetic oligonucleotide
  Antisense Strand to SEQ ID NO: 494373
aguuaccauuggaaaccca

SEQ ID NO: 494375 - RNA, 19 nt, Artificial Sequence
  Description of Artificial Sequence: Synthetic oligonucleotide
  Sense strand starting at position 1488 of SEQ ID NO: 317482
gcagcaucaccaugagaga

SEQ ID NO: 494376 - RNA, 19 nt, Artificial Sequence
  Description of Artificial Sequence: Synthetic oligonucleotide
  Antisense Strand to SEQ ID NO: 494375
ucucucauggugaugcugc

SEQ ID NO: 494377 - RNA, 19 nt, Artificial Sequence
  Description of Artificial Sequence: Synthetic oligonucleotide
  Sense strand starting at position 1724 of SEQ ID NO: 317482
augcaaagagacugguuaa

SEQ ID NO: 494378 - RNA, 19 nt, Artificial Sequence
  Description of Artificial Sequence: Synthetic oligonucleotide
  Antisense Strand to SEQ ID NO: 494377
uuaaccagucucuuugcau

SEQ ID NO: 494379 - RNA, 19 nt, Artificial Sequence
  Description of Artificial Sequence: Synthetic oligonucleotide
  Sense strand starting at position 1725 of SEQ ID NO: 317482
ugcaaagagacugguuaaa

SEQ ID NO: 494380 - RNA, 19 nt, Artificial Sequence
  Description of Artificial Sequence: Synthetic oligonucleotide
  Antisense Strand to SEQ ID NO: 494379
uuuaaccagucucuuugca

SEQ ID NO: 494381 - RNA, 19 nt, Artificial Sequence
  Description of Artificial Sequence: Synthetic oligonucleotide
  Sense strand starting at position 1862 of SEQ ID NO: 317482
gcuggaagucggcaggaau

SEQ ID NO: 494382 - RNA, 19 nt, Artificial Sequence
  Description of Artificial Sequence: Synthetic oligonucleotide
  Antisense Strand to SEQ ID NO: 494381
auuccugccgacuuccagc

SEQ ID NO: 494383 - RNA, 19 nt, Artificial Sequence
  Description of Artificial Sequence: Synthetic oligonucleotide
  Sense strand starting at position 1877 of SEQ ID NO: 317482
gaauguuucugggucauua

SEQ ID NO: 494384 - RNA, 19 nt, Artificial Sequence
  Description of Artificial Sequence: Synthetic oligonucleotide
  Antisense Strand to SEQ ID NO: 494383
uaaugacccagaaacauuc

SEQ ID NO: 494385 - RNA, 19 nt, Artificial Sequence
  Description of Artificial Sequence: Synthetic oligonucleotide
  Sense strand starting at position 1879 of SEQ ID NO: 317482
auguuucugggucauuaac

SEQ ID NO: 494386 - RNA, 19 nt, Artificial Sequence
  Description of Artificial Sequence: Synthetic oligonucleotide
  Antisense Strand to SEQ ID NO: 494385
guuaaugacccagaaacau

SEQ ID NO: 494387 - RNA, 19 nt, Artificial Sequence
  Description of Artificial Sequence: Synthetic oligonucleotide
  Sense strand starting at position 1881 of SEQ ID NO: 317482
guuucugggucauuaacaa

SEQ ID NO: 494388 - RNA, 19 nt, Artificial Sequence
  Description of Artificial Sequence: Synthetic oligonucleotide
  Antisense Strand to SEQ ID NO: 494387
uuguuaaugacccagaaac

SEQ ID NO: 494389 - RNA, 19 nt, Artificial Sequence
  Description of Artificial Sequence: Synthetic oligonucleotide
  Sense strand starting at position 1889 of SEQ ID NO: 317482
gucauuaacaaguggaaga

SEQ ID NO: 494390 - RNA, 19 nt, Artificial Sequence
  Description of Artificial Sequence: Synthetic oligonucleotide
  Antisense Strand to SEQ ID NO: 494389
ucuuccacuuguuaaugac

SEQ ID NO: 494391 - RNA, 19 nt, Artificial Sequence
  Description of Artificial Sequence: Synthetic oligonucleotide
  Sense strand starting at position 1926 of SEQ ID NO: 317482
ccaaucggucuugaucuua

SEQ ID NO: 494392 - RNA, 19 nt, Artificial Sequence
  Description of Artificial Sequence: Synthetic oligonucleotide
  Antisense Strand to SEQ ID NO: 494391
uaagaucaagaccgauugg

SEQ ID NO: 494393 - RNA, 19 nt, Artificial Sequence
  Description of Artificial Sequence: Synthetic oligonucleotide
  Sense strand starting at position 2052 of SEQ ID NO: 317482
gcuugcuuucccucugagu

SEQ ID NO: 494394 - RNA, 19 nt, Artificial Sequence
  Description of Artificial Sequence: Synthetic oligonucleotide
  Antisense Strand to SEQ ID NO: 494393
acucagagggaaagcaagc

SEQ ID NO: 494395 - RNA, 19 nt, Artificial Sequence
  Description of Artificial Sequence: Synthetic oligonucleotide
  Sense strand starting at position 2109 of SEQ ID NO: 317482
ugagcuccaucaccagaaa

SEQ ID NO: 494396 - RNA, 19 nt, Artificial Sequence
  Description of Artificial Sequence: Synthetic oligonucleotide
  Antisense Strand to SEQ ID NO: 494395
uuucuggugauggagcuca

SEQ ID NO: 494397 - RNA, 19 nt, Artificial Sequence
  Description of Artificial Sequence: Synthetic oligonucleotide
  Sense strand starting at position 2241 of SEQ ID NO: 317482
ggugaacgcagugagaaua

SEQ ID NO: 494398 - RNA, 19 nt, Artificial Sequence
  Description of Artificial Sequence: Synthetic oligonucleotide
  Antisense Strand to SEQ ID NO: 494397
uauucucacugcguucacc

SEQ ID NO: 494399 - RNA, 19 nt, Artificial Sequence
  Description of Artificial Sequence: Synthetic oligonucleotide
  Sense strand starting at position 2278 of SEQ ID NO: 317482
ggcauaugguaccucaaua

SEQ ID NO: 494400 - RNA, 19 nt, Artificial Sequence
  Description of Artificial Sequence: Synthetic oligonucleotide
  Antisense Strand to SEQ ID NO: 494399
uauugagguaccauaugcc

SEQ ID NO: 494401 - RNA, 19 nt, Artificial Sequence
  Description of Artificial Sequence: Synthetic oligonucleotide
  Sense strand starting at position 2344 of SEQ ID NO: 317482
acacuugcucguuagaaag

SEQ ID NO: 494402 - RNA, 19 nt, Artificial Sequence
  Description of Artificial Sequence: Synthetic oligonucleotide
  Antisense Strand to SEQ ID NO: 494401
cuuucuaacgagcaagugu

SEQ ID NO: 494403 - RNA, 19 nt, Artificial Sequence
  Description of Artificial Sequence: Synthetic oligonucleotide
  Sense strand starting at position 2637 of SEQ ID NO: 317482
ucuucugaucaugaaguuu

SEQ ID NO: 494404 - RNA, 19 nt, Artificial Sequence
  Description of Artificial Sequence: Synthetic oligonucleotide
  Antisense Strand to SEQ ID NO: 494403
aaacuucaugaucagaaga

SEQ ID NO: 494405 - RNA, 19 nt, Artificial Sequence
  Description of Artificial Sequence: Synthetic oligonucleotide
  Sense strand starting at position 2765 of SEQ ID NO: 317482
auaugauagugauuagguc

SEQ ID NO: 494406 - RNA, 19 nt, Artificial Sequence
  Description of Artificial Sequence: Synthetic oligonucleotide
  Antisense Strand to SEQ ID NO: 494405
gaccuaaucacuaucauau

SEQ ID NO: 494407 - RNA, 19 nt, Artificial Sequence
  Description of Artificial Sequence: Synthetic oligonucleotide
  Sense strand starting at position 2769 of SEQ ID NO: 317482
gauagugauuaggucucca

SEQ ID NO: 494408 - RNA, 19 nt, Artificial Sequence
  Description of Artificial Sequence: Synthetic oligonucleotide
  Antisense Strand to SEQ ID NO: 494407
uggagaccuaaucacuauc

SEQ ID NO: 494409 - RNA, 19 nt, Artificial Sequence
  Description of Artificial Sequence: Synthetic oligonucleotide
  Sense strand starting at position 2774 of SEQ ID NO: 317482
ugauuaggucuccauauua

SEQ ID NO: 494410 - RNA, 19 nt, Artificial Sequence
  Description of Artificial Sequence: Synthetic oligonucleotide
  Antisense Strand to SEQ ID NO: 494409
uaauauggagaccuaauca

SEQ ID NO: 494411 - RNA, 19 nt, Artificial Sequence
  Description of Artificial Sequence: Synthetic oligonucleotide
  Sense strand starting at position 2890 of SEQ ID NO: 317482
cuauuccuugguuaguuau

SEQ ID NO: 494412 - RNA, 19 nt, Artificial Sequence
  Description of Artificial Sequence: Synthetic oligonucleotide
  Antisense Strand to SEQ ID NO: 494411
auaacuaaccaaggaauag

SEQ ID NO: 494413 - RNA, 19 nt, Artificial Sequence
  Description of Artificial Sequence: Synthetic oligonucleotide
  Sense strand starting at position 3300 of SEQ ID NO: 317482
cauagaugugggcaacuau

SEQ ID NO: 494414 - RNA, 19 nt, Artificial Sequence
  Description of Artificial Sequence: Synthetic oligonucleotide
  Antisense Strand to SEQ ID NO: 494413
auaguugcccacaucuaug

SEQ ID NO: 494415 - RNA, 19 nt, Artificial Sequence
  Description of Artificial Sequence: Synthetic oligonucleotide
  Sense strand starting at position 3466 of SEQ ID NO: 317482
agguuucccuauucuggaa

SEQ ID NO: 494416 - RNA, 19 nt, Artificial Sequence
  Description of Artificial Sequence: Synthetic oligonucleotide
  Antisense Strand to SEQ ID NO: 494415
uuccagaauagggaaaccu

SEQ ID NO: 494417 - RNA, 19 nt, Artificial Sequence
  Description of Artificial Sequence: Synthetic oligonucleotide
  Sense strand starting at position 3573 of SEQ ID NO: 317482
aguauuucguuccuuugua

SEQ ID NO: 494418 - RNA, 19 nt, Artificial Sequence
  Description of Artificial Sequence: Synthetic oligonucleotide
  Antisense Strand to SEQ ID NO: 494417
uacaaaggaacgaaauacu

SEQ ID NO: 494419 - RNA, 19 nt, Artificial Sequence
  Description of Artificial Sequence: Synthetic oligonucleotide
  Sense strand starting at position 3603 of SEQ ID NO: 317482
uauuccauugcgugaauuu

SEQ ID NO: 494420 - RNA, 19 nt, Artificial Sequence
  Description of Artificial Sequence: Synthetic oligonucleotide
  Antisense Strand to SEQ ID NO: 494419
aaauucacgcaauggaaua

SEQ ID NO: 494421 - RNA, 19 nt, Artificial Sequence
  Description of Artificial Sequence: Synthetic oligonucleotide
  Sense strand starting at position 3742 of SEQ ID NO: 317482
gcuuuagaaguuuacaguu

SEQ ID NO: 494422 - RNA, 19 nt, Artificial Sequence
  Description of Artificial Sequence: Synthetic oligonucleotide
  Antisense Strand to SEQ ID NO: 494421
aacuguaaacuucuaaagc

SEQ ID NO: 494423 - RNA, 19 nt, Artificial Sequence
  Description of Artificial Sequence: Synthetic oligonucleotide
  Sense strand starting at position 3828 of SEQ ID NO: 317482
ccaucagacaggugucuga

SEQ ID NO: 494424 - RNA, 19 nt, Artificial Sequence
  Description of Artificial Sequence: Synthetic oligonucleotide
  Antisense Strand to SEQ ID NO: 494423
ucagacaccugucugaugg

SEQ ID NO: 494425 - RNA, 19 nt, Artificial Sequence
  Description of Artificial Sequence: Synthetic oligonucleotide
  Sense strand starting at position 3832 of SEQ ID NO: 317482
cagacaggugucugacuua

SEQ ID NO: 494426 - RNA, 19 nt, Artificial Sequence
  Description of Artificial Sequence: Synthetic oligonucleotide
  Antisense Strand to SEQ ID NO: 494425
uaagucagacaccugucug

SEQ ID NO: 494427 - RNA, 19 nt, Artificial Sequence
  Description of Artificial Sequence: Synthetic oligonucleotide
  Sense strand starting at position 3835 of SEQ ID NO: 317482
acaggugucugacuuacua

SEQ ID NO: 494428 - RNA, 19 nt, Artificial Sequence
  Description of Artificial Sequence: Synthetic oligonucleotide
  Antisense Strand to SEQ ID NO: 494427
uaguaagucagacaccugu

SEQ ID NO: 494429 - RNA, 19 nt, Artificial Sequence
  Description of Artificial Sequence: Synthetic oligonucleotide
  Sense strand starting at position 71 of SEQ ID NO: 317483
ccagcaucuaugggagagu

SEQ ID NO: 494430 - RNA, 19 nt, Artificial Sequence
  Description of Artificial Sequence: Synthetic oligonucleotide
  Antisense Strand to SEQ ID NO: 494429
acucucccauagaugcugg

SEQ ID NO: 494431 - RNA, 19 nt, Artificial Sequence
  Description of Artificial Sequence: Synthetic oligonucleotide
  Sense strand starting at position 92 of SEQ ID NO: 317483
gggccugacuuccuuaagu

SEQ ID NO: 494432 - RNA, 19 nt, Artificial Sequence
  Description of Artificial Sequence: Synthetic oligonucleotide
  Antisense Strand to SEQ ID NO: 494431
acuuaaggaagucaggccc

SEQ ID NO: 494433 - RNA, 19 nt, Artificial Sequence
  Description of Artificial Sequence: Synthetic oligonucleotide
  Sense strand starting at position 105 of SEQ ID NO: 317483
uuaagugccagugagcaaa

SEQ ID NO: 494434 - RNA, 19 nt, Artificial Sequence
  Description of Artificial Sequence: Synthetic oligonucleotide
  Antisense Strand to SEQ ID NO: 494433
uuugcucacuggcacuuaa

SEQ ID NO: 494435 - RNA, 19 nt, Artificial Sequence
  Description of Artificial Sequence: Synthetic oligonucleotide
  Sense strand starting at position 117 of SEQ ID NO: 317483
gagcaaaccuggguguguu

SEQ ID NO: 494436 - RNA, 19 nt, Artificial Sequence
  Description of Artificial Sequence: Synthetic oligonucleotide
  Antisense Strand to SEQ ID NO: 494435
aacacacccagguuugcuc

SEQ ID NO: 494437 - RNA, 19 nt, Artificial Sequence
  Description of Artificial Sequence: Synthetic oligonucleotide
  Sense strand starting at position 299 of SEQ ID NO: 317483
gcaauaguacaguacugau

SEQ ID NO: 494438 - RNA, 19 nt, Artificial Sequence
  Description of Artificial Sequence: Synthetic oligonucleotide
  Antisense Strand to SEQ ID NO: 494437
aucaguacuguacuauugc

SEQ ID NO: 494439 - RNA, 19 nt, Artificial Sequence
  Description of Artificial Sequence: Synthetic oligonucleotide
  Sense strand starting at position 366 of SEQ ID NO: 317483
gcucuaucccgucaaucaa

SEQ ID NO: 494440 - RNA, 19 nt, Artificial Sequence
  Description of Artificial Sequence: Synthetic oligonucleotide
  Antisense Strand to SEQ ID NO: 494439
uugauugacgggauagagc

SEQ ID NO: 494441 - RNA, 19 nt, Artificial Sequence
  Description of Artificial Sequence: Synthetic oligonucleotide
  Sense strand starting at position 531 of SEQ ID NO: 317483
gcagauuacaguugagauu

SEQ ID NO: 494442 - RNA, 19 nt, Artificial Sequence
  Description of Artificial Sequence: Synthetic oligonucleotide
  Antisense Strand to SEQ ID NO: 494441
aaucucaacuguaaucugc

SEQ ID NO: 494443 - RNA, 19 nt, Artificial Sequence
  Description of Artificial Sequence: Synthetic oligonucleotide
  Sense strand starting at position 562 of SEQ ID NO: 317483
uuugucaaccuuugguuaa

SEQ ID NO: 494444 - RNA, 19 nt, Artificial Sequence
  Description of Artificial Sequence: Synthetic oligonucleotide
  Antisense Strand to SEQ ID NO: 494443
uuaaccaaagguugacaaa

SEQ ID NO: 494445 - RNA, 19 nt, Artificial Sequence
  Description of Artificial Sequence: Synthetic oligonucleotide
  Sense strand starting at position 603 of SEQ ID NO: 317483
cggucugaauucuuccuua

SEQ ID NO: 494446 - RNA, 19 nt, Artificial Sequence
  Description of Artificial Sequence: Synthetic oligonucleotide
  Antisense Strand to SEQ ID NO: 494445
uaaggaagaauucagaccg

SEQ ID NO: 494447 - RNA, 19 nt, Artificial Sequence
  Description of Artificial Sequence: Synthetic oligonucleotide
  Sense strand starting at position 709 of SEQ ID NO: 317483
gcaguagauucccuacucu

SEQ ID NO: 494448 - RNA, 19 nt, Artificial Sequence
  Description of Artificial Sequence: Synthetic oligonucleotide
  Antisense Strand to SEQ ID NO: 494447
agaguagggaaucuacugc

SEQ ID NO: 494449 - RNA, 19 nt, Artificial Sequence
  Description of Artificial Sequence: Synthetic oligonucleotide
  Sense strand starting at position 737 of SEQ ID NO: 317483
accucuacugcuugagauc

SEQ ID NO: 494450 - RNA, 19 nt, Artificial Sequence
  Description of Artificial Sequence: Synthetic oligonucleotide
  Antisense Strand to SEQ ID NO: 494449
gaucucaagcaguagaggu

SEQ ID NO: 494451 - RNA, 19 nt, Artificial Sequence
  Description of Artificial Sequence: Synthetic oligonucleotide
  Sense strand starting at position 738 of SEQ ID NO: 317483
ccucuacugcuugagaucu

SEQ ID NO: 494452 - RNA, 19 nt, Artificial Sequence
  Description of Artificial Sequence: Synthetic oligonucleotide
  Antisense Strand to SEQ ID NO: 494451
agaucucaagcaguagagg

SEQ ID NO: 494453 - RNA, 19 nt, Artificial Sequence
  Description of Artificial Sequence: Synthetic oligonucleotide
  Sense strand starting at position 1145 of SEQ ID NO: 317483
aucaaaccugugggagauu

SEQ ID NO: 494454 - RNA, 19 nt, Artificial Sequence
  Description of Artificial Sequence: Synthetic oligonucleotide
  Antisense Strand to SEQ ID NO: 494453
aaucucccacagguuugau

SEQ ID NO: 494455 - RNA, 19 nt, Artificial Sequence
  Description of Artificial Sequence: Synthetic oligonucleotide
  Sense strand starting at position 1197 of SEQ ID NO: 317483
gaugauacgaaacguaagu

SEQ ID NO: 494456 - RNA, 19 nt, Artificial Sequence
  Description of Artificial Sequence: Synthetic oligonucleotide
  Antisense Strand to SEQ ID NO: 494455
acuuacguuucguaucauc

SEQ ID NO: 494457 - RNA, 19 nt, Artificial Sequence
  Description of Artificial Sequence: Synthetic oligonucleotide
  Sense strand starting at position 1206 of SEQ ID NO: 317483
aaacguaagugagccuaaa

SEQ ID NO: 494458 - RNA, 19 nt, Artificial Sequence
  Description of Artificial Sequence: Synthetic oligonucleotide
  Antisense Strand to SEQ ID NO: 494457
uuuaggcucacuuacguuu

SEQ ID NO: 494459 - RNA, 19 nt, Artificial Sequence
  Description of Artificial Sequence: Synthetic oligonucleotide
  Sense strand starting at position 2050 of SEQ ID NO: 317483
gcgggaaaggccugagcau

SEQ ID NO: 494460 - RNA, 19 nt, Artificial Sequence
  Description of Artificial Sequence: Synthetic oligonucleotide
  Antisense Strand to SEQ ID NO: 494459
augcucaggccuuucccgc

SEQ ID NO: 494461 - RNA, 19 nt, Artificial Sequence
  Description of Artificial Sequence: Synthetic oligonucleotide
  Sense strand starting at position 2096 of SEQ ID NO: 317483
ugagaagauucugaggaga

SEQ ID NO: 494462 - RNA, 19 nt, Artificial Sequence
  Description of Artificial Sequence: Synthetic oligonucleotide
  Antisense Strand to SEQ ID NO: 494461
ucuccucagaaucuucuca

SEQ ID NO: 494463 - RNA, 19 nt, Artificial Sequence
  Description of Artificial Sequence: Synthetic oligonucleotide
  Sense strand starting at position 2520 of SEQ ID NO: 317483
uaguuaccacccuggagau

SEQ ID NO: 494464 - RNA, 19 nt, Artificial Sequence
  Description of Artificial Sequence: Synthetic oligonucleotide
  Antisense Strand to SEQ ID NO: 494463
aucuccagggugguaacua

SEQ ID NO: 494465 - RNA, 19 nt, Artificial Sequence
  Description of Artificial Sequence: Synthetic oligonucleotide
  Sense strand starting at position 2521 of SEQ ID NO: 317483
aguuaccacccuggagauu

SEQ ID NO: 494466 - RNA, 19 nt, Artificial Sequence
  Description of Artificial Sequence: Synthetic oligonucleotide
  Antisense Strand to SEQ ID NO: 494465
aaucuccagggugguaacu

SEQ ID NO: 494467 - RNA, 19 nt, Artificial Sequence
  Description of Artificial Sequence: Synthetic oligonucleotide
  Sense strand starting at position 2568 of SEQ ID NO: 317483
caaggucucgucugaggaa

SEQ ID NO: 494468 - RNA, 19 nt, Artificial Sequence
  Description of Artificial Sequence: Synthetic oligonucleotide
  Antisense Strand to SEQ ID NO: 494467
uuccucagacgagaccuug

SEQ ID NO: 494469 - RNA, 19 nt, Artificial Sequence
  Description of Artificial Sequence: Synthetic oligonucleotide
  Sense strand starting at position 2611 of SEQ ID NO: 317483
ggacgaguaugaguuuguu

SEQ ID NO: 494470 - RNA, 19 nt, Artificial Sequence
  Description of Artificial Sequence: Synthetic oligonucleotide
  Antisense Strand to SEQ ID NO: 494469
aacaaacucauacucgucc

SEQ ID NO: 494471 - RNA, 19 nt, Artificial Sequence
  Description of Artificial Sequence: Synthetic oligonucleotide
  Sense strand starting at position 2614 of SEQ ID NO: 317483
cgaguaugaguuuguugga

SEQ ID NO: 494472 - RNA, 19 nt, Artificial Sequence
  Description of Artificial Sequence: Synthetic oligonucleotide
  Antisense Strand to SEQ ID NO: 494471
uccaacaaacucauacucg

SEQ ID NO: 494473 - RNA, 19 nt, Artificial Sequence
  Description of Artificial Sequence: Synthetic oligonucleotide
  Sense strand starting at position 2621 of SEQ ID NO: 317483
gaguuuguuggacaaacuu

SEQ ID NO: 494474 - RNA, 19 nt, Artificial Sequence
  Description of Artificial Sequence: Synthetic oligonucleotide
  Antisense Strand to SEQ ID NO: 494473
aaguuuguccaacaaacuc

SEQ ID NO: 494475 - RNA, 19 nt, Artificial Sequence
  Description of Artificial Sequence: Synthetic oligonucleotide
  Sense strand starting at position 2662 of SEQ ID NO: 317483
aaggauuaguccuugugag

SEQ ID NO: 494476 - RNA, 19 nt, Artificial Sequence
  Description of Artificial Sequence: Synthetic oligonucleotide
  Antisense Strand to SEQ ID NO: 494475
cucacaaggacuaauccuu

SEQ ID NO: 494477 - RNA, 19 nt, Artificial Sequence
  Description of Artificial Sequence: Synthetic oligonucleotide
  Sense strand starting at position 2663 of SEQ ID NO: 317483
aggauuaguccuugugagg

SEQ ID NO: 494478 - RNA, 19 nt, Artificial Sequence
  Description of Artificial Sequence: Synthetic oligonucleotide
  Antisense Strand to SEQ ID NO: 494477
ccucacaaggacuaauccu

SEQ ID NO: 494479 - RNA, 19 nt, Artificial Sequence
  Description of Artificial Sequence: Synthetic oligonucleotide
  Sense strand starting at position 2692 of SEQ ID NO: 317483
gucuuauaacuugguaaau

SEQ ID NO: 494480 - RNA, 19 nt, Artificial Sequence
  Description of Artificial Sequence: Synthetic oligonucleotide
  Antisense Strand to SEQ ID NO: 494479
auuuaccaaguuauaagac

SEQ ID NO: 494481 - RNA, 19 nt, Artificial Sequence
  Description of Artificial Sequence: Synthetic oligonucleotide
  Sense strand starting at position 2693 of SEQ ID NO: 317483
ucuuauaacuugguaaaug

SEQ ID NO: 494482 - RNA, 19 nt, Artificial Sequence
  Description of Artificial Sequence: Synthetic oligonucleotide
  Antisense Strand to SEQ ID NO: 494481
cauuuaccaaguuauaaga

SEQ ID NO: 494483 - RNA, 19 nt, Artificial Sequence
  Description of Artificial Sequence: Synthetic oligonucleotide
  Sense strand starting at position 2725 of SEQ ID NO: 317483
ggcuaauauuugcagaaga

SEQ ID NO: 494484 - RNA, 19 nt, Artificial Sequence
  Description of Artificial Sequence: Synthetic oligonucleotide
  Antisense Strand to SEQ ID NO: 494483
ucuucugcaaauauuagcc

SEQ ID NO: 494485 - RNA, 19 nt, Artificial Sequence
  Description of Artificial Sequence: Synthetic oligonucleotide
  Sense strand starting at position 2748 of SEQ ID NO: 317483
auagaaucggcauagcacu

SEQ ID NO: 494486 - RNA, 19 nt, Artificial Sequence
  Description of Artificial Sequence: Synthetic oligonucleotide
  Antisense Strand to SEQ ID NO: 494485
agugcuaugccgauucuau

SEQ ID NO: 494487 - RNA, 19 nt, Artificial Sequence
  Description of Artificial Sequence: Synthetic oligonucleotide
  Sense strand starting at position 3424 of SEQ ID NO: 317483
agagcuaccuucccagaaa

SEQ ID NO: 494488 - RNA, 19 nt, Artificial Sequence
  Description of Artificial Sequence: Synthetic oligonucleotide
  Antisense Strand to SEQ ID NO: 494487
uuucugggaagguagcucu

SEQ ID NO: 494489 - RNA, 19 nt, Artificial Sequence
  Description of Artificial Sequence: Synthetic oligonucleotide
  Sense strand starting at position 3453 of SEQ ID NO: 317483
ugugaugaagucugagauu

SEQ ID NO: 494490 - RNA, 19 nt, Artificial Sequence
  Description of Artificial Sequence: Synthetic oligonucleotide
  Antisense Strand to SEQ ID NO: 494489
aaucucagacuucaucaca

SEQ ID NO: 494491 - RNA, 19 nt, Artificial Sequence
  Description of Artificial Sequence: Synthetic oligonucleotide
  Sense strand starting at position 3456 of SEQ ID NO: 317483
gaugaagucugagauuuga

SEQ ID NO: 494492 - RNA, 19 nt, Artificial Sequence
  Description of Artificial Sequence: Synthetic oligonucleotide
  Antisense Strand to SEQ ID NO: 494491
ucaaaucucagacuucauc

SEQ ID NO: 494493 - RNA, 19 nt, Artificial Sequence
  Description of Artificial Sequence: Synthetic oligonucleotide
  Sense strand starting at position 3559 of SEQ ID NO: 317483
gaugauaaaggcugugguu

SEQ ID NO: 494494 - RNA, 19 nt, Artificial Sequence
  Description of Artificial Sequence: Synthetic oligonucleotide
  Antisense Strand to SEQ ID NO: 494493
aaccacagccuuuaucauc

SEQ ID NO: 494495 - RNA, 19 nt, Artificial Sequence
  Description of Artificial Sequence: Synthetic oligonucleotide
  Sense strand starting at position 3588 of SEQ ID NO: 317483
ugaucuggagucugaccaa

SEQ ID NO: 494496 - RNA, 19 nt, Artificial Sequence
  Description of Artificial Sequence: Synthetic oligonucleotide
  Antisense Strand to SEQ ID NO: 494495
uuggucagacuccagauca

SEQ ID NO: 494497 - RNA, 19 nt, Artificial Sequence
  Description of Artificial Sequence: Synthetic oligonucleotide
  Sense strand starting at position 3595 of SEQ ID NO: 317483
gagucugaccaaugggaug

SEQ ID NO: 494498 - RNA, 19 nt, Artificial Sequence
  Description of Artificial Sequence: Synthetic oligonucleotide
  Antisense Strand to SEQ ID NO: 494497
caucccauuggucagacuc

SEQ ID NO: 494499 - RNA, 19 nt, Artificial Sequence
  Description of Artificial Sequence: Synthetic oligonucleotide
  Sense strand starting at position 3846 of SEQ ID NO: 317483
ccacgaaucuguucugcaa

SEQ ID NO: 494500 - RNA, 19 nt, Artificial Sequence
  Description of Artificial Sequence: Synthetic oligonucleotide
  Antisense Strand to SEQ ID NO: 494499
uugcagaacagauucgugg

SEQ ID NO: 494501 - RNA, 19 nt, Artificial Sequence
  Description of Artificial Sequence: Synthetic oligonucleotide
  Sense strand starting at position 3849 of SEQ ID NO: 317483
cgaaucuguucugcaagga

SEQ ID NO: 494502 - RNA, 19 nt, Artificial Sequence
  Description of Artificial Sequence: Synthetic oligonucleotide
  Antisense Strand to SEQ ID NO: 494501
uccuugcagaacagauucg

SEQ ID NO: 494503 - RNA, 19 nt, Artificial Sequence
  Description of Artificial Sequence: Synthetic oligonucleotide
  Sense strand starting at position 3850 of SEQ ID NO: 317483
gaaucuguucugcaaggac

SEQ ID NO: 494504 - RNA, 19 nt, Artificial Sequence
  Description of Artificial Sequence: Synthetic oligonucleotide
  Antisense Strand to SEQ ID NO: 494503
guccuugcagaacagauuc

SEQ ID NO: 494505 - RNA, 19 nt, Artificial Sequence
  Description of Artificial Sequence: Synthetic oligonucleotide
  Sense strand starting at position 3853 of SEQ ID NO: 317483
ucuguucugcaaggacaua

SEQ ID NO: 494506 - RNA, 19 nt, Artificial Sequence
  Description of Artificial Sequence: Synthetic oligonucleotide
  Antisense Strand to SEQ ID NO: 494505
uauguccuugcagaacaga

SEQ ID NO: 494507 - RNA, 19 nt, Artificial Sequence
  Description of Artificial Sequence: Synthetic oligonucleotide
  Sense strand starting at position 3938 of SEQ ID NO: 317483
aacagaauaucucagugag

SEQ ID NO: 494508 - RNA, 19 nt, Artificial Sequence
  Description of Artificial Sequence: Synthetic oligonucleotide
  Antisense Strand to SEQ ID NO: 494507
cucacugagauauucuguu

SEQ ID NO: 494509 - RNA, 19 nt, Artificial Sequence
  Description of Artificial Sequence: Synthetic oligonucleotide
  Sense strand starting at position 250 of SEQ ID NO: 317484
accugauuguaccuuuguu

SEQ ID NO: 494510 - RNA, 19 nt, Artificial Sequence
  Description of Artificial Sequence: Synthetic oligonucleotide
  Antisense Strand to SEQ ID NO: 494509
aacaaagguacaaucaggu

SEQ ID NO: 494511 - RNA, 19 nt, Artificial Sequence
  Description of Artificial Sequence: Synthetic oligonucleotide
  Sense strand starting at position 782 of SEQ ID NO: 317484
agcagucuucucuacuauu

SEQ ID NO: 494512 - RNA, 19 nt, Artificial Sequence
  Description of Artificial Sequence: Synthetic oligonucleotide
  Antisense Strand to SEQ ID NO: 494511
aauaguagagaagacugcu

SEQ ID NO: 494513 - RNA, 19 nt, Artificial Sequence
  Description of Artificial Sequence: Synthetic oligonucleotide
  Sense strand starting at position 886 of SEQ ID NO: 317484
acacaauggugccuccaau

SEQ ID NO: 494514 - RNA, 19 nt, Artificial Sequence
  Description of Artificial Sequence: Synthetic oligonucleotide
  Antisense Strand to SEQ ID NO: 494513
auuggaggcaccauugugu

SEQ ID NO: 494515 - RNA, 19 nt, Artificial Sequence
  Description of Artificial Sequence: Synthetic oligonucleotide
  Sense strand starting at position 908 of SEQ ID NO: 317484
ugaagucuguagcuaaacu

SEQ ID NO: 494516 - RNA, 19 nt, Artificial Sequence
  Description of Artificial Sequence: Synthetic oligonucleotide
  Antisense Strand to SEQ ID NO: 494515
aguuuagcuacagacuuca

SEQ ID NO: 494517 - RNA, 19 nt, Artificial Sequence
  Description of Artificial Sequence: Synthetic oligonucleotide
  Sense strand starting at position 975 of SEQ ID NO: 317484
uuccacugguccuuuauua

SEQ ID NO: 494518 - RNA, 19 nt, Artificial Sequence
  Description of Artificial Sequence: Synthetic oligonucleotide
  Antisense Strand to SEQ ID NO: 494517
uaauaaaggaccaguggaa

SEQ ID NO: 494519 - RNA, 19 nt, Artificial Sequence
  Description of Artificial Sequence: Synthetic oligonucleotide
  Sense strand starting at position 1053 of SEQ ID NO: 317484
aaagauugccugggccaca

SEQ ID NO: 494520 - RNA, 19 nt, Artificial Sequence
  Description of Artificial Sequence: Synthetic oligonucleotide
  Antisense Strand to SEQ ID NO: 494519
uguggcccaggcaaucuuu

SEQ ID NO: 494521 - RNA, 19 nt, Artificial Sequence
  Description of Artificial Sequence: Synthetic oligonucleotide
  Sense strand starting at position 1147 of SEQ ID NO: 317484
uugugaaccuaugcuuuaa

SEQ ID NO: 494522 - RNA, 19 nt, Artificial Sequence
  Description of Artificial Sequence: Synthetic oligonucleotide
  Antisense Strand to SEQ ID NO: 494521
uuaaagcauagguucacaa

SEQ ID NO: 494523 - RNA, 19 nt, Artificial Sequence
  Description of Artificial Sequence: Synthetic oligonucleotide
  Sense strand starting at position 1327 of SEQ ID NO: 317484
ucucuagcuuguuugagga

SEQ ID NO: 494524 - RNA, 19 nt, Artificial Sequence
  Description of Artificial Sequence: Synthetic oligonucleotide
  Antisense Strand to SEQ ID NO: 494523
uccucaaacaagcuagaga

SEQ ID NO: 494525 - RNA, 19 nt, Artificial Sequence
  Description of Artificial Sequence: Synthetic oligonucleotide
  Sense strand starting at position 1397 of SEQ ID NO: 317484
acuggcugauucuuaacau

SEQ ID NO: 494526 - RNA, 19 nt, Artificial Sequence
  Description of Artificial Sequence: Synthetic oligonucleotide
  Antisense Strand to SEQ ID NO: 494525
auguuaagaaucagccagu

SEQ ID NO: 494527 - RNA, 19 nt, Artificial Sequence
  Description of Artificial Sequence: Synthetic oligonucleotide
  Sense strand starting at position 1453 of SEQ ID NO: 317484
gauaauucguaccuguaag

SEQ ID NO: 494528 - RNA, 19 nt, Artificial Sequence
  Description of Artificial Sequence: Synthetic oligonucleotide
  Antisense Strand to SEQ ID NO: 494527
cuuacagguacgaauuauc

SEQ ID NO: 494529 - RNA, 19 nt, Artificial Sequence
  Description of Artificial Sequence: Synthetic oligonucleotide
  Sense strand starting at position 1484 of SEQ ID NO: 317484
auuacaggaugcuuacaua

SEQ ID NO: 494530 - RNA, 19 nt, Artificial Sequence
  Description of Artificial Sequence: Synthetic oligonucleotide
  Antisense Strand to SEQ ID NO: 494529
uauguaagcauccuguaau

SEQ ID NO: 494531 - RNA, 19 nt, Artificial Sequence
  Description of Artificial Sequence: Synthetic oligonucleotide
  Sense strand starting at position 1881 of SEQ ID NO: 317484
agcaaauccggccaaagaa

SEQ ID NO: 494532 - RNA, 19 nt, Artificial Sequence
  Description of Artificial Sequence: Synthetic oligonucleotide
  Antisense Strand to SEQ ID NO: 494531
uucuuuggccggauuugcu

SEQ ID NO: 494533 - RNA, 19 nt, Artificial Sequence
  Description of Artificial Sequence: Synthetic oligonucleotide
  Sense strand starting at position 2055 of SEQ ID NO: 317484
gggauugugugaagauuga

SEQ ID NO: 494534 - RNA, 19 nt, Artificial Sequence
  Description of Artificial Sequence: Synthetic oligonucleotide
  Antisense Strand to SEQ ID NO: 494533
ucaaucuucacacaauccc

SEQ ID NO: 494535 - RNA, 19 nt, Artificial Sequence
  Description of Artificial Sequence: Synthetic oligonucleotide
  Sense strand starting at position 2147 of SEQ ID NO: 317484
uucggauucuuaucacuuu

SEQ ID NO: 494536 - RNA, 19 nt, Artificial Sequence
  Description of Artificial Sequence: Synthetic oligonucleotide
  Antisense Strand to SEQ ID NO: 494535
aaagugauaagaauccgaa

SEQ ID NO: 494537 - RNA, 19 nt, Artificial Sequence
  Description of Artificial Sequence: Synthetic oligonucleotide
  Sense strand starting at position 2193 of SEQ ID NO: 317484
caaguaagucugcaaguug

SEQ ID NO: 494538 - RNA, 19 nt, Artificial Sequence
  Description of Artificial Sequence: Synthetic oligonucleotide
  Antisense Strand to SEQ ID NO: 494537
caacuugcagacuuacuug

SEQ ID NO: 494539 - RNA, 19 nt, Artificial Sequence
  Description of Artificial Sequence: Synthetic oligonucleotide
  Sense strand starting at position 2263 of SEQ ID NO: 317484
gagagcuuugcagggucaa

SEQ ID NO: 494540 - RNA, 19 nt, Artificial Sequence
  Description of Artificial Sequence: Synthetic oligonucleotide
  Antisense Strand to SEQ ID NO: 494539
uugacccugcaaagcucuc

SEQ ID NO: 494541 - RNA, 19 nt, Artificial Sequence
  Description of Artificial Sequence: Synthetic oligonucleotide
  Sense strand starting at position 2318 of SEQ ID NO: 317484
uugagcacucccuaugcuu

SEQ ID NO: 494542 - RNA, 19 nt, Artificial Sequence
  Description of Artificial Sequence: Synthetic oligonucleotide
  Antisense Strand to SEQ ID NO: 494541
aagcauagggagugcucaa

SEQ ID NO: 494543 - RNA, 19 nt, Artificial Sequence
  Description of Artificial Sequence: Synthetic oligonucleotide
  Sense strand starting at position 2320 of SEQ ID NO: 317484
gagcacucccuaugcuuga

SEQ ID NO: 494544 - RNA, 19 nt, Artificial Sequence
  Description of Artificial Sequence: Synthetic oligonucleotide
  Antisense Strand to SEQ ID NO: 494543
ucaagcauagggagugcuc

SEQ ID NO: 494545 - RNA, 19 nt, Artificial Sequence
  Description of Artificial Sequence: Synthetic oligonucleotide
  Sense strand starting at position 2324 of SEQ ID NO: 317484
acucccuaugcuugaaaga

SEQ ID NO: 494546 - RNA, 19 nt, Artificial Sequence
  Description of Artificial Sequence: Synthetic oligonucleotide
  Antisense Strand to SEQ ID NO: 494545
ucuuucaagcauagggagu

SEQ ID NO: 494547 - RNA, 19 nt, Artificial Sequence
  Description of Artificial Sequence: Synthetic oligonucleotide
  Sense strand starting at position 2410 of SEQ ID NO: 317484
gggauugugcccuacccua

SEQ ID NO: 494548 - RNA, 19 nt, Artificial Sequence
  Description of Artificial Sequence: Synthetic oligonucleotide
  Antisense Strand to SEQ ID NO: 494547
uaggguagggcacaauccc

SEQ ID NO: 494549 - RNA, 19 nt, Artificial Sequence
  Description of Artificial Sequence: Synthetic oligonucleotide
  Sense strand starting at position 2463 of SEQ ID NO: 317484
ggcggaauuugagggauga

SEQ ID NO: 494550 - RNA, 19 nt, Artificial Sequence
  Description of Artificial Sequence: Synthetic oligonucleotide
  Antisense Strand to SEQ ID NO: 494549
ucaucccucaaauuccgcc

SEQ ID NO: 494551 - RNA, 19 nt, Artificial Sequence
  Description of Artificial Sequence: Synthetic oligonucleotide
  Sense strand starting at position 2479 of SEQ ID NO: 317484
ugaagaggcauucguugga

SEQ ID NO: 494552 - RNA, 19 nt, Artificial Sequence
  Description of Artificial Sequence: Synthetic oligonucleotide
  Antisense Strand to SEQ ID NO: 494551
uccaacgaaugccucuuca

SEQ ID NO: 494553 - RNA, 19 nt, Artificial Sequence
  Description of Artificial Sequence: Synthetic oligonucleotide
  Sense strand starting at position 2482 of SEQ ID NO: 317484
agaggcauucguuggauca

SEQ ID NO: 494554 - RNA, 19 nt, Artificial Sequence
  Description of Artificial Sequence: Synthetic oligonucleotide
  Antisense Strand to SEQ ID NO: 494553
ugauccaacgaaugccucu

SEQ ID NO: 494555 - RNA, 19 nt, Artificial Sequence
  Description of Artificial Sequence: Synthetic oligonucleotide
  Sense strand starting at position 2483 of SEQ ID NO: 317484
gaggcauucguuggaucaa

SEQ ID NO: 494556 - RNA, 19 nt, Artificial Sequence
  Description of Artificial Sequence: Synthetic oligonucleotide
  Antisense Strand to SEQ ID NO: 494555
uugauccaacgaaugccuc

SEQ ID NO: 494557 - RNA, 19 nt, Artificial Sequence
  Description of Artificial Sequence: Synthetic oligonucleotide
  Sense strand starting at position 2495 of SEQ ID NO: 317484
ggaucaauuccacggucaa

SEQ ID NO: 494558 - RNA, 19 nt, Artificial Sequence
  Description of Artificial Sequence: Synthetic oligonucleotide
  Antisense Strand to SEQ ID NO: 494557
uugaccguggaauugaucc

SEQ ID NO: 494559 - RNA, 19 nt, Artificial Sequence
  Description of Artificial Sequence: Synthetic oligonucleotide
  Sense strand starting at position 2496 of SEQ ID NO: 317484
gaucaauuccacggucaaa

SEQ ID NO: 494560 - RNA, 19 nt, Artificial Sequence
  Description of Artificial Sequence: Synthetic oligonucleotide
  Antisense Strand to SEQ ID NO: 494559
uuugaccguggaauugauc

SEQ ID NO: 494561 - RNA, 19 nt, Artificial Sequence
  Description of Artificial Sequence: Synthetic oligonucleotide
  Sense strand starting at position 2656 of SEQ ID NO: 317484
ggacaagccuagguaacau

SEQ ID NO: 494562 - RNA, 19 nt, Artificial Sequence
  Description of Artificial Sequence: Synthetic oligonucleotide
  Antisense Strand to SEQ ID NO: 494561
auguuaccuaggcuugucc

SEQ ID NO: 494563 - RNA, 19 nt, Artificial Sequence
  Description of Artificial Sequence: Synthetic oligonucleotide
  Sense strand starting at position 3397 of SEQ ID NO: 317484
gcacuacaacgugggaaau

SEQ ID NO: 494564 - RNA, 19 nt, Artificial Sequence
  Description of Artificial Sequence: Synthetic oligonucleotide
  Antisense Strand to SEQ ID NO: 494563
auuucccacguuguagugc

SEQ ID NO: 494565 - RNA, 19 nt, Artificial Sequence
  Description of Artificial Sequence: Synthetic oligonucleotide
  Sense strand starting at position 3444 of SEQ ID NO: 317484
cuuugugaggcugaugaga

SEQ ID NO: 494566 - RNA, 19 nt, Artificial Sequence
  Description of Artificial Sequence: Synthetic oligonucleotide
  Antisense Strand to SEQ ID NO: 494565
ucucaucagccucacaaag

SEQ ID NO: 494567 - RNA, 19 nt, Artificial Sequence
  Description of Artificial Sequence: Synthetic oligonucleotide
  Sense strand starting at position 3455 of SEQ ID NO: 317484
ugaugagauaggcgagaau

SEQ ID NO: 494568 - RNA, 19 nt, Artificial Sequence
  Description of Artificial Sequence: Synthetic oligonucleotide
  Antisense Strand to SEQ ID NO: 494567
auucucgccuaucucauca

SEQ ID NO: 494569 - RNA, 19 nt, Artificial Sequence
  Description of Artificial Sequence: Synthetic oligonucleotide
  Sense strand starting at position 3561 of SEQ ID NO: 317484
guacuaagauuugaauugu

SEQ ID NO: 494570 - RNA, 19 nt, Artificial Sequence
  Description of Artificial Sequence: Synthetic oligonucleotide
  Antisense Strand to SEQ ID NO: 494569
acaauucaaaucuuaguac

SEQ ID NO: 494571 - RNA, 19 nt, Artificial Sequence
  Description of Artificial Sequence: Synthetic oligonucleotide
  Sense strand starting at position 3567 of SEQ ID NO: 317484
agauuugaauuguggaaua

SEQ ID NO: 494572 - RNA, 19 nt, Artificial Sequence
  Description of Artificial Sequence: Synthetic oligonucleotide
  Antisense Strand to SEQ ID NO: 494571
uauuccacaauucaaaucu

SEQ ID NO: 494573 - RNA, 19 nt, Artificial Sequence
  Description of Artificial Sequence: Synthetic oligonucleotide
  Sense strand starting at position 3580 of SEQ ID NO: 317484
ggaauaaagacccgucgau

SEQ ID NO: 494574 - RNA, 19 nt, Artificial Sequence
  Description of Artificial Sequence: Synthetic oligonucleotide
  Antisense Strand to SEQ ID NO: 494573
aucgacgggucuuuauucc

SEQ ID NO: 494575 - RNA, 19 nt, Artificial Sequence
  Description of Artificial Sequence: Synthetic oligonucleotide
  Sense strand starting at position 3592 of SEQ ID NO: 317484
cgucgaugccuuuaauaua

SEQ ID NO: 494576 - RNA, 19 nt, Artificial Sequence
  Description of Artificial Sequence: Synthetic oligonucleotide
  Antisense Strand to SEQ ID NO: 494575
uauauuaaaggcaucgacg

SEQ ID NO: 494577 - RNA, 19 nt, Artificial Sequence
  Description of Artificial Sequence: Synthetic oligonucleotide
  Sense strand starting at position 3620 of SEQ ID NO: 317484
ggguguaugguggacaguu

SEQ ID NO: 494578 - RNA, 19 nt, Artificial Sequence
  Description of Artificial Sequence: Synthetic oligonucleotide
  Antisense Strand to SEQ ID NO: 494577
aacuguccaccauacaccc

SEQ ID NO: 494579 - RNA, 19 nt, Artificial Sequence
  Description of Artificial Sequence: Synthetic oligonucleotide
  Sense strand starting at position 3638 of SEQ ID NO: 317484
ugaauagaggugugaccua

SEQ ID NO: 494580 - RNA, 19 nt, Artificial Sequence
  Description of Artificial Sequence: Synthetic oligonucleotide
  Antisense Strand to SEQ ID NO: 494579
uaggucacaccucuauuca

SEQ ID NO: 494581 - RNA, 19 nt, Artificial Sequence
  Description of Artificial Sequence: Synthetic oligonucleotide
  Sense strand starting at position 3704 of SEQ ID NO: 317484
auuccagagucuccugaaa

SEQ ID NO: 494582 - RNA, 19 nt, Artificial Sequence
  Description of Artificial Sequence: Synthetic oligonucleotide
  Antisense Strand to SEQ ID NO: 494581
uuucaggagacucuggaau

SEQ ID NO: 494583 - RNA, 19 nt, Artificial Sequence
  Description of Artificial Sequence: Synthetic oligonucleotide
  Sense strand starting at position 3760 of SEQ ID NO: 317484
ccauauuacuuugcaguga

SEQ ID NO: 494584 - RNA, 19 nt, Artificial Sequence
  Description of Artificial Sequence: Synthetic oligonucleotide
  Antisense Strand to SEQ ID NO: 494583
ucacugcaaaguaauaugg

SEQ ID NO: 494585 - RNA, 19 nt, Artificial Sequence
  Description of Artificial Sequence: Synthetic oligonucleotide
  Sense strand starting at position 3765 of SEQ ID NO: 317484
uuacuuugcagugagguga

SEQ ID NO: 494586 - RNA, 19 nt, Artificial Sequence
  Description of Artificial Sequence: Synthetic oligonucleotide
  Antisense Strand to SEQ ID NO: 494585
ucaccucacugcaaaguaa

SEQ ID NO: 494587 - RNA, 19 nt, Artificial Sequence
  Description of Artificial Sequence: Synthetic oligonucleotide
  Sense strand starting at position 3778 of SEQ ID NO: 317484
aggugagugcaugguauuu

SEQ ID NO: 494588 - RNA, 19 nt, Artificial Sequence
  Description of Artificial Sequence: Synthetic oligonucleotide
  Antisense Strand to SEQ ID NO: 494587
aaauaccaugcacucaccu

SEQ ID NO: 494589 - RNA, 19 nt, Artificial Sequence
  Description of Artificial Sequence: Synthetic oligonucleotide
  Sense strand starting at position 24 of SEQ ID NO: 317485
gaccgagacagguggauua

SEQ ID NO: 494590 - RNA, 19 nt, Artificial Sequence
  Description of Artificial Sequence: Synthetic oligonucleotide
  Antisense Strand to SEQ ID NO: 494589
uaauccaccugucucgguc

SEQ ID NO: 494591 - RNA, 19 nt, Artificial Sequence
  Description of Artificial Sequence: Synthetic oligonucleotide
  Sense strand starting at position 296 of SEQ ID NO: 317485
uugggagaaucagauacau

SEQ ID NO: 494592 - RNA, 19 nt, Artificial Sequence
  Description of Artificial Sequence: Synthetic oligonucleotide
  Antisense Strand to SEQ ID NO: 494591
auguaucugauucucccaa

SEQ ID NO: 494593 - RNA, 19 nt, Artificial Sequence
  Description of Artificial Sequence: Synthetic oligonucleotide
  Sense strand starting at position 374 of SEQ ID NO: 317485
aauccaaguccgugaccaa

SEQ ID NO: 494594 - RNA, 19 nt, Artificial Sequence
  Description of Artificial Sequence: Synthetic oligonucleotide
  Antisense Strand to SEQ ID NO: 494593
uuggucacggacuuggauu

SEQ ID NO: 494595 - RNA, 19 nt, Artificial Sequence
  Description of Artificial Sequence: Synthetic oligonucleotide
  Sense strand starting at position 399 of SEQ ID NO: 317485
ggacuugucagguaucauu

SEQ ID NO: 494596 - RNA, 19 nt, Artificial Sequence
  Description of Artificial Sequence: Synthetic oligonucleotide
  Antisense Strand to SEQ ID NO: 494595
aaugauaccugacaagucc

SEQ ID NO: 494597 - RNA, 19 nt, Artificial Sequence
  Description of Artificial Sequence: Synthetic oligonucleotide
  Sense strand starting at position 509 of SEQ ID NO: 317485
ucgcuuuccgucucauguu

SEQ ID NO: 494598 - RNA, 19 nt, Artificial Sequence
  Description of Artificial Sequence: Synthetic oligonucleotide
  Antisense Strand to SEQ ID NO: 494597
aacaugagacggaaagcga

SEQ ID NO: 494599 - RNA, 19 nt, Artificial Sequence
  Description of Artificial Sequence: Synthetic oligonucleotide
  Sense strand starting at position 523 of SEQ ID NO: 317485
auguuacaugucuauaagu

SEQ ID NO: 494600 - RNA, 19 nt, Artificial Sequence
  Description of Artificial Sequence: Synthetic oligonucleotide
  Antisense Strand to SEQ ID NO: 494599
acuuauagacauguaacau

SEQ ID NO: 494601 - RNA, 19 nt, Artificial Sequence
  Description of Artificial Sequence: Synthetic oligonucleotide
  Sense strand starting at position 525 of SEQ ID NO: 317485
guuacaugucuauaaguau

SEQ ID NO: 494602 - RNA, 19 nt, Artificial Sequence
  Description of Artificial Sequence: Synthetic oligonucleotide
  Antisense Strand to SEQ ID NO: 494601
auacuuauagacauguaac

SEQ ID NO: 494603 - RNA, 19 nt, Artificial Sequence
  Description of Artificial Sequence: Synthetic oligonucleotide
  Sense strand starting at position 534 of SEQ ID NO: 317485
cuauaaguaucacuugugu

SEQ ID NO: 494604 - RNA, 19 nt, Artificial Sequence
  Description of Artificial Sequence: Synthetic oligonucleotide
  Antisense Strand to SEQ ID NO: 494603
acacaagugauacuuauag

SEQ ID NO: 494605 - RNA, 19 nt, Artificial Sequence
  Description of Artificial Sequence: Synthetic oligonucleotide
  Sense strand starting at position 597 of SEQ ID NO: 317485
ugucuaguuaugcaaagga

SEQ ID NO: 494606 - RNA, 19 nt, Artificial Sequence
  Description of Artificial Sequence: Synthetic oligonucleotide
  Antisense Strand to SEQ ID NO: 494605
uccuuugcauaacuagaca

SEQ ID NO: 494607 - RNA, 19 nt, Artificial Sequence
  Description of Artificial Sequence: Synthetic oligonucleotide
  Sense strand starting at position 909 of SEQ ID NO: 317485
gaguuucuccugcaauaga

SEQ ID NO: 494608 - RNA, 19 nt, Artificial Sequence
  Description of Artificial Sequence: Synthetic oligonucleotide
  Antisense Strand to SEQ ID NO: 494607
ucuauugcaggagaaacuc

SEQ ID NO: 494609 - RNA, 19 nt, Artificial Sequence
  Description of Artificial Sequence: Synthetic oligonucleotide
  Sense strand starting at position 1418 of SEQ ID NO: 317485
aggaaagcuaacggaguua

SEQ ID NO: 494610 - RNA, 19 nt, Artificial Sequence
  Description of Artificial Sequence: Synthetic oligonucleotide
  Antisense Strand to SEQ ID NO: 494609
uaacuccguuagcuuuccu

SEQ ID NO: 494611 - RNA, 19 nt, Artificial Sequence
  Description of Artificial Sequence: Synthetic oligonucleotide
  Sense strand starting at position 2017 of SEQ ID NO: 317485
ucucuucugugccugauuu

SEQ ID NO: 494612 - RNA, 19 nt, Artificial Sequence
  Description of Artificial Sequence: Synthetic oligonucleotide
  Antisense Strand to SEQ ID NO: 494611
aaaucaggcacagaagaga

SEQ ID NO: 494613 - RNA, 19 nt, Artificial Sequence
  Description of Artificial Sequence: Synthetic oligonucleotide
  Sense strand starting at position 2065 of SEQ ID NO: 317485
agccaauuaugacuuaaug

SEQ ID NO: 494614 - RNA, 19 nt, Artificial Sequence
  Description of Artificial Sequence: Synthetic oligonucleotide
  Antisense Strand to SEQ ID NO: 494613
cauuaagucauaauuggcu

SEQ ID NO: 494615 - RNA, 19 nt, Artificial Sequence
  Description of Artificial Sequence: Synthetic oligonucleotide
  Sense strand starting at position 2083 of SEQ ID NO: 317485
guggaacuccuguauacug

SEQ ID NO: 494616 - RNA, 19 nt, Artificial Sequence
  Description of Artificial Sequence: Synthetic oligonucleotide
  Antisense Strand to SEQ ID NO: 494615
caguauacaggaguuccac

SEQ ID NO: 494617 - RNA, 19 nt, Artificial Sequence
  Description of Artificial Sequence: Synthetic oligonucleotide
  Sense strand starting at position 2122 of SEQ ID NO: 317485
cuuugagacuuaucucugu

SEQ ID NO: 494618 - RNA, 19 nt, Artificial Sequence
  Description of Artificial Sequence: Synthetic oligonucleotide
  Antisense Strand to SEQ ID NO: 494617
acagagauaagucucaaag

SEQ ID NO: 494619 - RNA, 19 nt, Artificial Sequence
  Description of Artificial Sequence: Synthetic oligonucleotide
  Sense strand starting at position 2125 of SEQ ID NO: 317485
ugagacuuaucucugugaa

SEQ ID NO: 494620 - RNA, 19 nt, Artificial Sequence
  Description of Artificial Sequence: Synthetic oligonucleotide
  Antisense Strand to SEQ ID NO: 494619
uucacagagauaagucuca

SEQ ID NO: 494621 - RNA, 19 nt, Artificial Sequence
  Description of Artificial Sequence: Synthetic oligonucleotide
  Sense strand starting at position 2126 of SEQ ID NO: 317485
gagacuuaucucugugaaa

SEQ ID NO: 494622 - RNA, 19 nt, Artificial Sequence
  Description of Artificial Sequence: Synthetic oligonucleotide
  Antisense Strand to SEQ ID NO: 494621
uuucacagagauaagucuc

SEQ ID NO: 494623 - RNA, 19 nt, Artificial Sequence
  Description of Artificial Sequence: Synthetic oligonucleotide
  Sense strand starting at position 2152 of SEQ ID NO: 317485
augcuagaggcugaggauu

SEQ ID NO: 494624 - RNA, 19 nt, Artificial Sequence
  Description of Artificial Sequence: Synthetic oligonucleotide
  Antisense Strand to SEQ ID NO: 494623
aauccucagccucuagcau

SEQ ID NO: 494625 - RNA, 19 nt, Artificial Sequence
  Description of Artificial Sequence: Synthetic oligonucleotide
  Sense strand starting at position 2163 of SEQ ID NO: 317485
ugaggauucuggcuucuaa

SEQ ID NO: 494626 - RNA, 19 nt, Artificial Sequence
  Description of Artificial Sequence: Synthetic oligonucleotide
  Antisense Strand to SEQ ID NO: 494625
uuagaagccagaauccuca

SEQ ID NO: 494627 - RNA, 19 nt, Artificial Sequence
  Description of Artificial Sequence: Synthetic oligonucleotide
  Sense strand starting at position 2195 of SEQ ID NO: 317485
uugagaacugguuauugua

SEQ ID NO: 494628 - RNA, 19 nt, Artificial Sequence
  Description of Artificial Sequence: Synthetic oligonucleotide
  Antisense Strand to SEQ ID NO: 494627
uacaauaaccaguucucaa

SEQ ID NO: 494629 - RNA, 19 nt, Artificial Sequence
  Description of Artificial Sequence: Synthetic oligonucleotide
  Sense strand starting at position 2197 of SEQ ID NO: 317485
gagaacugguuauuguaca

SEQ ID NO: 494630 - RNA, 19 nt, Artificial Sequence
  Description of Artificial Sequence: Synthetic oligonucleotide
  Antisense Strand to SEQ ID NO: 494629
uguacaauaaccaguucuc

SEQ ID NO: 494631 - RNA, 19 nt, Artificial Sequence
  Description of Artificial Sequence: Synthetic oligonucleotide
  Sense strand starting at position 2202 of SEQ ID NO: 317485
cugguuauuguacauaaac

SEQ ID NO: 494632 - RNA, 19 nt, Artificial Sequence
  Description of Artificial Sequence: Synthetic oligonucleotide
  Antisense Strand to SEQ ID NO: 494631
guuuauguacaauaaccag

SEQ ID NO: 494633 - RNA, 19 nt, Artificial Sequence
  Description of Artificial Sequence: Synthetic oligonucleotide
  Sense strand starting at position 2226 of SEQ ID NO: 317485
uguggaaccaugugagcau

SEQ ID NO: 494634 - RNA, 19 nt, Artificial Sequence
  Description of Artificial Sequence: Synthetic oligonucleotide
  Antisense Strand to SEQ ID NO: 494633
augcucacaugguuccaca

SEQ ID NO: 494635 - RNA, 19 nt, Artificial Sequence
  Description of Artificial Sequence: Synthetic oligonucleotide
  Sense strand starting at position 2431 of SEQ ID NO: 317485
uuuguucugcuugaccaaa

SEQ ID NO: 494636 - RNA, 19 nt, Artificial Sequence
  Description of Artificial Sequence: Synthetic oligonucleotide
  Antisense Strand to SEQ ID NO: 494635
uuuggucaagcagaacaaa

SEQ ID NO: 494637 - RNA, 19 nt, Artificial Sequence
  Description of Artificial Sequence: Synthetic oligonucleotide
  Sense strand starting at position 2519 of SEQ ID NO: 317485
gagcucuuccacugaagua

SEQ ID NO: 494638 - RNA, 19 nt, Artificial Sequence
  Description of Artificial Sequence: Synthetic oligonucleotide
  Antisense Strand to SEQ ID NO: 494637
uacuucaguggaagagcuc

SEQ ID NO: 494639 - RNA, 19 nt, Artificial Sequence
  Description of Artificial Sequence: Synthetic oligonucleotide
  Sense strand starting at position 2532 of SEQ ID NO: 317485
gaaguauuccuugguguua

SEQ ID NO: 494640 - RNA, 19 nt, Artificial Sequence
  Description of Artificial Sequence: Synthetic oligonucleotide
  Antisense Strand to SEQ ID NO: 494639
uaacaccaaggaauacuuc

SEQ ID NO: 494641 - RNA, 19 nt, Artificial Sequence
  Description of Artificial Sequence: Synthetic oligonucleotide
  Sense strand starting at position 2558 of SEQ ID NO: 317485
gaugaauugccagagcugu

SEQ ID NO: 494642 - RNA, 19 nt, Artificial Sequence
  Description of Artificial Sequence: Synthetic oligonucleotide
  Antisense Strand to SEQ ID NO: 494641
acagcucuggcaauucauc

SEQ ID NO: 494643 - RNA, 19 nt, Artificial Sequence
  Description of Artificial Sequence: Synthetic oligonucleotide
  Sense strand starting at position 2649 of SEQ ID NO: 317485
auuggaaguugccucaaga

SEQ ID NO: 494644 - RNA, 19 nt, Artificial Sequence
  Description of Artificial Sequence: Synthetic oligonucleotide
  Antisense Strand to SEQ ID NO: 494643
ucuugaggcaacuuccaau

SEQ ID NO: 494645 - RNA, 19 nt, Artificial Sequence
  Description of Artificial Sequence: Synthetic oligonucleotide
  Sense strand starting at position 2775 of SEQ ID NO: 317485
cccugauuaucaguucuua

SEQ ID NO: 494646 - RNA, 19 nt, Artificial Sequence
  Description of Artificial Sequence: Synthetic oligonucleotide
  Antisense Strand to SEQ ID NO: 494645
uaagaacugauaaucaggg

SEQ ID NO: 494647 - RNA, 19 nt, Artificial Sequence
  Description of Artificial Sequence: Synthetic oligonucleotide
  Sense strand starting at position 2802 of SEQ ID NO: 317485
aaaugaagugugcagacau

SEQ ID NO: 494648 - RNA, 19 nt, Artificial Sequence
  Description of Artificial Sequence: Synthetic oligonucleotide
  Antisense Strand to SEQ ID NO: 494647
augucugcacacuucauuu

SEQ ID NO: 494649 - RNA, 19 nt, Artificial Sequence
  Description of Artificial Sequence: Synthetic oligonucleotide
  Sense strand starting at position 2866 of SEQ ID NO: 317485
cacagugaacuccgagauu

SEQ ID NO: 494650 - RNA, 19 nt, Artificial Sequence
  Description of Artificial Sequence: Synthetic oligonucleotide
  Antisense Strand to SEQ ID NO: 494649
aaucucggaguucacugug

SEQ ID NO: 494651 - RNA, 19 nt, Artificial Sequence
  Description of Artificial Sequence: Synthetic oligonucleotide
  Sense strand starting at position 2869 of SEQ ID NO: 317485
agugaacuccgagauuggu

SEQ ID NO: 494652 - RNA, 19 nt, Artificial Sequence
  Description of Artificial Sequence: Synthetic oligonucleotide
  Antisense Strand to SEQ ID NO: 494651
accaaucucggaguucacu

SEQ ID NO: 494653 - RNA, 19 nt, Artificial Sequence
  Description of Artificial Sequence: Synthetic oligonucleotide
  Sense strand starting at position 3315 of SEQ ID NO: 317485
ccuuguaaagcauacguga

SEQ ID NO: 494654 - RNA, 19 nt, Artificial Sequence
  Description of Artificial Sequence: Synthetic oligonucleotide
  Antisense Strand to SEQ ID NO: 494653
ucacguaugcuuuacaagg

SEQ ID NO: 494655 - RNA, 19 nt, Artificial Sequence
  Description of Artificial Sequence: Synthetic oligonucleotide
  Sense strand starting at position 3317 of SEQ ID NO: 317485
uuguaaagcauacgugaau

SEQ ID NO: 494656 - RNA, 19 nt, Artificial Sequence
  Description of Artificial Sequence: Synthetic oligonucleotide
  Antisense Strand to SEQ ID NO: 494655
auucacguaugcuuuacaa

SEQ ID NO: 494657 - RNA, 19 nt, Artificial Sequence
  Description of Artificial Sequence: Synthetic oligonucleotide
  Sense strand starting at position 3318 of SEQ ID NO: 317485
uguaaagcauacgugaauu

SEQ ID NO: 494658 - RNA, 19 nt, Artificial Sequence
  Description of Artificial Sequence: Synthetic oligonucleotide
  Antisense Strand to SEQ ID NO: 494657
aauucacguaugcuuuaca

SEQ ID NO: 494659 - RNA, 19 nt, Artificial Sequence
  Description of Artificial Sequence: Synthetic oligonucleotide
  Sense strand starting at position 3326 of SEQ ID NO: 317485
auacgugaauugcuaggau

SEQ ID NO: 494660 - RNA, 19 nt, Artificial Sequence
  Description of Artificial Sequence: Synthetic oligonucleotide
  Antisense Strand to SEQ ID NO: 494659
auccuagcaauucacguau

SEQ ID NO: 494661 - RNA, 19 nt, Artificial Sequence
  Description of Artificial Sequence: Synthetic oligonucleotide
  Sense strand starting at position 3329 of SEQ ID NO: 317485
cgugaauugcuaggaugag

SEQ ID NO: 494662 - RNA, 19 nt, Artificial Sequence
  Description of Artificial Sequence: Synthetic oligonucleotide
  Antisense Strand to SEQ ID NO: 494661
cucauccuagcaauucacg

SEQ ID NO: 494663 - RNA, 19 nt, Artificial Sequence
  Description of Artificial Sequence: Synthetic oligonucleotide
  Sense strand starting at position 3335 of SEQ ID NO: 317485
uugcuaggaugagaauuua

SEQ ID NO: 494664 - RNA, 19 nt, Artificial Sequence
  Description of Artificial Sequence: Synthetic oligonucleotide
  Antisense Strand to SEQ ID NO: 494663
uaaauucucauccuagcaa

SEQ ID NO: 494665 - RNA, 19 nt, Artificial Sequence
  Description of Artificial Sequence: Synthetic oligonucleotide
  Sense strand starting at position 3449 of SEQ ID NO: 317485
ccaggauacuaacuuguca

SEQ ID NO: 494666 - RNA, 19 nt, Artificial Sequence
  Description of Artificial Sequence: Synthetic oligonucleotide
  Antisense Strand to SEQ ID NO: 494665
ugacaaguuaguauccugg

SEQ ID NO: 494667 - RNA, 19 nt, Artificial Sequence
  Description of Artificial Sequence: Synthetic oligonucleotide
  Sense strand starting at position 3475 of SEQ ID NO: 317485
agaauauugcuaugaguua

SEQ ID NO: 494668 - RNA, 19 nt, Artificial Sequence
  Description of Artificial Sequence: Synthetic oligonucleotide
  Antisense Strand to SEQ ID NO: 494667
uaacucauagcaauauucu

SEQ ID NO: 494669 - RNA, 19 nt, Artificial Sequence
  Description of Artificial Sequence: Synthetic oligonucleotide
  Sense strand starting at position 78 of SEQ ID NO: 317486
ggcagcuagcguguuucua

SEQ ID NO: 494670 - RNA, 19 nt, Artificial Sequence
  Description of Artificial Sequence: Synthetic oligonucleotide
  Antisense Strand to SEQ ID NO: 494669
uagaaacacgcuagcugcc

SEQ ID NO: 494671 - RNA, 19 nt, Artificial Sequence
  Description of Artificial Sequence: Synthetic oligonucleotide
  Sense strand starting at position 79 of SEQ ID NO: 317486
gcagcuagcguguuucuau

SEQ ID NO: 494672 - RNA, 19 nt, Artificial Sequence
  Description of Artificial Sequence: Synthetic oligonucleotide
  Antisense Strand to SEQ ID NO: 494671
auagaaacacgcuagcugc

SEQ ID NO: 494673 - RNA, 19 nt, Artificial Sequence
  Description of Artificial Sequence: Synthetic oligonucleotide
  Sense strand starting at position 356 of SEQ ID NO: 317486
agguucugaucacuuuauu

SEQ ID NO: 494674 - RNA, 19 nt, Artificial Sequence
  Description of Artificial Sequence: Synthetic oligonucleotide
  Antisense Strand to SEQ ID NO: 494673
aauaaagugaucagaaccu

SEQ ID NO: 494675 - RNA, 19 nt, Artificial Sequence
  Description of Artificial Sequence: Synthetic oligonucleotide
  Sense strand starting at position 542 of SEQ ID NO: 317486
uugcauagucccuggcaaa

SEQ ID NO: 494676 - RNA, 19 nt, Artificial Sequence
  Description of Artificial Sequence: Synthetic oligonucleotide
  Antisense Strand to SEQ ID NO: 494675
uuugccagggacuaugcaa

SEQ ID NO: 494677 - RNA, 19 nt, Artificial Sequence
  Description of Artificial Sequence: Synthetic oligonucleotide
  Sense strand starting at position 743 of SEQ ID NO: 317486
aggauuaaguaugaagaua

SEQ ID NO: 494678 - RNA, 19 nt, Artificial Sequence
  Description of Artificial Sequence: Synthetic oligonucleotide
  Antisense Strand to SEQ ID NO: 494677
uaucuucauacuuaauccu

SEQ ID NO: 494679 - RNA, 19 nt, Artificial Sequence
  Description of Artificial Sequence: Synthetic oligonucleotide
  Sense strand starting at position 777 of SEQ ID NO: 317486
agugaaauaugccuaacag

SEQ ID NO: 494680 - RNA, 19 nt, Artificial Sequence
  Description of Artificial Sequence: Synthetic oligonucleotide
  Antisense Strand to SEQ ID NO: 494679
cuguuaggcauauuucacu

SEQ ID NO: 494681 - RNA, 19 nt, Artificial Sequence
  Description of Artificial Sequence: Synthetic oligonucleotide
  Sense strand starting at position 827 of SEQ ID NO: 317486
ucaaauugcucuuuaaagg

SEQ ID NO: 494682 - RNA, 19 nt, Artificial Sequence
  Description of Artificial Sequence: Synthetic oligonucleotide
  Antisense Strand to SEQ ID NO: 494681
ccuuuaaagagcaauuuga

SEQ ID NO: 494683 - RNA, 19 nt, Artificial Sequence
  Description of Artificial Sequence: Synthetic oligonucleotide
  Sense strand starting at position 937 of SEQ ID NO: 317486
ugcaaauagcauugcaaau

SEQ ID NO: 494684 - RNA, 19 nt, Artificial Sequence
  Description of Artificial Sequence: Synthetic oligonucleotide
  Antisense Strand to SEQ ID NO: 494683
auuugcaaugcuauuugca

SEQ ID NO: 494685 - RNA, 19 nt, Artificial Sequence
  Description of Artificial Sequence: Synthetic oligonucleotide
  Sense strand starting at position 1579 of SEQ ID NO: 317486
ugaccugaaucaucgccau

SEQ ID NO: 494686 - RNA, 19 nt, Artificial Sequence
  Description of Artificial Sequence: Synthetic oligonucleotide
  Antisense Strand to SEQ ID NO: 494685
auggcgaugauucagguca

SEQ ID NO: 494687 - RNA, 19 nt, Artificial Sequence
  Description of Artificial Sequence: Synthetic oligonucleotide
  Sense strand starting at position 1582 of SEQ ID NO: 317486
ccugaaucaucgccauucu

SEQ ID NO: 494688 - RNA, 19 nt, Artificial Sequence
  Description of Artificial Sequence: Synthetic oligonucleotide
  Antisense Strand to SEQ ID NO: 494687
agaauggcgaugauucagg

SEQ ID NO: 494689 - RNA, 19 nt, Artificial Sequence
  Description of Artificial Sequence: Synthetic oligonucleotide
  Sense strand starting at position 1583 of SEQ ID NO: 317486
cugaaucaucgccauucuu

SEQ ID NO: 494690 - RNA, 19 nt, Artificial Sequence
  Description of Artificial Sequence: Synthetic oligonucleotide
  Antisense Strand to SEQ ID NO: 494689
aagaauggcgaugauucag

SEQ ID NO: 494691 - RNA, 19 nt, Artificial Sequence
  Description of Artificial Sequence: Synthetic oligonucleotide
  Sense strand starting at position 1635 of SEQ ID NO: 317486
ucaaguuucucccucgaug

SEQ ID NO: 494692 - RNA, 19 nt, Artificial Sequence
  Description of Artificial Sequence: Synthetic oligonucleotide
  Antisense Strand to SEQ ID NO: 494691
caucgagggagaaacuuga

SEQ ID NO: 494693 - RNA, 19 nt, Artificial Sequence
  Description of Artificial Sequence: Synthetic oligonucleotide
  Sense strand starting at position 1668 of SEQ ID NO: 317486
uggaauaacuucuauagag

SEQ ID NO: 494694 - RNA, 19 nt, Artificial Sequence
  Description of Artificial Sequence: Synthetic oligonucleotide
  Antisense Strand to SEQ ID NO: 494693
cucuauagaaguuauucca

SEQ ID NO: 494695 - RNA, 19 nt, Artificial Sequence
  Description of Artificial Sequence: Synthetic oligonucleotide
  Sense strand starting at position 1709 of SEQ ID NO: 317486
aucauugauuuagaacagu

SEQ ID NO: 494696 - RNA, 19 nt, Artificial Sequence
  Description of Artificial Sequence: Synthetic oligonucleotide
  Antisense Strand to SEQ ID NO: 494695
acuguucuaaaucaaugau

SEQ ID NO: 494697 - RNA, 19 nt, Artificial Sequence
  Description of Artificial Sequence: Synthetic oligonucleotide
  Sense strand starting at position 1727 of SEQ ID NO: 317486
uuggauuccugaccuuaaa

SEQ ID NO: 494698 - RNA, 19 nt, Artificial Sequence
  Description of Artificial Sequence: Synthetic oligonucleotide
  Antisense Strand to SEQ ID NO: 494697
uuuaaggucaggaauccaa

SEQ ID NO: 494699 - RNA, 19 nt, Artificial Sequence
  Description of Artificial Sequence: Synthetic oligonucleotide
  Sense strand starting at position 1747 of SEQ ID NO: 317486
agccaacaacucugaguau

SEQ ID NO: 494700 - RNA, 19 nt, Artificial Sequence
  Description of Artificial Sequence: Synthetic oligonucleotide
  Antisense Strand to SEQ ID NO: 494699
auacucagaguuguuggcu

SEQ ID NO: 494701 - RNA, 19 nt, Artificial Sequence
  Description of Artificial Sequence: Synthetic oligonucleotide
  Sense strand starting at position 1852 of SEQ ID NO: 317486
accagaaugucuguccauu

SEQ ID NO: 494702 - RNA, 19 nt, Artificial Sequence
  Description of Artificial Sequence: Synthetic oligonucleotide
  Antisense Strand to SEQ ID NO: 494701
aauggacagacauucuggu

SEQ ID NO: 494703 - RNA, 19 nt, Artificial Sequence
  Description of Artificial Sequence: Synthetic oligonucleotide
  Sense strand starting at position 1881 of SEQ ID NO: 317486
aggaguuggccagaguguu

SEQ ID NO: 494704 - RNA, 19 nt, Artificial Sequence
  Description of Artificial Sequence: Synthetic oligonucleotide
  Antisense Strand to SEQ ID NO: 494703
aacacucuggccaacuccu

SEQ ID NO: 494705 - RNA, 19 nt, Artificial Sequence
  Description of Artificial Sequence: Synthetic oligonucleotide
  Sense strand starting at position 1882 of SEQ ID NO: 317486
ggaguuggccagaguguuu

SEQ ID NO: 494706 - RNA, 19 nt, Artificial Sequence
  Description of Artificial Sequence: Synthetic oligonucleotide
  Antisense Strand to SEQ ID NO: 494705
aaacacucuggccaacucc

SEQ ID NO: 494707 - RNA, 19 nt, Artificial Sequence
  Description of Artificial Sequence: Synthetic oligonucleotide
  Sense strand starting at position 1900 of SEQ ID NO: 317486
uugggauuugcgugaguga

SEQ ID NO: 494708 - RNA, 19 nt, Artificial Sequence
  Description of Artificial Sequence: Synthetic oligonucleotide
  Antisense Strand to SEQ ID NO: 494707
ucacucacgcaaaucccaa

SEQ ID NO: 494709 - RNA, 19 nt, Artificial Sequence
  Description of Artificial Sequence: Synthetic oligonucleotide
  Sense strand starting at position 1913 of SEQ ID NO: 317486
gagugacucuuacccugua

SEQ ID NO: 494710 - RNA, 19 nt, Artificial Sequence
  Description of Artificial Sequence: Synthetic oligonucleotide
  Antisense Strand to SEQ ID NO: 494709
uacaggguaagagucacuc

SEQ ID NO: 494711 - RNA, 19 nt, Artificial Sequence
  Description of Artificial Sequence: Synthetic oligonucleotide
  Sense strand starting at position 1914 of SEQ ID NO: 317486
agugacucuuacccuguaa

SEQ ID NO: 494712 - RNA, 19 nt, Artificial Sequence
  Description of Artificial Sequence: Synthetic oligonucleotide
  Antisense Strand to SEQ ID NO: 494711
uuacaggguaagagucacu

SEQ ID NO: 494713 - RNA, 19 nt, Artificial Sequence
  Description of Artificial Sequence: Synthetic oligonucleotide
  Sense strand starting at position 2062 of SEQ ID NO: 317486
uaggcaucuucugugaugu

SEQ ID NO: 494714 - RNA, 19 nt, Artificial Sequence
  Description of Artificial Sequence: Synthetic oligonucleotide
  Antisense Strand to SEQ ID NO: 494713
acaucacagaagaugccua

SEQ ID NO: 494715 - RNA, 19 nt, Artificial Sequence
  Description of Artificial Sequence: Synthetic oligonucleotide
  Sense strand starting at position 2076 of SEQ ID NO: 317486
gauguugugcuguaacuga

SEQ ID NO: 494716 - RNA, 19 nt, Artificial Sequence
  Description of Artificial Sequence: Synthetic oligonucleotide
  Antisense Strand to SEQ ID NO: 494715
ucaguuacagcacaacauc

SEQ ID NO: 494717 - RNA, 19 nt, Artificial Sequence
  Description of Artificial Sequence: Synthetic oligonucleotide
  Sense strand starting at position 2159 of SEQ ID NO: 317486
ugagguaucucccugcacu

SEQ ID NO: 494718 - RNA, 19 nt, Artificial Sequence
  Description of Artificial Sequence: Synthetic oligonucleotide
  Antisense Strand to SEQ ID NO: 494717
agugcagggagauaccuca

SEQ ID NO: 494719 - RNA, 19 nt, Artificial Sequence
  Description of Artificial Sequence: Synthetic oligonucleotide
  Sense strand starting at position 2160 of SEQ ID NO: 317486
gagguaucucccugcacug

SEQ ID NO: 494720 - RNA, 19 nt, Artificial Sequence
  Description of Artificial Sequence: Synthetic oligonucleotide
  Antisense Strand to SEQ ID NO: 494719
cagugcagggagauaccuc

SEQ ID NO: 494721 - RNA, 19 nt, Artificial Sequence
  Description of Artificial Sequence: Synthetic oligonucleotide
  Sense strand starting at position 2171 of SEQ ID NO: 317486
cugcacugugaaugagaaa

SEQ ID NO: 494722 - RNA, 19 nt, Artificial Sequence
  Description of Artificial Sequence: Synthetic oligonucleotide
  Antisense Strand to SEQ ID NO: 494721
uuucucauucacagugcag

SEQ ID NO: 494723 - RNA, 19 nt, Artificial Sequence
  Description of Artificial Sequence: Synthetic oligonucleotide
  Sense strand starting at position 2262 of SEQ ID NO: 317486
gaaauaaguccacgcagac

SEQ ID NO: 494724 - RNA, 19 nt, Artificial Sequence
  Description of Artificial Sequence: Synthetic oligonucleotide
  Antisense Strand to SEQ ID NO: 494723
gucugcguggacuuauuuc

SEQ ID NO: 494725 - RNA, 19 nt, Artificial Sequence
  Description of Artificial Sequence: Synthetic oligonucleotide
  Sense strand starting at position 2355 of SEQ ID NO: 317486
uuaggccaguguucuaaga

SEQ ID NO: 494726 - RNA, 19 nt, Artificial Sequence
  Description of Artificial Sequence: Synthetic oligonucleotide
  Antisense Strand to SEQ ID NO: 494725
ucuuagaacacuggccuaa

SEQ ID NO: 494727 - RNA, 19 nt, Artificial Sequence
  Description of Artificial Sequence: Synthetic oligonucleotide
  Sense strand starting at position 2384 of SEQ ID NO: 317486
ucccucaggucuucugaca

SEQ ID NO: 494728 - RNA, 19 nt, Artificial Sequence
  Description of Artificial Sequence: Synthetic oligonucleotide
  Antisense Strand to SEQ ID NO: 494727
ugucagaagaccugaggga

SEQ ID NO: 494729 - RNA, 19 nt, Artificial Sequence
  Description of Artificial Sequence: Synthetic oligonucleotide
  Sense strand starting at position 2396 of SEQ ID NO: 317486
ucugacaaucuugagcaau

SEQ ID NO: 494730 - RNA, 19 nt, Artificial Sequence
  Description of Artificial Sequence: Synthetic oligonucleotide
  Antisense Strand to SEQ ID NO: 494729
auugcucaagauugucaga

SEQ ID NO: 494731 - RNA, 19 nt, Artificial Sequence
  Description of Artificial Sequence: Synthetic oligonucleotide
  Sense strand starting at position 2398 of SEQ ID NO: 317486
ugacaaucuugagcaauag

SEQ ID NO: 494732 - RNA, 19 nt, Artificial Sequence
  Description of Artificial Sequence: Synthetic oligonucleotide
  Antisense Strand to SEQ ID NO: 494731
cuauugcucaagauuguca

SEQ ID NO: 494733 - RNA, 19 nt, Artificial Sequence
  Description of Artificial Sequence: Synthetic oligonucleotide
  Sense strand starting at position 2489 of SEQ ID NO: 317486
gcgcuaauuacugaaggaa

SEQ ID NO: 494734 - RNA, 19 nt, Artificial Sequence
  Description of Artificial Sequence: Synthetic oligonucleotide
  Antisense Strand to SEQ ID NO: 494733
uuccuucaguaauuagcgc

SEQ ID NO: 494735 - RNA, 19 nt, Artificial Sequence
  Description of Artificial Sequence: Synthetic oligonucleotide
  Sense strand starting at position 2538 of SEQ ID NO: 317486
gaaagagguucguugauag

SEQ ID NO: 494736 - RNA, 19 nt, Artificial Sequence
  Description of Artificial Sequence: Synthetic oligonucleotide
  Antisense Strand to SEQ ID NO: 494735
cuaucaacgaaccucuuuc

SEQ ID NO: 494737 - RNA, 19 nt, Artificial Sequence
  Description of Artificial Sequence: Synthetic oligonucleotide
  Sense strand starting at position 2599 of SEQ ID NO: 317486
auacuuucccuuugagaga

SEQ ID NO: 494738 - RNA, 19 nt, Artificial Sequence
  Description of Artificial Sequence: Synthetic oligonucleotide
  Antisense Strand to SEQ ID NO: 494737
ucucucaaagggaaaguau

SEQ ID NO: 494739 - RNA, 19 nt, Artificial Sequence
  Description of Artificial Sequence: Synthetic oligonucleotide
  Sense strand starting at position 3164 of SEQ ID NO: 317486
ucucaauaauuguuuccga

SEQ ID NO: 494740 - RNA, 19 nt, Artificial Sequence
  Description of Artificial Sequence: Synthetic oligonucleotide
  Antisense Strand to SEQ ID NO: 494739
ucggaaacaauuauugaga

SEQ ID NO: 494741 - RNA, 19 nt, Artificial Sequence
  Description of Artificial Sequence: Synthetic oligonucleotide
  Sense strand starting at position 3165 of SEQ ID NO: 317486
cucaauaauuguuuccgaa

SEQ ID NO: 494742 - RNA, 19 nt, Artificial Sequence
  Description of Artificial Sequence: Synthetic oligonucleotide
  Antisense Strand to SEQ ID NO: 494741
uucggaaacaauuauugag

SEQ ID NO: 494743 - RNA, 19 nt, Artificial Sequence
  Description of Artificial Sequence: Synthetic oligonucleotide
  Sense strand starting at position 3544 of SEQ ID NO: 317486
gucagacucuugcuaaggu

SEQ ID NO: 494744 - RNA, 19 nt, Artificial Sequence
  Description of Artificial Sequence: Synthetic oligonucleotide
  Antisense Strand to SEQ ID NO: 494743
accuuagcaagagucugac

SEQ ID NO: 494745 - RNA, 19 nt, Artificial Sequence
  Description of Artificial Sequence: Synthetic oligonucleotide
  Sense strand starting at position 3664 of SEQ ID NO: 317486
cuucuuaaguccuuuguaa

SEQ ID NO: 494746 - RNA, 19 nt, Artificial Sequence
  Description of Artificial Sequence: Synthetic oligonucleotide
  Antisense Strand to SEQ ID NO: 494745
uuacaaaggacuuaagaag

SEQ ID NO: 494747 - RNA, 19 nt, Artificial Sequence
  Description of Artificial Sequence: Synthetic oligonucleotide
  Sense strand starting at position 3960 of SEQ ID NO: 317486
ccguguuggccacacugau

SEQ ID NO: 494748 - RNA, 19 nt, Artificial Sequence
  Description of Artificial Sequence: Synthetic oligonucleotide
  Antisense Strand to SEQ ID NO: 494747
aucaguguggccaacacgg

SEQ ID NO: 494749 - RNA, 19 nt, Artificial Sequence
  Description of Artificial Sequence: Synthetic oligonucleotide
  Sense strand starting at position 208 of SEQ ID NO: 317487
gguucauucgcagacauag

SEQ ID NO: 494750 - RNA, 19 nt, Artificial Sequence
  Description of Artificial Sequence: Synthetic oligonucleotide
  Antisense Strand to SEQ ID NO: 494749
cuaugucugcgaaugaacc

SEQ ID NO: 494751 - RNA, 19 nt, Artificial Sequence
  Description of Artificial Sequence: Synthetic oligonucleotide
  Sense strand starting at position 225 of SEQ ID NO: 317487
agguuauuaagugggcuua

SEQ ID NO: 494752 - RNA, 19 nt, Artificial Sequence
  Description of Artificial Sequence: Synthetic oligonucleotide
  Antisense Strand to SEQ ID NO: 494751
uaagcccacuuaauaaccu

SEQ ID NO: 494753 - RNA, 19 nt, Artificial Sequence
  Description of Artificial Sequence: Synthetic oligonucleotide
  Sense strand starting at position 227 of SEQ ID NO: 317487
guuauuaagugggcuuaca

SEQ ID NO: 494754 - RNA, 19 nt, Artificial Sequence
  Description of Artificial Sequence: Synthetic oligonucleotide
  Antisense Strand to SEQ ID NO: 494753
uguaagcccacuuaauaac

SEQ ID NO: 494755 - RNA, 19 nt, Artificial Sequence
  Description of Artificial Sequence: Synthetic oligonucleotide
  Sense strand starting at position 354 of SEQ ID NO: 317487
aaucgucguuaauuuauga

SEQ ID NO: 494756 - RNA, 19 nt, Artificial Sequence
  Description of Artificial Sequence: Synthetic oligonucleotide
  Antisense Strand to SEQ ID NO: 494755
ucauaaauuaacgacgauu

SEQ ID NO: 494757 - RNA, 19 nt, Artificial Sequence
  Description of Artificial Sequence: Synthetic oligonucleotide
  Sense strand starting at position 430 of SEQ ID NO: 317487
ugacuugacagcgauagca

SEQ ID NO: 494758 - RNA, 19 nt, Artificial Sequence
  Description of Artificial Sequence: Synthetic oligonucleotide
  Antisense Strand to SEQ ID NO: 494757
ugcuaucgcugucaaguca

SEQ ID NO: 494759 - RNA, 19 nt, Artificial Sequence
  Description of Artificial Sequence: Synthetic oligonucleotide
  Sense strand starting at position 432 of SEQ ID NO: 317487
acuugacagcgauagcaaa

SEQ ID NO: 494760 - RNA, 19 nt, Artificial Sequence
  Description of Artificial Sequence: Synthetic oligonucleotide
  Antisense Strand to SEQ ID NO: 494759
uuugcuaucgcugucaagu

SEQ ID NO: 494761 - RNA, 19 nt, Artificial Sequence
  Description of Artificial Sequence: Synthetic oligonucleotide
  Sense strand starting at position 489 of SEQ ID NO: 317487
gagggagucuugcuagguc

SEQ ID NO: 494762 - RNA, 19 nt, Artificial Sequence
  Description of Artificial Sequence: Synthetic oligonucleotide
  Antisense Strand to SEQ ID NO: 494761
gaccuagcaagacucccuc

SEQ ID NO: 494763 - RNA, 19 nt, Artificial Sequence
  Description of Artificial Sequence: Synthetic oligonucleotide
  Sense strand starting at position 1389 of SEQ ID NO: 317487
ggcagcuuuaaagagguaa

SEQ ID NO: 494764 - RNA, 19 nt, Artificial Sequence
  Description of Artificial Sequence: Synthetic oligonucleotide
  Antisense Strand to SEQ ID NO: 494763
uuaccucuuuaaagcugcc

SEQ ID NO: 494765 - RNA, 19 nt, Artificial Sequence
  Description of Artificial Sequence: Synthetic oligonucleotide
  Sense strand starting at position 1456 of SEQ ID NO: 317487
ggcccuuuagaguacagau

SEQ ID NO: 494766 - RNA, 19 nt, Artificial Sequence
  Description of Artificial Sequence: Synthetic oligonucleotide
  Antisense Strand to SEQ ID NO: 494765
aucuguacucuaaagggcc

SEQ ID NO: 494767 - RNA, 19 nt, Artificial Sequence
  Description of Artificial Sequence: Synthetic oligonucleotide
  Sense strand starting at position 1997 of SEQ ID NO: 317487
uugcgucuuacgucaucga

SEQ ID NO: 494768 - RNA, 19 nt, Artificial Sequence
  Description of Artificial Sequence: Synthetic oligonucleotide
  Antisense Strand to SEQ ID NO: 494767
ucgaugacguaagacgcaa

SEQ ID NO: 494769 - RNA, 19 nt, Artificial Sequence
  Description of Artificial Sequence: Synthetic oligonucleotide
  Sense strand starting at position 2174 of SEQ ID NO: 317487
uauucuugugaguauugga

SEQ ID NO: 494770 - RNA, 19 nt, Artificial Sequence
  Description of Artificial Sequence: Synthetic oligonucleotide
  Antisense Strand to SEQ ID NO: 494769
uccaauacucacaagaaua

SEQ ID NO: 494771 - RNA, 19 nt, Artificial Sequence
  Description of Artificial Sequence: Synthetic oligonucleotide
  Sense strand starting at position 2181 of SEQ ID NO: 317487
gugaguauuggaugaagga

SEQ ID NO: 494772 - RNA, 19 nt, Artificial Sequence
  Description of Artificial Sequence: Synthetic oligonucleotide
  Antisense Strand to SEQ ID NO: 494771
uccuucauccaauacucac

SEQ ID NO: 494773 - RNA, 19 nt, Artificial Sequence
  Description of Artificial Sequence: Synthetic oligonucleotide
  Sense strand starting at position 2636 of SEQ ID NO: 317487
cuucuaauaggugauuauu

SEQ ID NO: 494774 - RNA, 19 nt, Artificial Sequence
  Description of Artificial Sequence: Synthetic oligonucleotide
  Antisense Strand to SEQ ID NO: 494773
aauaaucaccuauuagaag

SEQ ID NO: 494775 - RNA, 19 nt, Artificial Sequence
  Description of Artificial Sequence: Synthetic oligonucleotide
  Sense strand starting at position 2725 of SEQ ID NO: 317487
ugaaguaaauuauccuuga

SEQ ID NO: 494776 - RNA, 19 nt, Artificial Sequence
  Description of Artificial Sequence: Synthetic oligonucleotide
  Antisense Strand to SEQ ID NO: 494775
ucaaggauaauuuacuuca

SEQ ID NO: 494777 - RNA, 19 nt, Artificial Sequence
  Description of Artificial Sequence: Synthetic oligonucleotide
  Sense strand starting at position 2789 of SEQ ID NO: 317487
uccagaauuugagauucuc

SEQ ID NO: 494778 - RNA, 19 nt, Artificial Sequence
  Description of Artificial Sequence: Synthetic oligonucleotide
  Antisense Strand to SEQ ID NO: 494777
gagaaucucaaauucugga

SEQ ID NO: 494779 - RNA, 19 nt, Artificial Sequence
  Description of Artificial Sequence: Synthetic oligonucleotide
  Sense strand starting at position 2815 of SEQ ID NO: 317487
gccgaaauuucuuugacuu

SEQ ID NO: 494780 - RNA, 19 nt, Artificial Sequence
  Description of Artificial Sequence: Synthetic oligonucleotide
  Antisense Strand to SEQ ID NO: 494779
aagucaaagaaauuucggc

SEQ ID NO: 494781 - RNA, 19 nt, Artificial Sequence
  Description of Artificial Sequence: Synthetic oligonucleotide
  Sense strand starting at position 2817 of SEQ ID NO: 317487
cgaaauuucuuugacuuua

SEQ ID NO: 494782 - RNA, 19 nt, Artificial Sequence
  Description of Artificial Sequence: Synthetic oligonucleotide
  Antisense Strand to SEQ ID NO: 494781
uaaagucaaagaaauuucg

SEQ ID NO: 494783 - RNA, 19 nt, Artificial Sequence
  Description of Artificial Sequence: Synthetic oligonucleotide
  Sense strand starting at position 2952 of SEQ ID NO: 317487
gaucuuuguuaacugagca

SEQ ID NO: 494784 - RNA, 19 nt, Artificial Sequence
  Description of Artificial Sequence: Synthetic oligonucleotide
  Antisense Strand to SEQ ID NO: 494783
ugcucaguuaacaaagauc

SEQ ID NO: 494785 - RNA, 19 nt, Artificial Sequence
  Description of Artificial Sequence: Synthetic oligonucleotide
  Sense strand starting at position 2960 of SEQ ID NO: 317487
uuaacugagcacuggcaaa

SEQ ID NO: 494786 - RNA, 19 nt, Artificial Sequence
  Description of Artificial Sequence: Synthetic oligonucleotide
  Antisense Strand to SEQ ID NO: 494785
uuugccagugcucaguuaa

SEQ ID NO: 494787 - RNA, 19 nt, Artificial Sequence
  Description of Artificial Sequence: Synthetic oligonucleotide
  Sense strand starting at position 2988 of SEQ ID NO: 317487
auccacuucugaucuguua

SEQ ID NO: 494788 - RNA, 19 nt, Artificial Sequence
  Description of Artificial Sequence: Synthetic oligonucleotide
  Antisense Strand to SEQ ID NO: 494787
uaacagaucagaaguggau

SEQ ID NO: 494789 - RNA, 19 nt, Artificial Sequence
  Description of Artificial Sequence: Synthetic oligonucleotide
  Sense strand starting at position 3087 of SEQ ID NO: 317487
ucacauguaggucauuaaa

SEQ ID NO: 494790 - RNA, 19 nt, Artificial Sequence
  Description of Artificial Sequence: Synthetic oligonucleotide
  Antisense Strand to SEQ ID NO: 494789
uuuaaugaccuacauguga

SEQ ID NO: 494791 - RNA, 19 nt, Artificial Sequence
  Description of Artificial Sequence: Synthetic oligonucleotide
  Sense strand starting at position 3310 of SEQ ID NO: 317487
uuuguagucauuuggugca

SEQ ID NO: 494792 - RNA, 19 nt, Artificial Sequence
  Description of Artificial Sequence: Synthetic oligonucleotide
  Antisense Strand to SEQ ID NO: 494791
ugcaccaaaugacuacaaa

SEQ ID NO: 494793 - RNA, 19 nt, Artificial Sequence
  Description of Artificial Sequence: Synthetic oligonucleotide
  Sense strand starting at position 3312 of SEQ ID NO: 317487
uguagucauuuggugcaaa

SEQ ID NO: 494794 - RNA, 19 nt, Artificial Sequence
  Description of Artificial Sequence: Synthetic oligonucleotide
  Antisense Strand to SEQ ID NO: 494793
uuugcaccaaaugacuaca

SEQ ID NO: 494795 - RNA, 19 nt, Artificial Sequence
  Description of Artificial Sequence: Synthetic oligonucleotide
  Sense strand starting at position 3416 of SEQ ID NO: 317487
gaaaguuuaagacggugaa

SEQ ID NO: 494796 - RNA, 19 nt, Artificial Sequence
  Description of Artificial Sequence: Synthetic oligonucleotide
  Antisense Strand to SEQ ID NO: 494795
uucaccgucuuaaacuuuc

SEQ ID NO: 494797 - RNA, 19 nt, Artificial Sequence
  Description of Artificial Sequence: Synthetic oligonucleotide
  Sense strand starting at position 3417 of SEQ ID NO: 317487
aaaguuuaagacggugaaa

SEQ ID NO: 494798 - RNA, 19 nt, Artificial Sequence
  Description of Artificial Sequence: Synthetic oligonucleotide
  Antisense Strand to SEQ ID NO: 494797
uuucaccgucuuaaacuuu

SEQ ID NO: 494799 - RNA, 19 nt, Artificial Sequence
  Description of Artificial Sequence: Synthetic oligonucleotide
  Sense strand starting at position 3419 of SEQ ID NO: 317487
aguuuaagacggugaaauc

SEQ ID NO: 494800 - RNA, 19 nt, Artificial Sequence
  Description of Artificial Sequence: Synthetic oligonucleotide
  Antisense Strand to SEQ ID NO: 494799
gauuucaccgucuuaaacu

SEQ ID NO: 494801 - RNA, 19 nt, Artificial Sequence
  Description of Artificial Sequence: Synthetic oligonucleotide
  Sense strand starting at position 3420 of SEQ ID NO: 317487
guuuaagacggugaaauca

SEQ ID NO: 494802 - RNA, 19 nt, Artificial Sequence
  Description of Artificial Sequence: Synthetic oligonucleotide
  Antisense Strand to SEQ ID NO: 494801
ugauuucaccgucuuaaac

SEQ ID NO: 494803 - RNA, 19 nt, Artificial Sequence
  Description of Artificial Sequence: Synthetic oligonucleotide
  Sense strand starting at position 3429 of SEQ ID NO: 317487
ggugaaaucaugugaaaca

SEQ ID NO: 494804 - RNA, 19 nt, Artificial Sequence
  Description of Artificial Sequence: Synthetic oligonucleotide
  Antisense Strand to SEQ ID NO: 494803
uguuucacaugauuucacc

SEQ ID NO: 494805 - RNA, 19 nt, Artificial Sequence
  Description of Artificial Sequence: Synthetic oligonucleotide
  Sense strand starting at position 3519 of SEQ ID NO: 317487
cuuaguauuggugauacag

SEQ ID NO: 494806 - RNA, 19 nt, Artificial Sequence
  Description of Artificial Sequence: Synthetic oligonucleotide
  Antisense Strand to SEQ ID NO: 494805
cuguaucaccaauacuaag

SEQ ID NO: 494807 - RNA, 19 nt, Artificial Sequence
  Description of Artificial Sequence: Synthetic oligonucleotide
  Sense strand starting at position 3553 of SEQ ID NO: 317487
gcucucugugcuuaaggaa

SEQ ID NO: 494808 - RNA, 19 nt, Artificial Sequence
  Description of Artificial Sequence: Synthetic oligonucleotide
  Antisense Strand to SEQ ID NO: 494807
uuccuuaagcacagagagc

SEQ ID NO: 494809 - RNA, 19 nt, Artificial Sequence
  Description of Artificial Sequence: Synthetic oligonucleotide
  Sense strand starting at position 3587 of SEQ ID NO: 317487
gggagccagcaguaaauaa

SEQ ID NO: 494810 - RNA, 19 nt, Artificial Sequence
  Description of Artificial Sequence: Synthetic oligonucleotide
  Antisense Strand to SEQ ID NO: 494809
uuauuuacugcuggcuccc

SEQ ID NO: 494811 - RNA, 19 nt, Artificial Sequence
  Description of Artificial Sequence: Synthetic oligonucleotide
  Sense strand starting at position 3627 of SEQ ID NO: 317487
agaugcuuguacuuugaaa

SEQ ID NO: 494812 - RNA, 19 nt, Artificial Sequence
  Description of Artificial Sequence: Synthetic oligonucleotide
  Antisense Strand to SEQ ID NO: 494811
uuucaaaguacaagcaucu

SEQ ID NO: 494813 - RNA, 19 nt, Artificial Sequence
  Description of Artificial Sequence: Synthetic oligonucleotide
  Sense strand starting at position 3629 of SEQ ID NO: 317487
augcuuguacuuugaaaga

SEQ ID NO: 494814 - RNA, 19 nt, Artificial Sequence
  Description of Artificial Sequence: Synthetic oligonucleotide
  Antisense Strand to SEQ ID NO: 494813
ucuuucaaaguacaagcau

SEQ ID NO: 494815 - RNA, 19 nt, Artificial Sequence
  Description of Artificial Sequence: Synthetic oligonucleotide
  Sense strand starting at position 3649 of SEQ ID NO: 317487
gcaacuaaaugcuccuuga

SEQ ID NO: 494816 - RNA, 19 nt, Artificial Sequence
  Description of Artificial Sequence: Synthetic oligonucleotide
  Antisense Strand to SEQ ID NO: 494815
ucaaggagcauuuaguugc

SEQ ID NO: 494817 - RNA, 19 nt, Artificial Sequence
  Description of Artificial Sequence: Synthetic oligonucleotide
  Sense strand starting at position 3653 of SEQ ID NO: 317487
cuaaaugcuccuugaggca

SEQ ID NO: 494818 - RNA, 19 nt, Artificial Sequence
  Description of Artificial Sequence: Synthetic oligonucleotide
  Antisense Strand to SEQ ID NO: 494817
ugccucaaggagcauuuag

SEQ ID NO: 494819 - RNA, 19 nt, Artificial Sequence
  Description of Artificial Sequence: Synthetic oligonucleotide
  Sense strand starting at position 3718 of SEQ ID NO: 317487
guaaguaggaguuguacag

SEQ ID NO: 494820 - RNA, 19 nt, Artificial Sequence
  Description of Artificial Sequence: Synthetic oligonucleotide
  Antisense Strand to SEQ ID NO: 494819
cuguacaacuccuacuuac

SEQ ID NO: 494821 - RNA, 19 nt, Artificial Sequence
  Description of Artificial Sequence: Synthetic oligonucleotide
  Sense strand starting at position 3724 of SEQ ID NO: 317487
aggaguuguacagguguca

SEQ ID NO: 494822 - RNA, 19 nt, Artificial Sequence
  Description of Artificial Sequence: Synthetic oligonucleotide
  Antisense Strand to SEQ ID NO: 494821
ugacaccuguacaacuccu

SEQ ID NO: 494823 - RNA, 19 nt, Artificial Sequence
  Description of Artificial Sequence: Synthetic oligonucleotide
  Sense strand starting at position 3889 of SEQ ID NO: 317487
guaggaaugcaguaacauu

SEQ ID NO: 494824 - RNA, 19 nt, Artificial Sequence
  Description of Artificial Sequence: Synthetic oligonucleotide
  Antisense Strand to SEQ ID NO: 494823
aauguuacugcauuccuac

SEQ ID NO: 494825 - RNA, 19 nt, Artificial Sequence
  Description of Artificial Sequence: Synthetic oligonucleotide
  Sense strand starting at position 3900 of SEQ ID NO: 317487
guaacauuaaccgggucau

SEQ ID NO: 494826 - RNA, 19 nt, Artificial Sequence
  Description of Artificial Sequence: Synthetic oligonucleotide
  Antisense Strand to SEQ ID NO: 494825
augacccgguuaauguuac

SEQ ID NO: 494827 - RNA, 19 nt, Artificial Sequence
  Description of Artificial Sequence: Synthetic oligonucleotide
  Sense strand starting at position 3901 of SEQ ID NO: 317487
uaacauuaaccgggucauu

SEQ ID NO: 494828 - RNA, 19 nt, Artificial Sequence
  Description of Artificial Sequence: Synthetic oligonucleotide
  Antisense Strand to SEQ ID NO: 494827
aaugacccgguuaauguua

SEQ ID NO: 494829 - RNA, 19 nt, Artificial Sequence
  Description of Artificial Sequence: Synthetic oligonucleotide
  Sense strand starting at position 53 of SEQ ID NO: 317488
agguauacuugcuuucuaa

SEQ ID NO: 494830 - RNA, 19 nt, Artificial Sequence
  Description of Artificial Sequence: Synthetic oligonucleotide
  Antisense Strand to SEQ ID NO: 494829
uuagaaagcaaguauaccu

SEQ ID NO: 494831 - RNA, 19 nt, Artificial Sequence
  Description of Artificial Sequence: Synthetic oligonucleotide
  Sense strand starting at position 135 of SEQ ID NO: 317488
ugcagugaugcucacagua

SEQ ID NO: 494832 - RNA, 19 nt, Artificial Sequence
  Description of Artificial Sequence: Synthetic oligonucleotide
  Antisense Strand to SEQ ID NO: 494831
uacugugagcaucacugca

SEQ ID NO: 494833 - RNA, 19 nt, Artificial Sequence
  Description of Artificial Sequence: Synthetic oligonucleotide
  Sense strand starting at position 597 of SEQ ID NO: 317488
gguucauucgcagacauag

SEQ ID NO: 494834 - RNA, 19 nt, Artificial Sequence
  Description of Artificial Sequence: Synthetic oligonucleotide
  Antisense Strand to SEQ ID NO: 494833
cuaugucugcgaaugaacc

SEQ ID NO: 494835 - RNA, 19 nt, Artificial Sequence
  Description of Artificial Sequence: Synthetic oligonucleotide
  Sense strand starting at position 603 of SEQ ID NO: 317488
uucgcagacauagguuauu

SEQ ID NO: 494836 - RNA, 19 nt, Artificial Sequence
  Description of Artificial Sequence: Synthetic oligonucleotide
  Antisense Strand to SEQ ID NO: 494835
aauaaccuaugucugcgaa

SEQ ID NO: 494837 - RNA, 19 nt, Artificial Sequence
  Description of Artificial Sequence: Synthetic oligonucleotide
  Sense strand starting at position 614 of SEQ ID NO: 317488
agguuauuaagugggcuua

SEQ ID NO: 494838 - RNA, 19 nt, Artificial Sequence
  Description of Artificial Sequence: Synthetic oligonucleotide
  Antisense Strand to SEQ ID NO: 494837
uaagcccacuuaauaaccu

SEQ ID NO: 494839 - RNA, 19 nt, Artificial Sequence
  Description of Artificial Sequence: Synthetic oligonucleotide
  Sense strand starting at position 616 of SEQ ID NO: 317488
guuauuaagugggcuuaca

SEQ ID NO: 494840 - RNA, 19 nt, Artificial Sequence
  Description of Artificial Sequence: Synthetic oligonucleotide
  Antisense Strand to SEQ ID NO: 494839
uguaagcccacuuaauaac

SEQ ID NO: 494841 - RNA, 19 nt, Artificial Sequence
  Description of Artificial Sequence: Synthetic oligonucleotide
  Sense strand starting at position 743 of SEQ ID NO: 317488
aaucgucguuaauuuauga

SEQ ID NO: 494842 - RNA, 19 nt, Artificial Sequence
  Description of Artificial Sequence: Synthetic oligonucleotide
  Antisense Strand to SEQ ID NO: 494841
ucauaaauuaacgacgauu

SEQ ID NO: 494843 - RNA, 19 nt, Artificial Sequence
  Description of Artificial Sequence: Synthetic oligonucleotide
  Sense strand starting at position 819 of SEQ ID NO: 317488
ugacuugacagcgauagca

SEQ ID NO: 494844 - RNA, 19 nt, Artificial Sequence
  Description of Artificial Sequence: Synthetic oligonucleotide
  Antisense Strand to SEQ ID NO: 494843
ugcuaucgcugucaaguca

SEQ ID NO: 494845 - RNA, 19 nt, Artificial Sequence
  Description of Artificial Sequence: Synthetic oligonucleotide
  Sense strand starting at position 821 of SEQ ID NO: 317488
acuugacagcgauagcaaa

SEQ ID NO: 494846 - RNA, 19 nt, Artificial Sequence
  Description of Artificial Sequence: Synthetic oligonucleotide
  Antisense Strand to SEQ ID NO: 494845
uuugcuaucgcugucaagu

SEQ ID NO: 494847 - RNA, 19 nt, Artificial Sequence
  Description of Artificial Sequence: Synthetic oligonucleotide
  Sense strand starting at position 878 of SEQ ID NO: 317488
gagggagucuugcuagguc

SEQ ID NO: 494848 - RNA, 19 nt, Artificial Sequence
  Description of Artificial Sequence: Synthetic oligonucleotide
  Antisense Strand to SEQ ID NO: 494847
gaccuagcaagacucccuc

SEQ ID NO: 494849 - RNA, 19 nt, Artificial Sequence
  Description of Artificial Sequence: Synthetic oligonucleotide
  Sense strand starting at position 1778 of SEQ ID NO: 317488
ggcagcuuuaaagagguaa

SEQ ID NO: 494850 - RNA, 19 nt, Artificial Sequence
  Description of Artificial Sequence: Synthetic oligonucleotide
  Antisense Strand to SEQ ID NO: 494849
uuaccucuuuaaagcugcc

SEQ ID NO: 494851 - RNA, 19 nt, Artificial Sequence
  Description of Artificial Sequence: Synthetic oligonucleotide
  Sense strand starting at position 1845 of SEQ ID NO: 317488
ggcccuuuagaguacagau

SEQ ID NO: 494852 - RNA, 19 nt, Artificial Sequence
  Description of Artificial Sequence: Synthetic oligonucleotide
  Antisense Strand to SEQ ID NO: 494851
aucuguacucuaaagggcc

SEQ ID NO: 494853 - RNA, 19 nt, Artificial Sequence
  Description of Artificial Sequence: Synthetic oligonucleotide
  Sense strand starting at position 2012 of SEQ ID NO: 317488
acgggauuaagcugucucu

SEQ ID NO: 494854 - RNA, 19 nt, Artificial Sequence
  Description of Artificial Sequence: Synthetic oligonucleotide
  Antisense Strand to SEQ ID NO: 494853
agagacagcuuaaucccgu

SEQ ID NO: 494855 - RNA, 19 nt, Artificial Sequence
  Description of Artificial Sequence: Synthetic oligonucleotide
  Sense strand starting at position 2386 of SEQ ID NO: 317488
uugcgucuuacgucaucga

SEQ ID NO: 494856 - RNA, 19 nt, Artificial Sequence
  Description of Artificial Sequence: Synthetic oligonucleotide
  Antisense Strand to SEQ ID NO: 494855
ucgaugacguaagacgcaa

SEQ ID NO: 494857 - RNA, 19 nt, Artificial Sequence
  Description of Artificial Sequence: Synthetic oligonucleotide
  Sense strand starting at position 2563 of SEQ ID NO: 317488
uauucuugugaguauugga

SEQ ID NO: 494858 - RNA, 19 nt, Artificial Sequence
  Description of Artificial Sequence: Synthetic oligonucleotide
  Antisense Strand to SEQ ID NO: 494857
uccaauacucacaagaaua

SEQ ID NO: 494859 - RNA, 19 nt, Artificial Sequence
  Description of Artificial Sequence: Synthetic oligonucleotide
  Sense strand starting at position 2570 of SEQ ID NO: 317488
gugaguauuggaugaagga

SEQ ID NO: 494860 - RNA, 19 nt, Artificial Sequence
  Description of Artificial Sequence: Synthetic oligonucleotide
  Antisense Strand to SEQ ID NO: 494859
uccuucauccaauacucac

SEQ ID NO: 494861 - RNA, 19 nt, Artificial Sequence
  Description of Artificial Sequence: Synthetic oligonucleotide
  Sense strand starting at position 3025 of SEQ ID NO: 317488
cuucuaauaggugauuauu

SEQ ID NO: 494862 - RNA, 19 nt, Artificial Sequence
  Description of Artificial Sequence: Synthetic oligonucleotide
  Antisense Strand to SEQ ID NO: 494861
aauaaucaccuauuagaag

SEQ ID NO: 494863 - RNA, 19 nt, Artificial Sequence
  Description of Artificial Sequence: Synthetic oligonucleotide
  Sense strand starting at position 3114 of SEQ ID NO: 317488
ugaaguaaauuauccuuga

SEQ ID NO: 494864 - RNA, 19 nt, Artificial Sequence
  Description of Artificial Sequence: Synthetic oligonucleotide
  Antisense Strand to SEQ ID NO: 494863
ucaaggauaauuuacuuca

SEQ ID NO: 494865 - RNA, 19 nt, Artificial Sequence
  Description of Artificial Sequence: Synthetic oligonucleotide
  Sense strand starting at position 3178 of SEQ ID NO: 317488
uccagaauuugagauucuc

SEQ ID NO: 494866 - RNA, 19 nt, Artificial Sequence
  Description of Artificial Sequence: Synthetic oligonucleotide
  Antisense Strand to SEQ ID NO: 494865
gagaaucucaaauucugga

SEQ ID NO: 494867 - RNA, 19 nt, Artificial Sequence
  Description of Artificial Sequence: Synthetic oligonucleotide
  Sense strand starting at position 3204 of SEQ ID NO: 317488
gccgaaauuucuuugacuu

SEQ ID NO: 494868 - RNA, 19 nt, Artificial Sequence
  Description of Artificial Sequence: Synthetic oligonucleotide
  Antisense Strand to SEQ ID NO: 494867
aagucaaagaaauuucggc

SEQ ID NO: 494869 - RNA, 19 nt, Artificial Sequence
  Description of Artificial Sequence: Synthetic oligonucleotide
  Sense strand starting at position 3206 of SEQ ID NO: 317488
cgaaauuucuuugacuuua

SEQ ID NO: 494870 - RNA, 19 nt, Artificial Sequence
  Description of Artificial Sequence: Synthetic oligonucleotide
  Antisense Strand to SEQ ID NO: 494869
uaaagucaaagaaauuucg

SEQ ID NO: 494871 - RNA, 19 nt, Artificial Sequence
  Description of Artificial Sequence: Synthetic oligonucleotide
  Sense strand starting at position 3341 of SEQ ID NO: 317488
gaucuuuguuaacugagca

SEQ ID NO: 494872 - RNA, 19 nt, Artificial Sequence
  Description of Artificial Sequence: Synthetic oligonucleotide
  Antisense Strand to SEQ ID NO: 494871
ugcucaguuaacaaagauc

SEQ ID NO: 494873 - RNA, 19 nt, Artificial Sequence
  Description of Artificial Sequence: Synthetic oligonucleotide
  Sense strand starting at position 3349 of SEQ ID NO: 317488
uuaacugagcacuggcaaa

SEQ ID NO: 494874 - RNA, 19 nt, Artificial Sequence
  Description of Artificial Sequence: Synthetic oligonucleotide
  Antisense Strand to SEQ ID NO: 494873
uuugccagugcucaguuaa

SEQ ID NO: 494875 - RNA, 19 nt, Artificial Sequence
  Description of Artificial Sequence: Synthetic oligonucleotide
  Sense strand starting at position 3377 of SEQ ID NO: 317488
auccacuucugaucuguua

SEQ ID NO: 494876 - RNA, 19 nt, Artificial Sequence
  Description of Artificial Sequence: Synthetic oligonucleotide
  Antisense Strand to SEQ ID NO: 494875
uaacagaucagaaguggau

SEQ ID NO: 494877 - RNA, 19 nt, Artificial Sequence
  Description of Artificial Sequence: Synthetic oligonucleotide
  Sense strand starting at position 3476 of SEQ ID NO: 317488
ucacauguaggucauuaaa

SEQ ID NO: 494878 - RNA, 19 nt, Artificial Sequence
  Description of Artificial Sequence: Synthetic oligonucleotide
  Antisense Strand to SEQ ID NO: 494877
uuuaaugaccuacauguga

SEQ ID NO: 494879 - RNA, 19 nt, Artificial Sequence
  Description of Artificial Sequence: Synthetic oligonucleotide
  Sense strand starting at position 3503 of SEQ ID NO: 317488
ggcaaagugaugugccaaa

SEQ ID NO: 494880 - RNA, 19 nt, Artificial Sequence
  Description of Artificial Sequence: Synthetic oligonucleotide
  Antisense Strand to SEQ ID NO: 494879
uuuggcacaucacuuugcc

SEQ ID NO: 494881 - RNA, 19 nt, Artificial Sequence
  Description of Artificial Sequence: Synthetic oligonucleotide
  Sense strand starting at position 3597 of SEQ ID NO: 317488
cuggccuccuuagauauuu

SEQ ID NO: 494882 - RNA, 19 nt, Artificial Sequence
  Description of Artificial Sequence: Synthetic oligonucleotide
  Antisense Strand to SEQ ID NO: 494881
aaauaucuaaggaggccag

SEQ ID NO: 494883 - RNA, 19 nt, Artificial Sequence
  Description of Artificial Sequence: Synthetic oligonucleotide
  Sense strand starting at position 3699 of SEQ ID NO: 317488
uuuguagucauuuggugca

SEQ ID NO: 494884 - RNA, 19 nt, Artificial Sequence
  Description of Artificial Sequence: Synthetic oligonucleotide
  Antisense Strand to SEQ ID NO: 494883
ugcaccaaaugacuacaaa

SEQ ID NO: 494885 - RNA, 19 nt, Artificial Sequence
  Description of Artificial Sequence: Synthetic oligonucleotide
  Sense strand starting at position 3701 of SEQ ID NO: 317488
uguagucauuuggugcaaa

SEQ ID NO: 494886 - RNA, 19 nt, Artificial Sequence
  Description of Artificial Sequence: Synthetic oligonucleotide
  Antisense Strand to SEQ ID NO: 494885
uuugcaccaaaugacuaca

SEQ ID NO: 494887 - RNA, 19 nt, Artificial Sequence
  Description of Artificial Sequence: Synthetic oligonucleotide
  Sense strand starting at position 3805 of SEQ ID NO: 317488
gaaaguuuaagacggugaa

SEQ ID NO: 494888 - RNA, 19 nt, Artificial Sequence
  Description of Artificial Sequence: Synthetic oligonucleotide
  Antisense Strand to SEQ ID NO: 494887
uucaccgucuuaaacuuuc

SEQ ID NO: 494889 - RNA, 19 nt, Artificial Sequence
  Description of Artificial Sequence: Synthetic oligonucleotide
  Sense strand starting at position 3806 of SEQ ID NO: 317488
aaaguuuaagacggugaaa

SEQ ID NO: 494890 - RNA, 19 nt, Artificial Sequence
  Description of Artificial Sequence: Synthetic oligonucleotide
  Antisense Strand to SEQ ID NO: 494889
uuucaccgucuuaaacuuu

SEQ ID NO: 494891 - RNA, 19 nt, Artificial Sequence
  Description of Artificial Sequence: Synthetic oligonucleotide
  Sense strand starting at position 3808 of SEQ ID NO: 317488
aguuuaagacggugaaauc

SEQ ID NO: 494892 - RNA, 19 nt, Artificial Sequence
  Description of Artificial Sequence: Synthetic oligonucleotide
  Antisense Strand to SEQ ID NO: 494891
gauuucaccgucuuaaacu

SEQ ID NO: 494893 - RNA, 19 nt, Artificial Sequence
  Description of Artificial Sequence: Synthetic oligonucleotide
  Sense strand starting at position 3809 of SEQ ID NO: 317488
guuuaagacggugaaauca

SEQ ID NO: 494894 - RNA, 19 nt, Artificial Sequence
  Description of Artificial Sequence: Synthetic oligonucleotide
  Antisense Strand to SEQ ID NO: 494893
ugauuucaccgucuuaaac

SEQ ID NO: 494895 - RNA, 19 nt, Artificial Sequence
  Description of Artificial Sequence: Synthetic oligonucleotide
  Sense strand starting at position 3818 of SEQ ID NO: 317488
ggugaaaucaugugaaaca

SEQ ID NO: 494896 - RNA, 19 nt, Artificial Sequence
  Description of Artificial Sequence: Synthetic oligonucleotide
  Antisense Strand to SEQ ID NO: 494895
uguuucacaugauuucacc

SEQ ID NO: 494897 - RNA, 19 nt, Artificial Sequence
  Description of Artificial Sequence: Synthetic oligonucleotide
  Sense strand starting at position 3905 of SEQ ID NO: 317488
ugucuuaguauuggugaua

SEQ ID NO: 494898 - RNA, 19 nt, Artificial Sequence
  Description of Artificial Sequence: Synthetic oligonucleotide
  Antisense Strand to SEQ ID NO: 494897
uaucaccaauacuaagaca

SEQ ID NO: 494899 - RNA, 19 nt, Artificial Sequence
  Description of Artificial Sequence: Synthetic oligonucleotide
  Sense strand starting at position 3906 of SEQ ID NO: 317488
gucuuaguauuggugauac

SEQ ID NO: 494900 - RNA, 19 nt, Artificial Sequence
  Description of Artificial Sequence: Synthetic oligonucleotide
  Antisense Strand to SEQ ID NO: 494899
guaucaccaauacuaagac

SEQ ID NO: 494901 - RNA, 19 nt, Artificial Sequence
  Description of Artificial Sequence: Synthetic oligonucleotide
  Sense strand starting at position 3908 of SEQ ID NO: 317488
cuuaguauuggugauacag

SEQ ID NO: 494902 - RNA, 19 nt, Artificial Sequence
  Description of Artificial Sequence: Synthetic oligonucleotide
  Antisense Strand to SEQ ID NO: 494901
cuguaucaccaauacuaag

SEQ ID NO: 494903 - RNA, 19 nt, Artificial Sequence
  Description of Artificial Sequence: Synthetic oligonucleotide
  Sense strand starting at position 3932 of SEQ ID NO: 317488
acgaaaucaugcucucugu

SEQ ID NO: 494904 - RNA, 19 nt, Artificial Sequence
  Description of Artificial Sequence: Synthetic oligonucleotide
  Antisense Strand to SEQ ID NO: 494903
acagagagcaugauuucgu

SEQ ID NO: 494905 - RNA, 19 nt, Artificial Sequence
  Description of Artificial Sequence: Synthetic oligonucleotide
  Sense strand starting at position 3942 of SEQ ID NO: 317488
gcucucugugcuuaaggaa

SEQ ID NO: 494906 - RNA, 19 nt, Artificial Sequence
  Description of Artificial Sequence: Synthetic oligonucleotide
  Antisense Strand to SEQ ID NO: 494905
uuccuuaagcacagagagc

SEQ ID NO: 494907 - RNA, 19 nt, Artificial Sequence
  Description of Artificial Sequence: Synthetic oligonucleotide
  Sense strand starting at position 3976 of SEQ ID NO: 317488
gggagccagcaguaaauaa

SEQ ID NO: 494908 - RNA, 19 nt, Artificial Sequence
  Description of Artificial Sequence: Synthetic oligonucleotide
  Antisense Strand to SEQ ID NO: 494907
uuauuuacugcuggcuccc

SEQ ID NO: 494909 - RNA, 19 nt, Artificial Sequence
  Description of Artificial Sequence: Synthetic oligonucleotide
  Sense strand starting at position 39 of SEQ ID NO: 317489
uaggaagcugcaugaaaga

SEQ ID NO: 494910 - RNA, 19 nt, Artificial Sequence
  Description of Artificial Sequence: Synthetic oligonucleotide
  Antisense Strand to SEQ ID NO: 494909
ucuuucaugcagcuuccua

SEQ ID NO: 494911 - RNA, 19 nt, Artificial Sequence
  Description of Artificial Sequence: Synthetic oligonucleotide
  Sense strand starting at position 142 of SEQ ID NO: 317489
acugaaugagccugagaac

SEQ ID NO: 494912 - RNA, 19 nt, Artificial Sequence
  Description of Artificial Sequence: Synthetic oligonucleotide
  Antisense Strand to SEQ ID NO: 494911
guucucaggcucauucagu

SEQ ID NO: 494913 - RNA, 19 nt, Artificial Sequence
  Description of Artificial Sequence: Synthetic oligonucleotide
  Sense strand starting at position 348 of SEQ ID NO: 317489
acacaugcugcugaauaaa

SEQ ID NO: 494914 - RNA, 19 nt, Artificial Sequence
  Description of Artificial Sequence: Synthetic oligonucleotide
  Antisense Strand to SEQ ID NO: 494913
uuuauucagcagcaugugu

SEQ ID NO: 494915 - RNA, 19 nt, Artificial Sequence
  Description of Artificial Sequence: Synthetic oligonucleotide
  Sense strand starting at position 489 of SEQ ID NO: 317489
acaguuauuugucucagca

SEQ ID NO: 494916 - RNA, 19 nt, Artificial Sequence
  Description of Artificial Sequence: Synthetic oligonucleotide
  Antisense Strand to SEQ ID NO: 494915
ugcugagacaaauaacugu

SEQ ID NO: 494917 - RNA, 19 nt, Artificial Sequence
  Description of Artificial Sequence: Synthetic oligonucleotide
  Sense strand starting at position 541 of SEQ ID NO: 317489
auggcaugccuguauaaac

SEQ ID NO: 494918 - RNA, 19 nt, Artificial Sequence
  Description of Artificial Sequence: Synthetic oligonucleotide
  Antisense Strand to SEQ ID NO: 494917
guuuauacaggcaugccau

SEQ ID NO: 494919 - RNA, 19 nt, Artificial Sequence
  Description of Artificial Sequence: Synthetic oligonucleotide
  Sense strand starting at position 615 of SEQ ID NO: 317489
aggaaagccuucuuauugu

SEQ ID NO: 494920 - RNA, 19 nt, Artificial Sequence
  Description of Artificial Sequence: Synthetic oligonucleotide
  Antisense Strand to SEQ ID NO: 494919
acaauaagaaggcuuuccu

SEQ ID NO: 494921 - RNA, 19 nt, Artificial Sequence
  Description of Artificial Sequence: Synthetic oligonucleotide
  Sense strand starting at position 716 of SEQ ID NO: 317489
acuacaauguggucagaca

SEQ ID NO: 494922 - RNA, 19 nt, Artificial Sequence
  Description of Artificial Sequence: Synthetic oligonucleotide
  Antisense Strand to SEQ ID NO: 494921
ugucugaccacauuguagu

SEQ ID NO: 494923 - RNA, 19 nt, Artificial Sequence
  Description of Artificial Sequence: Synthetic oligonucleotide
  Sense strand starting at position 717 of SEQ ID NO: 317489
cuacaauguggucagacau

SEQ ID NO: 494924 - RNA, 19 nt, Artificial Sequence
  Description of Artificial Sequence: Synthetic oligonucleotide
  Antisense Strand to SEQ ID NO: 494923
augucugaccacauuguag

SEQ ID NO: 494925 - RNA, 19 nt, Artificial Sequence
  Description of Artificial Sequence: Synthetic oligonucleotide
  Sense strand starting at position 762 of SEQ ID NO: 317489
acugguuauucuccgacaa

SEQ ID NO: 494926 - RNA, 19 nt, Artificial Sequence
  Description of Artificial Sequence: Synthetic oligonucleotide
  Antisense Strand to SEQ ID NO: 494925
uugucggagaauaaccagu

SEQ ID NO: 494927 - RNA, 19 nt, Artificial Sequence
  Description of Artificial Sequence: Synthetic oligonucleotide
  Sense strand starting at position 763 of SEQ ID NO: 317489
cugguuauucuccgacaag

SEQ ID NO: 494928 - RNA, 19 nt, Artificial Sequence
  Description of Artificial Sequence: Synthetic oligonucleotide
  Antisense Strand to SEQ ID NO: 494927
cuugucggagaauaaccag

SEQ ID NO: 494929 - RNA, 19 nt, Artificial Sequence
  Description of Artificial Sequence: Synthetic oligonucleotide
  Sense strand starting at position 766 of SEQ ID NO: 317489
guuauucuccgacaaguua

SEQ ID NO: 494930 - RNA, 19 nt, Artificial Sequence
  Description of Artificial Sequence: Synthetic oligonucleotide
  Antisense Strand to SEQ ID NO: 494929
uaacuugucggagaauaac

SEQ ID NO: 494931 - RNA, 19 nt, Artificial Sequence
  Description of Artificial Sequence: Synthetic oligonucleotide
  Sense strand starting at position 783 of SEQ ID NO: 317489
uaaagauaacgcuguuuga

SEQ ID NO: 494932 - RNA, 19 nt, Artificial Sequence
  Description of Artificial Sequence: Synthetic oligonucleotide
  Antisense Strand to SEQ ID NO: 494931
ucaaacagcguuaucuuua

SEQ ID NO: 494933 - RNA, 19 nt, Artificial Sequence
  Description of Artificial Sequence: Synthetic oligonucleotide
  Sense strand starting at position 837 of SEQ ID NO: 317489
agaugacauguaugaugca

SEQ ID NO: 494934 - RNA, 19 nt, Artificial Sequence
  Description of Artificial Sequence: Synthetic oligonucleotide
  Antisense Strand to SEQ ID NO: 494933
ugcaucauacaugucaucu

SEQ ID NO: 494935 - RNA, 19 nt, Artificial Sequence
  Description of Artificial Sequence: Synthetic oligonucleotide
  Sense strand starting at position 1101 of SEQ ID NO: 317489
gcuaaacuccuagguauua

SEQ ID NO: 494936 - RNA, 19 nt, Artificial Sequence
  Description of Artificial Sequence: Synthetic oligonucleotide
  Antisense Strand to SEQ ID NO: 494935
uaauaccuaggaguuuagc

SEQ ID NO: 494937 - RNA, 19 nt, Artificial Sequence
  Description of Artificial Sequence: Synthetic oligonucleotide
  Sense strand starting at position 2101 of SEQ ID NO: 317489
uggagauccuuuccugcuu

SEQ ID NO: 494938 - RNA, 19 nt, Artificial Sequence
  Description of Artificial Sequence: Synthetic oligonucleotide
  Antisense Strand to SEQ ID NO: 494937
aagcaggaaaggaucucca

SEQ ID NO: 494939 - RNA, 19 nt, Artificial Sequence
  Description of Artificial Sequence: Synthetic oligonucleotide
  Sense strand starting at position 2148 of SEQ ID NO: 317489
ggagugugugggugaggaa

SEQ ID NO: 494940 - RNA, 19 nt, Artificial Sequence
  Description of Artificial Sequence: Synthetic oligonucleotide
  Antisense Strand to SEQ ID NO: 494939
uuccucacccacacacucc

SEQ ID NO: 494941 - RNA, 19 nt, Artificial Sequence
  Description of Artificial Sequence: Synthetic oligonucleotide
  Sense strand starting at position 2149 of SEQ ID NO: 317489
gagugugugggugaggaau

SEQ ID NO: 494942 - RNA, 19 nt, Artificial Sequence
  Description of Artificial Sequence: Synthetic oligonucleotide
  Antisense Strand to SEQ ID NO: 494941
auuccucacccacacacuc

SEQ ID NO: 494943 - RNA, 19 nt, Artificial Sequence
  Description of Artificial Sequence: Synthetic oligonucleotide
  Sense strand starting at position 2265 of SEQ ID NO: 317489
caguacugauuaccgauaa

SEQ ID NO: 494944 - RNA, 19 nt, Artificial Sequence
  Description of Artificial Sequence: Synthetic oligonucleotide
  Antisense Strand to SEQ ID NO: 494943
uuaucgguaaucaguacug

SEQ ID NO: 494945 - RNA, 19 nt, Artificial Sequence
  Description of Artificial Sequence: Synthetic oligonucleotide
  Sense strand starting at position 2313 of SEQ ID NO: 317489
aaagaugaguccucuuaug

SEQ ID NO: 494946 - RNA, 19 nt, Artificial Sequence
  Description of Artificial Sequence: Synthetic oligonucleotide
  Antisense Strand to SEQ ID NO: 494945
cauaagaggacucaucuuu

SEQ ID NO: 494947 - RNA, 19 nt, Artificial Sequence
  Description of Artificial Sequence: Synthetic oligonucleotide
  Sense strand starting at position 2427 of SEQ ID NO: 317489
auaagaaugauguaacguu

SEQ ID NO: 494948 - RNA, 19 nt, Artificial Sequence
  Description of Artificial Sequence: Synthetic oligonucleotide
  Antisense Strand to SEQ ID NO: 494947
aacguuacaucauucuuau

SEQ ID NO: 494949 - RNA, 19 nt, Artificial Sequence
  Description of Artificial Sequence: Synthetic oligonucleotide
  Sense strand starting at position 2440 of SEQ ID NO: 317489
aacguugucccaugaggga

SEQ ID NO: 494950 - RNA, 19 nt, Artificial Sequence
  Description of Artificial Sequence: Synthetic oligonucleotide
  Antisense Strand to SEQ ID NO: 494949
ucccucaugggacaacguu

SEQ ID NO: 494951 - RNA, 19 nt, Artificial Sequence
  Description of Artificial Sequence: Synthetic oligonucleotide
  Sense strand starting at position 2456 of SEQ ID NO: 317489
ggaugaaagucaucuguca

SEQ ID NO: 494952 - RNA, 19 nt, Artificial Sequence
  Description of Artificial Sequence: Synthetic oligonucleotide
  Antisense Strand to SEQ ID NO: 494951
ugacagaugacuuucaucc

SEQ ID NO: 494953 - RNA, 19 nt, Artificial Sequence
  Description of Artificial Sequence: Synthetic oligonucleotide
  Sense strand starting at position 2609 of SEQ ID NO: 317489
uguuuaaaggcuuacgacu

SEQ ID NO: 494954 - RNA, 19 nt, Artificial Sequence
  Description of Artificial Sequence: Synthetic oligonucleotide
  Antisense Strand to SEQ ID NO: 494953
agucguaagccuuuaaaca

SEQ ID NO: 494955 - RNA, 19 nt, Artificial Sequence
  Description of Artificial Sequence: Synthetic oligonucleotide
  Sense strand starting at position 2651 of SEQ ID NO: 317489
gugauaaauugagcaagca

SEQ ID NO: 494956 - RNA, 19 nt, Artificial Sequence
  Description of Artificial Sequence: Synthetic oligonucleotide
  Antisense Strand to SEQ ID NO: 494955
ugcuugcucaauuuaucac

SEQ ID NO: 494957 - RNA, 19 nt, Artificial Sequence
  Description of Artificial Sequence: Synthetic oligonucleotide
  Sense strand starting at position 2652 of SEQ ID NO: 317489
ugauaaauugagcaagcau

SEQ ID NO: 494958 - RNA, 19 nt, Artificial Sequence
  Description of Artificial Sequence: Synthetic oligonucleotide
  Antisense Strand to SEQ ID NO: 494957
augcuugcucaauuuauca

SEQ ID NO: 494959 - RNA, 19 nt, Artificial Sequence
  Description of Artificial Sequence: Synthetic oligonucleotide
  Sense strand starting at position 2983 of SEQ ID NO: 317489
ucacaaauuagugggaguu

SEQ ID NO: 494960 - RNA, 19 nt, Artificial Sequence
  Description of Artificial Sequence: Synthetic oligonucleotide
  Antisense Strand to SEQ ID NO: 494959
aacucccacuaauuuguga

SEQ ID NO: 494961 - RNA, 19 nt, Artificial Sequence
  Description of Artificial Sequence: Synthetic oligonucleotide
  Sense strand starting at position 3018 of SEQ ID NO: 317489
cuuugagucucuuugggag

SEQ ID NO: 494962 - RNA, 19 nt, Artificial Sequence
  Description of Artificial Sequence: Synthetic oligonucleotide
  Antisense Strand to SEQ ID NO: 494961
cucccaaagagacucaaag

SEQ ID NO: 494963 - RNA, 19 nt, Artificial Sequence
  Description of Artificial Sequence: Synthetic oligonucleotide
  Sense strand starting at position 3084 of SEQ ID NO: 317489
auucucuuauagcuggaaa

SEQ ID NO: 494964 - RNA, 19 nt, Artificial Sequence
  Description of Artificial Sequence: Synthetic oligonucleotide
  Antisense Strand to SEQ ID NO: 494963
uuuccagcuauaagagaau

SEQ ID NO: 494965 - RNA, 19 nt, Artificial Sequence
  Description of Artificial Sequence: Synthetic oligonucleotide
  Sense strand starting at position 3086 of SEQ ID NO: 317489
ucucuuauagcuggaaacu

SEQ ID NO: 494966 - RNA, 19 nt, Artificial Sequence
  Description of Artificial Sequence: Synthetic oligonucleotide
  Antisense Strand to SEQ ID NO: 494965
aguuuccagcuauaagaga

SEQ ID NO: 494967 - RNA, 19 nt, Artificial Sequence
  Description of Artificial Sequence: Synthetic oligonucleotide
  Sense strand starting at position 3087 of SEQ ID NO: 317489
cucuuauagcuggaaacua

SEQ ID NO: 494968 - RNA, 19 nt, Artificial Sequence
  Description of Artificial Sequence: Synthetic oligonucleotide
  Antisense Strand to SEQ ID NO: 494967
uaguuuccagcuauaagag

SEQ ID NO: 494969 - RNA, 19 nt, Artificial Sequence
  Description of Artificial Sequence: Synthetic oligonucleotide
  Sense strand starting at position 3300 of SEQ ID NO: 317489
gaguuaaaguaaucuugag

SEQ ID NO: 494970 - RNA, 19 nt, Artificial Sequence
  Description of Artificial Sequence: Synthetic oligonucleotide
  Antisense Strand to SEQ ID NO: 494969
cucaagauuacuuuaacuc

SEQ ID NO: 494971 - RNA, 19 nt, Artificial Sequence
  Description of Artificial Sequence: Synthetic oligonucleotide
  Sense strand starting at position 3304 of SEQ ID NO: 317489
uaaaguaaucuugaggcau

SEQ ID NO: 494972 - RNA, 19 nt, Artificial Sequence
  Description of Artificial Sequence: Synthetic oligonucleotide
  Antisense Strand to SEQ ID NO: 494971
augccucaagauuacuuua

SEQ ID NO: 494973 - RNA, 19 nt, Artificial Sequence
  Description of Artificial Sequence: Synthetic oligonucleotide
  Sense strand starting at position 3477 of SEQ ID NO: 317489
ugguuuauguguuuaaaga

SEQ ID NO: 494974 - RNA, 19 nt, Artificial Sequence
  Description of Artificial Sequence: Synthetic oligonucleotide
  Antisense Strand to SEQ ID NO: 494973
ucuuuaaacacauaaacca

SEQ ID NO: 494975 - RNA, 19 nt, Artificial Sequence
  Description of Artificial Sequence: Synthetic oligonucleotide
  Sense strand starting at position 3478 of SEQ ID NO: 317489
gguuuauguguuuaaagaa

SEQ ID NO: 494976 - RNA, 19 nt, Artificial Sequence
  Description of Artificial Sequence: Synthetic oligonucleotide
  Antisense Strand to SEQ ID NO: 494975
uucuuuaaacacauaaacc

SEQ ID NO: 494977 - RNA, 19 nt, Artificial Sequence
  Description of Artificial Sequence: Synthetic oligonucleotide
  Sense strand starting at position 3485 of SEQ ID NO: 317489
guguuuaaagaaugacuua

SEQ ID NO: 494978 - RNA, 19 nt, Artificial Sequence
  Description of Artificial Sequence: Synthetic oligonucleotide
  Antisense Strand to SEQ ID NO: 494977
uaagucauucuuuaaacac

SEQ ID NO: 494979 - RNA, 19 nt, Artificial Sequence
  Description of Artificial Sequence: Synthetic oligonucleotide
  Sense strand starting at position 3549 of SEQ ID NO: 317489
cuaaguaguauguguacaa

SEQ ID NO: 494980 - RNA, 19 nt, Artificial Sequence
  Description of Artificial Sequence: Synthetic oligonucleotide
  Antisense Strand to SEQ ID NO: 494979
uuguacacauacuacuuag

SEQ ID NO: 494981 - RNA, 19 nt, Artificial Sequence
  Description of Artificial Sequence: Synthetic oligonucleotide
  Sense strand starting at position 3550 of SEQ ID NO: 317489
uaaguaguauguguacaau

SEQ ID NO: 494982 - RNA, 19 nt, Artificial Sequence
  Description of Artificial Sequence: Synthetic oligonucleotide
  Antisense Strand to SEQ ID NO: 494981
auuguacacauacuacuua

SEQ ID NO: 494983 - RNA, 19 nt, Artificial Sequence
  Description of Artificial Sequence: Synthetic oligonucleotide
  Sense strand starting at position 3637 of SEQ ID NO: 317489
gcauauuuguauccagcaa

SEQ ID NO: 494984 - RNA, 19 nt, Artificial Sequence
  Description of Artificial Sequence: Synthetic oligonucleotide
  Antisense Strand to SEQ ID NO: 494983
uugcuggauacaaauaugc

SEQ ID NO: 494985 - RNA, 19 nt, Artificial Sequence
  Description of Artificial Sequence: Synthetic oligonucleotide
  Sense strand starting at position 3758 of SEQ ID NO: 317489
guuuacuugcuugacaagu

SEQ ID NO: 494986 - RNA, 19 nt, Artificial Sequence
  Description of Artificial Sequence: Synthetic oligonucleotide
  Antisense Strand to SEQ ID NO: 494985
acuugucaagcaaguaaac

SEQ ID NO: 494987 - RNA, 19 nt, Artificial Sequence
  Description of Artificial Sequence: Synthetic oligonucleotide
  Sense strand starting at position 3944 of SEQ ID NO: 317489
guaggaagaucuguguccu

SEQ ID NO: 494988 - RNA, 19 nt, Artificial Sequence
  Description of Artificial Sequence: Synthetic oligonucleotide
  Antisense Strand to SEQ ID NO: 494987
aggacacagaucuuccuac

SEQ ID NO: 494989 - RNA, 19 nt, Artificial Sequence
  Description of Artificial Sequence: Synthetic oligonucleotide
  Sense strand starting at position 35 of SEQ ID NO: 317490
gauguucuauuagcaguga

SEQ ID NO: 494990 - RNA, 19 nt, Artificial Sequence
  Description of Artificial Sequence: Synthetic oligonucleotide
  Antisense Strand to SEQ ID NO: 494989
ucacugcuaauagaacauc

SEQ ID NO: 494991 - RNA, 19 nt, Artificial Sequence
  Description of Artificial Sequence: Synthetic oligonucleotide
  Sense strand starting at position 39 of SEQ ID NO: 317490
uucuauuagcagugagaca

SEQ ID NO: 494992 - RNA, 19 nt, Artificial Sequence
  Description of Artificial Sequence: Synthetic oligonucleotide
  Antisense Strand to SEQ ID NO: 494991
ugucucacugcuaauagaa

SEQ ID NO: 494993 - RNA, 19 nt, Artificial Sequence
  Description of Artificial Sequence: Synthetic oligonucleotide
  Sense strand starting at position 58 of SEQ ID NO: 317490
gcaagccuacaauagaauu

SEQ ID NO: 494994 - RNA, 19 nt, Artificial Sequence
  Description of Artificial Sequence: Synthetic oligonucleotide
  Antisense Strand to SEQ ID NO: 494993
aauucuauuguaggcuugc

SEQ ID NO: 494995 - RNA, 19 nt, Artificial Sequence
  Description of Artificial Sequence: Synthetic oligonucleotide
  Sense strand starting at position 89 of SEQ ID NO: 317490
uuguguaauugaccucaaa

SEQ ID NO: 494996 - RNA, 19 nt, Artificial Sequence
  Description of Artificial Sequence: Synthetic oligonucleotide
  Antisense Strand to SEQ ID NO: 494995
uuugaggucaauuacacaa

SEQ ID NO: 494997 - RNA, 19 nt, Artificial Sequence
  Description of Artificial Sequence: Synthetic oligonucleotide
  Sense strand starting at position 101 of SEQ ID NO: 317490
ccucaaauuucggaaggca

SEQ ID NO: 494998 - RNA, 19 nt, Artificial Sequence
  Description of Artificial Sequence: Synthetic oligonucleotide
  Antisense Strand to SEQ ID NO: 494997
ugccuuccgaaauuugagg

SEQ ID NO: 494999 - RNA, 19 nt, Artificial Sequence
  Description of Artificial Sequence: Synthetic oligonucleotide
  Sense strand starting at position 400 of SEQ ID NO: 317490
ucgggaugcgucgcucauu

SEQ ID NO: 495000 - RNA, 19 nt, Artificial Sequence
  Description of Artificial Sequence: Synthetic oligonucleotide
  Antisense Strand to SEQ ID NO: 494999
aaugagcgacgcaucccga

SEQ ID NO: 495001 - RNA, 19 nt, Artificial Sequence
  Description of Artificial Sequence: Synthetic oligonucleotide
  Sense strand starting at position 403 of SEQ ID NO: 317490
ggaugcgucgcucauuuaa

SEQ ID NO: 495002 - RNA, 19 nt, Artificial Sequence
  Description of Artificial Sequence: Synthetic oligonucleotide
  Antisense Strand to SEQ ID NO: 495001
uuaaaugagcgacgcaucc

SEQ ID NO: 495003 - RNA, 19 nt, Artificial Sequence
  Description of Artificial Sequence: Synthetic oligonucleotide
  Sense strand starting at position 775 of SEQ ID NO: 317490
agcaucucacccugugaaa

SEQ ID NO: 495004 - RNA, 19 nt, Artificial Sequence
  Description of Artificial Sequence: Synthetic oligonucleotide
  Antisense Strand to SEQ ID NO: 495003
uuucacagggugagaugcu

SEQ ID NO: 495005 - RNA, 19 nt, Artificial Sequence
  Description of Artificial Sequence: Synthetic oligonucleotide
  Sense strand starting at position 818 of SEQ ID NO: 317490
cugcgucucgcacugauua

SEQ ID NO: 495006 - RNA, 19 nt, Artificial Sequence
  Description of Artificial Sequence: Synthetic oligonucleotide
  Antisense Strand to SEQ ID NO: 495005
uaaucagugcgagacgcag

SEQ ID NO: 495007 - RNA, 19 nt, Artificial Sequence
  Description of Artificial Sequence: Synthetic oligonucleotide
  Sense strand starting at position 842 of SEQ ID NO: 317490
ugucuccaagauuggaaau

SEQ ID NO: 495008 - RNA, 19 nt, Artificial Sequence
  Description of Artificial Sequence: Synthetic oligonucleotide
  Antisense Strand to SEQ ID NO: 495007
auuuccaaucuuggagaca

SEQ ID NO: 495009 - RNA, 19 nt, Artificial Sequence
  Description of Artificial Sequence: Synthetic oligonucleotide
  Sense strand starting at position 1092 of SEQ ID NO: 317490
cccaaaugugacugaacca

SEQ ID NO: 495010 - RNA, 19 nt, Artificial Sequence
  Description of Artificial Sequence: Synthetic oligonucleotide
  Antisense Strand to SEQ ID NO: 495009
ugguucagucacauuuggg

SEQ ID NO: 495011 - RNA, 19 nt, Artificial Sequence
  Description of Artificial Sequence: Synthetic oligonucleotide
  Sense strand starting at position 1376 of SEQ ID NO: 317490
cgagcuccucggcucuaau

SEQ ID NO: 495012 - RNA, 19 nt, Artificial Sequence
  Description of Artificial Sequence: Synthetic oligonucleotide
  Antisense Strand to SEQ ID NO: 495011
auuagagccgaggagcucg

SEQ ID NO: 495013 - RNA, 19 nt, Artificial Sequence
  Description of Artificial Sequence: Synthetic oligonucleotide
  Sense strand starting at position 1413 of SEQ ID NO: 317490
ccaggaugcuugucugaag

SEQ ID NO: 495014 - RNA, 19 nt, Artificial Sequence
  Description of Artificial Sequence: Synthetic oligonucleotide
  Antisense Strand to SEQ ID NO: 495013
cuucagacaagcauccugg

SEQ ID NO: 495015 - RNA, 19 nt, Artificial Sequence
  Description of Artificial Sequence: Synthetic oligonucleotide
  Sense strand starting at position 1414 of SEQ ID NO: 317490
caggaugcuugucugaagu

SEQ ID NO: 495016 - RNA, 19 nt, Artificial Sequence
  Description of Artificial Sequence: Synthetic oligonucleotide
  Antisense Strand to SEQ ID NO: 495015
acuucagacaagcauccug

SEQ ID NO: 495017 - RNA, 19 nt, Artificial Sequence
  Description of Artificial Sequence: Synthetic oligonucleotide
  Sense strand starting at position 2297 of SEQ ID NO: 317490
aucguuacucagggagaag

SEQ ID NO: 495018 - RNA, 19 nt, Artificial Sequence
  Description of Artificial Sequence: Synthetic oligonucleotide
  Antisense Strand to SEQ ID NO: 495017
cuucucccugaguaacgau

SEQ ID NO: 495019 - RNA, 19 nt, Artificial Sequence
  Description of Artificial Sequence: Synthetic oligonucleotide
  Sense strand starting at position 2509 of SEQ ID NO: 317490
gaaauccacuggcuuguua

SEQ ID NO: 495020 - RNA, 19 nt, Artificial Sequence
  Description of Artificial Sequence: Synthetic oligonucleotide
  Antisense Strand to SEQ ID NO: 495019
uaacaagccaguggauuuc

SEQ ID NO: 495021 - RNA, 19 nt, Artificial Sequence
  Description of Artificial Sequence: Synthetic oligonucleotide
  Sense strand starting at position 2513 of SEQ ID NO: 317490
uccacuggcuuguuaauuu

SEQ ID NO: 495022 - RNA, 19 nt, Artificial Sequence
  Description of Artificial Sequence: Synthetic oligonucleotide
  Antisense Strand to SEQ ID NO: 495021
aaauuaacaagccagugga

SEQ ID NO: 495023 - RNA, 19 nt, Artificial Sequence
  Description of Artificial Sequence: Synthetic oligonucleotide
  Sense strand starting at position 2581 of SEQ ID NO: 317490
uggguuacucccgguaaga

SEQ ID NO: 495024 - RNA, 19 nt, Artificial Sequence
  Description of Artificial Sequence: Synthetic oligonucleotide
  Antisense Strand to SEQ ID NO: 495023
ucuuaccgggaguaaccca

SEQ ID NO: 495025 - RNA, 19 nt, Artificial Sequence
  Description of Artificial Sequence: Synthetic oligonucleotide
  Sense strand starting at position 2583 of SEQ ID NO: 317490
gguuacucccgguaagacu

SEQ ID NO: 495026 - RNA, 19 nt, Artificial Sequence
  Description of Artificial Sequence: Synthetic oligonucleotide
  Antisense Strand to SEQ ID NO: 495025
agucuuaccgggaguaacc

SEQ ID NO: 495027 - RNA, 19 nt, Artificial Sequence
  Description of Artificial Sequence: Synthetic oligonucleotide
  Sense strand starting at position 2590 of SEQ ID NO: 317490
cccgguaagacuugguuga

SEQ ID NO: 495028 - RNA, 19 nt, Artificial Sequence
  Description of Artificial Sequence: Synthetic oligonucleotide
  Antisense Strand to SEQ ID NO: 495027
ucaaccaagucuuaccggg

SEQ ID NO: 495029 - RNA, 19 nt, Artificial Sequence
  Description of Artificial Sequence: Synthetic oligonucleotide
  Sense strand starting at position 2591 of SEQ ID NO: 317490
ccgguaagacuugguugaa

SEQ ID NO: 495030 - RNA, 19 nt, Artificial Sequence
  Description of Artificial Sequence: Synthetic oligonucleotide
  Antisense Strand to SEQ ID NO: 495029
uucaaccaagucuuaccgg

SEQ ID NO: 495031 - RNA, 19 nt, Artificial Sequence
  Description of Artificial Sequence: Synthetic oligonucleotide
  Sense strand starting at position 2592 of SEQ ID NO: 317490
cgguaagacuugguugaac

SEQ ID NO: 495032 - RNA, 19 nt, Artificial Sequence
  Description of Artificial Sequence: Synthetic oligonucleotide
  Antisense Strand to SEQ ID NO: 495031
guucaaccaagucuuaccg

SEQ ID NO: 495033 - RNA, 19 nt, Artificial Sequence
  Description of Artificial Sequence: Synthetic oligonucleotide
  Sense strand starting at position 2594 of SEQ ID NO: 317490
guaagacuugguugaaccu

SEQ ID NO: 495034 - RNA, 19 nt, Artificial Sequence
  Description of Artificial Sequence: Synthetic oligonucleotide
  Antisense Strand to SEQ ID NO: 495033
agguucaaccaagucuuac

SEQ ID NO: 495035 - RNA, 19 nt, Artificial Sequence
  Description of Artificial Sequence: Synthetic oligonucleotide
  Sense strand starting at position 2633 of SEQ ID NO: 317490
cccugagugccuucguacu

SEQ ID NO: 495036 - RNA, 19 nt, Artificial Sequence
  Description of Artificial Sequence: Synthetic oligonucleotide
  Antisense Strand to SEQ ID NO: 495035
aguacgaaggcacucaggg

SEQ ID NO: 495037 - RNA, 19 nt, Artificial Sequence
  Description of Artificial Sequence: Synthetic oligonucleotide
  Sense strand starting at position 2708 of SEQ ID NO: 317490
cucaaaggcgucuaauaag

SEQ ID NO: 495038 - RNA, 19 nt, Artificial Sequence
  Description of Artificial Sequence: Synthetic oligonucleotide
  Antisense Strand to SEQ ID NO: 495037
cuuauuagacgccuuugag

SEQ ID NO: 495039 - RNA, 19 nt, Artificial Sequence
  Description of Artificial Sequence: Synthetic oligonucleotide
  Sense strand starting at position 2846 of SEQ ID NO: 317490
agaaucuuagcaggaaucu

SEQ ID NO: 495040 - RNA, 19 nt, Artificial Sequence
  Description of Artificial Sequence: Synthetic oligonucleotide
  Antisense Strand to SEQ ID NO: 495039
agauuccugcuaagauucu

SEQ ID NO: 495041 - RNA, 19 nt, Artificial Sequence
  Description of Artificial Sequence: Synthetic oligonucleotide
  Sense strand starting at position 2896 of SEQ ID NO: 317490
auaagaaacccuuggccua

SEQ ID NO: 495042 - RNA, 19 nt, Artificial Sequence
  Description of Artificial Sequence: Synthetic oligonucleotide
  Antisense Strand to SEQ ID NO: 495041
uaggccaaggguuucuuau

SEQ ID NO: 495043 - RNA, 19 nt, Artificial Sequence
  Description of Artificial Sequence: Synthetic oligonucleotide
  Sense strand starting at position 2973 of SEQ ID NO: 317490
agaagaguguguucuucca

SEQ ID NO: 495044 - RNA, 19 nt, Artificial Sequence
  Description of Artificial Sequence: Synthetic oligonucleotide
  Antisense Strand to SEQ ID NO: 495043
uggaagaacacacucuucu

SEQ ID NO: 495045 - RNA, 19 nt, Artificial Sequence
  Description of Artificial Sequence: Synthetic oligonucleotide
  Sense strand starting at position 2975 of SEQ ID NO: 317490
aagaguguguucuuccaga

SEQ ID NO: 495046 - RNA, 19 nt, Artificial Sequence
  Description of Artificial Sequence: Synthetic oligonucleotide
  Antisense Strand to SEQ ID NO: 495045
ucuggaagaacacacucuu

SEQ ID NO: 495047 - RNA, 19 nt, Artificial Sequence
  Description of Artificial Sequence: Synthetic oligonucleotide
  Sense strand starting at position 2980 of SEQ ID NO: 317490
uguguucuuccagacuuuc

SEQ ID NO: 495048 - RNA, 19 nt, Artificial Sequence
  Description of Artificial Sequence: Synthetic oligonucleotide
  Antisense Strand to SEQ ID NO: 495047
gaaagucuggaagaacaca

SEQ ID NO: 495049 - RNA, 19 nt, Artificial Sequence
  Description of Artificial Sequence: Synthetic oligonucleotide
  Sense strand starting at position 3060 of SEQ ID NO: 317490
acacgcucugaugagauaa

SEQ ID NO: 495050 - RNA, 19 nt, Artificial Sequence
  Description of Artificial Sequence: Synthetic oligonucleotide
  Antisense Strand to SEQ ID NO: 495049
uuaucucaucagagcgugu

SEQ ID NO: 495051 - RNA, 19 nt, Artificial Sequence
  Description of Artificial Sequence: Synthetic oligonucleotide
  Sense strand starting at position 3201 of SEQ ID NO: 317490
uguguauuaaauuggcaag

SEQ ID NO: 495052 - RNA, 19 nt, Artificial Sequence
  Description of Artificial Sequence: Synthetic oligonucleotide
  Antisense Strand to SEQ ID NO: 495051
cuugccaauuuaauacaca

SEQ ID NO: 495053 - RNA, 19 nt, Artificial Sequence
  Description of Artificial Sequence: Synthetic oligonucleotide
  Sense strand starting at position 3215 of SEQ ID NO: 317490
gcaagucuauauguugaaa

SEQ ID NO: 495054 - RNA, 19 nt, Artificial Sequence
  Description of Artificial Sequence: Synthetic oligonucleotide
  Antisense Strand to SEQ ID NO: 495053
uuucaacauauagacuugc

SEQ ID NO: 495055 - RNA, 19 nt, Artificial Sequence
  Description of Artificial Sequence: Synthetic oligonucleotide
  Sense strand starting at position 3320 of SEQ ID NO: 317490
guuguuaguacauaugcaa

SEQ ID NO: 495056 - RNA, 19 nt, Artificial Sequence
  Description of Artificial Sequence: Synthetic oligonucleotide
  Antisense Strand to SEQ ID NO: 495055
uugcauauguacuaacaac

SEQ ID NO: 495057 - RNA, 19 nt, Artificial Sequence
  Description of Artificial Sequence: Synthetic oligonucleotide
  Sense strand starting at position 3521 of SEQ ID NO: 317490
cuggaaagaccaugcuuaa

SEQ ID NO: 495058 - RNA, 19 nt, Artificial Sequence
  Description of Artificial Sequence: Synthetic oligonucleotide
  Antisense Strand to SEQ ID NO: 495057
uuaagcauggucuuuccag

SEQ ID NO: 495059 - RNA, 19 nt, Artificial Sequence
  Description of Artificial Sequence: Synthetic oligonucleotide
  Sense strand starting at position 3540 of SEQ ID NO: 317490
agcaaagucugaucacgac

SEQ ID NO: 495060 - RNA, 19 nt, Artificial Sequence
  Description of Artificial Sequence: Synthetic oligonucleotide
  Antisense Strand to SEQ ID NO: 495059
gucgugaucagacuuugcu

SEQ ID NO: 495061 - RNA, 19 nt, Artificial Sequence
  Description of Artificial Sequence: Synthetic oligonucleotide
  Sense strand starting at position 3670 of SEQ ID NO: 317490
acgcucagucaucaacuga

SEQ ID NO: 495062 - RNA, 19 nt, Artificial Sequence
  Description of Artificial Sequence: Synthetic oligonucleotide
  Antisense Strand to SEQ ID NO: 495061
ucaguugaugacugagcgu

SEQ ID NO: 495063 - RNA, 19 nt, Artificial Sequence
  Description of Artificial Sequence: Synthetic oligonucleotide
  Sense strand starting at position 3684 of SEQ ID NO: 317490
acugacaugcuagauacuu

SEQ ID NO: 495064 - RNA, 19 nt, Artificial Sequence
  Description of Artificial Sequence: Synthetic oligonucleotide
  Antisense Strand to SEQ ID NO: 495063
aaguaucuagcaugucagu

SEQ ID NO: 495065 - RNA, 19 nt, Artificial Sequence
  Description of Artificial Sequence: Synthetic oligonucleotide
  Sense strand starting at position 3869 of SEQ ID NO: 317490
cuguguauaccacagucuu

SEQ ID NO: 495066 - RNA, 19 nt, Artificial Sequence
  Description of Artificial Sequence: Synthetic oligonucleotide
  Antisense Strand to SEQ ID NO: 495065
aagacugugguauacacag

SEQ ID NO: 495067 - RNA, 19 nt, Artificial Sequence
  Description of Artificial Sequence: Synthetic oligonucleotide
  Sense strand starting at position 3942 of SEQ ID NO: 317490
cuaugaaucccuugagggu

SEQ ID NO: 495068 - RNA, 19 nt, Artificial Sequence
  Description of Artificial Sequence: Synthetic oligonucleotide
  Antisense Strand to SEQ ID NO: 495067
acccucaagggauucauag

SEQ ID NO: 495069 - RNA, 19 nt, Artificial Sequence
  Description of Artificial Sequence: Synthetic oligonucleotide
  Sense strand starting at position 67 of SEQ ID NO: 317491
cuaguugcauuuguguaaa

SEQ ID NO: 495070 - RNA, 19 nt, Artificial Sequence
  Description of Artificial Sequence: Synthetic oligonucleotide
  Antisense Strand to SEQ ID NO: 495069
uuuacacaaaugcaacuag

SEQ ID NO: 495071 - RNA, 19 nt, Artificial Sequence
  Description of Artificial Sequence: Synthetic oligonucleotide
  Sense strand starting at position 69 of SEQ ID NO: 317491
aguugcauuuguguaaauc

SEQ ID NO: 495072 - RNA, 19 nt, Artificial Sequence
  Description of Artificial Sequence: Synthetic oligonucleotide
  Antisense Strand to SEQ ID NO: 495071
gauuuacacaaaugcaacu

SEQ ID NO: 495073 - RNA, 19 nt, Artificial Sequence
  Description of Artificial Sequence: Synthetic oligonucleotide
  Sense strand starting at position 70 of SEQ ID NO: 317491
guugcauuuguguaaaucu

SEQ ID NO: 495074 - RNA, 19 nt, Artificial Sequence
  Description of Artificial Sequence: Synthetic oligonucleotide
  Antisense Strand to SEQ ID NO: 495073
agauuuacacaaaugcaac

SEQ ID NO: 495075 - RNA, 19 nt, Artificial Sequence
  Description of Artificial Sequence: Synthetic oligonucleotide
  Sense strand starting at position 79 of SEQ ID NO: 317491
guguaaaucucacuaacua

SEQ ID NO: 495076 - RNA, 19 nt, Artificial Sequence
  Description of Artificial Sequence: Synthetic oligonucleotide
  Antisense Strand to SEQ ID NO: 495075
uaguuagugagauuuacac

SEQ ID NO: 495077 - RNA, 19 nt, Artificial Sequence
  Description of Artificial Sequence: Synthetic oligonucleotide
  Sense strand starting at position 199 of SEQ ID NO: 317491
aggaauugaugucuacaau

SEQ ID NO: 495078 - RNA, 19 nt, Artificial Sequence
  Description of Artificial Sequence: Synthetic oligonucleotide
  Antisense Strand to SEQ ID NO: 495077
auuguagacaucaauuccu

SEQ ID NO: 495079 - RNA, 19 nt, Artificial Sequence
  Description of Artificial Sequence: Synthetic oligonucleotide
  Sense strand starting at position 202 of SEQ ID NO: 317491
aauugaugucuacaaucgu

SEQ ID NO: 495080 - RNA, 19 nt, Artificial Sequence
  Description of Artificial Sequence: Synthetic oligonucleotide
  Antisense Strand to SEQ ID NO: 495079
acgauuguagacaucaauu

SEQ ID NO: 495081 - RNA, 19 nt, Artificial Sequence
  Description of Artificial Sequence: Synthetic oligonucleotide
  Sense strand starting at position 334 of SEQ ID NO: 317491
ggagguagcaacugauuaa

SEQ ID NO: 495082 - RNA, 19 nt, Artificial Sequence
  Description of Artificial Sequence: Synthetic oligonucleotide
  Antisense Strand to SEQ ID NO: 495081
uuaaucaguugcuaccucc

SEQ ID NO: 495083 - RNA, 19 nt, Artificial Sequence
  Description of Artificial Sequence: Synthetic oligonucleotide
  Sense strand starting at position 472 of SEQ ID NO: 317491
cuuugcuguccucauauuu

SEQ ID NO: 495084 - RNA, 19 nt, Artificial Sequence
  Description of Artificial Sequence: Synthetic oligonucleotide
  Antisense Strand to SEQ ID NO: 495083
aaauaugaggacagcaaag

SEQ ID NO: 495085 - RNA, 19 nt, Artificial Sequence
  Description of Artificial Sequence: Synthetic oligonucleotide
  Sense strand starting at position 512 of SEQ ID NO: 317491
ggcucaccacucugaauau

SEQ ID NO: 495086 - RNA, 19 nt, Artificial Sequence
  Description of Artificial Sequence: Synthetic oligonucleotide
  Antisense Strand to SEQ ID NO: 495085
auauucagaguggugagcc

SEQ ID NO: 495087 - RNA, 19 nt, Artificial Sequence
  Description of Artificial Sequence: Synthetic oligonucleotide
  Sense strand starting at position 560 of SEQ ID NO: 317491
ugucauaucagugaaguga

SEQ ID NO: 495088 - RNA, 19 nt, Artificial Sequence
  Description of Artificial Sequence: Synthetic oligonucleotide
  Antisense Strand to SEQ ID NO: 495087
ucacuucacugauaugaca

SEQ ID NO: 495089 - RNA, 19 nt, Artificial Sequence
  Description of Artificial Sequence: Synthetic oligonucleotide
  Sense strand starting at position 632 of SEQ ID NO: 317491
aaaugcuugggccaaugaa

SEQ ID NO: 495090 - RNA, 19 nt, Artificial Sequence
  Description of Artificial Sequence: Synthetic oligonucleotide
  Antisense Strand to SEQ ID NO: 495089
uucauuggcccaagcauuu

SEQ ID NO: 495091 - RNA, 19 nt, Artificial Sequence
  Description of Artificial Sequence: Synthetic oligonucleotide
  Sense strand starting at position 719 of SEQ ID NO: 317491
ccuaguauugcaggacauc

SEQ ID NO: 495092 - RNA, 19 nt, Artificial Sequence
  Description of Artificial Sequence: Synthetic oligonucleotide
  Antisense Strand to SEQ ID NO: 495091
gauguccugcaauacuagg

SEQ ID NO: 495093 - RNA, 19 nt, Artificial Sequence
  Description of Artificial Sequence: Synthetic oligonucleotide
  Sense strand starting at position 927 of SEQ ID NO: 317491
auagcucucugauccagaa

SEQ ID NO: 495094 - RNA, 19 nt, Artificial Sequence
  Description of Artificial Sequence: Synthetic oligonucleotide
  Antisense Strand to SEQ ID NO: 495093
uucuggaucagagagcuau

SEQ ID NO: 495095 - RNA, 19 nt, Artificial Sequence
  Description of Artificial Sequence: Synthetic oligonucleotide
  Sense strand starting at position 1995 of SEQ ID NO: 317491
gggcccuuucuggaauaca

SEQ ID NO: 495096 - RNA, 19 nt, Artificial Sequence
  Description of Artificial Sequence: Synthetic oligonucleotide
  Antisense Strand to SEQ ID NO: 495095
uguauuccagaaagggccc

SEQ ID NO: 495097 - RNA, 19 nt, Artificial Sequence
  Description of Artificial Sequence: Synthetic oligonucleotide
  Sense strand starting at position 2060 of SEQ ID NO: 317491
agcgauaccguugcuaacu

SEQ ID NO: 495098 - RNA, 19 nt, Artificial Sequence
  Description of Artificial Sequence: Synthetic oligonucleotide
  Antisense Strand to SEQ ID NO: 495097
aguuagcaacgguaucgcu

SEQ ID NO: 495099 - RNA, 19 nt, Artificial Sequence
  Description of Artificial Sequence: Synthetic oligonucleotide
  Sense strand starting at position 2089 of SEQ ID NO: 317491
aagugacaccugugaucua

SEQ ID NO: 495100 - RNA, 19 nt, Artificial Sequence
  Description of Artificial Sequence: Synthetic oligonucleotide
  Antisense Strand to SEQ ID NO: 495099
uagaucacaggugucacuu

SEQ ID NO: 495101 - RNA, 19 nt, Artificial Sequence
  Description of Artificial Sequence: Synthetic oligonucleotide
  Sense strand starting at position 2243 of SEQ ID NO: 317491
gauggaacucaucguaccu

SEQ ID NO: 495102 - RNA, 19 nt, Artificial Sequence
  Description of Artificial Sequence: Synthetic oligonucleotide
  Antisense Strand to SEQ ID NO: 495101
agguacgaugaguuccauc

SEQ ID NO: 495103 - RNA, 19 nt, Artificial Sequence
  Description of Artificial Sequence: Synthetic oligonucleotide
  Sense strand starting at position 2312 of SEQ ID NO: 317491
aguacuaggcuugaagacu

SEQ ID NO: 495104 - RNA, 19 nt, Artificial Sequence
  Description of Artificial Sequence: Synthetic oligonucleotide
  Antisense Strand to SEQ ID NO: 495103
agucuucaagccuaguacu

SEQ ID NO: 495105 - RNA, 19 nt, Artificial Sequence
  Description of Artificial Sequence: Synthetic oligonucleotide
  Sense strand starting at position 2860 of SEQ ID NO: 317491
aacgacaagguuugauuau

SEQ ID NO: 495106 - RNA, 19 nt, Artificial Sequence
  Description of Artificial Sequence: Synthetic oligonucleotide
  Antisense Strand to SEQ ID NO: 495105
auaaucaaaccuugucguu

SEQ ID NO: 495107 - RNA, 19 nt, Artificial Sequence
  Description of Artificial Sequence: Synthetic oligonucleotide
  Sense strand starting at position 2892 of SEQ ID NO: 317491
cuagaauuacuuugugagu

SEQ ID NO: 495108 - RNA, 19 nt, Artificial Sequence
  Description of Artificial Sequence: Synthetic oligonucleotide
  Antisense Strand to SEQ ID NO: 495107
acucacaaaguaauucuag

SEQ ID NO: 495109 - RNA, 19 nt, Artificial Sequence
  Description of Artificial Sequence: Synthetic oligonucleotide
  Sense strand starting at position 2893 of SEQ ID NO: 317491
uagaauuacuuugugagua

SEQ ID NO: 495110 - RNA, 19 nt, Artificial Sequence
  Description of Artificial Sequence: Synthetic oligonucleotide
  Antisense Strand to SEQ ID NO: 495109
uacucacaaaguaauucua

SEQ ID NO: 495111 - RNA, 19 nt, Artificial Sequence
  Description of Artificial Sequence: Synthetic oligonucleotide
  Sense strand starting at position 2898 of SEQ ID NO: 317491
uuacuuugugaguaaagca

SEQ ID NO: 495112 - RNA, 19 nt, Artificial Sequence
  Description of Artificial Sequence: Synthetic oligonucleotide
  Antisense Strand to SEQ ID NO: 495111
ugcuuuacucacaaaguaa

SEQ ID NO: 495113 - RNA, 19 nt, Artificial Sequence
  Description of Artificial Sequence: Synthetic oligonucleotide
  Sense strand starting at position 2938 of SEQ ID NO: 317491
cagaucaaugcgcacugaa

SEQ ID NO: 495114 - RNA, 19 nt, Artificial Sequence
  Description of Artificial Sequence: Synthetic oligonucleotide
  Antisense Strand to SEQ ID NO: 495113
uucagugcgcauugaucug

SEQ ID NO: 495115 - RNA, 19 nt, Artificial Sequence
  Description of Artificial Sequence: Synthetic oligonucleotide
  Sense strand starting at position 3014 of SEQ ID NO: 317491
aauugauguguacagugau

SEQ ID NO: 495116 - RNA, 19 nt, Artificial Sequence
  Description of Artificial Sequence: Synthetic oligonucleotide
  Antisense Strand to SEQ ID NO: 495115
aucacuguacacaucaauu

SEQ ID NO: 495117 - RNA, 19 nt, Artificial Sequence
  Description of Artificial Sequence: Synthetic oligonucleotide
  Sense strand starting at position 3020 of SEQ ID NO: 317491
uguguacagugauuugagu

SEQ ID NO: 495118 - RNA, 19 nt, Artificial Sequence
  Description of Artificial Sequence: Synthetic oligonucleotide
  Antisense Strand to SEQ ID NO: 495117
acucaaaucacuguacaca

SEQ ID NO: 495119 - RNA, 19 nt, Artificial Sequence
  Description of Artificial Sequence: Synthetic oligonucleotide
  Sense strand starting at position 3022 of SEQ ID NO: 317491
uguacagugauuugaguuc

SEQ ID NO: 495120 - RNA, 19 nt, Artificial Sequence
  Description of Artificial Sequence: Synthetic oligonucleotide
  Antisense Strand to SEQ ID NO: 495119
gaacucaaaucacuguaca

SEQ ID NO: 495121 - RNA, 19 nt, Artificial Sequence
  Description of Artificial Sequence: Synthetic oligonucleotide
  Sense strand starting at position 3044 of SEQ ID NO: 317491
ucuuaauuucugugauguu

SEQ ID NO: 495122 - RNA, 19 nt, Artificial Sequence
  Description of Artificial Sequence: Synthetic oligonucleotide
  Antisense Strand to SEQ ID NO: 495121
aacaucacagaaauuaaga

SEQ ID NO: 495123 - RNA, 19 nt, Artificial Sequence
  Description of Artificial Sequence: Synthetic oligonucleotide
  Sense strand starting at position 3053 of SEQ ID NO: 317491
cugugauguuagguaaaua

SEQ ID NO: 495124 - RNA, 19 nt, Artificial Sequence
  Description of Artificial Sequence: Synthetic oligonucleotide
  Antisense Strand to SEQ ID NO: 495123
uauuuaccuaacaucacag

SEQ ID NO: 495125 - RNA, 19 nt, Artificial Sequence
  Description of Artificial Sequence: Synthetic oligonucleotide
  Sense strand starting at position 3054 of SEQ ID NO: 317491
ugugauguuagguaaauaa

SEQ ID NO: 495126 - RNA, 19 nt, Artificial Sequence
  Description of Artificial Sequence: Synthetic oligonucleotide
  Antisense Strand to SEQ ID NO: 495125
uuauuuaccuaacaucaca

SEQ ID NO: 495127 - RNA, 19 nt, Artificial Sequence
  Description of Artificial Sequence: Synthetic oligonucleotide
  Sense strand starting at position 3202 of SEQ ID NO: 317491
uuaacaucgugacuaucua

SEQ ID NO: 495128 - RNA, 19 nt, Artificial Sequence
  Description of Artificial Sequence: Synthetic oligonucleotide
  Antisense Strand to SEQ ID NO: 495127
uagauagucacgauguuaa

SEQ ID NO: 495129 - RNA, 19 nt, Artificial Sequence
  Description of Artificial Sequence: Synthetic oligonucleotide
  Sense strand starting at position 3209 of SEQ ID NO: 317491
cgugacuaucuauaaucuu

SEQ ID NO: 495130 - RNA, 19 nt, Artificial Sequence
  Description of Artificial Sequence: Synthetic oligonucleotide
  Antisense Strand to SEQ ID NO: 495129
aagauuauagauagucacg

SEQ ID NO: 495131 - RNA, 19 nt, Artificial Sequence
  Description of Artificial Sequence: Synthetic oligonucleotide
  Sense strand starting at position 3503 of SEQ ID NO: 317491
acuguauucguggagucag

SEQ ID NO: 495132 - RNA, 19 nt, Artificial Sequence
  Description of Artificial Sequence: Synthetic oligonucleotide
  Antisense Strand to SEQ ID NO: 495131
cugacuccacgaauacagu

SEQ ID NO: 495133 - RNA, 19 nt, Artificial Sequence
  Description of Artificial Sequence: Synthetic oligonucleotide
  Sense strand starting at position 3586 of SEQ ID NO: 317491
ggaagcuucccuggcaaga

SEQ ID NO: 495134 - RNA, 19 nt, Artificial Sequence
  Description of Artificial Sequence: Synthetic oligonucleotide
  Antisense Strand to SEQ ID NO: 495133
ucuugccagggaagcuucc

SEQ ID NO: 495135 - RNA, 19 nt, Artificial Sequence
  Description of Artificial Sequence: Synthetic oligonucleotide
  Sense strand starting at position 3721 of SEQ ID NO: 317491
gggcaagccugacucuaua

SEQ ID NO: 495136 - RNA, 19 nt, Artificial Sequence
  Description of Artificial Sequence: Synthetic oligonucleotide
  Antisense Strand to SEQ ID NO: 495135
uauagagucaggcuugccc

SEQ ID NO: 495137 - RNA, 19 nt, Artificial Sequence
  Description of Artificial Sequence: Synthetic oligonucleotide
  Sense strand starting at position 3732 of SEQ ID NO: 317491
acucuauagagguauggca

SEQ ID NO: 495138 - RNA, 19 nt, Artificial Sequence
  Description of Artificial Sequence: Synthetic oligonucleotide
  Antisense Strand to SEQ ID NO: 495137
ugccauaccucuauagagu

SEQ ID NO: 495139 - RNA, 19 nt, Artificial Sequence
  Description of Artificial Sequence: Synthetic oligonucleotide
  Sense strand starting at position 3765 of SEQ ID NO: 317491
cagagaggcuuguugacuu

SEQ ID NO: 495140 - RNA, 19 nt, Artificial Sequence
  Description of Artificial Sequence: Synthetic oligonucleotide
  Antisense Strand to SEQ ID NO: 495139
aagucaacaagccucucug

SEQ ID NO: 495141 - RNA, 19 nt, Artificial Sequence
  Description of Artificial Sequence: Synthetic oligonucleotide
  Sense strand starting at position 3778 of SEQ ID NO: 317491
ugacuuaugcaaggacaca

SEQ ID NO: 495142 - RNA, 19 nt, Artificial Sequence
  Description of Artificial Sequence: Synthetic oligonucleotide
  Antisense Strand to SEQ ID NO: 495141
uguguccuugcauaaguca

SEQ ID NO: 495143 - RNA, 19 nt, Artificial Sequence
  Description of Artificial Sequence: Synthetic oligonucleotide
  Sense strand starting at position 3833 of SEQ ID NO: 317491
agugucaagugaucaacuu

SEQ ID NO: 495144 - RNA, 19 nt, Artificial Sequence
  Description of Artificial Sequence: Synthetic oligonucleotide
  Antisense Strand to SEQ ID NO: 495143
aaguugaucacuugacacu

SEQ ID NO: 495145 - RNA, 19 nt, Artificial Sequence
  Description of Artificial Sequence: Synthetic oligonucleotide
  Sense strand starting at position 3834 of SEQ ID NO: 317491
gugucaagugaucaacuuu

SEQ ID NO: 495146 - RNA, 19 nt, Artificial Sequence
  Description of Artificial Sequence: Synthetic oligonucleotide
  Antisense Strand to SEQ ID NO: 495145
aaaguugaucacuugacac

SEQ ID NO: 495147 - RNA, 19 nt, Artificial Sequence
  Description of Artificial Sequence: Synthetic oligonucleotide
  Sense strand starting at position 3932 of SEQ ID NO: 317491
ugaaguuauaucuggacug

SEQ ID NO: 495148 - RNA, 19 nt, Artificial Sequence
  Description of Artificial Sequence: Synthetic oligonucleotide
  Antisense Strand to SEQ ID NO: 495147
caguccagauauaacuuca

SEQ ID NO: 495149 - RNA, 19 nt, Artificial Sequence
  Description of Artificial Sequence: Synthetic oligonucleotide
  Sense strand starting at position 68 of SEQ ID NO: 317492
cacggaaaguggucuccaa

SEQ ID NO: 495150 - RNA, 19 nt, Artificial Sequence
  Description of Artificial Sequence: Synthetic oligonucleotide
  Antisense Strand to SEQ ID NO: 495149
uuggagaccacuuuccgug

SEQ ID NO: 495151 - RNA, 19 nt, Artificial Sequence
  Description of Artificial Sequence: Synthetic oligonucleotide
  Sense strand starting at position 117 of SEQ ID NO: 317492
ugaccaaugcaagguauua

SEQ ID NO: 495152 - RNA, 19 nt, Artificial Sequence
  Description of Artificial Sequence: Synthetic oligonucleotide
  Antisense Strand to SEQ ID NO: 495151
uaauaccuugcauugguca

SEQ ID NO: 495153 - RNA, 19 nt, Artificial Sequence
  Description of Artificial Sequence: Synthetic oligonucleotide
  Sense strand starting at position 190 of SEQ ID NO: 317492
uaugaagagccguauugac

SEQ ID NO: 495154 - RNA, 19 nt, Artificial Sequence
  Description of Artificial Sequence: Synthetic oligonucleotide
  Antisense Strand to SEQ ID NO: 495153
gucaauacggcucuucaua

SEQ ID NO: 495155 - RNA, 19 nt, Artificial Sequence
  Description of Artificial Sequence: Synthetic oligonucleotide
  Sense strand starting at position 224 of SEQ ID NO: 317492
uguauauacguacagcaaa

SEQ ID NO: 495156 - RNA, 19 nt, Artificial Sequence
  Description of Artificial Sequence: Synthetic oligonucleotide
  Antisense Strand to SEQ ID NO: 495155
uuugcuguacguauauaca

SEQ ID NO: 495157 - RNA, 19 nt, Artificial Sequence
  Description of Artificial Sequence: Synthetic oligonucleotide
  Sense strand starting at position 286 of SEQ ID NO: 317492
cagacugcuguggauaauu

SEQ ID NO: 495158 - RNA, 19 nt, Artificial Sequence
  Description of Artificial Sequence: Synthetic oligonucleotide
  Antisense Strand to SEQ ID NO: 495157
aauuauccacagcagucug

SEQ ID NO: 495159 - RNA, 19 nt, Artificial Sequence
  Description of Artificial Sequence: Synthetic oligonucleotide
  Sense strand starting at position 288 of SEQ ID NO: 317492
gacugcuguggauaauuau

SEQ ID NO: 495160 - RNA, 19 nt, Artificial Sequence
  Description of Artificial Sequence: Synthetic oligonucleotide
  Antisense Strand to SEQ ID NO: 495159
auaauuauccacagcaguc

SEQ ID NO: 495161 - RNA, 19 nt, Artificial Sequence
  Description of Artificial Sequence: Synthetic oligonucleotide
  Sense strand starting at position 516 of SEQ ID NO: 317492
acacguuugccagaucaag

SEQ ID NO: 495162 - RNA, 19 nt, Artificial Sequence
  Description of Artificial Sequence: Synthetic oligonucleotide
  Antisense Strand to SEQ ID NO: 495161
cuugaucuggcaaacgugu

SEQ ID NO: 495163 - RNA, 19 nt, Artificial Sequence
  Description of Artificial Sequence: Synthetic oligonucleotide
  Sense strand starting at position 631 of SEQ ID NO: 317492
uuugaaucuuguguuaaag

SEQ ID NO: 495164 - RNA, 19 nt, Artificial Sequence
  Description of Artificial Sequence: Synthetic oligonucleotide
  Antisense Strand to SEQ ID NO: 495163
cuuuaacacaagauucaaa

SEQ ID NO: 495165 - RNA, 19 nt, Artificial Sequence
  Description of Artificial Sequence: Synthetic oligonucleotide
  Sense strand starting at position 787 of SEQ ID NO: 317492
uauguugacggugacuuau

SEQ ID NO: 495166 - RNA, 19 nt, Artificial Sequence
  Description of Artificial Sequence: Synthetic oligonucleotide
  Antisense Strand to SEQ ID NO: 495165
auaagucaccgucaacaua

SEQ ID NO: 495167 - RNA, 19 nt, Artificial Sequence
  Description of Artificial Sequence: Synthetic oligonucleotide
  Sense strand starting at position 800 of SEQ ID NO: 317492
acuuauuauccugacgaug

SEQ ID NO: 495168 - RNA, 19 nt, Artificial Sequence
  Description of Artificial Sequence: Synthetic oligonucleotide
  Antisense Strand to SEQ ID NO: 495167
caucgucaggauaauaagu

SEQ ID NO: 495169 - RNA, 19 nt, Artificial Sequence
  Description of Artificial Sequence: Synthetic oligonucleotide
  Sense strand starting at position 805 of SEQ ID NO: 317492
uuauccugacgaugauaua

SEQ ID NO: 495170 - RNA, 19 nt, Artificial Sequence
  Description of Artificial Sequence: Synthetic oligonucleotide
  Antisense Strand to SEQ ID NO: 495169
uauaucaucgucaggauaa

SEQ ID NO: 495171 - RNA, 19 nt, Artificial Sequence
  Description of Artificial Sequence: Synthetic oligonucleotide
  Sense strand starting at position 912 of SEQ ID NO: 317492
caggaaacguuauuuacgu

SEQ ID NO: 495172 - RNA, 19 nt, Artificial Sequence
  Description of Artificial Sequence: Synthetic oligonucleotide
  Antisense Strand to SEQ ID NO: 495171
acguaaauaacguuuccug

SEQ ID NO: 495173 - RNA, 19 nt, Artificial Sequence
  Description of Artificial Sequence: Synthetic oligonucleotide
  Sense strand starting at position 917 of SEQ ID NO: 317492
aacguuauuuacgugcaau

SEQ ID NO: 495174 - RNA, 19 nt, Artificial Sequence
  Description of Artificial Sequence: Synthetic oligonucleotide
  Antisense Strand to SEQ ID NO: 495173
auugcacguaaauaacguu

SEQ ID NO: 495175 - RNA, 19 nt, Artificial Sequence
  Description of Artificial Sequence: Synthetic oligonucleotide
  Sense strand starting at position 920 of SEQ ID NO: 317492
guuauuuacgugcaauuac

SEQ ID NO: 495176 - RNA, 19 nt, Artificial Sequence
  Description of Artificial Sequence: Synthetic oligonucleotide
  Antisense Strand to SEQ ID NO: 495175
guaauugcacguaaauaac

SEQ ID NO: 495177 - RNA, 19 nt, Artificial Sequence
  Description of Artificial Sequence: Synthetic oligonucleotide
  Sense strand starting at position 929 of SEQ ID NO: 317492
gugcaauuacaggaccaua

SEQ ID NO: 495178 - RNA, 19 nt, Artificial Sequence
  Description of Artificial Sequence: Synthetic oligonucleotide
  Antisense Strand to SEQ ID NO: 495177
uaugguccuguaauugcac

SEQ ID NO: 495179 - RNA, 19 nt, Artificial Sequence
  Description of Artificial Sequence: Synthetic oligonucleotide
  Sense strand starting at position 1053 of SEQ ID NO: 317492
aucagaucguuguuagaag

SEQ ID NO: 495180 - RNA, 19 nt, Artificial Sequence
  Description of Artificial Sequence: Synthetic oligonucleotide
  Antisense Strand to SEQ ID NO: 495179
cuucuaacaacgaucugau

SEQ ID NO: 495181 - RNA, 19 nt, Artificial Sequence
  Description of Artificial Sequence: Synthetic oligonucleotide
  Sense strand starting at position 1163 of SEQ ID NO: 317492
auucgugugguugcucauu

SEQ ID NO: 495182 - RNA, 19 nt, Artificial Sequence
  Description of Artificial Sequence: Synthetic oligonucleotide
  Antisense Strand to SEQ ID NO: 495181
aaugagcaaccacacgaau

SEQ ID NO: 495183 - RNA, 19 nt, Artificial Sequence
  Description of Artificial Sequence: Synthetic oligonucleotide
  Sense strand starting at position 1168 of SEQ ID NO: 317492
ugugguugcucauuucuca

SEQ ID NO: 495184 - RNA, 19 nt, Artificial Sequence
  Description of Artificial Sequence: Synthetic oligonucleotide
  Antisense Strand to SEQ ID NO: 495183
ugagaaaugagcaaccaca

SEQ ID NO: 495185 - RNA, 19 nt, Artificial Sequence
  Description of Artificial Sequence: Synthetic oligonucleotide
  Sense strand starting at position 1292 of SEQ ID NO: 317492
uucccauuccucgaaagga

SEQ ID NO: 495186 - RNA, 19 nt, Artificial Sequence
  Description of Artificial Sequence: Synthetic oligonucleotide
  Antisense Strand to SEQ ID NO: 495185
uccuuucgaggaaugggaa

SEQ ID NO: 495187 - RNA, 19 nt, Artificial Sequence
  Description of Artificial Sequence: Synthetic oligonucleotide
  Sense strand starting at position 1308 of SEQ ID NO: 317492
ggauuaaauguuuaucucu

SEQ ID NO: 495188 - RNA, 19 nt, Artificial Sequence
  Description of Artificial Sequence: Synthetic oligonucleotide
  Antisense Strand to SEQ ID NO: 495187
agagauaaacauuuaaucc

SEQ ID NO: 495189 - RNA, 19 nt, Artificial Sequence
  Description of Artificial Sequence: Synthetic oligonucleotide
  Sense strand starting at position 2436 of SEQ ID NO: 317492
ggcuuauguggcuagagaa

SEQ ID NO: 495190 - RNA, 19 nt, Artificial Sequence
  Description of Artificial Sequence: Synthetic oligonucleotide
  Antisense Strand to SEQ ID NO: 495189
uucucuagccacauaagcc

SEQ ID NO: 495191 - RNA, 19 nt, Artificial Sequence
  Description of Artificial Sequence: Synthetic oligonucleotide
  Sense strand starting at position 2490 of SEQ ID NO: 317492
guggacuucgcugaaugga

SEQ ID NO: 495192 - RNA, 19 nt, Artificial Sequence
  Description of Artificial Sequence: Synthetic oligonucleotide
  Antisense Strand to SEQ ID NO: 495191
uccauucagcgaaguccac

SEQ ID NO: 495193 - RNA, 19 nt, Artificial Sequence
  Description of Artificial Sequence: Synthetic oligonucleotide
  Sense strand starting at position 2777 of SEQ ID NO: 317492
acagaauagugccuaagaa

SEQ ID NO: 495194 - RNA, 19 nt, Artificial Sequence
  Description of Artificial Sequence: Synthetic oligonucleotide
  Antisense Strand to SEQ ID NO: 495193
uucuuaggcacuauucugu

SEQ ID NO: 495195 - RNA, 19 nt, Artificial Sequence
  Description of Artificial Sequence: Synthetic oligonucleotide
  Sense strand starting at position 2855 of SEQ ID NO: 317492
gggaaucugaauuggguuu

SEQ ID NO: 495196 - RNA, 19 nt, Artificial Sequence
  Description of Artificial Sequence: Synthetic oligonucleotide
  Antisense Strand to SEQ ID NO: 495195
aaacccaauucagauuccc

SEQ ID NO: 495197 - RNA, 19 nt, Artificial Sequence
  Description of Artificial Sequence: Synthetic oligonucleotide
  Sense strand starting at position 2916 of SEQ ID NO: 317492
agaacagguggcuggaaau

SEQ ID NO: 495198 - RNA, 19 nt, Artificial Sequence
  Description of Artificial Sequence: Synthetic oligonucleotide
  Antisense Strand to SEQ ID NO: 495197
auuuccagccaccuguucu

SEQ ID NO: 495199 - RNA, 19 nt, Artificial Sequence
  Description of Artificial Sequence: Synthetic oligonucleotide
  Sense strand starting at position 3070 of SEQ ID NO: 317492
uauaaaugucuaugggaau

SEQ ID NO: 495200 - RNA, 19 nt, Artificial Sequence
  Description of Artificial Sequence: Synthetic oligonucleotide
  Antisense Strand to SEQ ID NO: 495199
auucccauagacauuuaua

SEQ ID NO: 495201 - RNA, 19 nt, Artificial Sequence
  Description of Artificial Sequence: Synthetic oligonucleotide
  Sense strand starting at position 3208 of SEQ ID NO: 317492
gagagccucuaguuauaag

SEQ ID NO: 495202 - RNA, 19 nt, Artificial Sequence
  Description of Artificial Sequence: Synthetic oligonucleotide
  Antisense Strand to SEQ ID NO: 495201
cuuauaacuagaggcucuc

SEQ ID NO: 495203 - RNA, 19 nt, Artificial Sequence
  Description of Artificial Sequence: Synthetic oligonucleotide
  Sense strand starting at position 3292 of SEQ ID NO: 317492
uuggcuagucaagaagcua

SEQ ID NO: 495204 - RNA, 19 nt, Artificial Sequence
  Description of Artificial Sequence: Synthetic oligonucleotide
  Antisense Strand to SEQ ID NO: 495203
uagcuucuugacuagccaa

SEQ ID NO: 495205 - RNA, 19 nt, Artificial Sequence
  Description of Artificial Sequence: Synthetic oligonucleotide
  Sense strand starting at position 3446 of SEQ ID NO: 317492
gaagcuaugacacgggaua

SEQ ID NO: 495206 - RNA, 19 nt, Artificial Sequence
  Description of Artificial Sequence: Synthetic oligonucleotide
  Antisense Strand to SEQ ID NO: 495205
uaucccgugucauagcuuc

SEQ ID NO: 495207 - RNA, 19 nt, Artificial Sequence
  Description of Artificial Sequence: Synthetic oligonucleotide
  Sense strand starting at position 3447 of SEQ ID NO: 317492
aagcuaugacacgggauaa

SEQ ID NO: 495208 - RNA, 19 nt, Artificial Sequence
  Description of Artificial Sequence: Synthetic oligonucleotide
  Antisense Strand to SEQ ID NO: 495207
uuaucccgugucauagcuu

SEQ ID NO: 495209 - RNA, 19 nt, Artificial Sequence
  Description of Artificial Sequence: Synthetic oligonucleotide
  Sense strand starting at position 3584 of SEQ ID NO: 317492
gcagcagauuuccuuguua

SEQ ID NO: 495210 - RNA, 19 nt, Artificial Sequence
  Description of Artificial Sequence: Synthetic oligonucleotide
  Antisense Strand to SEQ ID NO: 495209
uaacaaggaaaucugcugc

SEQ ID NO: 495211 - RNA, 19 nt, Artificial Sequence
  Description of Artificial Sequence: Synthetic oligonucleotide
  Sense strand starting at position 3700 of SEQ ID NO: 317492
agaagaaaggucuguccua

SEQ ID NO: 495212 - RNA, 19 nt, Artificial Sequence
  Description of Artificial Sequence: Synthetic oligonucleotide
  Antisense Strand to SEQ ID NO: 495211
uaggacagaccuuucuucu

SEQ ID NO: 495213 - RNA, 19 nt, Artificial Sequence
  Description of Artificial Sequence: Synthetic oligonucleotide
  Sense strand starting at position 3701 of SEQ ID NO: 317492
gaagaaaggucuguccuaa

SEQ ID NO: 495214 - RNA, 19 nt, Artificial Sequence
  Description of Artificial Sequence: Synthetic oligonucleotide
  Antisense Strand to SEQ ID NO: 495213
uuaggacagaccuuucuuc

SEQ ID NO: 495215 - RNA, 19 nt, Artificial Sequence
  Description of Artificial Sequence: Synthetic oligonucleotide
  Sense strand starting at position 3757 of SEQ ID NO: 317492
ugcaauugaugacugaguu

SEQ ID NO: 495216 - RNA, 19 nt, Artificial Sequence
  Description of Artificial Sequence: Synthetic oligonucleotide
  Antisense Strand to SEQ ID NO: 495215
aacucagucaucaauugca

SEQ ID NO: 495217 - RNA, 19 nt, Artificial Sequence
  Description of Artificial Sequence: Synthetic oligonucleotide
  Sense strand starting at position 3758 of SEQ ID NO: 317492
gcaauugaugacugaguug

SEQ ID NO: 495218 - RNA, 19 nt, Artificial Sequence
  Description of Artificial Sequence: Synthetic oligonucleotide
  Antisense Strand to SEQ ID NO: 495217
caacucagucaucaauugc

SEQ ID NO: 495219 - RNA, 19 nt, Artificial Sequence
  Description of Artificial Sequence: Synthetic oligonucleotide
  Sense strand starting at position 3761 of SEQ ID NO: 317492
auugaugacugaguugauc

SEQ ID NO: 495220 - RNA, 19 nt, Artificial Sequence
  Description of Artificial Sequence: Synthetic oligonucleotide
  Antisense Strand to SEQ ID NO: 495219
gaucaacucagucaucaau

SEQ ID NO: 495221 - RNA, 19 nt, Artificial Sequence
  Description of Artificial Sequence: Synthetic oligonucleotide
  Sense strand starting at position 3773 of SEQ ID NO: 317492
guugaucucuaaguggauu

SEQ ID NO: 495222 - RNA, 19 nt, Artificial Sequence
  Description of Artificial Sequence: Synthetic oligonucleotide
  Antisense Strand to SEQ ID NO: 495221
aauccacuuagagaucaac

SEQ ID NO: 495223 - RNA, 19 nt, Artificial Sequence
  Description of Artificial Sequence: Synthetic oligonucleotide
  Sense strand starting at position 3959 of SEQ ID NO: 317492
cuguauauucuauaggguu

SEQ ID NO: 495224 - RNA, 19 nt, Artificial Sequence
  Description of Artificial Sequence: Synthetic oligonucleotide
  Antisense Strand to SEQ ID NO: 495223
aacccuauagaauauacag

SEQ ID NO: 495225 - RNA, 19 nt, Artificial Sequence
  Description of Artificial Sequence: Synthetic oligonucleotide
  Sense strand starting at position 3965 of SEQ ID NO: 317492
auucuauaggguuggacaa

SEQ ID NO: 495226 - RNA, 19 nt, Artificial Sequence
  Description of Artificial Sequence: Synthetic oligonucleotide
  Antisense Strand to SEQ ID NO: 495225
uuguccaacccuauagaau

SEQ ID NO: 495227 - RNA, 19 nt, Artificial Sequence
  Description of Artificial Sequence: Synthetic oligonucleotide
  Sense strand starting at position 3966 of SEQ ID NO: 317492
uucuauaggguuggacaaa

SEQ ID NO: 495228 - RNA, 19 nt, Artificial Sequence
  Description of Artificial Sequence: Synthetic oligonucleotide
  Antisense Strand to SEQ ID NO: 495227
uuuguccaacccuauagaa

SEQ ID NO: 495229 - RNA, 19 nt, Artificial Sequence
  Description of Artificial Sequence: Synthetic oligonucleotide
  Sense strand starting at position 33 of SEQ ID NO: 317493
agugcuaugaggugacuga

SEQ ID NO: 495230 - RNA, 19 nt, Artificial Sequence
  Description of Artificial Sequence: Synthetic oligonucleotide
  Antisense Strand to SEQ ID NO: 495229
ucagucaccucauagcacu

SEQ ID NO: 495231 - RNA, 19 nt, Artificial Sequence
  Description of Artificial Sequence: Synthetic oligonucleotide
  Sense strand starting at position 61 of SEQ ID NO: 317493
guagcauaaauggagcaua

SEQ ID NO: 495232 - RNA, 19 nt, Artificial Sequence
  Description of Artificial Sequence: Synthetic oligonucleotide
  Antisense Strand to SEQ ID NO: 495231
uaugcuccauuuaugcuac

SEQ ID NO: 495233 - RNA, 19 nt, Artificial Sequence
  Description of Artificial Sequence: Synthetic oligonucleotide
  Sense strand starting at position 64 of SEQ ID NO: 317493
gcauaaauggagcauauca

SEQ ID NO: 495234 - RNA, 19 nt, Artificial Sequence
  Description of Artificial Sequence: Synthetic oligonucleotide
  Antisense Strand to SEQ ID NO: 495233
ugauaugcuccauuuaugc

SEQ ID NO: 495235 - RNA, 19 nt, Artificial Sequence
  Description of Artificial Sequence: Synthetic oligonucleotide
  Sense strand starting at position 72 of SEQ ID NO: 317493
ggagcauaucaccacuagu

SEQ ID NO: 495236 - RNA, 19 nt, Artificial Sequence
  Description of Artificial Sequence: Synthetic oligonucleotide
  Antisense Strand to SEQ ID NO: 495235
acuaguggugauaugcucc

SEQ ID NO: 495237 - RNA, 19 nt, Artificial Sequence
  Description of Artificial Sequence: Synthetic oligonucleotide
  Sense strand starting at position 75 of SEQ ID NO: 317493
gcauaucaccacuaguuau

SEQ ID NO: 495238 - RNA, 19 nt, Artificial Sequence
  Description of Artificial Sequence: Synthetic oligonucleotide
  Antisense Strand to SEQ ID NO: 495237
auaacuaguggugauaugc

SEQ ID NO: 495239 - RNA, 19 nt, Artificial Sequence
  Description of Artificial Sequence: Synthetic oligonucleotide
  Sense strand starting at position 162 of SEQ ID NO: 317493
aagggaaauugcucagguu

SEQ ID NO: 495240 - RNA, 19 nt, Artificial Sequence
  Description of Artificial Sequence: Synthetic oligonucleotide
  Antisense Strand to SEQ ID NO: 495239
aaccugagcaauuucccuu

SEQ ID NO: 495241 - RNA, 19 nt, Artificial Sequence
  Description of Artificial Sequence: Synthetic oligonucleotide
  Sense strand starting at position 163 of SEQ ID NO: 317493
agggaaauugcucagguuc

SEQ ID NO: 495242 - RNA, 19 nt, Artificial Sequence
  Description of Artificial Sequence: Synthetic oligonucleotide
  Antisense Strand to SEQ ID NO: 495241
gaaccugagcaauuucccu

SEQ ID NO: 495243 - RNA, 19 nt, Artificial Sequence
  Description of Artificial Sequence: Synthetic oligonucleotide
  Sense strand starting at position 176 of SEQ ID NO: 317493
agguucaggugaguaagaa

SEQ ID NO: 495244 - RNA, 19 nt, Artificial Sequence
  Description of Artificial Sequence: Synthetic oligonucleotide
  Antisense Strand to SEQ ID NO: 495243
uucuuacucaccugaaccu

SEQ ID NO: 495245 - RNA, 19 nt, Artificial Sequence
  Description of Artificial Sequence: Synthetic oligonucleotide
  Sense strand starting at position 619 of SEQ ID NO: 317493
ugccuuuaucaggaaacac

SEQ ID NO: 495246 - RNA, 19 nt, Artificial Sequence
  Description of Artificial Sequence: Synthetic oligonucleotide
  Antisense Strand to SEQ ID NO: 495245
guguuuccugauaaaggca

SEQ ID NO: 495247 - RNA, 19 nt, Artificial Sequence
  Description of Artificial Sequence: Synthetic oligonucleotide
  Sense strand starting at position 785 of SEQ ID NO: 317493
auuauacaucaucacgagu

SEQ ID NO: 495248 - RNA, 19 nt, Artificial Sequence
  Description of Artificial Sequence: Synthetic oligonucleotide
  Antisense Strand to SEQ ID NO: 495247
acucgugaugauguauaau

SEQ ID NO: 495249 - RNA, 19 nt, Artificial Sequence
  Description of Artificial Sequence: Synthetic oligonucleotide
  Sense strand starting at position 1013 of SEQ ID NO: 317493
acucucucauggguagaua

SEQ ID NO: 495250 - RNA, 19 nt, Artificial Sequence
  Description of Artificial Sequence: Synthetic oligonucleotide
  Antisense Strand to SEQ ID NO: 495249
uaucuacccaugagagagu

SEQ ID NO: 495251 - RNA, 19 nt, Artificial Sequence
  Description of Artificial Sequence: Synthetic oligonucleotide
  Sense strand starting at position 1026 of SEQ ID NO: 317493
uagauagguuguuuaguaa

SEQ ID NO: 495252 - RNA, 19 nt, Artificial Sequence
  Description of Artificial Sequence: Synthetic oligonucleotide
  Antisense Strand to SEQ ID NO: 495251
uuacuaaacaaccuaucua

SEQ ID NO: 495253 - RNA, 19 nt, Artificial Sequence
  Description of Artificial Sequence: Synthetic oligonucleotide
  Sense strand starting at position 1074 of SEQ ID NO: 317493
gcugacauugauggcuaaa

SEQ ID NO: 495254 - RNA, 19 nt, Artificial Sequence
  Description of Artificial Sequence: Synthetic oligonucleotide
  Antisense Strand to SEQ ID NO: 495253
uuuagccaucaaugucagc

SEQ ID NO: 495255 - RNA, 19 nt, Artificial Sequence
  Description of Artificial Sequence: Synthetic oligonucleotide
  Sense strand starting at position 1076 of SEQ ID NO: 317493
ugacauugauggcuaaauc

SEQ ID NO: 495256 - RNA, 19 nt, Artificial Sequence
  Description of Artificial Sequence: Synthetic oligonucleotide
  Antisense Strand to SEQ ID NO: 495255
gauuuagccaucaauguca

SEQ ID NO: 495257 - RNA, 19 nt, Artificial Sequence
  Description of Artificial Sequence: Synthetic oligonucleotide
  Sense strand starting at position 1271 of SEQ ID NO: 317493
gcuccaagucauggaauaa

SEQ ID NO: 495258 - RNA, 19 nt, Artificial Sequence
  Description of Artificial Sequence: Synthetic oligonucleotide
  Antisense Strand to SEQ ID NO: 495257
uuauuccaugacuuggagc

SEQ ID NO: 495259 - RNA, 19 nt, Artificial Sequence
  Description of Artificial Sequence: Synthetic oligonucleotide
  Sense strand starting at position 1475 of SEQ ID NO: 317493
ucucaaauuuacgagauac

SEQ ID NO: 495260 - RNA, 19 nt, Artificial Sequence
  Description of Artificial Sequence: Synthetic oligonucleotide
  Antisense Strand to SEQ ID NO: 495259
guaucucguaaauuugaga

SEQ ID NO: 495261 - RNA, 19 nt, Artificial Sequence
  Description of Artificial Sequence: Synthetic oligonucleotide
  Sense strand starting at position 1544 of SEQ ID NO: 317493
ccuaguucucaacaggacu

SEQ ID NO: 495262 - RNA, 19 nt, Artificial Sequence
  Description of Artificial Sequence: Synthetic oligonucleotide
  Antisense Strand to SEQ ID NO: 495261
aguccuguugagaacuagg

SEQ ID NO: 495263 - RNA, 19 nt, Artificial Sequence
  Description of Artificial Sequence: Synthetic oligonucleotide
  Sense strand starting at position 1566 of SEQ ID NO: 317493
ggacuuauccuaugccuag

SEQ ID NO: 495264 - RNA, 19 nt, Artificial Sequence
  Description of Artificial Sequence: Synthetic oligonucleotide
  Antisense Strand to SEQ ID NO: 495263
cuaggcauaggauaagucc

SEQ ID NO: 495265 - RNA, 19 nt, Artificial Sequence
  Description of Artificial Sequence: Synthetic oligonucleotide
  Sense strand starting at position 2575 of SEQ ID NO: 317493
uuaaucucggcccaucauu

SEQ ID NO: 495266 - RNA, 19 nt, Artificial Sequence
  Description of Artificial Sequence: Synthetic oligonucleotide
  Antisense Strand to SEQ ID NO: 495265
aaugaugggccgagauuaa

SEQ ID NO: 495267 - RNA, 19 nt, Artificial Sequence
  Description of Artificial Sequence: Synthetic oligonucleotide
  Sense strand starting at position 2615 of SEQ ID NO: 317493
agugcaaggaagugaaauu

SEQ ID NO: 495268 - RNA, 19 nt, Artificial Sequence
  Description of Artificial Sequence: Synthetic oligonucleotide
  Antisense Strand to SEQ ID NO: 495267
aauuucacuuccuugcacu

SEQ ID NO: 495269 - RNA, 19 nt, Artificial Sequence
  Description of Artificial Sequence: Synthetic oligonucleotide
  Sense strand starting at position 2700 of SEQ ID NO: 317493
uacagaagugcuggaaagu

SEQ ID NO: 495270 - RNA, 19 nt, Artificial Sequence
  Description of Artificial Sequence: Synthetic oligonucleotide
  Antisense Strand to SEQ ID NO: 495269
acuuuccagcacuucugua

SEQ ID NO: 495271 - RNA, 19 nt, Artificial Sequence
  Description of Artificial Sequence: Synthetic oligonucleotide
  Sense strand starting at position 2701 of SEQ ID NO: 317493
acagaagugcuggaaaguu

SEQ ID NO: 495272 - RNA, 19 nt, Artificial Sequence
  Description of Artificial Sequence: Synthetic oligonucleotide
  Antisense Strand to SEQ ID NO: 495271
aacuuuccagcacuucugu

SEQ ID NO: 495273 - RNA, 19 nt, Artificial Sequence
  Description of Artificial Sequence: Synthetic oligonucleotide
  Sense strand starting at position 2918 of SEQ ID NO: 317493
caaugagcacugugacuau

SEQ ID NO: 495274 - RNA, 19 nt, Artificial Sequence
  Description of Artificial Sequence: Synthetic oligonucleotide
  Antisense Strand to SEQ ID NO: 495273
auagucacagugcucauug

SEQ ID NO: 495275 - RNA, 19 nt, Artificial Sequence
  Description of Artificial Sequence: Synthetic oligonucleotide
  Sense strand starting at position 2982 of SEQ ID NO: 317493
uucuauucucaugaguuua

SEQ ID NO: 495276 - RNA, 19 nt, Artificial Sequence
  Description of Artificial Sequence: Synthetic oligonucleotide
  Antisense Strand to SEQ ID NO: 495275
uaaacucaugagaauagaa

SEQ ID NO: 495277 - RNA, 19 nt, Artificial Sequence
  Description of Artificial Sequence: Synthetic oligonucleotide
  Sense strand starting at position 2984 of SEQ ID NO: 317493
cuauucucaugaguuuauu

SEQ ID NO: 495278 - RNA, 19 nt, Artificial Sequence
  Description of Artificial Sequence: Synthetic oligonucleotide
  Antisense Strand to SEQ ID NO: 495277
aauaaacucaugagaauag

SEQ ID NO: 495279 - RNA, 19 nt, Artificial Sequence
  Description of Artificial Sequence: Synthetic oligonucleotide
  Sense strand starting at position 3201 of SEQ ID NO: 317493
acuagaaguucuuugacua

SEQ ID NO: 495280 - RNA, 19 nt, Artificial Sequence
  Description of Artificial Sequence: Synthetic oligonucleotide
  Antisense Strand to SEQ ID NO: 495279
uagucaaagaacuucuagu

SEQ ID NO: 495281 - RNA, 19 nt, Artificial Sequence
  Description of Artificial Sequence: Synthetic oligonucleotide
  Sense strand starting at position 3202 of SEQ ID NO: 317493
cuagaaguucuuugacuaa

SEQ ID NO: 495282 - RNA, 19 nt, Artificial Sequence
  Description of Artificial Sequence: Synthetic oligonucleotide
  Antisense Strand to SEQ ID NO: 495281
uuagucaaagaacuucuag

SEQ ID NO: 495283 - RNA, 19 nt, Artificial Sequence
  Description of Artificial Sequence: Synthetic oligonucleotide
  Sense strand starting at position 3233 of SEQ ID NO: 317493
uucuguuuagcauagaauu

SEQ ID NO: 495284 - RNA, 19 nt, Artificial Sequence
  Description of Artificial Sequence: Synthetic oligonucleotide
  Antisense Strand to SEQ ID NO: 495283
aauucuaugcuaaacagaa

SEQ ID NO: 495285 - RNA, 19 nt, Artificial Sequence
  Description of Artificial Sequence: Synthetic oligonucleotide
  Sense strand starting at position 3260 of SEQ ID NO: 317493
uagagaacuuuguuugcaa

SEQ ID NO: 495286 - RNA, 19 nt, Artificial Sequence
  Description of Artificial Sequence: Synthetic oligonucleotide
  Antisense Strand to SEQ ID NO: 495285
uugcaaacaaaguucucua

SEQ ID NO: 495287 - RNA, 19 nt, Artificial Sequence
  Description of Artificial Sequence: Synthetic oligonucleotide
  Sense strand starting at position 3261 of SEQ ID NO: 317493
agagaacuuuguuugcaag

SEQ ID NO: 495288 - RNA, 19 nt, Artificial Sequence
  Description of Artificial Sequence: Synthetic oligonucleotide
  Antisense Strand to SEQ ID NO: 495287
cuugcaaacaaaguucucu

SEQ ID NO: 495289 - RNA, 19 nt, Artificial Sequence
  Description of Artificial Sequence: Synthetic oligonucleotide
  Sense strand starting at position 3512 of SEQ ID NO: 317493
accaaacuugccugaaaga

SEQ ID NO: 495290 - RNA, 19 nt, Artificial Sequence
  Description of Artificial Sequence: Synthetic oligonucleotide
  Antisense Strand to SEQ ID NO: 495289
ucuuucaggcaaguuuggu

SEQ ID NO: 495291 - RNA, 19 nt, Artificial Sequence
  Description of Artificial Sequence: Synthetic oligonucleotide
  Sense strand starting at position 3525 of SEQ ID NO: 317493
gaaagauugugaguaccuu

SEQ ID NO: 495292 - RNA, 19 nt, Artificial Sequence
  Description of Artificial Sequence: Synthetic oligonucleotide
  Antisense Strand to SEQ ID NO: 495291
aagguacucacaaucuuuc

SEQ ID NO: 495293 - RNA, 19 nt, Artificial Sequence
  Description of Artificial Sequence: Synthetic oligonucleotide
  Sense strand starting at position 3529 of SEQ ID NO: 317493
gauugugaguaccuugaaa

SEQ ID NO: 495294 - RNA, 19 nt, Artificial Sequence
  Description of Artificial Sequence: Synthetic oligonucleotide
  Antisense Strand to SEQ ID NO: 495293
uuucaagguacucacaauc

SEQ ID NO: 495295 - RNA, 19 nt, Artificial Sequence
  Description of Artificial Sequence: Synthetic oligonucleotide
  Sense strand starting at position 3586 of SEQ ID NO: 317493
accguaugcaaggauuagu

SEQ ID NO: 495296 - RNA, 19 nt, Artificial Sequence
  Description of Artificial Sequence: Synthetic oligonucleotide
  Antisense Strand to SEQ ID NO: 495295
acuaauccuugcauacggu

SEQ ID NO: 495297 - RNA, 19 nt, Artificial Sequence
  Description of Artificial Sequence: Synthetic oligonucleotide
  Sense strand starting at position 3589 of SEQ ID NO: 317493
guaugcaaggauuaguaua

SEQ ID NO: 495298 - RNA, 19 nt, Artificial Sequence
  Description of Artificial Sequence: Synthetic oligonucleotide
  Antisense Strand to SEQ ID NO: 495297
uauacuaauccuugcauac

SEQ ID NO: 495299 - RNA, 19 nt, Artificial Sequence
  Description of Artificial Sequence: Synthetic oligonucleotide
  Sense strand starting at position 3591 of SEQ ID NO: 317493
augcaaggauuaguauaca

SEQ ID NO: 495300 - RNA, 19 nt, Artificial Sequence
  Description of Artificial Sequence: Synthetic oligonucleotide
  Antisense Strand to SEQ ID NO: 495299
uguauacuaauccuugcau

SEQ ID NO: 495301 - RNA, 19 nt, Artificial Sequence
  Description of Artificial Sequence: Synthetic oligonucleotide
  Sense strand starting at position 3742 of SEQ ID NO: 317493
aggugacacaacugauagu

SEQ ID NO: 495302 - RNA, 19 nt, Artificial Sequence
  Description of Artificial Sequence: Synthetic oligonucleotide
  Antisense Strand to SEQ ID NO: 495301
acuaucaguugugucaccu

SEQ ID NO: 495303 - RNA, 19 nt, Artificial Sequence
  Description of Artificial Sequence: Synthetic oligonucleotide
  Sense strand starting at position 3806 of SEQ ID NO: 317493
agucuugcucuggagaaau

SEQ ID NO: 495304 - RNA, 19 nt, Artificial Sequence
  Description of Artificial Sequence: Synthetic oligonucleotide
  Antisense Strand to SEQ ID NO: 495303
auuucuccagagcaagacu

SEQ ID NO: 495305 - RNA, 19 nt, Artificial Sequence
  Description of Artificial Sequence: Synthetic oligonucleotide
  Sense strand starting at position 3835 of SEQ ID NO: 317493
uaggucagcucccuaaaga

SEQ ID NO: 495306 - RNA, 19 nt, Artificial Sequence
  Description of Artificial Sequence: Synthetic oligonucleotide
  Antisense Strand to SEQ ID NO: 495305
ucuuuagggagcugaccua

SEQ ID NO: 495307 - RNA, 19 nt, Artificial Sequence
  Description of Artificial Sequence: Synthetic oligonucleotide
  Sense strand starting at position 3901 of SEQ ID NO: 317493
ccauaauuguucucaaagu

SEQ ID NO: 495308 - RNA, 19 nt, Artificial Sequence
  Description of Artificial Sequence: Synthetic oligonucleotide
  Antisense Strand to SEQ ID NO: 495307
acuuugagaacaauuaugg

SEQ ID NO: 495309 - RNA, 19 nt, Artificial Sequence
  Description of Artificial Sequence: Synthetic oligonucleotide
  Sense strand starting at position 48 of SEQ ID NO: 317494
cugagucuuagagguaaau

SEQ ID NO: 495310 - RNA, 19 nt, Artificial Sequence
  Description of Artificial Sequence: Synthetic oligonucleotide
  Antisense Strand to SEQ ID NO: 495309
auuuaccucuaagacucag

SEQ ID NO: 495311 - RNA, 19 nt, Artificial Sequence
  Description of Artificial Sequence: Synthetic oligonucleotide
  Sense strand starting at position 93 of SEQ ID NO: 317494
gggacugaauagucuucca

SEQ ID NO: 495312 - RNA, 19 nt, Artificial Sequence
  Description of Artificial Sequence: Synthetic oligonucleotide
  Antisense Strand to SEQ ID NO: 495311
uggaagacuauucaguccc

SEQ ID NO: 495313 - RNA, 19 nt, Artificial Sequence
  Description of Artificial Sequence: Synthetic oligonucleotide
  Sense strand starting at position 96 of SEQ ID NO: 317494
acugaauagucuuccaaag

SEQ ID NO: 495314 - RNA, 19 nt, Artificial Sequence
  Description of Artificial Sequence: Synthetic oligonucleotide
  Antisense Strand to SEQ ID NO: 495313
cuuuggaagacuauucagu

SEQ ID NO: 495315 - RNA, 19 nt, Artificial Sequence
  Description of Artificial Sequence: Synthetic oligonucleotide
  Sense strand starting at position 219 of SEQ ID NO: 317494
ucugauuucguccagcauu

SEQ ID NO: 495316 - RNA, 19 nt, Artificial Sequence
  Description of Artificial Sequence: Synthetic oligonucleotide
  Antisense Strand to SEQ ID NO: 495315
aaugcuggacgaaaucaga

SEQ ID NO: 495317 - RNA, 19 nt, Artificial Sequence
  Description of Artificial Sequence: Synthetic oligonucleotide
  Sense strand starting at position 722 of SEQ ID NO: 317494
gcgucugacaaccauauga

SEQ ID NO: 495318 - RNA, 19 nt, Artificial Sequence
  Description of Artificial Sequence: Synthetic oligonucleotide
  Antisense Strand to SEQ ID NO: 495317
ucauaugguugucagacgc

SEQ ID NO: 495319 - RNA, 19 nt, Artificial Sequence
  Description of Artificial Sequence: Synthetic oligonucleotide
  Sense strand starting at position 724 of SEQ ID NO: 317494
gucugacaaccauaugagu

SEQ ID NO: 495320 - RNA, 19 nt, Artificial Sequence
  Description of Artificial Sequence: Synthetic oligonucleotide
  Antisense Strand to SEQ ID NO: 495319
acucauaugguugucagac

SEQ ID NO: 495321 - RNA, 19 nt, Artificial Sequence
  Description of Artificial Sequence: Synthetic oligonucleotide
  Sense strand starting at position 776 of SEQ ID NO: 317494
uuucuuauuggcuagauaa

SEQ ID NO: 495322 - RNA, 19 nt, Artificial Sequence
  Description of Artificial Sequence: Synthetic oligonucleotide
  Antisense Strand to SEQ ID NO: 495321
uuaucuagccaauaagaaa

SEQ ID NO: 495323 - RNA, 19 nt, Artificial Sequence
  Description of Artificial Sequence: Synthetic oligonucleotide
  Sense strand starting at position 815 of SEQ ID NO: 317494
ccaguuuguagugaagauu

SEQ ID NO: 495324 - RNA, 19 nt, Artificial Sequence
  Description of Artificial Sequence: Synthetic oligonucleotide
  Antisense Strand to SEQ ID NO: 495323
aaucuucacuacaaacugg

SEQ ID NO: 495325 - RNA, 19 nt, Artificial Sequence
  Description of Artificial Sequence: Synthetic oligonucleotide
  Sense strand starting at position 934 of SEQ ID NO: 317494
acggcugccuucuuauuua

SEQ ID NO: 495326 - RNA, 19 nt, Artificial Sequence
  Description of Artificial Sequence: Synthetic oligonucleotide
  Antisense Strand to SEQ ID NO: 495325
uaaauaagaaggcagccgu

SEQ ID NO: 495327 - RNA, 19 nt, Artificial Sequence
  Description of Artificial Sequence: Synthetic oligonucleotide
  Sense strand starting at position 937 of SEQ ID NO: 317494
gcugccuucuuauuuagaa

SEQ ID NO: 495328 - RNA, 19 nt, Artificial Sequence
  Description of Artificial Sequence: Synthetic oligonucleotide
  Antisense Strand to SEQ ID NO: 495327
uucuaaauaagaaggcagc

SEQ ID NO: 495329 - RNA, 19 nt, Artificial Sequence
  Description of Artificial Sequence: Synthetic oligonucleotide
  Sense strand starting at position 950 of SEQ ID NO: 317494
uuagaagacuauucugcuu

SEQ ID NO: 495330 - RNA, 19 nt, Artificial Sequence
  Description of Artificial Sequence: Synthetic oligonucleotide
  Antisense Strand to SEQ ID NO: 495329
aagcagaauagucuucuaa

SEQ ID NO: 495331 - RNA, 19 nt, Artificial Sequence
  Description of Artificial Sequence: Synthetic oligonucleotide
  Sense strand starting at position 1057 of SEQ ID NO: 317494
agggaaucuuucucuguuc

SEQ ID NO: 495332 - RNA, 19 nt, Artificial Sequence
  Description of Artificial Sequence: Synthetic oligonucleotide
  Antisense Strand to SEQ ID NO: 495331
gaacagagaaagauucccu

SEQ ID NO: 495333 - RNA, 19 nt, Artificial Sequence
  Description of Artificial Sequence: Synthetic oligonucleotide
  Sense strand starting at position 1261 of SEQ ID NO: 317494
aggcucugacugcagauaa

SEQ ID NO: 495334 - RNA, 19 nt, Artificial Sequence
  Description of Artificial Sequence: Synthetic oligonucleotide
  Antisense Strand to SEQ ID NO: 495333
uuaucugcagucagagccu

SEQ ID NO: 495335 - RNA, 19 nt, Artificial Sequence
  Description of Artificial Sequence: Synthetic oligonucleotide
  Sense strand starting at position 1309 of SEQ ID NO: 317494
ugggaaagguccucgauaa

SEQ ID NO: 495336 - RNA, 19 nt, Artificial Sequence
  Description of Artificial Sequence: Synthetic oligonucleotide
  Antisense Strand to SEQ ID NO: 495335
uuaucgaggaccuuuccca

SEQ ID NO: 495337 - RNA, 19 nt, Artificial Sequence
  Description of Artificial Sequence: Synthetic oligonucleotide
  Sense strand starting at position 1310 of SEQ ID NO: 317494
gggaaagguccucgauaac

SEQ ID NO: 495338 - RNA, 19 nt, Artificial Sequence
  Description of Artificial Sequence: Synthetic oligonucleotide
  Antisense Strand to SEQ ID NO: 495337
guuaucgaggaccuuuccc

SEQ ID NO: 495339 - RNA, 19 nt, Artificial Sequence
  Description of Artificial Sequence: Synthetic oligonucleotide
  Sense strand starting at position 1313 of SEQ ID NO: 317494
aaagguccucgauaacgga

SEQ ID NO: 495340 - RNA, 19 nt, Artificial Sequence
  Description of Artificial Sequence: Synthetic oligonucleotide
  Antisense Strand to SEQ ID NO: 495339
uccguuaucgaggaccuuu

SEQ ID NO: 495341 - RNA, 19 nt, Artificial Sequence
  Description of Artificial Sequence: Synthetic oligonucleotide
  Sense strand starting at position 1371 of SEQ ID NO: 317494
aaagguuaagucuauaugu

SEQ ID NO: 495342 - RNA, 19 nt, Artificial Sequence
  Description of Artificial Sequence: Synthetic oligonucleotide
  Antisense Strand to SEQ ID NO: 495341
acauauagacuuaaccuuu

SEQ ID NO: 495343 - RNA, 19 nt, Artificial Sequence
  Description of Artificial Sequence: Synthetic oligonucleotide
  Sense strand starting at position 1373 of SEQ ID NO: 317494
agguuaagucuauauguuu

SEQ ID NO: 495344 - RNA, 19 nt, Artificial Sequence
  Description of Artificial Sequence: Synthetic oligonucleotide
  Antisense Strand to SEQ ID NO: 495343
aaacauauagacuuaaccu

SEQ ID NO: 495345 - RNA, 19 nt, Artificial Sequence
  Description of Artificial Sequence: Synthetic oligonucleotide
  Sense strand starting at position 1379 of SEQ ID NO: 317494
agucuauauguuuacuuga

SEQ ID NO: 495346 - RNA, 19 nt, Artificial Sequence
  Description of Artificial Sequence: Synthetic oligonucleotide
  Antisense Strand to SEQ ID NO: 495345
ucaaguaaacauauagacu

SEQ ID NO: 495347 - RNA, 19 nt, Artificial Sequence
  Description of Artificial Sequence: Synthetic oligonucleotide
  Sense strand starting at position 1702 of SEQ ID NO: 317494
gcugaaccuuuauuagaau

SEQ ID NO: 495348 - RNA, 19 nt, Artificial Sequence
  Description of Artificial Sequence: Synthetic oligonucleotide
  Antisense Strand to SEQ ID NO: 495347
auucuaauaaagguucagc

SEQ ID NO: 495349 - RNA, 19 nt, Artificial Sequence
  Description of Artificial Sequence: Synthetic oligonucleotide
  Sense strand starting at position 2312 of SEQ ID NO: 317494
ccgugaguggcagaaacaa

SEQ ID NO: 495350 - RNA, 19 nt, Artificial Sequence
  Description of Artificial Sequence: Synthetic oligonucleotide
  Antisense Strand to SEQ ID NO: 495349
uuguuucugccacucacgg

SEQ ID NO: 495351 - RNA, 19 nt, Artificial Sequence
  Description of Artificial Sequence: Synthetic oligonucleotide
  Sense strand starting at position 2334 of SEQ ID NO: 317494
gauucuaggcucuggaaua

SEQ ID NO: 495352 - RNA, 19 nt, Artificial Sequence
  Description of Artificial Sequence: Synthetic oligonucleotide
  Antisense Strand to SEQ ID NO: 495351
uauuccagagccuagaauc

SEQ ID NO: 495353 - RNA, 19 nt, Artificial Sequence
  Description of Artificial Sequence: Synthetic oligonucleotide
  Sense strand starting at position 2345 of SEQ ID NO: 317494
cuggaauauugaguuuaga

SEQ ID NO: 495354 - RNA, 19 nt, Artificial Sequence
  Description of Artificial Sequence: Synthetic oligonucleotide
  Antisense Strand to SEQ ID NO: 495353
ucuaaacucaauauuccag

SEQ ID NO: 495355 - RNA, 19 nt, Artificial Sequence
  Description of Artificial Sequence: Synthetic oligonucleotide
  Sense strand starting at position 2353 of SEQ ID NO: 317494
uugaguuuagaauguucca

SEQ ID NO: 495356 - RNA, 19 nt, Artificial Sequence
  Description of Artificial Sequence: Synthetic oligonucleotide
  Antisense Strand to SEQ ID NO: 495355
uggaacauucuaaacucaa

SEQ ID NO: 495357 - RNA, 19 nt, Artificial Sequence
  Description of Artificial Sequence: Synthetic oligonucleotide
  Sense strand starting at position 2609 of SEQ ID NO: 317494
uuagcauucugggugauga

SEQ ID NO: 495358 - RNA, 19 nt, Artificial Sequence
  Description of Artificial Sequence: Synthetic oligonucleotide
  Antisense Strand to SEQ ID NO: 495357
ucaucacccagaaugcuaa

SEQ ID NO: 495359 - RNA, 19 nt, Artificial Sequence
  Description of Artificial Sequence: Synthetic oligonucleotide
  Sense strand starting at position 2610 of SEQ ID NO: 317494
uagcauucugggugaugac

SEQ ID NO: 495360 - RNA, 19 nt, Artificial Sequence
  Description of Artificial Sequence: Synthetic oligonucleotide
  Antisense Strand to SEQ ID NO: 495359
gucaucacccagaaugcua

SEQ ID NO: 495361 - RNA, 19 nt, Artificial Sequence
  Description of Artificial Sequence: Synthetic oligonucleotide
  Sense strand starting at position 2653 of SEQ ID NO: 317494
cuuuguuaugcuuucguau

SEQ ID NO: 495362 - RNA, 19 nt, Artificial Sequence
  Description of Artificial Sequence: Synthetic oligonucleotide
  Antisense Strand to SEQ ID NO: 495361
auacgaaagcauaacaaag

SEQ ID NO: 495363 - RNA, 19 nt, Artificial Sequence
  Description of Artificial Sequence: Synthetic oligonucleotide
  Sense strand starting at position 2907 of SEQ ID NO: 317494
aaaggcugacagugauagu

SEQ ID NO: 495364 - RNA, 19 nt, Artificial Sequence
  Description of Artificial Sequence: Synthetic oligonucleotide
  Antisense Strand to SEQ ID NO: 495363
acuaucacugucagccuuu

SEQ ID NO: 495365 - RNA, 19 nt, Artificial Sequence
  Description of Artificial Sequence: Synthetic oligonucleotide
  Sense strand starting at position 2908 of SEQ ID NO: 317494
aaggcugacagugauagua

SEQ ID NO: 495366 - RNA, 19 nt, Artificial Sequence
  Description of Artificial Sequence: Synthetic oligonucleotide
  Antisense Strand to SEQ ID NO: 495365
uacuaucacugucagccuu

SEQ ID NO: 495367 - RNA, 19 nt, Artificial Sequence
  Description of Artificial Sequence: Synthetic oligonucleotide
  Sense strand starting at position 3346 of SEQ ID NO: 317494
augcauaccuaggugauga

SEQ ID NO: 495368 - RNA, 19 nt, Artificial Sequence
  Description of Artificial Sequence: Synthetic oligonucleotide
  Antisense Strand to SEQ ID NO: 495367
ucaucaccuagguaugcau

SEQ ID NO: 495369 - RNA, 19 nt, Artificial Sequence
  Description of Artificial Sequence: Synthetic oligonucleotide
  Sense strand starting at position 3430 of SEQ ID NO: 317494
gcacauguacccuggaaug

SEQ ID NO: 495370 - RNA, 19 nt, Artificial Sequence
  Description of Artificial Sequence: Synthetic oligonucleotide
  Antisense Strand to SEQ ID NO: 495369
cauuccaggguacaugugc

SEQ ID NO: 495371 - RNA, 19 nt, Artificial Sequence
  Description of Artificial Sequence: Synthetic oligonucleotide
  Sense strand starting at position 3432 of SEQ ID NO: 317494
acauguacccuggaaugua

SEQ ID NO: 495372 - RNA, 19 nt, Artificial Sequence
  Description of Artificial Sequence: Synthetic oligonucleotide
  Antisense Strand to SEQ ID NO: 495371
uacauuccaggguacaugu

SEQ ID NO: 495373 - RNA, 19 nt, Artificial Sequence
  Description of Artificial Sequence: Synthetic oligonucleotide
  Sense strand starting at position 3523 of SEQ ID NO: 317494
gugauaaggcucgggauaa

SEQ ID NO: 495374 - RNA, 19 nt, Artificial Sequence
  Description of Artificial Sequence: Synthetic oligonucleotide
  Antisense Strand to SEQ ID NO: 495373
uuaucccgagccuuaucac

SEQ ID NO: 495375 - RNA, 19 nt, Artificial Sequence
  Description of Artificial Sequence: Synthetic oligonucleotide
  Sense strand starting at position 3645 of SEQ ID NO: 317494
ugaaaugguucuccagggu

SEQ ID NO: 495376 - RNA, 19 nt, Artificial Sequence
  Description of Artificial Sequence: Synthetic oligonucleotide
  Antisense Strand to SEQ ID NO: 495375
acccuggagaaccauuuca

SEQ ID NO: 495377 - RNA, 19 nt, Artificial Sequence
  Description of Artificial Sequence: Synthetic oligonucleotide
  Sense strand starting at position 3649 of SEQ ID NO: 317494
augguucuccagggucaga

SEQ ID NO: 495378 - RNA, 19 nt, Artificial Sequence
  Description of Artificial Sequence: Synthetic oligonucleotide
  Antisense Strand to SEQ ID NO: 495377
ucugacccuggagaaccau

SEQ ID NO: 495379 - RNA, 19 nt, Artificial Sequence
  Description of Artificial Sequence: Synthetic oligonucleotide
  Sense strand starting at position 3706 of SEQ ID NO: 317494
cccaaugcuccagagcaga

SEQ ID NO: 495380 - RNA, 19 nt, Artificial Sequence
  Description of Artificial Sequence: Synthetic oligonucleotide
  Antisense Strand to SEQ ID NO: 495379
ucugcucuggagcauuggg

SEQ ID NO: 495381 - RNA, 19 nt, Artificial Sequence
  Description of Artificial Sequence: Synthetic oligonucleotide
  Sense strand starting at position 3772 of SEQ ID NO: 317494
ugucuuccucggcuaguua

SEQ ID NO: 495382 - RNA, 19 nt, Artificial Sequence
  Description of Artificial Sequence: Synthetic oligonucleotide
  Antisense Strand to SEQ ID NO: 495381
uaacuagccgaggaagaca

SEQ ID NO: 495383 - RNA, 19 nt, Artificial Sequence
  Description of Artificial Sequence: Synthetic oligonucleotide
  Sense strand starting at position 3809 of SEQ ID NO: 317494
uaacguguugggcaauaaa

SEQ ID NO: 495384 - RNA, 19 nt, Artificial Sequence
  Description of Artificial Sequence: Synthetic oligonucleotide
  Antisense Strand to SEQ ID NO: 495383
uuuauugcccaacacguua

SEQ ID NO: 495385 - RNA, 19 nt, Artificial Sequence
  Description of Artificial Sequence: Synthetic oligonucleotide
  Sense strand starting at position 3946 of SEQ ID NO: 317494
agagcuucuaagggugaga

SEQ ID NO: 495386 - RNA, 19 nt, Artificial Sequence
  Description of Artificial Sequence: Synthetic oligonucleotide
  Antisense Strand to SEQ ID NO: 495385
ucucacccuuagaagcucu

SEQ ID NO: 495387 - RNA, 19 nt, Artificial Sequence
  Description of Artificial Sequence: Synthetic oligonucleotide
  Sense strand starting at position 3948 of SEQ ID NO: 317494
agcuucuaagggugagaaa

SEQ ID NO: 495388 - RNA, 19 nt, Artificial Sequence
  Description of Artificial Sequence: Synthetic oligonucleotide
  Antisense Strand to SEQ ID NO: 495387
uuucucacccuuagaagcu

SEQ ID NO: 495389 - RNA, 19 nt, Artificial Sequence
  Description of Artificial Sequence: Synthetic oligonucleotide
  Sense strand starting at position 122 of SEQ ID NO: 317495
augcgauggcaucaaauuc

SEQ ID NO: 495390 - RNA, 19 nt, Artificial Sequence
  Description of Artificial Sequence: Synthetic oligonucleotide
  Antisense Strand to SEQ ID NO: 495389
gaauuugaugccaucgcau

SEQ ID NO: 495391 - RNA, 19 nt, Artificial Sequence
  Description of Artificial Sequence: Synthetic oligonucleotide
  Sense strand starting at position 321 of SEQ ID NO: 317495
ucagaagauagcuguguuc

SEQ ID NO: 495392 - RNA, 19 nt, Artificial Sequence
  Description of Artificial Sequence: Synthetic oligonucleotide
  Antisense Strand to SEQ ID NO: 495391
gaacacagcuaucuucuga

SEQ ID NO: 495393 - RNA, 19 nt, Artificial Sequence
  Description of Artificial Sequence: Synthetic oligonucleotide
  Sense strand starting at position 323 of SEQ ID NO: 317495
agaagauagcuguguucua

SEQ ID NO: 495394 - RNA, 19 nt, Artificial Sequence
  Description of Artificial Sequence: Synthetic oligonucleotide
  Antisense Strand to SEQ ID NO: 495393
uagaacacagcuaucuucu

SEQ ID NO: 495395 - RNA, 19 nt, Artificial Sequence
  Description of Artificial Sequence: Synthetic oligonucleotide
  Sense strand starting at position 324 of SEQ ID NO: 317495
gaagauagcuguguucuaa

SEQ ID NO: 495396 - RNA, 19 nt, Artificial Sequence
  Description of Artificial Sequence: Synthetic oligonucleotide
  Antisense Strand to SEQ ID NO: 495395
uuagaacacagcuaucuuc

SEQ ID NO: 495397 - RNA, 19 nt, Artificial Sequence
  Description of Artificial Sequence: Synthetic oligonucleotide
  Sense strand starting at position 387 of SEQ ID NO: 317495
cuguuugggcauuguaaca

SEQ ID NO: 495398 - RNA, 19 nt, Artificial Sequence
  Description of Artificial Sequence: Synthetic oligonucleotide
  Antisense Strand to SEQ ID NO: 495397
uguuacaaugcccaaacag

SEQ ID NO: 495399 - RNA, 19 nt, Artificial Sequence
  Description of Artificial Sequence: Synthetic oligonucleotide
  Sense strand starting at position 513 of SEQ ID NO: 317495
ucgaucucucuagacucaa

SEQ ID NO: 495400 - RNA, 19 nt, Artificial Sequence
  Description of Artificial Sequence: Synthetic oligonucleotide
  Antisense Strand to SEQ ID NO: 495399
uugagucuagagagaucga

SEQ ID NO: 495401 - RNA, 19 nt, Artificial Sequence
  Description of Artificial Sequence: Synthetic oligonucleotide
  Sense strand starting at position 904 of SEQ ID NO: 317495
aaaguugugccucacugga

SEQ ID NO: 495402 - RNA, 19 nt, Artificial Sequence
  Description of Artificial Sequence: Synthetic oligonucleotide
  Antisense Strand to SEQ ID NO: 495401
uccagugaggcacaacuuu

SEQ ID NO: 495403 - RNA, 19 nt, Artificial Sequence
  Description of Artificial Sequence: Synthetic oligonucleotide
  Sense strand starting at position 1019 of SEQ ID NO: 317495
ggcaguguuggcaauggca

SEQ ID NO: 495404 - RNA, 19 nt, Artificial Sequence
  Description of Artificial Sequence: Synthetic oligonucleotide
  Antisense Strand to SEQ ID NO: 495403
ugccauugccaacacugcc

SEQ ID NO: 495405 - RNA, 19 nt, Artificial Sequence
  Description of Artificial Sequence: Synthetic oligonucleotide
  Sense strand starting at position 1021 of SEQ ID NO: 317495
caguguuggcaauggcaga

SEQ ID NO: 495406 - RNA, 19 nt, Artificial Sequence
  Description of Artificial Sequence: Synthetic oligonucleotide
  Antisense Strand to SEQ ID NO: 495405
ucugccauugccaacacug

SEQ ID NO: 495407 - RNA, 19 nt, Artificial Sequence
  Description of Artificial Sequence: Synthetic oligonucleotide
  Sense strand starting at position 1104 of SEQ ID NO: 317495
agucucacaucagcugaaa

SEQ ID NO: 495408 - RNA, 19 nt, Artificial Sequence
  Description of Artificial Sequence: Synthetic oligonucleotide
  Antisense Strand to SEQ ID NO: 495407
uuucagcugaugugagacu

SEQ ID NO: 495409 - RNA, 19 nt, Artificial Sequence
  Description of Artificial Sequence: Synthetic oligonucleotide
  Sense strand starting at position 1155 of SEQ ID NO: 317495
guguauucugacaguggug

SEQ ID NO: 495410 - RNA, 19 nt, Artificial Sequence
  Description of Artificial Sequence: Synthetic oligonucleotide
  Antisense Strand to SEQ ID NO: 495409
caccacugucagaauacac

SEQ ID NO: 495411 - RNA, 19 nt, Artificial Sequence
  Description of Artificial Sequence: Synthetic oligonucleotide
  Sense strand starting at position 1157 of SEQ ID NO: 317495
guauucugacaguggugga

SEQ ID NO: 495412 - RNA, 19 nt, Artificial Sequence
  Description of Artificial Sequence: Synthetic oligonucleotide
  Antisense Strand to SEQ ID NO: 495411
uccaccacugucagaauac

SEQ ID NO: 495413 - RNA, 19 nt, Artificial Sequence
  Description of Artificial Sequence: Synthetic oligonucleotide
  Sense strand starting at position 1158 of SEQ ID NO: 317495
uauucugacagugguggau

SEQ ID NO: 495414 - RNA, 19 nt, Artificial Sequence
  Description of Artificial Sequence: Synthetic oligonucleotide
  Antisense Strand to SEQ ID NO: 495413
auccaccacugucagaaua

SEQ ID NO: 495415 - RNA, 19 nt, Artificial Sequence
  Description of Artificial Sequence: Synthetic oligonucleotide
  Sense strand starting at position 1393 of SEQ ID NO: 317495
gccucaggguguccagauu

SEQ ID NO: 495416 - RNA, 19 nt, Artificial Sequence
  Description of Artificial Sequence: Synthetic oligonucleotide
  Antisense Strand to SEQ ID NO: 495415
aaucuggacacccugaggc

SEQ ID NO: 495417 - RNA, 19 nt, Artificial Sequence
  Description of Artificial Sequence: Synthetic oligonucleotide
  Sense strand starting at position 1399 of SEQ ID NO: 317495
ggguguccagauugcuacu

SEQ ID NO: 495418 - RNA, 19 nt, Artificial Sequence
  Description of Artificial Sequence: Synthetic oligonucleotide
  Antisense Strand to SEQ ID NO: 495417
aguagcaaucuggacaccc

SEQ ID NO: 495419 - RNA, 19 nt, Artificial Sequence
  Description of Artificial Sequence: Synthetic oligonucleotide
  Sense strand starting at position 1459 of SEQ ID NO: 317495
agaggaucucaguggaggu

SEQ ID NO: 495420 - RNA, 19 nt, Artificial Sequence
  Description of Artificial Sequence: Synthetic oligonucleotide
  Antisense Strand to SEQ ID NO: 495419
accuccacugagauccucu

SEQ ID NO: 495421 - RNA, 19 nt, Artificial Sequence
  Description of Artificial Sequence: Synthetic oligonucleotide
  Sense strand starting at position 2019 of SEQ ID NO: 317495
gggcggagacgucaucaga

SEQ ID NO: 495422 - RNA, 19 nt, Artificial Sequence
  Description of Artificial Sequence: Synthetic oligonucleotide
  Antisense Strand to SEQ ID NO: 495421
ucugaugacgucuccgccc

SEQ ID NO: 495423 - RNA, 19 nt, Artificial Sequence
  Description of Artificial Sequence: Synthetic oligonucleotide
  Sense strand starting at position 2303 of SEQ ID NO: 317495
gagucuuaacgguaagaag

SEQ ID NO: 495424 - RNA, 19 nt, Artificial Sequence
  Description of Artificial Sequence: Synthetic oligonucleotide
  Antisense Strand to SEQ ID NO: 495423
cuucuuaccguuaagacuc

SEQ ID NO: 495425 - RNA, 19 nt, Artificial Sequence
  Description of Artificial Sequence: Synthetic oligonucleotide
  Sense strand starting at position 2357 of SEQ ID NO: 317495
ugcuaauagcuccagauug

SEQ ID NO: 495426 - RNA, 19 nt, Artificial Sequence
  Description of Artificial Sequence: Synthetic oligonucleotide
  Antisense Strand to SEQ ID NO: 495425
caaucuggagcuauuagca

SEQ ID NO: 495427 - RNA, 19 nt, Artificial Sequence
  Description of Artificial Sequence: Synthetic oligonucleotide
  Sense strand starting at position 2487 of SEQ ID NO: 317495
cauagaugucguuagauca

SEQ ID NO: 495428 - RNA, 19 nt, Artificial Sequence
  Description of Artificial Sequence: Synthetic oligonucleotide
  Antisense Strand to SEQ ID NO: 495427
ugaucuaacgacaucuaug

SEQ ID NO: 495429 - RNA, 19 nt, Artificial Sequence
  Description of Artificial Sequence: Synthetic oligonucleotide
  Sense strand starting at position 2507 of SEQ ID NO: 317495
ccaguuuggucccuuaaau

SEQ ID NO: 495430 - RNA, 19 nt, Artificial Sequence
  Description of Artificial Sequence: Synthetic oligonucleotide
  Antisense Strand to SEQ ID NO: 495429
auuuaagggaccaaacugg

SEQ ID NO: 495431 - RNA, 19 nt, Artificial Sequence
  Description of Artificial Sequence: Synthetic oligonucleotide
  Sense strand starting at position 2556 of SEQ ID NO: 317495
gugcaagugacuuggucaa

SEQ ID NO: 495432 - RNA, 19 nt, Artificial Sequence
  Description of Artificial Sequence: Synthetic oligonucleotide
  Antisense Strand to SEQ ID NO: 495431
uugaccaagucacuugcac

SEQ ID NO: 495433 - RNA, 19 nt, Artificial Sequence
  Description of Artificial Sequence: Synthetic oligonucleotide
  Sense strand starting at position 2560 of SEQ ID NO: 317495
aagugacuuggucaagguu

SEQ ID NO: 495434 - RNA, 19 nt, Artificial Sequence
  Description of Artificial Sequence: Synthetic oligonucleotide
  Antisense Strand to SEQ ID NO: 495433
aaccuugaccaagucacuu

SEQ ID NO: 495435 - RNA, 19 nt, Artificial Sequence
  Description of Artificial Sequence: Synthetic oligonucleotide
  Sense strand starting at position 2563 of SEQ ID NO: 317495
ugacuuggucaagguuaua

SEQ ID NO: 495436 - RNA, 19 nt, Artificial Sequence
  Description of Artificial Sequence: Synthetic oligonucleotide
  Antisense Strand to SEQ ID NO: 495435
uauaaccuugaccaaguca

SEQ ID NO: 495437 - RNA, 19 nt, Artificial Sequence
  Description of Artificial Sequence: Synthetic oligonucleotide
  Sense strand starting at position 2653 of SEQ ID NO: 317495
cgugucaccuuucuuagaa

SEQ ID NO: 495438 - RNA, 19 nt, Artificial Sequence
  Description of Artificial Sequence: Synthetic oligonucleotide
  Antisense Strand to SEQ ID NO: 495437
uucuaagaaaggugacacg

SEQ ID NO: 495439 - RNA, 19 nt, Artificial Sequence
  Description of Artificial Sequence: Synthetic oligonucleotide
  Sense strand starting at position 2654 of SEQ ID NO: 317495
gugucaccuuucuuagaaa

SEQ ID NO: 495440 - RNA, 19 nt, Artificial Sequence
  Description of Artificial Sequence: Synthetic oligonucleotide
  Antisense Strand to SEQ ID NO: 495439
uuucuaagaaaggugacac

SEQ ID NO: 495441 - RNA, 19 nt, Artificial Sequence
  Description of Artificial Sequence: Synthetic oligonucleotide
  Sense strand starting at position 2764 of SEQ ID NO: 317495
uagcauauacuuuggguau

SEQ ID NO: 495442 - RNA, 19 nt, Artificial Sequence
  Description of Artificial Sequence: Synthetic oligonucleotide
  Antisense Strand to SEQ ID NO: 495441
auacccaaaguauaugcua

SEQ ID NO: 495443 - RNA, 19 nt, Artificial Sequence
  Description of Artificial Sequence: Synthetic oligonucleotide
  Sense strand starting at position 2921 of SEQ ID NO: 317495
cuuuauguugcucaccuau

SEQ ID NO: 495444 - RNA, 19 nt, Artificial Sequence
  Description of Artificial Sequence: Synthetic oligonucleotide
  Antisense Strand to SEQ ID NO: 495443
auaggugagcaacauaaag

SEQ ID NO: 495445 - RNA, 19 nt, Artificial Sequence
  Description of Artificial Sequence: Synthetic oligonucleotide
  Sense strand starting at position 2923 of SEQ ID NO: 317495
uuauguugcucaccuauag

SEQ ID NO: 495446 - RNA, 19 nt, Artificial Sequence
  Description of Artificial Sequence: Synthetic oligonucleotide
  Antisense Strand to SEQ ID NO: 495445
cuauaggugagcaacauaa

SEQ ID NO: 495447 - RNA, 19 nt, Artificial Sequence
  Description of Artificial Sequence: Synthetic oligonucleotide
  Sense strand starting at position 2927 of SEQ ID NO: 317495
guugcucaccuauagcauu

SEQ ID NO: 495448 - RNA, 19 nt, Artificial Sequence
  Description of Artificial Sequence: Synthetic oligonucleotide
  Antisense Strand to SEQ ID NO: 495447
aaugcuauaggugagcaac

SEQ ID NO: 495449 - RNA, 19 nt, Artificial Sequence
  Description of Artificial Sequence: Synthetic oligonucleotide
  Sense strand starting at position 2987 of SEQ ID NO: 317495
aaauguucuugaucugugu

SEQ ID NO: 495450 - RNA, 19 nt, Artificial Sequence
  Description of Artificial Sequence: Synthetic oligonucleotide
  Antisense Strand to SEQ ID NO: 495449
acacagaucaagaacauuu

SEQ ID NO: 495451 - RNA, 19 nt, Artificial Sequence
  Description of Artificial Sequence: Synthetic oligonucleotide
  Sense strand starting at position 3023 of SEQ ID NO: 317495
cugcucuagcacuaagaua

SEQ ID NO: 495452 - RNA, 19 nt, Artificial Sequence
  Description of Artificial Sequence: Synthetic oligonucleotide
  Antisense Strand to SEQ ID NO: 495451
uaucuuagugcuagagcag

SEQ ID NO: 495453 - RNA, 19 nt, Artificial Sequence
  Description of Artificial Sequence: Synthetic oligonucleotide
  Sense strand starting at position 3162 of SEQ ID NO: 317495
ccacuagguuaacuagaau

SEQ ID NO: 495454 - RNA, 19 nt, Artificial Sequence
  Description of Artificial Sequence: Synthetic oligonucleotide
  Antisense Strand to SEQ ID NO: 495453
auucuaguuaaccuagugg

SEQ ID NO: 495455 - RNA, 19 nt, Artificial Sequence
  Description of Artificial Sequence: Synthetic oligonucleotide
  Sense strand starting at position 3406 of SEQ ID NO: 317495
gagggcauguuagauuuga

SEQ ID NO: 495456 - RNA, 19 nt, Artificial Sequence
  Description of Artificial Sequence: Synthetic oligonucleotide
  Antisense Strand to SEQ ID NO: 495455
ucaaaucuaacaugcccuc

SEQ ID NO: 495457 - RNA, 19 nt, Artificial Sequence
  Description of Artificial Sequence: Synthetic oligonucleotide
  Sense strand starting at position 3669 of SEQ ID NO: 317495
auauaucaauuuggugaga

SEQ ID NO: 495458 - RNA, 19 nt, Artificial Sequence
  Description of Artificial Sequence: Synthetic oligonucleotide
  Antisense Strand to SEQ ID NO: 495457
ucucaccaaauugauauau

SEQ ID NO: 495459 - RNA, 19 nt, Artificial Sequence
  Description of Artificial Sequence: Synthetic oligonucleotide
  Sense strand starting at position 3671 of SEQ ID NO: 317495
auaucaauuuggugagacu

SEQ ID NO: 495460 - RNA, 19 nt, Artificial Sequence
  Description of Artificial Sequence: Synthetic oligonucleotide
  Antisense Strand to SEQ ID NO: 495459
agucucaccaaauugauau

SEQ ID NO: 495461 - RNA, 19 nt, Artificial Sequence
  Description of Artificial Sequence: Synthetic oligonucleotide
  Sense strand starting at position 3674 of SEQ ID NO: 317495
ucaauuuggugagacuagu

SEQ ID NO: 495462 - RNA, 19 nt, Artificial Sequence
  Description of Artificial Sequence: Synthetic oligonucleotide
  Antisense Strand to SEQ ID NO: 495461
acuagucucaccaaauuga

SEQ ID NO: 495463 - RNA, 19 nt, Artificial Sequence
  Description of Artificial Sequence: Synthetic oligonucleotide
  Sense strand starting at position 3723 of SEQ ID NO: 317495
uggagaaagugucugacaa

SEQ ID NO: 495464 - RNA, 19 nt, Artificial Sequence
  Description of Artificial Sequence: Synthetic oligonucleotide
  Antisense Strand to SEQ ID NO: 495463
uugucagacacuuucucca

SEQ ID NO: 495465 - RNA, 19 nt, Artificial Sequence
  Description of Artificial Sequence: Synthetic oligonucleotide
  Sense strand starting at position 3724 of SEQ ID NO: 317495
ggagaaagugucugacaau

SEQ ID NO: 495466 - RNA, 19 nt, Artificial Sequence
  Description of Artificial Sequence: Synthetic oligonucleotide
  Antisense Strand to SEQ ID NO: 495465
auugucagacacuuucucc

SEQ ID NO: 495467 - RNA, 19 nt, Artificial Sequence
  Description of Artificial Sequence: Synthetic oligonucleotide
  Sense strand starting at position 3770 of SEQ ID NO: 317495
aggauugacucgguuucuu

SEQ ID NO: 495468 - RNA, 19 nt, Artificial Sequence
  Description of Artificial Sequence: Synthetic oligonucleotide
  Antisense Strand to SEQ ID NO: 495467
aagaaaccgagucaauccu

SEQ ID NO: 495469 - RNA, 19 nt, Artificial Sequence
  Description of Artificial Sequence: Synthetic oligonucleotide
  Sense strand starting at position 34 of SEQ ID NO: 317496
acuugaaaugugggaccuu

SEQ ID NO: 495470 - RNA, 19 nt, Artificial Sequence
  Description of Artificial Sequence: Synthetic oligonucleotide
  Antisense Strand to SEQ ID NO: 495469
aaggucccacauuucaagu

SEQ ID NO: 495471 - RNA, 19 nt, Artificial Sequence
  Description of Artificial Sequence: Synthetic oligonucleotide
  Sense strand starting at position 66 of SEQ ID NO: 317496
auucgaaauagguacguaa

SEQ ID NO: 495472 - RNA, 19 nt, Artificial Sequence
  Description of Artificial Sequence: Synthetic oligonucleotide
  Antisense Strand to SEQ ID NO: 495471
uuacguaccuauuucgaau

SEQ ID NO: 495473 - RNA, 19 nt, Artificial Sequence
  Description of Artificial Sequence: Synthetic oligonucleotide
  Sense strand starting at position 68 of SEQ ID NO: 317496
ucgaaauagguacguaaca

SEQ ID NO: 495474 - RNA, 19 nt, Artificial Sequence
  Description of Artificial Sequence: Synthetic oligonucleotide
  Antisense Strand to SEQ ID NO: 495473
uguuacguaccuauuucga

SEQ ID NO: 495475 - RNA, 19 nt, Artificial Sequence
  Description of Artificial Sequence: Synthetic oligonucleotide
  Sense strand starting at position 142 of SEQ ID NO: 317496
gccuaaaccgaagagcauu

SEQ ID NO: 495476 - RNA, 19 nt, Artificial Sequence
  Description of Artificial Sequence: Synthetic oligonucleotide
  Antisense Strand to SEQ ID NO: 495475
aaugcucuucgguuuaggc

SEQ ID NO: 495477 - RNA, 19 nt, Artificial Sequence
  Description of Artificial Sequence: Synthetic oligonucleotide
  Sense strand starting at position 192 of SEQ ID NO: 317496
uuggauguggaauguuuga

SEQ ID NO: 495478 - RNA, 19 nt, Artificial Sequence
  Description of Artificial Sequence: Synthetic oligonucleotide
  Antisense Strand to SEQ ID NO: 495477
ucaaacauuccacauccaa

SEQ ID NO: 495479 - RNA, 19 nt, Artificial Sequence
  Description of Artificial Sequence: Synthetic oligonucleotide
  Sense strand starting at position 205 of SEQ ID NO: 317496
guuugaaaguugccucaug

SEQ ID NO: 495480 - RNA, 19 nt, Artificial Sequence
  Description of Artificial Sequence: Synthetic oligonucleotide
  Antisense Strand to SEQ ID NO: 495479
caugaggcaacuuucaaac

SEQ ID NO: 495481 - RNA, 19 nt, Artificial Sequence
  Description of Artificial Sequence: Synthetic oligonucleotide
  Sense strand starting at position 206 of SEQ ID NO: 317496
uuugaaaguugccucaugu

SEQ ID NO: 495482 - RNA, 19 nt, Artificial Sequence
  Description of Artificial Sequence: Synthetic oligonucleotide
  Antisense Strand to SEQ ID NO: 495481
acaugaggcaacuuucaaa

SEQ ID NO: 495483 - RNA, 19 nt, Artificial Sequence
  Description of Artificial Sequence: Synthetic oligonucleotide
  Sense strand starting at position 267 of SEQ ID NO: 317496
gucaaaguuucuguaaguu

SEQ ID NO: 495484 - RNA, 19 nt, Artificial Sequence
  Description of Artificial Sequence: Synthetic oligonucleotide
  Antisense Strand to SEQ ID NO: 495483
aacuuacagaaacuuugac

SEQ ID NO: 495485 - RNA, 19 nt, Artificial Sequence
  Description of Artificial Sequence: Synthetic oligonucleotide
  Sense strand starting at position 271 of SEQ ID NO: 317496
aaguuucuguaaguugaau

SEQ ID NO: 495486 - RNA, 19 nt, Artificial Sequence
  Description of Artificial Sequence: Synthetic oligonucleotide
  Antisense Strand to SEQ ID NO: 495485
auucaacuuacagaaacuu

SEQ ID NO: 495487 - RNA, 19 nt, Artificial Sequence
  Description of Artificial Sequence: Synthetic oligonucleotide
  Sense strand starting at position 381 of SEQ ID NO: 317496
gagacaaccugguuaacua

SEQ ID NO: 495488 - RNA, 19 nt, Artificial Sequence
  Description of Artificial Sequence: Synthetic oligonucleotide
  Antisense Strand to SEQ ID NO: 495487
uaguuaaccagguugucuc

SEQ ID NO: 495489 - RNA, 19 nt, Artificial Sequence
  Description of Artificial Sequence: Synthetic oligonucleotide
  Sense strand starting at position 473 of SEQ ID NO: 317496
agcaguaauaacuaggagu

SEQ ID NO: 495490 - RNA, 19 nt, Artificial Sequence
  Description of Artificial Sequence: Synthetic oligonucleotide
  Antisense Strand to SEQ ID NO: 495489
acuccuaguuauuacugcu

SEQ ID NO: 495491 - RNA, 19 nt, Artificial Sequence
  Description of Artificial Sequence: Synthetic oligonucleotide
  Sense strand starting at position 475 of SEQ ID NO: 317496
caguaauaacuaggagugu

SEQ ID NO: 495492 - RNA, 19 nt, Artificial Sequence
  Description of Artificial Sequence: Synthetic oligonucleotide
  Antisense Strand to SEQ ID NO: 495491
acacuccuaguuauuacug

SEQ ID NO: 495493 - RNA, 19 nt, Artificial Sequence
  Description of Artificial Sequence: Synthetic oligonucleotide
  Sense strand starting at position 486 of SEQ ID NO: 317496
aggagugucaugugccaag

SEQ ID NO: 495494 - RNA, 19 nt, Artificial Sequence
  Description of Artificial Sequence: Synthetic oligonucleotide
  Antisense Strand to SEQ ID NO: 495493
cuuggcacaugacacuccu

SEQ ID NO: 495495 - RNA, 19 nt, Artificial Sequence
  Description of Artificial Sequence: Synthetic oligonucleotide
  Sense strand starting at position 706 of SEQ ID NO: 317496
uggagcauuucugcuccaa

SEQ ID NO: 495496 - RNA, 19 nt, Artificial Sequence
  Description of Artificial Sequence: Synthetic oligonucleotide
  Antisense Strand to SEQ ID NO: 495495
uuggagcagaaaugcucca

SEQ ID NO: 495497 - RNA, 19 nt, Artificial Sequence
  Description of Artificial Sequence: Synthetic oligonucleotide
  Sense strand starting at position 710 of SEQ ID NO: 317496
gcauuucugcuccaauguu

SEQ ID NO: 495498 - RNA, 19 nt, Artificial Sequence
  Description of Artificial Sequence: Synthetic oligonucleotide
  Antisense Strand to SEQ ID NO: 495497
aacauuggagcagaaaugc

SEQ ID NO: 495499 - RNA, 19 nt, Artificial Sequence
  Description of Artificial Sequence: Synthetic oligonucleotide
  Sense strand starting at position 743 of SEQ ID NO: 317496
cuguuauauugucucucua

SEQ ID NO: 495500 - RNA, 19 nt, Artificial Sequence
  Description of Artificial Sequence: Synthetic oligonucleotide
  Antisense Strand to SEQ ID NO: 495499
uagagagacaauauaacag

SEQ ID NO: 495501 - RNA, 19 nt, Artificial Sequence
  Description of Artificial Sequence: Synthetic oligonucleotide
  Sense strand starting at position 796 of SEQ ID NO: 317496
cuggguaugaccuguaaga

SEQ ID NO: 495502 - RNA, 19 nt, Artificial Sequence
  Description of Artificial Sequence: Synthetic oligonucleotide
  Antisense Strand to SEQ ID NO: 495501
ucuuacaggucauacccag

SEQ ID NO: 495503 - RNA, 19 nt, Artificial Sequence
  Description of Artificial Sequence: Synthetic oligonucleotide
  Sense strand starting at position 834 of SEQ ID NO: 317496
uccuuuaacguguucuguu

SEQ ID NO: 495504 - RNA, 19 nt, Artificial Sequence
  Description of Artificial Sequence: Synthetic oligonucleotide
  Antisense Strand to SEQ ID NO: 495503
aacagaacacguuaaagga

SEQ ID NO: 495505 - RNA, 19 nt, Artificial Sequence
  Description of Artificial Sequence: Synthetic oligonucleotide
  Sense strand starting at position 877 of SEQ ID NO: 317496
cugguacuauuccacauuu

SEQ ID NO: 495506 - RNA, 19 nt, Artificial Sequence
  Description of Artificial Sequence: Synthetic oligonucleotide
  Antisense Strand to SEQ ID NO: 495505
aaauguggaauaguaccag

SEQ ID NO: 495507 - RNA, 19 nt, Artificial Sequence
  Description of Artificial Sequence: Synthetic oligonucleotide
  Sense strand starting at position 938 of SEQ ID NO: 317496
acugaauguuaugcucuuu

SEQ ID NO: 495508 - RNA, 19 nt, Artificial Sequence
  Description of Artificial Sequence: Synthetic oligonucleotide
  Antisense Strand to SEQ ID NO: 495507
aaagagcauaacauucagu

SEQ ID NO: 495509 - RNA, 19 nt, Artificial Sequence
  Description of Artificial Sequence: Synthetic oligonucleotide
  Sense strand starting at position 948 of SEQ ID NO: 317496
augcucuuuguguaaacca

SEQ ID NO: 495510 - RNA, 19 nt, Artificial Sequence
  Description of Artificial Sequence: Synthetic oligonucleotide
  Antisense Strand to SEQ ID NO: 495509
ugguuuacacaaagagcau

SEQ ID NO: 495511 - RNA, 19 nt, Artificial Sequence
  Description of Artificial Sequence: Synthetic oligonucleotide
  Sense strand starting at position 955 of SEQ ID NO: 317496
uuguguaaaccacacugua

SEQ ID NO: 495512 - RNA, 19 nt, Artificial Sequence
  Description of Artificial Sequence: Synthetic oligonucleotide
  Antisense Strand to SEQ ID NO: 495511
uacagugugguuuacacaa

SEQ ID NO: 495513 - RNA, 19 nt, Artificial Sequence
  Description of Artificial Sequence: Synthetic oligonucleotide
  Sense strand starting at position 984 of SEQ ID NO: 317496
aggcuucuccaauauguuc

SEQ ID NO: 495514 - RNA, 19 nt, Artificial Sequence
  Description of Artificial Sequence: Synthetic oligonucleotide
  Antisense Strand to SEQ ID NO: 495513
gaacauauuggagaagccu

SEQ ID NO: 495515 - RNA, 19 nt, Artificial Sequence
  Description of Artificial Sequence: Synthetic oligonucleotide
  Sense strand starting at position 995 of SEQ ID NO: 317496
auauguuccuggccuuuaa

SEQ ID NO: 495516 - RNA, 19 nt, Artificial Sequence
  Description of Artificial Sequence: Synthetic oligonucleotide
  Antisense Strand to SEQ ID NO: 495515
uuaaaggccaggaacauau

SEQ ID NO: 495517 - RNA, 19 nt, Artificial Sequence
  Description of Artificial Sequence: Synthetic oligonucleotide
  Sense strand starting at position 1005 of SEQ ID NO: 317496
ggccuuuaaaguggucaca

SEQ ID NO: 495518 - RNA, 19 nt, Artificial Sequence
  Description of Artificial Sequence: Synthetic oligonucleotide
  Antisense Strand to SEQ ID NO: 495517
ugugaccacuuuaaaggcc

SEQ ID NO: 495519 - RNA, 19 nt, Artificial Sequence
  Description of Artificial Sequence: Synthetic oligonucleotide
  Sense strand starting at position 1007 of SEQ ID NO: 317496
ccuuuaaaguggucacaaa

SEQ ID NO: 495520 - RNA, 19 nt, Artificial Sequence
  Description of Artificial Sequence: Synthetic oligonucleotide
  Antisense Strand to SEQ ID NO: 495519
uuugugaccacuuuaaagg

SEQ ID NO: 495521 - RNA, 19 nt, Artificial Sequence
  Description of Artificial Sequence: Synthetic oligonucleotide
  Sense strand starting at position 1431 of SEQ ID NO: 317496
ucaaguuagcuguaaacac

SEQ ID NO: 495522 - RNA, 19 nt, Artificial Sequence
  Description of Artificial Sequence: Synthetic oligonucleotide
  Antisense Strand to SEQ ID NO: 495521
guguuuacagcuaacuuga

SEQ ID NO: 495523 - RNA, 19 nt, Artificial Sequence
  Description of Artificial Sequence: Synthetic oligonucleotide
  Sense strand starting at position 1557 of SEQ ID NO: 317496
aucuuagagcagugcacaa

SEQ ID NO: 495524 - RNA, 19 nt, Artificial Sequence
  Description of Artificial Sequence: Synthetic oligonucleotide
  Antisense Strand to SEQ ID NO: 495523
uugugcacugcucuaagau

SEQ ID NO: 495525 - RNA, 19 nt, Artificial Sequence
  Description of Artificial Sequence: Synthetic oligonucleotide
  Sense strand starting at position 1817 of SEQ ID NO: 317496
acgaaacaaggguguuauu

SEQ ID NO: 495526 - RNA, 19 nt, Artificial Sequence
  Description of Artificial Sequence: Synthetic oligonucleotide
  Antisense Strand to SEQ ID NO: 495525
aauaacacccuuguuucgu

SEQ ID NO: 495527 - RNA, 19 nt, Artificial Sequence
  Description of Artificial Sequence: Synthetic oligonucleotide
  Sense strand starting at position 1960 of SEQ ID NO: 317496
gugucccucggauaaauag

SEQ ID NO: 495528 - RNA, 19 nt, Artificial Sequence
  Description of Artificial Sequence: Synthetic oligonucleotide
  Antisense Strand to SEQ ID NO: 495527
cuauuuauccgagggacac

SEQ ID NO: 495529 - RNA, 19 nt, Artificial Sequence
  Description of Artificial Sequence: Synthetic oligonucleotide
  Sense strand starting at position 1970 of SEQ ID NO: 317496
gauaaauagcuucggguga

SEQ ID NO: 495530 - RNA, 19 nt, Artificial Sequence
  Description of Artificial Sequence: Synthetic oligonucleotide
  Antisense Strand to SEQ ID NO: 495529
ucacccgaagcuauuuauc

SEQ ID NO: 495531 - RNA, 19 nt, Artificial Sequence
  Description of Artificial Sequence: Synthetic oligonucleotide
  Sense strand starting at position 2049 of SEQ ID NO: 317496
cccacuuauucgguguaac

SEQ ID NO: 495532 - RNA, 19 nt, Artificial Sequence
  Description of Artificial Sequence: Synthetic oligonucleotide
  Antisense Strand to SEQ ID NO: 495531
guuacaccgaauaaguggg

SEQ ID NO: 495533 - RNA, 19 nt, Artificial Sequence
  Description of Artificial Sequence: Synthetic oligonucleotide
  Sense strand starting at position 2071 of SEQ ID NO: 317496
cccagagucgacuaagagu

SEQ ID NO: 495534 - RNA, 19 nt, Artificial Sequence
  Description of Artificial Sequence: Synthetic oligonucleotide
  Antisense Strand to SEQ ID NO: 495533
acucuuagucgacucuggg

SEQ ID NO: 495535 - RNA, 19 nt, Artificial Sequence
  Description of Artificial Sequence: Synthetic oligonucleotide
  Sense strand starting at position 2080 of SEQ ID NO: 317496
gacuaagaguuucuacuag

SEQ ID NO: 495536 - RNA, 19 nt, Artificial Sequence
  Description of Artificial Sequence: Synthetic oligonucleotide
  Antisense Strand to SEQ ID NO: 495535
cuaguagaaacucuuaguc

SEQ ID NO: 495537 - RNA, 19 nt, Artificial Sequence
  Description of Artificial Sequence: Synthetic oligonucleotide
  Sense strand starting at position 2430 of SEQ ID NO: 317496
gccacaaguguucuccguu

SEQ ID NO: 495538 - RNA, 19 nt, Artificial Sequence
  Description of Artificial Sequence: Synthetic oligonucleotide
  Antisense Strand to SEQ ID NO: 495537
aacggagaacacuuguggc

SEQ ID NO: 495539 - RNA, 19 nt, Artificial Sequence
  Description of Artificial Sequence: Synthetic oligonucleotide
  Sense strand starting at position 2473 of SEQ ID NO: 317496
caagaaguauaucugcguu

SEQ ID NO: 495540 - RNA, 19 nt, Artificial Sequence
  Description of Artificial Sequence: Synthetic oligonucleotide
  Antisense Strand to SEQ ID NO: 495539
aacgcagauauacuucuug

SEQ ID NO: 495541 - RNA, 19 nt, Artificial Sequence
  Description of Artificial Sequence: Synthetic oligonucleotide
  Sense strand starting at position 2832 of SEQ ID NO: 317496
gaauccaggucccuuaaga

SEQ ID NO: 495542 - RNA, 19 nt, Artificial Sequence
  Description of Artificial Sequence: Synthetic oligonucleotide
  Antisense Strand to SEQ ID NO: 495541
ucuuaagggaccuggauuc

SEQ ID NO: 495543 - RNA, 19 nt, Artificial Sequence
  Description of Artificial Sequence: Synthetic oligonucleotide
  Sense strand starting at position 2908 of SEQ ID NO: 317496
cgugcuuucggcccgaagu

SEQ ID NO: 495544 - RNA, 19 nt, Artificial Sequence
  Description of Artificial Sequence: Synthetic oligonucleotide
  Antisense Strand to SEQ ID NO: 495543
acuucgggccgaaagcacg

SEQ ID NO: 495545 - RNA, 19 nt, Artificial Sequence
  Description of Artificial Sequence: Synthetic oligonucleotide
  Sense strand starting at position 3171 of SEQ ID NO: 317496
ucgguuucuguccaaaggu

SEQ ID NO: 495546 - RNA, 19 nt, Artificial Sequence
  Description of Artificial Sequence: Synthetic oligonucleotide
  Antisense Strand to SEQ ID NO: 495545
accuuuggacagaaaccga

SEQ ID NO: 495547 - RNA, 19 nt, Artificial Sequence
  Description of Artificial Sequence: Synthetic oligonucleotide
  Sense strand starting at position 3221 of SEQ ID NO: 317496
ggagacuugauguguauug

SEQ ID NO: 495548 - RNA, 19 nt, Artificial Sequence
  Description of Artificial Sequence: Synthetic oligonucleotide
  Antisense Strand to SEQ ID NO: 495547
caauacacaucaagucucc

SEQ ID NO: 495549 - RNA, 19 nt, Artificial Sequence
  Description of Artificial Sequence: Synthetic oligonucleotide
  Sense strand starting at position 342 of SEQ ID NO: 317497
gccacaaguguucuccguu

SEQ ID NO: 495550 - RNA, 19 nt, Artificial Sequence
  Description of Artificial Sequence: Synthetic oligonucleotide
  Antisense Strand to SEQ ID NO: 495549
aacggagaacacuuguggc

SEQ ID NO: 495551 - RNA, 19 nt, Artificial Sequence
  Description of Artificial Sequence: Synthetic oligonucleotide
  Sense strand starting at position 744 of SEQ ID NO: 317497
gaauccaggucccuuaaga

SEQ ID NO: 495552 - RNA, 19 nt, Artificial Sequence
  Description of Artificial Sequence: Synthetic oligonucleotide
  Antisense Strand to SEQ ID NO: 495551
ucuuaagggaccuggauuc

SEQ ID NO: 495553 - RNA, 19 nt, Artificial Sequence
  Description of Artificial Sequence: Synthetic oligonucleotide
  Sense strand starting at position 820 of SEQ ID NO: 317497
cgugcuuucggcccgaagu

SEQ ID NO: 495554 - RNA, 19 nt, Artificial Sequence
  Description of Artificial Sequence: Synthetic oligonucleotide
  Antisense Strand to SEQ ID NO: 495553
acuucgggccgaaagcacg

SEQ ID NO: 495555 - RNA, 19 nt, Artificial Sequence
  Description of Artificial Sequence: Synthetic oligonucleotide
  Sense strand starting at position 1083 of SEQ ID NO: 317497
ucgguuucuguccaaaggu

SEQ ID NO: 495556 - RNA, 19 nt, Artificial Sequence
  Description of Artificial Sequence: Synthetic oligonucleotide
  Antisense Strand to SEQ ID NO: 495555
accuuuggacagaaaccga

SEQ ID NO: 495557 - RNA, 19 nt, Artificial Sequence
  Description of Artificial Sequence: Synthetic oligonucleotide
  Sense strand starting at position 1133 of SEQ ID NO: 317497
ggagacuugauguguauug

SEQ ID NO: 495558 - RNA, 19 nt, Artificial Sequence
  Description of Artificial Sequence: Synthetic oligonucleotide
  Antisense Strand to SEQ ID NO: 495557
caauacacaucaagucucc

SEQ ID NO: 495559 - RNA, 19 nt, Artificial Sequence
  Description of Artificial Sequence: Synthetic oligonucleotide
  Sense strand starting at position 1983 of SEQ ID NO: 317497
ccaguuuccucacuuggua

SEQ ID NO: 495560 - RNA, 19 nt, Artificial Sequence
  Description of Artificial Sequence: Synthetic oligonucleotide
  Antisense Strand to SEQ ID NO: 495559
uaccaagugaggaaacugg

SEQ ID NO: 495561 - RNA, 19 nt, Artificial Sequence
  Description of Artificial Sequence: Synthetic oligonucleotide
  Sense strand starting at position 1992 of SEQ ID NO: 317497
ucacuugguaucgaggaga

SEQ ID NO: 495562 - RNA, 19 nt, Artificial Sequence
  Description of Artificial Sequence: Synthetic oligonucleotide
  Antisense Strand to SEQ ID NO: 495561
ucuccucgauaccaaguga

SEQ ID NO: 495563 - RNA, 19 nt, Artificial Sequence
  Description of Artificial Sequence: Synthetic oligonucleotide
  Sense strand starting at position 1995 of SEQ ID NO: 317497
cuugguaucgaggagacga

SEQ ID NO: 495564 - RNA, 19 nt, Artificial Sequence
  Description of Artificial Sequence: Synthetic oligonucleotide
  Antisense Strand to SEQ ID NO: 495563
ucgucuccucgauaccaag

SEQ ID NO: 495565 - RNA, 19 nt, Artificial Sequence
  Description of Artificial Sequence: Synthetic oligonucleotide
  Sense strand starting at position 2009 of SEQ ID NO: 317497
gacgacucucgcgagaacu

SEQ ID NO: 495566 - RNA, 19 nt, Artificial Sequence
  Description of Artificial Sequence: Synthetic oligonucleotide
  Antisense Strand to SEQ ID NO: 495565
aguucucgcgagagucguc

SEQ ID NO: 495567 - RNA, 19 nt, Artificial Sequence
  Description of Artificial Sequence: Synthetic oligonucleotide
  Sense strand starting at position 2305 of SEQ ID NO: 317497
aggauuaauuaccagauac

SEQ ID NO: 495568 - RNA, 19 nt, Artificial Sequence
  Description of Artificial Sequence: Synthetic oligonucleotide
  Antisense Strand to SEQ ID NO: 495567
guaucugguaauuaauccu

SEQ ID NO: 495569 - RNA, 19 nt, Artificial Sequence
  Description of Artificial Sequence: Synthetic oligonucleotide
  Sense strand starting at position 2430 of SEQ ID NO: 317497
ucgagaugggaauaguagu

SEQ ID NO: 495570 - RNA, 19 nt, Artificial Sequence
  Description of Artificial Sequence: Synthetic oligonucleotide
  Antisense Strand to SEQ ID NO: 495569
acuacuauucccaucucga

SEQ ID NO: 495571 - RNA, 19 nt, Artificial Sequence
  Description of Artificial Sequence: Synthetic oligonucleotide
  Sense strand starting at position 2551 of SEQ ID NO: 317497
cugagucaagcucaauuga

SEQ ID NO: 495572 - RNA, 19 nt, Artificial Sequence
  Description of Artificial Sequence: Synthetic oligonucleotide
  Antisense Strand to SEQ ID NO: 495571
ucaauugagcuugacucag

SEQ ID NO: 495573 - RNA, 19 nt, Artificial Sequence
  Description of Artificial Sequence: Synthetic oligonucleotide
  Sense strand starting at position 2647 of SEQ ID NO: 317497
gguguagaugugggaacaa

SEQ ID NO: 495574 - RNA, 19 nt, Artificial Sequence
  Description of Artificial Sequence: Synthetic oligonucleotide
  Antisense Strand to SEQ ID NO: 495573
uuguucccacaucuacacc

SEQ ID NO: 495575 - RNA, 19 nt, Artificial Sequence
  Description of Artificial Sequence: Synthetic oligonucleotide
  Sense strand starting at position 2706 of SEQ ID NO: 317497
guucuugagccagaaagug

SEQ ID NO: 495576 - RNA, 19 nt, Artificial Sequence
  Description of Artificial Sequence: Synthetic oligonucleotide
  Antisense Strand to SEQ ID NO: 495575
cacuuucuggcucaagaac

SEQ ID NO: 495577 - RNA, 19 nt, Artificial Sequence
  Description of Artificial Sequence: Synthetic oligonucleotide
  Sense strand starting at position 2723 of SEQ ID NO: 317497
uguugagacuaauuaguua

SEQ ID NO: 495578 - RNA, 19 nt, Artificial Sequence
  Description of Artificial Sequence: Synthetic oligonucleotide
  Antisense Strand to SEQ ID NO: 495577
uaacuaauuagucucaaca

SEQ ID NO: 495579 - RNA, 19 nt, Artificial Sequence
  Description of Artificial Sequence: Synthetic oligonucleotide
  Sense strand starting at position 2735 of SEQ ID NO: 317497
uuaguuaauuagguagagu

SEQ ID NO: 495580 - RNA, 19 nt, Artificial Sequence
  Description of Artificial Sequence: Synthetic oligonucleotide
  Antisense Strand to SEQ ID NO: 495579
acucuaccuaauuaacuaa

SEQ ID NO: 495581 - RNA, 19 nt, Artificial Sequence
  Description of Artificial Sequence: Synthetic oligonucleotide
  Sense strand starting at position 2738 of SEQ ID NO: 317497
guuaauuagguagaguuua

SEQ ID NO: 495582 - RNA, 19 nt, Artificial Sequence
  Description of Artificial Sequence: Synthetic oligonucleotide
  Antisense Strand to SEQ ID NO: 495581
uaaacucuaccuaauuaac

SEQ ID NO: 495583 - RNA, 19 nt, Artificial Sequence
  Description of Artificial Sequence: Synthetic oligonucleotide
  Sense strand starting at position 2836 of SEQ ID NO: 317497
uagucaaggguuuaaagua

SEQ ID NO: 495584 - RNA, 19 nt, Artificial Sequence
  Description of Artificial Sequence: Synthetic oligonucleotide
  Antisense Strand to SEQ ID NO: 495583
uacuuuaaacccuugacua

SEQ ID NO: 495585 - RNA, 19 nt, Artificial Sequence
  Description of Artificial Sequence: Synthetic oligonucleotide
  Sense strand starting at position 3085 of SEQ ID NO: 317497
acacgucaacaaugaugaa

SEQ ID NO: 495586 - RNA, 19 nt, Artificial Sequence
  Description of Artificial Sequence: Synthetic oligonucleotide
  Antisense Strand to SEQ ID NO: 495585
uucaucauuguugacgugu

SEQ ID NO: 495587 - RNA, 19 nt, Artificial Sequence
  Description of Artificial Sequence: Synthetic oligonucleotide
  Sense strand starting at position 3097 of SEQ ID NO: 317497
ugaugaauauaaguagucu

SEQ ID NO: 495588 - RNA, 19 nt, Artificial Sequence
  Description of Artificial Sequence: Synthetic oligonucleotide
  Antisense Strand to SEQ ID NO: 495587
agacuacuuauauucauca

SEQ ID NO: 495589 - RNA, 19 nt, Artificial Sequence
  Description of Artificial Sequence: Synthetic oligonucleotide
  Sense strand starting at position 3101 of SEQ ID NO: 317497
gaauauaaguagucuaaug

SEQ ID NO: 495590 - RNA, 19 nt, Artificial Sequence
  Description of Artificial Sequence: Synthetic oligonucleotide
  Antisense Strand to SEQ ID NO: 495589
cauuagacuacuuauauuc

SEQ ID NO: 495591 - RNA, 19 nt, Artificial Sequence
  Description of Artificial Sequence: Synthetic oligonucleotide
  Sense strand starting at position 3209 of SEQ ID NO: 317497
augcgacuuugauuuggua

SEQ ID NO: 495592 - RNA, 19 nt, Artificial Sequence
  Description of Artificial Sequence: Synthetic oligonucleotide
  Antisense Strand to SEQ ID NO: 495591
uaccaaaucaaagucgcau

SEQ ID NO: 495593 - RNA, 19 nt, Artificial Sequence
  Description of Artificial Sequence: Synthetic oligonucleotide
  Sense strand starting at position 3393 of SEQ ID NO: 317497
ccugaauaaucuguguucu

SEQ ID NO: 495594 - RNA, 19 nt, Artificial Sequence
  Description of Artificial Sequence: Synthetic oligonucleotide
  Antisense Strand to SEQ ID NO: 495593
agaacacagauuauucagg

SEQ ID NO: 495595 - RNA, 19 nt, Artificial Sequence
  Description of Artificial Sequence: Synthetic oligonucleotide
  Sense strand starting at position 3394 of SEQ ID NO: 317497
cugaauaaucuguguucuc

SEQ ID NO: 495596 - RNA, 19 nt, Artificial Sequence
  Description of Artificial Sequence: Synthetic oligonucleotide
  Antisense Strand to SEQ ID NO: 495595
gagaacacagauuauucag

SEQ ID NO: 495597 - RNA, 19 nt, Artificial Sequence
  Description of Artificial Sequence: Synthetic oligonucleotide
  Sense strand starting at position 3395 of SEQ ID NO: 317497
ugaauaaucuguguucucu

SEQ ID NO: 495598 - RNA, 19 nt, Artificial Sequence
  Description of Artificial Sequence: Synthetic oligonucleotide
  Antisense Strand to SEQ ID NO: 495597
agagaacacagauuauuca

SEQ ID NO: 495599 - RNA, 19 nt, Artificial Sequence
  Description of Artificial Sequence: Synthetic oligonucleotide
  Sense strand starting at position 3413 of SEQ ID NO: 317497
ucucauagcuagccagaua

SEQ ID NO: 495600 - RNA, 19 nt, Artificial Sequence
  Description of Artificial Sequence: Synthetic oligonucleotide
  Antisense Strand to SEQ ID NO: 495599
uaucuggcuagcuaugaga

SEQ ID NO: 495601 - RNA, 19 nt, Artificial Sequence
  Description of Artificial Sequence: Synthetic oligonucleotide
  Sense strand starting at position 3488 of SEQ ID NO: 317497
gcuucccauuugcuugaua

SEQ ID NO: 495602 - RNA, 19 nt, Artificial Sequence
  Description of Artificial Sequence: Synthetic oligonucleotide
  Antisense Strand to SEQ ID NO: 495601
uaucaagcaaaugggaagc

SEQ ID NO: 495603 - RNA, 19 nt, Artificial Sequence
  Description of Artificial Sequence: Synthetic oligonucleotide
  Sense strand starting at position 3501 of SEQ ID NO: 317497
uugauauuggccugguuag

SEQ ID NO: 495604 - RNA, 19 nt, Artificial Sequence
  Description of Artificial Sequence: Synthetic oligonucleotide
  Antisense Strand to SEQ ID NO: 495603
cuaaccaggccaauaucaa

SEQ ID NO: 495605 - RNA, 19 nt, Artificial Sequence
  Description of Artificial Sequence: Synthetic oligonucleotide
  Sense strand starting at position 3544 of SEQ ID NO: 317497
ccgcuaaaguaaguaauaa

SEQ ID NO: 495606 - RNA, 19 nt, Artificial Sequence
  Description of Artificial Sequence: Synthetic oligonucleotide
  Antisense Strand to SEQ ID NO: 495605
uuauuacuuacuuuagcgg

SEQ ID NO: 495607 - RNA, 19 nt, Artificial Sequence
  Description of Artificial Sequence: Synthetic oligonucleotide
  Sense strand starting at position 3555 of SEQ ID NO: 317497
aguaauaaugacuguccuu

SEQ ID NO: 495608 - RNA, 19 nt, Artificial Sequence
  Description of Artificial Sequence: Synthetic oligonucleotide
  Antisense Strand to SEQ ID NO: 495607
aaggacagucauuauuacu

SEQ ID NO: 495609 - RNA, 19 nt, Artificial Sequence
  Description of Artificial Sequence: Synthetic oligonucleotide
  Sense strand starting at position 3570 of SEQ ID NO: 317497
ccuuucucacagggugauu

SEQ ID NO: 495610 - RNA, 19 nt, Artificial Sequence
  Description of Artificial Sequence: Synthetic oligonucleotide
  Antisense Strand to SEQ ID NO: 495609
aaucacccugugagaaagg

SEQ ID NO: 495611 - RNA, 19 nt, Artificial Sequence
  Description of Artificial Sequence: Synthetic oligonucleotide
  Sense strand starting at position 3599 of SEQ ID NO: 317497
agugucauaauauauguga

SEQ ID NO: 495612 - RNA, 19 nt, Artificial Sequence
  Description of Artificial Sequence: Synthetic oligonucleotide
  Antisense Strand to SEQ ID NO: 495611
ucacauauauuaugacacu

SEQ ID NO: 495613 - RNA, 19 nt, Artificial Sequence
  Description of Artificial Sequence: Synthetic oligonucleotide
  Sense strand starting at position 3602 of SEQ ID NO: 317497
gucauaauauaugugaaag

SEQ ID NO: 495614 - RNA, 19 nt, Artificial Sequence
  Description of Artificial Sequence: Synthetic oligonucleotide
  Antisense Strand to SEQ ID NO: 495613
cuuucacauauauuaugac

SEQ ID NO: 495615 - RNA, 19 nt, Artificial Sequence
  Description of Artificial Sequence: Synthetic oligonucleotide
  Sense strand starting at position 3628 of SEQ ID NO: 317497
gagacucuacagugcugua

SEQ ID NO: 495616 - RNA, 19 nt, Artificial Sequence
  Description of Artificial Sequence: Synthetic oligonucleotide
  Antisense Strand to SEQ ID NO: 495615
uacagcacuguagagucuc

SEQ ID NO: 495617 - RNA, 19 nt, Artificial Sequence
  Description of Artificial Sequence: Synthetic oligonucleotide
  Sense strand starting at position 3633 of SEQ ID NO: 317497
ucuacagugcuguauaaau

SEQ ID NO: 495618 - RNA, 19 nt, Artificial Sequence
  Description of Artificial Sequence: Synthetic oligonucleotide
  Antisense Strand to SEQ ID NO: 495617
auuuauacagcacuguaga

SEQ ID NO: 495619 - RNA, 19 nt, Artificial Sequence
  Description of Artificial Sequence: Synthetic oligonucleotide
  Sense strand starting at position 3676 of SEQ ID NO: 317497
gacauuaacuggccauagu

SEQ ID NO: 495620 - RNA, 19 nt, Artificial Sequence
  Description of Artificial Sequence: Synthetic oligonucleotide
  Antisense Strand to SEQ ID NO: 495619
acuauggccaguuaauguc

SEQ ID NO: 495621 - RNA, 19 nt, Artificial Sequence
  Description of Artificial Sequence: Synthetic oligonucleotide
  Sense strand starting at position 3684 of SEQ ID NO: 317497
cuggccauagugugaaaca

SEQ ID NO: 495622 - RNA, 19 nt, Artificial Sequence
  Description of Artificial Sequence: Synthetic oligonucleotide
  Antisense Strand to SEQ ID NO: 495621
uguuucacacuauggccag

SEQ ID NO: 495623 - RNA, 19 nt, Artificial Sequence
  Description of Artificial Sequence: Synthetic oligonucleotide
  Sense strand starting at position 3693 of SEQ ID NO: 317497
gugugaaacaaauguauag

SEQ ID NO: 495624 - RNA, 19 nt, Artificial Sequence
  Description of Artificial Sequence: Synthetic oligonucleotide
  Antisense Strand to SEQ ID NO: 495623
cuauacauuuguuucacac

SEQ ID NO: 495625 - RNA, 19 nt, Artificial Sequence
  Description of Artificial Sequence: Synthetic oligonucleotide
  Sense strand starting at position 3936 of SEQ ID NO: 317497
ggccaagaucacugcgaca

SEQ ID NO: 495626 - RNA, 19 nt, Artificial Sequence
  Description of Artificial Sequence: Synthetic oligonucleotide
  Antisense Strand to SEQ ID NO: 495625
ugucgcagugaucuuggcc

SEQ ID NO: 495627 - RNA, 19 nt, Artificial Sequence
  Description of Artificial Sequence: Synthetic oligonucleotide
  Sense strand starting at position 3938 of SEQ ID NO: 317497
ccaagaucacugcgacaga

SEQ ID NO: 495628 - RNA, 19 nt, Artificial Sequence
  Description of Artificial Sequence: Synthetic oligonucleotide
  Antisense Strand to SEQ ID NO: 495627
ucugucgcagugaucuugg

SEQ ID NO: 495629 - RNA, 19 nt, Artificial Sequence
  Description of Artificial Sequence: Synthetic oligonucleotide
  Sense strand starting at position 124 of SEQ ID NO: 317498
acgaaacaaggguguuauu

SEQ ID NO: 495630 - RNA, 19 nt, Artificial Sequence
  Description of Artificial Sequence: Synthetic oligonucleotide
  Antisense Strand to SEQ ID NO: 495629
aauaacacccuuguuucgu

SEQ ID NO: 495631 - RNA, 19 nt, Artificial Sequence
  Description of Artificial Sequence: Synthetic oligonucleotide
  Sense strand starting at position 267 of SEQ ID NO: 317498
gugucccucggauaaauag

SEQ ID NO: 495632 - RNA, 19 nt, Artificial Sequence
  Description of Artificial Sequence: Synthetic oligonucleotide
  Antisense Strand to SEQ ID NO: 495631
cuauuuauccgagggacac

SEQ ID NO: 495633 - RNA, 19 nt, Artificial Sequence
  Description of Artificial Sequence: Synthetic oligonucleotide
  Sense strand starting at position 277 of SEQ ID NO: 317498
gauaaauagcuucggguga

SEQ ID NO: 495634 - RNA, 19 nt, Artificial Sequence
  Description of Artificial Sequence: Synthetic oligonucleotide
  Antisense Strand to SEQ ID NO: 495633
ucacccgaagcuauuuauc

SEQ ID NO: 495635 - RNA, 19 nt, Artificial Sequence
  Description of Artificial Sequence: Synthetic oligonucleotide
  Sense strand starting at position 378 of SEQ ID NO: 317498
cccagagucgacuaagagu

SEQ ID NO: 495636 - RNA, 19 nt, Artificial Sequence
  Description of Artificial Sequence: Synthetic oligonucleotide
  Antisense Strand to SEQ ID NO: 495635
acucuuagucgacucuggg

SEQ ID NO: 495637 - RNA, 19 nt, Artificial Sequence
  Description of Artificial Sequence: Synthetic oligonucleotide
  Sense strand starting at position 387 of SEQ ID NO: 317498
gacuaagaguuucuacuag

SEQ ID NO: 495638 - RNA, 19 nt, Artificial Sequence
  Description of Artificial Sequence: Synthetic oligonucleotide
  Antisense Strand to SEQ ID NO: 495637
cuaguagaaacucuuaguc

SEQ ID NO: 495639 - RNA, 19 nt, Artificial Sequence
  Description of Artificial Sequence: Synthetic oligonucleotide
  Sense strand starting at position 737 of SEQ ID NO: 317498
gccacaaguguucuccguu

SEQ ID NO: 495640 - RNA, 19 nt, Artificial Sequence
  Description of Artificial Sequence: Synthetic oligonucleotide
  Antisense Strand to SEQ ID NO: 495639
aacggagaacacuuguggc

SEQ ID NO: 495641 - RNA, 19 nt, Artificial Sequence
  Description of Artificial Sequence: Synthetic oligonucleotide
  Sense strand starting at position 1139 of SEQ ID NO: 317498
gaauccaggucccuuaaga

SEQ ID NO: 495642 - RNA, 19 nt, Artificial Sequence
  Description of Artificial Sequence: Synthetic oligonucleotide
  Antisense Strand to SEQ ID NO: 495641
ucuuaagggaccuggauuc

SEQ ID NO: 495643 - RNA, 19 nt, Artificial Sequence
  Description of Artificial Sequence: Synthetic oligonucleotide
  Sense strand starting at position 1215 of SEQ ID NO: 317498
cgugcuuucggcccgaagu

SEQ ID NO: 495644 - RNA, 19 nt, Artificial Sequence
  Description of Artificial Sequence: Synthetic oligonucleotide
  Antisense Strand to SEQ ID NO: 495643
acuucgggccgaaagcacg

SEQ ID NO: 495645 - RNA, 19 nt, Artificial Sequence
  Description of Artificial Sequence: Synthetic oligonucleotide
  Sense strand starting at position 1478 of SEQ ID NO: 317498
ucgguuucuguccaaaggu

SEQ ID NO: 495646 - RNA, 19 nt, Artificial Sequence
  Description of Artificial Sequence: Synthetic oligonucleotide
  Antisense Strand to SEQ ID NO: 495645
accuuuggacagaaaccga

SEQ ID NO: 495647 - RNA, 19 nt, Artificial Sequence
  Description of Artificial Sequence: Synthetic oligonucleotide
  Sense strand starting at position 1528 of SEQ ID NO: 317498
ggagacuugauguguauug

SEQ ID NO: 495648 - RNA, 19 nt, Artificial Sequence
  Description of Artificial Sequence: Synthetic oligonucleotide
  Antisense Strand to SEQ ID NO: 495647
caauacacaucaagucucc

SEQ ID NO: 495649 - RNA, 19 nt, Artificial Sequence
  Description of Artificial Sequence: Synthetic oligonucleotide
  Sense strand starting at position 2378 of SEQ ID NO: 317498
ccaguuuccucacuuggua

SEQ ID NO: 495650 - RNA, 19 nt, Artificial Sequence
  Description of Artificial Sequence: Synthetic oligonucleotide
  Antisense Strand to SEQ ID NO: 495649
uaccaagugaggaaacugg

SEQ ID NO: 495651 - RNA, 19 nt, Artificial Sequence
  Description of Artificial Sequence: Synthetic oligonucleotide
  Sense strand starting at position 2387 of SEQ ID NO: 317498
ucacuugguaucgaggaga

SEQ ID NO: 495652 - RNA, 19 nt, Artificial Sequence
  Description of Artificial Sequence: Synthetic oligonucleotide
  Antisense Strand to SEQ ID NO: 495651
ucuccucgauaccaaguga

SEQ ID NO: 495653 - RNA, 19 nt, Artificial Sequence
  Description of Artificial Sequence: Synthetic oligonucleotide
  Sense strand starting at position 2390 of SEQ ID NO: 317498
cuugguaucgaggagacga

SEQ ID NO: 495654 - RNA, 19 nt, Artificial Sequence
  Description of Artificial Sequence: Synthetic oligonucleotide
  Antisense Strand to SEQ ID NO: 495653
ucgucuccucgauaccaag

SEQ ID NO: 495655 - RNA, 19 nt, Artificial Sequence
  Description of Artificial Sequence: Synthetic oligonucleotide
  Sense strand starting at position 2404 of SEQ ID NO: 317498
gacgacucucgcgagaacu

SEQ ID NO: 495656 - RNA, 19 nt, Artificial Sequence
  Description of Artificial Sequence: Synthetic oligonucleotide
  Antisense Strand to SEQ ID NO: 495655
aguucucgcgagagucguc

SEQ ID NO: 495657 - RNA, 19 nt, Artificial Sequence
  Description of Artificial Sequence: Synthetic oligonucleotide
  Sense strand starting at position 2700 of SEQ ID NO: 317498
aggauuaauuaccagauac

SEQ ID NO: 495658 - RNA, 19 nt, Artificial Sequence
  Description of Artificial Sequence: Synthetic oligonucleotide
  Antisense Strand to SEQ ID NO: 495657
guaucugguaauuaauccu

SEQ ID NO: 495659 - RNA, 19 nt, Artificial Sequence
  Description of Artificial Sequence: Synthetic oligonucleotide
  Sense strand starting at position 2825 of SEQ ID NO: 317498
ucgagaugggaauaguagu

SEQ ID NO: 495660 - RNA, 19 nt, Artificial Sequence
  Description of Artificial Sequence: Synthetic oligonucleotide
  Antisense Strand to SEQ ID NO: 495659
acuacuauucccaucucga

SEQ ID NO: 495661 - RNA, 19 nt, Artificial Sequence
  Description of Artificial Sequence: Synthetic oligonucleotide
  Sense strand starting at position 2946 of SEQ ID NO: 317498
cugagucaagcucaauuga

SEQ ID NO: 495662 - RNA, 19 nt, Artificial Sequence
  Description of Artificial Sequence: Synthetic oligonucleotide
  Antisense Strand to SEQ ID NO: 495661
ucaauugagcuugacucag

SEQ ID NO: 495663 - RNA, 19 nt, Artificial Sequence
  Description of Artificial Sequence: Synthetic oligonucleotide
  Sense strand starting at position 3042 of SEQ ID NO: 317498
gguguagaugugggaacaa

SEQ ID NO: 495664 - RNA, 19 nt, Artificial Sequence
  Description of Artificial Sequence: Synthetic oligonucleotide
  Antisense Strand to SEQ ID NO: 495663
uuguucccacaucuacacc

SEQ ID NO: 495665 - RNA, 19 nt, Artificial Sequence
  Description of Artificial Sequence: Synthetic oligonucleotide
  Sense strand starting at position 3101 of SEQ ID NO: 317498
guucuugagccagaaagug

SEQ ID NO: 495666 - RNA, 19 nt, Artificial Sequence
  Description of Artificial Sequence: Synthetic oligonucleotide
  Antisense Strand to SEQ ID NO: 495665
cacuuucuggcucaagaac

SEQ ID NO: 495667 - RNA, 19 nt, Artificial Sequence
  Description of Artificial Sequence: Synthetic oligonucleotide
  Sense strand starting at position 3118 of SEQ ID NO: 317498
uguugagacuaauuaguua

SEQ ID NO: 495668 - RNA, 19 nt, Artificial Sequence
  Description of Artificial Sequence: Synthetic oligonucleotide
  Antisense Strand to SEQ ID NO: 495667
uaacuaauuagucucaaca

SEQ ID NO: 495669 - RNA, 19 nt, Artificial Sequence
  Description of Artificial Sequence: Synthetic oligonucleotide
  Sense strand starting at position 3130 of SEQ ID NO: 317498
uuaguuaauuagguagagu

SEQ ID NO: 495670 - RNA, 19 nt, Artificial Sequence
  Description of Artificial Sequence: Synthetic oligonucleotide
  Antisense Strand to SEQ ID NO: 495669
acucuaccuaauuaacuaa

SEQ ID NO: 495671 - RNA, 19 nt, Artificial Sequence
  Description of Artificial Sequence: Synthetic oligonucleotide
  Sense strand starting at position 3133 of SEQ ID NO: 317498
guuaauuagguagaguuua

SEQ ID NO: 495672 - RNA, 19 nt, Artificial Sequence
  Description of Artificial Sequence: Synthetic oligonucleotide
  Antisense Strand to SEQ ID NO: 495671
uaaacucuaccuaauuaac

SEQ ID NO: 495673 - RNA, 19 nt, Artificial Sequence
  Description of Artificial Sequence: Synthetic oligonucleotide
  Sense strand starting at position 3231 of SEQ ID NO: 317498
uagucaaggguuuaaagua

SEQ ID NO: 495674 - RNA, 19 nt, Artificial Sequence
  Description of Artificial Sequence: Synthetic oligonucleotide
  Antisense Strand to SEQ ID NO: 495673
uacuuuaaacccuugacua

SEQ ID NO: 495675 - RNA, 19 nt, Artificial Sequence
  Description of Artificial Sequence: Synthetic oligonucleotide
  Sense strand starting at position 3260 of SEQ ID NO: 317498
aguuaugcucucuagugua

SEQ ID NO: 495676 - RNA, 19 nt, Artificial Sequence
  Description of Artificial Sequence: Synthetic oligonucleotide
  Antisense Strand to SEQ ID NO: 495675
uacacuagagagcauaacu

SEQ ID NO: 495677 - RNA, 19 nt, Artificial Sequence
  Description of Artificial Sequence: Synthetic oligonucleotide
  Sense strand starting at position 3480 of SEQ ID NO: 317498
acacgucaacaaugaugaa

SEQ ID NO: 495678 - RNA, 19 nt, Artificial Sequence
  Description of Artificial Sequence: Synthetic oligonucleotide
  Antisense Strand to SEQ ID NO: 495677
uucaucauuguugacgugu

SEQ ID NO: 495679 - RNA, 19 nt, Artificial Sequence
  Description of Artificial Sequence: Synthetic oligonucleotide
  Sense strand starting at position 3492 of SEQ ID NO: 317498
ugaugaauauaaguagucu

SEQ ID NO: 495680 - RNA, 19 nt, Artificial Sequence
  Description of Artificial Sequence: Synthetic oligonucleotide
  Antisense Strand to SEQ ID NO: 495679
agacuacuuauauucauca

SEQ ID NO: 495681 - RNA, 19 nt, Artificial Sequence
  Description of Artificial Sequence: Synthetic oligonucleotide
  Sense strand starting at position 3496 of SEQ ID NO: 317498
gaauauaaguagucuaaug

SEQ ID NO: 495682 - RNA, 19 nt, Artificial Sequence
  Description of Artificial Sequence: Synthetic oligonucleotide
  Antisense Strand to SEQ ID NO: 495681
cauuagacuacuuauauuc

SEQ ID NO: 495683 - RNA, 19 nt, Artificial Sequence
  Description of Artificial Sequence: Synthetic oligonucleotide
  Sense strand starting at position 3532 of SEQ ID NO: 317498
cauguagugucacuaguga

SEQ ID NO: 495684 - RNA, 19 nt, Artificial Sequence
  Description of Artificial Sequence: Synthetic oligonucleotide
  Antisense Strand to SEQ ID NO: 495683
ucacuagugacacuacaug

SEQ ID NO: 495685 - RNA, 19 nt, Artificial Sequence
  Description of Artificial Sequence: Synthetic oligonucleotide
  Sense strand starting at position 3604 of SEQ ID NO: 317498
augcgacuuugauuuggua

SEQ ID NO: 495686 - RNA, 19 nt, Artificial Sequence
  Description of Artificial Sequence: Synthetic oligonucleotide
  Antisense Strand to SEQ ID NO: 495685
uaccaaaucaaagucgcau

SEQ ID NO: 495687 - RNA, 19 nt, Artificial Sequence
  Description of Artificial Sequence: Synthetic oligonucleotide
  Sense strand starting at position 3788 of SEQ ID NO: 317498
ccugaauaaucuguguucu

SEQ ID NO: 495688 - RNA, 19 nt, Artificial Sequence
  Description of Artificial Sequence: Synthetic oligonucleotide
  Antisense Strand to SEQ ID NO: 495687
agaacacagauuauucagg

SEQ ID NO: 495689 - RNA, 19 nt, Artificial Sequence
  Description of Artificial Sequence: Synthetic oligonucleotide
  Sense strand starting at position 3789 of SEQ ID NO: 317498
cugaauaaucuguguucuc

SEQ ID NO: 495690 - RNA, 19 nt, Artificial Sequence
  Description of Artificial Sequence: Synthetic oligonucleotide
  Antisense Strand to SEQ ID NO: 495689
gagaacacagauuauucag

SEQ ID NO: 495691 - RNA, 19 nt, Artificial Sequence
  Description of Artificial Sequence: Synthetic oligonucleotide
  Sense strand starting at position 3790 of SEQ ID NO: 317498
ugaauaaucuguguucucu

SEQ ID NO: 495692 - RNA, 19 nt, Artificial Sequence
  Description of Artificial Sequence: Synthetic oligonucleotide
  Antisense Strand to SEQ ID NO: 495691
agagaacacagauuauuca

SEQ ID NO: 495693 - RNA, 19 nt, Artificial Sequence
  Description of Artificial Sequence: Synthetic oligonucleotide
  Sense strand starting at position 3808 of SEQ ID NO: 317498
ucucauagcuagccagaua

SEQ ID NO: 495694 - RNA, 19 nt, Artificial Sequence
  Description of Artificial Sequence: Synthetic oligonucleotide
  Antisense Strand to SEQ ID NO: 495693
uaucuggcuagcuaugaga

SEQ ID NO: 495695 - RNA, 19 nt, Artificial Sequence
  Description of Artificial Sequence: Synthetic oligonucleotide
  Sense strand starting at position 3873 of SEQ ID NO: 317498
auuaguuauugcuucccau

SEQ ID NO: 495696 - RNA, 19 nt, Artificial Sequence
  Description of Artificial Sequence: Synthetic oligonucleotide
  Antisense Strand to SEQ ID NO: 495695
augggaagcaauaacuaau

SEQ ID NO: 495697 - RNA, 19 nt, Artificial Sequence
  Description of Artificial Sequence: Synthetic oligonucleotide
  Sense strand starting at position 3883 of SEQ ID NO: 317498
gcuucccauuugcuugaua

SEQ ID NO: 495698 - RNA, 19 nt, Artificial Sequence
  Description of Artificial Sequence: Synthetic oligonucleotide
  Antisense Strand to SEQ ID NO: 495697
uaucaagcaaaugggaagc

SEQ ID NO: 495699 - RNA, 19 nt, Artificial Sequence
  Description of Artificial Sequence: Synthetic oligonucleotide
  Sense strand starting at position 3896 of SEQ ID NO: 317498
uugauauuggccugguuag

SEQ ID NO: 495700 - RNA, 19 nt, Artificial Sequence
  Description of Artificial Sequence: Synthetic oligonucleotide
  Antisense Strand to SEQ ID NO: 495699
cuaaccaggccaauaucaa

SEQ ID NO: 495701 - RNA, 19 nt, Artificial Sequence
  Description of Artificial Sequence: Synthetic oligonucleotide
  Sense strand starting at position 3939 of SEQ ID NO: 317498
ccgcuaaaguaaguaauaa

SEQ ID NO: 495702 - RNA, 19 nt, Artificial Sequence
  Description of Artificial Sequence: Synthetic oligonucleotide
  Antisense Strand to SEQ ID NO: 495701
uuauuacuuacuuuagcgg

SEQ ID NO: 495703 - RNA, 19 nt, Artificial Sequence
  Description of Artificial Sequence: Synthetic oligonucleotide
  Sense strand starting at position 3950 of SEQ ID NO: 317498
aguaauaaugacuguccuu

SEQ ID NO: 495704 - RNA, 19 nt, Artificial Sequence
  Description of Artificial Sequence: Synthetic oligonucleotide
  Antisense Strand to SEQ ID NO: 495703
aaggacagucauuauuacu

SEQ ID NO: 495705 - RNA, 19 nt, Artificial Sequence
  Description of Artificial Sequence: Synthetic oligonucleotide
  Sense strand starting at position 3965 of SEQ ID NO: 317498
ccuuucucacagggugauu

SEQ ID NO: 495706 - RNA, 19 nt, Artificial Sequence
  Description of Artificial Sequence: Synthetic oligonucleotide
  Antisense Strand to SEQ ID NO: 495705
aaucacccugugagaaagg

SEQ ID NO: 495707 - RNA, 19 nt, Artificial Sequence
  Description of Artificial Sequence: Synthetic oligonucleotide
  Sense strand starting at position 3974 of SEQ ID NO: 317498
cagggugauugugugguua

SEQ ID NO: 495708 - RNA, 19 nt, Artificial Sequence
  Description of Artificial Sequence: Synthetic oligonucleotide
  Antisense Strand to SEQ ID NO: 495707
uaaccacacaaucacccug

SEQ ID NO: 495709 - RNA, 19 nt, Artificial Sequence
  Description of Artificial Sequence: Synthetic oligonucleotide
  Sense strand starting at position 110 of SEQ ID NO: 317499
gccacaaguguucuccguu

SEQ ID NO: 495710 - RNA, 19 nt, Artificial Sequence
  Description of Artificial Sequence: Synthetic oligonucleotide
  Antisense Strand to SEQ ID NO: 495709
aacggagaacacuuguggc

SEQ ID NO: 495711 - RNA, 19 nt, Artificial Sequence
  Description of Artificial Sequence: Synthetic oligonucleotide
  Sense strand starting at position 512 of SEQ ID NO: 317499
gaauccaggucccuuaaga

SEQ ID NO: 495712 - RNA, 19 nt, Artificial Sequence
  Description of Artificial Sequence: Synthetic oligonucleotide
  Antisense Strand to SEQ ID NO: 495711
ucuuaagggaccuggauuc

SEQ ID NO: 495713 - RNA, 19 nt, Artificial Sequence
  Description of Artificial Sequence: Synthetic oligonucleotide
  Sense strand starting at position 588 of SEQ ID NO: 317499
cgugcuuucggcccgaagu

SEQ ID NO: 495714 - RNA, 19 nt, Artificial Sequence
  Description of Artificial Sequence: Synthetic oligonucleotide
  Antisense Strand to SEQ ID NO: 495713
acuucgggccgaaagcacg

SEQ ID NO: 495715 - RNA, 19 nt, Artificial Sequence
  Description of Artificial Sequence: Synthetic oligonucleotide
  Sense strand starting at position 901 of SEQ ID NO: 317499
ggagacuugauguguauug

SEQ ID NO: 495716 - RNA, 19 nt, Artificial Sequence
  Description of Artificial Sequence: Synthetic oligonucleotide
  Antisense Strand to SEQ ID NO: 495715
caauacacaucaagucucc

SEQ ID NO: 495717 - RNA, 19 nt, Artificial Sequence
  Description of Artificial Sequence: Synthetic oligonucleotide
  Sense strand starting at position 1760 of SEQ ID NO: 317499
ucacuugguaucgaggaga

SEQ ID NO: 495718 - RNA, 19 nt, Artificial Sequence
  Description of Artificial Sequence: Synthetic oligonucleotide
  Antisense Strand to SEQ ID NO: 495717
ucuccucgauaccaaguga

SEQ ID NO: 495719 - RNA, 19 nt, Artificial Sequence
  Description of Artificial Sequence: Synthetic oligonucleotide
  Sense strand starting at position 1763 of SEQ ID NO: 317499
cuugguaucgaggagacga

SEQ ID NO: 495720 - RNA, 19 nt, Artificial Sequence
  Description of Artificial Sequence: Synthetic oligonucleotide
  Antisense Strand to SEQ ID NO: 495719
ucgucuccucgauaccaag

SEQ ID NO: 495721 - RNA, 19 nt, Artificial Sequence
  Description of Artificial Sequence: Synthetic oligonucleotide
  Sense strand starting at position 1777 of SEQ ID NO: 317499
gacgacucucgcgagaacu

SEQ ID NO: 495722 - RNA, 19 nt, Artificial Sequence
  Description of Artificial Sequence: Synthetic oligonucleotide
  Antisense Strand to SEQ ID NO: 495721
aguucucgcgagagucguc

SEQ ID NO: 495723 - RNA, 19 nt, Artificial Sequence
  Description of Artificial Sequence: Synthetic oligonucleotide
  Sense strand starting at position 2198 of SEQ ID NO: 317499
ucgagaugggaauaguagu

SEQ ID NO: 495724 - RNA, 19 nt, Artificial Sequence
  Description of Artificial Sequence: Synthetic oligonucleotide
  Antisense Strand to SEQ ID NO: 495723
acuacuauucccaucucga

SEQ ID NO: 495725 - RNA, 19 nt, Artificial Sequence
  Description of Artificial Sequence: Synthetic oligonucleotide
  Sense strand starting at position 2319 of SEQ ID NO: 317499
cugagucaagcucaauuga

SEQ ID NO: 495726 - RNA, 19 nt, Artificial Sequence
  Description of Artificial Sequence: Synthetic oligonucleotide
  Antisense Strand to SEQ ID NO: 495725
ucaauugagcuugacucag

SEQ ID NO: 495727 - RNA, 19 nt, Artificial Sequence
  Description of Artificial Sequence: Synthetic oligonucleotide
  Sense strand starting at position 2415 of SEQ ID NO: 317499
gguguagaugugggaacaa

SEQ ID NO: 495728 - RNA, 19 nt, Artificial Sequence
  Description of Artificial Sequence: Synthetic oligonucleotide
  Antisense Strand to SEQ ID NO: 495727
uuguucccacaucuacacc

SEQ ID NO: 495729 - RNA, 19 nt, Artificial Sequence
  Description of Artificial Sequence: Synthetic oligonucleotide
  Sense strand starting at position 2474 of SEQ ID NO: 317499
guucuugagccagaaagug

SEQ ID NO: 495730 - RNA, 19 nt, Artificial Sequence
  Description of Artificial Sequence: Synthetic oligonucleotide
  Antisense Strand to SEQ ID NO: 495729
cacuuucuggcucaagaac

SEQ ID NO: 495731 - RNA, 19 nt, Artificial Sequence
  Description of Artificial Sequence: Synthetic oligonucleotide
  Sense strand starting at position 2491 of SEQ ID NO: 317499
uguugagacuaauuaguua

SEQ ID NO: 495732 - RNA, 19 nt, Artificial Sequence
  Description of Artificial Sequence: Synthetic oligonucleotide
  Antisense Strand to SEQ ID NO: 495731
uaacuaauuagucucaaca

SEQ ID NO: 495733 - RNA, 19 nt, Artificial Sequence
  Description of Artificial Sequence: Synthetic oligonucleotide
  Sense strand starting at position 2503 of SEQ ID NO: 317499
uuaguuaauuagguagagu

SEQ ID NO: 495734 - RNA, 19 nt, Artificial Sequence
  Description of Artificial Sequence: Synthetic oligonucleotide
  Antisense Strand to SEQ ID NO: 495733
acucuaccuaauuaacuaa

SEQ ID NO: 495735 - RNA, 19 nt, Artificial Sequence
  Description of Artificial Sequence: Synthetic oligonucleotide
  Sense strand starting at position 2506 of SEQ ID NO: 317499
guuaauuagguagaguuua

SEQ ID NO: 495736 - RNA, 19 nt, Artificial Sequence
  Description of Artificial Sequence: Synthetic oligonucleotide
  Antisense Strand to SEQ ID NO: 495735
uaaacucuaccuaauuaac

SEQ ID NO: 495737 - RNA, 19 nt, Artificial Sequence
  Description of Artificial Sequence: Synthetic oligonucleotide
  Sense strand starting at position 2604 of SEQ ID NO: 317499
uagucaaggguuuaaagua

SEQ ID NO: 495738 - RNA, 19 nt, Artificial Sequence
  Description of Artificial Sequence: Synthetic oligonucleotide
  Antisense Strand to SEQ ID NO: 495737
uacuuuaaacccuugacua

SEQ ID NO: 495739 - RNA, 19 nt, Artificial Sequence
  Description of Artificial Sequence: Synthetic oligonucleotide
  Sense strand starting at position 2853 of SEQ ID NO: 317499
acacgucaacaaugaugaa

SEQ ID NO: 495740 - RNA, 19 nt, Artificial Sequence
  Description of Artificial Sequence: Synthetic oligonucleotide
  Antisense Strand to SEQ ID NO: 495739
uucaucauuguugacgugu

SEQ ID NO: 495741 - RNA, 19 nt, Artificial Sequence
  Description of Artificial Sequence: Synthetic oligonucleotide
  Sense strand starting at position 2865 of SEQ ID NO: 317499
ugaugaauauaaguagucu

SEQ ID NO: 495742 - RNA, 19 nt, Artificial Sequence
  Description of Artificial Sequence: Synthetic oligonucleotide
  Antisense Strand to SEQ ID NO: 495741
agacuacuuauauucauca

SEQ ID NO: 495743 - RNA, 19 nt, Artificial Sequence
  Description of Artificial Sequence: Synthetic oligonucleotide
  Sense strand starting at position 2869 of SEQ ID NO: 317499
gaauauaaguagucuaaug

SEQ ID NO: 495744 - RNA, 19 nt, Artificial Sequence
  Description of Artificial Sequence: Synthetic oligonucleotide
  Antisense Strand to SEQ ID NO: 495743
cauuagacuacuuauauuc

SEQ ID NO: 495745 - RNA, 19 nt, Artificial Sequence
  Description of Artificial Sequence: Synthetic oligonucleotide
  Sense strand starting at position 2977 of SEQ ID NO: 317499
augcgacuuugauuuggua

SEQ ID NO: 495746 - RNA, 19 nt, Artificial Sequence
  Description of Artificial Sequence: Synthetic oligonucleotide
  Antisense Strand to SEQ ID NO: 495745
uaccaaaucaaagucgcau

SEQ ID NO: 495747 - RNA, 19 nt, Artificial Sequence
  Description of Artificial Sequence: Synthetic oligonucleotide
  Sense strand starting at position 3161 of SEQ ID NO: 317499
ccugaauaaucuguguucu

SEQ ID NO: 495748 - RNA, 19 nt, Artificial Sequence
  Description of Artificial Sequence: Synthetic oligonucleotide
  Antisense Strand to SEQ ID NO: 495747
agaacacagauuauucagg

SEQ ID NO: 495749 - RNA, 19 nt, Artificial Sequence
  Description of Artificial Sequence: Synthetic oligonucleotide
  Sense strand starting at position 3163 of SEQ ID NO: 317499
ugaauaaucuguguucucu

SEQ ID NO: 495750 - RNA, 19 nt, Artificial Sequence
  Description of Artificial Sequence: Synthetic oligonucleotide
  Antisense Strand to SEQ ID NO: 495749
agagaacacagauuauuca

SEQ ID NO: 495751 - RNA, 19 nt, Artificial Sequence
  Description of Artificial Sequence: Synthetic oligonucleotide
  Sense strand starting at position 3181 of SEQ ID NO: 317499
ucucauagcuagccagaua

SEQ ID NO: 495752 - RNA, 19 nt, Artificial Sequence
  Description of Artificial Sequence: Synthetic oligonucleotide
  Antisense Strand to SEQ ID NO: 495751
uaucuggcuagcuaugaga

SEQ ID NO: 495753 - RNA, 19 nt, Artificial Sequence
  Description of Artificial Sequence: Synthetic oligonucleotide
  Sense strand starting at position 3256 of SEQ ID NO: 317499
gcuucccauuugcuugaua

SEQ ID NO: 495754 - RNA, 19 nt, Artificial Sequence
  Description of Artificial Sequence: Synthetic oligonucleotide
  Antisense Strand to SEQ ID NO: 495753
uaucaagcaaaugggaagc

SEQ ID NO: 495755 - RNA, 19 nt, Artificial Sequence
  Description of Artificial Sequence: Synthetic oligonucleotide
  Sense strand starting at position 3269 of SEQ ID NO: 317499
uugauauuggccugguuag

SEQ ID NO: 495756 - RNA, 19 nt, Artificial Sequence
  Description of Artificial Sequence: Synthetic oligonucleotide
  Antisense Strand to SEQ ID NO: 495755
cuaaccaggccaauaucaa

SEQ ID NO: 495757 - RNA, 19 nt, Artificial Sequence
  Description of Artificial Sequence: Synthetic oligonucleotide
  Sense strand starting at position 3312 of SEQ ID NO: 317499
ccgcuaaaguaaguaauaa

SEQ ID NO: 495758 - RNA, 19 nt, Artificial Sequence
  Description of Artificial Sequence: Synthetic oligonucleotide
  Antisense Strand to SEQ ID NO: 495757
uuauuacuuacuuuagcgg

SEQ ID NO: 495759 - RNA, 19 nt, Artificial Sequence
  Description of Artificial Sequence: Synthetic oligonucleotide
  Sense strand starting at position 3323 of SEQ ID NO: 317499
aguaauaaugacuguccuu

SEQ ID NO: 495760 - RNA, 19 nt, Artificial Sequence
  Description of Artificial Sequence: Synthetic oligonucleotide
  Antisense Strand to SEQ ID NO: 495759
aaggacagucauuauuacu

SEQ ID NO: 495761 - RNA, 19 nt, Artificial Sequence
  Description of Artificial Sequence: Synthetic oligonucleotide
  Sense strand starting at position 3338 of SEQ ID NO: 317499
ccuuucucacagggugauu

SEQ ID NO: 495762 - RNA, 19 nt, Artificial Sequence
  Description of Artificial Sequence: Synthetic oligonucleotide
  Antisense Strand to SEQ ID NO: 495761
aaucacccugugagaaagg

SEQ ID NO: 495763 - RNA, 19 nt, Artificial Sequence
  Description of Artificial Sequence: Synthetic oligonucleotide
  Sense strand starting at position 3367 of SEQ ID NO: 317499
agugucauaauauauguga

SEQ ID NO: 495764 - RNA, 19 nt, Artificial Sequence
  Description of Artificial Sequence: Synthetic oligonucleotide
  Antisense Strand to SEQ ID NO: 495763
ucacauauauuaugacacu

SEQ ID NO: 495765 - RNA, 19 nt, Artificial Sequence
  Description of Artificial Sequence: Synthetic oligonucleotide
  Sense strand starting at position 3370 of SEQ ID NO: 317499
gucauaauauaugugaaag

SEQ ID NO: 495766 - RNA, 19 nt, Artificial Sequence
  Description of Artificial Sequence: Synthetic oligonucleotide
  Antisense Strand to SEQ ID NO: 495765
cuuucacauauauuaugac

SEQ ID NO: 495767 - RNA, 19 nt, Artificial Sequence
  Description of Artificial Sequence: Synthetic oligonucleotide
  Sense strand starting at position 3401 of SEQ ID NO: 317499
ucuacagugcuguauaaau

SEQ ID NO: 495768 - RNA, 19 nt, Artificial Sequence
  Description of Artificial Sequence: Synthetic oligonucleotide
  Antisense Strand to SEQ ID NO: 495767
auuuauacagcacuguaga

SEQ ID NO: 495769 - RNA, 19 nt, Artificial Sequence
  Description of Artificial Sequence: Synthetic oligonucleotide
  Sense strand starting at position 3444 of SEQ ID NO: 317499
gacauuaacuggccauagu

SEQ ID NO: 495770 - RNA, 19 nt, Artificial Sequence
  Description of Artificial Sequence: Synthetic oligonucleotide
  Antisense Strand to SEQ ID NO: 495769
acuauggccaguuaauguc

SEQ ID NO: 495771 - RNA, 19 nt, Artificial Sequence
  Description of Artificial Sequence: Synthetic oligonucleotide
  Sense strand starting at position 3452 of SEQ ID NO: 317499
cuggccauagugugaaaca

SEQ ID NO: 495772 - RNA, 19 nt, Artificial Sequence
  Description of Artificial Sequence: Synthetic oligonucleotide
  Antisense Strand to SEQ ID NO: 495771
uguuucacacuauggccag

SEQ ID NO: 495773 - RNA, 19 nt, Artificial Sequence
  Description of Artificial Sequence: Synthetic oligonucleotide
  Sense strand starting at position 3461 of SEQ ID NO: 317499
gugugaaacaaauguauag

SEQ ID NO: 495774 - RNA, 19 nt, Artificial Sequence
  Description of Artificial Sequence: Synthetic oligonucleotide
  Antisense Strand to SEQ ID NO: 495773
cuauacauuuguuucacac

SEQ ID NO: 495775 - RNA, 19 nt, Artificial Sequence
  Description of Artificial Sequence: Synthetic oligonucleotide
  Sense strand starting at position 3706 of SEQ ID NO: 317499
ccaagaucacugcgacaga

SEQ ID NO: 495776 - RNA, 19 nt, Artificial Sequence
  Description of Artificial Sequence: Synthetic oligonucleotide
  Antisense Strand to SEQ ID NO: 495775
ucugucgcagugaucuugg

SEQ ID NO: 495777 - RNA, 19 nt, Artificial Sequence
  Description of Artificial Sequence: Synthetic oligonucleotide
  Sense strand starting at position 3803 of SEQ ID NO: 317499
aaaggcaagugauugugua

SEQ ID NO: 495778 - RNA, 19 nt, Artificial Sequence
  Description of Artificial Sequence: Synthetic oligonucleotide
  Antisense Strand to SEQ ID NO: 495777
uacacaaucacuugccuuu

SEQ ID NO: 495779 - RNA, 19 nt, Artificial Sequence
  Description of Artificial Sequence: Synthetic oligonucleotide
  Sense strand starting at position 3804 of SEQ ID NO: 317499
aaggcaagugauuguguaa

SEQ ID NO: 495780 - RNA, 19 nt, Artificial Sequence
  Description of Artificial Sequence: Synthetic oligonucleotide
  Antisense Strand to SEQ ID NO: 495779
uuacacaaucacuugccuu

SEQ ID NO: 495781 - RNA, 19 nt, Artificial Sequence
  Description of Artificial Sequence: Synthetic oligonucleotide
  Sense strand starting at position 3811 of SEQ ID NO: 317499
gugauuguguaaucacaaa

SEQ ID NO: 495782 - RNA, 19 nt, Artificial Sequence
  Description of Artificial Sequence: Synthetic oligonucleotide
  Antisense Strand to SEQ ID NO: 495781
uuugugauuacacaaucac

SEQ ID NO: 495783 - RNA, 19 nt, Artificial Sequence
  Description of Artificial Sequence: Synthetic oligonucleotide
  Sense strand starting at position 3833 of SEQ ID NO: 317499
auuauuguuaggcagugaa

SEQ ID NO: 495784 - RNA, 19 nt, Artificial Sequence
  Description of Artificial Sequence: Synthetic oligonucleotide
  Antisense Strand to SEQ ID NO: 495783
uucacugccuaacaauaau

SEQ ID NO: 495785 - RNA, 19 nt, Artificial Sequence
  Description of Artificial Sequence: Synthetic oligonucleotide
  Sense strand starting at position 3837 of SEQ ID NO: 317499
uuguuaggcagugaaguaa

SEQ ID NO: 495786 - RNA, 19 nt, Artificial Sequence
  Description of Artificial Sequence: Synthetic oligonucleotide
  Antisense Strand to SEQ ID NO: 495785
uuacuucacugccuaacaa

SEQ ID NO: 495787 - RNA, 19 nt, Artificial Sequence
  Description of Artificial Sequence: Synthetic oligonucleotide
  Sense strand starting at position 3871 of SEQ ID NO: 317499
gggcuuucuguuuacaagu

SEQ ID NO: 495788 - RNA, 19 nt, Artificial Sequence
  Description of Artificial Sequence: Synthetic oligonucleotide
  Antisense Strand to SEQ ID NO: 495787
acuuguaaacagaaagccc

SEQ ID NO: 495789 - RNA, 19 nt, Artificial Sequence
  Description of Artificial Sequence: Synthetic oligonucleotide
  Sense strand starting at position 433 of SEQ ID NO: 317500
auuauaacuggcuguuaca

SEQ ID NO: 495790 - RNA, 19 nt, Artificial Sequence
  Description of Artificial Sequence: Synthetic oligonucleotide
  Antisense Strand to SEQ ID NO: 495789
uguaacagccaguuauaau

SEQ ID NO: 495791 - RNA, 19 nt, Artificial Sequence
  Description of Artificial Sequence: Synthetic oligonucleotide
  Sense strand starting at position 499 of SEQ ID NO: 317500
uguuguuaaguguagaacu

SEQ ID NO: 495792 - RNA, 19 nt, Artificial Sequence
  Description of Artificial Sequence: Synthetic oligonucleotide
  Antisense Strand to SEQ ID NO: 495791
aguucuacacuuaacaaca

SEQ ID NO: 495793 - RNA, 19 nt, Artificial Sequence
  Description of Artificial Sequence: Synthetic oligonucleotide
  Sense strand starting at position 526 of SEQ ID NO: 317500
ugaggcauauuauuaagau

SEQ ID NO: 495794 - RNA, 19 nt, Artificial Sequence
  Description of Artificial Sequence: Synthetic oligonucleotide
  Antisense Strand to SEQ ID NO: 495793
aucuuaauaauaugccuca

SEQ ID NO: 495795 - RNA, 19 nt, Artificial Sequence
  Description of Artificial Sequence: Synthetic oligonucleotide
  Sense strand starting at position 614 of SEQ ID NO: 317500
aagucauagcaagaaaguu

SEQ ID NO: 495796 - RNA, 19 nt, Artificial Sequence
  Description of Artificial Sequence: Synthetic oligonucleotide
  Antisense Strand to SEQ ID NO: 495795
aacuuucuugcuaugacuu

SEQ ID NO: 495797 - RNA, 19 nt, Artificial Sequence
  Description of Artificial Sequence: Synthetic oligonucleotide
  Sense strand starting at position 1045 of SEQ ID NO: 317500
guguuaguguauuuaugug

SEQ ID NO: 495798 - RNA, 19 nt, Artificial Sequence
  Description of Artificial Sequence: Synthetic oligonucleotide
  Antisense Strand to SEQ ID NO: 495797
cacauaaauacacuaacac

SEQ ID NO: 495799 - RNA, 19 nt, Artificial Sequence
  Description of Artificial Sequence: Synthetic oligonucleotide
  Sense strand starting at position 1540 of SEQ ID NO: 317500
uacgaaucuucucugagug

SEQ ID NO: 495800 - RNA, 19 nt, Artificial Sequence
  Description of Artificial Sequence: Synthetic oligonucleotide
  Antisense Strand to SEQ ID NO: 495799
cacucagagaagauucgua

SEQ ID NO: 495801 - RNA, 19 nt, Artificial Sequence
  Description of Artificial Sequence: Synthetic oligonucleotide
  Sense strand starting at position 1544 of SEQ ID NO: 317500
aaucuucucugaguggcaa

SEQ ID NO: 495802 - RNA, 19 nt, Artificial Sequence
  Description of Artificial Sequence: Synthetic oligonucleotide
  Antisense Strand to SEQ ID NO: 495801
uugccacucagagaagauu

SEQ ID NO: 495803 - RNA, 19 nt, Artificial Sequence
  Description of Artificial Sequence: Synthetic oligonucleotide
  Sense strand starting at position 1545 of SEQ ID NO: 317500
aucuucucugaguggcaaa

SEQ ID NO: 495804 - RNA, 19 nt, Artificial Sequence
  Description of Artificial Sequence: Synthetic oligonucleotide
  Antisense Strand to SEQ ID NO: 495803
uuugccacucagagaagau

SEQ ID NO: 495805 - RNA, 19 nt, Artificial Sequence
  Description of Artificial Sequence: Synthetic oligonucleotide
  Sense strand starting at position 1622 of SEQ ID NO: 317500
caguuccugguuuaguuaa

SEQ ID NO: 495806 - RNA, 19 nt, Artificial Sequence
  Description of Artificial Sequence: Synthetic oligonucleotide
  Antisense Strand to SEQ ID NO: 495805
uuaacuaaaccaggaacug

SEQ ID NO: 495807 - RNA, 19 nt, Artificial Sequence
  Description of Artificial Sequence: Synthetic oligonucleotide
  Sense strand starting at position 1720 of SEQ ID NO: 317500
ggauacucaugggcgagua

SEQ ID NO: 495808 - RNA, 19 nt, Artificial Sequence
  Description of Artificial Sequence: Synthetic oligonucleotide
  Antisense Strand to SEQ ID NO: 495807
uacucgcccaugaguaucc

SEQ ID NO: 495809 - RNA, 19 nt, Artificial Sequence
  Description of Artificial Sequence: Synthetic oligonucleotide
  Sense strand starting at position 1828 of SEQ ID NO: 317500
aaggcacuuucgguuagaa

SEQ ID NO: 495810 - RNA, 19 nt, Artificial Sequence
  Description of Artificial Sequence: Synthetic oligonucleotide
  Antisense Strand to SEQ ID NO: 495809
uucuaaccgaaagugccuu

SEQ ID NO: 495811 - RNA, 19 nt, Artificial Sequence
  Description of Artificial Sequence: Synthetic oligonucleotide
  Sense strand starting at position 1830 of SEQ ID NO: 317500
ggcacuuucgguuagaaag

SEQ ID NO: 495812 - RNA, 19 nt, Artificial Sequence
  Description of Artificial Sequence: Synthetic oligonucleotide
  Antisense Strand to SEQ ID NO: 495811
cuuucuaaccgaaagugcc

SEQ ID NO: 495813 - RNA, 19 nt, Artificial Sequence
  Description of Artificial Sequence: Synthetic oligonucleotide
  Sense strand starting at position 2646 of SEQ ID NO: 317500
ggcuaagucgucguuaucu

SEQ ID NO: 495814 - RNA, 19 nt, Artificial Sequence
  Description of Artificial Sequence: Synthetic oligonucleotide
  Antisense Strand to SEQ ID NO: 495813
agauaacgacgacuuagcc

SEQ ID NO: 495815 - RNA, 19 nt, Artificial Sequence
  Description of Artificial Sequence: Synthetic oligonucleotide
  Sense strand starting at position 2754 of SEQ ID NO: 317500
acacguaacacguauauga

SEQ ID NO: 495816 - RNA, 19 nt, Artificial Sequence
  Description of Artificial Sequence: Synthetic oligonucleotide
  Antisense Strand to SEQ ID NO: 495815
ucauauacguguuacgugu

SEQ ID NO: 495817 - RNA, 19 nt, Artificial Sequence
  Description of Artificial Sequence: Synthetic oligonucleotide
  Sense strand starting at position 2805 of SEQ ID NO: 317500
ccuccauucccucagguua

SEQ ID NO: 495818 - RNA, 19 nt, Artificial Sequence
  Description of Artificial Sequence: Synthetic oligonucleotide
  Antisense Strand to SEQ ID NO: 495817
uaaccugagggaauggagg

SEQ ID NO: 495819 - RNA, 19 nt, Artificial Sequence
  Description of Artificial Sequence: Synthetic oligonucleotide
  Sense strand starting at position 2810 of SEQ ID NO: 317500
auucccucagguuagaauu

SEQ ID NO: 495820 - RNA, 19 nt, Artificial Sequence
  Description of Artificial Sequence: Synthetic oligonucleotide
  Antisense Strand to SEQ ID NO: 495819
aauucuaaccugagggaau

SEQ ID NO: 495821 - RNA, 19 nt, Artificial Sequence
  Description of Artificial Sequence: Synthetic oligonucleotide
  Sense strand starting at position 2829 of SEQ ID NO: 317500
gaccuaucauagguggcau

SEQ ID NO: 495822 - RNA, 19 nt, Artificial Sequence
  Description of Artificial Sequence: Synthetic oligonucleotide
  Antisense Strand to SEQ ID NO: 495821
augccaccuaugauagguc

SEQ ID NO: 495823 - RNA, 19 nt, Artificial Sequence
  Description of Artificial Sequence: Synthetic oligonucleotide
  Sense strand starting at position 2888 of SEQ ID NO: 317500
gguaacuuaaguuggaaga

SEQ ID NO: 495824 - RNA, 19 nt, Artificial Sequence
  Description of Artificial Sequence: Synthetic oligonucleotide
  Antisense Strand to SEQ ID NO: 495823
ucuuccaacuuaaguuacc

SEQ ID NO: 495825 - RNA, 19 nt, Artificial Sequence
  Description of Artificial Sequence: Synthetic oligonucleotide
  Sense strand starting at position 2889 of SEQ ID NO: 317500
guaacuuaaguuggaagaa

SEQ ID NO: 495826 - RNA, 19 nt, Artificial Sequence
  Description of Artificial Sequence: Synthetic oligonucleotide
  Antisense Strand to SEQ ID NO: 495825
uucuuccaacuuaaguuac

SEQ ID NO: 495827 - RNA, 19 nt, Artificial Sequence
  Description of Artificial Sequence: Synthetic oligonucleotide
  Sense strand starting at position 2939 of SEQ ID NO: 317500
cgguaugaggagugaaauc

SEQ ID NO: 495828 - RNA, 19 nt, Artificial Sequence
  Description of Artificial Sequence: Synthetic oligonucleotide
  Antisense Strand to SEQ ID NO: 495827
gauuucacuccucauaccg

SEQ ID NO: 495829 - RNA, 19 nt, Artificial Sequence
  Description of Artificial Sequence: Synthetic oligonucleotide
  Sense strand starting at position 2974 of SEQ ID NO: 317500
agugaauauauguaacguu

SEQ ID NO: 495830 - RNA, 19 nt, Artificial Sequence
  Description of Artificial Sequence: Synthetic oligonucleotide
  Antisense Strand to SEQ ID NO: 495829
aacguuacauauauucacu

SEQ ID NO: 495831 - RNA, 19 nt, Artificial Sequence
  Description of Artificial Sequence: Synthetic oligonucleotide
  Sense strand starting at position 2984 of SEQ ID NO: 317500
uguaacguucuauacuuaa

SEQ ID NO: 495832 - RNA, 19 nt, Artificial Sequence
  Description of Artificial Sequence: Synthetic oligonucleotide
  Antisense Strand to SEQ ID NO: 495831
uuaaguauagaacguuaca

SEQ ID NO: 495833 - RNA, 19 nt, Artificial Sequence
  Description of Artificial Sequence: Synthetic oligonucleotide
  Sense strand starting at position 2987 of SEQ ID NO: 317500
aacguucuauacuuaagga

SEQ ID NO: 495834 - RNA, 19 nt, Artificial Sequence
  Description of Artificial Sequence: Synthetic oligonucleotide
  Antisense Strand to SEQ ID NO: 495833
uccuuaaguauagaacguu

SEQ ID NO: 495835 - RNA, 19 nt, Artificial Sequence
  Description of Artificial Sequence: Synthetic oligonucleotide
  Sense strand starting at position 3068 of SEQ ID NO: 317500
gcagucaacacuugggaga

SEQ ID NO: 495836 - RNA, 19 nt, Artificial Sequence
  Description of Artificial Sequence: Synthetic oligonucleotide
  Antisense Strand to SEQ ID NO: 495835
ucucccaaguguugacugc

SEQ ID NO: 495837 - RNA, 19 nt, Artificial Sequence
  Description of Artificial Sequence: Synthetic oligonucleotide
  Sense strand starting at position 3069 of SEQ ID NO: 317500
cagucaacacuugggagau

SEQ ID NO: 495838 - RNA, 19 nt, Artificial Sequence
  Description of Artificial Sequence: Synthetic oligonucleotide
  Antisense Strand to SEQ ID NO: 495837
aucucccaaguguugacug

SEQ ID NO: 495839 - RNA, 19 nt, Artificial Sequence
  Description of Artificial Sequence: Synthetic oligonucleotide
  Sense strand starting at position 3079 of SEQ ID NO: 317500
uugggagauuguguugagu

SEQ ID NO: 495840 - RNA, 19 nt, Artificial Sequence
  Description of Artificial Sequence: Synthetic oligonucleotide
  Antisense Strand to SEQ ID NO: 495839
acucaacacaaucucccaa

SEQ ID NO: 495841 - RNA, 19 nt, Artificial Sequence
  Description of Artificial Sequence: Synthetic oligonucleotide
  Sense strand starting at position 3191 of SEQ ID NO: 317500
uagguuaucagggagugca

SEQ ID NO: 495842 - RNA, 19 nt, Artificial Sequence
  Description of Artificial Sequence: Synthetic oligonucleotide
  Antisense Strand to SEQ ID NO: 495841
ugcacucccugauaaccua

SEQ ID NO: 495843 - RNA, 19 nt, Artificial Sequence
  Description of Artificial Sequence: Synthetic oligonucleotide
  Sense strand starting at position 3260 of SEQ ID NO: 317500
guucuaaagaucuguagua

SEQ ID NO: 495844 - RNA, 19 nt, Artificial Sequence
  Description of Artificial Sequence: Synthetic oligonucleotide
  Antisense Strand to SEQ ID NO: 495843
uacuacagaucuuuagaac

SEQ ID NO: 495845 - RNA, 19 nt, Artificial Sequence
  Description of Artificial Sequence: Synthetic oligonucleotide
  Sense strand starting at position 3261 of SEQ ID NO: 317500
uucuaaagaucuguaguac

SEQ ID NO: 495846 - RNA, 19 nt, Artificial Sequence
  Description of Artificial Sequence: Synthetic oligonucleotide
  Antisense Strand to SEQ ID NO: 495845
guacuacagaucuuuagaa

SEQ ID NO: 495847 - RNA, 19 nt, Artificial Sequence
  Description of Artificial Sequence: Synthetic oligonucleotide
  Sense strand starting at position 3270 of SEQ ID NO: 317500
ucuguaguaccugaccuaa

SEQ ID NO: 495848 - RNA, 19 nt, Artificial Sequence
  Description of Artificial Sequence: Synthetic oligonucleotide
  Antisense Strand to SEQ ID NO: 495847
uuaggucagguacuacaga

SEQ ID NO: 495849 - RNA, 19 nt, Artificial Sequence
  Description of Artificial Sequence: Synthetic oligonucleotide
  Sense strand starting at position 3305 of SEQ ID NO: 317500
agcugucugguagaagaaa

SEQ ID NO: 495850 - RNA, 19 nt, Artificial Sequence
  Description of Artificial Sequence: Synthetic oligonucleotide
  Antisense Strand to SEQ ID NO: 495849
uuucuucuaccagacagcu

SEQ ID NO: 495851 - RNA, 19 nt, Artificial Sequence
  Description of Artificial Sequence: Synthetic oligonucleotide
  Sense strand starting at position 3370 of SEQ ID NO: 317500
caaauuagugaagguuauu

SEQ ID NO: 495852 - RNA, 19 nt, Artificial Sequence
  Description of Artificial Sequence: Synthetic oligonucleotide
  Antisense Strand to SEQ ID NO: 495851
aauaaccuucacuaauuug

SEQ ID NO: 495853 - RNA, 19 nt, Artificial Sequence
  Description of Artificial Sequence: Synthetic oligonucleotide
  Sense strand starting at position 3381 of SEQ ID NO: 317500
agguuauugggaggugaau

SEQ ID NO: 495854 - RNA, 19 nt, Artificial Sequence
  Description of Artificial Sequence: Synthetic oligonucleotide
  Antisense Strand to SEQ ID NO: 495853
auucaccucccaauaaccu

SEQ ID NO: 495855 - RNA, 19 nt, Artificial Sequence
  Description of Artificial Sequence: Synthetic oligonucleotide
  Sense strand starting at position 3390 of SEQ ID NO: 317500
ggaggugaauuucagucua

SEQ ID NO: 495856 - RNA, 19 nt, Artificial Sequence
  Description of Artificial Sequence: Synthetic oligonucleotide
  Antisense Strand to SEQ ID NO: 495855
uagacugaaauucaccucc

SEQ ID NO: 495857 - RNA, 19 nt, Artificial Sequence
  Description of Artificial Sequence: Synthetic oligonucleotide
  Sense strand starting at position 3512 of SEQ ID NO: 317500
ugguggguggucgauagau

SEQ ID NO: 495858 - RNA, 19 nt, Artificial Sequence
  Description of Artificial Sequence: Synthetic oligonucleotide
  Antisense Strand to SEQ ID NO: 495857
aucuaucgaccacccacca

SEQ ID NO: 495859 - RNA, 19 nt, Artificial Sequence
  Description of Artificial Sequence: Synthetic oligonucleotide
  Sense strand starting at position 3522 of SEQ ID NO: 317500
ucgauagauuuagaaggga

SEQ ID NO: 495860 - RNA, 19 nt, Artificial Sequence
  Description of Artificial Sequence: Synthetic oligonucleotide
  Antisense Strand to SEQ ID NO: 495859
ucccuucuaaaucuaucga

SEQ ID NO: 495861 - RNA, 19 nt, Artificial Sequence
  Description of Artificial Sequence: Synthetic oligonucleotide
  Sense strand starting at position 3580 of SEQ ID NO: 317500
auugaauuauggucagaca

SEQ ID NO: 495862 - RNA, 19 nt, Artificial Sequence
  Description of Artificial Sequence: Synthetic oligonucleotide
  Antisense Strand to SEQ ID NO: 495861
ugucugaccauaauucaau

SEQ ID NO: 495863 - RNA, 19 nt, Artificial Sequence
  Description of Artificial Sequence: Synthetic oligonucleotide
  Sense strand starting at position 3606 of SEQ ID NO: 317500
uguugaguggauugugaga

SEQ ID NO: 495864 - RNA, 19 nt, Artificial Sequence
  Description of Artificial Sequence: Synthetic oligonucleotide
  Antisense Strand to SEQ ID NO: 495863
ucucacaauccacucaaca

SEQ ID NO: 495865 - RNA, 19 nt, Artificial Sequence
  Description of Artificial Sequence: Synthetic oligonucleotide
  Sense strand starting at position 3799 of SEQ ID NO: 317500
cuaccaguuuacucugaca

SEQ ID NO: 495866 - RNA, 19 nt, Artificial Sequence
  Description of Artificial Sequence: Synthetic oligonucleotide
  Antisense Strand to SEQ ID NO: 495865
ugucagaguaaacugguag

SEQ ID NO: 495867 - RNA, 19 nt, Artificial Sequence
  Description of Artificial Sequence: Synthetic oligonucleotide
  Sense strand starting at position 3801 of SEQ ID NO: 317500
accaguuuacucugacaga

SEQ ID NO: 495868 - RNA, 19 nt, Artificial Sequence
  Description of Artificial Sequence: Synthetic oligonucleotide
  Antisense Strand to SEQ ID NO: 495867
ucugucagaguaaacuggu

SEQ ID NO: 495869 - RNA, 19 nt, Artificial Sequence
  Description of Artificial Sequence: Synthetic oligonucleotide
  Sense strand starting at position 108 of SEQ ID NO: 317501
ucaaguuagcuguaaacac

SEQ ID NO: 495870 - RNA, 19 nt, Artificial Sequence
  Description of Artificial Sequence: Synthetic oligonucleotide
  Antisense Strand to SEQ ID NO: 495869
guguuuacagcuaacuuga

SEQ ID NO: 495871 - RNA, 19 nt, Artificial Sequence
  Description of Artificial Sequence: Synthetic oligonucleotide
  Sense strand starting at position 234 of SEQ ID NO: 317501
aucuuagagcagugcacaa

SEQ ID NO: 495872 - RNA, 19 nt, Artificial Sequence
  Description of Artificial Sequence: Synthetic oligonucleotide
  Antisense Strand to SEQ ID NO: 495871
uugugcacugcucuaagau

SEQ ID NO: 495873 - RNA, 19 nt, Artificial Sequence
  Description of Artificial Sequence: Synthetic oligonucleotide
  Sense strand starting at position 291 of SEQ ID NO: 317501
ucacauuauuacgaaagga

SEQ ID NO: 495874 - RNA, 19 nt, Artificial Sequence
  Description of Artificial Sequence: Synthetic oligonucleotide
  Antisense Strand to SEQ ID NO: 495873
uccuuucguaauaauguga

SEQ ID NO: 495875 - RNA, 19 nt, Artificial Sequence
  Description of Artificial Sequence: Synthetic oligonucleotide
  Sense strand starting at position 494 of SEQ ID NO: 317501
acgaaacaaggguguuauu

SEQ ID NO: 495876 - RNA, 19 nt, Artificial Sequence
  Description of Artificial Sequence: Synthetic oligonucleotide
  Antisense Strand to SEQ ID NO: 495875
aauaacacccuuguuucgu

SEQ ID NO: 495877 - RNA, 19 nt, Artificial Sequence
  Description of Artificial Sequence: Synthetic oligonucleotide
  Sense strand starting at position 637 of SEQ ID NO: 317501
gugucccucggauaaauag

SEQ ID NO: 495878 - RNA, 19 nt, Artificial Sequence
  Description of Artificial Sequence: Synthetic oligonucleotide
  Antisense Strand to SEQ ID NO: 495877
cuauuuauccgagggacac

SEQ ID NO: 495879 - RNA, 19 nt, Artificial Sequence
  Description of Artificial Sequence: Synthetic oligonucleotide
  Sense strand starting at position 647 of SEQ ID NO: 317501
gauaaauagcuucggguga

SEQ ID NO: 495880 - RNA, 19 nt, Artificial Sequence
  Description of Artificial Sequence: Synthetic oligonucleotide
  Antisense Strand to SEQ ID NO: 495879
ucacccgaagcuauuuauc

SEQ ID NO: 495881 - RNA, 19 nt, Artificial Sequence
  Description of Artificial Sequence: Synthetic oligonucleotide
  Sense strand starting at position 726 of SEQ ID NO: 317501
cccacuuauucgguguaac

SEQ ID NO: 495882 - RNA, 19 nt, Artificial Sequence
  Description of Artificial Sequence: Synthetic oligonucleotide
  Antisense Strand to SEQ ID NO: 495881
guuacaccgaauaaguggg

SEQ ID NO: 495883 - RNA, 19 nt, Artificial Sequence
  Description of Artificial Sequence: Synthetic oligonucleotide
  Sense strand starting at position 727 of SEQ ID NO: 317501
ccacuuauucgguguaacc

SEQ ID NO: 495884 - RNA, 19 nt, Artificial Sequence
  Description of Artificial Sequence: Synthetic oligonucleotide
  Antisense Strand to SEQ ID NO: 495883
gguuacaccgaauaagugg

SEQ ID NO: 495885 - RNA, 19 nt, Artificial Sequence
  Description of Artificial Sequence: Synthetic oligonucleotide
  Sense strand starting at position 737 of SEQ ID NO: 317501
gguguaaccugcccagagu

SEQ ID NO: 495886 - RNA, 19 nt, Artificial Sequence
  Description of Artificial Sequence: Synthetic oligonucleotide
  Antisense Strand to SEQ ID NO: 495885
acucugggcagguuacacc

SEQ ID NO: 495887 - RNA, 19 nt, Artificial Sequence
  Description of Artificial Sequence: Synthetic oligonucleotide
  Sense strand starting at position 748 of SEQ ID NO: 317501
cccagagucgacuaagagu

SEQ ID NO: 495888 - RNA, 19 nt, Artificial Sequence
  Description of Artificial Sequence: Synthetic oligonucleotide
  Antisense Strand to SEQ ID NO: 495887
acucuuagucgacucuggg

SEQ ID NO: 495889 - RNA, 19 nt, Artificial Sequence
  Description of Artificial Sequence: Synthetic oligonucleotide
  Sense strand starting at position 757 of SEQ ID NO: 317501
gacuaagaguuucuacuag

SEQ ID NO: 495890 - RNA, 19 nt, Artificial Sequence
  Description of Artificial Sequence: Synthetic oligonucleotide
  Antisense Strand to SEQ ID NO: 495889
cuaguagaaacucuuaguc

SEQ ID NO: 495891 - RNA, 19 nt, Artificial Sequence
  Description of Artificial Sequence: Synthetic oligonucleotide
  Sense strand starting at position 1107 of SEQ ID NO: 317501
gccacaaguguucuccguu

SEQ ID NO: 495892 - RNA, 19 nt, Artificial Sequence
  Description of Artificial Sequence: Synthetic oligonucleotide
  Antisense Strand to SEQ ID NO: 495891
aacggagaacacuuguggc

SEQ ID NO: 495893 - RNA, 19 nt, Artificial Sequence
  Description of Artificial Sequence: Synthetic oligonucleotide
  Sense strand starting at position 1150 of SEQ ID NO: 317501
caagaaguauaucugcguu

SEQ ID NO: 495894 - RNA, 19 nt, Artificial Sequence
  Description of Artificial Sequence: Synthetic oligonucleotide
  Antisense Strand to SEQ ID NO: 495893
aacgcagauauacuucuug

SEQ ID NO: 495895 - RNA, 19 nt, Artificial Sequence
  Description of Artificial Sequence: Synthetic oligonucleotide
  Sense strand starting at position 1152 of SEQ ID NO: 317501
agaaguauaucugcguucu

SEQ ID NO: 495896 - RNA, 19 nt, Artificial Sequence
  Description of Artificial Sequence: Synthetic oligonucleotide
  Antisense Strand to SEQ ID NO: 495895
agaacgcagauauacuucu

SEQ ID NO: 495897 - RNA, 19 nt, Artificial Sequence
  Description of Artificial Sequence: Synthetic oligonucleotide
  Sense strand starting at position 1509 of SEQ ID NO: 317501
gaauccaggucccuuaaga

SEQ ID NO: 495898 - RNA, 19 nt, Artificial Sequence
  Description of Artificial Sequence: Synthetic oligonucleotide
  Antisense Strand to SEQ ID NO: 495897
ucuuaagggaccuggauuc

SEQ ID NO: 495899 - RNA, 19 nt, Artificial Sequence
  Description of Artificial Sequence: Synthetic oligonucleotide
  Sense strand starting at position 1585 of SEQ ID NO: 317501
cgugcuuucggcccgaagu

SEQ ID NO: 495900 - RNA, 19 nt, Artificial Sequence
  Description of Artificial Sequence: Synthetic oligonucleotide
  Antisense Strand to SEQ ID NO: 495899
acuucgggccgaaagcacg

SEQ ID NO: 495901 - RNA, 19 nt, Artificial Sequence
  Description of Artificial Sequence: Synthetic oligonucleotide
  Sense strand starting at position 1848 of SEQ ID NO: 317501
ucgguuucuguccaaaggu

SEQ ID NO: 495902 - RNA, 19 nt, Artificial Sequence
  Description of Artificial Sequence: Synthetic oligonucleotide
  Antisense Strand to SEQ ID NO: 495901
accuuuggacagaaaccga

SEQ ID NO: 495903 - RNA, 19 nt, Artificial Sequence
  Description of Artificial Sequence: Synthetic oligonucleotide
  Sense strand starting at position 1898 of SEQ ID NO: 317501
ggagacuugauguguauug

SEQ ID NO: 495904 - RNA, 19 nt, Artificial Sequence
  Description of Artificial Sequence: Synthetic oligonucleotide
  Antisense Strand to SEQ ID NO: 495903
caauacacaucaagucucc

SEQ ID NO: 495905 - RNA, 19 nt, Artificial Sequence
  Description of Artificial Sequence: Synthetic oligonucleotide
  Sense strand starting at position 2505 of SEQ ID NO: 317501
ccgagugaauacgugucaa

SEQ ID NO: 495906 - RNA, 19 nt, Artificial Sequence
  Description of Artificial Sequence: Synthetic oligonucleotide
  Antisense Strand to SEQ ID NO: 495905
uugacacguauucacucgg

SEQ ID NO: 495907 - RNA, 19 nt, Artificial Sequence
  Description of Artificial Sequence: Synthetic oligonucleotide
  Sense strand starting at position 2748 of SEQ ID NO: 317501
ccaguuuccucacuuggua

SEQ ID NO: 495908 - RNA, 19 nt, Artificial Sequence
  Description of Artificial Sequence: Synthetic oligonucleotide
  Antisense Strand to SEQ ID NO: 495907
uaccaagugaggaaacugg

SEQ ID NO: 495909 - RNA, 19 nt, Artificial Sequence
  Description of Artificial Sequence: Synthetic oligonucleotide
  Sense strand starting at position 2757 of SEQ ID NO: 317501
ucacuugguaucgaggaga

SEQ ID NO: 495910 - RNA, 19 nt, Artificial Sequence
  Description of Artificial Sequence: Synthetic oligonucleotide
  Antisense Strand to SEQ ID NO: 495909
ucuccucgauaccaaguga

SEQ ID NO: 495911 - RNA, 19 nt, Artificial Sequence
  Description of Artificial Sequence: Synthetic oligonucleotide
  Sense strand starting at position 2760 of SEQ ID NO: 317501
cuugguaucgaggagacga

SEQ ID NO: 495912 - RNA, 19 nt, Artificial Sequence
  Description of Artificial Sequence: Synthetic oligonucleotide
  Antisense Strand to SEQ ID NO: 495911
ucgucuccucgauaccaag

SEQ ID NO: 495913 - RNA, 19 nt, Artificial Sequence
  Description of Artificial Sequence: Synthetic oligonucleotide
  Sense strand starting at position 2774 of SEQ ID NO: 317501
gacgacucucgcgagaacu

SEQ ID NO: 495914 - RNA, 19 nt, Artificial Sequence
  Description of Artificial Sequence: Synthetic oligonucleotide
  Antisense Strand to SEQ ID NO: 495913
aguucucgcgagagucguc

SEQ ID NO: 495915 - RNA, 19 nt, Artificial Sequence
  Description of Artificial Sequence: Synthetic oligonucleotide
  Sense strand starting at position 2815 of SEQ ID NO: 317501
guagcucugcaaugacuua

SEQ ID NO: 495916 - RNA, 19 nt, Artificial Sequence
  Description of Artificial Sequence: Synthetic oligonucleotide
  Antisense Strand to SEQ ID NO: 495915
uaagucauugcagagcuac

SEQ ID NO: 495917 - RNA, 19 nt, Artificial Sequence
  Description of Artificial Sequence: Synthetic oligonucleotide
  Sense strand starting at position 3070 of SEQ ID NO: 317501
aggauuaauuaccagauac

SEQ ID NO: 495918 - RNA, 19 nt, Artificial Sequence
  Description of Artificial Sequence: Synthetic oligonucleotide
  Antisense Strand to SEQ ID NO: 495917
guaucugguaauuaauccu

SEQ ID NO: 495919 - RNA, 19 nt, Artificial Sequence
  Description of Artificial Sequence: Synthetic oligonucleotide
  Sense strand starting at position 3115 of SEQ ID NO: 317501
ugagguuuccgguggagca

SEQ ID NO: 495920 - RNA, 19 nt, Artificial Sequence
  Description of Artificial Sequence: Synthetic oligonucleotide
  Antisense Strand to SEQ ID NO: 495919
ugcuccaccggaaaccuca

SEQ ID NO: 495921 - RNA, 19 nt, Artificial Sequence
  Description of Artificial Sequence: Synthetic oligonucleotide
  Sense strand starting at position 3195 of SEQ ID NO: 317501
ucgagaugggaauaguagu

SEQ ID NO: 495922 - RNA, 19 nt, Artificial Sequence
  Description of Artificial Sequence: Synthetic oligonucleotide
  Antisense Strand to SEQ ID NO: 495921
acuacuauucccaucucga

SEQ ID NO: 495923 - RNA, 19 nt, Artificial Sequence
  Description of Artificial Sequence: Synthetic oligonucleotide
  Sense strand starting at position 3316 of SEQ ID NO: 317501
cugagucaagcucaauuga

SEQ ID NO: 495924 - RNA, 19 nt, Artificial Sequence
  Description of Artificial Sequence: Synthetic oligonucleotide
  Antisense Strand to SEQ ID NO: 495923
ucaauugagcuugacucag

SEQ ID NO: 495925 - RNA, 19 nt, Artificial Sequence
  Description of Artificial Sequence: Synthetic oligonucleotide
  Sense strand starting at position 3412 of SEQ ID NO: 317501
gguguagaugugggaacaa

SEQ ID NO: 495926 - RNA, 19 nt, Artificial Sequence
  Description of Artificial Sequence: Synthetic oligonucleotide
  Antisense Strand to SEQ ID NO: 495925
uuguucccacaucuacacc

SEQ ID NO: 495927 - RNA, 19 nt, Artificial Sequence
  Description of Artificial Sequence: Synthetic oligonucleotide
  Sense strand starting at position 3471 of SEQ ID NO: 317501
guucuugagccagaaagug

SEQ ID NO: 495928 - RNA, 19 nt, Artificial Sequence
  Description of Artificial Sequence: Synthetic oligonucleotide
  Antisense Strand to SEQ ID NO: 495927
cacuuucuggcucaagaac

SEQ ID NO: 495929 - RNA, 19 nt, Artificial Sequence
  Description of Artificial Sequence: Synthetic oligonucleotide
  Sense strand starting at position 3488 of SEQ ID NO: 317501
uguugagacuaauuaguua

SEQ ID NO: 495930 - RNA, 19 nt, Artificial Sequence
  Description of Artificial Sequence: Synthetic oligonucleotide
  Antisense Strand to SEQ ID NO: 495929
uaacuaauuagucucaaca

SEQ ID NO: 495931 - RNA, 19 nt, Artificial Sequence
  Description of Artificial Sequence: Synthetic oligonucleotide
  Sense strand starting at position 3500 of SEQ ID NO: 317501
uuaguuaauuagguagagu

SEQ ID NO: 495932 - RNA, 19 nt, Artificial Sequence
  Description of Artificial Sequence: Synthetic oligonucleotide
  Antisense Strand to SEQ ID NO: 495931
acucuaccuaauuaacuaa

SEQ ID NO: 495933 - RNA, 19 nt, Artificial Sequence
  Description of Artificial Sequence: Synthetic oligonucleotide
  Sense strand starting at position 3503 of SEQ ID NO: 317501
guuaauuagguagaguuua

SEQ ID NO: 495934 - RNA, 19 nt, Artificial Sequence
  Description of Artificial Sequence: Synthetic oligonucleotide
  Antisense Strand to SEQ ID NO: 495933
uaaacucuaccuaauuaac

SEQ ID NO: 495935 - RNA, 19 nt, Artificial Sequence
  Description of Artificial Sequence: Synthetic oligonucleotide
  Sense strand starting at position 3601 of SEQ ID NO: 317501
uagucaaggguuuaaagua

SEQ ID NO: 495936 - RNA, 19 nt, Artificial Sequence
  Description of Artificial Sequence: Synthetic oligonucleotide
  Antisense Strand to SEQ ID NO: 495935
uacuuuaaacccuugacua

SEQ ID NO: 495937 - RNA, 19 nt, Artificial Sequence
  Description of Artificial Sequence: Synthetic oligonucleotide
  Sense strand starting at position 3630 of SEQ ID NO: 317501
aguuaugcucucuagugua

SEQ ID NO: 495938 - RNA, 19 nt, Artificial Sequence
  Description of Artificial Sequence: Synthetic oligonucleotide
  Antisense Strand to SEQ ID NO: 495937
uacacuagagagcauaacu

SEQ ID NO: 495939 - RNA, 19 nt, Artificial Sequence
  Description of Artificial Sequence: Synthetic oligonucleotide
  Sense strand starting at position 3850 of SEQ ID NO: 317501
acacgucaacaaugaugaa

SEQ ID NO: 495940 - RNA, 19 nt, Artificial Sequence
  Description of Artificial Sequence: Synthetic oligonucleotide
  Antisense Strand to SEQ ID NO: 495939
uucaucauuguugacgugu

SEQ ID NO: 495941 - RNA, 19 nt, Artificial Sequence
  Description of Artificial Sequence: Synthetic oligonucleotide
  Sense strand starting at position 3862 of SEQ ID NO: 317501
ugaugaauauaaguagucu

SEQ ID NO: 495942 - RNA, 19 nt, Artificial Sequence
  Description of Artificial Sequence: Synthetic oligonucleotide
  Antisense Strand to SEQ ID NO: 495941
agacuacuuauauucauca

SEQ ID NO: 495943 - RNA, 19 nt, Artificial Sequence
  Description of Artificial Sequence: Synthetic oligonucleotide
  Sense strand starting at position 3866 of SEQ ID NO: 317501
gaauauaaguagucuaaug

SEQ ID NO: 495944 - RNA, 19 nt, Artificial Sequence
  Description of Artificial Sequence: Synthetic oligonucleotide
  Antisense Strand to SEQ ID NO: 495943
cauuagacuacuuauauuc

SEQ ID NO: 495945 - RNA, 19 nt, Artificial Sequence
  Description of Artificial Sequence: Synthetic oligonucleotide
  Sense strand starting at position 3902 of SEQ ID NO: 317501
cauguagugucacuaguga

SEQ ID NO: 495946 - RNA, 19 nt, Artificial Sequence
  Description of Artificial Sequence: Synthetic oligonucleotide
  Antisense Strand to SEQ ID NO: 495945
ucacuagugacacuacaug

SEQ ID NO: 495947 - RNA, 19 nt, Artificial Sequence
  Description of Artificial Sequence: Synthetic oligonucleotide
  Sense strand starting at position 3974 of SEQ ID NO: 317501
augcgacuuugauuuggua

SEQ ID NO: 495948 - RNA, 19 nt, Artificial Sequence
  Description of Artificial Sequence: Synthetic oligonucleotide
  Antisense Strand to SEQ ID NO: 495947
uaccaaaucaaagucgcau

SEQ ID NO: 495949 - RNA, 19 nt, Artificial Sequence
  Description of Artificial Sequence: Synthetic oligonucleotide
  Sense strand starting at position 29 of SEQ ID NO: 317502
ucauuaggaguauauaugu

SEQ ID NO: 495950 - RNA, 19 nt, Artificial Sequence
  Description of Artificial Sequence: Synthetic oligonucleotide
  Antisense Strand to SEQ ID NO: 495949
acauauauacuccuaauga

SEQ ID NO: 495951 - RNA, 19 nt, Artificial Sequence
  Description of Artificial Sequence: Synthetic oligonucleotide
  Sense strand starting at position 34 of SEQ ID NO: 317502
aggaguauauaugucaacu

SEQ ID NO: 495952 - RNA, 19 nt, Artificial Sequence
  Description of Artificial Sequence: Synthetic oligonucleotide
  Antisense Strand to SEQ ID NO: 495951
aguugacauauauacuccu

SEQ ID NO: 495953 - RNA, 19 nt, Artificial Sequence
  Description of Artificial Sequence: Synthetic oligonucleotide
  Sense strand starting at position 126 of SEQ ID NO: 317502
cuauuucugcauuguacca

SEQ ID NO: 495954 - RNA, 19 nt, Artificial Sequence
  Description of Artificial Sequence: Synthetic oligonucleotide
  Antisense Strand to SEQ ID NO: 495953
ugguacaaugcagaaauag

SEQ ID NO: 495955 - RNA, 19 nt, Artificial Sequence
  Description of Artificial Sequence: Synthetic oligonucleotide
  Sense strand starting at position 312 of SEQ ID NO: 317502
acauacuuagaaugcugaa

SEQ ID NO: 495956 - RNA, 19 nt, Artificial Sequence
  Description of Artificial Sequence: Synthetic oligonucleotide
  Antisense Strand to SEQ ID NO: 495955
uucagcauucuaaguaugu

SEQ ID NO: 495957 - RNA, 19 nt, Artificial Sequence
  Description of Artificial Sequence: Synthetic oligonucleotide
  Sense strand starting at position 401 of SEQ ID NO: 317502
ucaauaaugguaugugaau

SEQ ID NO: 495958 - RNA, 19 nt, Artificial Sequence
  Description of Artificial Sequence: Synthetic oligonucleotide
  Antisense Strand to SEQ ID NO: 495957
auucacauaccauuauuga

SEQ ID NO: 495959 - RNA, 19 nt, Artificial Sequence
  Description of Artificial Sequence: Synthetic oligonucleotide
  Sense strand starting at position 402 of SEQ ID NO: 317502
caauaaugguaugugaauc

SEQ ID NO: 495960 - RNA, 19 nt, Artificial Sequence
  Description of Artificial Sequence: Synthetic oligonucleotide
  Antisense Strand to SEQ ID NO: 495959
gauucacauaccauuauug

SEQ ID NO: 495961 - RNA, 19 nt, Artificial Sequence
  Description of Artificial Sequence: Synthetic oligonucleotide
  Sense strand starting at position 477 of SEQ ID NO: 317502
cuggcauucuuguugaucu

SEQ ID NO: 495962 - RNA, 19 nt, Artificial Sequence
  Description of Artificial Sequence: Synthetic oligonucleotide
  Antisense Strand to SEQ ID NO: 495961
agaucaacaagaaugccag

SEQ ID NO: 495963 - RNA, 19 nt, Artificial Sequence
  Description of Artificial Sequence: Synthetic oligonucleotide
  Sense strand starting at position 485 of SEQ ID NO: 317502
cuuguugaucuugguauga

SEQ ID NO: 495964 - RNA, 19 nt, Artificial Sequence
  Description of Artificial Sequence: Synthetic oligonucleotide
  Antisense Strand to SEQ ID NO: 495963
ucauaccaagaucaacaag

SEQ ID NO: 495965 - RNA, 19 nt, Artificial Sequence
  Description of Artificial Sequence: Synthetic oligonucleotide
  Sense strand starting at position 489 of SEQ ID NO: 317502
uugaucuugguaugagaaa

SEQ ID NO: 495966 - RNA, 19 nt, Artificial Sequence
  Description of Artificial Sequence: Synthetic oligonucleotide
  Antisense Strand to SEQ ID NO: 495965
uuucucauaccaagaucaa

SEQ ID NO: 495967 - RNA, 19 nt, Artificial Sequence
  Description of Artificial Sequence: Synthetic oligonucleotide
  Sense strand starting at position 534 of SEQ ID NO: 317502
gucaaauuacuagagcacu

SEQ ID NO: 495968 - RNA, 19 nt, Artificial Sequence
  Description of Artificial Sequence: Synthetic oligonucleotide
  Antisense Strand to SEQ ID NO: 495967
agugcucuaguaauuugac

SEQ ID NO: 495969 - RNA, 19 nt, Artificial Sequence
  Description of Artificial Sequence: Synthetic oligonucleotide
  Sense strand starting at position 540 of SEQ ID NO: 317502
uuacuagagcacugugaau

SEQ ID NO: 495970 - RNA, 19 nt, Artificial Sequence
  Description of Artificial Sequence: Synthetic oligonucleotide
  Antisense Strand to SEQ ID NO: 495969
auucacagugcucuaguaa

SEQ ID NO: 495971 - RNA, 19 nt, Artificial Sequence
  Description of Artificial Sequence: Synthetic oligonucleotide
  Sense strand starting at position 542 of SEQ ID NO: 317502
acuagagcacugugaauau

SEQ ID NO: 495972 - RNA, 19 nt, Artificial Sequence
  Description of Artificial Sequence: Synthetic oligonucleotide
  Antisense Strand to SEQ ID NO: 495971
auauucacagugcucuagu

SEQ ID NO: 495973 - RNA, 19 nt, Artificial Sequence
  Description of Artificial Sequence: Synthetic oligonucleotide
  Sense strand starting at position 546 of SEQ ID NO: 317502
gagcacugugaauaucuua

SEQ ID NO: 495974 - RNA, 19 nt, Artificial Sequence
  Description of Artificial Sequence: Synthetic oligonucleotide
  Antisense Strand to SEQ ID NO: 495973
uaagauauucacagugcuc

SEQ ID NO: 495975 - RNA, 19 nt, Artificial Sequence
  Description of Artificial Sequence: Synthetic oligonucleotide
  Sense strand starting at position 589 of SEQ ID NO: 317502
aucuaaauucugcaggacu

SEQ ID NO: 495976 - RNA, 19 nt, Artificial Sequence
  Description of Artificial Sequence: Synthetic oligonucleotide
  Antisense Strand to SEQ ID NO: 495975
aguccugcagaauuuagau

SEQ ID NO: 495977 - RNA, 19 nt, Artificial Sequence
  Description of Artificial Sequence: Synthetic oligonucleotide
  Sense strand starting at position 591 of SEQ ID NO: 317502
cuaaauucugcaggacuua

SEQ ID NO: 495978 - RNA, 19 nt, Artificial Sequence
  Description of Artificial Sequence: Synthetic oligonucleotide
  Antisense Strand to SEQ ID NO: 495977
uaaguccugcagaauuuag

SEQ ID NO: 495979 - RNA, 19 nt, Artificial Sequence
  Description of Artificial Sequence: Synthetic oligonucleotide
  Sense strand starting at position 640 of SEQ ID NO: 317502
cuguuaagucgugauaaau

SEQ ID NO: 495980 - RNA, 19 nt, Artificial Sequence
  Description of Artificial Sequence: Synthetic oligonucleotide
  Antisense Strand to SEQ ID NO: 495979
auuuaucacgacuuaacag

SEQ ID NO: 495981 - RNA, 19 nt, Artificial Sequence
  Description of Artificial Sequence: Synthetic oligonucleotide
  Sense strand starting at position 804 of SEQ ID NO: 317502
uuaagacagucucucugau

SEQ ID NO: 495982 - RNA, 19 nt, Artificial Sequence
  Description of Artificial Sequence: Synthetic oligonucleotide
  Antisense Strand to SEQ ID NO: 495981
aucagagagacugucuuaa

SEQ ID NO: 495983 - RNA, 19 nt, Artificial Sequence
  Description of Artificial Sequence: Synthetic oligonucleotide
  Sense strand starting at position 817 of SEQ ID NO: 317502
ucugaucuguaacuuguaa

SEQ ID NO: 495984 - RNA, 19 nt, Artificial Sequence
  Description of Artificial Sequence: Synthetic oligonucleotide
  Antisense Strand to SEQ ID NO: 495983
uuacaaguuacagaucaga

SEQ ID NO: 495985 - RNA, 19 nt, Artificial Sequence
  Description of Artificial Sequence: Synthetic oligonucleotide
  Sense strand starting at position 1013 of SEQ ID NO: 317502
ggaauuaacuugcuaacuc

SEQ ID NO: 495986 - RNA, 19 nt, Artificial Sequence
  Description of Artificial Sequence: Synthetic oligonucleotide
  Antisense Strand to SEQ ID NO: 495985
gaguuagcaaguuaauucc

SEQ ID NO: 495987 - RNA, 19 nt, Artificial Sequence
  Description of Artificial Sequence: Synthetic oligonucleotide
  Sense strand starting at position 2110 of SEQ ID NO: 317502
gccuccgcuccuguuuaaa

SEQ ID NO: 495988 - RNA, 19 nt, Artificial Sequence
  Description of Artificial Sequence: Synthetic oligonucleotide
  Antisense Strand to SEQ ID NO: 495987
uuuaaacaggagcggaggc

SEQ ID NO: 495989 - RNA, 19 nt, Artificial Sequence
  Description of Artificial Sequence: Synthetic oligonucleotide
  Sense strand starting at position 2366 of SEQ ID NO: 317502
uuuauaguaccacgauuau

SEQ ID NO: 495990 - RNA, 19 nt, Artificial Sequence
  Description of Artificial Sequence: Synthetic oligonucleotide
  Antisense Strand to SEQ ID NO: 495989
auaaucgugguacuauaaa

SEQ ID NO: 495991 - RNA, 19 nt, Artificial Sequence
  Description of Artificial Sequence: Synthetic oligonucleotide
  Sense strand starting at position 2412 of SEQ ID NO: 317502
uugaauuaaggcugguuau

SEQ ID NO: 495992 - RNA, 19 nt, Artificial Sequence
  Description of Artificial Sequence: Synthetic oligonucleotide
  Antisense Strand to SEQ ID NO: 495991
auaaccagccuuaauucaa

SEQ ID NO: 495993 - RNA, 19 nt, Artificial Sequence
  Description of Artificial Sequence: Synthetic oligonucleotide
  Sense strand starting at position 2413 of SEQ ID NO: 317502
ugaauuaaggcugguuauu

SEQ ID NO: 495994 - RNA, 19 nt, Artificial Sequence
  Description of Artificial Sequence: Synthetic oligonucleotide
  Antisense Strand to SEQ ID NO: 495993
aauaaccagccuuaauuca

SEQ ID NO: 495995 - RNA, 19 nt, Artificial Sequence
  Description of Artificial Sequence: Synthetic oligonucleotide
  Sense strand starting at position 2432 of SEQ ID NO: 317502
guuggaucagauuggguuu

SEQ ID NO: 495996 - RNA, 19 nt, Artificial Sequence
  Description of Artificial Sequence: Synthetic oligonucleotide
  Antisense Strand to SEQ ID NO: 495995
aaacccaaucugauccaac

SEQ ID NO: 495997 - RNA, 19 nt, Artificial Sequence
  Description of Artificial Sequence: Synthetic oligonucleotide
  Sense strand starting at position 2438 of SEQ ID NO: 317502
ucagauuggguuugagaca

SEQ ID NO: 495998 - RNA, 19 nt, Artificial Sequence
  Description of Artificial Sequence: Synthetic oligonucleotide
  Antisense Strand to SEQ ID NO: 495997
ugucucaaacccaaucuga

SEQ ID NO: 495999 - RNA, 19 nt, Artificial Sequence
  Description of Artificial Sequence: Synthetic oligonucleotide
  Sense strand starting at position 2483 of SEQ ID NO: 317502
ggguuuagaagccagaugu

SEQ ID NO: 496000 - RNA, 19 nt, Artificial Sequence
  Description of Artificial Sequence: Synthetic oligonucleotide
  Antisense Strand to SEQ ID NO: 495999
acaucuggcuucuaaaccc

SEQ ID NO: 496001 - RNA, 19 nt, Artificial Sequence
  Description of Artificial Sequence: Synthetic oligonucleotide
  Sense strand starting at position 2493 of SEQ ID NO: 317502
gccagauguugcucuuuga

SEQ ID NO: 496002 - RNA, 19 nt, Artificial Sequence
  Description of Artificial Sequence: Synthetic oligonucleotide
  Antisense Strand to SEQ ID NO: 496001
ucaaagagcaacaucuggc

SEQ ID NO: 496003 - RNA, 19 nt, Artificial Sequence
  Description of Artificial Sequence: Synthetic oligonucleotide
  Sense strand starting at position 2497 of SEQ ID NO: 317502
gauguugcucuuugaccua

SEQ ID NO: 496004 - RNA, 19 nt, Artificial Sequence
  Description of Artificial Sequence: Synthetic oligonucleotide
  Antisense Strand to SEQ ID NO: 496003
uaggucaaagagcaacauc

SEQ ID NO: 496005 - RNA, 19 nt, Artificial Sequence
  Description of Artificial Sequence: Synthetic oligonucleotide
  Sense strand starting at position 2500 of SEQ ID NO: 317502
guugcucuuugaccuauuu

SEQ ID NO: 496006 - RNA, 19 nt, Artificial Sequence
  Description of Artificial Sequence: Synthetic oligonucleotide
  Antisense Strand to SEQ ID NO: 496005
aaauaggucaaagagcaac

SEQ ID NO: 496007 - RNA, 19 nt, Artificial Sequence
  Description of Artificial Sequence: Synthetic oligonucleotide
  Sense strand starting at position 2609 of SEQ ID NO: 317502
ugcccaucccuagagugua

SEQ ID NO: 496008 - RNA, 19 nt, Artificial Sequence
  Description of Artificial Sequence: Synthetic oligonucleotide
  Antisense Strand to SEQ ID NO: 496007
uacacucuagggaugggca

SEQ ID NO: 496009 - RNA, 19 nt, Artificial Sequence
  Description of Artificial Sequence: Synthetic oligonucleotide
  Sense strand starting at position 2718 of SEQ ID NO: 317502
cugaaugaagcaugugaaa

SEQ ID NO: 496010 - RNA, 19 nt, Artificial Sequence
  Description of Artificial Sequence: Synthetic oligonucleotide
  Antisense Strand to SEQ ID NO: 496009
uuucacaugcuucauucag

SEQ ID NO: 496011 - RNA, 19 nt, Artificial Sequence
  Description of Artificial Sequence: Synthetic oligonucleotide
  Sense strand starting at position 2854 of SEQ ID NO: 317502
ggugauaguaggcacucaa

SEQ ID NO: 496012 - RNA, 19 nt, Artificial Sequence
  Description of Artificial Sequence: Synthetic oligonucleotide
  Antisense Strand to SEQ ID NO: 496011
uugagugccuacuaucacc

SEQ ID NO: 496013 - RNA, 19 nt, Artificial Sequence
  Description of Artificial Sequence: Synthetic oligonucleotide
  Sense strand starting at position 3194 of SEQ ID NO: 317502
aguggaaaguaaguuugaa

SEQ ID NO: 496014 - RNA, 19 nt, Artificial Sequence
  Description of Artificial Sequence: Synthetic oligonucleotide
  Antisense Strand to SEQ ID NO: 496013
uucaaacuuacuuuccacu

SEQ ID NO: 496015 - RNA, 19 nt, Artificial Sequence
  Description of Artificial Sequence: Synthetic oligonucleotide
  Sense strand starting at position 3696 of SEQ ID NO: 317502
guuucuaaggugcauagua

SEQ ID NO: 496016 - RNA, 19 nt, Artificial Sequence
  Description of Artificial Sequence: Synthetic oligonucleotide
  Antisense Strand to SEQ ID NO: 496015
uacuaugcaccuuagaaac

SEQ ID NO: 496017 - RNA, 19 nt, Artificial Sequence
  Description of Artificial Sequence: Synthetic oligonucleotide
  Sense strand starting at position 3698 of SEQ ID NO: 317502
uucuaaggugcauaguaau

SEQ ID NO: 496018 - RNA, 19 nt, Artificial Sequence
  Description of Artificial Sequence: Synthetic oligonucleotide
  Antisense Strand to SEQ ID NO: 496017
auuacuaugcaccuuagaa

SEQ ID NO: 496019 - RNA, 19 nt, Artificial Sequence
  Description of Artificial Sequence: Synthetic oligonucleotide
  Sense strand starting at position 3710 of SEQ ID NO: 317502
uaguaauaaugguuuggua

SEQ ID NO: 496020 - RNA, 19 nt, Artificial Sequence
  Description of Artificial Sequence: Synthetic oligonucleotide
  Antisense Strand to SEQ ID NO: 496019
uaccaaaccauuauuacua

SEQ ID NO: 496021 - RNA, 19 nt, Artificial Sequence
  Description of Artificial Sequence: Synthetic oligonucleotide
  Sense strand starting at position 3712 of SEQ ID NO: 317502
guaauaaugguuugguacu

SEQ ID NO: 496022 - RNA, 19 nt, Artificial Sequence
  Description of Artificial Sequence: Synthetic oligonucleotide
  Antisense Strand to SEQ ID NO: 496021
aguaccaaaccauuauuac

SEQ ID NO: 496023 - RNA, 19 nt, Artificial Sequence
  Description of Artificial Sequence: Synthetic oligonucleotide
  Sense strand starting at position 3760 of SEQ ID NO: 317502
auaaguaauaaggguguca

SEQ ID NO: 496024 - RNA, 19 nt, Artificial Sequence
  Description of Artificial Sequence: Synthetic oligonucleotide
  Antisense Strand to SEQ ID NO: 496023
ugacacccuuauuacuuau

SEQ ID NO: 496025 - RNA, 19 nt, Artificial Sequence
  Description of Artificial Sequence: Synthetic oligonucleotide
  Sense strand starting at position 3762 of SEQ ID NO: 317502
aaguaauaagggugucauu

SEQ ID NO: 496026 - RNA, 19 nt, Artificial Sequence
  Description of Artificial Sequence: Synthetic oligonucleotide
  Antisense Strand to SEQ ID NO: 496025
aaugacacccuuauuacuu

SEQ ID NO: 496027 - RNA, 19 nt, Artificial Sequence
  Description of Artificial Sequence: Synthetic oligonucleotide
  Sense strand starting at position 3886 of SEQ ID NO: 317502
gguggcaaacauggaaaua

SEQ ID NO: 496028 - RNA, 19 nt, Artificial Sequence
  Description of Artificial Sequence: Synthetic oligonucleotide
  Antisense Strand to SEQ ID NO: 496027
uauuuccauguuugccacc

SEQ ID NO: 496029 - RNA, 19 nt, Artificial Sequence
  Description of Artificial Sequence: Synthetic oligonucleotide
  Sense strand starting at position 113 of SEQ ID NO: 317503
gcuuacuuacuaggaggaa

SEQ ID NO: 496030 - RNA, 19 nt, Artificial Sequence
  Description of Artificial Sequence: Synthetic oligonucleotide
  Antisense Strand to SEQ ID NO: 496029
uuccuccuaguaaguaagc

SEQ ID NO: 496031 - RNA, 19 nt, Artificial Sequence
  Description of Artificial Sequence: Synthetic oligonucleotide
  Sense strand starting at position 311 of SEQ ID NO: 317503
ugcgcuaaugacugggauu

SEQ ID NO: 496032 - RNA, 19 nt, Artificial Sequence
  Description of Artificial Sequence: Synthetic oligonucleotide
  Antisense Strand to SEQ ID NO: 496031
aaucccagucauuagcgca

SEQ ID NO: 496033 - RNA, 19 nt, Artificial Sequence
  Description of Artificial Sequence: Synthetic oligonucleotide
  Sense strand starting at position 312 of SEQ ID NO: 317503
gcgcuaaugacugggauuc

SEQ ID NO: 496034 - RNA, 19 nt, Artificial Sequence
  Description of Artificial Sequence: Synthetic oligonucleotide
  Antisense Strand to SEQ ID NO: 496033
gaaucccagucauuagcgc

SEQ ID NO: 496035 - RNA, 19 nt, Artificial Sequence
  Description of Artificial Sequence: Synthetic oligonucleotide
  Sense strand starting at position 666 of SEQ ID NO: 317503
aguaauggaggcggagaau

SEQ ID NO: 496036 - RNA, 19 nt, Artificial Sequence
  Description of Artificial Sequence: Synthetic oligonucleotide
  Antisense Strand to SEQ ID NO: 496035
auucuccgccuccauuacu

SEQ ID NO: 496037 - RNA, 19 nt, Artificial Sequence
  Description of Artificial Sequence: Synthetic oligonucleotide
  Sense strand starting at position 677 of SEQ ID NO: 317503
cggagaauuagcgaaccua

SEQ ID NO: 496038 - RNA, 19 nt, Artificial Sequence
  Description of Artificial Sequence: Synthetic oligonucleotide
  Antisense Strand to SEQ ID NO: 496037
uagguucgcuaauucuccg

SEQ ID NO: 496039 - RNA, 19 nt, Artificial Sequence
  Description of Artificial Sequence: Synthetic oligonucleotide
  Sense strand starting at position 696 of SEQ ID NO: 317503
auuguuucccugcgauuua

SEQ ID NO: 496040 - RNA, 19 nt, Artificial Sequence
  Description of Artificial Sequence: Synthetic oligonucleotide
  Antisense Strand to SEQ ID NO: 496039
uaaaucgcagggaaacaau

SEQ ID NO: 496041 - RNA, 19 nt, Artificial Sequence
  Description of Artificial Sequence: Synthetic oligonucleotide
  Sense strand starting at position 854 of SEQ ID NO: 317503
acucaugaguaggaugaau

SEQ ID NO: 496042 - RNA, 19 nt, Artificial Sequence
  Description of Artificial Sequence: Synthetic oligonucleotide
  Antisense Strand to SEQ ID NO: 496041
auucauccuacucaugagu

SEQ ID NO: 496043 - RNA, 19 nt, Artificial Sequence
  Description of Artificial Sequence: Synthetic oligonucleotide
  Sense strand starting at position 902 of SEQ ID NO: 317503
cugagauacugccucucuu

SEQ ID NO: 496044 - RNA, 19 nt, Artificial Sequence
  Description of Artificial Sequence: Synthetic oligonucleotide
  Antisense Strand to SEQ ID NO: 496043
aagagaggcaguaucucag

SEQ ID NO: 496045 - RNA, 19 nt, Artificial Sequence
  Description of Artificial Sequence: Synthetic oligonucleotide
  Sense strand starting at position 1564 of SEQ ID NO: 317503
ccgugaccgguuucguaga

SEQ ID NO: 496046 - RNA, 19 nt, Artificial Sequence
  Description of Artificial Sequence: Synthetic oligonucleotide
  Antisense Strand to SEQ ID NO: 496045
ucuacgaaaccggucacgg

SEQ ID NO: 496047 - RNA, 19 nt, Artificial Sequence
  Description of Artificial Sequence: Synthetic oligonucleotide
  Sense strand starting at position 2130 of SEQ ID NO: 317503
ucacucgccggugagauaa

SEQ ID NO: 496048 - RNA, 19 nt, Artificial Sequence
  Description of Artificial Sequence: Synthetic oligonucleotide
  Antisense Strand to SEQ ID NO: 496047
uuaucucaccggcgaguga

SEQ ID NO: 496049 - RNA, 19 nt, Artificial Sequence
  Description of Artificial Sequence: Synthetic oligonucleotide
  Sense strand starting at position 2168 of SEQ ID NO: 317503
ggauuuguugguggguguu

SEQ ID NO: 496050 - RNA, 19 nt, Artificial Sequence
  Description of Artificial Sequence: Synthetic oligonucleotide
  Antisense Strand to SEQ ID NO: 496049
aacacccaccaacaaaucc

SEQ ID NO: 496051 - RNA, 19 nt, Artificial Sequence
  Description of Artificial Sequence: Synthetic oligonucleotide
  Sense strand starting at position 2378 of SEQ ID NO: 317503
agcaguuugcguuuaaccu

SEQ ID NO: 496052 - RNA, 19 nt, Artificial Sequence
  Description of Artificial Sequence: Synthetic oligonucleotide
  Antisense Strand to SEQ ID NO: 496051
agguuaaacgcaaacugcu

SEQ ID NO: 496053 - RNA, 19 nt, Artificial Sequence
  Description of Artificial Sequence: Synthetic oligonucleotide
  Sense strand starting at position 2385 of SEQ ID NO: 317503
ugcguuuaaccuuagacaa

SEQ ID NO: 496054 - RNA, 19 nt, Artificial Sequence
  Description of Artificial Sequence: Synthetic oligonucleotide
  Antisense Strand to SEQ ID NO: 496053
uugucuaagguuaaacgca

SEQ ID NO: 496055 - RNA, 19 nt, Artificial Sequence
  Description of Artificial Sequence: Synthetic oligonucleotide
  Sense strand starting at position 2446 of SEQ ID NO: 317503
uuaagugacuaccuagaau

SEQ ID NO: 496056 - RNA, 19 nt, Artificial Sequence
  Description of Artificial Sequence: Synthetic oligonucleotide
  Antisense Strand to SEQ ID NO: 496055
auucuagguagucacuuaa

SEQ ID NO: 496057 - RNA, 19 nt, Artificial Sequence
  Description of Artificial Sequence: Synthetic oligonucleotide
  Sense strand starting at position 2516 of SEQ ID NO: 317503
gugacucccgcggaagaaa

SEQ ID NO: 496058 - RNA, 19 nt, Artificial Sequence
  Description of Artificial Sequence: Synthetic oligonucleotide
  Antisense Strand to SEQ ID NO: 496057
uuucuuccgcgggagucac

SEQ ID NO: 496059 - RNA, 19 nt, Artificial Sequence
  Description of Artificial Sequence: Synthetic oligonucleotide
  Sense strand starting at position 2527 of SEQ ID NO: 317503
ggaagaaaugguugguccu

SEQ ID NO: 496060 - RNA, 19 nt, Artificial Sequence
  Description of Artificial Sequence: Synthetic oligonucleotide
  Antisense Strand to SEQ ID NO: 496059
aggaccaaccauuucuucc

SEQ ID NO: 496061 - RNA, 19 nt, Artificial Sequence
  Description of Artificial Sequence: Synthetic oligonucleotide
  Sense strand starting at position 2570 of SEQ ID NO: 317503
augugaggguaauacaaga

SEQ ID NO: 496062 - RNA, 19 nt, Artificial Sequence
  Description of Artificial Sequence: Synthetic oligonucleotide
  Antisense Strand to SEQ ID NO: 496061
ucuuguauuacccucacau

SEQ ID NO: 496063 - RNA, 19 nt, Artificial Sequence
  Description of Artificial Sequence: Synthetic oligonucleotide
  Sense strand starting at position 2716 of SEQ ID NO: 317503
gucugaguucaccgcagaa

SEQ ID NO: 496064 - RNA, 19 nt, Artificial Sequence
  Description of Artificial Sequence: Synthetic oligonucleotide
  Antisense Strand to SEQ ID NO: 496063
uucugcggugaacucagac

SEQ ID NO: 496065 - RNA, 19 nt, Artificial Sequence
  Description of Artificial Sequence: Synthetic oligonucleotide
  Sense strand starting at position 2726 of SEQ ID NO: 317503
accgcagaauacucccaau

SEQ ID NO: 496066 - RNA, 19 nt, Artificial Sequence
  Description of Artificial Sequence: Synthetic oligonucleotide
  Antisense Strand to SEQ ID NO: 496065
auugggaguauucugcggu

SEQ ID NO: 496067 - RNA, 19 nt, Artificial Sequence
  Description of Artificial Sequence: Synthetic oligonucleotide
  Sense strand starting at position 2770 of SEQ ID NO: 317503
ggaaaccacuguucucuaa

SEQ ID NO: 496068 - RNA, 19 nt, Artificial Sequence
  Description of Artificial Sequence: Synthetic oligonucleotide
  Antisense Strand to SEQ ID NO: 496067
uuagagaacagugguuucc

SEQ ID NO: 496069 - RNA, 19 nt, Artificial Sequence
  Description of Artificial Sequence: Synthetic oligonucleotide
  Sense strand starting at position 2790 of SEQ ID NO: 317503
gaucucaggugaucucuaa

SEQ ID NO: 496070 - RNA, 19 nt, Artificial Sequence
  Description of Artificial Sequence: Synthetic oligonucleotide
  Antisense Strand to SEQ ID NO: 496069
uuagagaucaccugagauc

SEQ ID NO: 496071 - RNA, 19 nt, Artificial Sequence
  Description of Artificial Sequence: Synthetic oligonucleotide
  Sense strand starting at position 2835 of SEQ ID NO: 317503
gaaagcauuugcugaagaa

SEQ ID NO: 496072 - RNA, 19 nt, Artificial Sequence
  Description of Artificial Sequence: Synthetic oligonucleotide
  Antisense Strand to SEQ ID NO: 496071
uucuucagcaaaugcuuuc

SEQ ID NO: 496073 - RNA, 19 nt, Artificial Sequence
  Description of Artificial Sequence: Synthetic oligonucleotide
  Sense strand starting at position 2882 of SEQ ID NO: 317503
agaauugugccaggaaagc

SEQ ID NO: 496074 - RNA, 19 nt, Artificial Sequence
  Description of Artificial Sequence: Synthetic oligonucleotide
  Antisense Strand to SEQ ID NO: 496073
gcuuuccuggcacaauucu

SEQ ID NO: 496075 - RNA, 19 nt, Artificial Sequence
  Description of Artificial Sequence: Synthetic oligonucleotide
  Sense strand starting at position 2949 of SEQ ID NO: 317503
aagcaagaagguugaguau

SEQ ID NO: 496076 - RNA, 19 nt, Artificial Sequence
  Description of Artificial Sequence: Synthetic oligonucleotide
  Antisense Strand to SEQ ID NO: 496075
auacucaaccuucuugcuu

SEQ ID NO: 496077 - RNA, 19 nt, Artificial Sequence
  Description of Artificial Sequence: Synthetic oligonucleotide
  Sense strand starting at position 3104 of SEQ ID NO: 317503
uugcaugugucucucauuu

SEQ ID NO: 496078 - RNA, 19 nt, Artificial Sequence
  Description of Artificial Sequence: Synthetic oligonucleotide
  Antisense Strand to SEQ ID NO: 496077
aaaugagagacacaugcaa

SEQ ID NO: 496079 - RNA, 19 nt, Artificial Sequence
  Description of Artificial Sequence: Synthetic oligonucleotide
  Sense strand starting at position 3145 of SEQ ID NO: 317503
agacucauauuagugcaau

SEQ ID NO: 496080 - RNA, 19 nt, Artificial Sequence
  Description of Artificial Sequence: Synthetic oligonucleotide
  Antisense Strand to SEQ ID NO: 496079
auugcacuaauaugagucu

SEQ ID NO: 496081 - RNA, 19 nt, Artificial Sequence
  Description of Artificial Sequence: Synthetic oligonucleotide
  Sense strand starting at position 3192 of SEQ ID NO: 317503
aaguuaauuugcuuacggu

SEQ ID NO: 496082 - RNA, 19 nt, Artificial Sequence
  Description of Artificial Sequence: Synthetic oligonucleotide
  Antisense Strand to SEQ ID NO: 496081
accguaagcaaauuaacuu

SEQ ID NO: 496083 - RNA, 19 nt, Artificial Sequence
  Description of Artificial Sequence: Synthetic oligonucleotide
  Sense strand starting at position 3199 of SEQ ID NO: 317503
uuugcuuacggucacaauu

SEQ ID NO: 496084 - RNA, 19 nt, Artificial Sequence
  Description of Artificial Sequence: Synthetic oligonucleotide
  Antisense Strand to SEQ ID NO: 496083
aauugugaccguaagcaaa

SEQ ID NO: 496085 - RNA, 19 nt, Artificial Sequence
  Description of Artificial Sequence: Synthetic oligonucleotide
  Sense strand starting at position 3232 of SEQ ID NO: 317503
agaaguaaacccugcuaaa

SEQ ID NO: 496086 - RNA, 19 nt, Artificial Sequence
  Description of Artificial Sequence: Synthetic oligonucleotide
  Antisense Strand to SEQ ID NO: 496085
uuuagcaggguuuacuucu

SEQ ID NO: 496087 - RNA, 19 nt, Artificial Sequence
  Description of Artificial Sequence: Synthetic oligonucleotide
  Sense strand starting at position 3374 of SEQ ID NO: 317503
aggagcuuaaugggugaau

SEQ ID NO: 496088 - RNA, 19 nt, Artificial Sequence
  Description of Artificial Sequence: Synthetic oligonucleotide
  Antisense Strand to SEQ ID NO: 496087
auucacccauuaagcuccu

SEQ ID NO: 496089 - RNA, 19 nt, Artificial Sequence
  Description of Artificial Sequence: Synthetic oligonucleotide
  Sense strand starting at position 3375 of SEQ ID NO: 317503
ggagcuuaaugggugaauc

SEQ ID NO: 496090 - RNA, 19 nt, Artificial Sequence
  Description of Artificial Sequence: Synthetic oligonucleotide
  Antisense Strand to SEQ ID NO: 496089
gauucacccauuaagcucc

SEQ ID NO: 496091 - RNA, 19 nt, Artificial Sequence
  Description of Artificial Sequence: Synthetic oligonucleotide
  Sense strand starting at position 3376 of SEQ ID NO: 317503
gagcuuaaugggugaaucu

SEQ ID NO: 496092 - RNA, 19 nt, Artificial Sequence
  Description of Artificial Sequence: Synthetic oligonucleotide
  Antisense Strand to SEQ ID NO: 496091
agauucacccauuaagcuc

SEQ ID NO: 496093 - RNA, 19 nt, Artificial Sequence
  Description of Artificial Sequence: Synthetic oligonucleotide
  Sense strand starting at position 3377 of SEQ ID NO: 317503
agcuuaaugggugaaucuu

SEQ ID NO: 496094 - RNA, 19 nt, Artificial Sequence
  Description of Artificial Sequence: Synthetic oligonucleotide
  Antisense Strand to SEQ ID NO: 496093
aagauucacccauuaagcu

SEQ ID NO: 496095 - RNA, 19 nt, Artificial Sequence
  Description of Artificial Sequence: Synthetic oligonucleotide
  Sense strand starting at position 3415 of SEQ ID NO: 317503
ucaauaagguuguuaaaga

SEQ ID NO: 496096 - RNA, 19 nt, Artificial Sequence
  Description of Artificial Sequence: Synthetic oligonucleotide
  Antisense Strand to SEQ ID NO: 496095
ucuuuaacaaccuuauuga

SEQ ID NO: 496097 - RNA, 19 nt, Artificial Sequence
  Description of Artificial Sequence: Synthetic oligonucleotide
  Sense strand starting at position 3455 of SEQ ID NO: 317503
acaagugacuagguuauau

SEQ ID NO: 496098 - RNA, 19 nt, Artificial Sequence
  Description of Artificial Sequence: Synthetic oligonucleotide
  Antisense Strand to SEQ ID NO: 496097
auauaaccuagucacuugu

SEQ ID NO: 496099 - RNA, 19 nt, Artificial Sequence
  Description of Artificial Sequence: Synthetic oligonucleotide
  Sense strand starting at position 3466 of SEQ ID NO: 317503
gguuauauugaaugaguuc

SEQ ID NO: 496100 - RNA, 19 nt, Artificial Sequence
  Description of Artificial Sequence: Synthetic oligonucleotide
  Antisense Strand to SEQ ID NO: 496099
gaacucauucaauauaacc

SEQ ID NO: 496101 - RNA, 19 nt, Artificial Sequence
  Description of Artificial Sequence: Synthetic oligonucleotide
  Sense strand starting at position 3473 of SEQ ID NO: 317503
uugaaugaguucuugccuu

SEQ ID NO: 496102 - RNA, 19 nt, Artificial Sequence
  Description of Artificial Sequence: Synthetic oligonucleotide
  Antisense Strand to SEQ ID NO: 496101
aaggcaagaacucauucaa

SEQ ID NO: 496103 - RNA, 19 nt, Artificial Sequence
  Description of Artificial Sequence: Synthetic oligonucleotide
  Sense strand starting at position 3477 of SEQ ID NO: 317503
augaguucuugccuuuaga

SEQ ID NO: 496104 - RNA, 19 nt, Artificial Sequence
  Description of Artificial Sequence: Synthetic oligonucleotide
  Antisense Strand to SEQ ID NO: 496103
ucuaaaggcaagaacucau

SEQ ID NO: 496105 - RNA, 19 nt, Artificial Sequence
  Description of Artificial Sequence: Synthetic oligonucleotide
  Sense strand starting at position 3480 of SEQ ID NO: 317503
aguucuugccuuuagacaa

SEQ ID NO: 496106 - RNA, 19 nt, Artificial Sequence
  Description of Artificial Sequence: Synthetic oligonucleotide
  Antisense Strand to SEQ ID NO: 496105
uugucuaaaggcaagaacu

SEQ ID NO: 496107 - RNA, 19 nt, Artificial Sequence
  Description of Artificial Sequence: Synthetic oligonucleotide
  Sense strand starting at position 3981 of SEQ ID NO: 317503
agucauaagaguuguauga

SEQ ID NO: 496108 - RNA, 19 nt, Artificial Sequence
  Description of Artificial Sequence: Synthetic oligonucleotide
  Antisense Strand to SEQ ID NO: 496107
ucauacaacucuuaugacu

SEQ ID NO: 496109 - RNA, 19 nt, Artificial Sequence
  Description of Artificial Sequence: Synthetic oligonucleotide
  Sense strand starting at position 30 of SEQ ID NO: 317504
caguguugugcgguuugaa

SEQ ID NO: 496110 - RNA, 19 nt, Artificial Sequence
  Description of Artificial Sequence: Synthetic oligonucleotide
  Antisense Strand to SEQ ID NO: 496109
uucaaaccgcacaacacug

SEQ ID NO: 496111 - RNA, 19 nt, Artificial Sequence
  Description of Artificial Sequence: Synthetic oligonucleotide
  Sense strand starting at position 31 of SEQ ID NO: 317504
aguguugugcgguuugaau

SEQ ID NO: 496112 - RNA, 19 nt, Artificial Sequence
  Description of Artificial Sequence: Synthetic oligonucleotide
  Antisense Strand to SEQ ID NO: 496111
auucaaaccgcacaacacu

SEQ ID NO: 496113 - RNA, 19 nt, Artificial Sequence
  Description of Artificial Sequence: Synthetic oligonucleotide
  Sense strand starting at position 32 of SEQ ID NO: 317504
guguugugcgguuugaaug

SEQ ID NO: 496114 - RNA, 19 nt, Artificial Sequence
  Description of Artificial Sequence: Synthetic oligonucleotide
  Antisense Strand to SEQ ID NO: 496113
cauucaaaccgcacaacac

SEQ ID NO: 496115 - RNA, 19 nt, Artificial Sequence
  Description of Artificial Sequence: Synthetic oligonucleotide
  Sense strand starting at position 42 of SEQ ID NO: 317504
guuugaaugaugggcagaa

SEQ ID NO: 496116 - RNA, 19 nt, Artificial Sequence
  Description of Artificial Sequence: Synthetic oligonucleotide
  Antisense Strand to SEQ ID NO: 496115
uucugcccaucauucaaac

SEQ ID NO: 496117 - RNA, 19 nt, Artificial Sequence
  Description of Artificial Sequence: Synthetic oligonucleotide
  Sense strand starting at position 43 of SEQ ID NO: 317504
uuugaaugaugggcagaau

SEQ ID NO: 496118 - RNA, 19 nt, Artificial Sequence
  Description of Artificial Sequence: Synthetic oligonucleotide
  Antisense Strand to SEQ ID NO: 496117
auucugcccaucauucaaa

SEQ ID NO: 496119 - RNA, 19 nt, Artificial Sequence
  Description of Artificial Sequence: Synthetic oligonucleotide
  Sense strand starting at position 61 of SEQ ID NO: 317504
ucauaugagaagugcagaa

SEQ ID NO: 496120 - RNA, 19 nt, Artificial Sequence
  Description of Artificial Sequence: Synthetic oligonucleotide
  Antisense Strand to SEQ ID NO: 496119
uucugcacuucucauauga

SEQ ID NO: 496121 - RNA, 19 nt, Artificial Sequence
  Description of Artificial Sequence: Synthetic oligonucleotide
  Sense strand starting at position 206 of SEQ ID NO: 317504
cccaucugccaagggauaa

SEQ ID NO: 496122 - RNA, 19 nt, Artificial Sequence
  Description of Artificial Sequence: Synthetic oligonucleotide
  Antisense Strand to SEQ ID NO: 496121
uuaucccuuggcagauggg

SEQ ID NO: 496123 - RNA, 19 nt, Artificial Sequence
  Description of Artificial Sequence: Synthetic oligonucleotide
  Sense strand starting at position 390 of SEQ ID NO: 317504
ugcagcauucguccacuuu

SEQ ID NO: 496124 - RNA, 19 nt, Artificial Sequence
  Description of Artificial Sequence: Synthetic oligonucleotide
  Antisense Strand to SEQ ID NO: 496123
aaaguggacgaaugcugca

SEQ ID NO: 496125 - RNA, 19 nt, Artificial Sequence
  Description of Artificial Sequence: Synthetic oligonucleotide
  Sense strand starting at position 417 of SEQ ID NO: 317504
uggucuuuccuggaccuga

SEQ ID NO: 496126 - RNA, 19 nt, Artificial Sequence
  Description of Artificial Sequence: Synthetic oligonucleotide
  Antisense Strand to SEQ ID NO: 496125
ucagguccaggaaagacca

SEQ ID NO: 496127 - RNA, 19 nt, Artificial Sequence
  Description of Artificial Sequence: Synthetic oligonucleotide
  Sense strand starting at position 439 of SEQ ID NO: 317504
ggaaccucuuaagaggaaa

SEQ ID NO: 496128 - RNA, 19 nt, Artificial Sequence
  Description of Artificial Sequence: Synthetic oligonucleotide
  Antisense Strand to SEQ ID NO: 496127
uuuccucuuaagagguucc

SEQ ID NO: 496129 - RNA, 19 nt, Artificial Sequence
  Description of Artificial Sequence: Synthetic oligonucleotide
  Sense strand starting at position 577 of SEQ ID NO: 317504
uggucucuagccugaggau

SEQ ID NO: 496130 - RNA, 19 nt, Artificial Sequence
  Description of Artificial Sequence: Synthetic oligonucleotide
  Antisense Strand to SEQ ID NO: 496129
auccucaggcuagagacca

SEQ ID NO: 496131 - RNA, 19 nt, Artificial Sequence
  Description of Artificial Sequence: Synthetic oligonucleotide
  Sense strand starting at position 578 of SEQ ID NO: 317504
ggucucuagccugaggauu

SEQ ID NO: 496132 - RNA, 19 nt, Artificial Sequence
  Description of Artificial Sequence: Synthetic oligonucleotide
  Antisense Strand to SEQ ID NO: 496131
aauccucaggcuagagacc

SEQ ID NO: 496133 - RNA, 19 nt, Artificial Sequence
  Description of Artificial Sequence: Synthetic oligonucleotide
  Sense strand starting at position 615 of SEQ ID NO: 317504
guaguccucguuuggauuu

SEQ ID NO: 496134 - RNA, 19 nt, Artificial Sequence
  Description of Artificial Sequence: Synthetic oligonucleotide
  Antisense Strand to SEQ ID NO: 496133
aaauccaaacgaggacuac

SEQ ID NO: 496135 - RNA, 19 nt, Artificial Sequence
  Description of Artificial Sequence: Synthetic oligonucleotide
  Sense strand starting at position 633 of SEQ ID NO: 317504
ucugacaagcuccauagau

SEQ ID NO: 496136 - RNA, 19 nt, Artificial Sequence
  Description of Artificial Sequence: Synthetic oligonucleotide
  Antisense Strand to SEQ ID NO: 496135
aucuauggagcuugucaga

SEQ ID NO: 496137 - RNA, 19 nt, Artificial Sequence
  Description of Artificial Sequence: Synthetic oligonucleotide
  Sense strand starting at position 635 of SEQ ID NO: 317504
ugacaagcuccauagaugu

SEQ ID NO: 496138 - RNA, 19 nt, Artificial Sequence
  Description of Artificial Sequence: Synthetic oligonucleotide
  Antisense Strand to SEQ ID NO: 496137
acaucuauggagcuuguca

SEQ ID NO: 496139 - RNA, 19 nt, Artificial Sequence
  Description of Artificial Sequence: Synthetic oligonucleotide
  Sense strand starting at position 642 of SEQ ID NO: 317504
cuccauagauguuucugau

SEQ ID NO: 496140 - RNA, 19 nt, Artificial Sequence
  Description of Artificial Sequence: Synthetic oligonucleotide
  Antisense Strand to SEQ ID NO: 496139
aucagaaacaucuauggag

SEQ ID NO: 496141 - RNA, 19 nt, Artificial Sequence
  Description of Artificial Sequence: Synthetic oligonucleotide
  Sense strand starting at position 666 of SEQ ID NO: 317504
ucccucuuuggagaacuuu

SEQ ID NO: 496142 - RNA, 19 nt, Artificial Sequence
  Description of Artificial Sequence: Synthetic oligonucleotide
  Antisense Strand to SEQ ID NO: 496141
aaaguucuccaaagaggga

SEQ ID NO: 496143 - RNA, 19 nt, Artificial Sequence
  Description of Artificial Sequence: Synthetic oligonucleotide
  Sense strand starting at position 758 of SEQ ID NO: 317504
cugggugaccuuuacaagu

SEQ ID NO: 496144 - RNA, 19 nt, Artificial Sequence
  Description of Artificial Sequence: Synthetic oligonucleotide
  Antisense Strand to SEQ ID NO: 496143
acuuguaaaggucacccag

SEQ ID NO: 496145 - RNA, 19 nt, Artificial Sequence
  Description of Artificial Sequence: Synthetic oligonucleotide
  Sense strand starting at position 815 of SEQ ID NO: 317504
uucuaugaacaaugagcua

SEQ ID NO: 496146 - RNA, 19 nt, Artificial Sequence
  Description of Artificial Sequence: Synthetic oligonucleotide
  Antisense Strand to SEQ ID NO: 496145
uagcucauuguucauagaa

SEQ ID NO: 496147 - RNA, 19 nt, Artificial Sequence
  Description of Artificial Sequence: Synthetic oligonucleotide
  Sense strand starting at position 871 of SEQ ID NO: 317504
cucgccaauuuguuaugaa

SEQ ID NO: 496148 - RNA, 19 nt, Artificial Sequence
  Description of Artificial Sequence: Synthetic oligonucleotide
  Antisense Strand to SEQ ID NO: 496147
uucauaacaaauuggcgag

SEQ ID NO: 496149 - RNA, 19 nt, Artificial Sequence
  Description of Artificial Sequence: Synthetic oligonucleotide
  Sense strand starting at position 1113 of SEQ ID NO: 317504
gauuguucccaggacaccu

SEQ ID NO: 496150 - RNA, 19 nt, Artificial Sequence
  Description of Artificial Sequence: Synthetic oligonucleotide
  Antisense Strand to SEQ ID NO: 496149
agguguccugggaacaauc

SEQ ID NO: 496151 - RNA, 19 nt, Artificial Sequence
  Description of Artificial Sequence: Synthetic oligonucleotide
  Sense strand starting at position 1553 of SEQ ID NO: 317504
gggagaauuugguaguagu

SEQ ID NO: 496152 - RNA, 19 nt, Artificial Sequence
  Description of Artificial Sequence: Synthetic oligonucleotide
  Antisense Strand to SEQ ID NO: 496151
acuacuaccaaauucuccc

SEQ ID NO: 496153 - RNA, 19 nt, Artificial Sequence
  Description of Artificial Sequence: Synthetic oligonucleotide
  Sense strand starting at position 1665 of SEQ ID NO: 317504
aggccagacugcuuuggaa

SEQ ID NO: 496154 - RNA, 19 nt, Artificial Sequence
  Description of Artificial Sequence: Synthetic oligonucleotide
  Antisense Strand to SEQ ID NO: 496153
uuccaaagcagucuggccu

SEQ ID NO: 496155 - RNA, 19 nt, Artificial Sequence
  Description of Artificial Sequence: Synthetic oligonucleotide
  Sense strand starting at position 1857 of SEQ ID NO: 317504
gcuauuccagcugagaaga

SEQ ID NO: 496156 - RNA, 19 nt, Artificial Sequence
  Description of Artificial Sequence: Synthetic oligonucleotide
  Antisense Strand to SEQ ID NO: 496155
ucuucucagcuggaauagc

SEQ ID NO: 496157 - RNA, 19 nt, Artificial Sequence
  Description of Artificial Sequence: Synthetic oligonucleotide
  Sense strand starting at position 2211 of SEQ ID NO: 317504
gcgcgaggucucagaagac

SEQ ID NO: 496158 - RNA, 19 nt, Artificial Sequence
  Description of Artificial Sequence: Synthetic oligonucleotide
  Antisense Strand to SEQ ID NO: 496157
gucuucugagaccucgcgc

SEQ ID NO: 496159 - RNA, 19 nt, Artificial Sequence
  Description of Artificial Sequence: Synthetic oligonucleotide
  Sense strand starting at position 2483 of SEQ ID NO: 317504
auaucagagccuuggugaa

SEQ ID NO: 496160 - RNA, 19 nt, Artificial Sequence
  Description of Artificial Sequence: Synthetic oligonucleotide
  Antisense Strand to SEQ ID NO: 496159
uucaccaaggcucugauau

SEQ ID NO: 496161 - RNA, 19 nt, Artificial Sequence
  Description of Artificial Sequence: Synthetic oligonucleotide
  Sense strand starting at position 2699 of SEQ ID NO: 317504
ccaagagcacucugaacuu

SEQ ID NO: 496162 - RNA, 19 nt, Artificial Sequence
  Description of Artificial Sequence: Synthetic oligonucleotide
  Antisense Strand to SEQ ID NO: 496161
aaguucagagugcucuugg

SEQ ID NO: 496163 - RNA, 19 nt, Artificial Sequence
  Description of Artificial Sequence: Synthetic oligonucleotide
  Sense strand starting at position 2846 of SEQ ID NO: 317504
uuagauuucuuagagggug

SEQ ID NO: 496164 - RNA, 19 nt, Artificial Sequence
  Description of Artificial Sequence: Synthetic oligonucleotide
  Antisense Strand to SEQ ID NO: 496163
cacccucuaagaaaucuaa

SEQ ID NO: 496165 - RNA, 19 nt, Artificial Sequence
  Description of Artificial Sequence: Synthetic oligonucleotide
  Sense strand starting at position 2932 of SEQ ID NO: 317504
cugggaaagucaucuguac

SEQ ID NO: 496166 - RNA, 19 nt, Artificial Sequence
  Description of Artificial Sequence: Synthetic oligonucleotide
  Antisense Strand to SEQ ID NO: 496165
guacagaugacuuucccag

SEQ ID NO: 496167 - RNA, 19 nt, Artificial Sequence
  Description of Artificial Sequence: Synthetic oligonucleotide
  Sense strand starting at position 2934 of SEQ ID NO: 317504
gggaaagucaucuguacuc

SEQ ID NO: 496168 - RNA, 19 nt, Artificial Sequence
  Description of Artificial Sequence: Synthetic oligonucleotide
  Antisense Strand to SEQ ID NO: 496167
gaguacagaugacuuuccc

SEQ ID NO: 496169 - RNA, 19 nt, Artificial Sequence
  Description of Artificial Sequence: Synthetic oligonucleotide
  Sense strand starting at position 3231 of SEQ ID NO: 317504
uggauuugauauuaccaga

SEQ ID NO: 496170 - RNA, 19 nt, Artificial Sequence
  Description of Artificial Sequence: Synthetic oligonucleotide
  Antisense Strand to SEQ ID NO: 496169
ucugguaauaucaaaucca

SEQ ID NO: 496171 - RNA, 19 nt, Artificial Sequence
  Description of Artificial Sequence: Synthetic oligonucleotide
  Sense strand starting at position 3277 of SEQ ID NO: 317504
gguacucaacccugacuua

SEQ ID NO: 496172 - RNA, 19 nt, Artificial Sequence
  Description of Artificial Sequence: Synthetic oligonucleotide
  Antisense Strand to SEQ ID NO: 496171
uaagucaggguugaguacc

SEQ ID NO: 496173 - RNA, 19 nt, Artificial Sequence
  Description of Artificial Sequence: Synthetic oligonucleotide
  Sense strand starting at position 3323 of SEQ ID NO: 317504
agagucaucuccuccagga

SEQ ID NO: 496174 - RNA, 19 nt, Artificial Sequence
  Description of Artificial Sequence: Synthetic oligonucleotide
  Antisense Strand to SEQ ID NO: 496173
uccuggaggagaugacucu

SEQ ID NO: 496175 - RNA, 19 nt, Artificial Sequence
  Description of Artificial Sequence: Synthetic oligonucleotide
  Sense strand starting at position 3542 of SEQ ID NO: 317504
ugcaaacacuuguugaaau

SEQ ID NO: 496176 - RNA, 19 nt, Artificial Sequence
  Description of Artificial Sequence: Synthetic oligonucleotide
  Antisense Strand to SEQ ID NO: 496175
auuucaacaaguguuugca

SEQ ID NO: 496177 - RNA, 19 nt, Artificial Sequence
  Description of Artificial Sequence: Synthetic oligonucleotide
  Sense strand starting at position 3647 of SEQ ID NO: 317504
gccugacugacugggaaau

SEQ ID NO: 496178 - RNA, 19 nt, Artificial Sequence
  Description of Artificial Sequence: Synthetic oligonucleotide
  Antisense Strand to SEQ ID NO: 496177
auuucccagucagucaggc

SEQ ID NO: 496179 - RNA, 19 nt, Artificial Sequence
  Description of Artificial Sequence: Synthetic oligonucleotide
  Sense strand starting at position 3709 of SEQ ID NO: 317504
gagggaugaggcuguagaa

SEQ ID NO: 496180 - RNA, 19 nt, Artificial Sequence
  Description of Artificial Sequence: Synthetic oligonucleotide
  Antisense Strand to SEQ ID NO: 496179
uucuacagccucaucccuc

SEQ ID NO: 496181 - RNA, 19 nt, Artificial Sequence
  Description of Artificial Sequence: Synthetic oligonucleotide
  Sense strand starting at position 3747 of SEQ ID NO: 317504
cugcaaauccauuaugagu

SEQ ID NO: 496182 - RNA, 19 nt, Artificial Sequence
  Description of Artificial Sequence: Synthetic oligonucleotide
  Antisense Strand to SEQ ID NO: 496181
acucauaauggauuugcag

SEQ ID NO: 496183 - RNA, 19 nt, Artificial Sequence
  Description of Artificial Sequence: Synthetic oligonucleotide
  Sense strand starting at position 3876 of SEQ ID NO: 317504
agucaaagauuacucuaug

SEQ ID NO: 496184 - RNA, 19 nt, Artificial Sequence
  Description of Artificial Sequence: Synthetic oligonucleotide
  Antisense Strand to SEQ ID NO: 496183
cauagaguaaucuuugacu

SEQ ID NO: 496185 - RNA, 19 nt, Artificial Sequence
  Description of Artificial Sequence: Synthetic oligonucleotide
  Sense strand starting at position 3877 of SEQ ID NO: 317504
gucaaagauuacucuaugu

SEQ ID NO: 496186 - RNA, 19 nt, Artificial Sequence
  Description of Artificial Sequence: Synthetic oligonucleotide
  Antisense Strand to SEQ ID NO: 496185
acauagaguaaucuuugac

SEQ ID NO: 496187 - RNA, 19 nt, Artificial Sequence
  Description of Artificial Sequence: Synthetic oligonucleotide
  Sense strand starting at position 3882 of SEQ ID NO: 317504
agauuacucuauguuuaag

SEQ ID NO: 496188 - RNA, 19 nt, Artificial Sequence
  Description of Artificial Sequence: Synthetic oligonucleotide
  Antisense Strand to SEQ ID NO: 496187
cuuaaacauagaguaaucu

SEQ ID NO: 496189 - RNA, 19 nt, Artificial Sequence
  Description of Artificial Sequence: Synthetic oligonucleotide
  Sense strand starting at position 400 of SEQ ID NO: 317505
aguauuaaauagguaccaa

SEQ ID NO: 496190 - RNA, 19 nt, Artificial Sequence
  Description of Artificial Sequence: Synthetic oligonucleotide
  Antisense Strand to SEQ ID NO: 496189
uugguaccuauuuaauacu

SEQ ID NO: 496191 - RNA, 19 nt, Artificial Sequence
  Description of Artificial Sequence: Synthetic oligonucleotide
  Sense strand starting at position 865 of SEQ ID NO: 317505
gguuguuaugaagauucca

SEQ ID NO: 496192 - RNA, 19 nt, Artificial Sequence
  Description of Artificial Sequence: Synthetic oligonucleotide
  Antisense Strand to SEQ ID NO: 496191
uggaaucuucauaacaacc

SEQ ID NO: 496193 - RNA, 19 nt, Artificial Sequence
  Description of Artificial Sequence: Synthetic oligonucleotide
  Sense strand starting at position 903 of SEQ ID NO: 317505
gcacuagucuuccuagacu

SEQ ID NO: 496194 - RNA, 19 nt, Artificial Sequence
  Description of Artificial Sequence: Synthetic oligonucleotide
  Antisense Strand to SEQ ID NO: 496193
agucuaggaagacuagugc

SEQ ID NO: 496195 - RNA, 19 nt, Artificial Sequence
  Description of Artificial Sequence: Synthetic oligonucleotide
  Sense strand starting at position 921 of SEQ ID NO: 317505
uuccgaauuagcugagaua

SEQ ID NO: 496196 - RNA, 19 nt, Artificial Sequence
  Description of Artificial Sequence: Synthetic oligonucleotide
  Antisense Strand to SEQ ID NO: 496195
uaucucagcuaauucggaa

SEQ ID NO: 496197 - RNA, 19 nt, Artificial Sequence
  Description of Artificial Sequence: Synthetic oligonucleotide
  Sense strand starting at position 922 of SEQ ID NO: 317505
uccgaauuagcugagauac

SEQ ID NO: 496198 - RNA, 19 nt, Artificial Sequence
  Description of Artificial Sequence: Synthetic oligonucleotide
  Antisense Strand to SEQ ID NO: 496197
guaucucagcuaauucgga

SEQ ID NO: 496199 - RNA, 19 nt, Artificial Sequence
  Description of Artificial Sequence: Synthetic oligonucleotide
  Sense strand starting at position 1011 of SEQ ID NO: 317505
ggccaucgaugagugaaga

SEQ ID NO: 496200 - RNA, 19 nt, Artificial Sequence
  Description of Artificial Sequence: Synthetic oligonucleotide
  Antisense Strand to SEQ ID NO: 496199
ucuucacucaucgauggcc

SEQ ID NO: 496201 - RNA, 19 nt, Artificial Sequence
  Description of Artificial Sequence: Synthetic oligonucleotide
  Sense strand starting at position 1012 of SEQ ID NO: 317505
gccaucgaugagugaagau

SEQ ID NO: 496202 - RNA, 19 nt, Artificial Sequence
  Description of Artificial Sequence: Synthetic oligonucleotide
  Antisense Strand to SEQ ID NO: 496201
aucuucacucaucgauggc

SEQ ID NO: 496203 - RNA, 19 nt, Artificial Sequence
  Description of Artificial Sequence: Synthetic oligonucleotide
  Sense strand starting at position 1021 of SEQ ID NO: 317505
gagugaagaucugcuuaaa

SEQ ID NO: 496204 - RNA, 19 nt, Artificial Sequence
  Description of Artificial Sequence: Synthetic oligonucleotide
  Antisense Strand to SEQ ID NO: 496203
uuuaagcagaucuucacuc

SEQ ID NO: 496205 - RNA, 19 nt, Artificial Sequence
  Description of Artificial Sequence: Synthetic oligonucleotide
  Sense strand starting at position 1067 of SEQ ID NO: 317505
gauagaucucaaggccaag

SEQ ID NO: 496206 - RNA, 19 nt, Artificial Sequence
  Description of Artificial Sequence: Synthetic oligonucleotide
  Antisense Strand to SEQ ID NO: 496205
cuuggccuugagaucuauc

SEQ ID NO: 496207 - RNA, 19 nt, Artificial Sequence
  Description of Artificial Sequence: Synthetic oligonucleotide
  Sense strand starting at position 1145 of SEQ ID NO: 317505
uugauuauugacugcaugu

SEQ ID NO: 496208 - RNA, 19 nt, Artificial Sequence
  Description of Artificial Sequence: Synthetic oligonucleotide
  Antisense Strand to SEQ ID NO: 496207
acaugcagucaauaaucaa

SEQ ID NO: 496209 - RNA, 19 nt, Artificial Sequence
  Description of Artificial Sequence: Synthetic oligonucleotide
  Sense strand starting at position 1294 of SEQ ID NO: 317505
uggaaaugcucaguuugga

SEQ ID NO: 496210 - RNA, 19 nt, Artificial Sequence
  Description of Artificial Sequence: Synthetic oligonucleotide
  Antisense Strand to SEQ ID NO: 496209
uccaaacugagcauuucca

SEQ ID NO: 496211 - RNA, 19 nt, Artificial Sequence
  Description of Artificial Sequence: Synthetic oligonucleotide
  Sense strand starting at position 1310 of SEQ ID NO: 317505
ggaacuugcugagcuugaa

SEQ ID NO: 496212 - RNA, 19 nt, Artificial Sequence
  Description of Artificial Sequence: Synthetic oligonucleotide
  Antisense Strand to SEQ ID NO: 496211
uucaagcucagcaaguucc

SEQ ID NO: 496213 - RNA, 19 nt, Artificial Sequence
  Description of Artificial Sequence: Synthetic oligonucleotide
  Sense strand starting at position 1313 of SEQ ID NO: 317505
acuugcugagcuugaaaua

SEQ ID NO: 496214 - RNA, 19 nt, Artificial Sequence
  Description of Artificial Sequence: Synthetic oligonucleotide
  Antisense Strand to SEQ ID NO: 496213
uauuucaagcucagcaagu

SEQ ID NO: 496215 - RNA, 19 nt, Artificial Sequence
  Description of Artificial Sequence: Synthetic oligonucleotide
  Sense strand starting at position 1478 of SEQ ID NO: 317505
gagaaccuugcugagcaau

SEQ ID NO: 496216 - RNA, 19 nt, Artificial Sequence
  Description of Artificial Sequence: Synthetic oligonucleotide
  Antisense Strand to SEQ ID NO: 496215
auugcucagcaagguucuc

SEQ ID NO: 496217 - RNA, 19 nt, Artificial Sequence
  Description of Artificial Sequence: Synthetic oligonucleotide
  Sense strand starting at position 1480 of SEQ ID NO: 317505
gaaccuugcugagcaauga

SEQ ID NO: 496218 - RNA, 19 nt, Artificial Sequence
  Description of Artificial Sequence: Synthetic oligonucleotide
  Antisense Strand to SEQ ID NO: 496217
ucauugcucagcaagguuc

SEQ ID NO: 496219 - RNA, 19 nt, Artificial Sequence
  Description of Artificial Sequence: Synthetic oligonucleotide
  Sense strand starting at position 1484 of SEQ ID NO: 317505
cuugcugagcaaugagaca

SEQ ID NO: 496220 - RNA, 19 nt, Artificial Sequence
  Description of Artificial Sequence: Synthetic oligonucleotide
  Antisense Strand to SEQ ID NO: 496219
ugucucauugcucagcaag

SEQ ID NO: 496221 - RNA, 19 nt, Artificial Sequence
  Description of Artificial Sequence: Synthetic oligonucleotide
  Sense strand starting at position 2071 of SEQ ID NO: 317505
gcggguagccgaagacuua

SEQ ID NO: 496222 - RNA, 19 nt, Artificial Sequence
  Description of Artificial Sequence: Synthetic oligonucleotide
  Antisense Strand to SEQ ID NO: 496221
uaagucuucggcuacccgc

SEQ ID NO: 496223 - RNA, 19 nt, Artificial Sequence
  Description of Artificial Sequence: Synthetic oligonucleotide
  Sense strand starting at position 2072 of SEQ ID NO: 317505
cggguagccgaagacuuau

SEQ ID NO: 496224 - RNA, 19 nt, Artificial Sequence
  Description of Artificial Sequence: Synthetic oligonucleotide
  Antisense Strand to SEQ ID NO: 496223
auaagucuucggcuacccg

SEQ ID NO: 496225 - RNA, 19 nt, Artificial Sequence
  Description of Artificial Sequence: Synthetic oligonucleotide
  Sense strand starting at position 2081 of SEQ ID NO: 317505
gaagacuuauguuugguaa

SEQ ID NO: 496226 - RNA, 19 nt, Artificial Sequence
  Description of Artificial Sequence: Synthetic oligonucleotide
  Antisense Strand to SEQ ID NO: 496225
uuaccaaacauaagucuuc

SEQ ID NO: 496227 - RNA, 19 nt, Artificial Sequence
  Description of Artificial Sequence: Synthetic oligonucleotide
  Sense strand starting at position 2082 of SEQ ID NO: 317505
aagacuuauguuugguaaa

SEQ ID NO: 496228 - RNA, 19 nt, Artificial Sequence
  Description of Artificial Sequence: Synthetic oligonucleotide
  Antisense Strand to SEQ ID NO: 496227
uuuaccaaacauaagucuu

SEQ ID NO: 496229 - RNA, 19 nt, Artificial Sequence
  Description of Artificial Sequence: Synthetic oligonucleotide
  Sense strand starting at position 2084 of SEQ ID NO: 317505
gacuuauguuugguaaauu

SEQ ID NO: 496230 - RNA, 19 nt, Artificial Sequence
  Description of Artificial Sequence: Synthetic oligonucleotide
  Antisense Strand to SEQ ID NO: 496229
aauuuaccaaacauaaguc

SEQ ID NO: 496231 - RNA, 19 nt, Artificial Sequence
  Description of Artificial Sequence: Synthetic oligonucleotide
  Sense strand starting at position 2150 of SEQ ID NO: 317505
guguguucuucgaugcgga

SEQ ID NO: 496232 - RNA, 19 nt, Artificial Sequence
  Description of Artificial Sequence: Synthetic oligonucleotide
  Antisense Strand to SEQ ID NO: 496231
uccgcaucgaagaacacac

SEQ ID NO: 496233 - RNA, 19 nt, Artificial Sequence
  Description of Artificial Sequence: Synthetic oligonucleotide
  Sense strand starting at position 2152 of SEQ ID NO: 317505
guguucuucgaugcggauu

SEQ ID NO: 496234 - RNA, 19 nt, Artificial Sequence
  Description of Artificial Sequence: Synthetic oligonucleotide
  Antisense Strand to SEQ ID NO: 496233
aauccgcaucgaagaacac

SEQ ID NO: 496235 - RNA, 19 nt, Artificial Sequence
  Description of Artificial Sequence: Synthetic oligonucleotide
  Sense strand starting at position 2202 of SEQ ID NO: 317505
uggaauggauucucccgua

SEQ ID NO: 496236 - RNA, 19 nt, Artificial Sequence
  Description of Artificial Sequence: Synthetic oligonucleotide
  Antisense Strand to SEQ ID NO: 496235
uacgggagaauccauucca

SEQ ID NO: 496237 - RNA, 19 nt, Artificial Sequence
  Description of Artificial Sequence: Synthetic oligonucleotide
  Sense strand starting at position 2395 of SEQ ID NO: 317505
ggguguccucaagaaaggu

SEQ ID NO: 496238 - RNA, 19 nt, Artificial Sequence
  Description of Artificial Sequence: Synthetic oligonucleotide
  Antisense Strand to SEQ ID NO: 496237
accuuucuugaggacaccc

SEQ ID NO: 496239 - RNA, 19 nt, Artificial Sequence
  Description of Artificial Sequence: Synthetic oligonucleotide
  Sense strand starting at position 2472 of SEQ ID NO: 317505
ccguuuccucucugggaaa

SEQ ID NO: 496240 - RNA, 19 nt, Artificial Sequence
  Description of Artificial Sequence: Synthetic oligonucleotide
  Antisense Strand to SEQ ID NO: 496239
uuucccagagaggaaacgg

SEQ ID NO: 496241 - RNA, 19 nt, Artificial Sequence
  Description of Artificial Sequence: Synthetic oligonucleotide
  Sense strand starting at position 2474 of SEQ ID NO: 317505
guuuccucucugggaaaca

SEQ ID NO: 496242 - RNA, 19 nt, Artificial Sequence
  Description of Artificial Sequence: Synthetic oligonucleotide
  Antisense Strand to SEQ ID NO: 496241
uguuucccagagaggaaac

SEQ ID NO: 496243 - RNA, 19 nt, Artificial Sequence
  Description of Artificial Sequence: Synthetic oligonucleotide
  Sense strand starting at position 2645 of SEQ ID NO: 317505
ucuuaaaucuguuucuagu

SEQ ID NO: 496244 - RNA, 19 nt, Artificial Sequence
  Description of Artificial Sequence: Synthetic oligonucleotide
  Antisense Strand to SEQ ID NO: 496243
acuagaaacagauuuaaga

SEQ ID NO: 496245 - RNA, 19 nt, Artificial Sequence
  Description of Artificial Sequence: Synthetic oligonucleotide
  Sense strand starting at position 2689 of SEQ ID NO: 317505
gggauugcagaauaucugu

SEQ ID NO: 496246 - RNA, 19 nt, Artificial Sequence
  Description of Artificial Sequence: Synthetic oligonucleotide
  Antisense Strand to SEQ ID NO: 496245
acagauauucugcaauccc

SEQ ID NO: 496247 - RNA, 19 nt, Artificial Sequence
  Description of Artificial Sequence: Synthetic oligonucleotide
  Sense strand starting at position 2692 of SEQ ID NO: 317505
auugcagaauaucuguuaa

SEQ ID NO: 496248 - RNA, 19 nt, Artificial Sequence
  Description of Artificial Sequence: Synthetic oligonucleotide
  Antisense Strand to SEQ ID NO: 496247
uuaacagauauucugcaau

SEQ ID NO: 496249 - RNA, 19 nt, Artificial Sequence
  Description of Artificial Sequence: Synthetic oligonucleotide
  Sense strand starting at position 2694 of SEQ ID NO: 317505
ugcagaauaucuguuaaau

SEQ ID NO: 496250 - RNA, 19 nt, Artificial Sequence
  Description of Artificial Sequence: Synthetic oligonucleotide
  Antisense Strand to SEQ ID NO: 496249
auuuaacagauauucugca

SEQ ID NO: 496251 - RNA, 19 nt, Artificial Sequence
  Description of Artificial Sequence: Synthetic oligonucleotide
  Sense strand starting at position 2730 of SEQ ID NO: 317505
uguaaauguugcucaauaa

SEQ ID NO: 496252 - RNA, 19 nt, Artificial Sequence
  Description of Artificial Sequence: Synthetic oligonucleotide
  Antisense Strand to SEQ ID NO: 496251
uuauugagcaacauuuaca

SEQ ID NO: 496253 - RNA, 19 nt, Artificial Sequence
  Description of Artificial Sequence: Synthetic oligonucleotide
  Sense strand starting at position 2731 of SEQ ID NO: 317505
guaaauguugcucaauaag

SEQ ID NO: 496254 - RNA, 19 nt, Artificial Sequence
  Description of Artificial Sequence: Synthetic oligonucleotide
  Antisense Strand to SEQ ID NO: 496253
cuuauugagcaacauuuac

SEQ ID NO: 496255 - RNA, 19 nt, Artificial Sequence
  Description of Artificial Sequence: Synthetic oligonucleotide
  Sense strand starting at position 2734 of SEQ ID NO: 317505
aauguugcucaauaagagu

SEQ ID NO: 496256 - RNA, 19 nt, Artificial Sequence
  Description of Artificial Sequence: Synthetic oligonucleotide
  Antisense Strand to SEQ ID NO: 496255
acucuuauugagcaacauu

SEQ ID NO: 496257 - RNA, 19 nt, Artificial Sequence
  Description of Artificial Sequence: Synthetic oligonucleotide
  Sense strand starting at position 3108 of SEQ ID NO: 317505
aguuaagugaugggaaagu

SEQ ID NO: 496258 - RNA, 19 nt, Artificial Sequence
  Description of Artificial Sequence: Synthetic oligonucleotide
  Antisense Strand to SEQ ID NO: 496257
acuuucccaucacuuaacu

SEQ ID NO: 496259 - RNA, 19 nt, Artificial Sequence
  Description of Artificial Sequence: Synthetic oligonucleotide
  Sense strand starting at position 3119 of SEQ ID NO: 317505
gggaaaguucuaggcaaga

SEQ ID NO: 496260 - RNA, 19 nt, Artificial Sequence
  Description of Artificial Sequence: Synthetic oligonucleotide
  Antisense Strand to SEQ ID NO: 496259
ucuugccuagaacuuuccc

SEQ ID NO: 496261 - RNA, 19 nt, Artificial Sequence
  Description of Artificial Sequence: Synthetic oligonucleotide
  Sense strand starting at position 3274 of SEQ ID NO: 317505
acuaaaucuugacugaagu

SEQ ID NO: 496262 - RNA, 19 nt, Artificial Sequence
  Description of Artificial Sequence: Synthetic oligonucleotide
  Antisense Strand to SEQ ID NO: 496261
acuucagucaagauuuagu

SEQ ID NO: 496263 - RNA, 19 nt, Artificial Sequence
  Description of Artificial Sequence: Synthetic oligonucleotide
  Sense strand starting at position 3275 of SEQ ID NO: 317505
cuaaaucuugacugaaguu

SEQ ID NO: 496264 - RNA, 19 nt, Artificial Sequence
  Description of Artificial Sequence: Synthetic oligonucleotide
  Antisense Strand to SEQ ID NO: 496263
aacuucagucaagauuuag

SEQ ID NO: 496265 - RNA, 19 nt, Artificial Sequence
  Description of Artificial Sequence: Synthetic oligonucleotide
  Sense strand starting at position 3341 of SEQ ID NO: 317505
gggcguuguauuuaguuau

SEQ ID NO: 496266 - RNA, 19 nt, Artificial Sequence
  Description of Artificial Sequence: Synthetic oligonucleotide
  Antisense Strand to SEQ ID NO: 496265
auaacuaaauacaacgccc

SEQ ID NO: 496267 - RNA, 19 nt, Artificial Sequence
  Description of Artificial Sequence: Synthetic oligonucleotide
  Sense strand starting at position 3344 of SEQ ID NO: 317505
cguuguauuuaguuauguu

SEQ ID NO: 496268 - RNA, 19 nt, Artificial Sequence
  Description of Artificial Sequence: Synthetic oligonucleotide
  Antisense Strand to SEQ ID NO: 496267
aacauaacuaaauacaacg

SEQ ID NO: 496269 - RNA, 19 nt, Artificial Sequence
  Description of Artificial Sequence: Synthetic oligonucleotide
  Sense strand starting at position 254 of SEQ ID NO: 317506
ucugcugucagagacauag

SEQ ID NO: 496270 - RNA, 19 nt, Artificial Sequence
  Description of Artificial Sequence: Synthetic oligonucleotide
  Antisense Strand to SEQ ID NO: 496269
cuaugucucugacagcaga

SEQ ID NO: 496271 - RNA, 19 nt, Artificial Sequence
  Description of Artificial Sequence: Synthetic oligonucleotide
  Sense strand starting at position 269 of SEQ ID NO: 317506
auaggaguguuuccuuauu

SEQ ID NO: 496272 - RNA, 19 nt, Artificial Sequence
  Description of Artificial Sequence: Synthetic oligonucleotide
  Antisense Strand to SEQ ID NO: 496271
aauaaggaaacacuccuau

SEQ ID NO: 496273 - RNA, 19 nt, Artificial Sequence
  Description of Artificial Sequence: Synthetic oligonucleotide
  Sense strand starting at position 271 of SEQ ID NO: 317506
aggaguguuuccuuauuaa

SEQ ID NO: 496274 - RNA, 19 nt, Artificial Sequence
  Description of Artificial Sequence: Synthetic oligonucleotide
  Antisense Strand to SEQ ID NO: 496273
uuaauaaggaaacacuccu

SEQ ID NO: 496275 - RNA, 19 nt, Artificial Sequence
  Description of Artificial Sequence: Synthetic oligonucleotide
  Sense strand starting at position 274 of SEQ ID NO: 317506
aguguuuccuuauuaaaug

SEQ ID NO: 496276 - RNA, 19 nt, Artificial Sequence
  Description of Artificial Sequence: Synthetic oligonucleotide
  Antisense Strand to SEQ ID NO: 496275
cauuuaauaaggaaacacu

SEQ ID NO: 496277 - RNA, 19 nt, Artificial Sequence
  Description of Artificial Sequence: Synthetic oligonucleotide
  Sense strand starting at position 454 of SEQ ID NO: 317506
ggaauauaauccuucuagc

SEQ ID NO: 496278 - RNA, 19 nt, Artificial Sequence
  Description of Artificial Sequence: Synthetic oligonucleotide
  Antisense Strand to SEQ ID NO: 496277
gcuagaaggauuauauucc

SEQ ID NO: 496279 - RNA, 19 nt, Artificial Sequence
  Description of Artificial Sequence: Synthetic oligonucleotide
  Sense strand starting at position 510 of SEQ ID NO: 317506
gagcuaacgaugggcauua

SEQ ID NO: 496280 - RNA, 19 nt, Artificial Sequence
  Description of Artificial Sequence: Synthetic oligonucleotide
  Antisense Strand to SEQ ID NO: 496279
uaaugcccaucguuagcuc

SEQ ID NO: 496281 - RNA, 19 nt, Artificial Sequence
  Description of Artificial Sequence: Synthetic oligonucleotide
  Sense strand starting at position 512 of SEQ ID NO: 317506
gcuaacgaugggcauuaua

SEQ ID NO: 496282 - RNA, 19 nt, Artificial Sequence
  Description of Artificial Sequence: Synthetic oligonucleotide
  Antisense Strand to SEQ ID NO: 496281
uauaaugcccaucguuagc

SEQ ID NO: 496283 - RNA, 19 nt, Artificial Sequence
  Description of Artificial Sequence: Synthetic oligonucleotide
  Sense strand starting at position 515 of SEQ ID NO: 317506
aacgaugggcauuauaguu

SEQ ID NO: 496284 - RNA, 19 nt, Artificial Sequence
  Description of Artificial Sequence: Synthetic oligonucleotide
  Antisense Strand to SEQ ID NO: 496283
aacuauaaugcccaucguu

SEQ ID NO: 496285 - RNA, 19 nt, Artificial Sequence
  Description of Artificial Sequence: Synthetic oligonucleotide
  Sense strand starting at position 520 of SEQ ID NO: 317506
ugggcauuauaguuggaua

SEQ ID NO: 496286 - RNA, 19 nt, Artificial Sequence
  Description of Artificial Sequence: Synthetic oligonucleotide
  Antisense Strand to SEQ ID NO: 496285
uauccaacuauaaugccca

SEQ ID NO: 496287 - RNA, 19 nt, Artificial Sequence
  Description of Artificial Sequence: Synthetic oligonucleotide
  Sense strand starting at position 521 of SEQ ID NO: 317506
gggcauuauaguuggauac

SEQ ID NO: 496288 - RNA, 19 nt, Artificial Sequence
  Description of Artificial Sequence: Synthetic oligonucleotide
  Antisense Strand to SEQ ID NO: 496287
guauccaacuauaaugccc

SEQ ID NO: 496289 - RNA, 19 nt, Artificial Sequence
  Description of Artificial Sequence: Synthetic oligonucleotide
  Sense strand starting at position 522 of SEQ ID NO: 317506
ggcauuauaguuggauaca

SEQ ID NO: 496290 - RNA, 19 nt, Artificial Sequence
  Description of Artificial Sequence: Synthetic oligonucleotide
  Antisense Strand to SEQ ID NO: 496289
uguauccaacuauaaugcc

SEQ ID NO: 496291 - RNA, 19 nt, Artificial Sequence
  Description of Artificial Sequence: Synthetic oligonucleotide
  Sense strand starting at position 639 of SEQ ID NO: 317506
augucuaaggguuaucaug

SEQ ID NO: 496292 - RNA, 19 nt, Artificial Sequence
  Description of Artificial Sequence: Synthetic oligonucleotide
  Antisense Strand to SEQ ID NO: 496291
caugauaacccuuagacau

SEQ ID NO: 496293 - RNA, 19 nt, Artificial Sequence
  Description of Artificial Sequence: Synthetic oligonucleotide
  Sense strand starting at position 641 of SEQ ID NO: 317506
gucuaaggguuaucaugua

SEQ ID NO: 496294 - RNA, 19 nt, Artificial Sequence
  Description of Artificial Sequence: Synthetic oligonucleotide
  Antisense Strand to SEQ ID NO: 496293
uacaugauaacccuuagac

SEQ ID NO: 496295 - RNA, 19 nt, Artificial Sequence
  Description of Artificial Sequence: Synthetic oligonucleotide
  Sense strand starting at position 646 of SEQ ID NO: 317506
aggguuaucauguaaagcu

SEQ ID NO: 496296 - RNA, 19 nt, Artificial Sequence
  Description of Artificial Sequence: Synthetic oligonucleotide
  Antisense Strand to SEQ ID NO: 496295
agcuuuacaugauaacccu

SEQ ID NO: 496297 - RNA, 19 nt, Artificial Sequence
  Description of Artificial Sequence: Synthetic oligonucleotide
  Sense strand starting at position 656 of SEQ ID NO: 317506
uguaaagcuguggaaguaa

SEQ ID NO: 496298 - RNA, 19 nt, Artificial Sequence
  Description of Artificial Sequence: Synthetic oligonucleotide
  Antisense Strand to SEQ ID NO: 496297
uuacuuccacagcuuuaca

SEQ ID NO: 496299 - RNA, 19 nt, Artificial Sequence
  Description of Artificial Sequence: Synthetic oligonucleotide
  Sense strand starting at position 686 of SEQ ID NO: 317506
gauggauuaugcuuaucca

SEQ ID NO: 496300 - RNA, 19 nt, Artificial Sequence
  Description of Artificial Sequence: Synthetic oligonucleotide
  Antisense Strand to SEQ ID NO: 496299
uggauaagcauaauccauc

SEQ ID NO: 496301 - RNA, 19 nt, Artificial Sequence
  Description of Artificial Sequence: Synthetic oligonucleotide
  Sense strand starting at position 791 of SEQ ID NO: 317506
acuggauccuggccacuaa

SEQ ID NO: 496302 - RNA, 19 nt, Artificial Sequence
  Description of Artificial Sequence: Synthetic oligonucleotide
  Antisense Strand to SEQ ID NO: 496301
uuaguggccaggauccagu

SEQ ID NO: 496303 - RNA, 19 nt, Artificial Sequence
  Description of Artificial Sequence: Synthetic oligonucleotide
  Sense strand starting at position 792 of SEQ ID NO: 317506
cuggauccuggccacuaau

SEQ ID NO: 496304 - RNA, 19 nt, Artificial Sequence
  Description of Artificial Sequence: Synthetic oligonucleotide
  Antisense Strand to SEQ ID NO: 496303
auuaguggccaggauccag

SEQ ID NO: 496305 - RNA, 19 nt, Artificial Sequence
  Description of Artificial Sequence: Synthetic oligonucleotide
  Sense strand starting at position 876 of SEQ ID NO: 317506
uucuccauuucuuaaggga

SEQ ID NO: 496306 - RNA, 19 nt, Artificial Sequence
  Description of Artificial Sequence: Synthetic oligonucleotide
  Antisense Strand to SEQ ID NO: 496305
ucccuuaagaaauggagaa

SEQ ID NO: 496307 - RNA, 19 nt, Artificial Sequence
  Description of Artificial Sequence: Synthetic oligonucleotide
  Sense strand starting at position 879 of SEQ ID NO: 317506
uccauuucuuaagggauuu

SEQ ID NO: 496308 - RNA, 19 nt, Artificial Sequence
  Description of Artificial Sequence: Synthetic oligonucleotide
  Antisense Strand to SEQ ID NO: 496307
aaaucccuuaagaaaugga

SEQ ID NO: 496309 - RNA, 19 nt, Artificial Sequence
  Description of Artificial Sequence: Synthetic oligonucleotide
  Sense strand starting at position 927 of SEQ ID NO: 317506
gaggucugucgauagacag

SEQ ID NO: 496310 - RNA, 19 nt, Artificial Sequence
  Description of Artificial Sequence: Synthetic oligonucleotide
  Antisense Strand to SEQ ID NO: 496309
cugucuaucgacagaccuc

SEQ ID NO: 496311 - RNA, 19 nt, Artificial Sequence
  Description of Artificial Sequence: Synthetic oligonucleotide
  Sense strand starting at position 953 of SEQ ID NO: 317506
ucuguaugcccaugaauag

SEQ ID NO: 496312 - RNA, 19 nt, Artificial Sequence
  Description of Artificial Sequence: Synthetic oligonucleotide
  Antisense Strand to SEQ ID NO: 496311
cuauucaugggcauacaga

SEQ ID NO: 496313 - RNA, 19 nt, Artificial Sequence
  Description of Artificial Sequence: Synthetic oligonucleotide
  Sense strand starting at position 954 of SEQ ID NO: 317506
cuguaugcccaugaauaga

SEQ ID NO: 496314 - RNA, 19 nt, Artificial Sequence
  Description of Artificial Sequence: Synthetic oligonucleotide
  Antisense Strand to SEQ ID NO: 496313
ucuauucaugggcauacag

SEQ ID NO: 496315 - RNA, 19 nt, Artificial Sequence
  Description of Artificial Sequence: Synthetic oligonucleotide
  Sense strand starting at position 1175 of SEQ ID NO: 317506
gacagauaucacggcaguc

SEQ ID NO: 496316 - RNA, 19 nt, Artificial Sequence
  Description of Artificial Sequence: Synthetic oligonucleotide
  Antisense Strand to SEQ ID NO: 496315
gacugccgugauaucuguc

SEQ ID NO: 496317 - RNA, 19 nt, Artificial Sequence
  Description of Artificial Sequence: Synthetic oligonucleotide
  Sense strand starting at position 1177 of SEQ ID NO: 317506
cagauaucacggcagucuu

SEQ ID NO: 496318 - RNA, 19 nt, Artificial Sequence
  Description of Artificial Sequence: Synthetic oligonucleotide
  Antisense Strand to SEQ ID NO: 496317
aagacugccgugauaucug

SEQ ID NO: 496319 - RNA, 19 nt, Artificial Sequence
  Description of Artificial Sequence: Synthetic oligonucleotide
  Sense strand starting at position 1232 of SEQ ID NO: 317506
ucucuuugguuucuuaaga

SEQ ID NO: 496320 - RNA, 19 nt, Artificial Sequence
  Description of Artificial Sequence: Synthetic oligonucleotide
  Antisense Strand to SEQ ID NO: 496319
ucuuaagaaaccaaagaga

SEQ ID NO: 496321 - RNA, 19 nt, Artificial Sequence
  Description of Artificial Sequence: Synthetic oligonucleotide
  Sense strand starting at position 1390 of SEQ ID NO: 317506
agggaaaucucauccaagu

SEQ ID NO: 496322 - RNA, 19 nt, Artificial Sequence
  Description of Artificial Sequence: Synthetic oligonucleotide
  Antisense Strand to SEQ ID NO: 496321
acuuggaugagauuucccu

SEQ ID NO: 496323 - RNA, 19 nt, Artificial Sequence
  Description of Artificial Sequence: Synthetic oligonucleotide
  Sense strand starting at position 2224 of SEQ ID NO: 317506
ggucaagaauuguugucua

SEQ ID NO: 496324 - RNA, 19 nt, Artificial Sequence
  Description of Artificial Sequence: Synthetic oligonucleotide
  Antisense Strand to SEQ ID NO: 496323
uagacaacaauucuugacc

SEQ ID NO: 496325 - RNA, 19 nt, Artificial Sequence
  Description of Artificial Sequence: Synthetic oligonucleotide
  Sense strand starting at position 2227 of SEQ ID NO: 317506
caagaauuguugucuagca

SEQ ID NO: 496326 - RNA, 19 nt, Artificial Sequence
  Description of Artificial Sequence: Synthetic oligonucleotide
  Antisense Strand to SEQ ID NO: 496325
ugcuagacaacaauucuug

SEQ ID NO: 496327 - RNA, 19 nt, Artificial Sequence
  Description of Artificial Sequence: Synthetic oligonucleotide
  Sense strand starting at position 2228 of SEQ ID NO: 317506
aagaauuguugucuagcag

SEQ ID NO: 496328 - RNA, 19 nt, Artificial Sequence
  Description of Artificial Sequence: Synthetic oligonucleotide
  Antisense Strand to SEQ ID NO: 496327
cugcuagacaacaauucuu

SEQ ID NO: 496329 - RNA, 19 nt, Artificial Sequence
  Description of Artificial Sequence: Synthetic oligonucleotide
  Sense strand starting at position 2726 of SEQ ID NO: 317506
gagaguuugcaacauguaa

SEQ ID NO: 496330 - RNA, 19 nt, Artificial Sequence
  Description of Artificial Sequence: Synthetic oligonucleotide
  Antisense Strand to SEQ ID NO: 496329
uuacauguugcaaacucuc

SEQ ID NO: 496331 - RNA, 19 nt, Artificial Sequence
  Description of Artificial Sequence: Synthetic oligonucleotide
  Sense strand starting at position 2750 of SEQ ID NO: 317506
gugcgugaggaagaguaaa

SEQ ID NO: 496332 - RNA, 19 nt, Artificial Sequence
  Description of Artificial Sequence: Synthetic oligonucleotide
  Antisense Strand to SEQ ID NO: 496331
uuuacucuuccucacgcac

SEQ ID NO: 496333 - RNA, 19 nt, Artificial Sequence
  Description of Artificial Sequence: Synthetic oligonucleotide
  Sense strand starting at position 3023 of SEQ ID NO: 317506
ucaugauggugacuuuaag

SEQ ID NO: 496334 - RNA, 19 nt, Artificial Sequence
  Description of Artificial Sequence: Synthetic oligonucleotide
  Antisense Strand to SEQ ID NO: 496333
cuuaaagucaccaucauga

SEQ ID NO: 496335 - RNA, 19 nt, Artificial Sequence
  Description of Artificial Sequence: Synthetic oligonucleotide
  Sense strand starting at position 3037 of SEQ ID NO: 317506
uuaagaaagugguugaaug

SEQ ID NO: 496336 - RNA, 19 nt, Artificial Sequence
  Description of Artificial Sequence: Synthetic oligonucleotide
  Antisense Strand to SEQ ID NO: 496335
cauucaaccacuuucuuaa

SEQ ID NO: 496337 - RNA, 19 nt, Artificial Sequence
  Description of Artificial Sequence: Synthetic oligonucleotide
  Sense strand starting at position 3038 of SEQ ID NO: 317506
uaagaaagugguugaaugu

SEQ ID NO: 496338 - RNA, 19 nt, Artificial Sequence
  Description of Artificial Sequence: Synthetic oligonucleotide
  Antisense Strand to SEQ ID NO: 496337
acauucaaccacuuucuua

SEQ ID NO: 496339 - RNA, 19 nt, Artificial Sequence
  Description of Artificial Sequence: Synthetic oligonucleotide
  Sense strand starting at position 3044 of SEQ ID NO: 317506
agugguugaauguggauga

SEQ ID NO: 496340 - RNA, 19 nt, Artificial Sequence
  Description of Artificial Sequence: Synthetic oligonucleotide
  Antisense Strand to SEQ ID NO: 496339
ucauccacauucaaccacu

SEQ ID NO: 496341 - RNA, 19 nt, Artificial Sequence
  Description of Artificial Sequence: Synthetic oligonucleotide
  Sense strand starting at position 3048 of SEQ ID NO: 317506
guugaauguggaugaaaca

SEQ ID NO: 496342 - RNA, 19 nt, Artificial Sequence
  Description of Artificial Sequence: Synthetic oligonucleotide
  Antisense Strand to SEQ ID NO: 496341
uguuucauccacauucaac

SEQ ID NO: 496343 - RNA, 19 nt, Artificial Sequence
  Description of Artificial Sequence: Synthetic oligonucleotide
  Sense strand starting at position 3481 of SEQ ID NO: 317506
gucagacguuauccuaaag

SEQ ID NO: 496344 - RNA, 19 nt, Artificial Sequence
  Description of Artificial Sequence: Synthetic oligonucleotide
  Antisense Strand to SEQ ID NO: 496343
cuuuaggauaacgucugac

SEQ ID NO: 496345 - RNA, 19 nt, Artificial Sequence
  Description of Artificial Sequence: Synthetic oligonucleotide
  Sense strand starting at position 3774 of SEQ ID NO: 317506
acgagacacugucucagaa

SEQ ID NO: 496346 - RNA, 19 nt, Artificial Sequence
  Description of Artificial Sequence: Synthetic oligonucleotide
  Antisense Strand to SEQ ID NO: 496345
uucugagacagugucucgu

SEQ ID NO: 496347 - RNA, 19 nt, Artificial Sequence
  Description of Artificial Sequence: Synthetic oligonucleotide
  Sense strand starting at position 3866 of SEQ ID NO: 317506
guaauugcacuagauauga

SEQ ID NO: 496348 - RNA, 19 nt, Artificial Sequence
  Description of Artificial Sequence: Synthetic oligonucleotide
  Antisense Strand to SEQ ID NO: 496347
ucauaucuagugcaauuac

SEQ ID NO: 496349 - RNA, 19 nt, Artificial Sequence
  Description of Artificial Sequence: Synthetic oligonucleotide
  Sense strand starting at position 1 of SEQ ID NO: 317507
cugaauuuguguuuguaau

SEQ ID NO: 496350 - RNA, 19 nt, Artificial Sequence
  Description of Artificial Sequence: Synthetic oligonucleotide
  Antisense Strand to SEQ ID NO: 496349
auuacaaacacaaauucag

SEQ ID NO: 496351 - RNA, 19 nt, Artificial Sequence
  Description of Artificial Sequence: Synthetic oligonucleotide
  Sense strand starting at position 306 of SEQ ID NO: 317507
uuguguuacagguaauuag

SEQ ID NO: 496352 - RNA, 19 nt, Artificial Sequence
  Description of Artificial Sequence: Synthetic oligonucleotide
  Antisense Strand to SEQ ID NO: 496351
cuaauuaccuguaacacaa

SEQ ID NO: 496353 - RNA, 19 nt, Artificial Sequence
  Description of Artificial Sequence: Synthetic oligonucleotide
  Sense strand starting at position 309 of SEQ ID NO: 317507
uguuacagguaauuagaua

SEQ ID NO: 496354 - RNA, 19 nt, Artificial Sequence
  Description of Artificial Sequence: Synthetic oligonucleotide
  Antisense Strand to SEQ ID NO: 496353
uaucuaauuaccuguaaca

SEQ ID NO: 496355 - RNA, 19 nt, Artificial Sequence
  Description of Artificial Sequence: Synthetic oligonucleotide
  Sense strand starting at position 316 of SEQ ID NO: 317507
gguaauuagauaggcauua

SEQ ID NO: 496356 - RNA, 19 nt, Artificial Sequence
  Description of Artificial Sequence: Synthetic oligonucleotide
  Antisense Strand to SEQ ID NO: 496355
uaaugccuaucuaauuacc

SEQ ID NO: 496357 - RNA, 19 nt, Artificial Sequence
  Description of Artificial Sequence: Synthetic oligonucleotide
  Sense strand starting at position 345 of SEQ ID NO: 317507
gugacaguuccaugauuau

SEQ ID NO: 496358 - RNA, 19 nt, Artificial Sequence
  Description of Artificial Sequence: Synthetic oligonucleotide
  Antisense Strand to SEQ ID NO: 496357
auaaucauggaacugucac

SEQ ID NO: 496359 - RNA, 19 nt, Artificial Sequence
  Description of Artificial Sequence: Synthetic oligonucleotide
  Sense strand starting at position 351 of SEQ ID NO: 317507
guuccaugauuaucacacu

SEQ ID NO: 496360 - RNA, 19 nt, Artificial Sequence
  Description of Artificial Sequence: Synthetic oligonucleotide
  Antisense Strand to SEQ ID NO: 496359
agugugauaaucauggaac

SEQ ID NO: 496361 - RNA, 19 nt, Artificial Sequence
  Description of Artificial Sequence: Synthetic oligonucleotide
  Sense strand starting at position 414 of SEQ ID NO: 317507
agacaagcucuuuaugauc

SEQ ID NO: 496362 - RNA, 19 nt, Artificial Sequence
  Description of Artificial Sequence: Synthetic oligonucleotide
  Antisense Strand to SEQ ID NO: 496361
gaucauaaagagcuugucu

SEQ ID NO: 496363 - RNA, 19 nt, Artificial Sequence
  Description of Artificial Sequence: Synthetic oligonucleotide
  Sense strand starting at position 423 of SEQ ID NO: 317507
cuuuaugauccacagcugu

SEQ ID NO: 496364 - RNA, 19 nt, Artificial Sequence
  Description of Artificial Sequence: Synthetic oligonucleotide
  Antisense Strand to SEQ ID NO: 496363
acagcuguggaucauaaag

SEQ ID NO: 496365 - RNA, 19 nt, Artificial Sequence
  Description of Artificial Sequence: Synthetic oligonucleotide
  Sense strand starting at position 514 of SEQ ID NO: 317507
aauguugaagugugaccau

SEQ ID NO: 496366 - RNA, 19 nt, Artificial Sequence
  Description of Artificial Sequence: Synthetic oligonucleotide
  Antisense Strand to SEQ ID NO: 496365
auggucacacuucaacauu

SEQ ID NO: 496367 - RNA, 19 nt, Artificial Sequence
  Description of Artificial Sequence: Synthetic oligonucleotide
  Sense strand starting at position 564 of SEQ ID NO: 317507
gccucagaugagcauauau

SEQ ID NO: 496368 - RNA, 19 nt, Artificial Sequence
  Description of Artificial Sequence: Synthetic oligonucleotide
  Antisense Strand to SEQ ID NO: 496367
auauaugcucaucugaggc

SEQ ID NO: 496369 - RNA, 19 nt, Artificial Sequence
  Description of Artificial Sequence: Synthetic oligonucleotide
  Sense strand starting at position 694 of SEQ ID NO: 317507
aguccuaggaucgagguua

SEQ ID NO: 496370 - RNA, 19 nt, Artificial Sequence
  Description of Artificial Sequence: Synthetic oligonucleotide
  Antisense Strand to SEQ ID NO: 496369
uaaccucgauccuaggacu

SEQ ID NO: 496371 - RNA, 19 nt, Artificial Sequence
  Description of Artificial Sequence: Synthetic oligonucleotide
  Sense strand starting at position 899 of SEQ ID NO: 317507
aggauucgccacugauaac

SEQ ID NO: 496372 - RNA, 19 nt, Artificial Sequence
  Description of Artificial Sequence: Synthetic oligonucleotide
  Antisense Strand to SEQ ID NO: 496371
guuaucaguggcgaauccu

SEQ ID NO: 496373 - RNA, 19 nt, Artificial Sequence
  Description of Artificial Sequence: Synthetic oligonucleotide
  Sense strand starting at position 900 of SEQ ID NO: 317507
ggauucgccacugauaacu

SEQ ID NO: 496374 - RNA, 19 nt, Artificial Sequence
  Description of Artificial Sequence: Synthetic oligonucleotide
  Antisense Strand to SEQ ID NO: 496373
aguuaucaguggcgaaucc

SEQ ID NO: 496375 - RNA, 19 nt, Artificial Sequence
  Description of Artificial Sequence: Synthetic oligonucleotide
  Sense strand starting at position 924 of SEQ ID NO: 317507
gccuucuacugguuaacaa

SEQ ID NO: 496376 - RNA, 19 nt, Artificial Sequence
  Description of Artificial Sequence: Synthetic oligonucleotide
  Antisense Strand to SEQ ID NO: 496375
uuguuaaccaguagaaggc

SEQ ID NO: 496377 - RNA, 19 nt, Artificial Sequence
  Description of Artificial Sequence: Synthetic oligonucleotide
  Sense strand starting at position 1525 of SEQ ID NO: 317507
uggucacuuguguacauua

SEQ ID NO: 496378 - RNA, 19 nt, Artificial Sequence
  Description of Artificial Sequence: Synthetic oligonucleotide
  Antisense Strand to SEQ ID NO: 496377
uaauguacacaagugacca

SEQ ID NO: 496379 - RNA, 19 nt, Artificial Sequence
  Description of Artificial Sequence: Synthetic oligonucleotide
  Sense strand starting at position 1527 of SEQ ID NO: 317507
gucacuuguguacauuauu

SEQ ID NO: 496380 - RNA, 19 nt, Artificial Sequence
  Description of Artificial Sequence: Synthetic oligonucleotide
  Antisense Strand to SEQ ID NO: 496379
aauaauguacacaagugac

SEQ ID NO: 496381 - RNA, 19 nt, Artificial Sequence
  Description of Artificial Sequence: Synthetic oligonucleotide
  Sense strand starting at position 1573 of SEQ ID NO: 317507
guuucuuauuugucacuuu

SEQ ID NO: 496382 - RNA, 19 nt, Artificial Sequence
  Description of Artificial Sequence: Synthetic oligonucleotide
  Antisense Strand to SEQ ID NO: 496381
aaagugacaaauaagaaac

SEQ ID NO: 496383 - RNA, 19 nt, Artificial Sequence
  Description of Artificial Sequence: Synthetic oligonucleotide
  Sense strand starting at position 1588 of SEQ ID NO: 317507
cuuuaugugucaucuaaug

SEQ ID NO: 496384 - RNA, 19 nt, Artificial Sequence
  Description of Artificial Sequence: Synthetic oligonucleotide
  Antisense Strand to SEQ ID NO: 496383
cauuagaugacacauaaag

SEQ ID NO: 496385 - RNA, 19 nt, Artificial Sequence
  Description of Artificial Sequence: Synthetic oligonucleotide
  Sense strand starting at position 1659 of SEQ ID NO: 317507
uaaagaggacuuugaguuc

SEQ ID NO: 496386 - RNA, 19 nt, Artificial Sequence
  Description of Artificial Sequence: Synthetic oligonucleotide
  Antisense Strand to SEQ ID NO: 496385
gaacucaaaguccucuuua

SEQ ID NO: 496387 - RNA, 19 nt, Artificial Sequence
  Description of Artificial Sequence: Synthetic oligonucleotide
  Sense strand starting at position 1712 of SEQ ID NO: 317507
ccacacaguucccucgaua

SEQ ID NO: 496388 - RNA, 19 nt, Artificial Sequence
  Description of Artificial Sequence: Synthetic oligonucleotide
  Antisense Strand to SEQ ID NO: 496387
uaucgagggaacugugugg

SEQ ID NO: 496389 - RNA, 19 nt, Artificial Sequence
  Description of Artificial Sequence: Synthetic oligonucleotide
  Sense strand starting at position 1720 of SEQ ID NO: 317507
uucccucgauaucuguaaa

SEQ ID NO: 496390 - RNA, 19 nt, Artificial Sequence
  Description of Artificial Sequence: Synthetic oligonucleotide
  Antisense Strand to SEQ ID NO: 496389
uuuacagauaucgagggaa

SEQ ID NO: 496391 - RNA, 19 nt, Artificial Sequence
  Description of Artificial Sequence: Synthetic oligonucleotide
  Sense strand starting at position 1807 of SEQ ID NO: 317507
auggguaagcaaugaaaca

SEQ ID NO: 496392 - RNA, 19 nt, Artificial Sequence
  Description of Artificial Sequence: Synthetic oligonucleotide
  Antisense Strand to SEQ ID NO: 496391
uguuucauugcuuacccau

SEQ ID NO: 496393 - RNA, 19 nt, Artificial Sequence
  Description of Artificial Sequence: Synthetic oligonucleotide
  Sense strand starting at position 1926 of SEQ ID NO: 317507
ucuaguuucuuaccugaag

SEQ ID NO: 496394 - RNA, 19 nt, Artificial Sequence
  Description of Artificial Sequence: Synthetic oligonucleotide
  Antisense Strand to SEQ ID NO: 496393
cuucagguaagaaacuaga

SEQ ID NO: 496395 - RNA, 19 nt, Artificial Sequence
  Description of Artificial Sequence: Synthetic oligonucleotide
  Sense strand starting at position 1929 of SEQ ID NO: 317507
aguuucuuaccugaaguuu

SEQ ID NO: 496396 - RNA, 19 nt, Artificial Sequence
  Description of Artificial Sequence: Synthetic oligonucleotide
  Antisense Strand to SEQ ID NO: 496395
aaacuucagguaagaaacu

SEQ ID NO: 496397 - RNA, 19 nt, Artificial Sequence
  Description of Artificial Sequence: Synthetic oligonucleotide
  Sense strand starting at position 1942 of SEQ ID NO: 317507
aaguuuccuggaggaacuu

SEQ ID NO: 496398 - RNA, 19 nt, Artificial Sequence
  Description of Artificial Sequence: Synthetic oligonucleotide
  Antisense Strand to SEQ ID NO: 496397
aaguuccuccaggaaacuu

SEQ ID NO: 496399 - RNA, 19 nt, Artificial Sequence
  Description of Artificial Sequence: Synthetic oligonucleotide
  Sense strand starting at position 1984 of SEQ ID NO: 317507
gaagaagccgaauguaaau

SEQ ID NO: 496400 - RNA, 19 nt, Artificial Sequence
  Description of Artificial Sequence: Synthetic oligonucleotide
  Antisense Strand to SEQ ID NO: 496399
auuuacauucggcuucuuc

SEQ ID NO: 496401 - RNA, 19 nt, Artificial Sequence
  Description of Artificial Sequence: Synthetic oligonucleotide
  Sense strand starting at position 2216 of SEQ ID NO: 317507
ccaaguaugccaggauaua

SEQ ID NO: 496402 - RNA, 19 nt, Artificial Sequence
  Description of Artificial Sequence: Synthetic oligonucleotide
  Antisense Strand to SEQ ID NO: 496401
uauauccuggcauacuugg

SEQ ID NO: 496403 - RNA, 19 nt, Artificial Sequence
  Description of Artificial Sequence: Synthetic oligonucleotide
  Sense strand starting at position 2217 of SEQ ID NO: 317507
caaguaugccaggauauau

SEQ ID NO: 496404 - RNA, 19 nt, Artificial Sequence
  Description of Artificial Sequence: Synthetic oligonucleotide
  Antisense Strand to SEQ ID NO: 496403
auauauccuggcauacuug

SEQ ID NO: 496405 - RNA, 19 nt, Artificial Sequence
  Description of Artificial Sequence: Synthetic oligonucleotide
  Sense strand starting at position 2261 of SEQ ID NO: 317507
uaaucuugagauuguuaug

SEQ ID NO: 496406 - RNA, 19 nt, Artificial Sequence
  Description of Artificial Sequence: Synthetic oligonucleotide
  Antisense Strand to SEQ ID NO: 496405
cauaacaaucucaagauua

SEQ ID NO: 496407 - RNA, 19 nt, Artificial Sequence
  Description of Artificial Sequence: Synthetic oligonucleotide
  Sense strand starting at position 2412 of SEQ ID NO: 317507
gaaagugggugguuugauu

SEQ ID NO: 496408 - RNA, 19 nt, Artificial Sequence
  Description of Artificial Sequence: Synthetic oligonucleotide
  Antisense Strand to SEQ ID NO: 496407
aaucaaaccacccacuuuc

SEQ ID NO: 496409 - RNA, 19 nt, Artificial Sequence
  Description of Artificial Sequence: Synthetic oligonucleotide
  Sense strand starting at position 2419 of SEQ ID NO: 317507
ggugguuugauugaucuuu

SEQ ID NO: 496410 - RNA, 19 nt, Artificial Sequence
  Description of Artificial Sequence: Synthetic oligonucleotide
  Antisense Strand to SEQ ID NO: 496409
aaagaucaaucaaaccacc

SEQ ID NO: 496411 - RNA, 19 nt, Artificial Sequence
  Description of Artificial Sequence: Synthetic oligonucleotide
  Sense strand starting at position 2424 of SEQ ID NO: 317507
uuugauugaucuuugccau

SEQ ID NO: 496412 - RNA, 19 nt, Artificial Sequence
  Description of Artificial Sequence: Synthetic oligonucleotide
  Antisense Strand to SEQ ID NO: 496411
auggcaaagaucaaucaaa

SEQ ID NO: 496413 - RNA, 19 nt, Artificial Sequence
  Description of Artificial Sequence: Synthetic oligonucleotide
  Sense strand starting at position 2425 of SEQ ID NO: 317507
uugauugaucuuugccaua

SEQ ID NO: 496414 - RNA, 19 nt, Artificial Sequence
  Description of Artificial Sequence: Synthetic oligonucleotide
  Antisense Strand to SEQ ID NO: 496413
uauggcaaagaucaaucaa

SEQ ID NO: 496415 - RNA, 19 nt, Artificial Sequence
  Description of Artificial Sequence: Synthetic oligonucleotide
  Sense strand starting at position 2617 of SEQ ID NO: 317507
aguaauaacuaaguacuga

SEQ ID NO: 496416 - RNA, 19 nt, Artificial Sequence
  Description of Artificial Sequence: Synthetic oligonucleotide
  Antisense Strand to SEQ ID NO: 496415
ucaguacuuaguuauuacu

SEQ ID NO: 496417 - RNA, 19 nt, Artificial Sequence
  Description of Artificial Sequence: Synthetic oligonucleotide
  Sense strand starting at position 2706 of SEQ ID NO: 317507
agcugauaaguauggcaua

SEQ ID NO: 496418 - RNA, 19 nt, Artificial Sequence
  Description of Artificial Sequence: Synthetic oligonucleotide
  Antisense Strand to SEQ ID NO: 496417
uaugccauacuuaucagcu

SEQ ID NO: 496419 - RNA, 19 nt, Artificial Sequence
  Description of Artificial Sequence: Synthetic oligonucleotide
  Sense strand starting at position 2732 of SEQ ID NO: 317507
agagacacacuuuguauga

SEQ ID NO: 496420 - RNA, 19 nt, Artificial Sequence
  Description of Artificial Sequence: Synthetic oligonucleotide
  Antisense Strand to SEQ ID NO: 496419
ucauacaaagugugucucu

SEQ ID NO: 496421 - RNA, 19 nt, Artificial Sequence
  Description of Artificial Sequence: Synthetic oligonucleotide
  Sense strand starting at position 3338 of SEQ ID NO: 317507
ugguuaaauuucuaucuag

SEQ ID NO: 496422 - RNA, 19 nt, Artificial Sequence
  Description of Artificial Sequence: Synthetic oligonucleotide
  Antisense Strand to SEQ ID NO: 496421
cuagauagaaauuuaacca

SEQ ID NO: 496423 - RNA, 19 nt, Artificial Sequence
  Description of Artificial Sequence: Synthetic oligonucleotide
  Sense strand starting at position 3345 of SEQ ID NO: 317507
auuucuaucuaggacagaa

SEQ ID NO: 496424 - RNA, 19 nt, Artificial Sequence
  Description of Artificial Sequence: Synthetic oligonucleotide
  Antisense Strand to SEQ ID NO: 496423
uucuguccuagauagaaau

SEQ ID NO: 496425 - RNA, 19 nt, Artificial Sequence
  Description of Artificial Sequence: Synthetic oligonucleotide
  Sense strand starting at position 3468 of SEQ ID NO: 317507
ccugaagacucccuaugau

SEQ ID NO: 496426 - RNA, 19 nt, Artificial Sequence
  Description of Artificial Sequence: Synthetic oligonucleotide
  Antisense Strand to SEQ ID NO: 496425
aucauagggagucuucagg

SEQ ID NO: 496427 - RNA, 19 nt, Artificial Sequence
  Description of Artificial Sequence: Synthetic oligonucleotide
  Sense strand starting at position 3510 of SEQ ID NO: 317507
agauuacuguuauucuacu

SEQ ID NO: 496428 - RNA, 19 nt, Artificial Sequence
  Description of Artificial Sequence: Synthetic oligonucleotide
  Antisense Strand to SEQ ID NO: 496427
aguagaauaacaguaaucu

SEQ ID NO: 496429 - RNA, 19 nt, Artificial Sequence
  Description of Artificial Sequence: Synthetic oligonucleotide
  Sense strand starting at position 7 of SEQ ID NO: 317508
uccugaauugcuuauuaga

SEQ ID NO: 496430 - RNA, 19 nt, Artificial Sequence
  Description of Artificial Sequence: Synthetic oligonucleotide
  Antisense Strand to SEQ ID NO: 496429
ucuaauaagcaauucagga

SEQ ID NO: 496431 - RNA, 19 nt, Artificial Sequence
  Description of Artificial Sequence: Synthetic oligonucleotide
  Sense strand starting at position 92 of SEQ ID NO: 317508
ugcgguuccgacgucauua

SEQ ID NO: 496432 - RNA, 19 nt, Artificial Sequence
  Description of Artificial Sequence: Synthetic oligonucleotide
  Antisense Strand to SEQ ID NO: 496431
uaaugacgucggaaccgca

SEQ ID NO: 496433 - RNA, 19 nt, Artificial Sequence
  Description of Artificial Sequence: Synthetic oligonucleotide
  Sense strand starting at position 410 of SEQ ID NO: 317508
augucugauuuaucuguuu

SEQ ID NO: 496434 - RNA, 19 nt, Artificial Sequence
  Description of Artificial Sequence: Synthetic oligonucleotide
  Antisense Strand to SEQ ID NO: 496433
aaacagauaaaucagacau

SEQ ID NO: 496435 - RNA, 19 nt, Artificial Sequence
  Description of Artificial Sequence: Synthetic oligonucleotide
  Sense strand starting at position 412 of SEQ ID NO: 317508
gucugauuuaucuguuugu

SEQ ID NO: 496436 - RNA, 19 nt, Artificial Sequence
  Description of Artificial Sequence: Synthetic oligonucleotide
  Antisense Strand to SEQ ID NO: 496435
acaaacagauaaaucagac

SEQ ID NO: 496437 - RNA, 19 nt, Artificial Sequence
  Description of Artificial Sequence: Synthetic oligonucleotide
  Sense strand starting at position 436 of SEQ ID NO: 317508
ccuugaauccauggacuuu

SEQ ID NO: 496438 - RNA, 19 nt, Artificial Sequence
  Description of Artificial Sequence: Synthetic oligonucleotide
  Antisense Strand to SEQ ID NO: 496437
aaaguccauggauucaagg

SEQ ID NO: 496439 - RNA, 19 nt, Artificial Sequence
  Description of Artificial Sequence: Synthetic oligonucleotide
  Sense strand starting at position 479 of SEQ ID NO: 317508
gugcuuaguaaagaguaag

SEQ ID NO: 496440 - RNA, 19 nt, Artificial Sequence
  Description of Artificial Sequence: Synthetic oligonucleotide
  Antisense Strand to SEQ ID NO: 496439
cuuacucuuuacuaagcac

SEQ ID NO: 496441 - RNA, 19 nt, Artificial Sequence
  Description of Artificial Sequence: Synthetic oligonucleotide
  Sense strand starting at position 683 of SEQ ID NO: 317508
auaagcuuagcauggauaa

SEQ ID NO: 496442 - RNA, 19 nt, Artificial Sequence
  Description of Artificial Sequence: Synthetic oligonucleotide
  Antisense Strand to SEQ ID NO: 496441
uuauccaugcuaagcuuau

SEQ ID NO: 496443 - RNA, 19 nt, Artificial Sequence
  Description of Artificial Sequence: Synthetic oligonucleotide
  Sense strand starting at position 745 of SEQ ID NO: 317508
gugauaaagccuuaaugua

SEQ ID NO: 496444 - RNA, 19 nt, Artificial Sequence
  Description of Artificial Sequence: Synthetic oligonucleotide
  Antisense Strand to SEQ ID NO: 496443
uacauuaaggcuuuaucac

SEQ ID NO: 496445 - RNA, 19 nt, Artificial Sequence
  Description of Artificial Sequence: Synthetic oligonucleotide
  Sense strand starting at position 912 of SEQ ID NO: 317508
ugcaguuucuaggcaauuu

SEQ ID NO: 496446 - RNA, 19 nt, Artificial Sequence
  Description of Artificial Sequence: Synthetic oligonucleotide
  Antisense Strand to SEQ ID NO: 496445
aaauugccuagaaacugca

SEQ ID NO: 496447 - RNA, 19 nt, Artificial Sequence
  Description of Artificial Sequence: Synthetic oligonucleotide
  Sense strand starting at position 1121 of SEQ ID NO: 317508
guacaucaauacuuggaau

SEQ ID NO: 496448 - RNA, 19 nt, Artificial Sequence
  Description of Artificial Sequence: Synthetic oligonucleotide
  Antisense Strand to SEQ ID NO: 496447
auuccaaguauugauguac

SEQ ID NO: 496449 - RNA, 19 nt, Artificial Sequence
  Description of Artificial Sequence: Synthetic oligonucleotide
  Sense strand starting at position 1255 of SEQ ID NO: 317508
ucccaugauuuccaaagag

SEQ ID NO: 496450 - RNA, 19 nt, Artificial Sequence
  Description of Artificial Sequence: Synthetic oligonucleotide
  Antisense Strand to SEQ ID NO: 496449
cucuuuggaaaucauggga

SEQ ID NO: 496451 - RNA, 19 nt, Artificial Sequence
  Description of Artificial Sequence: Synthetic oligonucleotide
  Sense strand starting at position 1332 of SEQ ID NO: 317508
agacauuuggucggugagu

SEQ ID NO: 496452 - RNA, 19 nt, Artificial Sequence
  Description of Artificial Sequence: Synthetic oligonucleotide
  Antisense Strand to SEQ ID NO: 496451
acucaccgaccaaaugucu

SEQ ID NO: 496453 - RNA, 19 nt, Artificial Sequence
  Description of Artificial Sequence: Synthetic oligonucleotide
  Sense strand starting at position 1333 of SEQ ID NO: 317508
gacauuuggucggugaguu

SEQ ID NO: 496454 - RNA, 19 nt, Artificial Sequence
  Description of Artificial Sequence: Synthetic oligonucleotide
  Antisense Strand to SEQ ID NO: 496453
aacucaccgaccaaauguc

SEQ ID NO: 496455 - RNA, 19 nt, Artificial Sequence
  Description of Artificial Sequence: Synthetic oligonucleotide
  Sense strand starting at position 1334 of SEQ ID NO: 317508
acauuuggucggugaguuc

SEQ ID NO: 496456 - RNA, 19 nt, Artificial Sequence
  Description of Artificial Sequence: Synthetic oligonucleotide
  Antisense Strand to SEQ ID NO: 496455
gaacucaccgaccaaaugu

SEQ ID NO: 496457 - RNA, 19 nt, Artificial Sequence
  Description of Artificial Sequence: Synthetic oligonucleotide
  Sense strand starting at position 1471 of SEQ ID NO: 317508
acuauaucgccacaaggaa

SEQ ID NO: 496458 - RNA, 19 nt, Artificial Sequence
  Description of Artificial Sequence: Synthetic oligonucleotide
  Antisense Strand to SEQ ID NO: 496457
uuccuuguggcgauauagu

SEQ ID NO: 496459 - RNA, 19 nt, Artificial Sequence
  Description of Artificial Sequence: Synthetic oligonucleotide
  Sense strand starting at position 1610 of SEQ ID NO: 317508
uggccaucuccugauagaa

SEQ ID NO: 496460 - RNA, 19 nt, Artificial Sequence
  Description of Artificial Sequence: Synthetic oligonucleotide
  Antisense Strand to SEQ ID NO: 496459
uucuaucaggagauggcca

SEQ ID NO: 496461 - RNA, 19 nt, Artificial Sequence
  Description of Artificial Sequence: Synthetic oligonucleotide
  Sense strand starting at position 1629 of SEQ ID NO: 317508
ucuccaaaugguugaagga

SEQ ID NO: 496462 - RNA, 19 nt, Artificial Sequence
  Description of Artificial Sequence: Synthetic oligonucleotide
  Antisense Strand to SEQ ID NO: 496461
uccuucaaccauuuggaga

SEQ ID NO: 496463 - RNA, 19 nt, Artificial Sequence
  Description of Artificial Sequence: Synthetic oligonucleotide
  Sense strand starting at position 1638 of SEQ ID NO: 317508
gguugaaggagauggucua

SEQ ID NO: 496464 - RNA, 19 nt, Artificial Sequence
  Description of Artificial Sequence: Synthetic oligonucleotide
  Antisense Strand to SEQ ID NO: 496463
uagaccaucuccuucaacc

SEQ ID NO: 496465 - RNA, 19 nt, Artificial Sequence
  Description of Artificial Sequence: Synthetic oligonucleotide
  Sense strand starting at position 1734 of SEQ ID NO: 317508
aaaugucagagauggguua

SEQ ID NO: 496466 - RNA, 19 nt, Artificial Sequence
  Description of Artificial Sequence: Synthetic oligonucleotide
  Antisense Strand to SEQ ID NO: 496465
uaacccaucucugacauuu

SEQ ID NO: 496467 - RNA, 19 nt, Artificial Sequence
  Description of Artificial Sequence: Synthetic oligonucleotide
  Sense strand starting at position 1736 of SEQ ID NO: 317508
augucagagauggguuaga

SEQ ID NO: 496468 - RNA, 19 nt, Artificial Sequence
  Description of Artificial Sequence: Synthetic oligonucleotide
  Antisense Strand to SEQ ID NO: 496467
ucuaacccaucucugacau

SEQ ID NO: 496469 - RNA, 19 nt, Artificial Sequence
  Description of Artificial Sequence: Synthetic oligonucleotide
  Sense strand starting at position 1951 of SEQ ID NO: 317508
uggcuugaugcagaagauu

SEQ ID NO: 496470 - RNA, 19 nt, Artificial Sequence
  Description of Artificial Sequence: Synthetic oligonucleotide
  Antisense Strand to SEQ ID NO: 496469
aaucuucugcaucaagcca

SEQ ID NO: 496471 - RNA, 19 nt, Artificial Sequence
  Description of Artificial Sequence: Synthetic oligonucleotide
  Sense strand starting at position 1959 of SEQ ID NO: 317508
ugcagaagauuugaugaga

SEQ ID NO: 496472 - RNA, 19 nt, Artificial Sequence
  Description of Artificial Sequence: Synthetic oligonucleotide
  Antisense Strand to SEQ ID NO: 496471
ucucaucaaaucuucugca

SEQ ID NO: 496473 - RNA, 19 nt, Artificial Sequence
  Description of Artificial Sequence: Synthetic oligonucleotide
  Sense strand starting at position 1964 of SEQ ID NO: 317508
aagauuugaugagauguga

SEQ ID NO: 496474 - RNA, 19 nt, Artificial Sequence
  Description of Artificial Sequence: Synthetic oligonucleotide
  Antisense Strand to SEQ ID NO: 496473
ucacaucucaucaaaucuu

SEQ ID NO: 496475 - RNA, 19 nt, Artificial Sequence
  Description of Artificial Sequence: Synthetic oligonucleotide
  Sense strand starting at position 1973 of SEQ ID NO: 317508
ugagaugugaagcaaaugu

SEQ ID NO: 496476 - RNA, 19 nt, Artificial Sequence
  Description of Artificial Sequence: Synthetic oligonucleotide
  Antisense Strand to SEQ ID NO: 496475
acauuugcuucacaucuca

SEQ ID NO: 496477 - RNA, 19 nt, Artificial Sequence
  Description of Artificial Sequence: Synthetic oligonucleotide
  Sense strand starting at position 2085 of SEQ ID NO: 317508
agugauacuagucauagua

SEQ ID NO: 496478 - RNA, 19 nt, Artificial Sequence
  Description of Artificial Sequence: Synthetic oligonucleotide
  Antisense Strand to SEQ ID NO: 496477
uacuaugacuaguaucacu

SEQ ID NO: 496479 - RNA, 19 nt, Artificial Sequence
  Description of Artificial Sequence: Synthetic oligonucleotide
  Sense strand starting at position 2684 of SEQ ID NO: 317508
ggagcuauuuaagagaauu

SEQ ID NO: 496480 - RNA, 19 nt, Artificial Sequence
  Description of Artificial Sequence: Synthetic oligonucleotide
  Antisense Strand to SEQ ID NO: 496479
aauucucuuaaauagcucc

SEQ ID NO: 496481 - RNA, 19 nt, Artificial Sequence
  Description of Artificial Sequence: Synthetic oligonucleotide
  Sense strand starting at position 2744 of SEQ ID NO: 317508
cuaucuagccugcaugaaa

SEQ ID NO: 496482 - RNA, 19 nt, Artificial Sequence
  Description of Artificial Sequence: Synthetic oligonucleotide
  Antisense Strand to SEQ ID NO: 496481
uuucaugcaggcuagauag

SEQ ID NO: 496483 - RNA, 19 nt, Artificial Sequence
  Description of Artificial Sequence: Synthetic oligonucleotide
  Sense strand starting at position 2805 of SEQ ID NO: 317508
gcguuuauuaaguccuugu

SEQ ID NO: 496484 - RNA, 19 nt, Artificial Sequence
  Description of Artificial Sequence: Synthetic oligonucleotide
  Antisense Strand to SEQ ID NO: 496483
acaaggacuuaauaaacgc

SEQ ID NO: 496485 - RNA, 19 nt, Artificial Sequence
  Description of Artificial Sequence: Synthetic oligonucleotide
  Sense strand starting at position 3029 of SEQ ID NO: 317508
acuugagugauggguauac

SEQ ID NO: 496486 - RNA, 19 nt, Artificial Sequence
  Description of Artificial Sequence: Synthetic oligonucleotide
  Antisense Strand to SEQ ID NO: 496485
guauacccaucacucaagu

SEQ ID NO: 496487 - RNA, 19 nt, Artificial Sequence
  Description of Artificial Sequence: Synthetic oligonucleotide
  Sense strand starting at position 3189 of SEQ ID NO: 317508
uguauuaaccacugggaua

SEQ ID NO: 496488 - RNA, 19 nt, Artificial Sequence
  Description of Artificial Sequence: Synthetic oligonucleotide
  Antisense Strand to SEQ ID NO: 496487
uaucccagugguuaauaca

SEQ ID NO: 496489 - RNA, 19 nt, Artificial Sequence
  Description of Artificial Sequence: Synthetic oligonucleotide
  Sense strand starting at position 3190 of SEQ ID NO: 317508
guauuaaccacugggauag

SEQ ID NO: 496490 - RNA, 19 nt, Artificial Sequence
  Description of Artificial Sequence: Synthetic oligonucleotide
  Antisense Strand to SEQ ID NO: 496489
cuaucccagugguuaauac

SEQ ID NO: 496491 - RNA, 19 nt, Artificial Sequence
  Description of Artificial Sequence: Synthetic oligonucleotide
  Sense strand starting at position 3386 of SEQ ID NO: 317508
ugugaauaagcagagugau

SEQ ID NO: 496492 - RNA, 19 nt, Artificial Sequence
  Description of Artificial Sequence: Synthetic oligonucleotide
  Antisense Strand to SEQ ID NO: 496491
aucacucugcuuauucaca

SEQ ID NO: 496493 - RNA, 19 nt, Artificial Sequence
  Description of Artificial Sequence: Synthetic oligonucleotide
  Sense strand starting at position 3389 of SEQ ID NO: 317508
gaauaagcagagugauccu

SEQ ID NO: 496494 - RNA, 19 nt, Artificial Sequence
  Description of Artificial Sequence: Synthetic oligonucleotide
  Antisense Strand to SEQ ID NO: 496493
aggaucacucugcuuauuc

SEQ ID NO: 496495 - RNA, 19 nt, Artificial Sequence
  Description of Artificial Sequence: Synthetic oligonucleotide
  Sense strand starting at position 3586 of SEQ ID NO: 317508
ccuugaguguauuuccauu

SEQ ID NO: 496496 - RNA, 19 nt, Artificial Sequence
  Description of Artificial Sequence: Synthetic oligonucleotide
  Antisense Strand to SEQ ID NO: 496495
aauggaaauacacucaagg

SEQ ID NO: 496497 - RNA, 19 nt, Artificial Sequence
  Description of Artificial Sequence: Synthetic oligonucleotide
  Sense strand starting at position 3592 of SEQ ID NO: 317508
guguauuuccauugaaguu

SEQ ID NO: 496498 - RNA, 19 nt, Artificial Sequence
  Description of Artificial Sequence: Synthetic oligonucleotide
  Antisense Strand to SEQ ID NO: 496497
aacuucaauggaaauacac

SEQ ID NO: 496499 - RNA, 19 nt, Artificial Sequence
  Description of Artificial Sequence: Synthetic oligonucleotide
  Sense strand starting at position 3605 of SEQ ID NO: 317508
gaaguuucucugcagaaga

SEQ ID NO: 496500 - RNA, 19 nt, Artificial Sequence
  Description of Artificial Sequence: Synthetic oligonucleotide
  Antisense Strand to SEQ ID NO: 496499
ucuucugcagagaaacuuc

SEQ ID NO: 496501 - RNA, 19 nt, Artificial Sequence
  Description of Artificial Sequence: Synthetic oligonucleotide
  Sense strand starting at position 3607 of SEQ ID NO: 317508
aguuucucugcagaagaug

SEQ ID NO: 496502 - RNA, 19 nt, Artificial Sequence
  Description of Artificial Sequence: Synthetic oligonucleotide
  Antisense Strand to SEQ ID NO: 496501
caucuucugcagagaaacu

SEQ ID NO: 496503 - RNA, 19 nt, Artificial Sequence
  Description of Artificial Sequence: Synthetic oligonucleotide
  Sense strand starting at position 3671 of SEQ ID NO: 317508
cauagugacuuggcaagaa

SEQ ID NO: 496504 - RNA, 19 nt, Artificial Sequence
  Description of Artificial Sequence: Synthetic oligonucleotide
  Antisense Strand to SEQ ID NO: 496503
uucuugccaagucacuaug

SEQ ID NO: 496505 - RNA, 19 nt, Artificial Sequence
  Description of Artificial Sequence: Synthetic oligonucleotide
  Sense strand starting at position 3675 of SEQ ID NO: 317508
gugacuuggcaagaaacuu

SEQ ID NO: 496506 - RNA, 19 nt, Artificial Sequence
  Description of Artificial Sequence: Synthetic oligonucleotide
  Antisense Strand to SEQ ID NO: 496505
aaguuucuugccaagucac

SEQ ID NO: 496507 - RNA, 19 nt, Artificial Sequence
  Description of Artificial Sequence: Synthetic oligonucleotide
  Sense strand starting at position 3839 of SEQ ID NO: 317508
gaaaccaguuaggcagaua

SEQ ID NO: 496508 - RNA, 19 nt, Artificial Sequence
  Description of Artificial Sequence: Synthetic oligonucleotide
  Antisense Strand to SEQ ID NO: 496507
uaucugccuaacugguuuc

SEQ ID NO: 496509 - RNA, 19 nt, Artificial Sequence
  Description of Artificial Sequence: Synthetic oligonucleotide
  Sense strand starting at position 80 of SEQ ID NO: 317509
gucuccucucaugagaaug

SEQ ID NO: 496510 - RNA, 19 nt, Artificial Sequence
  Description of Artificial Sequence: Synthetic oligonucleotide
  Antisense Strand to SEQ ID NO: 496509
cauucucaugagaggagac

SEQ ID NO: 496511 - RNA, 19 nt, Artificial Sequence
  Description of Artificial Sequence: Synthetic oligonucleotide
  Sense strand starting at position 90 of SEQ ID NO: 317509
augagaauguaaguuccau

SEQ ID NO: 496512 - RNA, 19 nt, Artificial Sequence
  Description of Artificial Sequence: Synthetic oligonucleotide
  Antisense Strand to SEQ ID NO: 496511
auggaacuuacauucucau

SEQ ID NO: 496513 - RNA, 19 nt, Artificial Sequence
  Description of Artificial Sequence: Synthetic oligonucleotide
  Sense strand starting at position 96 of SEQ ID NO: 317509
auguaaguuccaugagaua

SEQ ID NO: 496514 - RNA, 19 nt, Artificial Sequence
  Description of Artificial Sequence: Synthetic oligonucleotide
  Antisense Strand to SEQ ID NO: 496513
uaucucauggaacuuacau

SEQ ID NO: 496515 - RNA, 19 nt, Artificial Sequence
  Description of Artificial Sequence: Synthetic oligonucleotide
  Sense strand starting at position 158 of SEQ ID NO: 317509
agacaaguuguaggaacua

SEQ ID NO: 496516 - RNA, 19 nt, Artificial Sequence
  Description of Artificial Sequence: Synthetic oligonucleotide
  Antisense Strand to SEQ ID NO: 496515
uaguuccuacaacuugucu

SEQ ID NO: 496517 - RNA, 19 nt, Artificial Sequence
  Description of Artificial Sequence: Synthetic oligonucleotide
  Sense strand starting at position 474 of SEQ ID NO: 317509
acauuaccucugugagaaa

SEQ ID NO: 496518 - RNA, 19 nt, Artificial Sequence
  Description of Artificial Sequence: Synthetic oligonucleotide
  Antisense Strand to SEQ ID NO: 496517
uuucucacagagguaaugu

SEQ ID NO: 496519 - RNA, 19 nt, Artificial Sequence
  Description of Artificial Sequence: Synthetic oligonucleotide
  Sense strand starting at position 653 of SEQ ID NO: 317509
ggccuugaugguuaacauu

SEQ ID NO: 496520 - RNA, 19 nt, Artificial Sequence
  Description of Artificial Sequence: Synthetic oligonucleotide
  Antisense Strand to SEQ ID NO: 496519
aauguuaaccaucaaggcc

SEQ ID NO: 496521 - RNA, 19 nt, Artificial Sequence
  Description of Artificial Sequence: Synthetic oligonucleotide
  Sense strand starting at position 749 of SEQ ID NO: 317509
gagagaugguguccaacua

SEQ ID NO: 496522 - RNA, 19 nt, Artificial Sequence
  Description of Artificial Sequence: Synthetic oligonucleotide
  Antisense Strand to SEQ ID NO: 496521
uaguuggacaccaucucuc

SEQ ID NO: 496523 - RNA, 19 nt, Artificial Sequence
  Description of Artificial Sequence: Synthetic oligonucleotide
  Sense strand starting at position 1037 of SEQ ID NO: 317509
aguuguuugcauuaagaga

SEQ ID NO: 496524 - RNA, 19 nt, Artificial Sequence
  Description of Artificial Sequence: Synthetic oligonucleotide
  Antisense Strand to SEQ ID NO: 496523
ucucuuaaugcaaacaacu

SEQ ID NO: 496525 - RNA, 19 nt, Artificial Sequence
  Description of Artificial Sequence: Synthetic oligonucleotide
  Sense strand starting at position 1117 of SEQ ID NO: 317509
agggaauuguuuguacaga

SEQ ID NO: 496526 - RNA, 19 nt, Artificial Sequence
  Description of Artificial Sequence: Synthetic oligonucleotide
  Antisense Strand to SEQ ID NO: 496525
ucuguacaaacaauucccu

SEQ ID NO: 496527 - RNA, 19 nt, Artificial Sequence
  Description of Artificial Sequence: Synthetic oligonucleotide
  Sense strand starting at position 1168 of SEQ ID NO: 317509
uaugcaguggaauggaaau

SEQ ID NO: 496528 - RNA, 19 nt, Artificial Sequence
  Description of Artificial Sequence: Synthetic oligonucleotide
  Antisense Strand to SEQ ID NO: 496527
auuuccauuccacugcaua

SEQ ID NO: 496529 - RNA, 19 nt, Artificial Sequence
  Description of Artificial Sequence: Synthetic oligonucleotide
  Sense strand starting at position 1308 of SEQ ID NO: 317509
uauagucuugcagagaaua

SEQ ID NO: 496530 - RNA, 19 nt, Artificial Sequence
  Description of Artificial Sequence: Synthetic oligonucleotide
  Antisense Strand to SEQ ID NO: 496529
uauucucugcaagacuaua

SEQ ID NO: 496531 - RNA, 19 nt, Artificial Sequence
  Description of Artificial Sequence: Synthetic oligonucleotide
  Sense strand starting at position 1456 of SEQ ID NO: 317509
ccucaauguguacauaaau

SEQ ID NO: 496532 - RNA, 19 nt, Artificial Sequence
  Description of Artificial Sequence: Synthetic oligonucleotide
  Antisense Strand to SEQ ID NO: 496531
auuuauguacacauugagg

SEQ ID NO: 496533 - RNA, 19 nt, Artificial Sequence
  Description of Artificial Sequence: Synthetic oligonucleotide
  Sense strand starting at position 1648 of SEQ ID NO: 317509
guagaaagcccauauugug

SEQ ID NO: 496534 - RNA, 19 nt, Artificial Sequence
  Description of Artificial Sequence: Synthetic oligonucleotide
  Antisense Strand to SEQ ID NO: 496533
cacaauaugggcuuucuac

SEQ ID NO: 496535 - RNA, 19 nt, Artificial Sequence
  Description of Artificial Sequence: Synthetic oligonucleotide
  Sense strand starting at position 1681 of SEQ ID NO: 317509
auggucaauccacagcauu

SEQ ID NO: 496536 - RNA, 19 nt, Artificial Sequence
  Description of Artificial Sequence: Synthetic oligonucleotide
  Antisense Strand to SEQ ID NO: 496535
aaugcuguggauugaccau

SEQ ID NO: 496537 - RNA, 19 nt, Artificial Sequence
  Description of Artificial Sequence: Synthetic oligonucleotide
  Sense strand starting at position 1770 of SEQ ID NO: 317509
gagaaucgggauuggaguu

SEQ ID NO: 496538 - RNA, 19 nt, Artificial Sequence
  Description of Artificial Sequence: Synthetic oligonucleotide
  Antisense Strand to SEQ ID NO: 496537
aacuccaaucccgauucuc

SEQ ID NO: 496539 - RNA, 19 nt, Artificial Sequence
  Description of Artificial Sequence: Synthetic oligonucleotide
  Sense strand starting at position 1776 of SEQ ID NO: 317509
cgggauuggaguugaugaa

SEQ ID NO: 496540 - RNA, 19 nt, Artificial Sequence
  Description of Artificial Sequence: Synthetic oligonucleotide
  Antisense Strand to SEQ ID NO: 496539
uucaucaacuccaaucccg

SEQ ID NO: 496541 - RNA, 19 nt, Artificial Sequence
  Description of Artificial Sequence: Synthetic oligonucleotide
  Sense strand starting at position 1791 of SEQ ID NO: 317509
ugaauagaguugcugauga

SEQ ID NO: 496542 - RNA, 19 nt, Artificial Sequence
  Description of Artificial Sequence: Synthetic oligonucleotide
  Antisense Strand to SEQ ID NO: 496541
ucaucagcaacucuauuca

SEQ ID NO: 496543 - RNA, 19 nt, Artificial Sequence
  Description of Artificial Sequence: Synthetic oligonucleotide
  Sense strand starting at position 1820 of SEQ ID NO: 317509
gucacauugugauuucuuu

SEQ ID NO: 496544 - RNA, 19 nt, Artificial Sequence
  Description of Artificial Sequence: Synthetic oligonucleotide
  Antisense Strand to SEQ ID NO: 496543
aaagaaaucacaaugugac

SEQ ID NO: 496545 - RNA, 19 nt, Artificial Sequence
  Description of Artificial Sequence: Synthetic oligonucleotide
  Sense strand starting at position 1883 of SEQ ID NO: 317509
ccaucuguaggccaaauua

SEQ ID NO: 496546 - RNA, 19 nt, Artificial Sequence
  Description of Artificial Sequence: Synthetic oligonucleotide
  Antisense Strand to SEQ ID NO: 496545
uaauuuggccuacagaugg

SEQ ID NO: 496547 - RNA, 19 nt, Artificial Sequence
  Description of Artificial Sequence: Synthetic oligonucleotide
  Sense strand starting at position 1947 of SEQ ID NO: 317509
ccagcaucuggacaaacuu

SEQ ID NO: 496548 - RNA, 19 nt, Artificial Sequence
  Description of Artificial Sequence: Synthetic oligonucleotide
  Antisense Strand to SEQ ID NO: 496547
aaguuuguccagaugcugg

SEQ ID NO: 496549 - RNA, 19 nt, Artificial Sequence
  Description of Artificial Sequence: Synthetic oligonucleotide
  Sense strand starting at position 1955 of SEQ ID NO: 317509
uggacaaacuucuuaggca

SEQ ID NO: 496550 - RNA, 19 nt, Artificial Sequence
  Description of Artificial Sequence: Synthetic oligonucleotide
  Antisense Strand to SEQ ID NO: 496549
ugccuaagaaguuugucca

SEQ ID NO: 496551 - RNA, 19 nt, Artificial Sequence
  Description of Artificial Sequence: Synthetic oligonucleotide
  Sense strand starting at position 2064 of SEQ ID NO: 317509
aaguaauauuuagugcgau

SEQ ID NO: 496552 - RNA, 19 nt, Artificial Sequence
  Description of Artificial Sequence: Synthetic oligonucleotide
  Antisense Strand to SEQ ID NO: 496551
aucgcacuaaauauuacuu

SEQ ID NO: 496553 - RNA, 19 nt, Artificial Sequence
  Description of Artificial Sequence: Synthetic oligonucleotide
  Sense strand starting at position 2067 of SEQ ID NO: 317509
uaauauuuagugcgauggu

SEQ ID NO: 496554 - RNA, 19 nt, Artificial Sequence
  Description of Artificial Sequence: Synthetic oligonucleotide
  Antisense Strand to SEQ ID NO: 496553
accaucgcacuaaauauua

SEQ ID NO: 496555 - RNA, 19 nt, Artificial Sequence
  Description of Artificial Sequence: Synthetic oligonucleotide
  Sense strand starting at position 2245 of SEQ ID NO: 317509
cugugauaauaacuaugau

SEQ ID NO: 496556 - RNA, 19 nt, Artificial Sequence
  Description of Artificial Sequence: Synthetic oligonucleotide
  Antisense Strand to SEQ ID NO: 496555
aucauaguuauuaucacag

SEQ ID NO: 496557 - RNA, 19 nt, Artificial Sequence
  Description of Artificial Sequence: Synthetic oligonucleotide
  Sense strand starting at position 2316 of SEQ ID NO: 317509
agaggaaguuugcucaaac

SEQ ID NO: 496558 - RNA, 19 nt, Artificial Sequence
  Description of Artificial Sequence: Synthetic oligonucleotide
  Antisense Strand to SEQ ID NO: 496557
guuugagcaaacuuccucu

SEQ ID NO: 496559 - RNA, 19 nt, Artificial Sequence
  Description of Artificial Sequence: Synthetic oligonucleotide
  Sense strand starting at position 2317 of SEQ ID NO: 317509
gaggaaguuugcucaaaca

SEQ ID NO: 496560 - RNA, 19 nt, Artificial Sequence
  Description of Artificial Sequence: Synthetic oligonucleotide
  Antisense Strand to SEQ ID NO: 496559
uguuugagcaaacuuccuc

SEQ ID NO: 496561 - RNA, 19 nt, Artificial Sequence
  Description of Artificial Sequence: Synthetic oligonucleotide
  Sense strand starting at position 2487 of SEQ ID NO: 317509
gaagauauggccuggaacu

SEQ ID NO: 496562 - RNA, 19 nt, Artificial Sequence
  Description of Artificial Sequence: Synthetic oligonucleotide
  Antisense Strand to SEQ ID NO: 496561
aguuccaggccauaucuuc

SEQ ID NO: 496563 - RNA, 19 nt, Artificial Sequence
  Description of Artificial Sequence: Synthetic oligonucleotide
  Sense strand starting at position 2488 of SEQ ID NO: 317509
aagauauggccuggaacuc

SEQ ID NO: 496564 - RNA, 19 nt, Artificial Sequence
  Description of Artificial Sequence: Synthetic oligonucleotide
  Antisense Strand to SEQ ID NO: 496563
gaguuccaggccauaucuu

SEQ ID NO: 496565 - RNA, 19 nt, Artificial Sequence
  Description of Artificial Sequence: Synthetic oligonucleotide
  Sense strand starting at position 2597 of SEQ ID NO: 317509
ucugacaccggguaauuau

SEQ ID NO: 496566 - RNA, 19 nt, Artificial Sequence
  Description of Artificial Sequence: Synthetic oligonucleotide
  Antisense Strand to SEQ ID NO: 496565
auaauuacccggugucaga

SEQ ID NO: 496567 - RNA, 19 nt, Artificial Sequence
  Description of Artificial Sequence: Synthetic oligonucleotide
  Sense strand starting at position 2722 of SEQ ID NO: 317509
aucuucuugguacagagua

SEQ ID NO: 496568 - RNA, 19 nt, Artificial Sequence
  Description of Artificial Sequence: Synthetic oligonucleotide
  Antisense Strand to SEQ ID NO: 496567
uacucuguaccaagaagau

SEQ ID NO: 496569 - RNA, 19 nt, Artificial Sequence
  Description of Artificial Sequence: Synthetic oligonucleotide
  Sense strand starting at position 2810 of SEQ ID NO: 317509
cagaaugacuggcuagacu

SEQ ID NO: 496570 - RNA, 19 nt, Artificial Sequence
  Description of Artificial Sequence: Synthetic oligonucleotide
  Antisense Strand to SEQ ID NO: 496569
agucuagccagucauucug

SEQ ID NO: 496571 - RNA, 19 nt, Artificial Sequence
  Description of Artificial Sequence: Synthetic oligonucleotide
  Sense strand starting at position 2817 of SEQ ID NO: 317509
acuggcuagacuuggauau

SEQ ID NO: 496572 - RNA, 19 nt, Artificial Sequence
  Description of Artificial Sequence: Synthetic oligonucleotide
  Antisense Strand to SEQ ID NO: 496571
auauccaagucuagccagu

SEQ ID NO: 496573 - RNA, 19 nt, Artificial Sequence
  Description of Artificial Sequence: Synthetic oligonucleotide
  Sense strand starting at position 2818 of SEQ ID NO: 317509
cuggcuagacuuggauaua

SEQ ID NO: 496574 - RNA, 19 nt, Artificial Sequence
  Description of Artificial Sequence: Synthetic oligonucleotide
  Antisense Strand to SEQ ID NO: 496573
uauauccaagucuagccag

SEQ ID NO: 496575 - RNA, 19 nt, Artificial Sequence
  Description of Artificial Sequence: Synthetic oligonucleotide
  Sense strand starting at position 2821 of SEQ ID NO: 317509
gcuagacuuggauauagug

SEQ ID NO: 496576 - RNA, 19 nt, Artificial Sequence
  Description of Artificial Sequence: Synthetic oligonucleotide
  Antisense Strand to SEQ ID NO: 496575
cacuauauccaagucuagc

SEQ ID NO: 496577 - RNA, 19 nt, Artificial Sequence
  Description of Artificial Sequence: Synthetic oligonucleotide
  Sense strand starting at position 3137 of SEQ ID NO: 317509
gcauuuguguccucucaag

SEQ ID NO: 496578 - RNA, 19 nt, Artificial Sequence
  Description of Artificial Sequence: Synthetic oligonucleotide
  Antisense Strand to SEQ ID NO: 496577
cuugagaggacacaaaugc

SEQ ID NO: 496579 - RNA, 19 nt, Artificial Sequence
  Description of Artificial Sequence: Synthetic oligonucleotide
  Sense strand starting at position 3143 of SEQ ID NO: 317509
guguccucucaagaauaag

SEQ ID NO: 496580 - RNA, 19 nt, Artificial Sequence
  Description of Artificial Sequence: Synthetic oligonucleotide
  Antisense Strand to SEQ ID NO: 496579
cuuauucuugagaggacac

SEQ ID NO: 496581 - RNA, 19 nt, Artificial Sequence
  Description of Artificial Sequence: Synthetic oligonucleotide
  Sense strand starting at position 3221 of SEQ ID NO: 317509
gccagagaagaguguaaau

SEQ ID NO: 496582 - RNA, 19 nt, Artificial Sequence
  Description of Artificial Sequence: Synthetic oligonucleotide
  Antisense Strand to SEQ ID NO: 496581
auuuacacucuucucuggc

SEQ ID NO: 496583 - RNA, 19 nt, Artificial Sequence
  Description of Artificial Sequence: Synthetic oligonucleotide
  Sense strand starting at position 3545 of SEQ ID NO: 317509
ugaugauauuagucaacuu

SEQ ID NO: 496584 - RNA, 19 nt, Artificial Sequence
  Description of Artificial Sequence: Synthetic oligonucleotide
  Antisense Strand to SEQ ID NO: 496583
aaguugacuaauaucauca

SEQ ID NO: 496585 - RNA, 19 nt, Artificial Sequence
  Description of Artificial Sequence: Synthetic oligonucleotide
  Sense strand starting at position 3577 of SEQ ID NO: 317509
auaucugcagggcaauaaa

SEQ ID NO: 496586 - RNA, 19 nt, Artificial Sequence
  Description of Artificial Sequence: Synthetic oligonucleotide
  Antisense Strand to SEQ ID NO: 496585
uuuauugcccugcagauau

SEQ ID NO: 496587 - RNA, 19 nt, Artificial Sequence
  Description of Artificial Sequence: Synthetic oligonucleotide
  Sense strand starting at position 3648 of SEQ ID NO: 317509
ugaguugauuauccuuaaa

SEQ ID NO: 496588 - RNA, 19 nt, Artificial Sequence
  Description of Artificial Sequence: Synthetic oligonucleotide
  Antisense Strand to SEQ ID NO: 496587
uuuaaggauaaucaacuca

SEQ ID NO: 496589 - RNA, 19 nt, Artificial Sequence
  Description of Artificial Sequence: Synthetic oligonucleotide
  Sense strand starting at position 47 of SEQ ID NO: 317510
guaaguuggagcuacauaa

SEQ ID NO: 496590 - RNA, 19 nt, Artificial Sequence
  Description of Artificial Sequence: Synthetic oligonucleotide
  Antisense Strand to SEQ ID NO: 496589
uuauguagcuccaacuuac

SEQ ID NO: 496591 - RNA, 19 nt, Artificial Sequence
  Description of Artificial Sequence: Synthetic oligonucleotide
  Sense strand starting at position 271 of SEQ ID NO: 317510
gccagugaccucuauauag

SEQ ID NO: 496592 - RNA, 19 nt, Artificial Sequence
  Description of Artificial Sequence: Synthetic oligonucleotide
  Antisense Strand to SEQ ID NO: 496591
cuauauagaggucacuggc

SEQ ID NO: 496593 - RNA, 19 nt, Artificial Sequence
  Description of Artificial Sequence: Synthetic oligonucleotide
  Sense strand starting at position 305 of SEQ ID NO: 317510
uuaauaucugaauguagac

SEQ ID NO: 496594 - RNA, 19 nt, Artificial Sequence
  Description of Artificial Sequence: Synthetic oligonucleotide
  Antisense Strand to SEQ ID NO: 496593
gucuacauucagauauuaa

SEQ ID NO: 496595 - RNA, 19 nt, Artificial Sequence
  Description of Artificial Sequence: Synthetic oligonucleotide
  Sense strand starting at position 343 of SEQ ID NO: 317510
auuguuuaccuagauccau

SEQ ID NO: 496596 - RNA, 19 nt, Artificial Sequence
  Description of Artificial Sequence: Synthetic oligonucleotide
  Antisense Strand to SEQ ID NO: 496595
auggaucuagguaaacaau

SEQ ID NO: 496597 - RNA, 19 nt, Artificial Sequence
  Description of Artificial Sequence: Synthetic oligonucleotide
  Sense strand starting at position 486 of SEQ ID NO: 317510
auauuaguucugugaaaca

SEQ ID NO: 496598 - RNA, 19 nt, Artificial Sequence
  Description of Artificial Sequence: Synthetic oligonucleotide
  Antisense Strand to SEQ ID NO: 496597
uguuucacagaacuaauau

SEQ ID NO: 496599 - RNA, 19 nt, Artificial Sequence
  Description of Artificial Sequence: Synthetic oligonucleotide
  Sense strand starting at position 491 of SEQ ID NO: 317510
aguucugugaaacagucua

SEQ ID NO: 496600 - RNA, 19 nt, Artificial Sequence
  Description of Artificial Sequence: Synthetic oligonucleotide
  Antisense Strand to SEQ ID NO: 496599
uagacuguuucacagaacu

SEQ ID NO: 496601 - RNA, 19 nt, Artificial Sequence
  Description of Artificial Sequence: Synthetic oligonucleotide
  Sense strand starting at position 496 of SEQ ID NO: 317510
ugugaaacagucuaugcau

SEQ ID NO: 496602 - RNA, 19 nt, Artificial Sequence
  Description of Artificial Sequence: Synthetic oligonucleotide
  Antisense Strand to SEQ ID NO: 496601
augcauagacuguuucaca

SEQ ID NO: 496603 - RNA, 19 nt, Artificial Sequence
  Description of Artificial Sequence: Synthetic oligonucleotide
  Sense strand starting at position 498 of SEQ ID NO: 317510
ugaaacagucuaugcauaa

SEQ ID NO: 496604 - RNA, 19 nt, Artificial Sequence
  Description of Artificial Sequence: Synthetic oligonucleotide
  Antisense Strand to SEQ ID NO: 496603
uuaugcauagacuguuuca

SEQ ID NO: 496605 - RNA, 19 nt, Artificial Sequence
  Description of Artificial Sequence: Synthetic oligonucleotide
  Sense strand starting at position 499 of SEQ ID NO: 317510
gaaacagucuaugcauaag

SEQ ID NO: 496606 - RNA, 19 nt, Artificial Sequence
  Description of Artificial Sequence: Synthetic oligonucleotide
  Antisense Strand to SEQ ID NO: 496605
cuuaugcauagacuguuuc

SEQ ID NO: 496607 - RNA, 19 nt, Artificial Sequence
  Description of Artificial Sequence: Synthetic oligonucleotide
  Sense strand starting at position 513 of SEQ ID NO: 317510
auaagaauucguuggaaua

SEQ ID NO: 496608 - RNA, 19 nt, Artificial Sequence
  Description of Artificial Sequence: Synthetic oligonucleotide
  Antisense Strand to SEQ ID NO: 496607
uauuccaacgaauucuuau

SEQ ID NO: 496609 - RNA, 19 nt, Artificial Sequence
  Description of Artificial Sequence: Synthetic oligonucleotide
  Sense strand starting at position 514 of SEQ ID NO: 317510
uaagaauucguuggaauac

SEQ ID NO: 496610 - RNA, 19 nt, Artificial Sequence
  Description of Artificial Sequence: Synthetic oligonucleotide
  Antisense Strand to SEQ ID NO: 496609
guauuccaacgaauucuua

SEQ ID NO: 496611 - RNA, 19 nt, Artificial Sequence
  Description of Artificial Sequence: Synthetic oligonucleotide
  Sense strand starting at position 679 of SEQ ID NO: 317510
ucaguaaagcaaggaaaua

SEQ ID NO: 496612 - RNA, 19 nt, Artificial Sequence
  Description of Artificial Sequence: Synthetic oligonucleotide
  Antisense Strand to SEQ ID NO: 496611
uauuuccuugcuuuacuga

SEQ ID NO: 496613 - RNA, 19 nt, Artificial Sequence
  Description of Artificial Sequence: Synthetic oligonucleotide
  Sense strand starting at position 707 of SEQ ID NO: 317510
caaguagguguauaucagu

SEQ ID NO: 496614 - RNA, 19 nt, Artificial Sequence
  Description of Artificial Sequence: Synthetic oligonucleotide
  Antisense Strand to SEQ ID NO: 496613
acugauauacaccuacuug

SEQ ID NO: 496615 - RNA, 19 nt, Artificial Sequence
  Description of Artificial Sequence: Synthetic oligonucleotide
  Sense strand starting at position 713 of SEQ ID NO: 317510
gguguauaucaguaaagua

SEQ ID NO: 496616 - RNA, 19 nt, Artificial Sequence
  Description of Artificial Sequence: Synthetic oligonucleotide
  Antisense Strand to SEQ ID NO: 496615
uacuuuacugauauacacc

SEQ ID NO: 496617 - RNA, 19 nt, Artificial Sequence
  Description of Artificial Sequence: Synthetic oligonucleotide
  Sense strand starting at position 1036 of SEQ ID NO: 317510
aucucuuaguuauugauga

SEQ ID NO: 496618 - RNA, 19 nt, Artificial Sequence
  Description of Artificial Sequence: Synthetic oligonucleotide
  Antisense Strand to SEQ ID NO: 496617
ucaucaauaacuaagagau

SEQ ID NO: 496619 - RNA, 19 nt, Artificial Sequence
  Description of Artificial Sequence: Synthetic oligonucleotide
  Sense strand starting at position 1079 of SEQ ID NO: 317510
uuaagaaaguagguuaucu

SEQ ID NO: 496620 - RNA, 19 nt, Artificial Sequence
  Description of Artificial Sequence: Synthetic oligonucleotide
  Antisense Strand to SEQ ID NO: 496619
agauaaccuacuuucuuaa

SEQ ID NO: 496621 - RNA, 19 nt, Artificial Sequence
  Description of Artificial Sequence: Synthetic oligonucleotide
  Sense strand starting at position 1092 of SEQ ID NO: 317510
uuaucuuacgcuuagaaca

SEQ ID NO: 496622 - RNA, 19 nt, Artificial Sequence
  Description of Artificial Sequence: Synthetic oligonucleotide
  Antisense Strand to SEQ ID NO: 496621
uguucuaagcguaagauaa

SEQ ID NO: 496623 - RNA, 19 nt, Artificial Sequence
  Description of Artificial Sequence: Synthetic oligonucleotide
  Sense strand starting at position 1177 of SEQ ID NO: 317510
ugucauagacaauguauga

SEQ ID NO: 496624 - RNA, 19 nt, Artificial Sequence
  Description of Artificial Sequence: Synthetic oligonucleotide
  Antisense Strand to SEQ ID NO: 496623
ucauacauugucuaugaca

SEQ ID NO: 496625 - RNA, 19 nt, Artificial Sequence
  Description of Artificial Sequence: Synthetic oligonucleotide
  Sense strand starting at position 1291 of SEQ ID NO: 317510
agucguaauccugaaucca

SEQ ID NO: 496626 - RNA, 19 nt, Artificial Sequence
  Description of Artificial Sequence: Synthetic oligonucleotide
  Antisense Strand to SEQ ID NO: 496625
uggauucaggauuacgacu

SEQ ID NO: 496627 - RNA, 19 nt, Artificial Sequence
  Description of Artificial Sequence: Synthetic oligonucleotide
  Sense strand starting at position 1351 of SEQ ID NO: 317510
ccagaaaggucauucuguc

SEQ ID NO: 496628 - RNA, 19 nt, Artificial Sequence
  Description of Artificial Sequence: Synthetic oligonucleotide
  Antisense Strand to SEQ ID NO: 496627
gacagaaugaccuuucugg

SEQ ID NO: 496629 - RNA, 19 nt, Artificial Sequence
  Description of Artificial Sequence: Synthetic oligonucleotide
  Sense strand starting at position 1450 of SEQ ID NO: 317510
cagaaauucuaagugugag

SEQ ID NO: 496630 - RNA, 19 nt, Artificial Sequence
  Description of Artificial Sequence: Synthetic oligonucleotide
  Antisense Strand to SEQ ID NO: 496629
cucacacuuagaauuucug

SEQ ID NO: 496631 - RNA, 19 nt, Artificial Sequence
  Description of Artificial Sequence: Synthetic oligonucleotide
  Sense strand starting at position 1831 of SEQ ID NO: 317510
ugagcucuucuagaaugac

SEQ ID NO: 496632 - RNA, 19 nt, Artificial Sequence
  Description of Artificial Sequence: Synthetic oligonucleotide
  Antisense Strand to SEQ ID NO: 496631
gucauucuagaagagcuca

SEQ ID NO: 496633 - RNA, 19 nt, Artificial Sequence
  Description of Artificial Sequence: Synthetic oligonucleotide
  Sense strand starting at position 2007 of SEQ ID NO: 317510
uguaguuacuaagcaagga

SEQ ID NO: 496634 - RNA, 19 nt, Artificial Sequence
  Description of Artificial Sequence: Synthetic oligonucleotide
  Antisense Strand to SEQ ID NO: 496633
uccuugcuuaguaacuaca

SEQ ID NO: 496635 - RNA, 19 nt, Artificial Sequence
  Description of Artificial Sequence: Synthetic oligonucleotide
  Sense strand starting at position 2102 of SEQ ID NO: 317510
acauguacugaagguauca

SEQ ID NO: 496636 - RNA, 19 nt, Artificial Sequence
  Description of Artificial Sequence: Synthetic oligonucleotide
  Antisense Strand to SEQ ID NO: 496635
ugauaccuucaguacaugu

SEQ ID NO: 496637 - RNA, 19 nt, Artificial Sequence
  Description of Artificial Sequence: Synthetic oligonucleotide
  Sense strand starting at position 2195 of SEQ ID NO: 317510
uauuaccuggauugaugau

SEQ ID NO: 496638 - RNA, 19 nt, Artificial Sequence
  Description of Artificial Sequence: Synthetic oligonucleotide
  Antisense Strand to SEQ ID NO: 496637
aucaucaauccagguaaua

SEQ ID NO: 496639 - RNA, 19 nt, Artificial Sequence
  Description of Artificial Sequence: Synthetic oligonucleotide
  Sense strand starting at position 2307 of SEQ ID NO: 317510
ggcaucagaugguuuagga

SEQ ID NO: 496640 - RNA, 19 nt, Artificial Sequence
  Description of Artificial Sequence: Synthetic oligonucleotide
  Antisense Strand to SEQ ID NO: 496639
uccuaaaccaucugaugcc

SEQ ID NO: 496641 - RNA, 19 nt, Artificial Sequence
  Description of Artificial Sequence: Synthetic oligonucleotide
  Sense strand starting at position 2462 of SEQ ID NO: 317510
gcacaauugcuuuaauaug

SEQ ID NO: 496642 - RNA, 19 nt, Artificial Sequence
  Description of Artificial Sequence: Synthetic oligonucleotide
  Antisense Strand to SEQ ID NO: 496641
cauauuaaagcaauugugc

SEQ ID NO: 496643 - RNA, 19 nt, Artificial Sequence
  Description of Artificial Sequence: Synthetic oligonucleotide
  Sense strand starting at position 2617 of SEQ ID NO: 317510
gugaguaguggucacagag

SEQ ID NO: 496644 - RNA, 19 nt, Artificial Sequence
  Description of Artificial Sequence: Synthetic oligonucleotide
  Antisense Strand to SEQ ID NO: 496643
cucugugaccacuacucac

SEQ ID NO: 496645 - RNA, 19 nt, Artificial Sequence
  Description of Artificial Sequence: Synthetic oligonucleotide
  Sense strand starting at position 2623 of SEQ ID NO: 317510
aguggucacagagaaaguu

SEQ ID NO: 496646 - RNA, 19 nt, Artificial Sequence
  Description of Artificial Sequence: Synthetic oligonucleotide
  Antisense Strand to SEQ ID NO: 496645
aacuuucucugugaccacu

SEQ ID NO: 496647 - RNA, 19 nt, Artificial Sequence
  Description of Artificial Sequence: Synthetic oligonucleotide
  Sense strand starting at position 2810 of SEQ ID NO: 317510
cacagagugguauguaaag

SEQ ID NO: 496648 - RNA, 19 nt, Artificial Sequence
  Description of Artificial Sequence: Synthetic oligonucleotide
  Antisense Strand to SEQ ID NO: 496647
cuuuacauaccacucugug

SEQ ID NO: 496649 - RNA, 19 nt, Artificial Sequence
  Description of Artificial Sequence: Synthetic oligonucleotide
  Sense strand starting at position 2812 of SEQ ID NO: 317510
cagagugguauguaaaggu

SEQ ID NO: 496650 - RNA, 19 nt, Artificial Sequence
  Description of Artificial Sequence: Synthetic oligonucleotide
  Antisense Strand to SEQ ID NO: 496649
accuuuacauaccacucug

SEQ ID NO: 496651 - RNA, 19 nt, Artificial Sequence
  Description of Artificial Sequence: Synthetic oligonucleotide
  Sense strand starting at position 3014 of SEQ ID NO: 317510
ucuuaauaagcagaaguuu

SEQ ID NO: 496652 - RNA, 19 nt, Artificial Sequence
  Description of Artificial Sequence: Synthetic oligonucleotide
  Antisense Strand to SEQ ID NO: 496651
aaacuucugcuuauuaaga

SEQ ID NO: 496653 - RNA, 19 nt, Artificial Sequence
  Description of Artificial Sequence: Synthetic oligonucleotide
  Sense strand starting at position 3091 of SEQ ID NO: 317510
aucaucuaacuggguuauu

SEQ ID NO: 496654 - RNA, 19 nt, Artificial Sequence
  Description of Artificial Sequence: Synthetic oligonucleotide
  Antisense Strand to SEQ ID NO: 496653
aauaacccaguuagaugau

SEQ ID NO: 496655 - RNA, 19 nt, Artificial Sequence
  Description of Artificial Sequence: Synthetic oligonucleotide
  Sense strand starting at position 3135 of SEQ ID NO: 317510
ucaacaacuguauguagau

SEQ ID NO: 496656 - RNA, 19 nt, Artificial Sequence
  Description of Artificial Sequence: Synthetic oligonucleotide
  Antisense Strand to SEQ ID NO: 496655
aucuacauacaguuguuga

SEQ ID NO: 496657 - RNA, 19 nt, Artificial Sequence
  Description of Artificial Sequence: Synthetic oligonucleotide
  Sense strand starting at position 3445 of SEQ ID NO: 317510
augauaacaccuugguauu

SEQ ID NO: 496658 - RNA, 19 nt, Artificial Sequence
  Description of Artificial Sequence: Synthetic oligonucleotide
  Antisense Strand to SEQ ID NO: 496657
aauaccaagguguuaucau

SEQ ID NO: 496659 - RNA, 19 nt, Artificial Sequence
  Description of Artificial Sequence: Synthetic oligonucleotide
  Sense strand starting at position 3446 of SEQ ID NO: 317510
ugauaacaccuugguauua

SEQ ID NO: 496660 - RNA, 19 nt, Artificial Sequence
  Description of Artificial Sequence: Synthetic oligonucleotide
  Antisense Strand to SEQ ID NO: 496659
uaauaccaagguguuauca

SEQ ID NO: 496661 - RNA, 19 nt, Artificial Sequence
  Description of Artificial Sequence: Synthetic oligonucleotide
  Sense strand starting at position 3634 of SEQ ID NO: 317510
auggauugaugucuaaugu

SEQ ID NO: 496662 - RNA, 19 nt, Artificial Sequence
  Description of Artificial Sequence: Synthetic oligonucleotide
  Antisense Strand to SEQ ID NO: 496661
acauuagacaucaauccau

SEQ ID NO: 496663 - RNA, 19 nt, Artificial Sequence
  Description of Artificial Sequence: Synthetic oligonucleotide
  Sense strand starting at position 3635 of SEQ ID NO: 317510
uggauugaugucuaauguc

SEQ ID NO: 496664 - RNA, 19 nt, Artificial Sequence
  Description of Artificial Sequence: Synthetic oligonucleotide
  Antisense Strand to SEQ ID NO: 496663
gacauuagacaucaaucca

SEQ ID NO: 496665 - RNA, 19 nt, Artificial Sequence
  Description of Artificial Sequence: Synthetic oligonucleotide
  Sense strand starting at position 3693 of SEQ ID NO: 317510
gaugacauguucuuagggu

SEQ ID NO: 496666 - RNA, 19 nt, Artificial Sequence
  Description of Artificial Sequence: Synthetic oligonucleotide
  Antisense Strand to SEQ ID NO: 496665
acccuaagaacaugucauc

SEQ ID NO: 496667 - RNA, 19 nt, Artificial Sequence
  Description of Artificial Sequence: Synthetic oligonucleotide
  Sense strand starting at position 3732 of SEQ ID NO: 317510
ggccauuacugacucauau

SEQ ID NO: 496668 - RNA, 19 nt, Artificial Sequence
  Description of Artificial Sequence: Synthetic oligonucleotide
  Antisense Strand to SEQ ID NO: 496667
auaugagucaguaauggcc

SEQ ID NO: 496669 - RNA, 19 nt, Artificial Sequence
  Description of Artificial Sequence: Synthetic oligonucleotide
  Sense strand starting at position 35 of SEQ ID NO: 317511
guuagaauaaugcaggcaa

SEQ ID NO: 496670 - RNA, 19 nt, Artificial Sequence
  Description of Artificial Sequence: Synthetic oligonucleotide
  Antisense Strand to SEQ ID NO: 496669
uugccugcauuauucuaac

SEQ ID NO: 496671 - RNA, 19 nt, Artificial Sequence
  Description of Artificial Sequence: Synthetic oligonucleotide
  Sense strand starting at position 141 of SEQ ID NO: 317511
gcccuuguuuauuuauaag

SEQ ID NO: 496672 - RNA, 19 nt, Artificial Sequence
  Description of Artificial Sequence: Synthetic oligonucleotide
  Antisense Strand to SEQ ID NO: 496671
cuuauaaauaaacaagggc

SEQ ID NO: 496673 - RNA, 19 nt, Artificial Sequence
  Description of Artificial Sequence: Synthetic oligonucleotide
  Sense strand starting at position 163 of SEQ ID NO: 317511
ggcaaaguagugggagaau

SEQ ID NO: 496674 - RNA, 19 nt, Artificial Sequence
  Description of Artificial Sequence: Synthetic oligonucleotide
  Antisense Strand to SEQ ID NO: 496673
auucucccacuacuuugcc

SEQ ID NO: 496675 - RNA, 19 nt, Artificial Sequence
  Description of Artificial Sequence: Synthetic oligonucleotide
  Sense strand starting at position 420 of SEQ ID NO: 317511
ucaaguuaacuguggacua

SEQ ID NO: 496676 - RNA, 19 nt, Artificial Sequence
  Description of Artificial Sequence: Synthetic oligonucleotide
  Antisense Strand to SEQ ID NO: 496675
uaguccacaguuaacuuga

SEQ ID NO: 496677 - RNA, 19 nt, Artificial Sequence
  Description of Artificial Sequence: Synthetic oligonucleotide
  Sense strand starting at position 422 of SEQ ID NO: 317511
aaguuaacuguggacuauu

SEQ ID NO: 496678 - RNA, 19 nt, Artificial Sequence
  Description of Artificial Sequence: Synthetic oligonucleotide
  Antisense Strand to SEQ ID NO: 496677
aauaguccacaguuaacuu

SEQ ID NO: 496679 - RNA, 19 nt, Artificial Sequence
  Description of Artificial Sequence: Synthetic oligonucleotide
  Sense strand starting at position 441 of SEQ ID NO: 317511
uugugaguauggcugaaau

SEQ ID NO: 496680 - RNA, 19 nt, Artificial Sequence
  Description of Artificial Sequence: Synthetic oligonucleotide
  Antisense Strand to SEQ ID NO: 496679
auuucagccauacucacaa

SEQ ID NO: 496681 - RNA, 19 nt, Artificial Sequence
  Description of Artificial Sequence: Synthetic oligonucleotide
  Sense strand starting at position 443 of SEQ ID NO: 317511
gugaguauggcugaaauca

SEQ ID NO: 496682 - RNA, 19 nt, Artificial Sequence
  Description of Artificial Sequence: Synthetic oligonucleotide
  Antisense Strand to SEQ ID NO: 496681
ugauuucagccauacucac

SEQ ID NO: 496683 - RNA, 19 nt, Artificial Sequence
  Description of Artificial Sequence: Synthetic oligonucleotide
  Sense strand starting at position 562 of SEQ ID NO: 317511
agagaucuguacucgacca

SEQ ID NO: 496684 - RNA, 19 nt, Artificial Sequence
  Description of Artificial Sequence: Synthetic oligonucleotide
  Antisense Strand to SEQ ID NO: 496683
uggucgaguacagaucucu

SEQ ID NO: 496685 - RNA, 19 nt, Artificial Sequence
  Description of Artificial Sequence: Synthetic oligonucleotide
  Sense strand starting at position 564 of SEQ ID NO: 317511
agaucuguacucgaccaua

SEQ ID NO: 496686 - RNA, 19 nt, Artificial Sequence
  Description of Artificial Sequence: Synthetic oligonucleotide
  Antisense Strand to SEQ ID NO: 496685
uauggucgaguacagaucu

SEQ ID NO: 496687 - RNA, 19 nt, Artificial Sequence
  Description of Artificial Sequence: Synthetic oligonucleotide
  Sense strand starting at position 567 of SEQ ID NO: 317511
ucuguacucgaccauaauc

SEQ ID NO: 496688 - RNA, 19 nt, Artificial Sequence
  Description of Artificial Sequence: Synthetic oligonucleotide
  Antisense Strand to SEQ ID NO: 496687
gauuauggucgaguacaga

SEQ ID NO: 496689 - RNA, 19 nt, Artificial Sequence
  Description of Artificial Sequence: Synthetic oligonucleotide
  Sense strand starting at position 688 of SEQ ID NO: 317511
ccaauuauuuagugaagga

SEQ ID NO: 496690 - RNA, 19 nt, Artificial Sequence
  Description of Artificial Sequence: Synthetic oligonucleotide
  Antisense Strand to SEQ ID NO: 496689
uccuucacuaaauaauugg

SEQ ID NO: 496691 - RNA, 19 nt, Artificial Sequence
  Description of Artificial Sequence: Synthetic oligonucleotide
  Sense strand starting at position 796 of SEQ ID NO: 317511
ccugguaacaugggaacau

SEQ ID NO: 496692 - RNA, 19 nt, Artificial Sequence
  Description of Artificial Sequence: Synthetic oligonucleotide
  Antisense Strand to SEQ ID NO: 496691
auguucccauguuaccagg

SEQ ID NO: 496693 - RNA, 19 nt, Artificial Sequence
  Description of Artificial Sequence: Synthetic oligonucleotide
  Sense strand starting at position 924 of SEQ ID NO: 317511
uuagauguuacuugacgga

SEQ ID NO: 496694 - RNA, 19 nt, Artificial Sequence
  Description of Artificial Sequence: Synthetic oligonucleotide
  Antisense Strand to SEQ ID NO: 496693
uccgucaaguaacaucuaa

SEQ ID NO: 496695 - RNA, 19 nt, Artificial Sequence
  Description of Artificial Sequence: Synthetic oligonucleotide
  Sense strand starting at position 928 of SEQ ID NO: 317511
auguuacuugacggaucuu

SEQ ID NO: 496696 - RNA, 19 nt, Artificial Sequence
  Description of Artificial Sequence: Synthetic oligonucleotide
  Antisense Strand to SEQ ID NO: 496695
aagauccgucaaguaacau

SEQ ID NO: 496697 - RNA, 19 nt, Artificial Sequence
  Description of Artificial Sequence: Synthetic oligonucleotide
  Sense strand starting at position 1102 of SEQ ID NO: 317511
uaauauuugugagauuggu

SEQ ID NO: 496698 - RNA, 19 nt, Artificial Sequence
  Description of Artificial Sequence: Synthetic oligonucleotide
  Antisense Strand to SEQ ID NO: 496697
accaaucucacaaauauua

SEQ ID NO: 496699 - RNA, 19 nt, Artificial Sequence
  Description of Artificial Sequence: Synthetic oligonucleotide
  Sense strand starting at position 1110 of SEQ ID NO: 317511
gugagauugguagaucauc

SEQ ID NO: 496700 - RNA, 19 nt, Artificial Sequence
  Description of Artificial Sequence: Synthetic oligonucleotide
  Antisense Strand to SEQ ID NO: 496699
gaugaucuaccaaucucac

SEQ ID NO: 496701 - RNA, 19 nt, Artificial Sequence
  Description of Artificial Sequence: Synthetic oligonucleotide
  Sense strand starting at position 1115 of SEQ ID NO: 317511
auugguagaucaucuugua

SEQ ID NO: 496702 - RNA, 19 nt, Artificial Sequence
  Description of Artificial Sequence: Synthetic oligonucleotide
  Antisense Strand to SEQ ID NO: 496701
uacaagaugaucuaccaau

SEQ ID NO: 496703 - RNA, 19 nt, Artificial Sequence
  Description of Artificial Sequence: Synthetic oligonucleotide
  Sense strand starting at position 1177 of SEQ ID NO: 317511
acuuuauggcuuuaugcaa

SEQ ID NO: 496704 - RNA, 19 nt, Artificial Sequence
  Description of Artificial Sequence: Synthetic oligonucleotide
  Antisense Strand to SEQ ID NO: 496703
uugcauaaagccauaaagu

SEQ ID NO: 496705 - RNA, 19 nt, Artificial Sequence
  Description of Artificial Sequence: Synthetic oligonucleotide
  Sense strand starting at position 1185 of SEQ ID NO: 317511
gcuuuaugcaaguugugcu

SEQ ID NO: 496706 - RNA, 19 nt, Artificial Sequence
  Description of Artificial Sequence: Synthetic oligonucleotide
  Antisense Strand to SEQ ID NO: 496705
agcacaacuugcauaaagc

SEQ ID NO: 496707 - RNA, 19 nt, Artificial Sequence
  Description of Artificial Sequence: Synthetic oligonucleotide
  Sense strand starting at position 2090 of SEQ ID NO: 317511
ugagcauccugaguacaug

SEQ ID NO: 496708 - RNA, 19 nt, Artificial Sequence
  Description of Artificial Sequence: Synthetic oligonucleotide
  Antisense Strand to SEQ ID NO: 496707
cauguacucaggaugcuca

SEQ ID NO: 496709 - RNA, 19 nt, Artificial Sequence
  Description of Artificial Sequence: Synthetic oligonucleotide
  Sense strand starting at position 2199 of SEQ ID NO: 317511
guuuaaugaccuugcaaau

SEQ ID NO: 496710 - RNA, 19 nt, Artificial Sequence
  Description of Artificial Sequence: Synthetic oligonucleotide
  Antisense Strand to SEQ ID NO: 496709
auuugcaaggucauuaaac

SEQ ID NO: 496711 - RNA, 19 nt, Artificial Sequence
  Description of Artificial Sequence: Synthetic oligonucleotide
  Sense strand starting at position 2499 of SEQ ID NO: 317511
ccuguauauuaacugucau

SEQ ID NO: 496712 - RNA, 19 nt, Artificial Sequence
  Description of Artificial Sequence: Synthetic oligonucleotide
  Antisense Strand to SEQ ID NO: 496711
augacaguuaauauacagg

SEQ ID NO: 496713 - RNA, 19 nt, Artificial Sequence
  Description of Artificial Sequence: Synthetic oligonucleotide
  Sense strand starting at position 2730 of SEQ ID NO: 317511
aucagaugcuacuuauaag

SEQ ID NO: 496714 - RNA, 19 nt, Artificial Sequence
  Description of Artificial Sequence: Synthetic oligonucleotide
  Antisense Strand to SEQ ID NO: 496713
cuuauaaguagcaucugau

SEQ ID NO: 496715 - RNA, 19 nt, Artificial Sequence
  Description of Artificial Sequence: Synthetic oligonucleotide
  Sense strand starting at position 2736 of SEQ ID NO: 317511
ugcuacuuauaagcagaaa

SEQ ID NO: 496716 - RNA, 19 nt, Artificial Sequence
  Description of Artificial Sequence: Synthetic oligonucleotide
  Antisense Strand to SEQ ID NO: 496715
uuucugcuuauaaguagca

SEQ ID NO: 496717 - RNA, 19 nt, Artificial Sequence
  Description of Artificial Sequence: Synthetic oligonucleotide
  Sense strand starting at position 2927 of SEQ ID NO: 317511
uaugaauagcguugauuaa

SEQ ID NO: 496718 - RNA, 19 nt, Artificial Sequence
  Description of Artificial Sequence: Synthetic oligonucleotide
  Antisense Strand to SEQ ID NO: 496717
uuaaucaacgcuauucaua

SEQ ID NO: 496719 - RNA, 19 nt, Artificial Sequence
  Description of Artificial Sequence: Synthetic oligonucleotide
  Sense strand starting at position 2928 of SEQ ID NO: 317511
augaauagcguugauuaac

SEQ ID NO: 496720 - RNA, 19 nt, Artificial Sequence
  Description of Artificial Sequence: Synthetic oligonucleotide
  Antisense Strand to SEQ ID NO: 496719
guuaaucaacgcuauucau

SEQ ID NO: 496721 - RNA, 19 nt, Artificial Sequence
  Description of Artificial Sequence: Synthetic oligonucleotide
  Sense strand starting at position 2931 of SEQ ID NO: 317511
aauagcguugauuaacauu

SEQ ID NO: 496722 - RNA, 19 nt, Artificial Sequence
  Description of Artificial Sequence: Synthetic oligonucleotide
  Antisense Strand to SEQ ID NO: 496721
aauguuaaucaacgcuauu

SEQ ID NO: 496723 - RNA, 19 nt, Artificial Sequence
  Description of Artificial Sequence: Synthetic oligonucleotide
  Sense strand starting at position 2937 of SEQ ID NO: 317511
guugauuaacauugaugua

SEQ ID NO: 496724 - RNA, 19 nt, Artificial Sequence
  Description of Artificial Sequence: Synthetic oligonucleotide
  Antisense Strand to SEQ ID NO: 496723
uacaucaauguuaaucaac

SEQ ID NO: 496725 - RNA, 19 nt, Artificial Sequence
  Description of Artificial Sequence: Synthetic oligonucleotide
  Sense strand starting at position 2955 of SEQ ID NO: 317511
acaugcuuucuguagacau

SEQ ID NO: 496726 - RNA, 19 nt, Artificial Sequence
  Description of Artificial Sequence: Synthetic oligonucleotide
  Antisense Strand to SEQ ID NO: 496725
augucuacagaaagcaugu

SEQ ID NO: 496727 - RNA, 19 nt, Artificial Sequence
  Description of Artificial Sequence: Synthetic oligonucleotide
  Sense strand starting at position 2957 of SEQ ID NO: 317511
augcuuucuguagacaugu

SEQ ID NO: 496728 - RNA, 19 nt, Artificial Sequence
  Description of Artificial Sequence: Synthetic oligonucleotide
  Antisense Strand to SEQ ID NO: 496727
acaugucuacagaaagcau

SEQ ID NO: 496729 - RNA, 19 nt, Artificial Sequence
  Description of Artificial Sequence: Synthetic oligonucleotide
  Sense strand starting at position 3023 of SEQ ID NO: 317511
gugguaaauauauguguaa

SEQ ID NO: 496730 - RNA, 19 nt, Artificial Sequence
  Description of Artificial Sequence: Synthetic oligonucleotide
  Antisense Strand to SEQ ID NO: 496729
uuacacauauauuuaccac

SEQ ID NO: 496731 - RNA, 19 nt, Artificial Sequence
  Description of Artificial Sequence: Synthetic oligonucleotide
  Sense strand starting at position 3214 of SEQ ID NO: 317511
aggaaaguuuccuuccaca

SEQ ID NO: 496732 - RNA, 19 nt, Artificial Sequence
  Description of Artificial Sequence: Synthetic oligonucleotide
  Antisense Strand to SEQ ID NO: 496731
uguggaaggaaacuuuccu

SEQ ID NO: 496733 - RNA, 19 nt, Artificial Sequence
  Description of Artificial Sequence: Synthetic oligonucleotide
  Sense strand starting at position 3428 of SEQ ID NO: 317511
gaaaguccuccacagaguu

SEQ ID NO: 496734 - RNA, 19 nt, Artificial Sequence
  Description of Artificial Sequence: Synthetic oligonucleotide
  Antisense Strand to SEQ ID NO: 496733
aacucuguggaggacuuuc

SEQ ID NO: 496735 - RNA, 19 nt, Artificial Sequence
  Description of Artificial Sequence: Synthetic oligonucleotide
  Sense strand starting at position 3460 of SEQ ID NO: 317511
gccaguuguaaauggauga

SEQ ID NO: 496736 - RNA, 19 nt, Artificial Sequence
  Description of Artificial Sequence: Synthetic oligonucleotide
  Antisense Strand to SEQ ID NO: 496735
ucauccauuuacaacuggc

SEQ ID NO: 496737 - RNA, 19 nt, Artificial Sequence
  Description of Artificial Sequence: Synthetic oligonucleotide
  Sense strand starting at position 3461 of SEQ ID NO: 317511
ccaguuguaaauggaugau

SEQ ID NO: 496738 - RNA, 19 nt, Artificial Sequence
  Description of Artificial Sequence: Synthetic oligonucleotide
  Antisense Strand to SEQ ID NO: 496737
aucauccauuuacaacugg

SEQ ID NO: 496739 - RNA, 19 nt, Artificial Sequence
  Description of Artificial Sequence: Synthetic oligonucleotide
  Sense strand starting at position 3464 of SEQ ID NO: 317511
guuguaaauggaugauagu

SEQ ID NO: 496740 - RNA, 19 nt, Artificial Sequence
  Description of Artificial Sequence: Synthetic oligonucleotide
  Antisense Strand to SEQ ID NO: 496739
acuaucauccauuuacaac

SEQ ID NO: 496741 - RNA, 19 nt, Artificial Sequence
  Description of Artificial Sequence: Synthetic oligonucleotide
  Sense strand starting at position 3702 of SEQ ID NO: 317511
uggaaacuuguauguccau

SEQ ID NO: 496742 - RNA, 19 nt, Artificial Sequence
  Description of Artificial Sequence: Synthetic oligonucleotide
  Antisense Strand to SEQ ID NO: 496741
auggacauacaaguuucca

SEQ ID NO: 496743 - RNA, 19 nt, Artificial Sequence
  Description of Artificial Sequence: Synthetic oligonucleotide
  Sense strand starting at position 3703 of SEQ ID NO: 317511
ggaaacuuguauguccaua

SEQ ID NO: 496744 - RNA, 19 nt, Artificial Sequence
  Description of Artificial Sequence: Synthetic oligonucleotide
  Antisense Strand to SEQ ID NO: 496743
uauggacauacaaguuucc

SEQ ID NO: 496745 - RNA, 19 nt, Artificial Sequence
  Description of Artificial Sequence: Synthetic oligonucleotide
  Sense strand starting at position 3708 of SEQ ID NO: 317511
cuuguauguccauaucuug

SEQ ID NO: 496746 - RNA, 19 nt, Artificial Sequence
  Description of Artificial Sequence: Synthetic oligonucleotide
  Antisense Strand to SEQ ID NO: 496745
caagauauggacauacaag

SEQ ID NO: 496747 - RNA, 19 nt, Artificial Sequence
  Description of Artificial Sequence: Synthetic oligonucleotide
  Sense strand starting at position 3794 of SEQ ID NO: 317511
cagcaaauuguuggaauca

SEQ ID NO: 496748 - RNA, 19 nt, Artificial Sequence
  Description of Artificial Sequence: Synthetic oligonucleotide
  Antisense Strand to SEQ ID NO: 496747
ugauuccaacaauuugcug

SEQ ID NO: 496749 - RNA, 19 nt, Artificial Sequence
  Description of Artificial Sequence: Synthetic oligonucleotide
  Sense strand starting at position 60 of SEQ ID NO: 317512
guuagaauaauguaggcaa

SEQ ID NO: 496750 - RNA, 19 nt, Artificial Sequence
  Description of Artificial Sequence: Synthetic oligonucleotide
  Antisense Strand to SEQ ID NO: 496749
uugccuacauuauucuaac

SEQ ID NO: 496751 - RNA, 19 nt, Artificial Sequence
  Description of Artificial Sequence: Synthetic oligonucleotide
  Sense strand starting at position 220 of SEQ ID NO: 317512
augucaugucaguauacuc

SEQ ID NO: 496752 - RNA, 19 nt, Artificial Sequence
  Description of Artificial Sequence: Synthetic oligonucleotide
  Antisense Strand to SEQ ID NO: 496751
gaguauacugacaugacau

SEQ ID NO: 496753 - RNA, 19 nt, Artificial Sequence
  Description of Artificial Sequence: Synthetic oligonucleotide
  Sense strand starting at position 225 of SEQ ID NO: 317512
augucaguauacucacaau

SEQ ID NO: 496754 - RNA, 19 nt, Artificial Sequence
  Description of Artificial Sequence: Synthetic oligonucleotide
  Antisense Strand to SEQ ID NO: 496753
auugugaguauacugacau

SEQ ID NO: 496755 - RNA, 19 nt, Artificial Sequence
  Description of Artificial Sequence: Synthetic oligonucleotide
  Sense strand starting at position 436 of SEQ ID NO: 317512
aaguuaaccguggacuauu

SEQ ID NO: 496756 - RNA, 19 nt, Artificial Sequence
  Description of Artificial Sequence: Synthetic oligonucleotide
  Antisense Strand to SEQ ID NO: 496755
aauaguccacgguuaacuu

SEQ ID NO: 496757 - RNA, 19 nt, Artificial Sequence
  Description of Artificial Sequence: Synthetic oligonucleotide
  Sense strand starting at position 455 of SEQ ID NO: 317512
uugaguauggcugaaauca

SEQ ID NO: 496758 - RNA, 19 nt, Artificial Sequence
  Description of Artificial Sequence: Synthetic oligonucleotide
  Antisense Strand to SEQ ID NO: 496757
ugauuucagccauacucaa

SEQ ID NO: 496759 - RNA, 19 nt, Artificial Sequence
  Description of Artificial Sequence: Synthetic oligonucleotide
  Sense strand starting at position 463 of SEQ ID NO: 317512
ggcugaaaucauuguacca

SEQ ID NO: 496760 - RNA, 19 nt, Artificial Sequence
  Description of Artificial Sequence: Synthetic oligonucleotide
  Antisense Strand to SEQ ID NO: 496759
ugguacaaugauuucagcc

SEQ ID NO: 496761 - RNA, 19 nt, Artificial Sequence
  Description of Artificial Sequence: Synthetic oligonucleotide
  Sense strand starting at position 665 of SEQ ID NO: 317512
caacgagaugauuggacuu

SEQ ID NO: 496762 - RNA, 19 nt, Artificial Sequence
  Description of Artificial Sequence: Synthetic oligonucleotide
  Antisense Strand to SEQ ID NO: 496761
aaguccaaucaucucguug

SEQ ID NO: 496763 - RNA, 19 nt, Artificial Sequence
  Description of Artificial Sequence: Synthetic oligonucleotide
  Sense strand starting at position 702 of SEQ ID NO: 317512
uucuuuagugaaggaguau

SEQ ID NO: 496764 - RNA, 19 nt, Artificial Sequence
  Description of Artificial Sequence: Synthetic oligonucleotide
  Antisense Strand to SEQ ID NO: 496763
auacuccuucacuaaagaa

SEQ ID NO: 496765 - RNA, 19 nt, Artificial Sequence
  Description of Artificial Sequence: Synthetic oligonucleotide
  Sense strand starting at position 890 of SEQ ID NO: 317512
uguagaaagauguguaauu

SEQ ID NO: 496766 - RNA, 19 nt, Artificial Sequence
  Description of Artificial Sequence: Synthetic oligonucleotide
  Antisense Strand to SEQ ID NO: 496765
aauuacacaucuuucuaca

SEQ ID NO: 496767 - RNA, 19 nt, Artificial Sequence
  Description of Artificial Sequence: Synthetic oligonucleotide
  Sense strand starting at position 891 of SEQ ID NO: 317512
guagaaagauguguaauua

SEQ ID NO: 496768 - RNA, 19 nt, Artificial Sequence
  Description of Artificial Sequence: Synthetic oligonucleotide
  Antisense Strand to SEQ ID NO: 496767
uaauuacacaucuuucuac

SEQ ID NO: 496769 - RNA, 19 nt, Artificial Sequence
  Description of Artificial Sequence: Synthetic oligonucleotide
  Sense strand starting at position 934 of SEQ ID NO: 317512
uuagauguuacuugaugga

SEQ ID NO: 496770 - RNA, 19 nt, Artificial Sequence
  Description of Artificial Sequence: Synthetic oligonucleotide
  Antisense Strand to SEQ ID NO: 496769
uccaucaaguaacaucuaa

SEQ ID NO: 496771 - RNA, 19 nt, Artificial Sequence
  Description of Artificial Sequence: Synthetic oligonucleotide
  Sense strand starting at position 938 of SEQ ID NO: 317512
auguuacuugauggaucuu

SEQ ID NO: 496772 - RNA, 19 nt, Artificial Sequence
  Description of Artificial Sequence: Synthetic oligonucleotide
  Antisense Strand to SEQ ID NO: 496771
aagauccaucaaguaacau

SEQ ID NO: 496773 - RNA, 19 nt, Artificial Sequence
  Description of Artificial Sequence: Synthetic oligonucleotide
  Sense strand starting at position 1010 of SEQ ID NO: 317512
aagucuuagguguacuaau

SEQ ID NO: 496774 - RNA, 19 nt, Artificial Sequence
  Description of Artificial Sequence: Synthetic oligonucleotide
  Antisense Strand to SEQ ID NO: 496773
auuaguacaccuaagacuu

SEQ ID NO: 496775 - RNA, 19 nt, Artificial Sequence
  Description of Artificial Sequence: Synthetic oligonucleotide
  Sense strand starting at position 1450 of SEQ ID NO: 317512
augaguagccaggagugaa

SEQ ID NO: 496776 - RNA, 19 nt, Artificial Sequence
  Description of Artificial Sequence: Synthetic oligonucleotide
  Antisense Strand to SEQ ID NO: 496775
uucacuccuggcuacucau

SEQ ID NO: 496777 - RNA, 19 nt, Artificial Sequence
  Description of Artificial Sequence: Synthetic oligonucleotide
  Sense strand starting at position 1478 of SEQ ID NO: 317512
guacacaaaggguauguua

SEQ ID NO: 496778 - RNA, 19 nt, Artificial Sequence
  Description of Artificial Sequence: Synthetic oligonucleotide
  Antisense Strand to SEQ ID NO: 496777
uaacauacccuuuguguac

SEQ ID NO: 496779 - RNA, 19 nt, Artificial Sequence
  Description of Artificial Sequence: Synthetic oligonucleotide
  Sense strand starting at position 1480 of SEQ ID NO: 317512
acacaaaggguauguuaaa

SEQ ID NO: 496780 - RNA, 19 nt, Artificial Sequence
  Description of Artificial Sequence: Synthetic oligonucleotide
  Antisense Strand to SEQ ID NO: 496779
uuuaacauacccuuugugu

SEQ ID NO: 496781 - RNA, 19 nt, Artificial Sequence
  Description of Artificial Sequence: Synthetic oligonucleotide
  Sense strand starting at position 1481 of SEQ ID NO: 317512
cacaaaggguauguuaaau

SEQ ID NO: 496782 - RNA, 19 nt, Artificial Sequence
  Description of Artificial Sequence: Synthetic oligonucleotide
  Antisense Strand to SEQ ID NO: 496781
auuuaacauacccuuugug

SEQ ID NO: 496783 - RNA, 19 nt, Artificial Sequence
  Description of Artificial Sequence: Synthetic oligonucleotide
  Sense strand starting at position 1698 of SEQ ID NO: 317512
cgugauauucuccaacuca

SEQ ID NO: 496784 - RNA, 19 nt, Artificial Sequence
  Description of Artificial Sequence: Synthetic oligonucleotide
  Antisense Strand to SEQ ID NO: 496783
ugaguuggagaauaucacg

SEQ ID NO: 496785 - RNA, 19 nt, Artificial Sequence
  Description of Artificial Sequence: Synthetic oligonucleotide
  Sense strand starting at position 1733 of SEQ ID NO: 317512
uaggauaaacuucgaguuu

SEQ ID NO: 496786 - RNA, 19 nt, Artificial Sequence
  Description of Artificial Sequence: Synthetic oligonucleotide
  Antisense Strand to SEQ ID NO: 496785
aaacucgaaguuuauccua

SEQ ID NO: 496787 - RNA, 19 nt, Artificial Sequence
  Description of Artificial Sequence: Synthetic oligonucleotide
  Sense strand starting at position 1739 of SEQ ID NO: 317512
aaacuucgaguuuaagagu

SEQ ID NO: 496788 - RNA, 19 nt, Artificial Sequence
  Description of Artificial Sequence: Synthetic oligonucleotide
  Antisense Strand to SEQ ID NO: 496787
acucuuaaacucgaaguuu

SEQ ID NO: 496789 - RNA, 19 nt, Artificial Sequence
  Description of Artificial Sequence: Synthetic oligonucleotide
  Sense strand starting at position 1745 of SEQ ID NO: 317512
cgaguuuaagaguggauga

SEQ ID NO: 496790 - RNA, 19 nt, Artificial Sequence
  Description of Artificial Sequence: Synthetic oligonucleotide
  Antisense Strand to SEQ ID NO: 496789
ucauccacucuuaaacucg

SEQ ID NO: 496791 - RNA, 19 nt, Artificial Sequence
  Description of Artificial Sequence: Synthetic oligonucleotide
  Sense strand starting at position 1747 of SEQ ID NO: 317512
aguuuaagaguggaugagu

SEQ ID NO: 496792 - RNA, 19 nt, Artificial Sequence
  Description of Artificial Sequence: Synthetic oligonucleotide
  Antisense Strand to SEQ ID NO: 496791
acucauccacucuuaaacu

SEQ ID NO: 496793 - RNA, 19 nt, Artificial Sequence
  Description of Artificial Sequence: Synthetic oligonucleotide
  Sense strand starting at position 1756 of SEQ ID NO: 317512
guggaugagucauugggau

SEQ ID NO: 496794 - RNA, 19 nt, Artificial Sequence
  Description of Artificial Sequence: Synthetic oligonucleotide
  Antisense Strand to SEQ ID NO: 496793
aucccaaugacucauccac

SEQ ID NO: 496795 - RNA, 19 nt, Artificial Sequence
  Description of Artificial Sequence: Synthetic oligonucleotide
  Sense strand starting at position 1758 of SEQ ID NO: 317512
ggaugagucauugggauca

SEQ ID NO: 496796 - RNA, 19 nt, Artificial Sequence
  Description of Artificial Sequence: Synthetic oligonucleotide
  Antisense Strand to SEQ ID NO: 496795
ugaucccaaugacucaucc

SEQ ID NO: 496797 - RNA, 19 nt, Artificial Sequence
  Description of Artificial Sequence: Synthetic oligonucleotide
  Sense strand starting at position 1928 of SEQ ID NO: 317512
guuguaucagcagaagaac

SEQ ID NO: 496798 - RNA, 19 nt, Artificial Sequence
  Description of Artificial Sequence: Synthetic oligonucleotide
  Antisense Strand to SEQ ID NO: 496797
guucuucugcugauacaac

SEQ ID NO: 496799 - RNA, 19 nt, Artificial Sequence
  Description of Artificial Sequence: Synthetic oligonucleotide
  Sense strand starting at position 2141 of SEQ ID NO: 317512
uuuacucaagaauguuuga

SEQ ID NO: 496800 - RNA, 19 nt, Artificial Sequence
  Description of Artificial Sequence: Synthetic oligonucleotide
  Antisense Strand to SEQ ID NO: 496799
ucaaacauucuugaguaaa

SEQ ID NO: 496801 - RNA, 19 nt, Artificial Sequence
  Description of Artificial Sequence: Synthetic oligonucleotide
  Sense strand starting at position 2144 of SEQ ID NO: 317512
acucaagaauguuugaugu

SEQ ID NO: 496802 - RNA, 19 nt, Artificial Sequence
  Description of Artificial Sequence: Synthetic oligonucleotide
  Antisense Strand to SEQ ID NO: 496801
acaucaaacauucuugagu

SEQ ID NO: 496803 - RNA, 19 nt, Artificial Sequence
  Description of Artificial Sequence: Synthetic oligonucleotide
  Sense strand starting at position 2171 of SEQ ID NO: 317512
uguuuauauuugcugucau

SEQ ID NO: 496804 - RNA, 19 nt, Artificial Sequence
  Description of Artificial Sequence: Synthetic oligonucleotide
  Antisense Strand to SEQ ID NO: 496803
augacagcaaauauaaaca

SEQ ID NO: 496805 - RNA, 19 nt, Artificial Sequence
  Description of Artificial Sequence: Synthetic oligonucleotide
  Sense strand starting at position 2642 of SEQ ID NO: 317512
ggcuucuucuauuuaguuu

SEQ ID NO: 496806 - RNA, 19 nt, Artificial Sequence
  Description of Artificial Sequence: Synthetic oligonucleotide
  Antisense Strand to SEQ ID NO: 496805
aaacuaaauagaagaagcc

SEQ ID NO: 496807 - RNA, 19 nt, Artificial Sequence
  Description of Artificial Sequence: Synthetic oligonucleotide
  Sense strand starting at position 2806 of SEQ ID NO: 317512
augcauagcguugauauuu

SEQ ID NO: 496808 - RNA, 19 nt, Artificial Sequence
  Description of Artificial Sequence: Synthetic oligonucleotide
  Antisense Strand to SEQ ID NO: 496807
aaauaucaacgcuaugcau

SEQ ID NO: 496809 - RNA, 19 nt, Artificial Sequence
  Description of Artificial Sequence: Synthetic oligonucleotide
  Sense strand starting at position 2979 of SEQ ID NO: 317512
uuggguauaugucuagaaa

SEQ ID NO: 496810 - RNA, 19 nt, Artificial Sequence
  Description of Artificial Sequence: Synthetic oligonucleotide
  Antisense Strand to SEQ ID NO: 496809
uuucuagacauauacccaa

SEQ ID NO: 496811 - RNA, 19 nt, Artificial Sequence
  Description of Artificial Sequence: Synthetic oligonucleotide
  Sense strand starting at position 2982 of SEQ ID NO: 317512
gguauaugucuagaaaggc

SEQ ID NO: 496812 - RNA, 19 nt, Artificial Sequence
  Description of Artificial Sequence: Synthetic oligonucleotide
  Antisense Strand to SEQ ID NO: 496811
gccuuucuagacauauacc

SEQ ID NO: 496813 - RNA, 19 nt, Artificial Sequence
  Description of Artificial Sequence: Synthetic oligonucleotide
  Sense strand starting at position 3039 of SEQ ID NO: 317512
ugaggaauugcuggacuuu

SEQ ID NO: 496814 - RNA, 19 nt, Artificial Sequence
  Description of Artificial Sequence: Synthetic oligonucleotide
  Antisense Strand to SEQ ID NO: 496813
aaaguccagcaauuccuca

SEQ ID NO: 496815 - RNA, 19 nt, Artificial Sequence
  Description of Artificial Sequence: Synthetic oligonucleotide
  Sense strand starting at position 3207 of SEQ ID NO: 317512
aggaaaguuuccuuccaca

SEQ ID NO: 496816 - RNA, 19 nt, Artificial Sequence
  Description of Artificial Sequence: Synthetic oligonucleotide
  Antisense Strand to SEQ ID NO: 496815
uguggaaggaaacuuuccu

SEQ ID NO: 496817 - RNA, 19 nt, Artificial Sequence
  Description of Artificial Sequence: Synthetic oligonucleotide
  Sense strand starting at position 3420 of SEQ ID NO: 317512
gaaagucuuccacagaguu

SEQ ID NO: 496818 - RNA, 19 nt, Artificial Sequence
  Description of Artificial Sequence: Synthetic oligonucleotide
  Antisense Strand to SEQ ID NO: 496817
aacucuguggaagacuuuc

SEQ ID NO: 496819 - RNA, 19 nt, Artificial Sequence
  Description of Artificial Sequence: Synthetic oligonucleotide
  Sense strand starting at position 3683 of SEQ ID NO: 317512
caauguacucuuugggaac

SEQ ID NO: 496820 - RNA, 19 nt, Artificial Sequence
  Description of Artificial Sequence: Synthetic oligonucleotide
  Antisense Strand to SEQ ID NO: 496819
guucccaaagaguacauug

SEQ ID NO: 496821 - RNA, 19 nt, Artificial Sequence
  Description of Artificial Sequence: Synthetic oligonucleotide
  Sense strand starting at position 3696 of SEQ ID NO: 317512
gggaacuuguauguccaca

SEQ ID NO: 496822 - RNA, 19 nt, Artificial Sequence
  Description of Artificial Sequence: Synthetic oligonucleotide
  Antisense Strand to SEQ ID NO: 496821
uguggacauacaaguuccc

SEQ ID NO: 496823 - RNA, 19 nt, Artificial Sequence
  Description of Artificial Sequence: Synthetic oligonucleotide
  Sense strand starting at position 3787 of SEQ ID NO: 317512
cagcaaauuguuggaauca

SEQ ID NO: 496824 - RNA, 19 nt, Artificial Sequence
  Description of Artificial Sequence: Synthetic oligonucleotide
  Antisense Strand to SEQ ID NO: 496823
ugauuccaacaauuugcug

SEQ ID NO: 496825 - RNA, 19 nt, Artificial Sequence
  Description of Artificial Sequence: Synthetic oligonucleotide
  Sense strand starting at position 3931 of SEQ ID NO: 317512
gggacucagagcuggaaua

SEQ ID NO: 496826 - RNA, 19 nt, Artificial Sequence
  Description of Artificial Sequence: Synthetic oligonucleotide
  Antisense Strand to SEQ ID NO: 496825
uauuccagcucugaguccc

SEQ ID NO: 496827 - RNA, 19 nt, Artificial Sequence
  Description of Artificial Sequence: Synthetic oligonucleotide
  Sense strand starting at position 3945 of SEQ ID NO: 317512
gaauacaacggucagcaua

SEQ ID NO: 496828 - RNA, 19 nt, Artificial Sequence
  Description of Artificial Sequence: Synthetic oligonucleotide
  Antisense Strand to SEQ ID NO: 496827
uaugcugaccguuguauuc

SEQ ID NO: 496829 - RNA, 19 nt, Artificial Sequence
  Description of Artificial Sequence: Synthetic oligonucleotide
  Sense strand starting at position 194 of SEQ ID NO: 317513
gaauuaugagguuaagcga

SEQ ID NO: 496830 - RNA, 19 nt, Artificial Sequence
  Description of Artificial Sequence: Synthetic oligonucleotide
  Antisense Strand to SEQ ID NO: 496829
ucgcuuaaccucauaauuc

SEQ ID NO: 496831 - RNA, 19 nt, Artificial Sequence
  Description of Artificial Sequence: Synthetic oligonucleotide
  Sense strand starting at position 201 of SEQ ID NO: 317513
gagguuaagcgacaucucu

SEQ ID NO: 496832 - RNA, 19 nt, Artificial Sequence
  Description of Artificial Sequence: Synthetic oligonucleotide
  Antisense Strand to SEQ ID NO: 496831
agagaugucgcuuaaccuc

SEQ ID NO: 496833 - RNA, 19 nt, Artificial Sequence
  Description of Artificial Sequence: Synthetic oligonucleotide
  Sense strand starting at position 207 of SEQ ID NO: 317513
aagcgacaucucuaauguc

SEQ ID NO: 496834 - RNA, 19 nt, Artificial Sequence
  Description of Artificial Sequence: Synthetic oligonucleotide
  Antisense Strand to SEQ ID NO: 496833
gacauuagagaugucgcuu

SEQ ID NO: 496835 - RNA, 19 nt, Artificial Sequence
  Description of Artificial Sequence: Synthetic oligonucleotide
  Sense strand starting at position 298 of SEQ ID NO: 317513
ucaauaguugcauauagau

SEQ ID NO: 496836 - RNA, 19 nt, Artificial Sequence
  Description of Artificial Sequence: Synthetic oligonucleotide
  Antisense Strand to SEQ ID NO: 496835
aucuauaugcaacuauuga

SEQ ID NO: 496837 - RNA, 19 nt, Artificial Sequence
  Description of Artificial Sequence: Synthetic oligonucleotide
  Sense strand starting at position 376 of SEQ ID NO: 317513
uuucuaacaguccaguuua

SEQ ID NO: 496838 - RNA, 19 nt, Artificial Sequence
  Description of Artificial Sequence: Synthetic oligonucleotide
  Antisense Strand to SEQ ID NO: 496837
uaaacuggacuguuagaaa

SEQ ID NO: 496839 - RNA, 19 nt, Artificial Sequence
  Description of Artificial Sequence: Synthetic oligonucleotide
  Sense strand starting at position 429 of SEQ ID NO: 317513
ucaagugaacucuguacua

SEQ ID NO: 496840 - RNA, 19 nt, Artificial Sequence
  Description of Artificial Sequence: Synthetic oligonucleotide
  Antisense Strand to SEQ ID NO: 496839
uaguacagaguucacuuga

SEQ ID NO: 496841 - RNA, 19 nt, Artificial Sequence
  Description of Artificial Sequence: Synthetic oligonucleotide
  Sense strand starting at position 460 of SEQ ID NO: 317513
ggcagaaauccugguacca

SEQ ID NO: 496842 - RNA, 19 nt, Artificial Sequence
  Description of Artificial Sequence: Synthetic oligonucleotide
  Antisense Strand to SEQ ID NO: 496841
ugguaccaggauuucugcc

SEQ ID NO: 496843 - RNA, 19 nt, Artificial Sequence
  Description of Artificial Sequence: Synthetic oligonucleotide
  Sense strand starting at position 577 of SEQ ID NO: 317513
agagaacuguacucaaccu

SEQ ID NO: 496844 - RNA, 19 nt, Artificial Sequence
  Description of Artificial Sequence: Synthetic oligonucleotide
  Antisense Strand to SEQ ID NO: 496843
agguugaguacaguucucu

SEQ ID NO: 496845 - RNA, 19 nt, Artificial Sequence
  Description of Artificial Sequence: Synthetic oligonucleotide
  Sense strand starting at position 702 of SEQ ID NO: 317513
ccaauucuuuaguuaggga

SEQ ID NO: 496846 - RNA, 19 nt, Artificial Sequence
  Description of Artificial Sequence: Synthetic oligonucleotide
  Antisense Strand to SEQ ID NO: 496845
ucccuaacuaaagaauugg

SEQ ID NO: 496847 - RNA, 19 nt, Artificial Sequence
  Description of Artificial Sequence: Synthetic oligonucleotide
  Sense strand starting at position 707 of SEQ ID NO: 317513
ucuuuaguuagggaguaua

SEQ ID NO: 496848 - RNA, 19 nt, Artificial Sequence
  Description of Artificial Sequence: Synthetic oligonucleotide
  Antisense Strand to SEQ ID NO: 496847
uauacucccuaacuaaaga

SEQ ID NO: 496849 - RNA, 19 nt, Artificial Sequence
  Description of Artificial Sequence: Synthetic oligonucleotide
  Sense strand starting at position 762 of SEQ ID NO: 317513
uugcaucugagauguagac

SEQ ID NO: 496850 - RNA, 19 nt, Artificial Sequence
  Description of Artificial Sequence: Synthetic oligonucleotide
  Antisense Strand to SEQ ID NO: 496849
gucuacaucucagaugcaa

SEQ ID NO: 496851 - RNA, 19 nt, Artificial Sequence
  Description of Artificial Sequence: Synthetic oligonucleotide
  Sense strand starting at position 764 of SEQ ID NO: 317513
gcaucugagauguagacau

SEQ ID NO: 496852 - RNA, 19 nt, Artificial Sequence
  Description of Artificial Sequence: Synthetic oligonucleotide
  Antisense Strand to SEQ ID NO: 496851
augucuacaucucagaugc

SEQ ID NO: 496853 - RNA, 19 nt, Artificial Sequence
  Description of Artificial Sequence: Synthetic oligonucleotide
  Sense strand starting at position 881 of SEQ ID NO: 317513
uuacauagauaguuguaga

SEQ ID NO: 496854 - RNA, 19 nt, Artificial Sequence
  Description of Artificial Sequence: Synthetic oligonucleotide
  Antisense Strand to SEQ ID NO: 496853
ucuacaacuaucuauguaa

SEQ ID NO: 496855 - RNA, 19 nt, Artificial Sequence
  Description of Artificial Sequence: Synthetic oligonucleotide
  Sense strand starting at position 1067 of SEQ ID NO: 317513
gagugauggccacaggguu

SEQ ID NO: 496856 - RNA, 19 nt, Artificial Sequence
  Description of Artificial Sequence: Synthetic oligonucleotide
  Antisense Strand to SEQ ID NO: 496855
aacccuguggccaucacuc

SEQ ID NO: 496857 - RNA, 19 nt, Artificial Sequence
  Description of Artificial Sequence: Synthetic oligonucleotide
  Sense strand starting at position 1111 of SEQ ID NO: 317513
uucuauaauguuugugaga

SEQ ID NO: 496858 - RNA, 19 nt, Artificial Sequence
  Description of Artificial Sequence: Synthetic oligonucleotide
  Antisense Strand to SEQ ID NO: 496857
ucucacaaacauuauagaa

SEQ ID NO: 496859 - RNA, 19 nt, Artificial Sequence
  Description of Artificial Sequence: Synthetic oligonucleotide
  Sense strand starting at position 1112 of SEQ ID NO: 317513
ucuauaauguuugugagau

SEQ ID NO: 496860 - RNA, 19 nt, Artificial Sequence
  Description of Artificial Sequence: Synthetic oligonucleotide
  Antisense Strand to SEQ ID NO: 496859
aucucacaaacauuauaga

SEQ ID NO: 496861 - RNA, 19 nt, Artificial Sequence
  Description of Artificial Sequence: Synthetic oligonucleotide
  Sense strand starting at position 1120 of SEQ ID NO: 317513
guuugugagauugauagau

SEQ ID NO: 496862 - RNA, 19 nt, Artificial Sequence
  Description of Artificial Sequence: Synthetic oligonucleotide
  Antisense Strand to SEQ ID NO: 496861
aucuaucaaucucacaaac

SEQ ID NO: 496863 - RNA, 19 nt, Artificial Sequence
  Description of Artificial Sequence: Synthetic oligonucleotide
  Sense strand starting at position 1244 of SEQ ID NO: 317513
cacguuaccgauuaaacaa

SEQ ID NO: 496864 - RNA, 19 nt, Artificial Sequence
  Description of Artificial Sequence: Synthetic oligonucleotide
  Antisense Strand to SEQ ID NO: 496863
uuguuuaaucgguaacgug

SEQ ID NO: 496865 - RNA, 19 nt, Artificial Sequence
  Description of Artificial Sequence: Synthetic oligonucleotide
  Sense strand starting at position 1454 of SEQ ID NO: 317513
uuguguagccaggaguaaa

SEQ ID NO: 496866 - RNA, 19 nt, Artificial Sequence
  Description of Artificial Sequence: Synthetic oligonucleotide
  Antisense Strand to SEQ ID NO: 496865
uuuacuccuggcuacacaa

SEQ ID NO: 496867 - RNA, 19 nt, Artificial Sequence
  Description of Artificial Sequence: Synthetic oligonucleotide
  Sense strand starting at position 1482 of SEQ ID NO: 317513
guacacaaaccguauguua

SEQ ID NO: 496868 - RNA, 19 nt, Artificial Sequence
  Description of Artificial Sequence: Synthetic oligonucleotide
  Antisense Strand to SEQ ID NO: 496867
uaacauacgguuuguguac

SEQ ID NO: 496869 - RNA, 19 nt, Artificial Sequence
  Description of Artificial Sequence: Synthetic oligonucleotide
  Sense strand starting at position 1644 of SEQ ID NO: 317513
caggauuucuuguucuugu

SEQ ID NO: 496870 - RNA, 19 nt, Artificial Sequence
  Description of Artificial Sequence: Synthetic oligonucleotide
  Antisense Strand to SEQ ID NO: 496869
acaagaacaagaaauccug

SEQ ID NO: 496871 - RNA, 19 nt, Artificial Sequence
  Description of Artificial Sequence: Synthetic oligonucleotide
  Sense strand starting at position 1718 of SEQ ID NO: 317513
gcaugaugauauucucaaa

SEQ ID NO: 496872 - RNA, 19 nt, Artificial Sequence
  Description of Artificial Sequence: Synthetic oligonucleotide
  Antisense Strand to SEQ ID NO: 496871
uuugagaauaucaucaugc

SEQ ID NO: 496873 - RNA, 19 nt, Artificial Sequence
  Description of Artificial Sequence: Synthetic oligonucleotide
  Sense strand starting at position 1780 of SEQ ID NO: 317513
guggaugcaucauugggau

SEQ ID NO: 496874 - RNA, 19 nt, Artificial Sequence
  Description of Artificial Sequence: Synthetic oligonucleotide
  Antisense Strand to SEQ ID NO: 496873
aucccaaugaugcauccac

SEQ ID NO: 496875 - RNA, 19 nt, Artificial Sequence
  Description of Artificial Sequence: Synthetic oligonucleotide
  Sense strand starting at position 1782 of SEQ ID NO: 317513
ggaugcaucauugggauca

SEQ ID NO: 496876 - RNA, 19 nt, Artificial Sequence
  Description of Artificial Sequence: Synthetic oligonucleotide
  Antisense Strand to SEQ ID NO: 496875
ugaucccaaugaugcaucc

SEQ ID NO: 496877 - RNA, 19 nt, Artificial Sequence
  Description of Artificial Sequence: Synthetic oligonucleotide
  Sense strand starting at position 1949 of SEQ ID NO: 317513
ugagauguaucagcagaag

SEQ ID NO: 496878 - RNA, 19 nt, Artificial Sequence
  Description of Artificial Sequence: Synthetic oligonucleotide
  Antisense Strand to SEQ ID NO: 496877
cuucugcugauacaucuca

SEQ ID NO: 496879 - RNA, 19 nt, Artificial Sequence
  Description of Artificial Sequence: Synthetic oligonucleotide
  Sense strand starting at position 2107 of SEQ ID NO: 317513
ggagcauccugaguacaug

SEQ ID NO: 496880 - RNA, 19 nt, Artificial Sequence
  Description of Artificial Sequence: Synthetic oligonucleotide
  Antisense Strand to SEQ ID NO: 496879
cauguacucaggaugcucc

SEQ ID NO: 496881 - RNA, 19 nt, Artificial Sequence
  Description of Artificial Sequence: Synthetic oligonucleotide
  Sense strand starting at position 2220 of SEQ ID NO: 317513
gauuaaugaccuugcaagu

SEQ ID NO: 496882 - RNA, 19 nt, Artificial Sequence
  Description of Artificial Sequence: Synthetic oligonucleotide
  Antisense Strand to SEQ ID NO: 496881
acuugcaaggucauuaauc

SEQ ID NO: 496883 - RNA, 19 nt, Artificial Sequence
  Description of Artificial Sequence: Synthetic oligonucleotide
  Sense strand starting at position 2384 of SEQ ID NO: 317513
uuguaaaucuuuguuggag

SEQ ID NO: 496884 - RNA, 19 nt, Artificial Sequence
  Description of Artificial Sequence: Synthetic oligonucleotide
  Antisense Strand to SEQ ID NO: 496883
cuccaacaaagauuuacaa

SEQ ID NO: 496885 - RNA, 19 nt, Artificial Sequence
  Description of Artificial Sequence: Synthetic oligonucleotide
  Sense strand starting at position 2574 of SEQ ID NO: 317513
ggcaaccaguaaucuaauu

SEQ ID NO: 496886 - RNA, 19 nt, Artificial Sequence
  Description of Artificial Sequence: Synthetic oligonucleotide
  Antisense Strand to SEQ ID NO: 496885
aauuagauuacugguugcc

SEQ ID NO: 496887 - RNA, 19 nt, Artificial Sequence
  Description of Artificial Sequence: Synthetic oligonucleotide
  Sense strand starting at position 2698 of SEQ ID NO: 317513
aaaggaccauccguagaau

SEQ ID NO: 496888 - RNA, 19 nt, Artificial Sequence
  Description of Artificial Sequence: Synthetic oligonucleotide
  Antisense Strand to SEQ ID NO: 496887
auucuacggaugguccuuu

SEQ ID NO: 496889 - RNA, 19 nt, Artificial Sequence
  Description of Artificial Sequence: Synthetic oligonucleotide
  Sense strand starting at position 2701 of SEQ ID NO: 317513
ggaccauccguagaauagu

SEQ ID NO: 496890 - RNA, 19 nt, Artificial Sequence
  Description of Artificial Sequence: Synthetic oligonucleotide
  Antisense Strand to SEQ ID NO: 496889
acuauucuacggauggucc

SEQ ID NO: 496891 - RNA, 19 nt, Artificial Sequence
  Description of Artificial Sequence: Synthetic oligonucleotide
  Sense strand starting at position 2709 of SEQ ID NO: 317513
cguagaauaguguaaauaa

SEQ ID NO: 496892 - RNA, 19 nt, Artificial Sequence
  Description of Artificial Sequence: Synthetic oligonucleotide
  Antisense Strand to SEQ ID NO: 496891
uuauuuacacuauucuacg

SEQ ID NO: 496893 - RNA, 19 nt, Artificial Sequence
  Description of Artificial Sequence: Synthetic oligonucleotide
  Sense strand starting at position 2827 of SEQ ID NO: 317513
ggccauuaugaauagcauu

SEQ ID NO: 496894 - RNA, 19 nt, Artificial Sequence
  Description of Artificial Sequence: Synthetic oligonucleotide
  Antisense Strand to SEQ ID NO: 496893
aaugcuauucauaauggcc

SEQ ID NO: 496895 - RNA, 19 nt, Artificial Sequence
  Description of Artificial Sequence: Synthetic oligonucleotide
  Sense strand starting at position 2849 of SEQ ID NO: 317513
uaacauugaugugcaugaa

SEQ ID NO: 496896 - RNA, 19 nt, Artificial Sequence
  Description of Artificial Sequence: Synthetic oligonucleotide
  Antisense Strand to SEQ ID NO: 496895
uucaugcacaucaauguua

SEQ ID NO: 496897 - RNA, 19 nt, Artificial Sequence
  Description of Artificial Sequence: Synthetic oligonucleotide
  Sense strand starting at position 2850 of SEQ ID NO: 317513
aacauugaugugcaugaau

SEQ ID NO: 496898 - RNA, 19 nt, Artificial Sequence
  Description of Artificial Sequence: Synthetic oligonucleotide
  Antisense Strand to SEQ ID NO: 496897
auucaugcacaucaauguu

SEQ ID NO: 496899 - RNA, 19 nt, Artificial Sequence
  Description of Artificial Sequence: Synthetic oligonucleotide
  Sense strand starting at position 2861 of SEQ ID NO: 317513
gcaugaauucuguggacau

SEQ ID NO: 496900 - RNA, 19 nt, Artificial Sequence
  Description of Artificial Sequence: Synthetic oligonucleotide
  Antisense Strand to SEQ ID NO: 496899
auguccacagaauucaugc

SEQ ID NO: 496901 - RNA, 19 nt, Artificial Sequence
  Description of Artificial Sequence: Synthetic oligonucleotide
  Sense strand starting at position 2865 of SEQ ID NO: 317513
gaauucuguggacauguuu

SEQ ID NO: 496902 - RNA, 19 nt, Artificial Sequence
  Description of Artificial Sequence: Synthetic oligonucleotide
  Antisense Strand to SEQ ID NO: 496901
aaacauguccacagaauuc

SEQ ID NO: 496903 - RNA, 19 nt, Artificial Sequence
  Description of Artificial Sequence: Synthetic oligonucleotide
  Sense strand starting at position 3333 of SEQ ID NO: 317513
guaaguccuccacagaguu

SEQ ID NO: 496904 - RNA, 19 nt, Artificial Sequence
  Description of Artificial Sequence: Synthetic oligonucleotide
  Antisense Strand to SEQ ID NO: 496903
aacucuguggaggacuuac

SEQ ID NO: 496905 - RNA, 19 nt, Artificial Sequence
  Description of Artificial Sequence: Synthetic oligonucleotide
  Sense strand starting at position 3609 of SEQ ID NO: 317513
ggaaacuuauauguccaca

SEQ ID NO: 496906 - RNA, 19 nt, Artificial Sequence
  Description of Artificial Sequence: Synthetic oligonucleotide
  Antisense Strand to SEQ ID NO: 496905
uguggacauauaaguuucc

SEQ ID NO: 496907 - RNA, 19 nt, Artificial Sequence
  Description of Artificial Sequence: Synthetic oligonucleotide
  Sense strand starting at position 3859 of SEQ ID NO: 317513
auacaacugucagcauaag

SEQ ID NO: 496908 - RNA, 19 nt, Artificial Sequence
  Description of Artificial Sequence: Synthetic oligonucleotide
  Antisense Strand to SEQ ID NO: 496907
cuuaugcugacaguuguau

SEQ ID NO: 496909 - RNA, 19 nt, Artificial Sequence
  Description of Artificial Sequence: Synthetic oligonucleotide
  Sense strand starting at position 549 of SEQ ID NO: 317514
uugucaaccuguuauugaa

SEQ ID NO: 496910 - RNA, 19 nt, Artificial Sequence
  Description of Artificial Sequence: Synthetic oligonucleotide
  Antisense Strand to SEQ ID NO: 496909
uucaauaacagguugacaa

SEQ ID NO: 496911 - RNA, 19 nt, Artificial Sequence
  Description of Artificial Sequence: Synthetic oligonucleotide
  Sense strand starting at position 552 of SEQ ID NO: 317514
ucaaccuguuauugaagga

SEQ ID NO: 496912 - RNA, 19 nt, Artificial Sequence
  Description of Artificial Sequence: Synthetic oligonucleotide
  Antisense Strand to SEQ ID NO: 496911
uccuucaauaacagguuga

SEQ ID NO: 496913 - RNA, 19 nt, Artificial Sequence
  Description of Artificial Sequence: Synthetic oligonucleotide
  Sense strand starting at position 556 of SEQ ID NO: 317514
ccuguuauugaaggaaugu

SEQ ID NO: 496914 - RNA, 19 nt, Artificial Sequence
  Description of Artificial Sequence: Synthetic oligonucleotide
  Antisense Strand to SEQ ID NO: 496913
acauuccuucaauaacagg

SEQ ID NO: 496915 - RNA, 19 nt, Artificial Sequence
  Description of Artificial Sequence: Synthetic oligonucleotide
  Sense strand starting at position 630 of SEQ ID NO: 317514
auuacucaacugugaagga

SEQ ID NO: 496916 - RNA, 19 nt, Artificial Sequence
  Description of Artificial Sequence: Synthetic oligonucleotide
  Antisense Strand to SEQ ID NO: 496915
uccuucacaguugaguaau

SEQ ID NO: 496917 - RNA, 19 nt, Artificial Sequence
  Description of Artificial Sequence: Synthetic oligonucleotide
  Sense strand starting at position 631 of SEQ ID NO: 317514
uuacucaacugugaaggaa

SEQ ID NO: 496918 - RNA, 19 nt, Artificial Sequence
  Description of Artificial Sequence: Synthetic oligonucleotide
  Antisense Strand to SEQ ID NO: 496917
uuccuucacaguugaguaa

SEQ ID NO: 496919 - RNA, 19 nt, Artificial Sequence
  Description of Artificial Sequence: Synthetic oligonucleotide
  Sense strand starting at position 645 of SEQ ID NO: 317514
aggaauccuucuuacauga

SEQ ID NO: 496920 - RNA, 19 nt, Artificial Sequence
  Description of Artificial Sequence: Synthetic oligonucleotide
  Antisense Strand to SEQ ID NO: 496919
ucauguaagaaggauuccu

SEQ ID NO: 496921 - RNA, 19 nt, Artificial Sequence
  Description of Artificial Sequence: Synthetic oligonucleotide
  Sense strand starting at position 787 of SEQ ID NO: 317514
ugaagauguuucuugaggu

SEQ ID NO: 496922 - RNA, 19 nt, Artificial Sequence
  Description of Artificial Sequence: Synthetic oligonucleotide
  Antisense Strand to SEQ ID NO: 496921
accucaagaaacaucuuca

SEQ ID NO: 496923 - RNA, 19 nt, Artificial Sequence
  Description of Artificial Sequence: Synthetic oligonucleotide
  Sense strand starting at position 788 of SEQ ID NO: 317514
gaagauguuucuugaggua

SEQ ID NO: 496924 - RNA, 19 nt, Artificial Sequence
  Description of Artificial Sequence: Synthetic oligonucleotide
  Antisense Strand to SEQ ID NO: 496923
uaccucaagaaacaucuuc

SEQ ID NO: 496925 - RNA, 19 nt, Artificial Sequence
  Description of Artificial Sequence: Synthetic oligonucleotide
  Sense strand starting at position 791 of SEQ ID NO: 317514
gauguuucuugagguaucu

SEQ ID NO: 496926 - RNA, 19 nt, Artificial Sequence
  Description of Artificial Sequence: Synthetic oligonucleotide
  Antisense Strand to SEQ ID NO: 496925
agauaccucaagaaacauc

SEQ ID NO: 496927 - RNA, 19 nt, Artificial Sequence
  Description of Artificial Sequence: Synthetic oligonucleotide
  Sense strand starting at position 800 of SEQ ID NO: 317514
ugagguaucuauugacuuu

SEQ ID NO: 496928 - RNA, 19 nt, Artificial Sequence
  Description of Artificial Sequence: Synthetic oligonucleotide
  Antisense Strand to SEQ ID NO: 496927
aaagucaauagauaccuca

SEQ ID NO: 496929 - RNA, 19 nt, Artificial Sequence
  Description of Artificial Sequence: Synthetic oligonucleotide
  Sense strand starting at position 866 of SEQ ID NO: 317514
agaaaucauuagugcuuua

SEQ ID NO: 496930 - RNA, 19 nt, Artificial Sequence
  Description of Artificial Sequence: Synthetic oligonucleotide
  Antisense Strand to SEQ ID NO: 496929
uaaagcacuaaugauuucu

SEQ ID NO: 496931 - RNA, 19 nt, Artificial Sequence
  Description of Artificial Sequence: Synthetic oligonucleotide
  Sense strand starting at position 871 of SEQ ID NO: 317514
ucauuagugcuuuacaaug

SEQ ID NO: 496932 - RNA, 19 nt, Artificial Sequence
  Description of Artificial Sequence: Synthetic oligonucleotide
  Antisense Strand to SEQ ID NO: 496931
cauuguaaagcacuaauga

SEQ ID NO: 496933 - RNA, 19 nt, Artificial Sequence
  Description of Artificial Sequence: Synthetic oligonucleotide
  Sense strand starting at position 873 of SEQ ID NO: 317514
auuagugcuuuacaaugaa

SEQ ID NO: 496934 - RNA, 19 nt, Artificial Sequence
  Description of Artificial Sequence: Synthetic oligonucleotide
  Antisense Strand to SEQ ID NO: 496933
uucauuguaaagcacuaau

SEQ ID NO: 496935 - RNA, 19 nt, Artificial Sequence
  Description of Artificial Sequence: Synthetic oligonucleotide
  Sense strand starting at position 876 of SEQ ID NO: 317514
agugcuuuacaaugaaggu

SEQ ID NO: 496936 - RNA, 19 nt, Artificial Sequence
  Description of Artificial Sequence: Synthetic oligonucleotide
  Antisense Strand to SEQ ID NO: 496935
accuucauuguaaagcacu

SEQ ID NO: 496937 - RNA, 19 nt, Artificial Sequence
  Description of Artificial Sequence: Synthetic oligonucleotide
  Sense strand starting at position 877 of SEQ ID NO: 317514
gugcuuuacaaugaagguu

SEQ ID NO: 496938 - RNA, 19 nt, Artificial Sequence
  Description of Artificial Sequence: Synthetic oligonucleotide
  Antisense Strand to SEQ ID NO: 496937
aaccuucauuguaaagcac

SEQ ID NO: 496939 - RNA, 19 nt, Artificial Sequence
  Description of Artificial Sequence: Synthetic oligonucleotide
  Sense strand starting at position 905 of SEQ ID NO: 317514
cuggguguccuguaguagu

SEQ ID NO: 496940 - RNA, 19 nt, Artificial Sequence
  Description of Artificial Sequence: Synthetic oligonucleotide
  Antisense Strand to SEQ ID NO: 496939
acuacuacaggacacccag

SEQ ID NO: 496941 - RNA, 19 nt, Artificial Sequence
  Description of Artificial Sequence: Synthetic oligonucleotide
  Sense strand starting at position 908 of SEQ ID NO: 317514
gguguccuguaguagugau

SEQ ID NO: 496942 - RNA, 19 nt, Artificial Sequence
  Description of Artificial Sequence: Synthetic oligonucleotide
  Antisense Strand to SEQ ID NO: 496941
aucacuacuacaggacacc

SEQ ID NO: 496943 - RNA, 19 nt, Artificial Sequence
  Description of Artificial Sequence: Synthetic oligonucleotide
  Sense strand starting at position 1333 of SEQ ID NO: 317514
cagaaaggguauguuaaau

SEQ ID NO: 496944 - RNA, 19 nt, Artificial Sequence
  Description of Artificial Sequence: Synthetic oligonucleotide
  Antisense Strand to SEQ ID NO: 496943
auuuaacauacccuuucug

SEQ ID NO: 496945 - RNA, 19 nt, Artificial Sequence
  Description of Artificial Sequence: Synthetic oligonucleotide
  Sense strand starting at position 1383 of SEQ ID NO: 317514
gggcaucugccagaaugac

SEQ ID NO: 496946 - RNA, 19 nt, Artificial Sequence
  Description of Artificial Sequence: Synthetic oligonucleotide
  Antisense Strand to SEQ ID NO: 496945
gucauucuggcagaugccc

SEQ ID NO: 496947 - RNA, 19 nt, Artificial Sequence
  Description of Artificial Sequence: Synthetic oligonucleotide
  Sense strand starting at position 1389 of SEQ ID NO: 317514
cugccagaaugacaucaaa

SEQ ID NO: 496948 - RNA, 19 nt, Artificial Sequence
  Description of Artificial Sequence: Synthetic oligonucleotide
  Antisense Strand to SEQ ID NO: 496947
uuugaugucauucuggcag

SEQ ID NO: 496949 - RNA, 19 nt, Artificial Sequence
  Description of Artificial Sequence: Synthetic oligonucleotide
  Sense strand starting at position 1455 of SEQ ID NO: 317514
cuuuacagagcuuguuacu

SEQ ID NO: 496950 - RNA, 19 nt, Artificial Sequence
  Description of Artificial Sequence: Synthetic oligonucleotide
  Antisense Strand to SEQ ID NO: 496949
aguaacaagcucuguaaag

SEQ ID NO: 496951 - RNA, 19 nt, Artificial Sequence
  Description of Artificial Sequence: Synthetic oligonucleotide
  Sense strand starting at position 1458 of SEQ ID NO: 317514
uacagagcuuguuacugua

SEQ ID NO: 496952 - RNA, 19 nt, Artificial Sequence
  Description of Artificial Sequence: Synthetic oligonucleotide
  Antisense Strand to SEQ ID NO: 496951
uacaguaacaagcucugua

SEQ ID NO: 496953 - RNA, 19 nt, Artificial Sequence
  Description of Artificial Sequence: Synthetic oligonucleotide
  Sense strand starting at position 1466 of SEQ ID NO: 317514
uuguuacuguagucauaau

SEQ ID NO: 496954 - RNA, 19 nt, Artificial Sequence
  Description of Artificial Sequence: Synthetic oligonucleotide
  Antisense Strand to SEQ ID NO: 496953
auuaugacuacaguaacaa

SEQ ID NO: 496955 - RNA, 19 nt, Artificial Sequence
  Description of Artificial Sequence: Synthetic oligonucleotide
  Sense strand starting at position 1548 of SEQ ID NO: 317514
auauccaucuaucgagaau

SEQ ID NO: 496956 - RNA, 19 nt, Artificial Sequence
  Description of Artificial Sequence: Synthetic oligonucleotide
  Antisense Strand to SEQ ID NO: 496955
auucucgauagauggauau

SEQ ID NO: 496957 - RNA, 19 nt, Artificial Sequence
  Description of Artificial Sequence: Synthetic oligonucleotide
  Sense strand starting at position 1800 of SEQ ID NO: 317514
ugagcuguaucagcagaaa

SEQ ID NO: 496958 - RNA, 19 nt, Artificial Sequence
  Description of Artificial Sequence: Synthetic oligonucleotide
  Antisense Strand to SEQ ID NO: 496957
uuucugcugauacagcuca

SEQ ID NO: 496959 - RNA, 19 nt, Artificial Sequence
  Description of Artificial Sequence: Synthetic oligonucleotide
  Sense strand starting at position 1803 of SEQ ID NO: 317514
gcuguaucagcagaaagac

SEQ ID NO: 496960 - RNA, 19 nt, Artificial Sequence
  Description of Artificial Sequence: Synthetic oligonucleotide
  Antisense Strand to SEQ ID NO: 496959
gucuuucugcugauacagc

SEQ ID NO: 496961 - RNA, 19 nt, Artificial Sequence
  Description of Artificial Sequence: Synthetic oligonucleotide
  Sense strand starting at position 1839 of SEQ ID NO: 317514
acauccuggucuuaugcaa

SEQ ID NO: 496962 - RNA, 19 nt, Artificial Sequence
  Description of Artificial Sequence: Synthetic oligonucleotide
  Antisense Strand to SEQ ID NO: 496961
uugcauaagaccaggaugu

SEQ ID NO: 496963 - RNA, 19 nt, Artificial Sequence
  Description of Artificial Sequence: Synthetic oligonucleotide
  Sense strand starting at position 1846 of SEQ ID NO: 317514
ggucuuaugcaaugcuucu

SEQ ID NO: 496964 - RNA, 19 nt, Artificial Sequence
  Description of Artificial Sequence: Synthetic oligonucleotide
  Antisense Strand to SEQ ID NO: 496963
agaagcauugcauaagacc

SEQ ID NO: 496965 - RNA, 19 nt, Artificial Sequence
  Description of Artificial Sequence: Synthetic oligonucleotide
  Sense strand starting at position 2089 of SEQ ID NO: 317514
gaccuagaauauguaagua

SEQ ID NO: 496966 - RNA, 19 nt, Artificial Sequence
  Description of Artificial Sequence: Synthetic oligonucleotide
  Antisense Strand to SEQ ID NO: 496965
uacuuacauauucuagguc

SEQ ID NO: 496967 - RNA, 19 nt, Artificial Sequence
  Description of Artificial Sequence: Synthetic oligonucleotide
  Sense strand starting at position 2659 of SEQ ID NO: 317514
gaguacugcuccugcagga

SEQ ID NO: 496968 - RNA, 19 nt, Artificial Sequence
  Description of Artificial Sequence: Synthetic oligonucleotide
  Antisense Strand to SEQ ID NO: 496967
uccugcaggagcaguacuc

SEQ ID NO: 496969 - RNA, 19 nt, Artificial Sequence
  Description of Artificial Sequence: Synthetic oligonucleotide
  Sense strand starting at position 2915 of SEQ ID NO: 317514
cuggcaucacagggaucua

SEQ ID NO: 496970 - RNA, 19 nt, Artificial Sequence
  Description of Artificial Sequence: Synthetic oligonucleotide
  Antisense Strand to SEQ ID NO: 496969
uagaucccugugaugccag

SEQ ID NO: 496971 - RNA, 19 nt, Artificial Sequence
  Description of Artificial Sequence: Synthetic oligonucleotide
  Sense strand starting at position 3363 of SEQ ID NO: 317514
ccuuacaucuggugccaaa

SEQ ID NO: 496972 - RNA, 19 nt, Artificial Sequence
  Description of Artificial Sequence: Synthetic oligonucleotide
  Antisense Strand to SEQ ID NO: 496971
uuuggcaccagauguaagg

SEQ ID NO: 496973 - RNA, 19 nt, Artificial Sequence
  Description of Artificial Sequence: Synthetic oligonucleotide
  Sense strand starting at position 3522 of SEQ ID NO: 317514
cugguaaguuucccuugga

SEQ ID NO: 496974 - RNA, 19 nt, Artificial Sequence
  Description of Artificial Sequence: Synthetic oligonucleotide
  Antisense Strand to SEQ ID NO: 496973
uccaagggaaacuuaccag

SEQ ID NO: 496975 - RNA, 19 nt, Artificial Sequence
  Description of Artificial Sequence: Synthetic oligonucleotide
  Sense strand starting at position 3523 of SEQ ID NO: 317514
ugguaaguuucccuuggag

SEQ ID NO: 496976 - RNA, 19 nt, Artificial Sequence
  Description of Artificial Sequence: Synthetic oligonucleotide
  Antisense Strand to SEQ ID NO: 496975
cuccaagggaaacuuacca

SEQ ID NO: 496977 - RNA, 19 nt, Artificial Sequence
  Description of Artificial Sequence: Synthetic oligonucleotide
  Sense strand starting at position 3884 of SEQ ID NO: 317514
gccauaagugccuugucuu

SEQ ID NO: 496978 - RNA, 19 nt, Artificial Sequence
  Description of Artificial Sequence: Synthetic oligonucleotide
  Antisense Strand to SEQ ID NO: 496977
aagacaaggcacuuauggc

SEQ ID NO: 496979 - RNA, 19 nt, Artificial Sequence
  Description of Artificial Sequence: Synthetic oligonucleotide
  Sense strand starting at position 3885 of SEQ ID NO: 317514
ccauaagugccuugucuuu

SEQ ID NO: 496980 - RNA, 19 nt, Artificial Sequence
  Description of Artificial Sequence: Synthetic oligonucleotide
  Antisense Strand to SEQ ID NO: 496979
aaagacaaggcacuuaugg

SEQ ID NO: 496981 - RNA, 19 nt, Artificial Sequence
  Description of Artificial Sequence: Synthetic oligonucleotide
  Sense strand starting at position 3909 of SEQ ID NO: 317514
acgauaaagccuggucgca

SEQ ID NO: 496982 - RNA, 19 nt, Artificial Sequence
  Description of Artificial Sequence: Synthetic oligonucleotide
  Antisense Strand to SEQ ID NO: 496981
ugcgaccaggcuuuaucgu

SEQ ID NO: 496983 - RNA, 19 nt, Artificial Sequence
  Description of Artificial Sequence: Synthetic oligonucleotide
  Sense strand starting at position 3911 of SEQ ID NO: 317514
gauaaagccuggucgcagu

SEQ ID NO: 496984 - RNA, 19 nt, Artificial Sequence
  Description of Artificial Sequence: Synthetic oligonucleotide
  Antisense Strand to SEQ ID NO: 496983
acugcgaccaggcuuuauc

SEQ ID NO: 496985 - RNA, 19 nt, Artificial Sequence
  Description of Artificial Sequence: Synthetic oligonucleotide
  Sense strand starting at position 3919 of SEQ ID NO: 317514
cuggucgcaguaugaauua

SEQ ID NO: 496986 - RNA, 19 nt, Artificial Sequence
  Description of Artificial Sequence: Synthetic oligonucleotide
  Antisense Strand to SEQ ID NO: 496985
uaauucauacugcgaccag

SEQ ID NO: 496987 - RNA, 19 nt, Artificial Sequence
  Description of Artificial Sequence: Synthetic oligonucleotide
  Sense strand starting at position 548 of SEQ ID NO: 317515
agagauaugugcucuuccu

SEQ ID NO: 496988 - RNA, 19 nt, Artificial Sequence
  Description of Artificial Sequence: Synthetic oligonucleotide
  Antisense Strand to SEQ ID NO: 496987
aggaagagcacauaucucu

SEQ ID NO: 496989 - RNA, 19 nt, Artificial Sequence
  Description of Artificial Sequence: Synthetic oligonucleotide
  Sense strand starting at position 663 of SEQ ID NO: 317515
aggaaauaauugugaaguu

SEQ ID NO: 496990 - RNA, 19 nt, Artificial Sequence
  Description of Artificial Sequence: Synthetic oligonucleotide
  Antisense Strand to SEQ ID NO: 496989
aacuucacaauuauuuccu

SEQ ID NO: 496991 - RNA, 19 nt, Artificial Sequence
  Description of Artificial Sequence: Synthetic oligonucleotide
  Sense strand starting at position 664 of SEQ ID NO: 317515
ggaaauaauugugaaguug

SEQ ID NO: 496992 - RNA, 19 nt, Artificial Sequence
  Description of Artificial Sequence: Synthetic oligonucleotide
  Antisense Strand to SEQ ID NO: 496991
caacuucacaauuauuucc

SEQ ID NO: 496993 - RNA, 19 nt, Artificial Sequence
  Description of Artificial Sequence: Synthetic oligonucleotide
  Sense strand starting at position 672 of SEQ ID NO: 317515
uugugaaguuguuauugaa

SEQ ID NO: 496994 - RNA, 19 nt, Artificial Sequence
  Description of Artificial Sequence: Synthetic oligonucleotide
  Antisense Strand to SEQ ID NO: 496993
uucaauaacaacuucacaa

SEQ ID NO: 496995 - RNA, 19 nt, Artificial Sequence
  Description of Artificial Sequence: Synthetic oligonucleotide
  Sense strand starting at position 675 of SEQ ID NO: 317515
ugaaguuguuauugaagga

SEQ ID NO: 496996 - RNA, 19 nt, Artificial Sequence
  Description of Artificial Sequence: Synthetic oligonucleotide
  Antisense Strand to SEQ ID NO: 496995
uccuucaauaacaacuuca

SEQ ID NO: 496997 - RNA, 19 nt, Artificial Sequence
  Description of Artificial Sequence: Synthetic oligonucleotide
  Sense strand starting at position 679 of SEQ ID NO: 317515
guuguuauugaaggaaugu

SEQ ID NO: 496998 - RNA, 19 nt, Artificial Sequence
  Description of Artificial Sequence: Synthetic oligonucleotide
  Antisense Strand to SEQ ID NO: 496997
acauuccuucaauaacaac

SEQ ID NO: 496999 - RNA, 19 nt, Artificial Sequence
  Description of Artificial Sequence: Synthetic oligonucleotide
  Sense strand starting at position 754 of SEQ ID NO: 317515
uuucucaacugugaaggaa

SEQ ID NO: 497000 - RNA, 19 nt, Artificial Sequence
  Description of Artificial Sequence: Synthetic oligonucleotide
  Antisense Strand to SEQ ID NO: 496999
uuccuucacaguugagaaa

SEQ ID NO: 497001 - RNA, 19 nt, Artificial Sequence
  Description of Artificial Sequence: Synthetic oligonucleotide
  Sense strand starting at position 768 of SEQ ID NO: 317515
aggaauccuucuuauauga

SEQ ID NO: 497002 - RNA, 19 nt, Artificial Sequence
  Description of Artificial Sequence: Synthetic oligonucleotide
  Antisense Strand to SEQ ID NO: 497001
ucauauaagaaggauuccu

SEQ ID NO: 497003 - RNA, 19 nt, Artificial Sequence
  Description of Artificial Sequence: Synthetic oligonucleotide
  Sense strand starting at position 819 of SEQ ID NO: 317515
gagguacucagguacaagu

SEQ ID NO: 497004 - RNA, 19 nt, Artificial Sequence
  Description of Artificial Sequence: Synthetic oligonucleotide
  Antisense Strand to SEQ ID NO: 497003
acuuguaccugaguaccuc

SEQ ID NO: 497005 - RNA, 19 nt, Artificial Sequence
  Description of Artificial Sequence: Synthetic oligonucleotide
  Sense strand starting at position 830 of SEQ ID NO: 317515
guacaaguuccucaauccu

SEQ ID NO: 497006 - RNA, 19 nt, Artificial Sequence
  Description of Artificial Sequence: Synthetic oligonucleotide
  Antisense Strand to SEQ ID NO: 497005
aggauugaggaacuuguac

SEQ ID NO: 497007 - RNA, 19 nt, Artificial Sequence
  Description of Artificial Sequence: Synthetic oligonucleotide
  Sense strand starting at position 906 of SEQ ID NO: 317515
ugaagauguuucuugaagu

SEQ ID NO: 497008 - RNA, 19 nt, Artificial Sequence
  Description of Artificial Sequence: Synthetic oligonucleotide
  Antisense Strand to SEQ ID NO: 497007
acuucaagaaacaucuuca

SEQ ID NO: 497009 - RNA, 19 nt, Artificial Sequence
  Description of Artificial Sequence: Synthetic oligonucleotide
  Sense strand starting at position 907 of SEQ ID NO: 317515
gaagauguuucuugaagua

SEQ ID NO: 497010 - RNA, 19 nt, Artificial Sequence
  Description of Artificial Sequence: Synthetic oligonucleotide
  Antisense Strand to SEQ ID NO: 497009
uacuucaagaaacaucuuc

SEQ ID NO: 497011 - RNA, 19 nt, Artificial Sequence
  Description of Artificial Sequence: Synthetic oligonucleotide
  Sense strand starting at position 919 of SEQ ID NO: 317515
ugaaguaucuauugacuuu

SEQ ID NO: 497012 - RNA, 19 nt, Artificial Sequence
  Description of Artificial Sequence: Synthetic oligonucleotide
  Antisense Strand to SEQ ID NO: 497011
aaagucaauagauacuuca

SEQ ID NO: 497013 - RNA, 19 nt, Artificial Sequence
  Description of Artificial Sequence: Synthetic oligonucleotide
  Sense strand starting at position 964 of SEQ ID NO: 317515
aaugauaugugauggcuua

SEQ ID NO: 497014 - RNA, 19 nt, Artificial Sequence
  Description of Artificial Sequence: Synthetic oligonucleotide
  Antisense Strand to SEQ ID NO: 497013
uaagccaucacauaucauu

SEQ ID NO: 497015 - RNA, 19 nt, Artificial Sequence
  Description of Artificial Sequence: Synthetic oligonucleotide
  Sense strand starting at position 1007 of SEQ ID NO: 317515
gaagguuuaugacucucuu

SEQ ID NO: 497016 - RNA, 19 nt, Artificial Sequence
  Description of Artificial Sequence: Synthetic oligonucleotide
  Antisense Strand to SEQ ID NO: 497015
aagagagucauaaaccuuc

SEQ ID NO: 497017 - RNA, 19 nt, Artificial Sequence
  Description of Artificial Sequence: Synthetic oligonucleotide
  Sense strand starting at position 1023 of SEQ ID NO: 317515
cuugguguccuauagcagu

SEQ ID NO: 497018 - RNA, 19 nt, Artificial Sequence
  Description of Artificial Sequence: Synthetic oligonucleotide
  Antisense Strand to SEQ ID NO: 497017
acugcuauaggacaccaag

SEQ ID NO: 497019 - RNA, 19 nt, Artificial Sequence
  Description of Artificial Sequence: Synthetic oligonucleotide
  Sense strand starting at position 1046 of SEQ ID NO: 317515
gcaccaggguucuaacuga

SEQ ID NO: 497020 - RNA, 19 nt, Artificial Sequence
  Description of Artificial Sequence: Synthetic oligonucleotide
  Antisense Strand to SEQ ID NO: 497019
ucaguuagaacccuggugc

SEQ ID NO: 497021 - RNA, 19 nt, Artificial Sequence
  Description of Artificial Sequence: Synthetic oligonucleotide
  Sense strand starting at position 1269 of SEQ ID NO: 317515
agaucauaugcuugaaacc

SEQ ID NO: 497022 - RNA, 19 nt, Artificial Sequence
  Description of Artificial Sequence: Synthetic oligonucleotide
  Antisense Strand to SEQ ID NO: 497021
gguuucaagcauaugaucu

SEQ ID NO: 497023 - RNA, 19 nt, Artificial Sequence
  Description of Artificial Sequence: Synthetic oligonucleotide
  Sense strand starting at position 1417 of SEQ ID NO: 317515
cuguguagccaacagagaa

SEQ ID NO: 497024 - RNA, 19 nt, Artificial Sequence
  Description of Artificial Sequence: Synthetic oligonucleotide
  Antisense Strand to SEQ ID NO: 497023
uucucuguuggcuacacag

SEQ ID NO: 497025 - RNA, 19 nt, Artificial Sequence
  Description of Artificial Sequence: Synthetic oligonucleotide
  Sense strand starting at position 1448 of SEQ ID NO: 317515
cagaaaggguauguuaagu

SEQ ID NO: 497026 - RNA, 19 nt, Artificial Sequence
  Description of Artificial Sequence: Synthetic oligonucleotide
  Antisense Strand to SEQ ID NO: 497025
acuuaacauacccuuucug

SEQ ID NO: 497027 - RNA, 19 nt, Artificial Sequence
  Description of Artificial Sequence: Synthetic oligonucleotide
  Sense strand starting at position 1454 of SEQ ID NO: 317515
ggguauguuaaguagcuca

SEQ ID NO: 497028 - RNA, 19 nt, Artificial Sequence
  Description of Artificial Sequence: Synthetic oligonucleotide
  Antisense Strand to SEQ ID NO: 497027
ugagcuacuuaacauaccc

SEQ ID NO: 497029 - RNA, 19 nt, Artificial Sequence
  Description of Artificial Sequence: Synthetic oligonucleotide
  Sense strand starting at position 1607 of SEQ ID NO: 317515
acacaauucuuguaguugu

SEQ ID NO: 497030 - RNA, 19 nt, Artificial Sequence
  Description of Artificial Sequence: Synthetic oligonucleotide
  Antisense Strand to SEQ ID NO: 497029
acaacuacaagaauugugu

SEQ ID NO: 497031 - RNA, 19 nt, Artificial Sequence
  Description of Artificial Sequence: Synthetic oligonucleotide
  Sense strand starting at position 1610 of SEQ ID NO: 317515
caauucuuguaguugugaa

SEQ ID NO: 497032 - RNA, 19 nt, Artificial Sequence
  Description of Artificial Sequence: Synthetic oligonucleotide
  Antisense Strand to SEQ ID NO: 497031
uucacaacuacaagaauug

SEQ ID NO: 497033 - RNA, 19 nt, Artificial Sequence
  Description of Artificial Sequence: Synthetic oligonucleotide
  Sense strand starting at position 1663 of SEQ ID NO: 317515
auguccaucuaucgaacau

SEQ ID NO: 497034 - RNA, 19 nt, Artificial Sequence
  Description of Artificial Sequence: Synthetic oligonucleotide
  Antisense Strand to SEQ ID NO: 497033
auguucgauagauggacau

SEQ ID NO: 497035 - RNA, 19 nt, Artificial Sequence
  Description of Artificial Sequence: Synthetic oligonucleotide
  Sense strand starting at position 1915 of SEQ ID NO: 317515
ugagcugcaucagcagaaa

SEQ ID NO: 497036 - RNA, 19 nt, Artificial Sequence
  Description of Artificial Sequence: Synthetic oligonucleotide
  Antisense Strand to SEQ ID NO: 497035
uuucugcugaugcagcuca

SEQ ID NO: 497037 - RNA, 19 nt, Artificial Sequence
  Description of Artificial Sequence: Synthetic oligonucleotide
  Sense strand starting at position 1961 of SEQ ID NO: 317515
ggucuuaugcagugcuucu

SEQ ID NO: 497038 - RNA, 19 nt, Artificial Sequence
  Description of Artificial Sequence: Synthetic oligonucleotide
  Antisense Strand to SEQ ID NO: 497037
agaagcacugcauaagacc

SEQ ID NO: 497039 - RNA, 19 nt, Artificial Sequence
  Description of Artificial Sequence: Synthetic oligonucleotide
  Sense strand starting at position 2144 of SEQ ID NO: 317515
gaccuagaauacguaagua

SEQ ID NO: 497040 - RNA, 19 nt, Artificial Sequence
  Description of Artificial Sequence: Synthetic oligonucleotide
  Antisense Strand to SEQ ID NO: 497039
uacuuacguauucuagguc

SEQ ID NO: 497041 - RNA, 19 nt, Artificial Sequence
  Description of Artificial Sequence: Synthetic oligonucleotide
  Sense strand starting at position 2973 of SEQ ID NO: 317515
gcaccacagugauccuuua

SEQ ID NO: 497042 - RNA, 19 nt, Artificial Sequence
  Description of Artificial Sequence: Synthetic oligonucleotide
  Antisense Strand to SEQ ID NO: 497041
uaaaggaucacuguggugc

SEQ ID NO: 497043 - RNA, 19 nt, Artificial Sequence
  Description of Artificial Sequence: Synthetic oligonucleotide
  Sense strand starting at position 3227 of SEQ ID NO: 317515
acguuagauugggacacuu

SEQ ID NO: 497044 - RNA, 19 nt, Artificial Sequence
  Description of Artificial Sequence: Synthetic oligonucleotide
  Antisense Strand to SEQ ID NO: 497043
aagugucccaaucuaacgu

SEQ ID NO: 497045 - RNA, 19 nt, Artificial Sequence
  Description of Artificial Sequence: Synthetic oligonucleotide
  Sense strand starting at position 3235 of SEQ ID NO: 317515
uugggacacuuacucuuua

SEQ ID NO: 497046 - RNA, 19 nt, Artificial Sequence
  Description of Artificial Sequence: Synthetic oligonucleotide
  Antisense Strand to SEQ ID NO: 497045
uaaagaguaagugucccaa

SEQ ID NO: 497047 - RNA, 19 nt, Artificial Sequence
  Description of Artificial Sequence: Synthetic oligonucleotide
  Sense strand starting at position 3377 of SEQ ID NO: 317515
uuggcaugcucucagggau

SEQ ID NO: 497048 - RNA, 19 nt, Artificial Sequence
  Description of Artificial Sequence: Synthetic oligonucleotide
  Antisense Strand to SEQ ID NO: 497047
aucccugagagcaugccaa

SEQ ID NO: 497049 - RNA, 19 nt, Artificial Sequence
  Description of Artificial Sequence: Synthetic oligonucleotide
  Sense strand starting at position 3380 of SEQ ID NO: 317515
gcaugcucucagggaucaa

SEQ ID NO: 497050 - RNA, 19 nt, Artificial Sequence
  Description of Artificial Sequence: Synthetic oligonucleotide
  Antisense Strand to SEQ ID NO: 497049
uugaucccugagagcaugc

SEQ ID NO: 497051 - RNA, 19 nt, Artificial Sequence
  Description of Artificial Sequence: Synthetic oligonucleotide
  Sense strand starting at position 3412 of SEQ ID NO: 317515
ccuuauaucuggugccaaa

SEQ ID NO: 497052 - RNA, 19 nt, Artificial Sequence
  Description of Artificial Sequence: Synthetic oligonucleotide
  Antisense Strand to SEQ ID NO: 497051
uuuggcaccagauauaagg

SEQ ID NO: 497053 - RNA, 19 nt, Artificial Sequence
  Description of Artificial Sequence: Synthetic oligonucleotide
  Sense strand starting at position 3761 of SEQ ID NO: 317515
augcacugcuggucagaga

SEQ ID NO: 497054 - RNA, 19 nt, Artificial Sequence
  Description of Artificial Sequence: Synthetic oligonucleotide
  Antisense Strand to SEQ ID NO: 497053
ucucugaccagcagugcau

SEQ ID NO: 497055 - RNA, 19 nt, Artificial Sequence
  Description of Artificial Sequence: Synthetic oligonucleotide
  Sense strand starting at position 3802 of SEQ ID NO: 317515
uuuacaguguucuucugua

SEQ ID NO: 497056 - RNA, 19 nt, Artificial Sequence
  Description of Artificial Sequence: Synthetic oligonucleotide
  Antisense Strand to SEQ ID NO: 497055
uacagaagaacacuguaaa

SEQ ID NO: 497057 - RNA, 19 nt, Artificial Sequence
  Description of Artificial Sequence: Synthetic oligonucleotide
  Sense strand starting at position 3807 of SEQ ID NO: 317515
aguguucuucuguacaaug

SEQ ID NO: 497058 - RNA, 19 nt, Artificial Sequence
  Description of Artificial Sequence: Synthetic oligonucleotide
  Antisense Strand to SEQ ID NO: 497057
cauuguacagaagaacacu

SEQ ID NO: 497059 - RNA, 19 nt, Artificial Sequence
  Description of Artificial Sequence: Synthetic oligonucleotide
  Sense strand starting at position 3818 of SEQ ID NO: 317515
guacaaugucuggaaucuc

SEQ ID NO: 497060 - RNA, 19 nt, Artificial Sequence
  Description of Artificial Sequence: Synthetic oligonucleotide
  Antisense Strand to SEQ ID NO: 497059
gagauuccagacauuguac

SEQ ID NO: 497061 - RNA, 19 nt, Artificial Sequence
  Description of Artificial Sequence: Synthetic oligonucleotide
  Sense strand starting at position 56 of SEQ ID NO: 317516
guuagaauuauguaggcaa

SEQ ID NO: 497062 - RNA, 19 nt, Artificial Sequence
  Description of Artificial Sequence: Synthetic oligonucleotide
  Antisense Strand to SEQ ID NO: 497061
uugccuacauaauucuaac

SEQ ID NO: 497063 - RNA, 19 nt, Artificial Sequence
  Description of Artificial Sequence: Synthetic oligonucleotide
  Sense strand starting at position 58 of SEQ ID NO: 317516
uagaauuauguaggcaaag

SEQ ID NO: 497064 - RNA, 19 nt, Artificial Sequence
  Description of Artificial Sequence: Synthetic oligonucleotide
  Antisense Strand to SEQ ID NO: 497063
cuuugccuacauaauucua

SEQ ID NO: 497065 - RNA, 19 nt, Artificial Sequence
  Description of Artificial Sequence: Synthetic oligonucleotide
  Sense strand starting at position 59 of SEQ ID NO: 317516
agaauuauguaggcaaaga

SEQ ID NO: 497066 - RNA, 19 nt, Artificial Sequence
  Description of Artificial Sequence: Synthetic oligonucleotide
  Antisense Strand to SEQ ID NO: 497065
ucuuugccuacauaauucu

SEQ ID NO: 497067 - RNA, 19 nt, Artificial Sequence
  Description of Artificial Sequence: Synthetic oligonucleotide
  Sense strand starting at position 192 of SEQ ID NO: 317516
gugggagaauuaugaaguu

SEQ ID NO: 497068 - RNA, 19 nt, Artificial Sequence
  Description of Artificial Sequence: Synthetic oligonucleotide
  Antisense Strand to SEQ ID NO: 497067
aacuucauaauucucccac

SEQ ID NO: 497069 - RNA, 19 nt, Artificial Sequence
  Description of Artificial Sequence: Synthetic oligonucleotide
  Sense strand starting at position 201 of SEQ ID NO: 317516
uuaugaaguuaagcgacau

SEQ ID NO: 497070 - RNA, 19 nt, Artificial Sequence
  Description of Artificial Sequence: Synthetic oligonucleotide
  Antisense Strand to SEQ ID NO: 497069
augucgcuuaacuucauaa

SEQ ID NO: 497071 - RNA, 19 nt, Artificial Sequence
  Description of Artificial Sequence: Synthetic oligonucleotide
  Sense strand starting at position 205 of SEQ ID NO: 317516
gaaguuaagcgacaucucu

SEQ ID NO: 497072 - RNA, 19 nt, Artificial Sequence
  Description of Artificial Sequence: Synthetic oligonucleotide
  Antisense Strand to SEQ ID NO: 497071
agagaugucgcuuaacuuc

SEQ ID NO: 497073 - RNA, 19 nt, Artificial Sequence
  Description of Artificial Sequence: Synthetic oligonucleotide
  Sense strand starting at position 211 of SEQ ID NO: 317516
aagcgacaucucuaauguc

SEQ ID NO: 497074 - RNA, 19 nt, Artificial Sequence
  Description of Artificial Sequence: Synthetic oligonucleotide
  Antisense Strand to SEQ ID NO: 497073
gacauuagagaugucgcuu

SEQ ID NO: 497075 - RNA, 19 nt, Artificial Sequence
  Description of Artificial Sequence: Synthetic oligonucleotide
  Sense strand starting at position 214 of SEQ ID NO: 317516
cgacaucucuaaugucaag

SEQ ID NO: 497076 - RNA, 19 nt, Artificial Sequence
  Description of Artificial Sequence: Synthetic oligonucleotide
  Antisense Strand to SEQ ID NO: 497075
cuugacauuagagaugucg

SEQ ID NO: 497077 - RNA, 19 nt, Artificial Sequence
  Description of Artificial Sequence: Synthetic oligonucleotide
  Sense strand starting at position 302 of SEQ ID NO: 317516
ucaauaguugcauauagau

SEQ ID NO: 497078 - RNA, 19 nt, Artificial Sequence
  Description of Artificial Sequence: Synthetic oligonucleotide
  Antisense Strand to SEQ ID NO: 497077
aucuauaugcaacuauuga

SEQ ID NO: 497079 - RNA, 19 nt, Artificial Sequence
  Description of Artificial Sequence: Synthetic oligonucleotide
  Sense strand starting at position 380 of SEQ ID NO: 317516
uuucuaacaguccaguuua

SEQ ID NO: 497080 - RNA, 19 nt, Artificial Sequence
  Description of Artificial Sequence: Synthetic oligonucleotide
  Antisense Strand to SEQ ID NO: 497079
uaaacuggacuguuagaaa

SEQ ID NO: 497081 - RNA, 19 nt, Artificial Sequence
  Description of Artificial Sequence: Synthetic oligonucleotide
  Sense strand starting at position 436 of SEQ ID NO: 317516
ucaagugaacucggacuau

SEQ ID NO: 497082 - RNA, 19 nt, Artificial Sequence
  Description of Artificial Sequence: Synthetic oligonucleotide
  Antisense Strand to SEQ ID NO: 497081
auaguccgaguucacuuga

SEQ ID NO: 497083 - RNA, 19 nt, Artificial Sequence
  Description of Artificial Sequence: Synthetic oligonucleotide
  Sense strand starting at position 679 of SEQ ID NO: 317516
acaagauaauuggacuuua

SEQ ID NO: 497084 - RNA, 19 nt, Artificial Sequence
  Description of Artificial Sequence: Synthetic oligonucleotide
  Antisense Strand to SEQ ID NO: 497083
uaaaguccaauuaucuugu

SEQ ID NO: 497085 - RNA, 19 nt, Artificial Sequence
  Description of Artificial Sequence: Synthetic oligonucleotide
  Sense strand starting at position 772 of SEQ ID NO: 317516
gcaucugagauguggacau

SEQ ID NO: 497086 - RNA, 19 nt, Artificial Sequence
  Description of Artificial Sequence: Synthetic oligonucleotide
  Antisense Strand to SEQ ID NO: 497085
auguccacaucucagaugc

SEQ ID NO: 497087 - RNA, 19 nt, Artificial Sequence
  Description of Artificial Sequence: Synthetic oligonucleotide
  Sense strand starting at position 809 of SEQ ID NO: 317516
aggaaaccuucuggaaaca

SEQ ID NO: 497088 - RNA, 19 nt, Artificial Sequence
  Description of Artificial Sequence: Synthetic oligonucleotide
  Antisense Strand to SEQ ID NO: 497087
uguuuccagaagguuuccu

SEQ ID NO: 497089 - RNA, 19 nt, Artificial Sequence
  Description of Artificial Sequence: Synthetic oligonucleotide
  Sense strand starting at position 942 of SEQ ID NO: 317516
ucaguaagauguuacuuga

SEQ ID NO: 497090 - RNA, 19 nt, Artificial Sequence
  Description of Artificial Sequence: Synthetic oligonucleotide
  Antisense Strand to SEQ ID NO: 497089
ucaaguaacaucuuacuga

SEQ ID NO: 497091 - RNA, 19 nt, Artificial Sequence
  Description of Artificial Sequence: Synthetic oligonucleotide
  Sense strand starting at position 2115 of SEQ ID NO: 317516
ggagcauccugaguacaug

SEQ ID NO: 497092 - RNA, 19 nt, Artificial Sequence
  Description of Artificial Sequence: Synthetic oligonucleotide
  Antisense Strand to SEQ ID NO: 497091
cauguacucaggaugcucc

SEQ ID NO: 497093 - RNA, 19 nt, Artificial Sequence
  Description of Artificial Sequence: Synthetic oligonucleotide
  Sense strand starting at position 2143 of SEQ ID NO: 317516
gagacaaaguuugauuacu

SEQ ID NO: 497094 - RNA, 19 nt, Artificial Sequence
  Description of Artificial Sequence: Synthetic oligonucleotide
  Antisense Strand to SEQ ID NO: 497093
aguaaucaaacuuugucuc

SEQ ID NO: 497095 - RNA, 19 nt, Artificial Sequence
  Description of Artificial Sequence: Synthetic oligonucleotide
  Sense strand starting at position 2277 of SEQ ID NO: 317516
caagaauaguggcaaguga

SEQ ID NO: 497096 - RNA, 19 nt, Artificial Sequence
  Description of Artificial Sequence: Synthetic oligonucleotide
  Antisense Strand to SEQ ID NO: 497095
ucacuugccacuauucuug

SEQ ID NO: 497097 - RNA, 19 nt, Artificial Sequence
  Description of Artificial Sequence: Synthetic oligonucleotide
  Sense strand starting at position 2329 of SEQ ID NO: 317516
agaugaagugaucguacaa

SEQ ID NO: 497098 - RNA, 19 nt, Artificial Sequence
  Description of Artificial Sequence: Synthetic oligonucleotide
  Antisense Strand to SEQ ID NO: 497097
uuguacgaucacuucaucu

SEQ ID NO: 497099 - RNA, 19 nt, Artificial Sequence
  Description of Artificial Sequence: Synthetic oligonucleotide
  Sense strand starting at position 2336 of SEQ ID NO: 317516
gugaucguacaaugcaaau

SEQ ID NO: 497100 - RNA, 19 nt, Artificial Sequence
  Description of Artificial Sequence: Synthetic oligonucleotide
  Antisense Strand to SEQ ID NO: 497099
auuugcauuguacgaucac

SEQ ID NO: 497101 - RNA, 19 nt, Artificial Sequence
  Description of Artificial Sequence: Synthetic oligonucleotide
  Sense strand starting at position 2748 of SEQ ID NO: 317516
gccaaauaguuaucagaug

SEQ ID NO: 497102 - RNA, 19 nt, Artificial Sequence
  Description of Artificial Sequence: Synthetic oligonucleotide
  Antisense Strand to SEQ ID NO: 497101
caucugauaacuauuuggc

SEQ ID NO: 497103 - RNA, 19 nt, Artificial Sequence
  Description of Artificial Sequence: Synthetic oligonucleotide
  Sense strand starting at position 2756 of SEQ ID NO: 317516
guuaucagaugcuauuuau

SEQ ID NO: 497104 - RNA, 19 nt, Artificial Sequence
  Description of Artificial Sequence: Synthetic oligonucleotide
  Antisense Strand to SEQ ID NO: 497103
auaaauagcaucugauaac

SEQ ID NO: 497105 - RNA, 19 nt, Artificial Sequence
  Description of Artificial Sequence: Synthetic oligonucleotide
  Sense strand starting at position 2796 of SEQ ID NO: 317516
uuaauaguugauggauacu

SEQ ID NO: 497106 - RNA, 19 nt, Artificial Sequence
  Description of Artificial Sequence: Synthetic oligonucleotide
  Antisense Strand to SEQ ID NO: 497105
aguauccaucaacuauuaa

SEQ ID NO: 497107 - RNA, 19 nt, Artificial Sequence
  Description of Artificial Sequence: Synthetic oligonucleotide
  Sense strand starting at position 2802 of SEQ ID NO: 317516
guugauggauacugauuua

SEQ ID NO: 497108 - RNA, 19 nt, Artificial Sequence
  Description of Artificial Sequence: Synthetic oligonucleotide
  Antisense Strand to SEQ ID NO: 497107
uaaaucaguauccaucaac

SEQ ID NO: 497109 - RNA, 19 nt, Artificial Sequence
  Description of Artificial Sequence: Synthetic oligonucleotide
  Sense strand starting at position 2832 of SEQ ID NO: 317516
ggucauuaugaauagcauu

SEQ ID NO: 497110 - RNA, 19 nt, Artificial Sequence
  Description of Artificial Sequence: Synthetic oligonucleotide
  Antisense Strand to SEQ ID NO: 497109
aaugcuauucauaaugacc

SEQ ID NO: 497111 - RNA, 19 nt, Artificial Sequence
  Description of Artificial Sequence: Synthetic oligonucleotide
  Sense strand starting at position 2840 of SEQ ID NO: 317516
ugaauagcauuguuuaaca

SEQ ID NO: 497112 - RNA, 19 nt, Artificial Sequence
  Description of Artificial Sequence: Synthetic oligonucleotide
  Antisense Strand to SEQ ID NO: 497111
uguuaaacaaugcuauuca

SEQ ID NO: 497113 - RNA, 19 nt, Artificial Sequence
  Description of Artificial Sequence: Synthetic oligonucleotide
  Sense strand starting at position 2845 of SEQ ID NO: 317516
agcauuguuuaacauugau

SEQ ID NO: 497114 - RNA, 19 nt, Artificial Sequence
  Description of Artificial Sequence: Synthetic oligonucleotide
  Antisense Strand to SEQ ID NO: 497113
aucaauguuaaacaaugcu

SEQ ID NO: 497115 - RNA, 19 nt, Artificial Sequence
  Description of Artificial Sequence: Synthetic oligonucleotide
  Sense strand starting at position 2851 of SEQ ID NO: 317516
guuuaacauugaugugcau

SEQ ID NO: 497116 - RNA, 19 nt, Artificial Sequence
  Description of Artificial Sequence: Synthetic oligonucleotide
  Antisense Strand to SEQ ID NO: 497115
augcacaucaauguuaaac

SEQ ID NO: 497117 - RNA, 19 nt, Artificial Sequence
  Description of Artificial Sequence: Synthetic oligonucleotide
  Sense strand starting at position 2854 of SEQ ID NO: 317516
uaacauugaugugcaugau

SEQ ID NO: 497118 - RNA, 19 nt, Artificial Sequence
  Description of Artificial Sequence: Synthetic oligonucleotide
  Antisense Strand to SEQ ID NO: 497117
aucaugcacaucaauguua

SEQ ID NO: 497119 - RNA, 19 nt, Artificial Sequence
  Description of Artificial Sequence: Synthetic oligonucleotide
  Sense strand starting at position 2855 of SEQ ID NO: 317516
aacauugaugugcaugauu

SEQ ID NO: 497120 - RNA, 19 nt, Artificial Sequence
  Description of Artificial Sequence: Synthetic oligonucleotide
  Antisense Strand to SEQ ID NO: 497119
aaucaugcacaucaauguu

SEQ ID NO: 497121 - RNA, 19 nt, Artificial Sequence
  Description of Artificial Sequence: Synthetic oligonucleotide
  Sense strand starting at position 2864 of SEQ ID NO: 317516
gugcaugauuucuguggac

SEQ ID NO: 497122 - RNA, 19 nt, Artificial Sequence
  Description of Artificial Sequence: Synthetic oligonucleotide
  Antisense Strand to SEQ ID NO: 497121
guccacagaaaucaugcac

SEQ ID NO: 497123 - RNA, 19 nt, Artificial Sequence
  Description of Artificial Sequence: Synthetic oligonucleotide
  Sense strand starting at position 2930 of SEQ ID NO: 317516
uuaugugguaaauguaagu

SEQ ID NO: 497124 - RNA, 19 nt, Artificial Sequence
  Description of Artificial Sequence: Synthetic oligonucleotide
  Antisense Strand to SEQ ID NO: 497123
acuuacauuuaccacauaa

SEQ ID NO: 497125 - RNA, 19 nt, Artificial Sequence
  Description of Artificial Sequence: Synthetic oligonucleotide
  Sense strand starting at position 2935 of SEQ ID NO: 317516
ugguaaauguaaguguaau

SEQ ID NO: 497126 - RNA, 19 nt, Artificial Sequence
  Description of Artificial Sequence: Synthetic oligonucleotide
  Antisense Strand to SEQ ID NO: 497125
auuacacuuacauuuacca

SEQ ID NO: 497127 - RNA, 19 nt, Artificial Sequence
  Description of Artificial Sequence: Synthetic oligonucleotide
  Sense strand starting at position 2936 of SEQ ID NO: 317516
gguaaauguaaguguaauc

SEQ ID NO: 497128 - RNA, 19 nt, Artificial Sequence
  Description of Artificial Sequence: Synthetic oligonucleotide
  Antisense Strand to SEQ ID NO: 497127
gauuacacuuacauuuacc

SEQ ID NO: 497129 - RNA, 19 nt, Artificial Sequence
  Description of Artificial Sequence: Synthetic oligonucleotide
  Sense strand starting at position 3282 of SEQ ID NO: 317516
aauguauauugguacuaag

SEQ ID NO: 497130 - RNA, 19 nt, Artificial Sequence
  Description of Artificial Sequence: Synthetic oligonucleotide
  Antisense Strand to SEQ ID NO: 497129
cuuaguaccaauauacauu

SEQ ID NO: 497131 - RNA, 19 nt, Artificial Sequence
  Description of Artificial Sequence: Synthetic oligonucleotide
  Sense strand starting at position 3285 of SEQ ID NO: 317516
guauauugguacuaaguuc

SEQ ID NO: 497132 - RNA, 19 nt, Artificial Sequence
  Description of Artificial Sequence: Synthetic oligonucleotide
  Antisense Strand to SEQ ID NO: 497131
gaacuuaguaccaauauac

SEQ ID NO: 497133 - RNA, 19 nt, Artificial Sequence
  Description of Artificial Sequence: Synthetic oligonucleotide
  Sense strand starting at position 3292 of SEQ ID NO: 317516
gguacuaaguucugauaug

SEQ ID NO: 497134 - RNA, 19 nt, Artificial Sequence
  Description of Artificial Sequence: Synthetic oligonucleotide
  Antisense Strand to SEQ ID NO: 497133
cauaucagaacuuaguacc

SEQ ID NO: 497135 - RNA, 19 nt, Artificial Sequence
  Description of Artificial Sequence: Synthetic oligonucleotide
  Sense strand starting at position 3442 of SEQ ID NO: 317516
gcucacuacugagaacuua

SEQ ID NO: 497136 - RNA, 19 nt, Artificial Sequence
  Description of Artificial Sequence: Synthetic oligonucleotide
  Antisense Strand to SEQ ID NO: 497135
uaaguucucaguagugagc

SEQ ID NO: 497137 - RNA, 19 nt, Artificial Sequence
  Description of Artificial Sequence: Synthetic oligonucleotide
  Sense strand starting at position 3473 of SEQ ID NO: 317516
ugauauaaauucuggaauc

SEQ ID NO: 497138 - RNA, 19 nt, Artificial Sequence
  Description of Artificial Sequence: Synthetic oligonucleotide
  Antisense Strand to SEQ ID NO: 497137
gauuccagaauuuauauca

SEQ ID NO: 497139 - RNA, 19 nt, Artificial Sequence
  Description of Artificial Sequence: Synthetic oligonucleotide
  Sense strand starting at position 3659 of SEQ ID NO: 317516
ucaaguuccuucugaguaa

SEQ ID NO: 497140 - RNA, 19 nt, Artificial Sequence
  Description of Artificial Sequence: Synthetic oligonucleotide
  Antisense Strand to SEQ ID NO: 497139
uuacucagaaggaacuuga

SEQ ID NO: 497141 - RNA, 19 nt, Artificial Sequence
  Description of Artificial Sequence: Synthetic oligonucleotide
  Sense strand starting at position 3 of SEQ ID NO: 317517
guuagaauaaugugggcaa

SEQ ID NO: 497142 - RNA, 19 nt, Artificial Sequence
  Description of Artificial Sequence: Synthetic oligonucleotide
  Antisense Strand to SEQ ID NO: 497141
uugcccacauuauucuaac

SEQ ID NO: 497143 - RNA, 19 nt, Artificial Sequence
  Description of Artificial Sequence: Synthetic oligonucleotide
  Sense strand starting at position 172 of SEQ ID NO: 317517
augucacaucaguauauuc

SEQ ID NO: 497144 - RNA, 19 nt, Artificial Sequence
  Description of Artificial Sequence: Synthetic oligonucleotide
  Antisense Strand to SEQ ID NO: 497143
gaauauacugaugugacau

SEQ ID NO: 497145 - RNA, 19 nt, Artificial Sequence
  Description of Artificial Sequence: Synthetic oligonucleotide
  Sense strand starting at position 246 of SEQ ID NO: 317517
ucgauaguagcagauauac

SEQ ID NO: 497146 - RNA, 19 nt, Artificial Sequence
  Description of Artificial Sequence: Synthetic oligonucleotide
  Antisense Strand to SEQ ID NO: 497145
guauaucugcuacuaucga

SEQ ID NO: 497147 - RNA, 19 nt, Artificial Sequence
  Description of Artificial Sequence: Synthetic oligonucleotide
  Sense strand starting at position 248 of SEQ ID NO: 317517
gauaguagcagauauacgu

SEQ ID NO: 497148 - RNA, 19 nt, Artificial Sequence
  Description of Artificial Sequence: Synthetic oligonucleotide
  Antisense Strand to SEQ ID NO: 497147
acguauaucugcuacuauc

SEQ ID NO: 497149 - RNA, 19 nt, Artificial Sequence
  Description of Artificial Sequence: Synthetic oligonucleotide
  Sense strand starting at position 281 of SEQ ID NO: 317517
gagcuccgugaucaauuaa

SEQ ID NO: 497150 - RNA, 19 nt, Artificial Sequence
  Description of Artificial Sequence: Synthetic oligonucleotide
  Antisense Strand to SEQ ID NO: 497149
uuaauugaucacggagcuc

SEQ ID NO: 497151 - RNA, 19 nt, Artificial Sequence
  Description of Artificial Sequence: Synthetic oligonucleotide
  Sense strand starting at position 383 of SEQ ID NO: 317517
agguuaacuguugauuauu

SEQ ID NO: 497152 - RNA, 19 nt, Artificial Sequence
  Description of Artificial Sequence: Synthetic oligonucleotide
  Antisense Strand to SEQ ID NO: 497151
aauaaucaacaguuaaccu

SEQ ID NO: 497153 - RNA, 19 nt, Artificial Sequence
  Description of Artificial Sequence: Synthetic oligonucleotide
  Sense strand starting at position 402 of SEQ ID NO: 317517
uugaaaugauggcugaaau

SEQ ID NO: 497154 - RNA, 19 nt, Artificial Sequence
  Description of Artificial Sequence: Synthetic oligonucleotide
  Antisense Strand to SEQ ID NO: 497153
auuucagccaucauuucaa

SEQ ID NO: 497155 - RNA, 19 nt, Artificial Sequence
  Description of Artificial Sequence: Synthetic oligonucleotide
  Sense strand starting at position 403 of SEQ ID NO: 317517
ugaaaugauggcugaaauc

SEQ ID NO: 497156 - RNA, 19 nt, Artificial Sequence
  Description of Artificial Sequence: Synthetic oligonucleotide
  Antisense Strand to SEQ ID NO: 497155
gauuucagccaucauuuca

SEQ ID NO: 497157 - RNA, 19 nt, Artificial Sequence
  Description of Artificial Sequence: Synthetic oligonucleotide
  Sense strand starting at position 629 of SEQ ID NO: 317517
acaagaugauuagccuuaa

SEQ ID NO: 497158 - RNA, 19 nt, Artificial Sequence
  Description of Artificial Sequence: Synthetic oligonucleotide
  Antisense Strand to SEQ ID NO: 497157
uuaaggcuaaucaucuugu

SEQ ID NO: 497159 - RNA, 19 nt, Artificial Sequence
  Description of Artificial Sequence: Synthetic oligonucleotide
  Sense strand starting at position 767 of SEQ ID NO: 317517
cuaguaacauggguacaua

SEQ ID NO: 497160 - RNA, 19 nt, Artificial Sequence
  Description of Artificial Sequence: Synthetic oligonucleotide
  Antisense Strand to SEQ ID NO: 497159
uauguacccauguuacuag

SEQ ID NO: 497161 - RNA, 19 nt, Artificial Sequence
  Description of Artificial Sequence: Synthetic oligonucleotide
  Sense strand starting at position 901 of SEQ ID NO: 317517
gauguuucugaauaagucu

SEQ ID NO: 497162 - RNA, 19 nt, Artificial Sequence
  Description of Artificial Sequence: Synthetic oligonucleotide
  Antisense Strand to SEQ ID NO: 497161
agacuuauucagaaacauc

SEQ ID NO: 497163 - RNA, 19 nt, Artificial Sequence
  Description of Artificial Sequence: Synthetic oligonucleotide
  Sense strand starting at position 907 of SEQ ID NO: 317517
ucugaauaagucugacuuu

SEQ ID NO: 497164 - RNA, 19 nt, Artificial Sequence
  Description of Artificial Sequence: Synthetic oligonucleotide
  Antisense Strand to SEQ ID NO: 497163
aaagucagacuuauucaga

SEQ ID NO: 497165 - RNA, 19 nt, Artificial Sequence
  Description of Artificial Sequence: Synthetic oligonucleotide
  Sense strand starting at position 954 of SEQ ID NO: 317517
acagauaugugauugcuua

SEQ ID NO: 497166 - RNA, 19 nt, Artificial Sequence
  Description of Artificial Sequence: Synthetic oligonucleotide
  Antisense Strand to SEQ ID NO: 497165
uaagcaaucacauaucugu

SEQ ID NO: 497167 - RNA, 19 nt, Artificial Sequence
  Description of Artificial Sequence: Synthetic oligonucleotide
  Sense strand starting at position 955 of SEQ ID NO: 317517
cagauaugugauugcuuaa

SEQ ID NO: 497168 - RNA, 19 nt, Artificial Sequence
  Description of Artificial Sequence: Synthetic oligonucleotide
  Antisense Strand to SEQ ID NO: 497167
uuaagcaaucacauaucug

SEQ ID NO: 497169 - RNA, 19 nt, Artificial Sequence
  Description of Artificial Sequence: Synthetic oligonucleotide
  Sense strand starting at position 958 of SEQ ID NO: 317517
auaugugauugcuuaaaga

SEQ ID NO: 497170 - RNA, 19 nt, Artificial Sequence
  Description of Artificial Sequence: Synthetic oligonucleotide
  Antisense Strand to SEQ ID NO: 497169
ucuuuaagcaaucacauau

SEQ ID NO: 497171 - RNA, 19 nt, Artificial Sequence
  Description of Artificial Sequence: Synthetic oligonucleotide
  Sense strand starting at position 973 of SEQ ID NO: 317517
aagaaaucuuaggugcacu

SEQ ID NO: 497172 - RNA, 19 nt, Artificial Sequence
  Description of Artificial Sequence: Synthetic oligonucleotide
  Antisense Strand to SEQ ID NO: 497171
agugcaccuaagauuucuu

SEQ ID NO: 497173 - RNA, 19 nt, Artificial Sequence
  Description of Artificial Sequence: Synthetic oligonucleotide
  Sense strand starting at position 1004 of SEQ ID NO: 317517
uaugacuuccuggagucuu

SEQ ID NO: 497174 - RNA, 19 nt, Artificial Sequence
  Description of Artificial Sequence: Synthetic oligonucleotide
  Antisense Strand to SEQ ID NO: 497173
aagacuccaggaagucaua

SEQ ID NO: 497175 - RNA, 19 nt, Artificial Sequence
  Description of Artificial Sequence: Synthetic oligonucleotide
  Sense strand starting at position 1014 of SEQ ID NO: 317517
uggagucuucuguaugagu

SEQ ID NO: 497176 - RNA, 19 nt, Artificial Sequence
  Description of Artificial Sequence: Synthetic oligonucleotide
  Antisense Strand to SEQ ID NO: 497175
acucauacagaagacucca

SEQ ID NO: 497177 - RNA, 19 nt, Artificial Sequence
  Description of Artificial Sequence: Synthetic oligonucleotide
  Sense strand starting at position 1029 of SEQ ID NO: 317517
gagugauggccacagaguu

SEQ ID NO: 497178 - RNA, 19 nt, Artificial Sequence
  Description of Artificial Sequence: Synthetic oligonucleotide
  Antisense Strand to SEQ ID NO: 497177
aacucuguggccaucacuc

SEQ ID NO: 497179 - RNA, 19 nt, Artificial Sequence
  Description of Artificial Sequence: Synthetic oligonucleotide
  Sense strand starting at position 1085 of SEQ ID NO: 317517
gugaguuugguagaucauc

SEQ ID NO: 497180 - RNA, 19 nt, Artificial Sequence
  Description of Artificial Sequence: Synthetic oligonucleotide
  Antisense Strand to SEQ ID NO: 497179
gaugaucuaccaaacucac

SEQ ID NO: 497181 - RNA, 19 nt, Artificial Sequence
  Description of Artificial Sequence: Synthetic oligonucleotide
  Sense strand starting at position 1090 of SEQ ID NO: 317517
uuugguagaucaucuuaca

SEQ ID NO: 497182 - RNA, 19 nt, Artificial Sequence
  Description of Artificial Sequence: Synthetic oligonucleotide
  Antisense Strand to SEQ ID NO: 497181
uguaagaugaucuaccaaa

SEQ ID NO: 497183 - RNA, 19 nt, Artificial Sequence
  Description of Artificial Sequence: Synthetic oligonucleotide
  Sense strand starting at position 1270 of SEQ ID NO: 317517
gucaaauauuuggaaccaa

SEQ ID NO: 497184 - RNA, 19 nt, Artificial Sequence
  Description of Artificial Sequence: Synthetic oligonucleotide
  Antisense Strand to SEQ ID NO: 497183
uugguuccaaauauuugac

SEQ ID NO: 497185 - RNA, 19 nt, Artificial Sequence
  Description of Artificial Sequence: Synthetic oligonucleotide
  Sense strand starting at position 1337 of SEQ ID NO: 317517
gucauuuggucacuuaguu

SEQ ID NO: 497186 - RNA, 19 nt, Artificial Sequence
  Description of Artificial Sequence: Synthetic oligonucleotide
  Antisense Strand to SEQ ID NO: 497185
aacuaagugaccaaaugac

SEQ ID NO: 497187 - RNA, 19 nt, Artificial Sequence
  Description of Artificial Sequence: Synthetic oligonucleotide
  Sense strand starting at position 1583 of SEQ ID NO: 317517
cuaaguaugucauuaaaug

SEQ ID NO: 497188 - RNA, 19 nt, Artificial Sequence
  Description of Artificial Sequence: Synthetic oligonucleotide
  Antisense Strand to SEQ ID NO: 497187
cauuuaaugacauacuuag

SEQ ID NO: 497189 - RNA, 19 nt, Artificial Sequence
  Description of Artificial Sequence: Synthetic oligonucleotide
  Sense strand starting at position 1591 of SEQ ID NO: 317517
gucauuaaauguccacaug

SEQ ID NO: 497190 - RNA, 19 nt, Artificial Sequence
  Description of Artificial Sequence: Synthetic oligonucleotide
  Antisense Strand to SEQ ID NO: 497189
cauguggacauuuaaugac

SEQ ID NO: 497191 - RNA, 19 nt, Artificial Sequence
  Description of Artificial Sequence: Synthetic oligonucleotide
  Sense strand starting at position 1749 of SEQ ID NO: 317517
ggcuguugggaucgaaaga

SEQ ID NO: 497192 - RNA, 19 nt, Artificial Sequence
  Description of Artificial Sequence: Synthetic oligonucleotide
  Antisense Strand to SEQ ID NO: 497191
ucuuucgaucccaacagcc

SEQ ID NO: 497193 - RNA, 19 nt, Artificial Sequence
  Description of Artificial Sequence: Synthetic oligonucleotide
  Sense strand starting at position 1750 of SEQ ID NO: 317517
gcuguugggaucgaaagaa

SEQ ID NO: 497194 - RNA, 19 nt, Artificial Sequence
  Description of Artificial Sequence: Synthetic oligonucleotide
  Antisense Strand to SEQ ID NO: 497193
uucuuucgaucccaacagc

SEQ ID NO: 497195 - RNA, 19 nt, Artificial Sequence
  Description of Artificial Sequence: Synthetic oligonucleotide
  Sense strand starting at position 1799 of SEQ ID NO: 317517
ucaugaccucucuggacaa

SEQ ID NO: 497196 - RNA, 19 nt, Artificial Sequence
  Description of Artificial Sequence: Synthetic oligonucleotide
  Antisense Strand to SEQ ID NO: 497195
uuguccagagaggucauga

SEQ ID NO: 497197 - RNA, 19 nt, Artificial Sequence
  Description of Artificial Sequence: Synthetic oligonucleotide
  Sense strand starting at position 2077 of SEQ ID NO: 317517
auauuaacagucugagcau

SEQ ID NO: 497198 - RNA, 19 nt, Artificial Sequence
  Description of Artificial Sequence: Synthetic oligonucleotide
  Antisense Strand to SEQ ID NO: 497197
augcucagacuguuaauau

SEQ ID NO: 497199 - RNA, 19 nt, Artificial Sequence
  Description of Artificial Sequence: Synthetic oligonucleotide
  Sense strand starting at position 2089 of SEQ ID NO: 317517
ugagcauguggaugacaaa

SEQ ID NO: 497200 - RNA, 19 nt, Artificial Sequence
  Description of Artificial Sequence: Synthetic oligonucleotide
  Antisense Strand to SEQ ID NO: 497199
uuugucauccacaugcuca

SEQ ID NO: 497201 - RNA, 19 nt, Artificial Sequence
  Description of Artificial Sequence: Synthetic oligonucleotide
  Sense strand starting at position 2494 of SEQ ID NO: 317517
ucagaauagugugcauaag

SEQ ID NO: 497202 - RNA, 19 nt, Artificial Sequence
  Description of Artificial Sequence: Synthetic oligonucleotide
  Antisense Strand to SEQ ID NO: 497201
cuuaugcacacuauucuga

SEQ ID NO: 497203 - RNA, 19 nt, Artificial Sequence
  Description of Artificial Sequence: Synthetic oligonucleotide
  Sense strand starting at position 2495 of SEQ ID NO: 317517
cagaauagugugcauaaga

SEQ ID NO: 497204 - RNA, 19 nt, Artificial Sequence
  Description of Artificial Sequence: Synthetic oligonucleotide
  Antisense Strand to SEQ ID NO: 497203
ucuuaugcacacuauucug

SEQ ID NO: 497205 - RNA, 19 nt, Artificial Sequence
  Description of Artificial Sequence: Synthetic oligonucleotide
  Sense strand starting at position 2594 of SEQ ID NO: 317517
uuuguaaauuuguugacgu

SEQ ID NO: 497206 - RNA, 19 nt, Artificial Sequence
  Description of Artificial Sequence: Synthetic oligonucleotide
  Antisense Strand to SEQ ID NO: 497205
acgucaacaaauuuacaaa

SEQ ID NO: 497207 - RNA, 19 nt, Artificial Sequence
  Description of Artificial Sequence: Synthetic oligonucleotide
  Sense strand starting at position 2934 of SEQ ID NO: 317517
auagcauuuacguguugau

SEQ ID NO: 497208 - RNA, 19 nt, Artificial Sequence
  Description of Artificial Sequence: Synthetic oligonucleotide
  Antisense Strand to SEQ ID NO: 497207
aucaacacguaaaugcuau

SEQ ID NO: 497209 - RNA, 19 nt, Artificial Sequence
  Description of Artificial Sequence: Synthetic oligonucleotide
  Sense strand starting at position 3000 of SEQ ID NO: 317517
uccuauagacuuuguugaa

SEQ ID NO: 497210 - RNA, 19 nt, Artificial Sequence
  Description of Artificial Sequence: Synthetic oligonucleotide
  Antisense Strand to SEQ ID NO: 497209
uucaacaaagucuauagga

SEQ ID NO: 497211 - RNA, 19 nt, Artificial Sequence
  Description of Artificial Sequence: Synthetic oligonucleotide
  Sense strand starting at position 3001 of SEQ ID NO: 317517
ccuauagacuuuguugaau

SEQ ID NO: 497212 - RNA, 19 nt, Artificial Sequence
  Description of Artificial Sequence: Synthetic oligonucleotide
  Antisense Strand to SEQ ID NO: 497211
auucaacaaagucuauagg

SEQ ID NO: 497213 - RNA, 19 nt, Artificial Sequence
  Description of Artificial Sequence: Synthetic oligonucleotide
  Sense strand starting at position 3678 of SEQ ID NO: 317517
ggaacuugaagacguaagu

SEQ ID NO: 497214 - RNA, 19 nt, Artificial Sequence
  Description of Artificial Sequence: Synthetic oligonucleotide
  Antisense Strand to SEQ ID NO: 497213
acuuacgucuucaaguucc

SEQ ID NO: 497215 - RNA, 19 nt, Artificial Sequence
  Description of Artificial Sequence: Synthetic oligonucleotide
  Sense strand starting at position 3788 of SEQ ID NO: 317517
ccuggugaagauuauguga

SEQ ID NO: 497216 - RNA, 19 nt, Artificial Sequence
  Description of Artificial Sequence: Synthetic oligonucleotide
  Antisense Strand to SEQ ID NO: 497215
ucacauaaucuucaccagg

SEQ ID NO: 497217 - RNA, 19 nt, Artificial Sequence
  Description of Artificial Sequence: Synthetic oligonucleotide
  Sense strand starting at position 3791 of SEQ ID NO: 317517
ggugaagauuaugugaaca

SEQ ID NO: 497218 - RNA, 19 nt, Artificial Sequence
  Description of Artificial Sequence: Synthetic oligonucleotide
  Antisense Strand to SEQ ID NO: 497217
uguucacauaaucuucacc

SEQ ID NO: 497219 - RNA, 19 nt, Artificial Sequence
  Description of Artificial Sequence: Synthetic oligonucleotide
  Sense strand starting at position 3799 of SEQ ID NO: 317517
uuaugugaacauugcugaa

SEQ ID NO: 497220 - RNA, 19 nt, Artificial Sequence
  Description of Artificial Sequence: Synthetic oligonucleotide
  Antisense Strand to SEQ ID NO: 497219
uucagcaauguucacauaa

SEQ ID NO: 497221 - RNA, 19 nt, Artificial Sequence
  Description of Artificial Sequence: Synthetic oligonucleotide
  Sense strand starting at position 94 of SEQ ID NO: 317518
agcgauaaugcagauuaac

SEQ ID NO: 497222 - RNA, 19 nt, Artificial Sequence
  Description of Artificial Sequence: Synthetic oligonucleotide
  Antisense Strand to SEQ ID NO: 497221
guuaaucugcauuaucgcu

SEQ ID NO: 497223 - RNA, 19 nt, Artificial Sequence
  Description of Artificial Sequence: Synthetic oligonucleotide
  Sense strand starting at position 319 of SEQ ID NO: 317518
cuuagagagcuuuguaaga

SEQ ID NO: 497224 - RNA, 19 nt, Artificial Sequence
  Description of Artificial Sequence: Synthetic oligonucleotide
  Antisense Strand to SEQ ID NO: 497223
ucuuacaaagcucucuaag

SEQ ID NO: 497225 - RNA, 19 nt, Artificial Sequence
  Description of Artificial Sequence: Synthetic oligonucleotide
  Sense strand starting at position 364 of SEQ ID NO: 317518
gucguuucucaggaauagg

SEQ ID NO: 497226 - RNA, 19 nt, Artificial Sequence
  Description of Artificial Sequence: Synthetic oligonucleotide
  Antisense Strand to SEQ ID NO: 497225
ccuauuccugagaaacgac

SEQ ID NO: 497227 - RNA, 19 nt, Artificial Sequence
  Description of Artificial Sequence: Synthetic oligonucleotide
  Sense strand starting at position 460 of SEQ ID NO: 317518
aucuuauaugggcauaauu

SEQ ID NO: 497228 - RNA, 19 nt, Artificial Sequence
  Description of Artificial Sequence: Synthetic oligonucleotide
  Antisense Strand to SEQ ID NO: 497227
aauuaugcccauauaagau

SEQ ID NO: 497229 - RNA, 19 nt, Artificial Sequence
  Description of Artificial Sequence: Synthetic oligonucleotide
  Sense strand starting at position 652 of SEQ ID NO: 317518
ugauuauaagauugccaca

SEQ ID NO: 497230 - RNA, 19 nt, Artificial Sequence
  Description of Artificial Sequence: Synthetic oligonucleotide
  Antisense Strand to SEQ ID NO: 497229
uguggcaaucuuauaauca

SEQ ID NO: 497231 - RNA, 19 nt, Artificial Sequence
  Description of Artificial Sequence: Synthetic oligonucleotide
  Sense strand starting at position 786 of SEQ ID NO: 317518
ggugcagggucaucagaaa

SEQ ID NO: 497232 - RNA, 19 nt, Artificial Sequence
  Description of Artificial Sequence: Synthetic oligonucleotide
  Antisense Strand to SEQ ID NO: 497231
uuucugaugacccugcacc

SEQ ID NO: 497233 - RNA, 19 nt, Artificial Sequence
  Description of Artificial Sequence: Synthetic oligonucleotide
  Sense strand starting at position 847 of SEQ ID NO: 317518
gcuggugugacagauaaca

SEQ ID NO: 497234 - RNA, 19 nt, Artificial Sequence
  Description of Artificial Sequence: Synthetic oligonucleotide
  Antisense Strand to SEQ ID NO: 497233
uguuaucugucacaccagc

SEQ ID NO: 497235 - RNA, 19 nt, Artificial Sequence
  Description of Artificial Sequence: Synthetic oligonucleotide
  Sense strand starting at position 880 of SEQ ID NO: 317518
aaagcuuuggcaggaucua

SEQ ID NO: 497236 - RNA, 19 nt, Artificial Sequence
  Description of Artificial Sequence: Synthetic oligonucleotide
  Antisense Strand to SEQ ID NO: 497235
uagauccugccaaagcuuu

SEQ ID NO: 497237 - RNA, 19 nt, Artificial Sequence
  Description of Artificial Sequence: Synthetic oligonucleotide
  Sense strand starting at position 995 of SEQ ID NO: 317518
aauugugugccagagauua

SEQ ID NO: 497238 - RNA, 19 nt, Artificial Sequence
  Description of Artificial Sequence: Synthetic oligonucleotide
  Antisense Strand to SEQ ID NO: 497237
uaaucucuggcacacaauu

SEQ ID NO: 497239 - RNA, 19 nt, Artificial Sequence
  Description of Artificial Sequence: Synthetic oligonucleotide
  Sense strand starting at position 1049 of SEQ ID NO: 317518
agcuuuguacaguacauau

SEQ ID NO: 497240 - RNA, 19 nt, Artificial Sequence
  Description of Artificial Sequence: Synthetic oligonucleotide
  Antisense Strand to SEQ ID NO: 497239
auauguacuguacaaagcu

SEQ ID NO: 497241 - RNA, 19 nt, Artificial Sequence
  Description of Artificial Sequence: Synthetic oligonucleotide
  Sense strand starting at position 1376 of SEQ ID NO: 317518
gugguuucuacaugaauga

SEQ ID NO: 497242 - RNA, 19 nt, Artificial Sequence
  Description of Artificial Sequence: Synthetic oligonucleotide
  Antisense Strand to SEQ ID NO: 497241
ucauucauguagaaaccac

SEQ ID NO: 497243 - RNA, 19 nt, Artificial Sequence
  Description of Artificial Sequence: Synthetic oligonucleotide
  Sense strand starting at position 1471 of SEQ ID NO: 317518
auuugaaauuuguguuccu

SEQ ID NO: 497244 - RNA, 19 nt, Artificial Sequence
  Description of Artificial Sequence: Synthetic oligonucleotide
  Antisense Strand to SEQ ID NO: 497243
aggaacacaaauuucaaau

SEQ ID NO: 497245 - RNA, 19 nt, Artificial Sequence
  Description of Artificial Sequence: Synthetic oligonucleotide
  Sense strand starting at position 1472 of SEQ ID NO: 317518
uuugaaauuuguguuccuu

SEQ ID NO: 497246 - RNA, 19 nt, Artificial Sequence
  Description of Artificial Sequence: Synthetic oligonucleotide
  Antisense Strand to SEQ ID NO: 497245
aaggaacacaaauuucaaa

SEQ ID NO: 497247 - RNA, 19 nt, Artificial Sequence
  Description of Artificial Sequence: Synthetic oligonucleotide
  Sense strand starting at position 1675 of SEQ ID NO: 317518
aauccauucguugaugaga

SEQ ID NO: 497248 - RNA, 19 nt, Artificial Sequence
  Description of Artificial Sequence: Synthetic oligonucleotide
  Antisense Strand to SEQ ID NO: 497247
ucucaucaacgaauggauu

SEQ ID NO: 497249 - RNA, 19 nt, Artificial Sequence
  Description of Artificial Sequence: Synthetic oligonucleotide
  Sense strand starting at position 1678 of SEQ ID NO: 317518
ccauucguugaugagacau

SEQ ID NO: 497250 - RNA, 19 nt, Artificial Sequence
  Description of Artificial Sequence: Synthetic oligonucleotide
  Antisense Strand to SEQ ID NO: 497249
augucucaucaacgaaugg

SEQ ID NO: 497251 - RNA, 19 nt, Artificial Sequence
  Description of Artificial Sequence: Synthetic oligonucleotide
  Sense strand starting at position 1684 of SEQ ID NO: 317518
guugaugagacauguaaga

SEQ ID NO: 497252 - RNA, 19 nt, Artificial Sequence
  Description of Artificial Sequence: Synthetic oligonucleotide
  Antisense Strand to SEQ ID NO: 497251
ucuuacaugucucaucaac

SEQ ID NO: 497253 - RNA, 19 nt, Artificial Sequence
  Description of Artificial Sequence: Synthetic oligonucleotide
  Sense strand starting at position 2155 of SEQ ID NO: 317518
cauagugaagaguguuuaa

SEQ ID NO: 497254 - RNA, 19 nt, Artificial Sequence
  Description of Artificial Sequence: Synthetic oligonucleotide
  Antisense Strand to SEQ ID NO: 497253
uuaaacacucuucacuaug

SEQ ID NO: 497255 - RNA, 19 nt, Artificial Sequence
  Description of Artificial Sequence: Synthetic oligonucleotide
  Sense strand starting at position 2158 of SEQ ID NO: 317518
agugaagaguguuuaaaga

SEQ ID NO: 497256 - RNA, 19 nt, Artificial Sequence
  Description of Artificial Sequence: Synthetic oligonucleotide
  Antisense Strand to SEQ ID NO: 497255
ucuuuaaacacucuucacu

SEQ ID NO: 497257 - RNA, 19 nt, Artificial Sequence
  Description of Artificial Sequence: Synthetic oligonucleotide
  Sense strand starting at position 2244 of SEQ ID NO: 317518
ucucuaagugcuuagaaag

SEQ ID NO: 497258 - RNA, 19 nt, Artificial Sequence
  Description of Artificial Sequence: Synthetic oligonucleotide
  Antisense Strand to SEQ ID NO: 497257
cuuucuaagcacuuagaga

SEQ ID NO: 497259 - RNA, 19 nt, Artificial Sequence
  Description of Artificial Sequence: Synthetic oligonucleotide
  Sense strand starting at position 2374 of SEQ ID NO: 317518
gugaaaggaucagagauuu

SEQ ID NO: 497260 - RNA, 19 nt, Artificial Sequence
  Description of Artificial Sequence: Synthetic oligonucleotide
  Antisense Strand to SEQ ID NO: 497259
aaaucucugauccuuucac

SEQ ID NO: 497261 - RNA, 19 nt, Artificial Sequence
  Description of Artificial Sequence: Synthetic oligonucleotide
  Sense strand starting at position 2504 of SEQ ID NO: 317518
uaauuagcaguuggauaau

SEQ ID NO: 497262 - RNA, 19 nt, Artificial Sequence
  Description of Artificial Sequence: Synthetic oligonucleotide
  Antisense Strand to SEQ ID NO: 497261
auuauccaacugcuaauua

SEQ ID NO: 497263 - RNA, 19 nt, Artificial Sequence
  Description of Artificial Sequence: Synthetic oligonucleotide
  Sense strand starting at position 2706 of SEQ ID NO: 317518
gcaugcuaggauuacugua

SEQ ID NO: 497264 - RNA, 19 nt, Artificial Sequence
  Description of Artificial Sequence: Synthetic oligonucleotide
  Antisense Strand to SEQ ID NO: 497263
uacaguaauccuagcaugc

SEQ ID NO: 497265 - RNA, 19 nt, Artificial Sequence
  Description of Artificial Sequence: Synthetic oligonucleotide
  Sense strand starting at position 2711 of SEQ ID NO: 317518
cuaggauuacuguauggcu

SEQ ID NO: 497266 - RNA, 19 nt, Artificial Sequence
  Description of Artificial Sequence: Synthetic oligonucleotide
  Antisense Strand to SEQ ID NO: 497265
agccauacaguaauccuag

SEQ ID NO: 497267 - RNA, 19 nt, Artificial Sequence
  Description of Artificial Sequence: Synthetic oligonucleotide
  Sense strand starting at position 2788 of SEQ ID NO: 317518
acaaauguccugugggaag

SEQ ID NO: 497268 - RNA, 19 nt, Artificial Sequence
  Description of Artificial Sequence: Synthetic oligonucleotide
  Antisense Strand to SEQ ID NO: 497267
cuucccacaggacauuugu

SEQ ID NO: 497269 - RNA, 19 nt, Artificial Sequence
  Description of Artificial Sequence: Synthetic oligonucleotide
  Sense strand starting at position 2790 of SEQ ID NO: 317518
aaauguccugugggaagau

SEQ ID NO: 497270 - RNA, 19 nt, Artificial Sequence
  Description of Artificial Sequence: Synthetic oligonucleotide
  Antisense Strand to SEQ ID NO: 497269
aucuucccacaggacauuu

SEQ ID NO: 497271 - RNA, 19 nt, Artificial Sequence
  Description of Artificial Sequence: Synthetic oligonucleotide
  Sense strand starting at position 2895 of SEQ ID NO: 317518
auaugaucugguggcagaa

SEQ ID NO: 497272 - RNA, 19 nt, Artificial Sequence
  Description of Artificial Sequence: Synthetic oligonucleotide
  Antisense Strand to SEQ ID NO: 497271
uucugccaccagaucauau

SEQ ID NO: 497273 - RNA, 19 nt, Artificial Sequence
  Description of Artificial Sequence: Synthetic oligonucleotide
  Sense strand starting at position 3097 of SEQ ID NO: 317518
ggcacauaaugccuggaua

SEQ ID NO: 497274 - RNA, 19 nt, Artificial Sequence
  Description of Artificial Sequence: Synthetic oligonucleotide
  Antisense Strand to SEQ ID NO: 497273
uauccaggcauuaugugcc

SEQ ID NO: 497275 - RNA, 19 nt, Artificial Sequence
  Description of Artificial Sequence: Synthetic oligonucleotide
  Sense strand starting at position 3098 of SEQ ID NO: 317518
gcacauaaugccuggauag

SEQ ID NO: 497276 - RNA, 19 nt, Artificial Sequence
  Description of Artificial Sequence: Synthetic oligonucleotide
  Antisense Strand to SEQ ID NO: 497275
cuauccaggcauuaugugc

SEQ ID NO: 497277 - RNA, 19 nt, Artificial Sequence
  Description of Artificial Sequence: Synthetic oligonucleotide
  Sense strand starting at position 3099 of SEQ ID NO: 317518
cacauaaugccuggauagu

SEQ ID NO: 497278 - RNA, 19 nt, Artificial Sequence
  Description of Artificial Sequence: Synthetic oligonucleotide
  Antisense Strand to SEQ ID NO: 497277
acuauccaggcauuaugug

SEQ ID NO: 497279 - RNA, 19 nt, Artificial Sequence
  Description of Artificial Sequence: Synthetic oligonucleotide
  Sense strand starting at position 3100 of SEQ ID NO: 317518
acauaaugccuggauagua

SEQ ID NO: 497280 - RNA, 19 nt, Artificial Sequence
  Description of Artificial Sequence: Synthetic oligonucleotide
  Antisense Strand to SEQ ID NO: 497279
uacuauccaggcauuaugu

SEQ ID NO: 497281 - RNA, 19 nt, Artificial Sequence
  Description of Artificial Sequence: Synthetic oligonucleotide
  Sense strand starting at position 3131 of SEQ ID NO: 317518
uagagauuguacguggaua

SEQ ID NO: 497282 - RNA, 19 nt, Artificial Sequence
  Description of Artificial Sequence: Synthetic oligonucleotide
  Antisense Strand to SEQ ID NO: 497281
uauccacguacaaucucua

SEQ ID NO: 497283 - RNA, 19 nt, Artificial Sequence
  Description of Artificial Sequence: Synthetic oligonucleotide
  Sense strand starting at position 3132 of SEQ ID NO: 317518
agagauuguacguggauaa

SEQ ID NO: 497284 - RNA, 19 nt, Artificial Sequence
  Description of Artificial Sequence: Synthetic oligonucleotide
  Antisense Strand to SEQ ID NO: 497283
uuauccacguacaaucucu

SEQ ID NO: 497285 - RNA, 19 nt, Artificial Sequence
  Description of Artificial Sequence: Synthetic oligonucleotide
  Sense strand starting at position 3133 of SEQ ID NO: 317518
gagauuguacguggauaau

SEQ ID NO: 497286 - RNA, 19 nt, Artificial Sequence
  Description of Artificial Sequence: Synthetic oligonucleotide
  Antisense Strand to SEQ ID NO: 497285
auuauccacguacaaucuc

SEQ ID NO: 497287 - RNA, 19 nt, Artificial Sequence
  Description of Artificial Sequence: Synthetic oligonucleotide
  Sense strand starting at position 3199 of SEQ ID NO: 317518
acaugcacuccuuaaggua

SEQ ID NO: 497288 - RNA, 19 nt, Artificial Sequence
  Description of Artificial Sequence: Synthetic oligonucleotide
  Antisense Strand to SEQ ID NO: 497287
uaccuuaaggagugcaugu

SEQ ID NO: 497289 - RNA, 19 nt, Artificial Sequence
  Description of Artificial Sequence: Synthetic oligonucleotide
  Sense strand starting at position 3337 of SEQ ID NO: 317518
uugacucuccagugaauga

SEQ ID NO: 497290 - RNA, 19 nt, Artificial Sequence
  Description of Artificial Sequence: Synthetic oligonucleotide
  Antisense Strand to SEQ ID NO: 497289
ucauucacuggagagucaa

SEQ ID NO: 497291 - RNA, 19 nt, Artificial Sequence
  Description of Artificial Sequence: Synthetic oligonucleotide
  Sense strand starting at position 3399 of SEQ ID NO: 317518
gguggcuuacaguaauuaa

SEQ ID NO: 497292 - RNA, 19 nt, Artificial Sequence
  Description of Artificial Sequence: Synthetic oligonucleotide
  Antisense Strand to SEQ ID NO: 497291
uuaauuacuguaagccacc

SEQ ID NO: 497293 - RNA, 19 nt, Artificial Sequence
  Description of Artificial Sequence: Synthetic oligonucleotide
  Sense strand starting at position 3402 of SEQ ID NO: 317518
ggcuuacaguaauuaagaa

SEQ ID NO: 497294 - RNA, 19 nt, Artificial Sequence
  Description of Artificial Sequence: Synthetic oligonucleotide
  Antisense Strand to SEQ ID NO: 497293
uucuuaauuacuguaagcc

SEQ ID NO: 497295 - RNA, 19 nt, Artificial Sequence
  Description of Artificial Sequence: Synthetic oligonucleotide
  Sense strand starting at position 3425 of SEQ ID NO: 317518
cgcaaaggugaugaaaguu

SEQ ID NO: 497296 - RNA, 19 nt, Artificial Sequence
  Description of Artificial Sequence: Synthetic oligonucleotide
  Antisense Strand to SEQ ID NO: 497295
aacuuucaucaccuuugcg

SEQ ID NO: 497297 - RNA, 19 nt, Artificial Sequence
  Description of Artificial Sequence: Synthetic oligonucleotide
  Sense strand starting at position 3724 of SEQ ID NO: 317518
auuccauugucaguaacau

SEQ ID NO: 497298 - RNA, 19 nt, Artificial Sequence
  Description of Artificial Sequence: Synthetic oligonucleotide
  Antisense Strand to SEQ ID NO: 497297
auguuacugacaauggaau

SEQ ID NO: 497299 - RNA, 19 nt, Artificial Sequence
  Description of Artificial Sequence: Synthetic oligonucleotide
  Sense strand starting at position 3725 of SEQ ID NO: 317518
uuccauugucaguaacaua

SEQ ID NO: 497300 - RNA, 19 nt, Artificial Sequence
  Description of Artificial Sequence: Synthetic oligonucleotide
  Antisense Strand to SEQ ID NO: 497299
uauguuacugacaauggaa

SEQ ID NO: 497301 - RNA, 19 nt, Artificial Sequence
  Description of Artificial Sequence: Synthetic oligonucleotide
  Sense strand starting at position 5 of SEQ ID NO: 317519
guuagaauaauguaggcaa

SEQ ID NO: 497302 - RNA, 19 nt, Artificial Sequence
  Description of Artificial Sequence: Synthetic oligonucleotide
  Antisense Strand to SEQ ID NO: 497301
uugccuacauuauucuaac

SEQ ID NO: 497303 - RNA, 19 nt, Artificial Sequence
  Description of Artificial Sequence: Synthetic oligonucleotide
  Sense strand starting at position 109 of SEQ ID NO: 317519
gcccauguguauuuauaag

SEQ ID NO: 497304 - RNA, 19 nt, Artificial Sequence
  Description of Artificial Sequence: Synthetic oligonucleotide
  Antisense Strand to SEQ ID NO: 497303
cuuauaaauacacaugggc

SEQ ID NO: 497305 - RNA, 19 nt, Artificial Sequence
  Description of Artificial Sequence: Synthetic oligonucleotide
  Sense strand starting at position 115 of SEQ ID NO: 317519
guguauuuauaagaaagac

SEQ ID NO: 497306 - RNA, 19 nt, Artificial Sequence
  Description of Artificial Sequence: Synthetic oligonucleotide
  Antisense Strand to SEQ ID NO: 497305
gucuuucuuauaaauacac

SEQ ID NO: 497307 - RNA, 19 nt, Artificial Sequence
  Description of Artificial Sequence: Synthetic oligonucleotide
  Sense strand starting at position 406 of SEQ ID NO: 317519
guggacuauguugagagua

SEQ ID NO: 497308 - RNA, 19 nt, Artificial Sequence
  Description of Artificial Sequence: Synthetic oligonucleotide
  Antisense Strand to SEQ ID NO: 497307
uacucucaacauaguccac

SEQ ID NO: 497309 - RNA, 19 nt, Artificial Sequence
  Description of Artificial Sequence: Synthetic oligonucleotide
  Sense strand starting at position 416 of SEQ ID NO: 317519
uugagaguauggcugaaau

SEQ ID NO: 497310 - RNA, 19 nt, Artificial Sequence
  Description of Artificial Sequence: Synthetic oligonucleotide
  Antisense Strand to SEQ ID NO: 497309
auuucagccauacucucaa

SEQ ID NO: 497311 - RNA, 19 nt, Artificial Sequence
  Description of Artificial Sequence: Synthetic oligonucleotide
  Sense strand starting at position 500 of SEQ ID NO: 317519
uguacauuauagcuagaaa

SEQ ID NO: 497312 - RNA, 19 nt, Artificial Sequence
  Description of Artificial Sequence: Synthetic oligonucleotide
  Antisense Strand to SEQ ID NO: 497311
uuucuagcuauaauguaca

SEQ ID NO: 497313 - RNA, 19 nt, Artificial Sequence
  Description of Artificial Sequence: Synthetic oligonucleotide
  Sense strand starting at position 664 of SEQ ID NO: 317519
uccaauucuuucgugaaag

SEQ ID NO: 497314 - RNA, 19 nt, Artificial Sequence
  Description of Artificial Sequence: Synthetic oligonucleotide
  Antisense Strand to SEQ ID NO: 497313
cuuucacgaaagaauugga

SEQ ID NO: 497315 - RNA, 19 nt, Artificial Sequence
  Description of Artificial Sequence: Synthetic oligonucleotide
  Sense strand starting at position 666 of SEQ ID NO: 317519
caauucuuucgugaaagag

SEQ ID NO: 497316 - RNA, 19 nt, Artificial Sequence
  Description of Artificial Sequence: Synthetic oligonucleotide
  Antisense Strand to SEQ ID NO: 497315
cucuuucacgaaagaauug

SEQ ID NO: 497317 - RNA, 19 nt, Artificial Sequence
  Description of Artificial Sequence: Synthetic oligonucleotide
  Sense strand starting at position 670 of SEQ ID NO: 317519
ucuuucgugaaagaguaua

SEQ ID NO: 497318 - RNA, 19 nt, Artificial Sequence
  Description of Artificial Sequence: Synthetic oligonucleotide
  Antisense Strand to SEQ ID NO: 497317
uauacucuuucacgaaaga

SEQ ID NO: 497319 - RNA, 19 nt, Artificial Sequence
  Description of Artificial Sequence: Synthetic oligonucleotide
  Sense strand starting at position 727 of SEQ ID NO: 317519
gcaucugagguauagacau

SEQ ID NO: 497320 - RNA, 19 nt, Artificial Sequence
  Description of Artificial Sequence: Synthetic oligonucleotide
  Antisense Strand to SEQ ID NO: 497319
augucuauaccucagaugc

SEQ ID NO: 497321 - RNA, 19 nt, Artificial Sequence
  Description of Artificial Sequence: Synthetic oligonucleotide
  Sense strand starting at position 749 of SEQ ID NO: 317519
cucucuuuacugugaagga

SEQ ID NO: 497322 - RNA, 19 nt, Artificial Sequence
  Description of Artificial Sequence: Synthetic oligonucleotide
  Antisense Strand to SEQ ID NO: 497321
uccuucacaguaaagagag

SEQ ID NO: 497323 - RNA, 19 nt, Artificial Sequence
  Description of Artificial Sequence: Synthetic oligonucleotide
  Sense strand starting at position 773 of SEQ ID NO: 317519
ucugguaauaugggaacau

SEQ ID NO: 497324 - RNA, 19 nt, Artificial Sequence
  Description of Artificial Sequence: Synthetic oligonucleotide
  Antisense Strand to SEQ ID NO: 497323
auguucccauauuaccaga

SEQ ID NO: 497325 - RNA, 19 nt, Artificial Sequence
  Description of Artificial Sequence: Synthetic oligonucleotide
  Sense strand starting at position 905 of SEQ ID NO: 317519
gaaguuauuugauggauuu

SEQ ID NO: 497326 - RNA, 19 nt, Artificial Sequence
  Description of Artificial Sequence: Synthetic oligonucleotide
  Antisense Strand to SEQ ID NO: 497325
aaauccaucaaauaacuuc

SEQ ID NO: 497327 - RNA, 19 nt, Artificial Sequence
  Description of Artificial Sequence: Synthetic oligonucleotide
  Sense strand starting at position 1020 of SEQ ID NO: 317519
guguucugugugagugaug

SEQ ID NO: 497328 - RNA, 19 nt, Artificial Sequence
  Description of Artificial Sequence: Synthetic oligonucleotide
  Antisense Strand to SEQ ID NO: 497327
caucacucacacagaacac

SEQ ID NO: 497329 - RNA, 19 nt, Artificial Sequence
  Description of Artificial Sequence: Synthetic oligonucleotide
  Sense strand starting at position 2006 of SEQ ID NO: 317519
ucucaugguuauguccaaa

SEQ ID NO: 497330 - RNA, 19 nt, Artificial Sequence
  Description of Artificial Sequence: Synthetic oligonucleotide
  Antisense Strand to SEQ ID NO: 497329
uuuggacauaaccaugaga

SEQ ID NO: 497331 - RNA, 19 nt, Artificial Sequence
  Description of Artificial Sequence: Synthetic oligonucleotide
  Sense strand starting at position 2009 of SEQ ID NO: 317519
caugguuauguccaaagau

SEQ ID NO: 497332 - RNA, 19 nt, Artificial Sequence
  Description of Artificial Sequence: Synthetic oligonucleotide
  Antisense Strand to SEQ ID NO: 497331
aucuuuggacauaaccaug

SEQ ID NO: 497333 - RNA, 19 nt, Artificial Sequence
  Description of Artificial Sequence: Synthetic oligonucleotide
  Sense strand starting at position 2193 of SEQ ID NO: 317519
agcuaauaucaaggaucuu

SEQ ID NO: 497334 - RNA, 19 nt, Artificial Sequence
  Description of Artificial Sequence: Synthetic oligonucleotide
  Antisense Strand to SEQ ID NO: 497333
aagauccuugauauuagcu

SEQ ID NO: 497335 - RNA, 19 nt, Artificial Sequence
  Description of Artificial Sequence: Synthetic oligonucleotide
  Sense strand starting at position 2203 of SEQ ID NO: 317519
aaggaucuuguauggacau

SEQ ID NO: 497336 - RNA, 19 nt, Artificial Sequence
  Description of Artificial Sequence: Synthetic oligonucleotide
  Antisense Strand to SEQ ID NO: 497335
auguccauacaagauccuu

SEQ ID NO: 497337 - RNA, 19 nt, Artificial Sequence
  Description of Artificial Sequence: Synthetic oligonucleotide
  Sense strand starting at position 2345 of SEQ ID NO: 317519
uuuguaaacuuuguugaca

SEQ ID NO: 497338 - RNA, 19 nt, Artificial Sequence
  Description of Artificial Sequence: Synthetic oligonucleotide
  Antisense Strand to SEQ ID NO: 497337
ugucaacaaaguuuacaaa

SEQ ID NO: 497339 - RNA, 19 nt, Artificial Sequence
  Description of Artificial Sequence: Synthetic oligonucleotide
  Sense strand starting at position 2346 of SEQ ID NO: 317519
uuguaaacuuuguugacau

SEQ ID NO: 497340 - RNA, 19 nt, Artificial Sequence
  Description of Artificial Sequence: Synthetic oligonucleotide
  Antisense Strand to SEQ ID NO: 497339
augucaacaaaguuuacaa

SEQ ID NO: 497341 - RNA, 19 nt, Artificial Sequence
  Description of Artificial Sequence: Synthetic oligonucleotide
  Sense strand starting at position 2348 of SEQ ID NO: 317519
guaaacuuuguugacaugu

SEQ ID NO: 497342 - RNA, 19 nt, Artificial Sequence
  Description of Artificial Sequence: Synthetic oligonucleotide
  Antisense Strand to SEQ ID NO: 497341
acaugucaacaaaguuuac

SEQ ID NO: 497343 - RNA, 19 nt, Artificial Sequence
  Description of Artificial Sequence: Synthetic oligonucleotide
  Sense strand starting at position 2547 of SEQ ID NO: 317519
gguaauugcuaauugaauu

SEQ ID NO: 497344 - RNA, 19 nt, Artificial Sequence
  Description of Artificial Sequence: Synthetic oligonucleotide
  Antisense Strand to SEQ ID NO: 497343
aauucaauuagcaauuacc

SEQ ID NO: 497345 - RNA, 19 nt, Artificial Sequence
  Description of Artificial Sequence: Synthetic oligonucleotide
  Sense strand starting at position 2679 of SEQ ID NO: 317519
uaugauauagcguauacau

SEQ ID NO: 497346 - RNA, 19 nt, Artificial Sequence
  Description of Artificial Sequence: Synthetic oligonucleotide
  Antisense Strand to SEQ ID NO: 497345
auguauacgcuauaucaua

SEQ ID NO: 497347 - RNA, 19 nt, Artificial Sequence
  Description of Artificial Sequence: Synthetic oligonucleotide
  Sense strand starting at position 2906 of SEQ ID NO: 317519
cuguuacaagacuauaguu

SEQ ID NO: 497348 - RNA, 19 nt, Artificial Sequence
  Description of Artificial Sequence: Synthetic oligonucleotide
  Antisense Strand to SEQ ID NO: 497347
aacuauagucuuguaacag

SEQ ID NO: 497349 - RNA, 19 nt, Artificial Sequence
  Description of Artificial Sequence: Synthetic oligonucleotide
  Sense strand starting at position 3037 of SEQ ID NO: 317519
gaaggaucucacugauguc

SEQ ID NO: 497350 - RNA, 19 nt, Artificial Sequence
  Description of Artificial Sequence: Synthetic oligonucleotide
  Antisense Strand to SEQ ID NO: 497349
gacaucagugagauccuuc

SEQ ID NO: 497351 - RNA, 19 nt, Artificial Sequence
  Description of Artificial Sequence: Synthetic oligonucleotide
  Sense strand starting at position 3050 of SEQ ID NO: 317519
gaugucagcugaucugaaa

SEQ ID NO: 497352 - RNA, 19 nt, Artificial Sequence
  Description of Artificial Sequence: Synthetic oligonucleotide
  Antisense Strand to SEQ ID NO: 497351
uuucagaucagcugacauc

SEQ ID NO: 497353 - RNA, 19 nt, Artificial Sequence
  Description of Artificial Sequence: Synthetic oligonucleotide
  Sense strand starting at position 3134 of SEQ ID NO: 317519
ucuuguucugaugacuuua

SEQ ID NO: 497354 - RNA, 19 nt, Artificial Sequence
  Description of Artificial Sequence: Synthetic oligonucleotide
  Antisense Strand to SEQ ID NO: 497353
uaaagucaucagaacaaga

SEQ ID NO: 497355 - RNA, 19 nt, Artificial Sequence
  Description of Artificial Sequence: Synthetic oligonucleotide
  Sense strand starting at position 3331 of SEQ ID NO: 317519
guguaauuggacuauuauu

SEQ ID NO: 497356 - RNA, 19 nt, Artificial Sequence
  Description of Artificial Sequence: Synthetic oligonucleotide
  Antisense Strand to SEQ ID NO: 497355
aauaauaguccaauuacac

SEQ ID NO: 497357 - RNA, 19 nt, Artificial Sequence
  Description of Artificial Sequence: Synthetic oligonucleotide
  Sense strand starting at position 3338 of SEQ ID NO: 317519
uggacuauuauuggacagu

SEQ ID NO: 497358 - RNA, 19 nt, Artificial Sequence
  Description of Artificial Sequence: Synthetic oligonucleotide
  Antisense Strand to SEQ ID NO: 497357
acuguccaauaauagucca

SEQ ID NO: 497359 - RNA, 19 nt, Artificial Sequence
  Description of Artificial Sequence: Synthetic oligonucleotide
  Sense strand starting at position 3344 of SEQ ID NO: 317519
auuauuggacaguaagcau

SEQ ID NO: 497360 - RNA, 19 nt, Artificial Sequence
  Description of Artificial Sequence: Synthetic oligonucleotide
  Antisense Strand to SEQ ID NO: 497359
augcuuacuguccaauaau

SEQ ID NO: 497361 - RNA, 19 nt, Artificial Sequence
  Description of Artificial Sequence: Synthetic oligonucleotide
  Sense strand starting at position 3364 of SEQ ID NO: 317519
ugaaacuguugguccuaua

SEQ ID NO: 497362 - RNA, 19 nt, Artificial Sequence
  Description of Artificial Sequence: Synthetic oligonucleotide
  Antisense Strand to SEQ ID NO: 497361
uauaggaccaacaguuuca

SEQ ID NO: 497363 - RNA, 19 nt, Artificial Sequence
  Description of Artificial Sequence: Synthetic oligonucleotide
  Sense strand starting at position 3395 of SEQ ID NO: 317519
uggaauaaguaacugcaaa

SEQ ID NO: 497364 - RNA, 19 nt, Artificial Sequence
  Description of Artificial Sequence: Synthetic oligonucleotide
  Antisense Strand to SEQ ID NO: 497363
uuugcaguuacuuauucca

SEQ ID NO: 497365 - RNA, 19 nt, Artificial Sequence
  Description of Artificial Sequence: Synthetic oligonucleotide
  Sense strand starting at position 3530 of SEQ ID NO: 317519
agaaacuuguuuccugaga

SEQ ID NO: 497366 - RNA, 19 nt, Artificial Sequence
  Description of Artificial Sequence: Synthetic oligonucleotide
  Antisense Strand to SEQ ID NO: 497365
ucucaggaaacaaguuucu

SEQ ID NO: 497367 - RNA, 19 nt, Artificial Sequence
  Description of Artificial Sequence: Synthetic oligonucleotide
  Sense strand starting at position 3531 of SEQ ID NO: 317519
gaaacuuguuuccugagau

SEQ ID NO: 497368 - RNA, 19 nt, Artificial Sequence
  Description of Artificial Sequence: Synthetic oligonucleotide
  Antisense Strand to SEQ ID NO: 497367
aucucaggaaacaaguuuc

SEQ ID NO: 497369 - RNA, 19 nt, Artificial Sequence
  Description of Artificial Sequence: Synthetic oligonucleotide
  Sense strand starting at position 3573 of SEQ ID NO: 317519
uuaugaacauuguugaaug

SEQ ID NO: 497370 - RNA, 19 nt, Artificial Sequence
  Description of Artificial Sequence: Synthetic oligonucleotide
  Antisense Strand to SEQ ID NO: 497369
cauucaacaauguucauaa

SEQ ID NO: 497371 - RNA, 19 nt, Artificial Sequence
  Description of Artificial Sequence: Synthetic oligonucleotide
  Sense strand starting at position 3674 of SEQ ID NO: 317519
gaagaucuucuauggguaa

SEQ ID NO: 497372 - RNA, 19 nt, Artificial Sequence
  Description of Artificial Sequence: Synthetic oligonucleotide
  Antisense Strand to SEQ ID NO: 497371
uuacccauagaagaucuuc

SEQ ID NO: 497373 - RNA, 19 nt, Artificial Sequence
  Description of Artificial Sequence: Synthetic oligonucleotide
  Sense strand starting at position 3730 of SEQ ID NO: 317519
uugugaaaggguggguuaa

SEQ ID NO: 497374 - RNA, 19 nt, Artificial Sequence
  Description of Artificial Sequence: Synthetic oligonucleotide
  Antisense Strand to SEQ ID NO: 497373
uuaacccacccuuucacaa

SEQ ID NO: 497375 - RNA, 19 nt, Artificial Sequence
  Description of Artificial Sequence: Synthetic oligonucleotide
  Sense strand starting at position 3731 of SEQ ID NO: 317519
ugugaaaggguggguuaau

SEQ ID NO: 497376 - RNA, 19 nt, Artificial Sequence
  Description of Artificial Sequence: Synthetic oligonucleotide
  Antisense Strand to SEQ ID NO: 497375
auuaacccacccuuucaca

SEQ ID NO: 497377 - RNA, 19 nt, Artificial Sequence
  Description of Artificial Sequence: Synthetic oligonucleotide
  Sense strand starting at position 3732 of SEQ ID NO: 317519
gugaaaggguggguuaaug

SEQ ID NO: 497378 - RNA, 19 nt, Artificial Sequence
  Description of Artificial Sequence: Synthetic oligonucleotide
  Antisense Strand to SEQ ID NO: 497377
cauuaacccacccuuucac

SEQ ID NO: 497379 - RNA, 19 nt, Artificial Sequence
  Description of Artificial Sequence: Synthetic oligonucleotide
  Sense strand starting at position 3762 of SEQ ID NO: 317519
ugccauuguugucuuauuu

SEQ ID NO: 497380 - RNA, 19 nt, Artificial Sequence
  Description of Artificial Sequence: Synthetic oligonucleotide
  Antisense Strand to SEQ ID NO: 497379
aaauaagacaacaauggca

SEQ ID NO: 497381 - RNA, 19 nt, Artificial Sequence
  Description of Artificial Sequence: Synthetic oligonucleotide
  Sense strand starting at position 170 of SEQ ID NO: 317520
uggaguauuuggaguagug

SEQ ID NO: 497382 - RNA, 19 nt, Artificial Sequence
  Description of Artificial Sequence: Synthetic oligonucleotide
  Antisense Strand to SEQ ID NO: 497381
cacuacuccaaauacucca

SEQ ID NO: 497383 - RNA, 19 nt, Artificial Sequence
  Description of Artificial Sequence: Synthetic oligonucleotide
  Sense strand starting at position 361 of SEQ ID NO: 317520
ccagccauucgcguuaguu

SEQ ID NO: 497384 - RNA, 19 nt, Artificial Sequence
  Description of Artificial Sequence: Synthetic oligonucleotide
  Antisense Strand to SEQ ID NO: 497383
aacuaacgcgaauggcugg

SEQ ID NO: 497385 - RNA, 19 nt, Artificial Sequence
  Description of Artificial Sequence: Synthetic oligonucleotide
  Sense strand starting at position 362 of SEQ ID NO: 317520
cagccauucgcguuaguuc

SEQ ID NO: 497386 - RNA, 19 nt, Artificial Sequence
  Description of Artificial Sequence: Synthetic oligonucleotide
  Antisense Strand to SEQ ID NO: 497385
gaacuaacgcgaauggcug

SEQ ID NO: 497387 - RNA, 19 nt, Artificial Sequence
  Description of Artificial Sequence: Synthetic oligonucleotide
  Sense strand starting at position 367 of SEQ ID NO: 317520
auucgcguuaguucucaga

SEQ ID NO: 497388 - RNA, 19 nt, Artificial Sequence
  Description of Artificial Sequence: Synthetic oligonucleotide
  Antisense Strand to SEQ ID NO: 497387
ucugagaacuaacgcgaau

SEQ ID NO: 497389 - RNA, 19 nt, Artificial Sequence
  Description of Artificial Sequence: Synthetic oligonucleotide
  Sense strand starting at position 422 of SEQ ID NO: 317520
cgccuagaugcugaaaggu

SEQ ID NO: 497390 - RNA, 19 nt, Artificial Sequence
  Description of Artificial Sequence: Synthetic oligonucleotide
  Antisense Strand to SEQ ID NO: 497389
accuuucagcaucuaggcg

SEQ ID NO: 497391 - RNA, 19 nt, Artificial Sequence
  Description of Artificial Sequence: Synthetic oligonucleotide
  Sense strand starting at position 465 of SEQ ID NO: 317520
agaggcuauuccuuuccua

SEQ ID NO: 497392 - RNA, 19 nt, Artificial Sequence
  Description of Artificial Sequence: Synthetic oligonucleotide
  Antisense Strand to SEQ ID NO: 497391
uaggaaaggaauagccucu

SEQ ID NO: 497393 - RNA, 19 nt, Artificial Sequence
  Description of Artificial Sequence: Synthetic oligonucleotide
  Sense strand starting at position 469 of SEQ ID NO: 317520
gcuauuccuuuccuaagga

SEQ ID NO: 497394 - RNA, 19 nt, Artificial Sequence
  Description of Artificial Sequence: Synthetic oligonucleotide
  Antisense Strand to SEQ ID NO: 497393
uccuuaggaaaggaauagc

SEQ ID NO: 497395 - RNA, 19 nt, Artificial Sequence
  Description of Artificial Sequence: Synthetic oligonucleotide
  Sense strand starting at position 502 of SEQ ID NO: 317520
gcagguuuaccguacucaa

SEQ ID NO: 497396 - RNA, 19 nt, Artificial Sequence
  Description of Artificial Sequence: Synthetic oligonucleotide
  Antisense Strand to SEQ ID NO: 497395
uugaguacgguaaaccugc

SEQ ID NO: 497397 - RNA, 19 nt, Artificial Sequence
  Description of Artificial Sequence: Synthetic oligonucleotide
  Sense strand starting at position 505 of SEQ ID NO: 317520
gguuuaccguacucaauuu

SEQ ID NO: 497398 - RNA, 19 nt, Artificial Sequence
  Description of Artificial Sequence: Synthetic oligonucleotide
  Antisense Strand to SEQ ID NO: 497397
aaauugaguacgguaaacc

SEQ ID NO: 497399 - RNA, 19 nt, Artificial Sequence
  Description of Artificial Sequence: Synthetic oligonucleotide
  Sense strand starting at position 2541 of SEQ ID NO: 317520
cgucuugaccagcaagcaa

SEQ ID NO: 497400 - RNA, 19 nt, Artificial Sequence
  Description of Artificial Sequence: Synthetic oligonucleotide
  Antisense Strand to SEQ ID NO: 497399
uugcuugcuggucaagacg

SEQ ID NO: 497401 - RNA, 19 nt, Artificial Sequence
  Description of Artificial Sequence: Synthetic oligonucleotide
  Sense strand starting at position 2626 of SEQ ID NO: 317520
gguagauugugaguuucau

SEQ ID NO: 497402 - RNA, 19 nt, Artificial Sequence
  Description of Artificial Sequence: Synthetic oligonucleotide
  Antisense Strand to SEQ ID NO: 497401
augaaacucacaaucuacc

SEQ ID NO: 497403 - RNA, 19 nt, Artificial Sequence
  Description of Artificial Sequence: Synthetic oligonucleotide
  Sense strand starting at position 2652 of SEQ ID NO: 317520
gagaaagucuaagugugca

SEQ ID NO: 497404 - RNA, 19 nt, Artificial Sequence
  Description of Artificial Sequence: Synthetic oligonucleotide
  Antisense Strand to SEQ ID NO: 497403
ugcacacuuagacuuucuc

SEQ ID NO: 497405 - RNA, 19 nt, Artificial Sequence
  Description of Artificial Sequence: Synthetic oligonucleotide
  Sense strand starting at position 2721 of SEQ ID NO: 317520
ucuauauaacguggacuga

SEQ ID NO: 497406 - RNA, 19 nt, Artificial Sequence
  Description of Artificial Sequence: Synthetic oligonucleotide
  Antisense Strand to SEQ ID NO: 497405
ucaguccacguuauauaga

SEQ ID NO: 497407 - RNA, 19 nt, Artificial Sequence
  Description of Artificial Sequence: Synthetic oligonucleotide
  Sense strand starting at position 2730 of SEQ ID NO: 317520
cguggacugaauuguuuau

SEQ ID NO: 497408 - RNA, 19 nt, Artificial Sequence
  Description of Artificial Sequence: Synthetic oligonucleotide
  Antisense Strand to SEQ ID NO: 497407
auaaacaauucaguccacg

SEQ ID NO: 497409 - RNA, 19 nt, Artificial Sequence
  Description of Artificial Sequence: Synthetic oligonucleotide
  Sense strand starting at position 2734 of SEQ ID NO: 317520
gacugaauuguuuauuguu

SEQ ID NO: 497410 - RNA, 19 nt, Artificial Sequence
  Description of Artificial Sequence: Synthetic oligonucleotide
  Antisense Strand to SEQ ID NO: 497409
aacaauaaacaauucaguc

SEQ ID NO: 497411 - RNA, 19 nt, Artificial Sequence
  Description of Artificial Sequence: Synthetic oligonucleotide
  Sense strand starting at position 2752 of SEQ ID NO: 317520
uuauguuucgugucgagca

SEQ ID NO: 497412 - RNA, 19 nt, Artificial Sequence
  Description of Artificial Sequence: Synthetic oligonucleotide
  Antisense Strand to SEQ ID NO: 497411
ugcucgacacgaaacauaa

SEQ ID NO: 497413 - RNA, 19 nt, Artificial Sequence
  Description of Artificial Sequence: Synthetic oligonucleotide
  Sense strand starting at position 2768 of SEQ ID NO: 317520
gcauaaauuccagaagcua

SEQ ID NO: 497414 - RNA, 19 nt, Artificial Sequence
  Description of Artificial Sequence: Synthetic oligonucleotide
  Antisense Strand to SEQ ID NO: 497413
uagcuucuggaauuuaugc

SEQ ID NO: 497415 - RNA, 19 nt, Artificial Sequence
  Description of Artificial Sequence: Synthetic oligonucleotide
  Sense strand starting at position 2999 of SEQ ID NO: 317520
ccauaugcucaagaauguu

SEQ ID NO: 497416 - RNA, 19 nt, Artificial Sequence
  Description of Artificial Sequence: Synthetic oligonucleotide
  Antisense Strand to SEQ ID NO: 497415
aacauucuugagcauaugg

SEQ ID NO: 497417 - RNA, 19 nt, Artificial Sequence
  Description of Artificial Sequence: Synthetic oligonucleotide
  Sense strand starting at position 3070 of SEQ ID NO: 317520
uucuuugcagauuaggaau

SEQ ID NO: 497418 - RNA, 19 nt, Artificial Sequence
  Description of Artificial Sequence: Synthetic oligonucleotide
  Antisense Strand to SEQ ID NO: 497417
auuccuaaucugcaaagaa

SEQ ID NO: 497419 - RNA, 19 nt, Artificial Sequence
  Description of Artificial Sequence: Synthetic oligonucleotide
  Sense strand starting at position 3090 of SEQ ID NO: 317520
ugaacauauucccugugca

SEQ ID NO: 497420 - RNA, 19 nt, Artificial Sequence
  Description of Artificial Sequence: Synthetic oligonucleotide
  Antisense Strand to SEQ ID NO: 497419
ugcacagggaauauguuca

SEQ ID NO: 497421 - RNA, 19 nt, Artificial Sequence
  Description of Artificial Sequence: Synthetic oligonucleotide
  Sense strand starting at position 3133 of SEQ ID NO: 317520
cuuuguaccugauuaccau

SEQ ID NO: 497422 - RNA, 19 nt, Artificial Sequence
  Description of Artificial Sequence: Synthetic oligonucleotide
  Antisense Strand to SEQ ID NO: 497421
augguaaucagguacaaag

SEQ ID NO: 497423 - RNA, 19 nt, Artificial Sequence
  Description of Artificial Sequence: Synthetic oligonucleotide
  Sense strand starting at position 3134 of SEQ ID NO: 317520
uuuguaccugauuaccaua

SEQ ID NO: 497424 - RNA, 19 nt, Artificial Sequence
  Description of Artificial Sequence: Synthetic oligonucleotide
  Antisense Strand to SEQ ID NO: 497423
uaugguaaucagguacaaa

SEQ ID NO: 497425 - RNA, 19 nt, Artificial Sequence
  Description of Artificial Sequence: Synthetic oligonucleotide
  Sense strand starting at position 3280 of SEQ ID NO: 317520
ucaagcuacuguuugauga

SEQ ID NO: 497426 - RNA, 19 nt, Artificial Sequence
  Description of Artificial Sequence: Synthetic oligonucleotide
  Antisense Strand to SEQ ID NO: 497425
ucaucaaacaguagcuuga

SEQ ID NO: 497427 - RNA, 19 nt, Artificial Sequence
  Description of Artificial Sequence: Synthetic oligonucleotide
  Sense strand starting at position 3281 of SEQ ID NO: 317520
caagcuacuguuugaugau

SEQ ID NO: 497428 - RNA, 19 nt, Artificial Sequence
  Description of Artificial Sequence: Synthetic oligonucleotide
  Antisense Strand to SEQ ID NO: 497427
aucaucaaacaguagcuug

SEQ ID NO: 497429 - RNA, 19 nt, Artificial Sequence
  Description of Artificial Sequence: Synthetic oligonucleotide
  Sense strand starting at position 3291 of SEQ ID NO: 317520
uuugaugaugcauauguaa

SEQ ID NO: 497430 - RNA, 19 nt, Artificial Sequence
  Description of Artificial Sequence: Synthetic oligonucleotide
  Antisense Strand to SEQ ID NO: 497429
uuacauaugcaucaucaaa

SEQ ID NO: 497431 - RNA, 19 nt, Artificial Sequence
  Description of Artificial Sequence: Synthetic oligonucleotide
  Sense strand starting at position 3294 of SEQ ID NO: 317520
gaugaugcauauguaaauu

SEQ ID NO: 497432 - RNA, 19 nt, Artificial Sequence
  Description of Artificial Sequence: Synthetic oligonucleotide
  Antisense Strand to SEQ ID NO: 497431
aauuuacauaugcaucauc

SEQ ID NO: 497433 - RNA, 19 nt, Artificial Sequence
  Description of Artificial Sequence: Synthetic oligonucleotide
  Sense strand starting at position 3410 of SEQ ID NO: 317520
gguguaaacugaccauugu

SEQ ID NO: 497434 - RNA, 19 nt, Artificial Sequence
  Description of Artificial Sequence: Synthetic oligonucleotide
  Antisense Strand to SEQ ID NO: 497433
acaauggucaguuuacacc

SEQ ID NO: 497435 - RNA, 19 nt, Artificial Sequence
  Description of Artificial Sequence: Synthetic oligonucleotide
  Sense strand starting at position 3418 of SEQ ID NO: 317520
cugaccauuguguaagguu

SEQ ID NO: 497436 - RNA, 19 nt, Artificial Sequence
  Description of Artificial Sequence: Synthetic oligonucleotide
  Antisense Strand to SEQ ID NO: 497435
aaccuuacacaauggucag

SEQ ID NO: 497437 - RNA, 19 nt, Artificial Sequence
  Description of Artificial Sequence: Synthetic oligonucleotide
  Sense strand starting at position 3476 of SEQ ID NO: 317520
uguagauauguccauguuu

SEQ ID NO: 497438 - RNA, 19 nt, Artificial Sequence
  Description of Artificial Sequence: Synthetic oligonucleotide
  Antisense Strand to SEQ ID NO: 497437
aaacauggacauaucuaca

SEQ ID NO: 497439 - RNA, 19 nt, Artificial Sequence
  Description of Artificial Sequence: Synthetic oligonucleotide
  Sense strand starting at position 3564 of SEQ ID NO: 317520
caguaaggguguuccauaa

SEQ ID NO: 497440 - RNA, 19 nt, Artificial Sequence
  Description of Artificial Sequence: Synthetic oligonucleotide
  Antisense Strand to SEQ ID NO: 497439
uuauggaacacccuuacug

SEQ ID NO: 497441 - RNA, 19 nt, Artificial Sequence
  Description of Artificial Sequence: Synthetic oligonucleotide
  Sense strand starting at position 3568 of SEQ ID NO: 317520
aaggguguuccauaaugua

SEQ ID NO: 497442 - RNA, 19 nt, Artificial Sequence
  Description of Artificial Sequence: Synthetic oligonucleotide
  Antisense Strand to SEQ ID NO: 497441
uacauuauggaacacccuu

SEQ ID NO: 497443 - RNA, 19 nt, Artificial Sequence
  Description of Artificial Sequence: Synthetic oligonucleotide
  Sense strand starting at position 3652 of SEQ ID NO: 317520
gcaagaaaucagugagguu

SEQ ID NO: 497444 - RNA, 19 nt, Artificial Sequence
  Description of Artificial Sequence: Synthetic oligonucleotide
  Antisense Strand to SEQ ID NO: 497443
aaccucacugauuucuugc

SEQ ID NO: 497445 - RNA, 19 nt, Artificial Sequence
  Description of Artificial Sequence: Synthetic oligonucleotide
  Sense strand starting at position 3725 of SEQ ID NO: 317520
uuaacauuauuggcuaagu

SEQ ID NO: 497446 - RNA, 19 nt, Artificial Sequence
  Description of Artificial Sequence: Synthetic oligonucleotide
  Antisense Strand to SEQ ID NO: 497445
acuuagccaauaauguuaa

SEQ ID NO: 497447 - RNA, 19 nt, Artificial Sequence
  Description of Artificial Sequence: Synthetic oligonucleotide
  Sense strand starting at position 3734 of SEQ ID NO: 317520
uuggcuaagugguugaaua

SEQ ID NO: 497448 - RNA, 19 nt, Artificial Sequence
  Description of Artificial Sequence: Synthetic oligonucleotide
  Antisense Strand to SEQ ID NO: 497447
uauucaaccacuuagccaa

SEQ ID NO: 497449 - RNA, 19 nt, Artificial Sequence
  Description of Artificial Sequence: Synthetic oligonucleotide
  Sense strand starting at position 3735 of SEQ ID NO: 317520
uggcuaagugguugaauaa

SEQ ID NO: 497450 - RNA, 19 nt, Artificial Sequence
  Description of Artificial Sequence: Synthetic oligonucleotide
  Antisense Strand to SEQ ID NO: 497449
uuauucaaccacuuagcca

SEQ ID NO: 497451 - RNA, 19 nt, Artificial Sequence
  Description of Artificial Sequence: Synthetic oligonucleotide
  Sense strand starting at position 3736 of SEQ ID NO: 317520
ggcuaagugguugaauaaa

SEQ ID NO: 497452 - RNA, 19 nt, Artificial Sequence
  Description of Artificial Sequence: Synthetic oligonucleotide
  Antisense Strand to SEQ ID NO: 497451
uuuauucaaccacuuagcc

SEQ ID NO: 497453 - RNA, 19 nt, Artificial Sequence
  Description of Artificial Sequence: Synthetic oligonucleotide
  Sense strand starting at position 3772 of SEQ ID NO: 317520
ugcuacuucucuuuaagga

SEQ ID NO: 497454 - RNA, 19 nt, Artificial Sequence
  Description of Artificial Sequence: Synthetic oligonucleotide
  Antisense Strand to SEQ ID NO: 497453
uccuuaaagagaaguagca

SEQ ID NO: 497455 - RNA, 19 nt, Artificial Sequence
  Description of Artificial Sequence: Synthetic oligonucleotide
  Sense strand starting at position 3773 of SEQ ID NO: 317520
gcuacuucucuuuaaggaa

SEQ ID NO: 497456 - RNA, 19 nt, Artificial Sequence
  Description of Artificial Sequence: Synthetic oligonucleotide
  Antisense Strand to SEQ ID NO: 497455
uuccuuaaagagaaguagc

SEQ ID NO: 497457 - RNA, 19 nt, Artificial Sequence
  Description of Artificial Sequence: Synthetic oligonucleotide
  Sense strand starting at position 3918 of SEQ ID NO: 317520
gccaauguggaguauggua

SEQ ID NO: 497458 - RNA, 19 nt, Artificial Sequence
  Description of Artificial Sequence: Synthetic oligonucleotide
  Antisense Strand to SEQ ID NO: 497457
uaccauacuccacauuggc

SEQ ID NO: 497459 - RNA, 19 nt, Artificial Sequence
  Description of Artificial Sequence: Synthetic oligonucleotide
  Sense strand starting at position 3920 of SEQ ID NO: 317520
caauguggaguaugguauu

SEQ ID NO: 497460 - RNA, 19 nt, Artificial Sequence
  Description of Artificial Sequence: Synthetic oligonucleotide
  Antisense Strand to SEQ ID NO: 497459
aauaccauacuccacauug

SEQ ID NO: 497461 - RNA, 19 nt, Artificial Sequence
  Description of Artificial Sequence: Synthetic oligonucleotide
  Sense strand starting at position 7 of SEQ ID NO: 317521
gggauuuacuguuggcuca

SEQ ID NO: 497462 - RNA, 19 nt, Artificial Sequence
  Description of Artificial Sequence: Synthetic oligonucleotide
  Antisense Strand to SEQ ID NO: 497461
ugagccaacaguaaauccc

SEQ ID NO: 497463 - RNA, 19 nt, Artificial Sequence
  Description of Artificial Sequence: Synthetic oligonucleotide
  Sense strand starting at position 58 of SEQ ID NO: 317521
aacagaguuucuuaaagug

SEQ ID NO: 497464 - RNA, 19 nt, Artificial Sequence
  Description of Artificial Sequence: Synthetic oligonucleotide
  Antisense Strand to SEQ ID NO: 497463
cacuuuaagaaacucuguu

SEQ ID NO: 497465 - RNA, 19 nt, Artificial Sequence
  Description of Artificial Sequence: Synthetic oligonucleotide
  Sense strand starting at position 81 of SEQ ID NO: 317521
ugauuccaucauugaaaug

SEQ ID NO: 497466 - RNA, 19 nt, Artificial Sequence
  Description of Artificial Sequence: Synthetic oligonucleotide
  Antisense Strand to SEQ ID NO: 497465
cauuucaaugauggaauca

SEQ ID NO: 497467 - RNA, 19 nt, Artificial Sequence
  Description of Artificial Sequence: Synthetic oligonucleotide
  Sense strand starting at position 110 of SEQ ID NO: 317521
agagcaugcuuuccuuaaa

SEQ ID NO: 497468 - RNA, 19 nt, Artificial Sequence
  Description of Artificial Sequence: Synthetic oligonucleotide
  Antisense Strand to SEQ ID NO: 497467
uuuaaggaaagcaugcucu

SEQ ID NO: 497469 - RNA, 19 nt, Artificial Sequence
  Description of Artificial Sequence: Synthetic oligonucleotide
  Sense strand starting at position 220 of SEQ ID NO: 317521
guaauaaccucccagagaa

SEQ ID NO: 497470 - RNA, 19 nt, Artificial Sequence
  Description of Artificial Sequence: Synthetic oligonucleotide
  Antisense Strand to SEQ ID NO: 497469
uucucugggagguuauuac

SEQ ID NO: 497471 - RNA, 19 nt, Artificial Sequence
  Description of Artificial Sequence: Synthetic oligonucleotide
  Sense strand starting at position 276 of SEQ ID NO: 317521
ccuguuaauugugcuauuu

SEQ ID NO: 497472 - RNA, 19 nt, Artificial Sequence
  Description of Artificial Sequence: Synthetic oligonucleotide
  Antisense Strand to SEQ ID NO: 497471
aaauagcacaauuaacagg

SEQ ID NO: 497473 - RNA, 19 nt, Artificial Sequence
  Description of Artificial Sequence: Synthetic oligonucleotide
  Sense strand starting at position 309 of SEQ ID NO: 317521
gggauucuguguguaauua

SEQ ID NO: 497474 - RNA, 19 nt, Artificial Sequence
  Description of Artificial Sequence: Synthetic oligonucleotide
  Antisense Strand to SEQ ID NO: 497473
uaauuacacacagaauccc

SEQ ID NO: 497475 - RNA, 19 nt, Artificial Sequence
  Description of Artificial Sequence: Synthetic oligonucleotide
  Sense strand starting at position 310 of SEQ ID NO: 317521
ggauucuguguguaauuaa

SEQ ID NO: 497476 - RNA, 19 nt, Artificial Sequence
  Description of Artificial Sequence: Synthetic oligonucleotide
  Antisense Strand to SEQ ID NO: 497475
uuaauuacacacagaaucc

SEQ ID NO: 497477 - RNA, 19 nt, Artificial Sequence
  Description of Artificial Sequence: Synthetic oligonucleotide
  Sense strand starting at position 313 of SEQ ID NO: 317521
uucuguguguaauuaaaga

SEQ ID NO: 497478 - RNA, 19 nt, Artificial Sequence
  Description of Artificial Sequence: Synthetic oligonucleotide
  Antisense Strand to SEQ ID NO: 497477
ucuuuaauuacacacagaa

SEQ ID NO: 497479 - RNA, 19 nt, Artificial Sequence
  Description of Artificial Sequence: Synthetic oligonucleotide
  Sense strand starting at position 425 of SEQ ID NO: 317521
gucuauugaccauauggca

SEQ ID NO: 497480 - RNA, 19 nt, Artificial Sequence
  Description of Artificial Sequence: Synthetic oligonucleotide
  Antisense Strand to SEQ ID NO: 497479
ugccauauggucaauagac

SEQ ID NO: 497481 - RNA, 19 nt, Artificial Sequence
  Description of Artificial Sequence: Synthetic oligonucleotide
  Sense strand starting at position 486 of SEQ ID NO: 317521
gaauguuucccagggaagu

SEQ ID NO: 497482 - RNA, 19 nt, Artificial Sequence
  Description of Artificial Sequence: Synthetic oligonucleotide
  Antisense Strand to SEQ ID NO: 497481
acuucccugggaaacauuc

SEQ ID NO: 497483 - RNA, 19 nt, Artificial Sequence
  Description of Artificial Sequence: Synthetic oligonucleotide
  Sense strand starting at position 487 of SEQ ID NO: 317521
aauguuucccagggaagug

SEQ ID NO: 497484 - RNA, 19 nt, Artificial Sequence
  Description of Artificial Sequence: Synthetic oligonucleotide
  Antisense Strand to SEQ ID NO: 497483
cacuucccugggaaacauu

SEQ ID NO: 497485 - RNA, 19 nt, Artificial Sequence
  Description of Artificial Sequence: Synthetic oligonucleotide
  Sense strand starting at position 644 of SEQ ID NO: 317521
caaggaauucggcaaaccu

SEQ ID NO: 497486 - RNA, 19 nt, Artificial Sequence
  Description of Artificial Sequence: Synthetic oligonucleotide
  Antisense Strand to SEQ ID NO: 497485
agguuugccgaauuccuug

SEQ ID NO: 497487 - RNA, 19 nt, Artificial Sequence
  Description of Artificial Sequence: Synthetic oligonucleotide
  Sense strand starting at position 2570 of SEQ ID NO: 317521
aauggaucuguuugggaag

SEQ ID NO: 497488 - RNA, 19 nt, Artificial Sequence
  Description of Artificial Sequence: Synthetic oligonucleotide
  Antisense Strand to SEQ ID NO: 497487
cuucccaaacagauccauu

SEQ ID NO: 497489 - RNA, 19 nt, Artificial Sequence
  Description of Artificial Sequence: Synthetic oligonucleotide
  Sense strand starting at position 2573 of SEQ ID NO: 317521
ggaucuguuugggaagaaa

SEQ ID NO: 497490 - RNA, 19 nt, Artificial Sequence
  Description of Artificial Sequence: Synthetic oligonucleotide
  Antisense Strand to SEQ ID NO: 497489
uuucuucccaaacagaucc

SEQ ID NO: 497491 - RNA, 19 nt, Artificial Sequence
  Description of Artificial Sequence: Synthetic oligonucleotide
  Sense strand starting at position 2681 of SEQ ID NO: 317521
ugaaauaucuauggaacau

SEQ ID NO: 497492 - RNA, 19 nt, Artificial Sequence
  Description of Artificial Sequence: Synthetic oligonucleotide
  Antisense Strand to SEQ ID NO: 497491
auguuccauagauauuuca

SEQ ID NO: 497493 - RNA, 19 nt, Artificial Sequence
  Description of Artificial Sequence: Synthetic oligonucleotide
  Sense strand starting at position 2773 of SEQ ID NO: 317521
cagcacgugucucuuauuu

SEQ ID NO: 497494 - RNA, 19 nt, Artificial Sequence
  Description of Artificial Sequence: Synthetic oligonucleotide
  Antisense Strand to SEQ ID NO: 497493
aaauaagagacacgugcug

SEQ ID NO: 497495 - RNA, 19 nt, Artificial Sequence
  Description of Artificial Sequence: Synthetic oligonucleotide
  Sense strand starting at position 2777 of SEQ ID NO: 317521
acgugucucuuauuuaaau

SEQ ID NO: 497496 - RNA, 19 nt, Artificial Sequence
  Description of Artificial Sequence: Synthetic oligonucleotide
  Antisense Strand to SEQ ID NO: 497495
auuuaaauaagagacacgu

SEQ ID NO: 497497 - RNA, 19 nt, Artificial Sequence
  Description of Artificial Sequence: Synthetic oligonucleotide
  Sense strand starting at position 2778 of SEQ ID NO: 317521
cgugucucuuauuuaaauc

SEQ ID NO: 497498 - RNA, 19 nt, Artificial Sequence
  Description of Artificial Sequence: Synthetic oligonucleotide
  Antisense Strand to SEQ ID NO: 497497
gauuuaaauaagagacacg

SEQ ID NO: 497499 - RNA, 19 nt, Artificial Sequence
  Description of Artificial Sequence: Synthetic oligonucleotide
  Sense strand starting at position 2809 of SEQ ID NO: 317521
ugguuacauuugcaguuau

SEQ ID NO: 497500 - RNA, 19 nt, Artificial Sequence
  Description of Artificial Sequence: Synthetic oligonucleotide
  Antisense Strand to SEQ ID NO: 497499
auaacugcaaauguaacca

SEQ ID NO: 497501 - RNA, 19 nt, Artificial Sequence
  Description of Artificial Sequence: Synthetic oligonucleotide
  Sense strand starting at position 2871 of SEQ ID NO: 317521
uuugaaugguaguuuggua

SEQ ID NO: 497502 - RNA, 19 nt, Artificial Sequence
  Description of Artificial Sequence: Synthetic oligonucleotide
  Antisense Strand to SEQ ID NO: 497501
uaccaaacuaccauucaaa

SEQ ID NO: 497503 - RNA, 19 nt, Artificial Sequence
  Description of Artificial Sequence: Synthetic oligonucleotide
  Sense strand starting at position 2879 of SEQ ID NO: 317521
guaguuugguaauucugca

SEQ ID NO: 497504 - RNA, 19 nt, Artificial Sequence
  Description of Artificial Sequence: Synthetic oligonucleotide
  Antisense Strand to SEQ ID NO: 497503
ugcagaauuaccaaacuac

SEQ ID NO: 497505 - RNA, 19 nt, Artificial Sequence
  Description of Artificial Sequence: Synthetic oligonucleotide
  Sense strand starting at position 2883 of SEQ ID NO: 317521
uuugguaauucugcagaaa

SEQ ID NO: 497506 - RNA, 19 nt, Artificial Sequence
  Description of Artificial Sequence: Synthetic oligonucleotide
  Antisense Strand to SEQ ID NO: 497505
uuucugcagaauuaccaaa

SEQ ID NO: 497507 - RNA, 19 nt, Artificial Sequence
  Description of Artificial Sequence: Synthetic oligonucleotide
  Sense strand starting at position 2950 of SEQ ID NO: 317521
accuaaauaccauaguugu

SEQ ID NO: 497508 - RNA, 19 nt, Artificial Sequence
  Description of Artificial Sequence: Synthetic oligonucleotide
  Antisense Strand to SEQ ID NO: 497507
acaacuaugguauuuaggu

SEQ ID NO: 497509 - RNA, 19 nt, Artificial Sequence
  Description of Artificial Sequence: Synthetic oligonucleotide
  Sense strand starting at position 2998 of SEQ ID NO: 317521
ucaauuugcugaugcauuu

SEQ ID NO: 497510 - RNA, 19 nt, Artificial Sequence
  Description of Artificial Sequence: Synthetic oligonucleotide
  Antisense Strand to SEQ ID NO: 497509
aaaugcaucagcaaauuga

SEQ ID NO: 497511 - RNA, 19 nt, Artificial Sequence
  Description of Artificial Sequence: Synthetic oligonucleotide
  Sense strand starting at position 3051 of SEQ ID NO: 317521
aaagcucaagaggguuaau

SEQ ID NO: 497512 - RNA, 19 nt, Artificial Sequence
  Description of Artificial Sequence: Synthetic oligonucleotide
  Antisense Strand to SEQ ID NO: 497511
auuaacccucuugagcuuu

SEQ ID NO: 497513 - RNA, 19 nt, Artificial Sequence
  Description of Artificial Sequence: Synthetic oligonucleotide
  Sense strand starting at position 3105 of SEQ ID NO: 317521
gaaugauuaugucucagac

SEQ ID NO: 497514 - RNA, 19 nt, Artificial Sequence
  Description of Artificial Sequence: Synthetic oligonucleotide
  Antisense Strand to SEQ ID NO: 497513
gucugagacauaaucauuc

SEQ ID NO: 497515 - RNA, 19 nt, Artificial Sequence
  Description of Artificial Sequence: Synthetic oligonucleotide
  Sense strand starting at position 3107 of SEQ ID NO: 317521
augauuaugucucagacca

SEQ ID NO: 497516 - RNA, 19 nt, Artificial Sequence
  Description of Artificial Sequence: Synthetic oligonucleotide
  Antisense Strand to SEQ ID NO: 497515
uggucugagacauaaucau

SEQ ID NO: 497517 - RNA, 19 nt, Artificial Sequence
  Description of Artificial Sequence: Synthetic oligonucleotide
  Sense strand starting at position 3122 of SEQ ID NO: 317521
accacacuucuauguugua

SEQ ID NO: 497518 - RNA, 19 nt, Artificial Sequence
  Description of Artificial Sequence: Synthetic oligonucleotide
  Antisense Strand to SEQ ID NO: 497517
uacaacauagaaguguggu

SEQ ID NO: 497519 - RNA, 19 nt, Artificial Sequence
  Description of Artificial Sequence: Synthetic oligonucleotide
  Sense strand starting at position 3169 of SEQ ID NO: 317521
agaggaugccuguacacuu

SEQ ID NO: 497520 - RNA, 19 nt, Artificial Sequence
  Description of Artificial Sequence: Synthetic oligonucleotide
  Antisense Strand to SEQ ID NO: 497519
aaguguacaggcauccucu

SEQ ID NO: 497521 - RNA, 19 nt, Artificial Sequence
  Description of Artificial Sequence: Synthetic oligonucleotide
  Sense strand starting at position 3217 of SEQ ID NO: 317521
guuaacagauauguguaau

SEQ ID NO: 497522 - RNA, 19 nt, Artificial Sequence
  Description of Artificial Sequence: Synthetic oligonucleotide
  Antisense Strand to SEQ ID NO: 497521
auuacacauaucuguuaac

SEQ ID NO: 497523 - RNA, 19 nt, Artificial Sequence
  Description of Artificial Sequence: Synthetic oligonucleotide
  Sense strand starting at position 3229 of SEQ ID NO: 317521
guguaauaaaguugucuuu

SEQ ID NO: 497524 - RNA, 19 nt, Artificial Sequence
  Description of Artificial Sequence: Synthetic oligonucleotide
  Antisense Strand to SEQ ID NO: 497523
aaagacaacuuuauuacac

SEQ ID NO: 497525 - RNA, 19 nt, Artificial Sequence
  Description of Artificial Sequence: Synthetic oligonucleotide
  Sense strand starting at position 3282 of SEQ ID NO: 317521
gaccauauagugugcaaau

SEQ ID NO: 497526 - RNA, 19 nt, Artificial Sequence
  Description of Artificial Sequence: Synthetic oligonucleotide
  Antisense Strand to SEQ ID NO: 497525
auuugcacacuauaugguc

SEQ ID NO: 497527 - RNA, 19 nt, Artificial Sequence
  Description of Artificial Sequence: Synthetic oligonucleotide
  Sense strand starting at position 3283 of SEQ ID NO: 317521
accauauagugugcaaaua

SEQ ID NO: 497528 - RNA, 19 nt, Artificial Sequence
  Description of Artificial Sequence: Synthetic oligonucleotide
  Antisense Strand to SEQ ID NO: 497527
uauuugcacacuauauggu

SEQ ID NO: 497529 - RNA, 19 nt, Artificial Sequence
  Description of Artificial Sequence: Synthetic oligonucleotide
  Sense strand starting at position 3787 of SEQ ID NO: 317521
auaauuaacuuuggagaag

SEQ ID NO: 497530 - RNA, 19 nt, Artificial Sequence
  Description of Artificial Sequence: Synthetic oligonucleotide
  Antisense Strand to SEQ ID NO: 497529
cuucuccaaaguuaauuau

SEQ ID NO: 497531 - RNA, 19 nt, Artificial Sequence
  Description of Artificial Sequence: Synthetic oligonucleotide
  Sense strand starting at position 3798 of SEQ ID NO: 317521
uggagaagauacugauucu

SEQ ID NO: 497532 - RNA, 19 nt, Artificial Sequence
  Description of Artificial Sequence: Synthetic oligonucleotide
  Antisense Strand to SEQ ID NO: 497531
agaaucaguaucuucucca

SEQ ID NO: 497533 - RNA, 19 nt, Artificial Sequence
  Description of Artificial Sequence: Synthetic oligonucleotide
  Sense strand starting at position 3804 of SEQ ID NO: 317521
agauacugauucuauagua

SEQ ID NO: 497534 - RNA, 19 nt, Artificial Sequence
  Description of Artificial Sequence: Synthetic oligonucleotide
  Antisense Strand to SEQ ID NO: 497533
uacuauagaaucaguaucu

SEQ ID NO: 497535 - RNA, 19 nt, Artificial Sequence
  Description of Artificial Sequence: Synthetic oligonucleotide
  Sense strand starting at position 3903 of SEQ ID NO: 317521
acuguacugccucaccuau

SEQ ID NO: 497536 - RNA, 19 nt, Artificial Sequence
  Description of Artificial Sequence: Synthetic oligonucleotide
  Antisense Strand to SEQ ID NO: 497535
auaggugaggcaguacagu

SEQ ID NO: 497537 - RNA, 19 nt, Artificial Sequence
  Description of Artificial Sequence: Synthetic oligonucleotide
  Sense strand starting at position 3916 of SEQ ID NO: 317521
accuaugugucucuccaau

SEQ ID NO: 497538 - RNA, 19 nt, Artificial Sequence
  Description of Artificial Sequence: Synthetic oligonucleotide
  Antisense Strand to SEQ ID NO: 497537
auuggagagacacauaggu

SEQ ID NO: 497539 - RNA, 19 nt, Artificial Sequence
  Description of Artificial Sequence: Synthetic oligonucleotide
  Sense strand starting at position 3918 of SEQ ID NO: 317521
cuaugugucucuccaaugu

SEQ ID NO: 497540 - RNA, 19 nt, Artificial Sequence
  Description of Artificial Sequence: Synthetic oligonucleotide
  Antisense Strand to SEQ ID NO: 497539
acauuggagagacacauag

SEQ ID NO: 497541 - RNA, 19 nt, Artificial Sequence
  Description of Artificial Sequence: Synthetic oligonucleotide
  Sense strand starting at position 8 of SEQ ID NO: 317522
gaggcaucuggcgagaaag

SEQ ID NO: 497542 - RNA, 19 nt, Artificial Sequence
  Description of Artificial Sequence: Synthetic oligonucleotide
  Antisense Strand to SEQ ID NO: 497541
cuuucucgccagaugccuc

SEQ ID NO: 497543 - RNA, 19 nt, Artificial Sequence
  Description of Artificial Sequence: Synthetic oligonucleotide
  Sense strand starting at position 74 of SEQ ID NO: 317522
uuuacuuccgaagaagcua

SEQ ID NO: 497544 - RNA, 19 nt, Artificial Sequence
  Description of Artificial Sequence: Synthetic oligonucleotide
  Antisense Strand to SEQ ID NO: 497543
uagcuucuucggaaguaaa

SEQ ID NO: 497545 - RNA, 19 nt, Artificial Sequence
  Description of Artificial Sequence: Synthetic oligonucleotide
  Sense strand starting at position 214 of SEQ ID NO: 317522
agggaaugcuguccggaaa

SEQ ID NO: 497546 - RNA, 19 nt, Artificial Sequence
  Description of Artificial Sequence: Synthetic oligonucleotide
  Antisense Strand to SEQ ID NO: 497545
uuuccggacagcauucccu

SEQ ID NO: 497547 - RNA, 19 nt, Artificial Sequence
  Description of Artificial Sequence: Synthetic oligonucleotide
  Sense strand starting at position 215 of SEQ ID NO: 317522
gggaaugcuguccggaaac

SEQ ID NO: 497548 - RNA, 19 nt, Artificial Sequence
  Description of Artificial Sequence: Synthetic oligonucleotide
  Antisense Strand to SEQ ID NO: 497547
guuuccggacagcauuccc

SEQ ID NO: 497549 - RNA, 19 nt, Artificial Sequence
  Description of Artificial Sequence: Synthetic oligonucleotide
  Sense strand starting at position 291 of SEQ ID NO: 317522
ucuccaaauuuggaaggaa

SEQ ID NO: 497550 - RNA, 19 nt, Artificial Sequence
  Description of Artificial Sequence: Synthetic oligonucleotide
  Antisense Strand to SEQ ID NO: 497549
uuccuuccaaauuuggaga

SEQ ID NO: 497551 - RNA, 19 nt, Artificial Sequence
  Description of Artificial Sequence: Synthetic oligonucleotide
  Sense strand starting at position 458 of SEQ ID NO: 317522
ugggcuuggccagaaguuu

SEQ ID NO: 497552 - RNA, 19 nt, Artificial Sequence
  Description of Artificial Sequence: Synthetic oligonucleotide
  Antisense Strand to SEQ ID NO: 497551
aaacuucuggccaagccca

SEQ ID NO: 497553 - RNA, 19 nt, Artificial Sequence
  Description of Artificial Sequence: Synthetic oligonucleotide
  Sense strand starting at position 749 of SEQ ID NO: 317522
agaguuauaaacuggucga

SEQ ID NO: 497554 - RNA, 19 nt, Artificial Sequence
  Description of Artificial Sequence: Synthetic oligonucleotide
  Antisense Strand to SEQ ID NO: 497553
ucgaccaguuuauaacucu

SEQ ID NO: 497555 - RNA, 19 nt, Artificial Sequence
  Description of Artificial Sequence: Synthetic oligonucleotide
  Sense strand starting at position 750 of SEQ ID NO: 317522
gaguuauaaacuggucgac

SEQ ID NO: 497556 - RNA, 19 nt, Artificial Sequence
  Description of Artificial Sequence: Synthetic oligonucleotide
  Antisense Strand to SEQ ID NO: 497555
gucgaccaguuuauaacuc

SEQ ID NO: 497557 - RNA, 19 nt, Artificial Sequence
  Description of Artificial Sequence: Synthetic oligonucleotide
  Sense strand starting at position 752 of SEQ ID NO: 317522
guuauaaacuggucgacua

SEQ ID NO: 497558 - RNA, 19 nt, Artificial Sequence
  Description of Artificial Sequence: Synthetic oligonucleotide
  Antisense Strand to SEQ ID NO: 497557
uagucgaccaguuuauaac

SEQ ID NO: 497559 - RNA, 19 nt, Artificial Sequence
  Description of Artificial Sequence: Synthetic oligonucleotide
  Sense strand starting at position 784 of SEQ ID NO: 317522
cggauuugguuugaacaag

SEQ ID NO: 497560 - RNA, 19 nt, Artificial Sequence
  Description of Artificial Sequence: Synthetic oligonucleotide
  Antisense Strand to SEQ ID NO: 497559
cuuguucaaaccaaauccg

SEQ ID NO: 497561 - RNA, 19 nt, Artificial Sequence
  Description of Artificial Sequence: Synthetic oligonucleotide
  Sense strand starting at position 932 of SEQ ID NO: 317522
ucgggugagcuguguauuu

SEQ ID NO: 497562 - RNA, 19 nt, Artificial Sequence
  Description of Artificial Sequence: Synthetic oligonucleotide
  Antisense Strand to SEQ ID NO: 497561
aaauacacagcucacccga

SEQ ID NO: 497563 - RNA, 19 nt, Artificial Sequence
  Description of Artificial Sequence: Synthetic oligonucleotide
  Sense strand starting at position 937 of SEQ ID NO: 317522
ugagcuguguauuuccaca

SEQ ID NO: 497564 - RNA, 19 nt, Artificial Sequence
  Description of Artificial Sequence: Synthetic oligonucleotide
  Antisense Strand to SEQ ID NO: 497563
uguggaaauacacagcuca

SEQ ID NO: 497565 - RNA, 19 nt, Artificial Sequence
  Description of Artificial Sequence: Synthetic oligonucleotide
  Sense strand starting at position 1160 of SEQ ID NO: 317522
caccgagagucuuuccaaa

SEQ ID NO: 497566 - RNA, 19 nt, Artificial Sequence
  Description of Artificial Sequence: Synthetic oligonucleotide
  Antisense Strand to SEQ ID NO: 497565
uuuggaaagacucucggug

SEQ ID NO: 497567 - RNA, 19 nt, Artificial Sequence
  Description of Artificial Sequence: Synthetic oligonucleotide
  Sense strand starting at position 1162 of SEQ ID NO: 317522
ccgagagucuuuccaaacc

SEQ ID NO: 497568 - RNA, 19 nt, Artificial Sequence
  Description of Artificial Sequence: Synthetic oligonucleotide
  Antisense Strand to SEQ ID NO: 497567
gguuuggaaagacucucgg

SEQ ID NO: 497569 - RNA, 19 nt, Artificial Sequence
  Description of Artificial Sequence: Synthetic oligonucleotide
  Sense strand starting at position 1370 of SEQ ID NO: 317522
cuucuugacuaguugggaa

SEQ ID NO: 497570 - RNA, 19 nt, Artificial Sequence
  Description of Artificial Sequence: Synthetic oligonucleotide
  Antisense Strand to SEQ ID NO: 497569
uucccaacuagucaagaag

SEQ ID NO: 497571 - RNA, 19 nt, Artificial Sequence
  Description of Artificial Sequence: Synthetic oligonucleotide
  Sense strand starting at position 1635 of SEQ ID NO: 317522
gaccuuuccucaucguaga

SEQ ID NO: 497572 - RNA, 19 nt, Artificial Sequence
  Description of Artificial Sequence: Synthetic oligonucleotide
  Antisense Strand to SEQ ID NO: 497571
ucuacgaugaggaaagguc

SEQ ID NO: 497573 - RNA, 19 nt, Artificial Sequence
  Description of Artificial Sequence: Synthetic oligonucleotide
  Sense strand starting at position 2315 of SEQ ID NO: 317522
gccuuauguaagcaaggau

SEQ ID NO: 497574 - RNA, 19 nt, Artificial Sequence
  Description of Artificial Sequence: Synthetic oligonucleotide
  Antisense Strand to SEQ ID NO: 497573
auccuugcuuacauaaggc

SEQ ID NO: 497575 - RNA, 19 nt, Artificial Sequence
  Description of Artificial Sequence: Synthetic oligonucleotide
  Sense strand starting at position 2327 of SEQ ID NO: 317522
caaggauugcagggagauc

SEQ ID NO: 497576 - RNA, 19 nt, Artificial Sequence
  Description of Artificial Sequence: Synthetic oligonucleotide
  Antisense Strand to SEQ ID NO: 497575
gaucucccugcaauccuug

SEQ ID NO: 497577 - RNA, 19 nt, Artificial Sequence
  Description of Artificial Sequence: Synthetic oligonucleotide
  Sense strand starting at position 2562 of SEQ ID NO: 317522
agccgaauucccuaggacu

SEQ ID NO: 497578 - RNA, 19 nt, Artificial Sequence
  Description of Artificial Sequence: Synthetic oligonucleotide
  Antisense Strand to SEQ ID NO: 497577
aguccuagggaauucggcu

SEQ ID NO: 497579 - RNA, 19 nt, Artificial Sequence
  Description of Artificial Sequence: Synthetic oligonucleotide
  Sense strand starting at position 2713 of SEQ ID NO: 317522
gcgccagucagacugcuuu

SEQ ID NO: 497580 - RNA, 19 nt, Artificial Sequence
  Description of Artificial Sequence: Synthetic oligonucleotide
  Antisense Strand to SEQ ID NO: 497579
aaagcagucugacuggcgc

SEQ ID NO: 497581 - RNA, 19 nt, Artificial Sequence
  Description of Artificial Sequence: Synthetic oligonucleotide
  Sense strand starting at position 2783 of SEQ ID NO: 317522
gacggaaacucauucugca

SEQ ID NO: 497582 - RNA, 19 nt, Artificial Sequence
  Description of Artificial Sequence: Synthetic oligonucleotide
  Antisense Strand to SEQ ID NO: 497581
ugcagaaugaguuuccguc

SEQ ID NO: 497583 - RNA, 19 nt, Artificial Sequence
  Description of Artificial Sequence: Synthetic oligonucleotide
  Sense strand starting at position 2999 of SEQ ID NO: 317522
aggaaauaauugucuacgu

SEQ ID NO: 497584 - RNA, 19 nt, Artificial Sequence
  Description of Artificial Sequence: Synthetic oligonucleotide
  Antisense Strand to SEQ ID NO: 497583
acguagacaauuauuuccu

SEQ ID NO: 497585 - RNA, 19 nt, Artificial Sequence
  Description of Artificial Sequence: Synthetic oligonucleotide
  Sense strand starting at position 3000 of SEQ ID NO: 317522
ggaaauaauugucuacgua

SEQ ID NO: 497586 - RNA, 19 nt, Artificial Sequence
  Description of Artificial Sequence: Synthetic oligonucleotide
  Antisense Strand to SEQ ID NO: 497585
uacguagacaauuauuucc

SEQ ID NO: 497587 - RNA, 19 nt, Artificial Sequence
  Description of Artificial Sequence: Synthetic oligonucleotide
  Sense strand starting at position 3001 of SEQ ID NO: 317522
gaaauaauugucuacguag

SEQ ID NO: 497588 - RNA, 19 nt, Artificial Sequence
  Description of Artificial Sequence: Synthetic oligonucleotide
  Antisense Strand to SEQ ID NO: 497587
cuacguagacaauuauuuc

SEQ ID NO: 497589 - RNA, 19 nt, Artificial Sequence
  Description of Artificial Sequence: Synthetic oligonucleotide
  Sense strand starting at position 3029 of SEQ ID NO: 317522
gaaucccuguggucaugau

SEQ ID NO: 497590 - RNA, 19 nt, Artificial Sequence
  Description of Artificial Sequence: Synthetic oligonucleotide
  Antisense Strand to SEQ ID NO: 497589
aucaugaccacagggauuc

SEQ ID NO: 497591 - RNA, 19 nt, Artificial Sequence
  Description of Artificial Sequence: Synthetic oligonucleotide
  Sense strand starting at position 3056 of SEQ ID NO: 317522
gcaagauuggguggguaaa

SEQ ID NO: 497592 - RNA, 19 nt, Artificial Sequence
  Description of Artificial Sequence: Synthetic oligonucleotide
  Antisense Strand to SEQ ID NO: 497591
uuuacccacccaaucuugc

SEQ ID NO: 497593 - RNA, 19 nt, Artificial Sequence
  Description of Artificial Sequence: Synthetic oligonucleotide
  Sense strand starting at position 3163 of SEQ ID NO: 317522
agauuagcaugucuuuaaa

SEQ ID NO: 497594 - RNA, 19 nt, Artificial Sequence
  Description of Artificial Sequence: Synthetic oligonucleotide
  Antisense Strand to SEQ ID NO: 497593
uuuaaagacaugcuaaucu

SEQ ID NO: 497595 - RNA, 19 nt, Artificial Sequence
  Description of Artificial Sequence: Synthetic oligonucleotide
  Sense strand starting at position 3286 of SEQ ID NO: 317522
ggucauaacuacucuguua

SEQ ID NO: 497596 - RNA, 19 nt, Artificial Sequence
  Description of Artificial Sequence: Synthetic oligonucleotide
  Antisense Strand to SEQ ID NO: 497595
uaacagaguaguuaugacc

SEQ ID NO: 497597 - RNA, 19 nt, Artificial Sequence
  Description of Artificial Sequence: Synthetic oligonucleotide
  Sense strand starting at position 3316 of SEQ ID NO: 317522
ucagguaaccugugaaugu

SEQ ID NO: 497598 - RNA, 19 nt, Artificial Sequence
  Description of Artificial Sequence: Synthetic oligonucleotide
  Antisense Strand to SEQ ID NO: 497597
acauucacagguuaccuga

SEQ ID NO: 497599 - RNA, 19 nt, Artificial Sequence
  Description of Artificial Sequence: Synthetic oligonucleotide
  Sense strand starting at position 3431 of SEQ ID NO: 317522
aagaccuaucucggaugaa

SEQ ID NO: 497600 - RNA, 19 nt, Artificial Sequence
  Description of Artificial Sequence: Synthetic oligonucleotide
  Antisense Strand to SEQ ID NO: 497599
uucauccgagauaggucuu

SEQ ID NO: 497601 - RNA, 19 nt, Artificial Sequence
  Description of Artificial Sequence: Synthetic oligonucleotide
  Sense strand starting at position 3434 of SEQ ID NO: 317522
accuaucucggaugaauca

SEQ ID NO: 497602 - RNA, 19 nt, Artificial Sequence
  Description of Artificial Sequence: Synthetic oligonucleotide
  Antisense Strand to SEQ ID NO: 497601
ugauucauccgagauaggu

SEQ ID NO: 497603 - RNA, 19 nt, Artificial Sequence
  Description of Artificial Sequence: Synthetic oligonucleotide
  Sense strand starting at position 3687 of SEQ ID NO: 317522
uucccuaauuuguaagaug

SEQ ID NO: 497604 - RNA, 19 nt, Artificial Sequence
  Description of Artificial Sequence: Synthetic oligonucleotide
  Antisense Strand to SEQ ID NO: 497603
caucuuacaaauuagggaa

SEQ ID NO: 497605 - RNA, 19 nt, Artificial Sequence
  Description of Artificial Sequence: Synthetic oligonucleotide
  Sense strand starting at position 3698 of SEQ ID NO: 317522
guaagaugggucuaguaac

SEQ ID NO: 497606 - RNA, 19 nt, Artificial Sequence
  Description of Artificial Sequence: Synthetic oligonucleotide
  Antisense Strand to SEQ ID NO: 497605
guuacuagacccaucuuac

SEQ ID NO: 497607 - RNA, 19 nt, Artificial Sequence
  Description of Artificial Sequence: Synthetic oligonucleotide
  Sense strand starting at position 3706 of SEQ ID NO: 317522
ggucuaguaacaggaacua

SEQ ID NO: 497608 - RNA, 19 nt, Artificial Sequence
  Description of Artificial Sequence: Synthetic oligonucleotide
  Antisense Strand to SEQ ID NO: 497607
uaguuccuguuacuagacc

SEQ ID NO: 497609 - RNA, 19 nt, Artificial Sequence
  Description of Artificial Sequence: Synthetic oligonucleotide
  Sense strand starting at position 3742 of SEQ ID NO: 317522
aggauuauguaaguuaaac

SEQ ID NO: 497610 - RNA, 19 nt, Artificial Sequence
  Description of Artificial Sequence: Synthetic oligonucleotide
  Antisense Strand to SEQ ID NO: 497609
guuuaacuuacauaauccu

SEQ ID NO: 497611 - RNA, 19 nt, Artificial Sequence
  Description of Artificial Sequence: Synthetic oligonucleotide
  Sense strand starting at position 3886 of SEQ ID NO: 317522
ucauaucuguacuuucuga

SEQ ID NO: 497612 - RNA, 19 nt, Artificial Sequence
  Description of Artificial Sequence: Synthetic oligonucleotide
  Antisense Strand to SEQ ID NO: 497611
ucagaaaguacagauauga

SEQ ID NO: 497613 - RNA, 19 nt, Artificial Sequence
  Description of Artificial Sequence: Synthetic oligonucleotide
  Sense strand starting at position 3902 of SEQ ID NO: 317522
ugaggucguaguuaugaga

SEQ ID NO: 497614 - RNA, 19 nt, Artificial Sequence
  Description of Artificial Sequence: Synthetic oligonucleotide
  Antisense Strand to SEQ ID NO: 497613
ucucauaacuacgaccuca

SEQ ID NO: 497615 - RNA, 19 nt, Artificial Sequence
  Description of Artificial Sequence: Synthetic oligonucleotide
  Sense strand starting at position 3909 of SEQ ID NO: 317522
guaguuaugagauacaugu

SEQ ID NO: 497616 - RNA, 19 nt, Artificial Sequence
  Description of Artificial Sequence: Synthetic oligonucleotide
  Antisense Strand to SEQ ID NO: 497615
acauguaucucauaacuac

SEQ ID NO: 497617 - RNA, 19 nt, Artificial Sequence
  Description of Artificial Sequence: Synthetic oligonucleotide
  Sense strand starting at position 3948 of SEQ ID NO: 317522
gcuagugugaauuggaaau

SEQ ID NO: 497618 - RNA, 19 nt, Artificial Sequence
  Description of Artificial Sequence: Synthetic oligonucleotide
  Antisense Strand to SEQ ID NO: 497617
auuuccaauucacacuagc

SEQ ID NO: 497619 - RNA, 19 nt, Artificial Sequence
  Description of Artificial Sequence: Synthetic oligonucleotide
  Sense strand starting at position 3950 of SEQ ID NO: 317522
uagugugaauuggaaauuu

SEQ ID NO: 497620 - RNA, 19 nt, Artificial Sequence
  Description of Artificial Sequence: Synthetic oligonucleotide
  Antisense Strand to SEQ ID NO: 497619
aaauuuccaauucacacua

SEQ ID NO: 497621 - RNA, 19 nt, Artificial Sequence
  Description of Artificial Sequence: Synthetic oligonucleotide
  Sense strand starting at position 49 of SEQ ID NO: 317523
gccugugucacugcgacua

SEQ ID NO: 497622 - RNA, 19 nt, Artificial Sequence
  Description of Artificial Sequence: Synthetic oligonucleotide
  Antisense Strand to SEQ ID NO: 497621
uagucgcagugacacaggc

SEQ ID NO: 497623 - RNA, 19 nt, Artificial Sequence
  Description of Artificial Sequence: Synthetic oligonucleotide
  Sense strand starting at position 136 of SEQ ID NO: 317523
aagugaaggcuuugaagua

SEQ ID NO: 497624 - RNA, 19 nt, Artificial Sequence
  Description of Artificial Sequence: Synthetic oligonucleotide
  Antisense Strand to SEQ ID NO: 497623
uacuucaaagccuucacuu

SEQ ID NO: 497625 - RNA, 19 nt, Artificial Sequence
  Description of Artificial Sequence: Synthetic oligonucleotide
  Sense strand starting at position 154 of SEQ ID NO: 317523
aagguaccucuugguugaa

SEQ ID NO: 497626 - RNA, 19 nt, Artificial Sequence
  Description of Artificial Sequence: Synthetic oligonucleotide
  Antisense Strand to SEQ ID NO: 497625
uucaaccaagagguaccuu

SEQ ID NO: 497627 - RNA, 19 nt, Artificial Sequence
  Description of Artificial Sequence: Synthetic oligonucleotide
  Sense strand starting at position 155 of SEQ ID NO: 317523
agguaccucuugguugaau

SEQ ID NO: 497628 - RNA, 19 nt, Artificial Sequence
  Description of Artificial Sequence: Synthetic oligonucleotide
  Antisense Strand to SEQ ID NO: 497627
auucaaccaagagguaccu

SEQ ID NO: 497629 - RNA, 19 nt, Artificial Sequence
  Description of Artificial Sequence: Synthetic oligonucleotide
  Sense strand starting at position 182 of SEQ ID NO: 317523
uauuauuagcagugugaca

SEQ ID NO: 497630 - RNA, 19 nt, Artificial Sequence
  Description of Artificial Sequence: Synthetic oligonucleotide
  Antisense Strand to SEQ ID NO: 497629
ugucacacugcuaauaaua

SEQ ID NO: 497631 - RNA, 19 nt, Artificial Sequence
  Description of Artificial Sequence: Synthetic oligonucleotide
  Sense strand starting at position 191 of SEQ ID NO: 317523
cagugugacauuggucaag

SEQ ID NO: 497632 - RNA, 19 nt, Artificial Sequence
  Description of Artificial Sequence: Synthetic oligonucleotide
  Antisense Strand to SEQ ID NO: 497631
cuugaccaaugucacacug

SEQ ID NO: 497633 - RNA, 19 nt, Artificial Sequence
  Description of Artificial Sequence: Synthetic oligonucleotide
  Sense strand starting at position 579 of SEQ ID NO: 317523
uaucuugcaggguaguuaa

SEQ ID NO: 497634 - RNA, 19 nt, Artificial Sequence
  Description of Artificial Sequence: Synthetic oligonucleotide
  Antisense Strand to SEQ ID NO: 497633
uuaacuacccugcaagaua

SEQ ID NO: 497635 - RNA, 19 nt, Artificial Sequence
  Description of Artificial Sequence: Synthetic oligonucleotide
  Sense strand starting at position 590 of SEQ ID NO: 317523
guaguuaacgauuaaagca

SEQ ID NO: 497636 - RNA, 19 nt, Artificial Sequence
  Description of Artificial Sequence: Synthetic oligonucleotide
  Antisense Strand to SEQ ID NO: 497635
ugcuuuaaucguuaacuac

SEQ ID NO: 497637 - RNA, 19 nt, Artificial Sequence
  Description of Artificial Sequence: Synthetic oligonucleotide
  Sense strand starting at position 648 of SEQ ID NO: 317523
aagguaagagccugacaaa

SEQ ID NO: 497638 - RNA, 19 nt, Artificial Sequence
  Description of Artificial Sequence: Synthetic oligonucleotide
  Antisense Strand to SEQ ID NO: 497637
uuugucaggcucuuaccuu

SEQ ID NO: 497639 - RNA, 19 nt, Artificial Sequence
  Description of Artificial Sequence: Synthetic oligonucleotide
  Sense strand starting at position 704 of SEQ ID NO: 317523
aaaguuagccauuaaagug

SEQ ID NO: 497640 - RNA, 19 nt, Artificial Sequence
  Description of Artificial Sequence: Synthetic oligonucleotide
  Antisense Strand to SEQ ID NO: 497639
cacuuuaauggcuaacuuu

SEQ ID NO: 497641 - RNA, 19 nt, Artificial Sequence
  Description of Artificial Sequence: Synthetic oligonucleotide
  Sense strand starting at position 917 of SEQ ID NO: 317523
caaaucaugucauuaggag

SEQ ID NO: 497642 - RNA, 19 nt, Artificial Sequence
  Description of Artificial Sequence: Synthetic oligonucleotide
  Antisense Strand to SEQ ID NO: 497641
cuccuaaugacaugauuug

SEQ ID NO: 497643 - RNA, 19 nt, Artificial Sequence
  Description of Artificial Sequence: Synthetic oligonucleotide
  Sense strand starting at position 978 of SEQ ID NO: 317523
cgcuuaagaucccuacuac

SEQ ID NO: 497644 - RNA, 19 nt, Artificial Sequence
  Description of Artificial Sequence: Synthetic oligonucleotide
  Antisense Strand to SEQ ID NO: 497643
guaguagggaucuuaagcg

SEQ ID NO: 497645 - RNA, 19 nt, Artificial Sequence
  Description of Artificial Sequence: Synthetic oligonucleotide
  Sense strand starting at position 1471 of SEQ ID NO: 317523
uugaauaacucugggauuu

SEQ ID NO: 497646 - RNA, 19 nt, Artificial Sequence
  Description of Artificial Sequence: Synthetic oligonucleotide
  Antisense Strand to SEQ ID NO: 497645
aaaucccagaguuauucaa

SEQ ID NO: 497647 - RNA, 19 nt, Artificial Sequence
  Description of Artificial Sequence: Synthetic oligonucleotide
  Sense strand starting at position 2042 of SEQ ID NO: 317523
ccacccuucgcggauugau

SEQ ID NO: 497648 - RNA, 19 nt, Artificial Sequence
  Description of Artificial Sequence: Synthetic oligonucleotide
  Antisense Strand to SEQ ID NO: 497647
aucaauccgcgaagggugg

SEQ ID NO: 497649 - RNA, 19 nt, Artificial Sequence
  Description of Artificial Sequence: Synthetic oligonucleotide
  Sense strand starting at position 2146 of SEQ ID NO: 317523
ggguguuuaaucgucgcca

SEQ ID NO: 497650 - RNA, 19 nt, Artificial Sequence
  Description of Artificial Sequence: Synthetic oligonucleotide
  Antisense Strand to SEQ ID NO: 497649
uggcgacgauuaaacaccc

SEQ ID NO: 497651 - RNA, 19 nt, Artificial Sequence
  Description of Artificial Sequence: Synthetic oligonucleotide
  Sense strand starting at position 2208 of SEQ ID NO: 317523
uugagucgaaagugaaauu

SEQ ID NO: 497652 - RNA, 19 nt, Artificial Sequence
  Description of Artificial Sequence: Synthetic oligonucleotide
  Antisense Strand to SEQ ID NO: 497651
aauuucacuuucgacucaa

SEQ ID NO: 497653 - RNA, 19 nt, Artificial Sequence
  Description of Artificial Sequence: Synthetic oligonucleotide
  Sense strand starting at position 2313 of SEQ ID NO: 317523
cuuucugaucccgguaaau

SEQ ID NO: 497654 - RNA, 19 nt, Artificial Sequence
  Description of Artificial Sequence: Synthetic oligonucleotide
  Antisense Strand to SEQ ID NO: 497653
auuuaccgggaucagaaag

SEQ ID NO: 497655 - RNA, 19 nt, Artificial Sequence
  Description of Artificial Sequence: Synthetic oligonucleotide
  Sense strand starting at position 2315 of SEQ ID NO: 317523
uucugaucccgguaaauug

SEQ ID NO: 497656 - RNA, 19 nt, Artificial Sequence
  Description of Artificial Sequence: Synthetic oligonucleotide
  Antisense Strand to SEQ ID NO: 497655
caauuuaccgggaucagaa

SEQ ID NO: 497657 - RNA, 19 nt, Artificial Sequence
  Description of Artificial Sequence: Synthetic oligonucleotide
  Sense strand starting at position 2484 of SEQ ID NO: 317523
aagugucgucaggaggaaa

SEQ ID NO: 497658 - RNA, 19 nt, Artificial Sequence
  Description of Artificial Sequence: Synthetic oligonucleotide
  Antisense Strand to SEQ ID NO: 497657
uuuccuccugacgacacuu

SEQ ID NO: 497659 - RNA, 19 nt, Artificial Sequence
  Description of Artificial Sequence: Synthetic oligonucleotide
  Sense strand starting at position 2555 of SEQ ID NO: 317523
caguuuggcgaguaacaua

SEQ ID NO: 497660 - RNA, 19 nt, Artificial Sequence
  Description of Artificial Sequence: Synthetic oligonucleotide
  Antisense Strand to SEQ ID NO: 497659
uauguuacucgccaaacug

SEQ ID NO: 497661 - RNA, 19 nt, Artificial Sequence
  Description of Artificial Sequence: Synthetic oligonucleotide
  Sense strand starting at position 2560 of SEQ ID NO: 317523
uggcgaguaacauaauguu

SEQ ID NO: 497662 - RNA, 19 nt, Artificial Sequence
  Description of Artificial Sequence: Synthetic oligonucleotide
  Antisense Strand to SEQ ID NO: 497661
aacauuauguuacucgcca

SEQ ID NO: 497663 - RNA, 19 nt, Artificial Sequence
  Description of Artificial Sequence: Synthetic oligonucleotide
  Sense strand starting at position 2675 of SEQ ID NO: 317523
ugagguugucaguacacau

SEQ ID NO: 497664 - RNA, 19 nt, Artificial Sequence
  Description of Artificial Sequence: Synthetic oligonucleotide
  Antisense Strand to SEQ ID NO: 497663
auguguacugacaaccuca

SEQ ID NO: 497665 - RNA, 19 nt, Artificial Sequence
  Description of Artificial Sequence: Synthetic oligonucleotide
  Sense strand starting at position 2700 of SEQ ID NO: 317523
ggaauagucuuguaaauuu

SEQ ID NO: 497666 - RNA, 19 nt, Artificial Sequence
  Description of Artificial Sequence: Synthetic oligonucleotide
  Antisense Strand to SEQ ID NO: 497665
aaauuuacaagacuauucc

SEQ ID NO: 497667 - RNA, 19 nt, Artificial Sequence
  Description of Artificial Sequence: Synthetic oligonucleotide
  Sense strand starting at position 2738 of SEQ ID NO: 317523
ggucuaguuagcuaacuga

SEQ ID NO: 497668 - RNA, 19 nt, Artificial Sequence
  Description of Artificial Sequence: Synthetic oligonucleotide
  Antisense Strand to SEQ ID NO: 497667
ucaguuagcuaacuagacc

SEQ ID NO: 497669 - RNA, 19 nt, Artificial Sequence
  Description of Artificial Sequence: Synthetic oligonucleotide
  Sense strand starting at position 2926 of SEQ ID NO: 317523
agaggaagcugggaagaau

SEQ ID NO: 497670 - RNA, 19 nt, Artificial Sequence
  Description of Artificial Sequence: Synthetic oligonucleotide
  Antisense Strand to SEQ ID NO: 497669
auucuucccagcuuccucu

SEQ ID NO: 497671 - RNA, 19 nt, Artificial Sequence
  Description of Artificial Sequence: Synthetic oligonucleotide
  Sense strand starting at position 2971 of SEQ ID NO: 317523
auguccaaucaauagucau

SEQ ID NO: 497672 - RNA, 19 nt, Artificial Sequence
  Description of Artificial Sequence: Synthetic oligonucleotide
  Antisense Strand to SEQ ID NO: 497671
augacuauugauuggacau

SEQ ID NO: 497673 - RNA, 19 nt, Artificial Sequence
  Description of Artificial Sequence: Synthetic oligonucleotide
  Sense strand starting at position 3049 of SEQ ID NO: 317523
gugccugugacauagauua

SEQ ID NO: 497674 - RNA, 19 nt, Artificial Sequence
  Description of Artificial Sequence: Synthetic oligonucleotide
  Antisense Strand to SEQ ID NO: 497673
uaaucuaugucacaggcac

SEQ ID NO: 497675 - RNA, 19 nt, Artificial Sequence
  Description of Artificial Sequence: Synthetic oligonucleotide
  Sense strand starting at position 3051 of SEQ ID NO: 317523
gccugugacauagauuaug

SEQ ID NO: 497676 - RNA, 19 nt, Artificial Sequence
  Description of Artificial Sequence: Synthetic oligonucleotide
  Antisense Strand to SEQ ID NO: 497675
cauaaucuaugucacaggc

SEQ ID NO: 497677 - RNA, 19 nt, Artificial Sequence
  Description of Artificial Sequence: Synthetic oligonucleotide
  Sense strand starting at position 3062 of SEQ ID NO: 317523
agauuauguucuucucauc

SEQ ID NO: 497678 - RNA, 19 nt, Artificial Sequence
  Description of Artificial Sequence: Synthetic oligonucleotide
  Antisense Strand to SEQ ID NO: 497677
gaugagaagaacauaaucu

SEQ ID NO: 497679 - RNA, 19 nt, Artificial Sequence
  Description of Artificial Sequence: Synthetic oligonucleotide
  Sense strand starting at position 3081 of SEQ ID NO: 317523
auuucucauugagaugaca

SEQ ID NO: 497680 - RNA, 19 nt, Artificial Sequence
  Description of Artificial Sequence: Synthetic oligonucleotide
  Antisense Strand to SEQ ID NO: 497679
ugucaucucaaugagaaau

SEQ ID NO: 497681 - RNA, 19 nt, Artificial Sequence
  Description of Artificial Sequence: Synthetic oligonucleotide
  Sense strand starting at position 3256 of SEQ ID NO: 317523
gugcaaacuccuuaguuug

SEQ ID NO: 497682 - RNA, 19 nt, Artificial Sequence
  Description of Artificial Sequence: Synthetic oligonucleotide
  Antisense Strand to SEQ ID NO: 497681
caaacuaaggaguuugcac

SEQ ID NO: 497683 - RNA, 19 nt, Artificial Sequence
  Description of Artificial Sequence: Synthetic oligonucleotide
  Sense strand starting at position 3401 of SEQ ID NO: 317523
cugcuaauuccuuaaggcu

SEQ ID NO: 497684 - RNA, 19 nt, Artificial Sequence
  Description of Artificial Sequence: Synthetic oligonucleotide
  Antisense Strand to SEQ ID NO: 497683
agccuuaaggaauuagcag

SEQ ID NO: 497685 - RNA, 19 nt, Artificial Sequence
  Description of Artificial Sequence: Synthetic oligonucleotide
  Sense strand starting at position 3460 of SEQ ID NO: 317523
gguacacaucuauauguua

SEQ ID NO: 497686 - RNA, 19 nt, Artificial Sequence
  Description of Artificial Sequence: Synthetic oligonucleotide
  Antisense Strand to SEQ ID NO: 497685
uaacauauagauguguacc

SEQ ID NO: 497687 - RNA, 19 nt, Artificial Sequence
  Description of Artificial Sequence: Synthetic oligonucleotide
  Sense strand starting at position 3501 of SEQ ID NO: 317523
guauaugguguacauugaa

SEQ ID NO: 497688 - RNA, 19 nt, Artificial Sequence
  Description of Artificial Sequence: Synthetic oligonucleotide
  Antisense Strand to SEQ ID NO: 497687
uucaauguacaccauauac

SEQ ID NO: 497689 - RNA, 19 nt, Artificial Sequence
  Description of Artificial Sequence: Synthetic oligonucleotide
  Sense strand starting at position 3504 of SEQ ID NO: 317523
uaugguguacauugaauaa

SEQ ID NO: 497690 - RNA, 19 nt, Artificial Sequence
  Description of Artificial Sequence: Synthetic oligonucleotide
  Antisense Strand to SEQ ID NO: 497689
uuauucaauguacaccaua

SEQ ID NO: 497691 - RNA, 19 nt, Artificial Sequence
  Description of Artificial Sequence: Synthetic oligonucleotide
  Sense strand starting at position 3515 of SEQ ID NO: 317523
uugaauaaaugcuugcuaa

SEQ ID NO: 497692 - RNA, 19 nt, Artificial Sequence
  Description of Artificial Sequence: Synthetic oligonucleotide
  Antisense Strand to SEQ ID NO: 497691
uuagcaagcauuuauucaa

SEQ ID NO: 497693 - RNA, 19 nt, Artificial Sequence
  Description of Artificial Sequence: Synthetic oligonucleotide
  Sense strand starting at position 3516 of SEQ ID NO: 317523
ugaauaaaugcuugcuaaa

SEQ ID NO: 497694 - RNA, 19 nt, Artificial Sequence
  Description of Artificial Sequence: Synthetic oligonucleotide
  Antisense Strand to SEQ ID NO: 497693
uuuagcaagcauuuauuca

SEQ ID NO: 497695 - RNA, 19 nt, Artificial Sequence
  Description of Artificial Sequence: Synthetic oligonucleotide
  Sense strand starting at position 3546 of SEQ ID NO: 317523
agggcaggacuauguuauu

SEQ ID NO: 497696 - RNA, 19 nt, Artificial Sequence
  Description of Artificial Sequence: Synthetic oligonucleotide
  Antisense Strand to SEQ ID NO: 497695
aauaacauaguccugcccu

SEQ ID NO: 497697 - RNA, 19 nt, Artificial Sequence
  Description of Artificial Sequence: Synthetic oligonucleotide
  Sense strand starting at position 3646 of SEQ ID NO: 317523
ugaauauuauacuaagagg

SEQ ID NO: 497698 - RNA, 19 nt, Artificial Sequence
  Description of Artificial Sequence: Synthetic oligonucleotide
  Antisense Strand to SEQ ID NO: 497697
ccucuuaguauaauauuca

SEQ ID NO: 497699 - RNA, 19 nt, Artificial Sequence
  Description of Artificial Sequence: Synthetic oligonucleotide
  Sense strand starting at position 3917 of SEQ ID NO: 317523
cuaagaaaugcaugcaaag

SEQ ID NO: 497700 - RNA, 19 nt, Artificial Sequence
  Description of Artificial Sequence: Synthetic oligonucleotide
  Antisense Strand to SEQ ID NO: 497699
cuuugcaugcauuucuuag

SEQ ID NO: 497701 - RNA, 19 nt, Artificial Sequence
  Description of Artificial Sequence: Synthetic oligonucleotide
  Sense strand starting at position 2050 of SEQ ID NO: 317524
gcagaaagacgcuaucucu

SEQ ID NO: 497702 - RNA, 19 nt, Artificial Sequence
  Description of Artificial Sequence: Synthetic oligonucleotide
  Antisense Strand to SEQ ID NO: 497701
agagauagcgucuuucugc

SEQ ID NO: 497703 - RNA, 19 nt, Artificial Sequence
  Description of Artificial Sequence: Synthetic oligonucleotide
  Sense strand starting at position 2283 of SEQ ID NO: 317524
ucagauuacuccucaggau

SEQ ID NO: 497704 - RNA, 19 nt, Artificial Sequence
  Description of Artificial Sequence: Synthetic oligonucleotide
  Antisense Strand to SEQ ID NO: 497703
auccugaggaguaaucuga

SEQ ID NO: 497705 - RNA, 19 nt, Artificial Sequence
  Description of Artificial Sequence: Synthetic oligonucleotide
  Sense strand starting at position 2541 of SEQ ID NO: 317524
agaauucggaagugugcuu

SEQ ID NO: 497706 - RNA, 19 nt, Artificial Sequence
  Description of Artificial Sequence: Synthetic oligonucleotide
  Antisense Strand to SEQ ID NO: 497705
aagcacacuuccgaauucu

SEQ ID NO: 497707 - RNA, 19 nt, Artificial Sequence
  Description of Artificial Sequence: Synthetic oligonucleotide
  Sense strand starting at position 2686 of SEQ ID NO: 317524
gauucucuauccguguuga

SEQ ID NO: 497708 - RNA, 19 nt, Artificial Sequence
  Description of Artificial Sequence: Synthetic oligonucleotide
  Antisense Strand to SEQ ID NO: 497707
ucaacacggauagagaauc

SEQ ID NO: 497709 - RNA, 19 nt, Artificial Sequence
  Description of Artificial Sequence: Synthetic oligonucleotide
  Sense strand starting at position 2687 of SEQ ID NO: 317524
auucucuauccguguugaa

SEQ ID NO: 497710 - RNA, 19 nt, Artificial Sequence
  Description of Artificial Sequence: Synthetic oligonucleotide
  Antisense Strand to SEQ ID NO: 497709
uucaacacggauagagaau

SEQ ID NO: 497711 - RNA, 19 nt, Artificial Sequence
  Description of Artificial Sequence: Synthetic oligonucleotide
  Sense strand starting at position 2705 of SEQ ID NO: 317524
auuacuugccaguggacaa

SEQ ID NO: 497712 - RNA, 19 nt, Artificial Sequence
  Description of Artificial Sequence: Synthetic oligonucleotide
  Antisense Strand to SEQ ID NO: 497711
uuguccacuggcaaguaau

SEQ ID NO: 497713 - RNA, 19 nt, Artificial Sequence
  Description of Artificial Sequence: Synthetic oligonucleotide
  Sense strand starting at position 2725 of SEQ ID NO: 317524
aagacaaguguuugcauga

SEQ ID NO: 497714 - RNA, 19 nt, Artificial Sequence
  Description of Artificial Sequence: Synthetic oligonucleotide
  Antisense Strand to SEQ ID NO: 497713
ucaugcaaacacuugucuu

SEQ ID NO: 497715 - RNA, 19 nt, Artificial Sequence
  Description of Artificial Sequence: Synthetic oligonucleotide
  Sense strand starting at position 2726 of SEQ ID NO: 317524
agacaaguguuugcaugaa

SEQ ID NO: 497716 - RNA, 19 nt, Artificial Sequence
  Description of Artificial Sequence: Synthetic oligonucleotide
  Antisense Strand to SEQ ID NO: 497715
uucaugcaaacacuugucu

SEQ ID NO: 497717 - RNA, 19 nt, Artificial Sequence
  Description of Artificial Sequence: Synthetic oligonucleotide
  Sense strand starting at position 2830 of SEQ ID NO: 317524
caauguagacuguguagga

SEQ ID NO: 497718 - RNA, 19 nt, Artificial Sequence
  Description of Artificial Sequence: Synthetic oligonucleotide
  Antisense Strand to SEQ ID NO: 497717
uccuacacagucuacauug

SEQ ID NO: 497719 - RNA, 19 nt, Artificial Sequence
  Description of Artificial Sequence: Synthetic oligonucleotide
  Sense strand starting at position 2840 of SEQ ID NO: 317524
uguguaggacuuuguggaa

SEQ ID NO: 497720 - RNA, 19 nt, Artificial Sequence
  Description of Artificial Sequence: Synthetic oligonucleotide
  Antisense Strand to SEQ ID NO: 497719
uuccacaaaguccuacaca

SEQ ID NO: 497721 - RNA, 19 nt, Artificial Sequence
  Description of Artificial Sequence: Synthetic oligonucleotide
  Sense strand starting at position 2852 of SEQ ID NO: 317524
uguggaaucaugcaaucag

SEQ ID NO: 497722 - RNA, 19 nt, Artificial Sequence
  Description of Artificial Sequence: Synthetic oligonucleotide
  Antisense Strand to SEQ ID NO: 497721
cugauugcaugauuccaca

SEQ ID NO: 497723 - RNA, 19 nt, Artificial Sequence
  Description of Artificial Sequence: Synthetic oligonucleotide
  Sense strand starting at position 2861 of SEQ ID NO: 317524
augcaaucagcgggagacu

SEQ ID NO: 497724 - RNA, 19 nt, Artificial Sequence
  Description of Artificial Sequence: Synthetic oligonucleotide
  Antisense Strand to SEQ ID NO: 497723
agucucccgcugauugcau

SEQ ID NO: 497725 - RNA, 19 nt, Artificial Sequence
  Description of Artificial Sequence: Synthetic oligonucleotide
  Sense strand starting at position 2862 of SEQ ID NO: 317524
ugcaaucagcgggagacua

SEQ ID NO: 497726 - RNA, 19 nt, Artificial Sequence
  Description of Artificial Sequence: Synthetic oligonucleotide
  Antisense Strand to SEQ ID NO: 497725
uagucucccgcugauugca

SEQ ID NO: 497727 - RNA, 19 nt, Artificial Sequence
  Description of Artificial Sequence: Synthetic oligonucleotide
  Sense strand starting at position 2864 of SEQ ID NO: 317524
caaucagcgggagacuauu

SEQ ID NO: 497728 - RNA, 19 nt, Artificial Sequence
  Description of Artificial Sequence: Synthetic oligonucleotide
  Antisense Strand to SEQ ID NO: 497727
aauagucucccgcugauug

SEQ ID NO: 497729 - RNA, 19 nt, Artificial Sequence
  Description of Artificial Sequence: Synthetic oligonucleotide
  Sense strand starting at position 2872 of SEQ ID NO: 317524
gggagacuauuugaugaca

SEQ ID NO: 497730 - RNA, 19 nt, Artificial Sequence
  Description of Artificial Sequence: Synthetic oligonucleotide
  Antisense Strand to SEQ ID NO: 497729
ugucaucaaauagucuccc

SEQ ID NO: 497731 - RNA, 19 nt, Artificial Sequence
  Description of Artificial Sequence: Synthetic oligonucleotide
  Sense strand starting at position 2874 of SEQ ID NO: 317524
gagacuauuugaugacauu

SEQ ID NO: 497732 - RNA, 19 nt, Artificial Sequence
  Description of Artificial Sequence: Synthetic oligonucleotide
  Antisense Strand to SEQ ID NO: 497731
aaugucaucaaauagucuc

SEQ ID NO: 497733 - RNA, 19 nt, Artificial Sequence
  Description of Artificial Sequence: Synthetic oligonucleotide
  Sense strand starting at position 2896 of SEQ ID NO: 317524
caaauuuguguuugcccga

SEQ ID NO: 497734 - RNA, 19 nt, Artificial Sequence
  Description of Artificial Sequence: Synthetic oligonucleotide
  Antisense Strand to SEQ ID NO: 497733
ucgggcaaacacaaauuug

SEQ ID NO: 497735 - RNA, 19 nt, Artificial Sequence
  Description of Artificial Sequence: Synthetic oligonucleotide
  Sense strand starting at position 2897 of SEQ ID NO: 317524
aaauuuguguuugcccgaa

SEQ ID NO: 497736 - RNA, 19 nt, Artificial Sequence
  Description of Artificial Sequence: Synthetic oligonucleotide
  Antisense Strand to SEQ ID NO: 497735
uucgggcaaacacaaauuu

SEQ ID NO: 497737 - RNA, 19 nt, Artificial Sequence
  Description of Artificial Sequence: Synthetic oligonucleotide
  Sense strand starting at position 2919 of SEQ ID NO: 317524
guagauugucacgacauug

SEQ ID NO: 497738 - RNA, 19 nt, Artificial Sequence
  Description of Artificial Sequence: Synthetic oligonucleotide
  Antisense Strand to SEQ ID NO: 497737
caaugucgugacaaucuac

SEQ ID NO: 497739 - RNA, 19 nt, Artificial Sequence
  Description of Artificial Sequence: Synthetic oligonucleotide
  Sense strand starting at position 2934 of SEQ ID NO: 317524
auuguauagugaguaguuu

SEQ ID NO: 497740 - RNA, 19 nt, Artificial Sequence
  Description of Artificial Sequence: Synthetic oligonucleotide
  Antisense Strand to SEQ ID NO: 497739
aaacuacucacuauacaau

SEQ ID NO: 497741 - RNA, 19 nt, Artificial Sequence
  Description of Artificial Sequence: Synthetic oligonucleotide
  Sense strand starting at position 2938 of SEQ ID NO: 317524
uauagugaguaguuucuga

SEQ ID NO: 497742 - RNA, 19 nt, Artificial Sequence
  Description of Artificial Sequence: Synthetic oligonucleotide
  Antisense Strand to SEQ ID NO: 497741
ucagaaacuacucacuaua

SEQ ID NO: 497743 - RNA, 19 nt, Artificial Sequence
  Description of Artificial Sequence: Synthetic oligonucleotide
  Sense strand starting at position 3066 of SEQ ID NO: 317524
ugacaccgugggugauaau

SEQ ID NO: 497744 - RNA, 19 nt, Artificial Sequence
  Description of Artificial Sequence: Synthetic oligonucleotide
  Antisense Strand to SEQ ID NO: 497743
auuaucacccacgguguca

SEQ ID NO: 497745 - RNA, 19 nt, Artificial Sequence
  Description of Artificial Sequence: Synthetic oligonucleotide
  Sense strand starting at position 3067 of SEQ ID NO: 317524
gacaccgugggugauaaua

SEQ ID NO: 497746 - RNA, 19 nt, Artificial Sequence
  Description of Artificial Sequence: Synthetic oligonucleotide
  Antisense Strand to SEQ ID NO: 497745
uauuaucacccacgguguc

SEQ ID NO: 497747 - RNA, 19 nt, Artificial Sequence
  Description of Artificial Sequence: Synthetic oligonucleotide
  Sense strand starting at position 3078 of SEQ ID NO: 317524
ugauaauauuuccaugugu

SEQ ID NO: 497748 - RNA, 19 nt, Artificial Sequence
  Description of Artificial Sequence: Synthetic oligonucleotide
  Antisense Strand to SEQ ID NO: 497747
acacauggaaauauuauca

SEQ ID NO: 497749 - RNA, 19 nt, Artificial Sequence
  Description of Artificial Sequence: Synthetic oligonucleotide
  Sense strand starting at position 3087 of SEQ ID NO: 317524
uuccauguguaugugauaa

SEQ ID NO: 497750 - RNA, 19 nt, Artificial Sequence
  Description of Artificial Sequence: Synthetic oligonucleotide
  Antisense Strand to SEQ ID NO: 497749
uuaucacauacacauggaa

SEQ ID NO: 497751 - RNA, 19 nt, Artificial Sequence
  Description of Artificial Sequence: Synthetic oligonucleotide
  Sense strand starting at position 3136 of SEQ ID NO: 317524
auguucuaagguugacaaa

SEQ ID NO: 497752 - RNA, 19 nt, Artificial Sequence
  Description of Artificial Sequence: Synthetic oligonucleotide
  Antisense Strand to SEQ ID NO: 497751
uuugucaaccuuagaacau

SEQ ID NO: 497753 - RNA, 19 nt, Artificial Sequence
  Description of Artificial Sequence: Synthetic oligonucleotide
  Sense strand starting at position 3283 of SEQ ID NO: 317524
guccuuguuucagugggaa

SEQ ID NO: 497754 - RNA, 19 nt, Artificial Sequence
  Description of Artificial Sequence: Synthetic oligonucleotide
  Antisense Strand to SEQ ID NO: 497753
uucccacugaaacaaggac

SEQ ID NO: 497755 - RNA, 19 nt, Artificial Sequence
  Description of Artificial Sequence: Synthetic oligonucleotide
  Sense strand starting at position 3326 of SEQ ID NO: 317524
ccuggauucucgcuuugau

SEQ ID NO: 497756 - RNA, 19 nt, Artificial Sequence
  Description of Artificial Sequence: Synthetic oligonucleotide
  Antisense Strand to SEQ ID NO: 497755
aucaaagcgagaauccagg

SEQ ID NO: 497757 - RNA, 19 nt, Artificial Sequence
  Description of Artificial Sequence: Synthetic oligonucleotide
  Sense strand starting at position 3427 of SEQ ID NO: 317524
uuuaauucugacgaaagug

SEQ ID NO: 497758 - RNA, 19 nt, Artificial Sequence
  Description of Artificial Sequence: Synthetic oligonucleotide
  Antisense Strand to SEQ ID NO: 497757
cacuuucgucagaauuaaa

SEQ ID NO: 497759 - RNA, 19 nt, Artificial Sequence
  Description of Artificial Sequence: Synthetic oligonucleotide
  Sense strand starting at position 3443 of SEQ ID NO: 317524
guggacacguucccugaau

SEQ ID NO: 497760 - RNA, 19 nt, Artificial Sequence
  Description of Artificial Sequence: Synthetic oligonucleotide
  Antisense Strand to SEQ ID NO: 497759
auucagggaacguguccac

SEQ ID NO: 497761 - RNA, 19 nt, Artificial Sequence
  Description of Artificial Sequence: Synthetic oligonucleotide
  Sense strand starting at position 3444 of SEQ ID NO: 317524
uggacacguucccugaauu

SEQ ID NO: 497762 - RNA, 19 nt, Artificial Sequence
  Description of Artificial Sequence: Synthetic oligonucleotide
  Antisense Strand to SEQ ID NO: 497761
aauucagggaacgugucca

SEQ ID NO: 497763 - RNA, 19 nt, Artificial Sequence
  Description of Artificial Sequence: Synthetic oligonucleotide
  Sense strand starting at position 3445 of SEQ ID NO: 317524
ggacacguucccugaauua

SEQ ID NO: 497764 - RNA, 19 nt, Artificial Sequence
  Description of Artificial Sequence: Synthetic oligonucleotide
  Antisense Strand to SEQ ID NO: 497763
uaauucagggaacgugucc

SEQ ID NO: 497765 - RNA, 19 nt, Artificial Sequence
  Description of Artificial Sequence: Synthetic oligonucleotide
  Sense strand starting at position 3531 of SEQ ID NO: 317524
ggacuuucccaacaugucu

SEQ ID NO: 497766 - RNA, 19 nt, Artificial Sequence
  Description of Artificial Sequence: Synthetic oligonucleotide
  Antisense Strand to SEQ ID NO: 497765
agacauguugggaaagucc

SEQ ID NO: 497767 - RNA, 19 nt, Artificial Sequence
  Description of Artificial Sequence: Synthetic oligonucleotide
  Sense strand starting at position 3545 of SEQ ID NO: 317524
ugucuuagagaguaagcaa

SEQ ID NO: 497768 - RNA, 19 nt, Artificial Sequence
  Description of Artificial Sequence: Synthetic oligonucleotide
  Antisense Strand to SEQ ID NO: 497767
uugcuuacucucuaagaca

SEQ ID NO: 497769 - RNA, 19 nt, Artificial Sequence
  Description of Artificial Sequence: Synthetic oligonucleotide
  Sense strand starting at position 3739 of SEQ ID NO: 317524
cuuccugugccugauguaa

SEQ ID NO: 497770 - RNA, 19 nt, Artificial Sequence
  Description of Artificial Sequence: Synthetic oligonucleotide
  Antisense Strand to SEQ ID NO: 497769
uuacaucaggcacaggaag

SEQ ID NO: 497771 - RNA, 19 nt, Artificial Sequence
  Description of Artificial Sequence: Synthetic oligonucleotide
  Sense strand starting at position 3743 of SEQ ID NO: 317524
cugugccugauguaaaguu

SEQ ID NO: 497772 - RNA, 19 nt, Artificial Sequence
  Description of Artificial Sequence: Synthetic oligonucleotide
  Antisense Strand to SEQ ID NO: 497771
aacuuuacaucaggcacag

SEQ ID NO: 497773 - RNA, 19 nt, Artificial Sequence
  Description of Artificial Sequence: Synthetic oligonucleotide
  Sense strand starting at position 3755 of SEQ ID NO: 317524
uaaaguuuccugugggaag

SEQ ID NO: 497774 - RNA, 19 nt, Artificial Sequence
  Description of Artificial Sequence: Synthetic oligonucleotide
  Antisense Strand to SEQ ID NO: 497773
cuucccacaggaaacuuua

SEQ ID NO: 497775 - RNA, 19 nt, Artificial Sequence
  Description of Artificial Sequence: Synthetic oligonucleotide
  Sense strand starting at position 3806 of SEQ ID NO: 317524
ggagaaagcagccacgauu

SEQ ID NO: 497776 - RNA, 19 nt, Artificial Sequence
  Description of Artificial Sequence: Synthetic oligonucleotide
  Antisense Strand to SEQ ID NO: 497775
aaucguggcugcuuucucc

SEQ ID NO: 497777 - RNA, 19 nt, Artificial Sequence
  Description of Artificial Sequence: Synthetic oligonucleotide
  Sense strand starting at position 3916 of SEQ ID NO: 317524
aggcauugguguccuuuaa

SEQ ID NO: 497778 - RNA, 19 nt, Artificial Sequence
  Description of Artificial Sequence: Synthetic oligonucleotide
  Antisense Strand to SEQ ID NO: 497777
uuaaaggacaccaaugccu

SEQ ID NO: 497779 - RNA, 19 nt, Artificial Sequence
  Description of Artificial Sequence: Synthetic oligonucleotide
  Sense strand starting at position 3920 of SEQ ID NO: 317524
auugguguccuuuaaugcu

SEQ ID NO: 497780 - RNA, 19 nt, Artificial Sequence
  Description of Artificial Sequence: Synthetic oligonucleotide
  Antisense Strand to SEQ ID NO: 497779
agcauuaaaggacaccaau

SEQ ID NO: 497781 - RNA, 19 nt, Artificial Sequence
  Description of Artificial Sequence: Synthetic oligonucleotide
  Sense strand starting at position 2222 of SEQ ID NO: 317525
ccuugcaucgcuggguauu

SEQ ID NO: 497782 - RNA, 19 nt, Artificial Sequence
  Description of Artificial Sequence: Synthetic oligonucleotide
  Antisense Strand to SEQ ID NO: 497781
aauacccagcgaugcaagg

SEQ ID NO: 497783 - RNA, 19 nt, Artificial Sequence
  Description of Artificial Sequence: Synthetic oligonucleotide
  Sense strand starting at position 2682 of SEQ ID NO: 317525
ccuauugauucucugucca

SEQ ID NO: 497784 - RNA, 19 nt, Artificial Sequence
  Description of Artificial Sequence: Synthetic oligonucleotide
  Antisense Strand to SEQ ID NO: 497783
uggacagagaaucaauagg

SEQ ID NO: 497785 - RNA, 19 nt, Artificial Sequence
  Description of Artificial Sequence: Synthetic oligonucleotide
  Sense strand starting at position 2687 of SEQ ID NO: 317525
ugauucucuguccaaguga

SEQ ID NO: 497786 - RNA, 19 nt, Artificial Sequence
  Description of Artificial Sequence: Synthetic oligonucleotide
  Antisense Strand to SEQ ID NO: 497785
ucacuuggacagagaauca

SEQ ID NO: 497787 - RNA, 19 nt, Artificial Sequence
  Description of Artificial Sequence: Synthetic oligonucleotide
  Sense strand starting at position 3113 of SEQ ID NO: 317530
caacguuuccuagagauaa

SEQ ID NO: 497788 - RNA, 19 nt, Artificial Sequence
  Description of Artificial Sequence: Synthetic oligonucleotide
  Antisense Strand to SEQ ID NO: 497787
uuaucucuaggaaacguug

SEQ ID NO: 497789 - RNA, 19 nt, Artificial Sequence
  Description of Artificial Sequence: Synthetic oligonucleotide
  Sense strand starting at position 3219 of SEQ ID NO: 317530
ggagaaacaucagagacgu

SEQ ID NO: 497790 - RNA, 19 nt, Artificial Sequence
  Description of Artificial Sequence: Synthetic oligonucleotide
  Antisense Strand to SEQ ID NO: 497789
acgucucugauguuucucc

SEQ ID NO: 497791 - RNA, 19 nt, Artificial Sequence
  Description of Artificial Sequence: Synthetic oligonucleotide
  Sense strand starting at position 2421 of SEQ ID NO: 317532
gugugauuguguucgucug

SEQ ID NO: 497792 - RNA, 19 nt, Artificial Sequence
  Description of Artificial Sequence: Synthetic oligonucleotide
  Antisense Strand to SEQ ID NO: 497791
cagacgaacacaaucacac

SEQ ID NO: 497793 - RNA, 19 nt, Artificial Sequence
  Description of Artificial Sequence: Synthetic oligonucleotide
  Sense strand starting at position 2222 of SEQ ID NO: 317533
ccuugcaucgcuggguauu

SEQ ID NO: 497794 - RNA, 19 nt, Artificial Sequence
  Description of Artificial Sequence: Synthetic oligonucleotide
  Antisense Strand to SEQ ID NO: 497793
aauacccagcgaugcaagg

SEQ ID NO: 497795 - RNA, 19 nt, Artificial Sequence
  Description of Artificial Sequence: Synthetic oligonucleotide
  Sense strand starting at position 2682 of SEQ ID NO: 317533
ccuauugauucucugucca

SEQ ID NO: 497796 - RNA, 19 nt, Artificial Sequence
  Description of Artificial Sequence: Synthetic oligonucleotide
  Antisense Strand to SEQ ID NO: 497795
uggacagagaaucaauagg

SEQ ID NO: 497797 - RNA, 19 nt, Artificial Sequence
  Description of Artificial Sequence: Synthetic oligonucleotide
  Sense strand starting at position 2687 of SEQ ID NO: 317533
ugauucucuguccaaguga

SEQ ID NO: 497798 - RNA, 19 nt, Artificial Sequence
  Description of Artificial Sequence: Synthetic oligonucleotide
  Antisense Strand to SEQ ID NO: 497797
ucacuuggacagagaauca

SEQ ID NO: 497799 - RNA, 19 nt, Artificial Sequence
  Description of Artificial Sequence: Synthetic oligonucleotide
  Sense strand starting at position 2222 of SEQ ID NO: 317536
ccuugcaucgcuggguauu

SEQ ID NO: 497800 - RNA, 19 nt, Artificial Sequence
  Description of Artificial Sequence: Synthetic oligonucleotide
  Antisense Strand to SEQ ID NO: 497799
aauacccagcgaugcaagg

SEQ ID NO: 497801 - RNA, 19 nt, Artificial Sequence
  Description of Artificial Sequence: Synthetic oligonucleotide
  Sense strand starting at position 2682 of SEQ ID NO: 317536
ccuauugauucucugucca

SEQ ID NO: 497802 - RNA, 19 nt, Artificial Sequence
  Description of Artificial Sequence: Synthetic oligonucleotide
  Antisense Strand to SEQ ID NO: 497801
uggacagagaaucaauagg

SEQ ID NO: 497803 - RNA, 19 nt, Artificial Sequence
  Description of Artificial Sequence: Synthetic oligonucleotide
  Sense strand starting at position 2687 of SEQ ID NO: 317536
ugauucucuguccaaguga

SEQ ID NO: 497804 - RNA, 19 nt, Artificial Sequence
  Description of Artificial Sequence: Synthetic oligonucleotide
  Antisense Strand to SEQ ID NO: 497803
ucacuuggacagagaauca

SEQ ID NO: 497805 - RNA, 19 nt, Artificial Sequence
  Description of Artificial Sequence: Synthetic oligonucleotide
  Sense strand starting at position 2059 of SEQ ID NO: 317545
cgauaucccuuccgagaga

SEQ ID NO: 497806 - RNA, 19 nt, Artificial Sequence
  Description of Artificial Sequence: Synthetic oligonucleotide
  Antisense Strand to SEQ ID NO: 497805
ucucucggaagggauaucg

SEQ ID NO: 497807 - RNA, 19 nt, Artificial Sequence
  Description of Artificial Sequence: Synthetic oligonucleotide
  Sense strand starting at position 2022 of SEQ ID NO: 317549
caagguuugucugcuggaa

SEQ ID NO: 497808 - RNA, 19 nt, Artificial Sequence
  Description of Artificial Sequence: Synthetic oligonucleotide
  Antisense Strand to SEQ ID NO: 497807
uuccagcagacaaaccuug

SEQ ID NO: 497809 - RNA, 19 nt, Artificial Sequence
  Description of Artificial Sequence: Synthetic oligonucleotide
  Sense strand starting at position 2059 of SEQ ID NO: 317553
cgauaucccuuccgagaga

SEQ ID NO: 497810 - RNA, 19 nt, Artificial Sequence
  Description of Artificial Sequence: Synthetic oligonucleotide
  Antisense Strand to SEQ ID NO: 497809
ucucucggaagggauaucg

SEQ ID NO: 497811 - RNA, 19 nt, Artificial Sequence
  Description of Artificial Sequence: Synthetic oligonucleotide
  Sense strand starting at position 2022 of SEQ ID NO: 317557
caagguuugucugcuggaa

SEQ ID NO: 497812 - RNA, 19 nt, Artificial Sequence
  Description of Artificial Sequence: Synthetic oligonucleotide
  Antisense Strand to SEQ ID NO: 497811
uuccagcagacaaaccuug

SEQ ID NO: 497813 - RNA, 19 nt, Artificial Sequence
  Description of Artificial Sequence: Synthetic oligonucleotide
  Sense strand starting at position 2059 of SEQ ID NO: 317561
cgauaucccuuccgagaga

SEQ ID NO: 497814 - RNA, 19 nt, Artificial Sequence
  Description of Artificial Sequence: Synthetic oligonucleotide
  Antisense Strand to SEQ ID NO: 497813
ucucucggaagggauaucg

SEQ ID NO: 497815 - RNA, 19 nt, Artificial Sequence
  Description of Artificial Sequence: Synthetic oligonucleotide
  Sense strand starting at position 2022 of SEQ ID NO: 317565
caagguuugucugcuggaa

SEQ ID NO: 497816 - RNA, 19 nt, Artificial Sequence
  Description of Artificial Sequence: Synthetic oligonucleotide
  Antisense Strand to SEQ ID NO: 497815
uuccagcagacaaaccuug

SEQ ID NO: 497817 - RNA, 19 nt, Artificial Sequence
  Description of Artificial Sequence: Synthetic oligonucleotide
  Sense strand starting at position 2059 of SEQ ID NO: 317569
cgauaucccuuccgagaga

SEQ ID NO: 497818 - RNA, 19 nt, Artificial Sequence
  Description of Artificial Sequence: Synthetic oligonucleotide
  Antisense Strand to SEQ ID NO: 497817
ucucucggaagggauaucg

SEQ ID NO: 497819 - RNA, 19 nt, Artificial Sequence
  Description of Artificial Sequence: Synthetic oligonucleotide
  Sense strand starting at position 2022 of SEQ ID NO: 317573
caagguuugucugcuggaa

SEQ ID NO: 497820 - RNA, 19 nt, Artificial Sequence
  Description of Artificial Sequence: Synthetic oligonucleotide
  Antisense Strand to SEQ ID NO: 497819
uuccagcagacaaaccuug

SEQ ID NO: 497821 - RNA, 19 nt, Artificial Sequence
  Description of Artificial Sequence: Synthetic oligonucleotide
  Sense strand starting at position 2059 of SEQ ID NO: 317577
cgauaucccuuccgagaga

SEQ ID NO: 497822 - RNA, 19 nt, Artificial Sequence
  Description of Artificial Sequence: Synthetic oligonucleotide
  Antisense Strand to SEQ ID NO: 497821
ucucucggaagggauaucg

SEQ ID NO: 497823 - RNA, 19 nt, Artificial Sequence
  Description of Artificial Sequence: Synthetic oligonucleotide
  Sense strand starting at position 2022 of SEQ ID NO: 317581
caagguuugucugcuggaa

SEQ ID NO: 497824 - RNA, 19 nt, Artificial Sequence
  Description of Artificial Sequence: Synthetic oligonucleotide
  Antisense Strand to SEQ ID NO: 497823
uuccagcagacaaaccuug

SEQ ID NO: 497825 - RNA, 19 nt, Artificial Sequence
  Description of Artificial Sequence: Synthetic oligonucleotide
  Sense strand starting at position 2059 of SEQ ID NO: 317585
cgauaucccuuccgagaga

SEQ ID NO: 497826 - RNA, 19 nt, Artificial Sequence
  Description of Artificial Sequence: Synthetic oligonucleotide
  Antisense Strand to SEQ ID NO: 497825
ucucucggaagggauaucg

SEQ ID NO: 497827 - RNA, 19 nt, Artificial Sequence
  Description of Artificial Sequence: Synthetic oligonucleotide
  Sense strand starting at position 2022 of SEQ ID NO: 317589
caagguuugucugcuggaa

SEQ ID NO: 497828 - RNA, 19 nt, Artificial Sequence
  Description of Artificial Sequence: Synthetic oligonucleotide
  Antisense Strand to SEQ ID NO: 497827
uuccagcagacaaaccuug

SEQ ID NO: 497829 - RNA, 19 nt, Artificial Sequence
  Description of Artificial Sequence: Synthetic oligonucleotide
  Sense strand starting at position 2059 of SEQ ID NO: 317593
cgauaucccuuccgagaga

SEQ ID NO: 497830 - RNA, 19 nt, Artificial Sequence
  Description of Artificial Sequence: Synthetic oligonucleotide
  Antisense Strand to SEQ ID NO: 497829
ucucucggaagggauaucg

SEQ ID NO: 497831 - RNA, 19 nt, Artificial Sequence
  Description of Artificial Sequence: Synthetic oligonucleotide
  Sense strand starting at position 2022 of SEQ ID NO: 317597
caagguuugucugcuggaa

SEQ ID NO: 497832 - RNA, 19 nt, Artificial Sequence
  Description of Artificial Sequence: Synthetic oligonucleotide
  Antisense Strand to SEQ ID NO: 497831
uuccagcagacaaaccuug

SEQ ID NO: 497833 - RNA, 19 nt, Artificial Sequence
  Description of Artificial Sequence: Synthetic oligonucleotide
  Sense strand starting at position 2059 of SEQ ID NO: 317601
cgauaucccuuccgagaga

SEQ ID NO: 497834 - RNA, 19 nt, Artificial Sequence
  Description of Artificial Sequence: Synthetic oligonucleotide
  Antisense Strand to SEQ ID NO: 497833
ucucucggaagggauaucg

SEQ ID NO: 497835 - RNA, 19 nt, Artificial Sequence
  Description of Artificial Sequence: Synthetic oligonucleotide
  Sense strand starting at position 2022 of SEQ ID NO: 317605
caagguuugucugcuggaa

SEQ ID NO: 497836 - RNA, 19 nt, Artificial Sequence
  Description of Artificial Sequence: Synthetic oligonucleotide
  Antisense Strand to SEQ ID NO: 497835
uuccagcagacaaaccuug

SEQ ID NO: 497837 - RNA, 19 nt, Artificial Sequence
  Description of Artificial Sequence: Synthetic oligonucleotide
  Sense strand starting at position 249 of SEQ ID NO: 317607
uccuccuuugucuacuaga

SEQ ID NO: 497838 - RNA, 19 nt, Artificial Sequence
  Description of Artificial Sequence: Synthetic oligonucleotide
  Antisense Strand to SEQ ID NO: 497837
ucuaguagacaaaggagga

SEQ ID NO: 497839 - RNA, 19 nt, Artificial Sequence
  Description of Artificial Sequence: Synthetic oligonucleotide
  Sense strand starting at position 303 of SEQ ID NO: 317607
cauaguuaucugggauaau

SEQ ID NO: 497840 - RNA, 19 nt, Artificial Sequence
  Description of Artificial Sequence: Synthetic oligonucleotide
  Antisense Strand to SEQ ID NO: 497839
auuaucccagauaacuaug

SEQ ID NO: 497841 - RNA, 19 nt, Artificial Sequence
  Description of Artificial Sequence: Synthetic oligonucleotide
  Sense strand starting at position 511 of SEQ ID NO: 317607
agcagaggcuggguaauua

SEQ ID NO: 497842 - RNA, 19 nt, Artificial Sequence
  Description of Artificial Sequence: Synthetic oligonucleotide
  Antisense Strand to SEQ ID NO: 497841
uaauuacccagccucugcu

SEQ ID NO: 497843 - RNA, 19 nt, Artificial Sequence
  Description of Artificial Sequence: Synthetic oligonucleotide
  Sense strand starting at position 612 of SEQ ID NO: 317607
augugacguccugaauaag

SEQ ID NO: 497844 - RNA, 19 nt, Artificial Sequence
  Description of Artificial Sequence: Synthetic oligonucleotide
  Antisense Strand to SEQ ID NO: 497843
cuuauucaggacgucacau

SEQ ID NO: 497845 - RNA, 19 nt, Artificial Sequence
  Description of Artificial Sequence: Synthetic oligonucleotide
  Sense strand starting at position 615 of SEQ ID NO: 317607
ugacguccugaauaaggua

SEQ ID NO: 497846 - RNA, 19 nt, Artificial Sequence
  Description of Artificial Sequence: Synthetic oligonucleotide
  Antisense Strand to SEQ ID NO: 497845
uaccuuauucaggacguca

SEQ ID NO: 497847 - RNA, 19 nt, Artificial Sequence
  Description of Artificial Sequence: Synthetic oligonucleotide
  Sense strand starting at position 627 of SEQ ID NO: 317607
uaagguagugaaugugaau

SEQ ID NO: 497848 - RNA, 19 nt, Artificial Sequence
  Description of Artificial Sequence: Synthetic oligonucleotide
  Antisense Strand to SEQ ID NO: 497847
auucacauucacuaccuua

SEQ ID NO: 497849 - RNA, 19 nt, Artificial Sequence
  Description of Artificial Sequence: Synthetic oligonucleotide
  Sense strand starting at position 640 of SEQ ID NO: 317607
gugaauaaauuugggauga

SEQ ID NO: 497850 - RNA, 19 nt, Artificial Sequence
  Description of Artificial Sequence: Synthetic oligonucleotide
  Antisense Strand to SEQ ID NO: 497849
ucaucccaaauuuauucac

SEQ ID NO: 497851 - RNA, 19 nt, Artificial Sequence
  Description of Artificial Sequence: Synthetic oligonucleotide
  Sense strand starting at position 641 of SEQ ID NO: 317607
ugaauaaauuugggaugag

SEQ ID NO: 497852 - RNA, 19 nt, Artificial Sequence
  Description of Artificial Sequence: Synthetic oligonucleotide
  Antisense Strand to SEQ ID NO: 497851
cucaucccaaauuuauuca

SEQ ID NO: 497853 - RNA, 19 nt, Artificial Sequence
  Description of Artificial Sequence: Synthetic oligonucleotide
  Sense strand starting at position 777 of SEQ ID NO: 317607
gacccuuaccuguggaaga

SEQ ID NO: 497854 - RNA, 19 nt, Artificial Sequence
  Description of Artificial Sequence: Synthetic oligonucleotide
  Antisense Strand to SEQ ID NO: 497853
ucuuccacagguaaggguc

SEQ ID NO: 497855 - RNA, 19 nt, Artificial Sequence
  Description of Artificial Sequence: Synthetic oligonucleotide
  Sense strand starting at position 2362 of SEQ ID NO: 317607
auaagugcuaucgauguga

SEQ ID NO: 497856 - RNA, 19 nt, Artificial Sequence
  Description of Artificial Sequence: Synthetic oligonucleotide
  Antisense Strand to SEQ ID NO: 497855
ucacaucgauagcacuuau

SEQ ID NO: 497857 - RNA, 19 nt, Artificial Sequence
  Description of Artificial Sequence: Synthetic oligonucleotide
  Sense strand starting at position 2373 of SEQ ID NO: 317607
cgaugugaaauccgaggaa

SEQ ID NO: 497858 - RNA, 19 nt, Artificial Sequence
  Description of Artificial Sequence: Synthetic oligonucleotide
  Antisense Strand to SEQ ID NO: 497857
uuccucggauuucacaucg

SEQ ID NO: 497859 - RNA, 19 nt, Artificial Sequence
  Description of Artificial Sequence: Synthetic oligonucleotide
  Sense strand starting at position 2432 of SEQ ID NO: 317607
gauugagaagucugccuug

SEQ ID NO: 497860 - RNA, 19 nt, Artificial Sequence
  Description of Artificial Sequence: Synthetic oligonucleotide
  Antisense Strand to SEQ ID NO: 497859
caaggcagacuucucaauc

SEQ ID NO: 497861 - RNA, 19 nt, Artificial Sequence
  Description of Artificial Sequence: Synthetic oligonucleotide
  Sense strand starting at position 2448 of SEQ ID NO: 317607
uuggcucauuaaucaagaa

SEQ ID NO: 497862 - RNA, 19 nt, Artificial Sequence
  Description of Artificial Sequence: Synthetic oligonucleotide
  Antisense Strand to SEQ ID NO: 497861
uucuugauuaaugagccaa

SEQ ID NO: 497863 - RNA, 19 nt, Artificial Sequence
  Description of Artificial Sequence: Synthetic oligonucleotide
  Sense strand starting at position 2492 of SEQ ID NO: 317607
ugccuuuauccugcgaugu

SEQ ID NO: 497864 - RNA, 19 nt, Artificial Sequence
  Description of Artificial Sequence: Synthetic oligonucleotide
  Antisense Strand to SEQ ID NO: 497863
acaucgcaggauaaaggca

SEQ ID NO: 497865 - RNA, 19 nt, Artificial Sequence
  Description of Artificial Sequence: Synthetic oligonucleotide
  Sense strand starting at position 2504 of SEQ ID NO: 317607
gcgaugucgguauugaagu

SEQ ID NO: 497866 - RNA, 19 nt, Artificial Sequence
  Description of Artificial Sequence: Synthetic oligonucleotide
  Antisense Strand to SEQ ID NO: 497865
acuucaauaccgacaucgc

SEQ ID NO: 497867 - RNA, 19 nt, Artificial Sequence
  Description of Artificial Sequence: Synthetic oligonucleotide
  Sense strand starting at position 2506 of SEQ ID NO: 317607
gaugucgguauugaaguaa

SEQ ID NO: 497868 - RNA, 19 nt, Artificial Sequence
  Description of Artificial Sequence: Synthetic oligonucleotide
  Antisense Strand to SEQ ID NO: 497867
uuacuucaauaccgacauc

SEQ ID NO: 497869 - RNA, 19 nt, Artificial Sequence
  Description of Artificial Sequence: Synthetic oligonucleotide
  Sense strand starting at position 2548 of SEQ ID NO: 317607
gcauuuagcgaccaucagu

SEQ ID NO: 497870 - RNA, 19 nt, Artificial Sequence
  Description of Artificial Sequence: Synthetic oligonucleotide
  Antisense Strand to SEQ ID NO: 497869
acugauggucgcuaaaugc

SEQ ID NO: 497871 - RNA, 19 nt, Artificial Sequence
  Description of Artificial Sequence: Synthetic oligonucleotide
  Sense strand starting at position 2603 of SEQ ID NO: 317607
agcuuuguaccauaucgaa

SEQ ID NO: 497872 - RNA, 19 nt, Artificial Sequence
  Description of Artificial Sequence: Synthetic oligonucleotide
  Antisense Strand to SEQ ID NO: 497871
uucgauaugguacaaagcu

SEQ ID NO: 497873 - RNA, 19 nt, Artificial Sequence
  Description of Artificial Sequence: Synthetic oligonucleotide
  Sense strand starting at position 2746 of SEQ ID NO: 317607
cuuauuguauauguugaca

SEQ ID NO: 497874 - RNA, 19 nt, Artificial Sequence
  Description of Artificial Sequence: Synthetic oligonucleotide
  Antisense Strand to SEQ ID NO: 497873
ugucaacauauacaauaag

SEQ ID NO: 497875 - RNA, 19 nt, Artificial Sequence
  Description of Artificial Sequence: Synthetic oligonucleotide
  Sense strand starting at position 2754 of SEQ ID NO: 317607
auauguugacaccgaagau

SEQ ID NO: 497876 - RNA, 19 nt, Artificial Sequence
  Description of Artificial Sequence: Synthetic oligonucleotide
  Antisense Strand to SEQ ID NO: 497875
aucuucggugucaacauau

SEQ ID NO: 497877 - RNA, 19 nt, Artificial Sequence
  Description of Artificial Sequence: Synthetic oligonucleotide
  Sense strand starting at position 2763 of SEQ ID NO: 317607
caccgaagaugguuuacaa

SEQ ID NO: 497878 - RNA, 19 nt, Artificial Sequence
  Description of Artificial Sequence: Synthetic oligonucleotide
  Antisense Strand to SEQ ID NO: 497877
uuguaaaccaucuucggug

SEQ ID NO: 497879 - RNA, 19 nt, Artificial Sequence
  Description of Artificial Sequence: Synthetic oligonucleotide
  Sense strand starting at position 2845 of SEQ ID NO: 317607
agaauuuaaucagaggucu

SEQ ID NO: 497880 - RNA, 19 nt, Artificial Sequence
  Description of Artificial Sequence: Synthetic oligonucleotide
  Antisense Strand to SEQ ID NO: 497879
agaccucugauuaaauucu

SEQ ID NO: 497881 - RNA, 19 nt, Artificial Sequence
  Description of Artificial Sequence: Synthetic oligonucleotide
  Sense strand starting at position 2906 of SEQ ID NO: 317607
ugguuaauauaguugugaa

SEQ ID NO: 497882 - RNA, 19 nt, Artificial Sequence
  Description of Artificial Sequence: Synthetic oligonucleotide
  Antisense Strand to SEQ ID NO: 497881
uucacaacuauauuaacca

SEQ ID NO: 497883 - RNA, 19 nt, Artificial Sequence
  Description of Artificial Sequence: Synthetic oligonucleotide
  Sense strand starting at position 2907 of SEQ ID NO: 317607
gguuaauauaguugugaaa

SEQ ID NO: 497884 - RNA, 19 nt, Artificial Sequence
  Description of Artificial Sequence: Synthetic oligonucleotide
  Antisense Strand to SEQ ID NO: 497883
uuucacaacuauauuaacc

SEQ ID NO: 497885 - RNA, 19 nt, Artificial Sequence
  Description of Artificial Sequence: Synthetic oligonucleotide
  Sense strand starting at position 2930 of SEQ ID NO: 317607
acauuaaggcccuguaaua

SEQ ID NO: 497886 - RNA, 19 nt, Artificial Sequence
  Description of Artificial Sequence: Synthetic oligonucleotide
  Antisense Strand to SEQ ID NO: 497885
uauuacagggccuuaaugu

SEQ ID NO: 497887 - RNA, 19 nt, Artificial Sequence
  Description of Artificial Sequence: Synthetic oligonucleotide
  Sense strand starting at position 3121 of SEQ ID NO: 317607
gagacaggagcuugaguaa

SEQ ID NO: 497888 - RNA, 19 nt, Artificial Sequence
  Description of Artificial Sequence: Synthetic oligonucleotide
  Antisense Strand to SEQ ID NO: 497887
uuacucaagcuccugucuc

SEQ ID NO: 497889 - RNA, 19 nt, Artificial Sequence
  Description of Artificial Sequence: Synthetic oligonucleotide
  Sense strand starting at position 3157 of SEQ ID NO: 317607
aguugacucguaggaagau

SEQ ID NO: 497890 - RNA, 19 nt, Artificial Sequence
  Description of Artificial Sequence: Synthetic oligonucleotide
  Antisense Strand to SEQ ID NO: 497889
aucuuccuacgagucaacu

SEQ ID NO: 497891 - RNA, 19 nt, Artificial Sequence
  Description of Artificial Sequence: Synthetic oligonucleotide
  Sense strand starting at position 3195 of SEQ ID NO: 317607
ugagguaauuaaucuauca

SEQ ID NO: 497892 - RNA, 19 nt, Artificial Sequence
  Description of Artificial Sequence: Synthetic oligonucleotide
  Antisense Strand to SEQ ID NO: 497891
ugauagauuaauuaccuca

SEQ ID NO: 497893 - RNA, 19 nt, Artificial Sequence
  Description of Artificial Sequence: Synthetic oligonucleotide
  Sense strand starting at position 3269 of SEQ ID NO: 317607
uugucuuuacugggaauaa

SEQ ID NO: 497894 - RNA, 19 nt, Artificial Sequence
  Description of Artificial Sequence: Synthetic oligonucleotide
  Antisense Strand to SEQ ID NO: 497893
uuauucccaguaaagacaa

SEQ ID NO: 497895 - RNA, 19 nt, Artificial Sequence
  Description of Artificial Sequence: Synthetic oligonucleotide
  Sense strand starting at position 3390 of SEQ ID NO: 317607
auuaaucuuugugcuaaga

SEQ ID NO: 497896 - RNA, 19 nt, Artificial Sequence
  Description of Artificial Sequence: Synthetic oligonucleotide
  Antisense Strand to SEQ ID NO: 497895
ucuuagcacaaagauuaau

SEQ ID NO: 497897 - RNA, 19 nt, Artificial Sequence
  Description of Artificial Sequence: Synthetic oligonucleotide
  Sense strand starting at position 3419 of SEQ ID NO: 317607
acgaaugaagauugcugaa

SEQ ID NO: 497898 - RNA, 19 nt, Artificial Sequence
  Description of Artificial Sequence: Synthetic oligonucleotide
  Antisense Strand to SEQ ID NO: 497897
uucagcaaucuucauucgu

SEQ ID NO: 497899 - RNA, 19 nt, Artificial Sequence
  Description of Artificial Sequence: Synthetic oligonucleotide
  Sense strand starting at position 3444 of SEQ ID NO: 317607
cagcgaagugauuauucca

SEQ ID NO: 497900 - RNA, 19 nt, Artificial Sequence
  Description of Artificial Sequence: Synthetic oligonucleotide
  Antisense Strand to SEQ ID NO: 497899
uggaauaaucacuucgcug

SEQ ID NO: 497901 - RNA, 19 nt, Artificial Sequence
  Description of Artificial Sequence: Synthetic oligonucleotide
  Sense strand starting at position 3447 of SEQ ID NO: 317607
cgaagugauuauuccaaag

SEQ ID NO: 497902 - RNA, 19 nt, Artificial Sequence
  Description of Artificial Sequence: Synthetic oligonucleotide
  Antisense Strand to SEQ ID NO: 497901
cuuuggaauaaucacuucg

SEQ ID NO: 497903 - RNA, 19 nt, Artificial Sequence
  Description of Artificial Sequence: Synthetic oligonucleotide
  Sense strand starting at position 3541 of SEQ ID NO: 317607
uguuaauauuaggucuuga

SEQ ID NO: 497904 - RNA, 19 nt, Artificial Sequence
  Description of Artificial Sequence: Synthetic oligonucleotide
  Antisense Strand to SEQ ID NO: 497903
ucaagaccuaauauuaaca

SEQ ID NO: 497905 - RNA, 19 nt, Artificial Sequence
  Description of Artificial Sequence: Synthetic oligonucleotide
  Sense strand starting at position 3600 of SEQ ID NO: 317607
gugcuauuaguccauauaa

SEQ ID NO: 497906 - RNA, 19 nt, Artificial Sequence
  Description of Artificial Sequence: Synthetic oligonucleotide
  Antisense Strand to SEQ ID NO: 497905
uuauauggacuaauagcac

SEQ ID NO: 497907 - RNA, 19 nt, Artificial Sequence
  Description of Artificial Sequence: Synthetic oligonucleotide
  Sense strand starting at position 3649 of SEQ ID NO: 317607
gcaccaugacucuguauuu

SEQ ID NO: 497908 - RNA, 19 nt, Artificial Sequence
  Description of Artificial Sequence: Synthetic oligonucleotide
  Antisense Strand to SEQ ID NO: 497907
aaauacagagucauggugc

SEQ ID NO: 497909 - RNA, 19 nt, Artificial Sequence
  Description of Artificial Sequence: Synthetic oligonucleotide
  Sense strand starting at position 3680 of SEQ ID NO: 317607
uugaaugauagaugcauga

SEQ ID NO: 497910 - RNA, 19 nt, Artificial Sequence
  Description of Artificial Sequence: Synthetic oligonucleotide
  Antisense Strand to SEQ ID NO: 497909
ucaugcaucuaucauucaa

SEQ ID NO: 497911 - RNA, 19 nt, Artificial Sequence
  Description of Artificial Sequence: Synthetic oligonucleotide
  Sense strand starting at position 3888 of SEQ ID NO: 317607
uucagaagucuguggaaga

SEQ ID NO: 497912 - RNA, 19 nt, Artificial Sequence
  Description of Artificial Sequence: Synthetic oligonucleotide
  Antisense Strand to SEQ ID NO: 497911
ucuuccacagacuucugaa

SEQ ID NO: 497913 - RNA, 19 nt, Artificial Sequence
  Description of Artificial Sequence: Synthetic oligonucleotide
  Sense strand starting at position 3925 of SEQ ID NO: 317607
ugccacuaaucauuggauu

SEQ ID NO: 497914 - RNA, 19 nt, Artificial Sequence
  Description of Artificial Sequence: Synthetic oligonucleotide
  Antisense Strand to SEQ ID NO: 497913
aauccaaugauuaguggca

SEQ ID NO: 497915 - RNA, 19 nt, Artificial Sequence
  Description of Artificial Sequence: Synthetic oligonucleotide
  Sense strand starting at position 3926 of SEQ ID NO: 317607
gccacuaaucauuggauua

SEQ ID NO: 497916 - RNA, 19 nt, Artificial Sequence
  Description of Artificial Sequence: Synthetic oligonucleotide
  Antisense Strand to SEQ ID NO: 497915
uaauccaaugauuaguggc

SEQ ID NO: 497917 - RNA, 19 nt, Artificial Sequence
  Description of Artificial Sequence: Synthetic oligonucleotide
  Sense strand starting at position 220 of SEQ ID NO: 317608
caagguaguuagguaauga

SEQ ID NO: 497918 - RNA, 19 nt, Artificial Sequence
  Description of Artificial Sequence: Synthetic oligonucleotide
  Antisense Strand to SEQ ID NO: 497917
ucauuaccuaacuaccuug

SEQ ID NO: 497919 - RNA, 19 nt, Artificial Sequence
  Description of Artificial Sequence: Synthetic oligonucleotide
  Sense strand starting at position 251 of SEQ ID NO: 317608
ccaauuaagaggugcagau

SEQ ID NO: 497920 - RNA, 19 nt, Artificial Sequence
  Description of Artificial Sequence: Synthetic oligonucleotide
  Antisense Strand to SEQ ID NO: 497919
aucugcaccucuuaauugg

SEQ ID NO: 497921 - RNA, 19 nt, Artificial Sequence
  Description of Artificial Sequence: Synthetic oligonucleotide
  Sense strand starting at position 291 of SEQ ID NO: 317608
ggaauucuaccaugaaguu

SEQ ID NO: 497922 - RNA, 19 nt, Artificial Sequence
  Description of Artificial Sequence: Synthetic oligonucleotide
  Antisense Strand to SEQ ID NO: 497921
aacuucaugguagaauucc

SEQ ID NO: 497923 - RNA, 19 nt, Artificial Sequence
  Description of Artificial Sequence: Synthetic oligonucleotide
  Sense strand starting at position 352 of SEQ ID NO: 317608
aaacuaaggucuccggaaa

SEQ ID NO: 497924 - RNA, 19 nt, Artificial Sequence
  Description of Artificial Sequence: Synthetic oligonucleotide
  Antisense Strand to SEQ ID NO: 497923
uuuccggagaccuuaguuu

SEQ ID NO: 497925 - RNA, 19 nt, Artificial Sequence
  Description of Artificial Sequence: Synthetic oligonucleotide
  Sense strand starting at position 353 of SEQ ID NO: 317608
aacuaaggucuccggaaau

SEQ ID NO: 497926 - RNA, 19 nt, Artificial Sequence
  Description of Artificial Sequence: Synthetic oligonucleotide
  Antisense Strand to SEQ ID NO: 497925
auuuccggagaccuuaguu

SEQ ID NO: 497927 - RNA, 19 nt, Artificial Sequence
  Description of Artificial Sequence: Synthetic oligonucleotide
  Sense strand starting at position 402 of SEQ ID NO: 317608
ucaugcuuaacuggagaga

SEQ ID NO: 497928 - RNA, 19 nt, Artificial Sequence
  Description of Artificial Sequence: Synthetic oligonucleotide
  Antisense Strand to SEQ ID NO: 497927
ucucuccaguuaagcauga

SEQ ID NO: 497929 - RNA, 19 nt, Artificial Sequence
  Description of Artificial Sequence: Synthetic oligonucleotide
  Sense strand starting at position 489 of SEQ ID NO: 317608
ccagaagcagaauguguau

SEQ ID NO: 497930 - RNA, 19 nt, Artificial Sequence
  Description of Artificial Sequence: Synthetic oligonucleotide
  Antisense Strand to SEQ ID NO: 497929
auacacauucugcuucugg

SEQ ID NO: 497931 - RNA, 19 nt, Artificial Sequence
  Description of Artificial Sequence: Synthetic oligonucleotide
  Sense strand starting at position 492 of SEQ ID NO: 317608
gaagcagaauguguauaca

SEQ ID NO: 497932 - RNA, 19 nt, Artificial Sequence
  Description of Artificial Sequence: Synthetic oligonucleotide
  Antisense Strand to SEQ ID NO: 497931
uguauacacauucugcuuc

SEQ ID NO: 497933 - RNA, 19 nt, Artificial Sequence
  Description of Artificial Sequence: Synthetic oligonucleotide
  Sense strand starting at position 495 of SEQ ID NO: 317608
gcagaauguguauacaacu

SEQ ID NO: 497934 - RNA, 19 nt, Artificial Sequence
  Description of Artificial Sequence: Synthetic oligonucleotide
  Antisense Strand to SEQ ID NO: 497933
aguuguauacacauucugc

SEQ ID NO: 497935 - RNA, 19 nt, Artificial Sequence
  Description of Artificial Sequence: Synthetic oligonucleotide
  Sense strand starting at position 503 of SEQ ID NO: 317608
uguauacaacuuuggucaa

SEQ ID NO: 497936 - RNA, 19 nt, Artificial Sequence
  Description of Artificial Sequence: Synthetic oligonucleotide
  Antisense Strand to SEQ ID NO: 497935
uugaccaaaguuguauaca

SEQ ID NO: 497937 - RNA, 19 nt, Artificial Sequence
  Description of Artificial Sequence: Synthetic oligonucleotide
  Sense strand starting at position 514 of SEQ ID NO: 317608
uuggucaaacgagaaugua

SEQ ID NO: 497938 - RNA, 19 nt, Artificial Sequence
  Description of Artificial Sequence: Synthetic oligonucleotide
  Antisense Strand to SEQ ID NO: 497937
uacauucucguuugaccaa

SEQ ID NO: 497939 - RNA, 19 nt, Artificial Sequence
  Description of Artificial Sequence: Synthetic oligonucleotide
  Sense strand starting at position 599 of SEQ ID NO: 317608
ucuaucugugcugauauaa

SEQ ID NO: 497940 - RNA, 19 nt, Artificial Sequence
  Description of Artificial Sequence: Synthetic oligonucleotide
  Antisense Strand to SEQ ID NO: 497939
uuauaucagcacagauaga

SEQ ID NO: 497941 - RNA, 19 nt, Artificial Sequence
  Description of Artificial Sequence: Synthetic oligonucleotide
  Sense strand starting at position 609 of SEQ ID NO: 317608
cugauauaacacuguauug

SEQ ID NO: 497942 - RNA, 19 nt, Artificial Sequence
  Description of Artificial Sequence: Synthetic oligonucleotide
  Antisense Strand to SEQ ID NO: 497941
caauacaguguuauaucag

SEQ ID NO: 497943 - RNA, 19 nt, Artificial Sequence
  Description of Artificial Sequence: Synthetic oligonucleotide
  Sense strand starting at position 770 of SEQ ID NO: 317608
ggccauuuaucggaacaaa

SEQ ID NO: 497944 - RNA, 19 nt, Artificial Sequence
  Description of Artificial Sequence: Synthetic oligonucleotide
  Antisense Strand to SEQ ID NO: 497943
uuuguuccgauaaauggcc

SEQ ID NO: 497945 - RNA, 19 nt, Artificial Sequence
  Description of Artificial Sequence: Synthetic oligonucleotide
  Sense strand starting at position 793 of SEQ ID NO: 317608
guaaucauuugauacacag

SEQ ID NO: 497946 - RNA, 19 nt, Artificial Sequence
  Description of Artificial Sequence: Synthetic oligonucleotide
  Antisense Strand to SEQ ID NO: 497945
cuguguaucaaaugauuac

SEQ ID NO: 497947 - RNA, 19 nt, Artificial Sequence
  Description of Artificial Sequence: Synthetic oligonucleotide
  Sense strand starting at position 816 of SEQ ID NO: 317608
uucucagagguacaucuua

SEQ ID NO: 497948 - RNA, 19 nt, Artificial Sequence
  Description of Artificial Sequence: Synthetic oligonucleotide
  Antisense Strand to SEQ ID NO: 497947
uaagauguaccucugagaa

SEQ ID NO: 497949 - RNA, 19 nt, Artificial Sequence
  Description of Artificial Sequence: Synthetic oligonucleotide
  Sense strand starting at position 1017 of SEQ ID NO: 317608
aguuaaauccauuggucug

SEQ ID NO: 497950 - RNA, 19 nt, Artificial Sequence
  Description of Artificial Sequence: Synthetic oligonucleotide
  Antisense Strand to SEQ ID NO: 497949
cagaccaauggauuuaacu

SEQ ID NO: 497951 - RNA, 19 nt, Artificial Sequence
  Description of Artificial Sequence: Synthetic oligonucleotide
  Sense strand starting at position 1022 of SEQ ID NO: 317608
aauccauuggucuggacaa

SEQ ID NO: 497952 - RNA, 19 nt, Artificial Sequence
  Description of Artificial Sequence: Synthetic oligonucleotide
  Antisense Strand to SEQ ID NO: 497951
uuguccagaccaauggauu

SEQ ID NO: 497953 - RNA, 19 nt, Artificial Sequence
  Description of Artificial Sequence: Synthetic oligonucleotide
  Sense strand starting at position 1086 of SEQ ID NO: 317608
cagcuagugcauuaugaaa

SEQ ID NO: 497954 - RNA, 19 nt, Artificial Sequence
  Description of Artificial Sequence: Synthetic oligonucleotide
  Antisense Strand to SEQ ID NO: 497953
uuucauaaugcacuagcug

SEQ ID NO: 497955 - RNA, 19 nt, Artificial Sequence
  Description of Artificial Sequence: Synthetic oligonucleotide
  Sense strand starting at position 1378 of SEQ ID NO: 317608
ucucaaucacacgaaguau

SEQ ID NO: 497956 - RNA, 19 nt, Artificial Sequence
  Description of Artificial Sequence: Synthetic oligonucleotide
  Antisense Strand to SEQ ID NO: 497955
auacuucgugugauugaga

SEQ ID NO: 497957 - RNA, 19 nt, Artificial Sequence
  Description of Artificial Sequence: Synthetic oligonucleotide
  Sense strand starting at position 1432 of SEQ ID NO: 317608
uucuuaucugguggaggaa

SEQ ID NO: 497958 - RNA, 19 nt, Artificial Sequence
  Description of Artificial Sequence: Synthetic oligonucleotide
  Antisense Strand to SEQ ID NO: 497957
uuccuccaccagauaagaa

SEQ ID NO: 497959 - RNA, 19 nt, Artificial Sequence
  Description of Artificial Sequence: Synthetic oligonucleotide
  Sense strand starting at position 1556 of SEQ ID NO: 317608
aaacgaugugcuuaagaaa

SEQ ID NO: 497960 - RNA, 19 nt, Artificial Sequence
  Description of Artificial Sequence: Synthetic oligonucleotide
  Antisense Strand to SEQ ID NO: 497959
uuucuuaagcacaucguuu

SEQ ID NO: 497961 - RNA, 19 nt, Artificial Sequence
  Description of Artificial Sequence: Synthetic oligonucleotide
  Sense strand starting at position 1749 of SEQ ID NO: 317608
guuaauauuuacgucugau

SEQ ID NO: 497962 - RNA, 19 nt, Artificial Sequence
  Description of Artificial Sequence: Synthetic oligonucleotide
  Antisense Strand to SEQ ID NO: 497961
aucagacguaaauauuaac

SEQ ID NO: 497963 - RNA, 19 nt, Artificial Sequence
  Description of Artificial Sequence: Synthetic oligonucleotide
  Sense strand starting at position 1757 of SEQ ID NO: 317608
uuacgucugauccagugaa

SEQ ID NO: 497964 - RNA, 19 nt, Artificial Sequence
  Description of Artificial Sequence: Synthetic oligonucleotide
  Antisense Strand to SEQ ID NO: 497963
uucacuggaucagacguaa

SEQ ID NO: 497965 - RNA, 19 nt, Artificial Sequence
  Description of Artificial Sequence: Synthetic oligonucleotide
  Sense strand starting at position 1904 of SEQ ID NO: 317608
auacaugggagguguuuau

SEQ ID NO: 497966 - RNA, 19 nt, Artificial Sequence
  Description of Artificial Sequence: Synthetic oligonucleotide
  Antisense Strand to SEQ ID NO: 497965
auaaacaccucccauguau

SEQ ID NO: 497967 - RNA, 19 nt, Artificial Sequence
  Description of Artificial Sequence: Synthetic oligonucleotide
  Sense strand starting at position 1908 of SEQ ID NO: 317608
augggagguguuuauauua

SEQ ID NO: 497968 - RNA, 19 nt, Artificial Sequence
  Description of Artificial Sequence: Synthetic oligonucleotide
  Antisense Strand to SEQ ID NO: 497967
uaauauaaacaccucccau

SEQ ID NO: 497969 - RNA, 19 nt, Artificial Sequence
  Description of Artificial Sequence: Synthetic oligonucleotide
  Sense strand starting at position 1945 of SEQ ID NO: 317608
ucugaaauggcaugaucuc

SEQ ID NO: 497970 - RNA, 19 nt, Artificial Sequence
  Description of Artificial Sequence: Synthetic oligonucleotide
  Antisense Strand to SEQ ID NO: 497969
gagaucaugccauuucaga

SEQ ID NO: 497971 - RNA, 19 nt, Artificial Sequence
  Description of Artificial Sequence: Synthetic oligonucleotide
  Sense strand starting at position 1971 of SEQ ID NO: 317608
ccuuaaacaccugguagau

SEQ ID NO: 497972 - RNA, 19 nt, Artificial Sequence
  Description of Artificial Sequence: Synthetic oligonucleotide
  Antisense Strand to SEQ ID NO: 497971
aucuaccagguguuuaagg

SEQ ID NO: 497973 - RNA, 19 nt, Artificial Sequence
  Description of Artificial Sequence: Synthetic oligonucleotide
  Sense strand starting at position 1991 of SEQ ID NO: 317608
acauaacaaugagaaagau

SEQ ID NO: 497974 - RNA, 19 nt, Artificial Sequence
  Description of Artificial Sequence: Synthetic oligonucleotide
  Antisense Strand to SEQ ID NO: 497973
aucuuucucauuguuaugu

SEQ ID NO: 497975 - RNA, 19 nt, Artificial Sequence
  Description of Artificial Sequence: Synthetic oligonucleotide
  Sense strand starting at position 2140 of SEQ ID NO: 317608
aagccaacauguguuagaa

SEQ ID NO: 497976 - RNA, 19 nt, Artificial Sequence
  Description of Artificial Sequence: Synthetic oligonucleotide
  Antisense Strand to SEQ ID NO: 497975
uucuaacacauguuggcuu

SEQ ID NO: 497977 - RNA, 19 nt, Artificial Sequence
  Description of Artificial Sequence: Synthetic oligonucleotide
  Sense strand starting at position 2515 of SEQ ID NO: 317608
cucugucacucucuagaca

SEQ ID NO: 497978 - RNA, 19 nt, Artificial Sequence
  Description of Artificial Sequence: Synthetic oligonucleotide
  Antisense Strand to SEQ ID NO: 497977
ugucuagagagugacagag

SEQ ID NO: 497979 - RNA, 19 nt, Artificial Sequence
  Description of Artificial Sequence: Synthetic oligonucleotide
  Sense strand starting at position 2516 of SEQ ID NO: 317608
ucugucacucucuagacau

SEQ ID NO: 497980 - RNA, 19 nt, Artificial Sequence
  Description of Artificial Sequence: Synthetic oligonucleotide
  Antisense Strand to SEQ ID NO: 497979
augucuagagagugacaga

SEQ ID NO: 497981 - RNA, 19 nt, Artificial Sequence
  Description of Artificial Sequence: Synthetic oligonucleotide
  Sense strand starting at position 2529 of SEQ ID NO: 317608
agacauggcgucuaaauac

SEQ ID NO: 497982 - RNA, 19 nt, Artificial Sequence
  Description of Artificial Sequence: Synthetic oligonucleotide
  Antisense Strand to SEQ ID NO: 497981
guauuuagacgccaugucu

SEQ ID NO: 497983 - RNA, 19 nt, Artificial Sequence
  Description of Artificial Sequence: Synthetic oligonucleotide
  Sense strand starting at position 2568 of SEQ ID NO: 317608
augaauuacugguuccuca

SEQ ID NO: 497984 - RNA, 19 nt, Artificial Sequence
  Description of Artificial Sequence: Synthetic oligonucleotide
  Antisense Strand to SEQ ID NO: 497983
ugaggaaccaguaauucau

SEQ ID NO: 497985 - RNA, 19 nt, Artificial Sequence
  Description of Artificial Sequence: Synthetic oligonucleotide
  Sense strand starting at position 2586 of SEQ ID NO: 317608
acuucaucugggugauggu

SEQ ID NO: 497986 - RNA, 19 nt, Artificial Sequence
  Description of Artificial Sequence: Synthetic oligonucleotide
  Antisense Strand to SEQ ID NO: 497985
accaucacccagaugaagu

SEQ ID NO: 497987 - RNA, 19 nt, Artificial Sequence
  Description of Artificial Sequence: Synthetic oligonucleotide
  Sense strand starting at position 2714 of SEQ ID NO: 317608
acugaaacacguugugaca

SEQ ID NO: 497988 - RNA, 19 nt, Artificial Sequence
  Description of Artificial Sequence: Synthetic oligonucleotide
  Antisense Strand to SEQ ID NO: 497987
ugucacaacguguuucagu

SEQ ID NO: 497989 - RNA, 19 nt, Artificial Sequence
  Description of Artificial Sequence: Synthetic oligonucleotide
  Sense strand starting at position 3083 of SEQ ID NO: 317608
ugacuccucgcagagaaag

SEQ ID NO: 497990 - RNA, 19 nt, Artificial Sequence
  Description of Artificial Sequence: Synthetic oligonucleotide
  Antisense Strand to SEQ ID NO: 497989
cuuucucugcgaggaguca

SEQ ID NO: 497991 - RNA, 19 nt, Artificial Sequence
  Description of Artificial Sequence: Synthetic oligonucleotide
  Sense strand starting at position 3400 of SEQ ID NO: 317608
gggcuucuccaucaagcuu

SEQ ID NO: 497992 - RNA, 19 nt, Artificial Sequence
  Description of Artificial Sequence: Synthetic oligonucleotide
  Antisense Strand to SEQ ID NO: 497991
aagcuugauggagaagccc

SEQ ID NO: 497993 - RNA, 19 nt, Artificial Sequence
  Description of Artificial Sequence: Synthetic oligonucleotide
  Sense strand starting at position 3408 of SEQ ID NO: 317608
ccaucaagcuuccuuggau

SEQ ID NO: 497994 - RNA, 19 nt, Artificial Sequence
  Description of Artificial Sequence: Synthetic oligonucleotide
  Antisense Strand to SEQ ID NO: 497993
auccaaggaagcuugaugg

SEQ ID NO: 497995 - RNA, 19 nt, Artificial Sequence
  Description of Artificial Sequence: Synthetic oligonucleotide
  Sense strand starting at position 3546 of SEQ ID NO: 317608
gucuaaagaauguaggcaa

SEQ ID NO: 497996 - RNA, 19 nt, Artificial Sequence
  Description of Artificial Sequence: Synthetic oligonucleotide
  Antisense Strand to SEQ ID NO: 497995
uugccuacauucuuuagac

SEQ ID NO: 497997 - RNA, 19 nt, Artificial Sequence
  Description of Artificial Sequence: Synthetic oligonucleotide
  Sense strand starting at position 173 of SEQ ID NO: 317609
gccucacuacccuguagua

SEQ ID NO: 497998 - RNA, 19 nt, Artificial Sequence
  Description of Artificial Sequence: Synthetic oligonucleotide
  Antisense Strand to SEQ ID NO: 497997
uacuacaggguagugaggc

SEQ ID NO: 497999 - RNA, 19 nt, Artificial Sequence
  Description of Artificial Sequence: Synthetic oligonucleotide
  Sense strand starting at position 262 of SEQ ID NO: 317609
aggaacuggucguaggaga

SEQ ID NO: 498000 - RNA, 19 nt, Artificial Sequence
  Description of Artificial Sequence: Synthetic oligonucleotide
  Antisense Strand to SEQ ID NO: 497999
ucuccuacgaccaguuccu

SEQ ID NO: 498001 - RNA, 19 nt, Artificial Sequence
  Description of Artificial Sequence: Synthetic oligonucleotide
  Sense strand starting at position 338 of SEQ ID NO: 317609
ucugacuccucgcagagaa

SEQ ID NO: 498002 - RNA, 19 nt, Artificial Sequence
  Description of Artificial Sequence: Synthetic oligonucleotide
  Antisense Strand to SEQ ID NO: 498001
uucucugcgaggagucaga

SEQ ID NO: 498003 - RNA, 19 nt, Artificial Sequence
  Description of Artificial Sequence: Synthetic oligonucleotide
  Sense strand starting at position 340 of SEQ ID NO: 317609
ugacuccucgcagagaaag

SEQ ID NO: 498004 - RNA, 19 nt, Artificial Sequence
  Description of Artificial Sequence: Synthetic oligonucleotide
  Antisense Strand to SEQ ID NO: 498003
cuuucucugcgaggaguca

SEQ ID NO: 498005 - RNA, 19 nt, Artificial Sequence
  Description of Artificial Sequence: Synthetic oligonucleotide
  Sense strand starting at position 491 of SEQ ID NO: 317609
ucccauugugcugaaagcu

SEQ ID NO: 498006 - RNA, 19 nt, Artificial Sequence
  Description of Artificial Sequence: Synthetic oligonucleotide
  Antisense Strand to SEQ ID NO: 498005
agcuuucagcacaauggga

SEQ ID NO: 498007 - RNA, 19 nt, Artificial Sequence
  Description of Artificial Sequence: Synthetic oligonucleotide
  Sense strand starting at position 657 of SEQ ID NO: 317609
gggcuucuccaucaagcuu

SEQ ID NO: 498008 - RNA, 19 nt, Artificial Sequence
  Description of Artificial Sequence: Synthetic oligonucleotide
  Antisense Strand to SEQ ID NO: 498007
aagcuugauggagaagccc

SEQ ID NO: 498009 - RNA, 19 nt, Artificial Sequence
  Description of Artificial Sequence: Synthetic oligonucleotide
  Sense strand starting at position 665 of SEQ ID NO: 317609
ccaucaagcuuccuuggau

SEQ ID NO: 498010 - RNA, 19 nt, Artificial Sequence
  Description of Artificial Sequence: Synthetic oligonucleotide
  Antisense Strand to SEQ ID NO: 498009
auccaaggaagcuugaugg

SEQ ID NO: 498011 - RNA, 19 nt, Artificial Sequence
  Description of Artificial Sequence: Synthetic oligonucleotide
  Sense strand starting at position 803 of SEQ ID NO: 317609
gucuaaagaauguaggcaa

SEQ ID NO: 498012 - RNA, 19 nt, Artificial Sequence
  Description of Artificial Sequence: Synthetic oligonucleotide
  Antisense Strand to SEQ ID NO: 498011
uugccuacauucuuuagac

SEQ ID NO: 498013 - RNA, 19 nt, Artificial Sequence
  Description of Artificial Sequence: Synthetic oligonucleotide
  Sense strand starting at position 933 of SEQ ID NO: 317609
gcuggagguucuuccuaca

SEQ ID NO: 498014 - RNA, 19 nt, Artificial Sequence
  Description of Artificial Sequence: Synthetic oligonucleotide
  Antisense Strand to SEQ ID NO: 498013
uguaggaagaaccuccagc

SEQ ID NO: 498015 - RNA, 19 nt, Artificial Sequence
  Description of Artificial Sequence: Synthetic oligonucleotide
  Sense strand starting at position 936 of SEQ ID NO: 317609
ggagguucuuccuacagaa

SEQ ID NO: 498016 - RNA, 19 nt, Artificial Sequence
  Description of Artificial Sequence: Synthetic oligonucleotide
  Antisense Strand to SEQ ID NO: 498015
uucuguaggaagaaccucc

SEQ ID NO: 498017 - RNA, 19 nt, Artificial Sequence
  Description of Artificial Sequence: Synthetic oligonucleotide
  Sense strand starting at position 1026 of SEQ ID NO: 317609
cagugaugucccuggcugu

SEQ ID NO: 498018 - RNA, 19 nt, Artificial Sequence
  Description of Artificial Sequence: Synthetic oligonucleotide
  Antisense Strand to SEQ ID NO: 498017
acagccagggacaucacug

SEQ ID NO: 498019 - RNA, 19 nt, Artificial Sequence
  Description of Artificial Sequence: Synthetic oligonucleotide
  Sense strand starting at position 1027 of SEQ ID NO: 317609
agugaugucccuggcugua

SEQ ID NO: 498020 - RNA, 19 nt, Artificial Sequence
  Description of Artificial Sequence: Synthetic oligonucleotide
  Antisense Strand to SEQ ID NO: 498019
uacagccagggacaucacu

SEQ ID NO: 498021 - RNA, 19 nt, Artificial Sequence
  Description of Artificial Sequence: Synthetic oligonucleotide
  Sense strand starting at position 1392 of SEQ ID NO: 317609
ggcugucuugaccgcaaga

SEQ ID NO: 498022 - RNA, 19 nt, Artificial Sequence
  Description of Artificial Sequence: Synthetic oligonucleotide
  Antisense Strand to SEQ ID NO: 498021
ucuugcggucaagacagcc

SEQ ID NO: 498023 - RNA, 19 nt, Artificial Sequence
  Description of Artificial Sequence: Synthetic oligonucleotide
  Sense strand starting at position 1394 of SEQ ID NO: 317609
cugucuugaccgcaagaag

SEQ ID NO: 498024 - RNA, 19 nt, Artificial Sequence
  Description of Artificial Sequence: Synthetic oligonucleotide
  Antisense Strand to SEQ ID NO: 498023
cuucuugcggucaagacag

SEQ ID NO: 498025 - RNA, 19 nt, Artificial Sequence
  Description of Artificial Sequence: Synthetic oligonucleotide
  Sense strand starting at position 1797 of SEQ ID NO: 317609
cgauguuucggacagucau

SEQ ID NO: 498026 - RNA, 19 nt, Artificial Sequence
  Description of Artificial Sequence: Synthetic oligonucleotide
  Antisense Strand to SEQ ID NO: 498025
augacuguccgaaacaucg

SEQ ID NO: 498027 - RNA, 19 nt, Artificial Sequence
  Description of Artificial Sequence: Synthetic oligonucleotide
  Sense strand starting at position 1804 of SEQ ID NO: 317609
ucggacagucauuagucua

SEQ ID NO: 498028 - RNA, 19 nt, Artificial Sequence
  Description of Artificial Sequence: Synthetic oligonucleotide
  Antisense Strand to SEQ ID NO: 498027
uagacuaaugacuguccga

SEQ ID NO: 498029 - RNA, 19 nt, Artificial Sequence
  Description of Artificial Sequence: Synthetic oligonucleotide
  Sense strand starting at position 1807 of SEQ ID NO: 317609
gacagucauuagucuaaag

SEQ ID NO: 498030 - RNA, 19 nt, Artificial Sequence
  Description of Artificial Sequence: Synthetic oligonucleotide
  Antisense Strand to SEQ ID NO: 498029
cuuuagacuaaugacuguc

SEQ ID NO: 498031 - RNA, 19 nt, Artificial Sequence
  Description of Artificial Sequence: Synthetic oligonucleotide
  Sense strand starting at position 1809 of SEQ ID NO: 317609
cagucauuagucuaaaggu

SEQ ID NO: 498032 - RNA, 19 nt, Artificial Sequence
  Description of Artificial Sequence: Synthetic oligonucleotide
  Antisense Strand to SEQ ID NO: 498031
accuuuagacuaaugacug

SEQ ID NO: 498033 - RNA, 19 nt, Artificial Sequence
  Description of Artificial Sequence: Synthetic oligonucleotide
  Sense strand starting at position 2686 of SEQ ID NO: 317609
gugacauuagcggguccaa

SEQ ID NO: 498034 - RNA, 19 nt, Artificial Sequence
  Description of Artificial Sequence: Synthetic oligonucleotide
  Antisense Strand to SEQ ID NO: 498033
uuggacccgcuaaugucac

SEQ ID NO: 498035 - RNA, 19 nt, Artificial Sequence
  Description of Artificial Sequence: Synthetic oligonucleotide
  Sense strand starting at position 2816 of SEQ ID NO: 317609
agccucuaguuguugagau

SEQ ID NO: 498036 - RNA, 19 nt, Artificial Sequence
  Description of Artificial Sequence: Synthetic oligonucleotide
  Antisense Strand to SEQ ID NO: 498035
aucucaacaacuagaggcu

SEQ ID NO: 498037 - RNA, 19 nt, Artificial Sequence
  Description of Artificial Sequence: Synthetic oligonucleotide
  Sense strand starting at position 2916 of SEQ ID NO: 317609
gcagauagguccacgcgaa

SEQ ID NO: 498038 - RNA, 19 nt, Artificial Sequence
  Description of Artificial Sequence: Synthetic oligonucleotide
  Antisense Strand to SEQ ID NO: 498037
uucgcguggaccuaucugc

SEQ ID NO: 498039 - RNA, 19 nt, Artificial Sequence
  Description of Artificial Sequence: Synthetic oligonucleotide
  Sense strand starting at position 2917 of SEQ ID NO: 317609
cagauagguccacgcgaau

SEQ ID NO: 498040 - RNA, 19 nt, Artificial Sequence
  Description of Artificial Sequence: Synthetic oligonucleotide
  Antisense Strand to SEQ ID NO: 498039
auucgcguggaccuaucug

SEQ ID NO: 498041 - RNA, 19 nt, Artificial Sequence
  Description of Artificial Sequence: Synthetic oligonucleotide
  Sense strand starting at position 2946 of SEQ ID NO: 317609
cguuucugaauguguggaa

SEQ ID NO: 498042 - RNA, 19 nt, Artificial Sequence
  Description of Artificial Sequence: Synthetic oligonucleotide
  Antisense Strand to SEQ ID NO: 498041
uuccacacauucagaaacg

SEQ ID NO: 498043 - RNA, 19 nt, Artificial Sequence
  Description of Artificial Sequence: Synthetic oligonucleotide
  Sense strand starting at position 2950 of SEQ ID NO: 317609
ucugaauguguggaacagu

SEQ ID NO: 498044 - RNA, 19 nt, Artificial Sequence
  Description of Artificial Sequence: Synthetic oligonucleotide
  Antisense Strand to SEQ ID NO: 498043
acuguuccacacauucaga

SEQ ID NO: 498045 - RNA, 19 nt, Artificial Sequence
  Description of Artificial Sequence: Synthetic oligonucleotide
  Sense strand starting at position 3014 of SEQ ID NO: 317609
acaagugagaugcgugaua

SEQ ID NO: 498046 - RNA, 19 nt, Artificial Sequence
  Description of Artificial Sequence: Synthetic oligonucleotide
  Antisense Strand to SEQ ID NO: 498045
uaucacgcaucucacuugu

SEQ ID NO: 498047 - RNA, 19 nt, Artificial Sequence
  Description of Artificial Sequence: Synthetic oligonucleotide
  Sense strand starting at position 3016 of SEQ ID NO: 317609
aagugagaugcgugauaaa

SEQ ID NO: 498048 - RNA, 19 nt, Artificial Sequence
  Description of Artificial Sequence: Synthetic oligonucleotide
  Antisense Strand to SEQ ID NO: 498047
uuuaucacgcaucucacuu

SEQ ID NO: 498049 - RNA, 19 nt, Artificial Sequence
  Description of Artificial Sequence: Synthetic oligonucleotide
  Sense strand starting at position 3019 of SEQ ID NO: 317609
ugagaugcgugauaaauuc

SEQ ID NO: 498050 - RNA, 19 nt, Artificial Sequence
  Description of Artificial Sequence: Synthetic oligonucleotide
  Antisense Strand to SEQ ID NO: 498049
gaauuuaucacgcaucuca

SEQ ID NO: 498051 - RNA, 19 nt, Artificial Sequence
  Description of Artificial Sequence: Synthetic oligonucleotide
  Sense strand starting at position 3026 of SEQ ID NO: 317609
cgugauaaauucuuagauc

SEQ ID NO: 498052 - RNA, 19 nt, Artificial Sequence
  Description of Artificial Sequence: Synthetic oligonucleotide
  Antisense Strand to SEQ ID NO: 498051
gaucuaagaauuuaucacg

SEQ ID NO: 498053 - RNA, 19 nt, Artificial Sequence
  Description of Artificial Sequence: Synthetic oligonucleotide
  Sense strand starting at position 3027 of SEQ ID NO: 317609
gugauaaauucuuagauca

SEQ ID NO: 498054 - RNA, 19 nt, Artificial Sequence
  Description of Artificial Sequence: Synthetic oligonucleotide
  Antisense Strand to SEQ ID NO: 498053
ugaucuaagaauuuaucac

SEQ ID NO: 498055 - RNA, 19 nt, Artificial Sequence
  Description of Artificial Sequence: Synthetic oligonucleotide
  Sense strand starting at position 3034 of SEQ ID NO: 317609
auucuuagaucaguguauu

SEQ ID NO: 498056 - RNA, 19 nt, Artificial Sequence
  Description of Artificial Sequence: Synthetic oligonucleotide
  Antisense Strand to SEQ ID NO: 498055
aauacacugaucuaagaau

SEQ ID NO: 498057 - RNA, 19 nt, Artificial Sequence
  Description of Artificial Sequence: Synthetic oligonucleotide
  Sense strand starting at position 3121 of SEQ ID NO: 317609
gagagccguugauugcuaa

SEQ ID NO: 498058 - RNA, 19 nt, Artificial Sequence
  Description of Artificial Sequence: Synthetic oligonucleotide
  Antisense Strand to SEQ ID NO: 498057
uuagcaaucaacggcucuc

SEQ ID NO: 498059 - RNA, 19 nt, Artificial Sequence
  Description of Artificial Sequence: Synthetic oligonucleotide
  Sense strand starting at position 3122 of SEQ ID NO: 317609
agagccguugauugcuaau

SEQ ID NO: 498060 - RNA, 19 nt, Artificial Sequence
  Description of Artificial Sequence: Synthetic oligonucleotide
  Antisense Strand to SEQ ID NO: 498059
auuagcaaucaacggcucu

SEQ ID NO: 498061 - RNA, 19 nt, Artificial Sequence
  Description of Artificial Sequence: Synthetic oligonucleotide
  Sense strand starting at position 3124 of SEQ ID NO: 317609
agccguugauugcuaauau

SEQ ID NO: 498062 - RNA, 19 nt, Artificial Sequence
  Description of Artificial Sequence: Synthetic oligonucleotide
  Antisense Strand to SEQ ID NO: 498061
auauuagcaaucaacggcu

SEQ ID NO: 498063 - RNA, 19 nt, Artificial Sequence
  Description of Artificial Sequence: Synthetic oligonucleotide
  Sense strand starting at position 3166 of SEQ ID NO: 317609
guaagacagacuuguugac

SEQ ID NO: 498064 - RNA, 19 nt, Artificial Sequence
  Description of Artificial Sequence: Synthetic oligonucleotide
  Antisense Strand to SEQ ID NO: 498063
gucaacaagucugucuuac

SEQ ID NO: 498065 - RNA, 19 nt, Artificial Sequence
  Description of Artificial Sequence: Synthetic oligonucleotide
  Sense strand starting at position 3173 of SEQ ID NO: 317609
agacuuguugacugaaggu

SEQ ID NO: 498066 - RNA, 19 nt, Artificial Sequence
  Description of Artificial Sequence: Synthetic oligonucleotide
  Antisense Strand to SEQ ID NO: 498065
accuucagucaacaagucu

SEQ ID NO: 498067 - RNA, 19 nt, Artificial Sequence
  Description of Artificial Sequence: Synthetic oligonucleotide
  Sense strand starting at position 3196 of SEQ ID NO: 317609
ggagucaugucacuguguu

SEQ ID NO: 498068 - RNA, 19 nt, Artificial Sequence
  Description of Artificial Sequence: Synthetic oligonucleotide
  Antisense Strand to SEQ ID NO: 498067
aacacagugacaugacucc

SEQ ID NO: 498069 - RNA, 19 nt, Artificial Sequence
  Description of Artificial Sequence: Synthetic oligonucleotide
  Sense strand starting at position 3197 of SEQ ID NO: 317609
gagucaugucacuguguuu

SEQ ID NO: 498070 - RNA, 19 nt, Artificial Sequence
  Description of Artificial Sequence: Synthetic oligonucleotide
  Antisense Strand to SEQ ID NO: 498069
aaacacagugacaugacuc

SEQ ID NO: 498071 - RNA, 19 nt, Artificial Sequence
  Description of Artificial Sequence: Synthetic oligonucleotide
  Sense strand starting at position 3297 of SEQ ID NO: 317609
cuuccauuguaagucauga

SEQ ID NO: 498072 - RNA, 19 nt, Artificial Sequence
  Description of Artificial Sequence: Synthetic oligonucleotide
  Antisense Strand to SEQ ID NO: 498071
ucaugacuuacaauggaag

SEQ ID NO: 498073 - RNA, 19 nt, Artificial Sequence
  Description of Artificial Sequence: Synthetic oligonucleotide
  Sense strand starting at position 3302 of SEQ ID NO: 317609
auuguaagucaugacugau

SEQ ID NO: 498074 - RNA, 19 nt, Artificial Sequence
  Description of Artificial Sequence: Synthetic oligonucleotide
  Antisense Strand to SEQ ID NO: 498073
aucagucaugacuuacaau

SEQ ID NO: 498075 - RNA, 19 nt, Artificial Sequence
  Description of Artificial Sequence: Synthetic oligonucleotide
  Sense strand starting at position 3513 of SEQ ID NO: 317609
ccauaacuaucagcuggua

SEQ ID NO: 498076 - RNA, 19 nt, Artificial Sequence
  Description of Artificial Sequence: Synthetic oligonucleotide
  Antisense Strand to SEQ ID NO: 498075
uaccagcugauaguuaugg

SEQ ID NO: 498077 - RNA, 19 nt, Artificial Sequence
  Description of Artificial Sequence: Synthetic oligonucleotide
  Sense strand starting at position 81 of SEQ ID NO: 317610
uuaugcauuguuuagugaa

SEQ ID NO: 498078 - RNA, 19 nt, Artificial Sequence
  Description of Artificial Sequence: Synthetic oligonucleotide
  Antisense Strand to SEQ ID NO: 498077
uucacuaaacaaugcauaa

SEQ ID NO: 498079 - RNA, 19 nt, Artificial Sequence
  Description of Artificial Sequence: Synthetic oligonucleotide
  Sense strand starting at position 288 of SEQ ID NO: 317610
augguuuaucaccaguaaa

SEQ ID NO: 498080 - RNA, 19 nt, Artificial Sequence
  Description of Artificial Sequence: Synthetic oligonucleotide
  Antisense Strand to SEQ ID NO: 498079
uuuacuggugauaaaccau

SEQ ID NO: 498081 - RNA, 19 nt, Artificial Sequence
  Description of Artificial Sequence: Synthetic oligonucleotide
  Sense strand starting at position 291 of SEQ ID NO: 317610
guuuaucaccaguaaacac

SEQ ID NO: 498082 - RNA, 19 nt, Artificial Sequence
  Description of Artificial Sequence: Synthetic oligonucleotide
  Antisense Strand to SEQ ID NO: 498081
guguuuacuggugauaaac

SEQ ID NO: 498083 - RNA, 19 nt, Artificial Sequence
  Description of Artificial Sequence: Synthetic oligonucleotide
  Sense strand starting at position 866 of SEQ ID NO: 317610
gggacuacagguuaaguuu

SEQ ID NO: 498084 - RNA, 19 nt, Artificial Sequence
  Description of Artificial Sequence: Synthetic oligonucleotide
  Antisense Strand to SEQ ID NO: 498083
aaacuuaaccuguaguccc

SEQ ID NO: 498085 - RNA, 19 nt, Artificial Sequence
  Description of Artificial Sequence: Synthetic oligonucleotide
  Sense strand starting at position 872 of SEQ ID NO: 317610
acagguuaaguuuacuauu

SEQ ID NO: 498086 - RNA, 19 nt, Artificial Sequence
  Description of Artificial Sequence: Synthetic oligonucleotide
  Antisense Strand to SEQ ID NO: 498085
aauaguaaacuuaaccugu

SEQ ID NO: 498087 - RNA, 19 nt, Artificial Sequence
  Description of Artificial Sequence: Synthetic oligonucleotide
  Sense strand starting at position 1032 of SEQ ID NO: 317610
gguaauucccugcauacuu

SEQ ID NO: 498088 - RNA, 19 nt, Artificial Sequence
  Description of Artificial Sequence: Synthetic oligonucleotide
  Antisense Strand to SEQ ID NO: 498087
aaguaugcagggaauuacc

SEQ ID NO: 498089 - RNA, 19 nt, Artificial Sequence
  Description of Artificial Sequence: Synthetic oligonucleotide
  Sense strand starting at position 1264 of SEQ ID NO: 317610
caagaaucucacgagucca

SEQ ID NO: 498090 - RNA, 19 nt, Artificial Sequence
  Description of Artificial Sequence: Synthetic oligonucleotide
  Antisense Strand to SEQ ID NO: 498089
uggacucgugagauucuug

SEQ ID NO: 498091 - RNA, 19 nt, Artificial Sequence
  Description of Artificial Sequence: Synthetic oligonucleotide
  Sense strand starting at position 1736 of SEQ ID NO: 317610
gcuaguuucggagacuuac

SEQ ID NO: 498092 - RNA, 19 nt, Artificial Sequence
  Description of Artificial Sequence: Synthetic oligonucleotide
  Antisense Strand to SEQ ID NO: 498091
guaagucuccgaaacuagc

SEQ ID NO: 498093 - RNA, 19 nt, Artificial Sequence
  Description of Artificial Sequence: Synthetic oligonucleotide
  Sense strand starting at position 2280 of SEQ ID NO: 317610
gggaaaggugguuguagga

SEQ ID NO: 498094 - RNA, 19 nt, Artificial Sequence
  Description of Artificial Sequence: Synthetic oligonucleotide
  Antisense Strand to SEQ ID NO: 498093
uccuacaaccaccuuuccc

SEQ ID NO: 498095 - RNA, 19 nt, Artificial Sequence
  Description of Artificial Sequence: Synthetic oligonucleotide
  Sense strand starting at position 2322 of SEQ ID NO: 317610
agaggcuaguucuucagga

SEQ ID NO: 498096 - RNA, 19 nt, Artificial Sequence
  Description of Artificial Sequence: Synthetic oligonucleotide
  Antisense Strand to SEQ ID NO: 498095
uccugaagaacuagccucu

SEQ ID NO: 498097 - RNA, 19 nt, Artificial Sequence
  Description of Artificial Sequence: Synthetic oligonucleotide
  Sense strand starting at position 2335 of SEQ ID NO: 317610
ucaggaggaggcgauuauu

SEQ ID NO: 498098 - RNA, 19 nt, Artificial Sequence
  Description of Artificial Sequence: Synthetic oligonucleotide
  Antisense Strand to SEQ ID NO: 498097
aauaaucgccuccuccuga

SEQ ID NO: 498099 - RNA, 19 nt, Artificial Sequence
  Description of Artificial Sequence: Synthetic oligonucleotide
  Sense strand starting at position 2345 of SEQ ID NO: 317610
gcgauuauucuggugcucu

SEQ ID NO: 498100 - RNA, 19 nt, Artificial Sequence
  Description of Artificial Sequence: Synthetic oligonucleotide
  Antisense Strand to SEQ ID NO: 498099
agagcaccagaauaaucgc

SEQ ID NO: 498101 - RNA, 19 nt, Artificial Sequence
  Description of Artificial Sequence: Synthetic oligonucleotide
  Sense strand starting at position 2426 of SEQ ID NO: 317610
uuagguguuaccugagaga

SEQ ID NO: 498102 - RNA, 19 nt, Artificial Sequence
  Description of Artificial Sequence: Synthetic oligonucleotide
  Antisense Strand to SEQ ID NO: 498101
ucucucagguaacaccuaa

SEQ ID NO: 498103 - RNA, 19 nt, Artificial Sequence
  Description of Artificial Sequence: Synthetic oligonucleotide
  Sense strand starting at position 2440 of SEQ ID NO: 317610
agagaacaauccguaguuu

SEQ ID NO: 498104 - RNA, 19 nt, Artificial Sequence
  Description of Artificial Sequence: Synthetic oligonucleotide
  Antisense Strand to SEQ ID NO: 498103
aaacuacggauuguucucu

SEQ ID NO: 498105 - RNA, 19 nt, Artificial Sequence
  Description of Artificial Sequence: Synthetic oligonucleotide
  Sense strand starting at position 2441 of SEQ ID NO: 317610
gagaacaauccguaguuug

SEQ ID NO: 498106 - RNA, 19 nt, Artificial Sequence
  Description of Artificial Sequence: Synthetic oligonucleotide
  Antisense Strand to SEQ ID NO: 498105
caaacuacggauuguucuc

SEQ ID NO: 498107 - RNA, 19 nt, Artificial Sequence
  Description of Artificial Sequence: Synthetic oligonucleotide
  Sense strand starting at position 2482 of SEQ ID NO: 317610
cgcaguuuccuuuagauuu

SEQ ID NO: 498108 - RNA, 19 nt, Artificial Sequence
  Description of Artificial Sequence: Synthetic oligonucleotide
  Antisense Strand to SEQ ID NO: 498107
aaaucuaaaggaaacugcg

SEQ ID NO: 498109 - RNA, 19 nt, Artificial Sequence
  Description of Artificial Sequence: Synthetic oligonucleotide
  Sense strand starting at position 2492 of SEQ ID NO: 317610
uuuagauuuccgugagucg

SEQ ID NO: 498110 - RNA, 19 nt, Artificial Sequence
  Description of Artificial Sequence: Synthetic oligonucleotide
  Antisense Strand to SEQ ID NO: 498109
cgacucacggaaaucuaaa

SEQ ID NO: 498111 - RNA, 19 nt, Artificial Sequence
  Description of Artificial Sequence: Synthetic oligonucleotide
  Sense strand starting at position 2493 of SEQ ID NO: 317610
uuagauuuccgugagucgu

SEQ ID NO: 498112 - RNA, 19 nt, Artificial Sequence
  Description of Artificial Sequence: Synthetic oligonucleotide
  Antisense Strand to SEQ ID NO: 498111
acgacucacggaaaucuaa

SEQ ID NO: 498113 - RNA, 19 nt, Artificial Sequence
  Description of Artificial Sequence: Synthetic oligonucleotide
  Sense strand starting at position 2495 of SEQ ID NO: 317610
agauuuccgugagucguua

SEQ ID NO: 498114 - RNA, 19 nt, Artificial Sequence
  Description of Artificial Sequence: Synthetic oligonucleotide
  Antisense Strand to SEQ ID NO: 498113
uaacgacucacggaaaucu

SEQ ID NO: 498115 - RNA, 19 nt, Artificial Sequence
  Description of Artificial Sequence: Synthetic oligonucleotide
  Sense strand starting at position 2497 of SEQ ID NO: 317610
auuuccgugagucguuaga

SEQ ID NO: 498116 - RNA, 19 nt, Artificial Sequence
  Description of Artificial Sequence: Synthetic oligonucleotide
  Antisense Strand to SEQ ID NO: 498115
ucuaacgacucacggaaau

SEQ ID NO: 498117 - RNA, 19 nt, Artificial Sequence
  Description of Artificial Sequence: Synthetic oligonucleotide
  Sense strand starting at position 2501 of SEQ ID NO: 317610
ccgugagucguuagacgau

SEQ ID NO: 498118 - RNA, 19 nt, Artificial Sequence
  Description of Artificial Sequence: Synthetic oligonucleotide
  Antisense Strand to SEQ ID NO: 498117
aucgucuaacgacucacgg

SEQ ID NO: 498119 - RNA, 19 nt, Artificial Sequence
  Description of Artificial Sequence: Synthetic oligonucleotide
  Sense strand starting at position 2503 of SEQ ID NO: 317610
gugagucguuagacgaucu

SEQ ID NO: 498120 - RNA, 19 nt, Artificial Sequence
  Description of Artificial Sequence: Synthetic oligonucleotide
  Antisense Strand to SEQ ID NO: 498119
agaucgucuaacgacucac

SEQ ID NO: 498121 - RNA, 19 nt, Artificial Sequence
  Description of Artificial Sequence: Synthetic oligonucleotide
  Sense strand starting at position 2513 of SEQ ID NO: 317610
agacgaucuauuugcaguu

SEQ ID NO: 498122 - RNA, 19 nt, Artificial Sequence
  Description of Artificial Sequence: Synthetic oligonucleotide
  Antisense Strand to SEQ ID NO: 498121
aacugcaaauagaucgucu

SEQ ID NO: 498123 - RNA, 19 nt, Artificial Sequence
  Description of Artificial Sequence: Synthetic oligonucleotide
  Sense strand starting at position 2514 of SEQ ID NO: 317610
gacgaucuauuugcaguua

SEQ ID NO: 498124 - RNA, 19 nt, Artificial Sequence
  Description of Artificial Sequence: Synthetic oligonucleotide
  Antisense Strand to SEQ ID NO: 498123
uaacugcaaauagaucguc

SEQ ID NO: 498125 - RNA, 19 nt, Artificial Sequence
  Description of Artificial Sequence: Synthetic oligonucleotide
  Sense strand starting at position 2609 of SEQ ID NO: 317610
uguugaccugguuaaugau

SEQ ID NO: 498126 - RNA, 19 nt, Artificial Sequence
  Description of Artificial Sequence: Synthetic oligonucleotide
  Antisense Strand to SEQ ID NO: 498125
aucauuaaccaggucaaca

SEQ ID NO: 498127 - RNA, 19 nt, Artificial Sequence
  Description of Artificial Sequence: Synthetic oligonucleotide
  Sense strand starting at position 2616 of SEQ ID NO: 317610
cugguuaaugauugucaga

SEQ ID NO: 498128 - RNA, 19 nt, Artificial Sequence
  Description of Artificial Sequence: Synthetic oligonucleotide
  Antisense Strand to SEQ ID NO: 498127
ucugacaaucauuaaccag

SEQ ID NO: 498129 - RNA, 19 nt, Artificial Sequence
  Description of Artificial Sequence: Synthetic oligonucleotide
  Sense strand starting at position 2618 of SEQ ID NO: 317610
gguuaaugauugucagaaa

SEQ ID NO: 498130 - RNA, 19 nt, Artificial Sequence
  Description of Artificial Sequence: Synthetic oligonucleotide
  Antisense Strand to SEQ ID NO: 498129
uuucugacaaucauuaacc

SEQ ID NO: 498131 - RNA, 19 nt, Artificial Sequence
  Description of Artificial Sequence: Synthetic oligonucleotide
  Sense strand starting at position 2682 of SEQ ID NO: 317610
aaagguacugcugggaauu

SEQ ID NO: 498132 - RNA, 19 nt, Artificial Sequence
  Description of Artificial Sequence: Synthetic oligonucleotide
  Antisense Strand to SEQ ID NO: 498131
aauucccagcaguaccuuu

SEQ ID NO: 498133 - RNA, 19 nt, Artificial Sequence
  Description of Artificial Sequence: Synthetic oligonucleotide
  Sense strand starting at position 2727 of SEQ ID NO: 317610
cuuucuuaggaauaguagu

SEQ ID NO: 498134 - RNA, 19 nt, Artificial Sequence
  Description of Artificial Sequence: Synthetic oligonucleotide
  Antisense Strand to SEQ ID NO: 498133
acuacuauuccuaagaaag

SEQ ID NO: 498135 - RNA, 19 nt, Artificial Sequence
  Description of Artificial Sequence: Synthetic oligonucleotide
  Sense strand starting at position 2824 of SEQ ID NO: 317610
guguaaguugaacauacua

SEQ ID NO: 498136 - RNA, 19 nt, Artificial Sequence
  Description of Artificial Sequence: Synthetic oligonucleotide
  Antisense Strand to SEQ ID NO: 498135
uaguauguucaacuuacac

SEQ ID NO: 498137 - RNA, 19 nt, Artificial Sequence
  Description of Artificial Sequence: Synthetic oligonucleotide
  Sense strand starting at position 2906 of SEQ ID NO: 317610
ggaagaaauauuggucguu

SEQ ID NO: 498138 - RNA, 19 nt, Artificial Sequence
  Description of Artificial Sequence: Synthetic oligonucleotide
  Antisense Strand to SEQ ID NO: 498137
aacgaccaauauuucuucc

SEQ ID NO: 498139 - RNA, 19 nt, Artificial Sequence
  Description of Artificial Sequence: Synthetic oligonucleotide
  Sense strand starting at position 2907 of SEQ ID NO: 317610
gaagaaauauuggucguug

SEQ ID NO: 498140 - RNA, 19 nt, Artificial Sequence
  Description of Artificial Sequence: Synthetic oligonucleotide
  Antisense Strand to SEQ ID NO: 498139
caacgaccaauauuucuuc

SEQ ID NO: 498141 - RNA, 19 nt, Artificial Sequence
  Description of Artificial Sequence: Synthetic oligonucleotide
  Sense strand starting at position 2908 of SEQ ID NO: 317610
aagaaauauuggucguuga

SEQ ID NO: 498142 - RNA, 19 nt, Artificial Sequence
  Description of Artificial Sequence: Synthetic oligonucleotide
  Antisense Strand to SEQ ID NO: 498141
ucaacgaccaauauuucuu

SEQ ID NO: 498143 - RNA, 19 nt, Artificial Sequence
  Description of Artificial Sequence: Synthetic oligonucleotide
  Sense strand starting at position 2919 of SEQ ID NO: 317610
gucguugauacaggagaca

SEQ ID NO: 498144 - RNA, 19 nt, Artificial Sequence
  Description of Artificial Sequence: Synthetic oligonucleotide
  Antisense Strand to SEQ ID NO: 498143
ugucuccuguaucaacgac

SEQ ID NO: 498145 - RNA, 19 nt, Artificial Sequence
  Description of Artificial Sequence: Synthetic oligonucleotide
  Sense strand starting at position 2955 of SEQ ID NO: 317610
augucugaggcugaaucau

SEQ ID NO: 498146 - RNA, 19 nt, Artificial Sequence
  Description of Artificial Sequence: Synthetic oligonucleotide
  Antisense Strand to SEQ ID NO: 498145
augauucagccucagacau

SEQ ID NO: 498147 - RNA, 19 nt, Artificial Sequence
  Description of Artificial Sequence: Synthetic oligonucleotide
  Sense strand starting at position 3010 of SEQ ID NO: 317610
ugaacuaggcacugucaga

SEQ ID NO: 498148 - RNA, 19 nt, Artificial Sequence
  Description of Artificial Sequence: Synthetic oligonucleotide
  Antisense Strand to SEQ ID NO: 498147
ucugacagugccuaguuca

SEQ ID NO: 498149 - RNA, 19 nt, Artificial Sequence
  Description of Artificial Sequence: Synthetic oligonucleotide
  Sense strand starting at position 3352 of SEQ ID NO: 317610
cucucagguguauaucuau

SEQ ID NO: 498150 - RNA, 19 nt, Artificial Sequence
  Description of Artificial Sequence: Synthetic oligonucleotide
  Antisense Strand to SEQ ID NO: 498149
auagauauacaccugagag

SEQ ID NO: 498151 - RNA, 19 nt, Artificial Sequence
  Description of Artificial Sequence: Synthetic oligonucleotide
  Sense strand starting at position 3546 of SEQ ID NO: 317610
gucagaaaucuaugaguac

SEQ ID NO: 498152 - RNA, 19 nt, Artificial Sequence
  Description of Artificial Sequence: Synthetic oligonucleotide
  Antisense Strand to SEQ ID NO: 498151
guacucauagauuucugac

SEQ ID NO: 498153 - RNA, 19 nt, Artificial Sequence
  Description of Artificial Sequence: Synthetic oligonucleotide
  Sense strand starting at position 3935 of SEQ ID NO: 317610
ugguucucucaagauccuu

SEQ ID NO: 498154 - RNA, 19 nt, Artificial Sequence
  Description of Artificial Sequence: Synthetic oligonucleotide
  Antisense Strand to SEQ ID NO: 498153
aaggaucuugagagaacca

SEQ ID NO: 498155 - RNA, 19 nt, Artificial Sequence
  Description of Artificial Sequence: Synthetic oligonucleotide
  Sense strand starting at position 3940 of SEQ ID NO: 317610
cucucaagauccuuugguu

SEQ ID NO: 498156 - RNA, 19 nt, Artificial Sequence
  Description of Artificial Sequence: Synthetic oligonucleotide
  Antisense Strand to SEQ ID NO: 498155
aaccaaaggaucuugagag

SEQ ID NO: 498157 - RNA, 19 nt, Artificial Sequence
  Description of Artificial Sequence: Synthetic oligonucleotide
  Sense strand starting at position 2016 of SEQ ID NO: 317611
ggucccuuagucgagauca

SEQ ID NO: 498158 - RNA, 19 nt, Artificial Sequence
  Description of Artificial Sequence: Synthetic oligonucleotide
  Antisense Strand to SEQ ID NO: 498157
ugaucucgacuaagggacc

SEQ ID NO: 498159 - RNA, 19 nt, Artificial Sequence
  Description of Artificial Sequence: Synthetic oligonucleotide
  Sense strand starting at position 2075 of SEQ ID NO: 317611
agucgauuccggugaauua

SEQ ID NO: 498160 - RNA, 19 nt, Artificial Sequence
  Description of Artificial Sequence: Synthetic oligonucleotide
  Antisense Strand to SEQ ID NO: 498159
uaauucaccggaaucgacu

SEQ ID NO: 498161 - RNA, 19 nt, Artificial Sequence
  Description of Artificial Sequence: Synthetic oligonucleotide
  Sense strand starting at position 2076 of SEQ ID NO: 317611
gucgauuccggugaauuaa

SEQ ID NO: 498162 - RNA, 19 nt, Artificial Sequence
  Description of Artificial Sequence: Synthetic oligonucleotide
  Antisense Strand to SEQ ID NO: 498161
uuaauucaccggaaucgac

SEQ ID NO: 498163 - RNA, 19 nt, Artificial Sequence
  Description of Artificial Sequence: Synthetic oligonucleotide
  Sense strand starting at position 2095 of SEQ ID NO: 317611
aaucuuuccguguggaaac

SEQ ID NO: 498164 - RNA, 19 nt, Artificial Sequence
  Description of Artificial Sequence: Synthetic oligonucleotide
  Antisense Strand to SEQ ID NO: 498163
guuuccacacggaaagauu

SEQ ID NO: 498165 - RNA, 19 nt, Artificial Sequence
  Description of Artificial Sequence: Synthetic oligonucleotide
  Sense strand starting at position 2153 of SEQ ID NO: 317611
gggcuaaugcgcuuacucu

SEQ ID NO: 498166 - RNA, 19 nt, Artificial Sequence
  Description of Artificial Sequence: Synthetic oligonucleotide
  Antisense Strand to SEQ ID NO: 498165
agaguaagcgcauuagccc

SEQ ID NO: 498167 - RNA, 19 nt, Artificial Sequence
  Description of Artificial Sequence: Synthetic oligonucleotide
  Sense strand starting at position 2277 of SEQ ID NO: 317611
gggcguuccauugagguuu

SEQ ID NO: 498168 - RNA, 19 nt, Artificial Sequence
  Description of Artificial Sequence: Synthetic oligonucleotide
  Antisense Strand to SEQ ID NO: 498167
aaaccucaauggaacgccc

SEQ ID NO: 498169 - RNA, 19 nt, Artificial Sequence
  Description of Artificial Sequence: Synthetic oligonucleotide
  Sense strand starting at position 2374 of SEQ ID NO: 317611
ugcuuaucaggcuggaagu

SEQ ID NO: 498170 - RNA, 19 nt, Artificial Sequence
  Description of Artificial Sequence: Synthetic oligonucleotide
  Antisense Strand to SEQ ID NO: 498169
acuuccagccugauaagca

SEQ ID NO: 498171 - RNA, 19 nt, Artificial Sequence
  Description of Artificial Sequence: Synthetic oligonucleotide
  Sense strand starting at position 2375 of SEQ ID NO: 317611
gcuuaucaggcuggaaguu

SEQ ID NO: 498172 - RNA, 19 nt, Artificial Sequence
  Description of Artificial Sequence: Synthetic oligonucleotide
  Antisense Strand to SEQ ID NO: 498171
aacuuccagccugauaagc

SEQ ID NO: 498173 - RNA, 19 nt, Artificial Sequence
  Description of Artificial Sequence: Synthetic oligonucleotide
  Sense strand starting at position 2376 of SEQ ID NO: 317611
cuuaucaggcuggaaguua

SEQ ID NO: 498174 - RNA, 19 nt, Artificial Sequence
  Description of Artificial Sequence: Synthetic oligonucleotide
  Antisense Strand to SEQ ID NO: 498173
uaacuuccagccugauaag

SEQ ID NO: 498175 - RNA, 19 nt, Artificial Sequence
  Description of Artificial Sequence: Synthetic oligonucleotide
  Sense strand starting at position 2384 of SEQ ID NO: 317611
gcuggaaguuaaucagauu

SEQ ID NO: 498176 - RNA, 19 nt, Artificial Sequence
  Description of Artificial Sequence: Synthetic oligonucleotide
  Antisense Strand to SEQ ID NO: 498175
aaucugauuaacuuccagc

SEQ ID NO: 498177 - RNA, 19 nt, Artificial Sequence
  Description of Artificial Sequence: Synthetic oligonucleotide
  Sense strand starting at position 2490 of SEQ ID NO: 317611
gggagguuuccgggcgaga

SEQ ID NO: 498178 - RNA, 19 nt, Artificial Sequence
  Description of Artificial Sequence: Synthetic oligonucleotide
  Antisense Strand to SEQ ID NO: 498177
ucucgcccggaaaccuccc

SEQ ID NO: 498179 - RNA, 19 nt, Artificial Sequence
  Description of Artificial Sequence: Synthetic oligonucleotide
  Sense strand starting at position 2649 of SEQ ID NO: 317611
gggucugacucuucucaag

SEQ ID NO: 498180 - RNA, 19 nt, Artificial Sequence
  Description of Artificial Sequence: Synthetic oligonucleotide
  Antisense Strand to SEQ ID NO: 498179
cuugagaagagucagaccc

SEQ ID NO: 498181 - RNA, 19 nt, Artificial Sequence
  Description of Artificial Sequence: Synthetic oligonucleotide
  Sense strand starting at position 2651 of SEQ ID NO: 317611
gucugacucuucucaagga

SEQ ID NO: 498182 - RNA, 19 nt, Artificial Sequence
  Description of Artificial Sequence: Synthetic oligonucleotide
  Antisense Strand to SEQ ID NO: 498181
uccuugagaagagucagac

SEQ ID NO: 498183 - RNA, 19 nt, Artificial Sequence
  Description of Artificial Sequence: Synthetic oligonucleotide
  Sense strand starting at position 2655 of SEQ ID NO: 317611
gacucuucucaaggaaguc

SEQ ID NO: 498184 - RNA, 19 nt, Artificial Sequence
  Description of Artificial Sequence: Synthetic oligonucleotide
  Antisense Strand to SEQ ID NO: 498183
gacuuccuugagaagaguc

SEQ ID NO: 498185 - RNA, 19 nt, Artificial Sequence
  Description of Artificial Sequence: Synthetic oligonucleotide
  Sense strand starting at position 2667 of SEQ ID NO: 317611
ggaagucugcccuguaaug

SEQ ID NO: 498186 - RNA, 19 nt, Artificial Sequence
  Description of Artificial Sequence: Synthetic oligonucleotide
  Antisense Strand to SEQ ID NO: 498185
cauuacagggcagacuucc

SEQ ID NO: 498187 - RNA, 19 nt, Artificial Sequence
  Description of Artificial Sequence: Synthetic oligonucleotide
  Sense strand starting at position 2669 of SEQ ID NO: 317611
aagucugcccuguaauguu

SEQ ID NO: 498188 - RNA, 19 nt, Artificial Sequence
  Description of Artificial Sequence: Synthetic oligonucleotide
  Antisense Strand to SEQ ID NO: 498187
aacauuacagggcagacuu

SEQ ID NO: 498189 - RNA, 19 nt, Artificial Sequence
  Description of Artificial Sequence: Synthetic oligonucleotide
  Sense strand starting at position 2688 of SEQ ID NO: 317611
agaguaauucaggguguaa

SEQ ID NO: 498190 - RNA, 19 nt, Artificial Sequence
  Description of Artificial Sequence: Synthetic oligonucleotide
  Antisense Strand to SEQ ID NO: 498189
uuacacccugaauuacucu

SEQ ID NO: 498191 - RNA, 19 nt, Artificial Sequence
  Description of Artificial Sequence: Synthetic oligonucleotide
  Sense strand starting at position 2690 of SEQ ID NO: 317611
aguaauucaggguguaagu

SEQ ID NO: 498192 - RNA, 19 nt, Artificial Sequence
  Description of Artificial Sequence: Synthetic oligonucleotide
  Antisense Strand to SEQ ID NO: 498191
acuuacacccugaauuacu

SEQ ID NO: 498193 - RNA, 19 nt, Artificial Sequence
  Description of Artificial Sequence: Synthetic oligonucleotide
  Sense strand starting at position 2714 of SEQ ID NO: 317611
ggcauuacauauguaaggu

SEQ ID NO: 498194 - RNA, 19 nt, Artificial Sequence
  Description of Artificial Sequence: Synthetic oligonucleotide
  Antisense Strand to SEQ ID NO: 498193
accuuacauauguaaugcc

SEQ ID NO: 498195 - RNA, 19 nt, Artificial Sequence
  Description of Artificial Sequence: Synthetic oligonucleotide
  Sense strand starting at position 2730 of SEQ ID NO: 317611
gguucaggguuaguauuau

SEQ ID NO: 498196 - RNA, 19 nt, Artificial Sequence
  Description of Artificial Sequence: Synthetic oligonucleotide
  Antisense Strand to SEQ ID NO: 498195
auaauacuaacccugaacc

SEQ ID NO: 498197 - RNA, 19 nt, Artificial Sequence
  Description of Artificial Sequence: Synthetic oligonucleotide
  Sense strand starting at position 3450 of SEQ ID NO: 317611
auugauuacaggcgugagu

SEQ ID NO: 498198 - RNA, 19 nt, Artificial Sequence
  Description of Artificial Sequence: Synthetic oligonucleotide
  Antisense Strand to SEQ ID NO: 498197
acucacgccuguaaucaau

SEQ ID NO: 498199 - RNA, 19 nt, Artificial Sequence
  Description of Artificial Sequence: Synthetic oligonucleotide
  Sense strand starting at position 3507 of SEQ ID NO: 317611
aguauagugucauuagguu

SEQ ID NO: 498200 - RNA, 19 nt, Artificial Sequence
  Description of Artificial Sequence: Synthetic oligonucleotide
  Antisense Strand to SEQ ID NO: 498199
aaccuaaugacacuauacu

SEQ ID NO: 498201 - RNA, 19 nt, Artificial Sequence
  Description of Artificial Sequence: Synthetic oligonucleotide
  Sense strand starting at position 3511 of SEQ ID NO: 317611
uagugucauuagguuaaua

SEQ ID NO: 498202 - RNA, 19 nt, Artificial Sequence
  Description of Artificial Sequence: Synthetic oligonucleotide
  Antisense Strand to SEQ ID NO: 498201
uauuaaccuaaugacacua

SEQ ID NO: 498203 - RNA, 19 nt, Artificial Sequence
  Description of Artificial Sequence: Synthetic oligonucleotide
  Sense strand starting at position 3513 of SEQ ID NO: 317611
gugucauuagguuaauaaa

SEQ ID NO: 498204 - RNA, 19 nt, Artificial Sequence
  Description of Artificial Sequence: Synthetic oligonucleotide
  Antisense Strand to SEQ ID NO: 498203
uuuauuaaccuaaugacac

SEQ ID NO: 498205 - RNA, 19 nt, Artificial Sequence
  Description of Artificial Sequence: Synthetic oligonucleotide
  Sense strand starting at position 3584 of SEQ ID NO: 317611
gccuaaagguguccgaaac

SEQ ID NO: 498206 - RNA, 19 nt, Artificial Sequence
  Description of Artificial Sequence: Synthetic oligonucleotide
  Antisense Strand to SEQ ID NO: 498205
guuucggacaccuuuaggc

SEQ ID NO: 498207 - RNA, 19 nt, Artificial Sequence
  Description of Artificial Sequence: Synthetic oligonucleotide
  Sense strand starting at position 3585 of SEQ ID NO: 317611
ccuaaagguguccgaaaca

SEQ ID NO: 498208 - RNA, 19 nt, Artificial Sequence
  Description of Artificial Sequence: Synthetic oligonucleotide
  Antisense Strand to SEQ ID NO: 498207
uguuucggacaccuuuagg

SEQ ID NO: 498209 - RNA, 19 nt, Artificial Sequence
  Description of Artificial Sequence: Synthetic oligonucleotide
  Sense strand starting at position 3670 of SEQ ID NO: 317611
ucugaugguaagcaugaau

SEQ ID NO: 498210 - RNA, 19 nt, Artificial Sequence
  Description of Artificial Sequence: Synthetic oligonucleotide
  Antisense Strand to SEQ ID NO: 498209
auucaugcuuaccaucaga

SEQ ID NO: 498211 - RNA, 19 nt, Artificial Sequence
  Description of Artificial Sequence: Synthetic oligonucleotide
  Sense strand starting at position 3727 of SEQ ID NO: 317611
agcagauauuaacugcuua

SEQ ID NO: 498212 - RNA, 19 nt, Artificial Sequence
  Description of Artificial Sequence: Synthetic oligonucleotide
  Antisense Strand to SEQ ID NO: 498211
uaagcaguuaauaucugcu

SEQ ID NO: 498213 - RNA, 19 nt, Artificial Sequence
  Description of Artificial Sequence: Synthetic oligonucleotide
  Sense strand starting at position 3749 of SEQ ID NO: 317611
uuuguuguagaaugcuaca

SEQ ID NO: 498214 - RNA, 19 nt, Artificial Sequence
  Description of Artificial Sequence: Synthetic oligonucleotide
  Antisense Strand to SEQ ID NO: 498213
uguagcauucuacaacaaa

SEQ ID NO: 498215 - RNA, 19 nt, Artificial Sequence
  Description of Artificial Sequence: Synthetic oligonucleotide
  Sense strand starting at position 3774 of SEQ ID NO: 317611
agugaugaaucagccaguu

SEQ ID NO: 498216 - RNA, 19 nt, Artificial Sequence
  Description of Artificial Sequence: Synthetic oligonucleotide
  Antisense Strand to SEQ ID NO: 498215
aacuggcugauucaucacu

SEQ ID NO: 498217 - RNA, 19 nt, Artificial Sequence
  Description of Artificial Sequence: Synthetic oligonucleotide
  Sense strand starting at position 3787 of SEQ ID NO: 317611
ccaguuaaggacuguauaa

SEQ ID NO: 498218 - RNA, 19 nt, Artificial Sequence
  Description of Artificial Sequence: Synthetic oligonucleotide
  Antisense Strand to SEQ ID NO: 498217
uuauacaguccuuaacugg

SEQ ID NO: 498219 - RNA, 19 nt, Artificial Sequence
  Description of Artificial Sequence: Synthetic oligonucleotide
  Sense strand starting at position 3794 of SEQ ID NO: 317611
aggacuguauaaucaggua

SEQ ID NO: 498220 - RNA, 19 nt, Artificial Sequence
  Description of Artificial Sequence: Synthetic oligonucleotide
  Antisense Strand to SEQ ID NO: 498219
uaccugauuauacaguccu

SEQ ID NO: 498221 - RNA, 19 nt, Artificial Sequence
  Description of Artificial Sequence: Synthetic oligonucleotide
  Sense strand starting at position 3817 of SEQ ID NO: 317611
agaagacacucauacagau

SEQ ID NO: 498222 - RNA, 19 nt, Artificial Sequence
  Description of Artificial Sequence: Synthetic oligonucleotide
  Antisense Strand to SEQ ID NO: 498221
aucuguaugagugucuucu

SEQ ID NO: 498223 - RNA, 19 nt, Artificial Sequence
  Description of Artificial Sequence: Synthetic oligonucleotide
  Sense strand starting at position 3846 of SEQ ID NO: 317611
caaggcaguguaugaugua

SEQ ID NO: 498224 - RNA, 19 nt, Artificial Sequence
  Description of Artificial Sequence: Synthetic oligonucleotide
  Antisense Strand to SEQ ID NO: 498223
uacaucauacacugccuug

SEQ ID NO: 498225 - RNA, 19 nt, Artificial Sequence
  Description of Artificial Sequence: Synthetic oligonucleotide
  Sense strand starting at position 3919 of SEQ ID NO: 317611
uugggaauauugcuuaaag

SEQ ID NO: 498226 - RNA, 19 nt, Artificial Sequence
  Description of Artificial Sequence: Synthetic oligonucleotide
  Antisense Strand to SEQ ID NO: 498225
cuuuaagcaauauucccaa

SEQ ID NO: 498227 - RNA, 19 nt, Artificial Sequence
  Description of Artificial Sequence: Synthetic oligonucleotide
  Sense strand starting at position 3920 of SEQ ID NO: 317611
ugggaauauugcuuaaaga

SEQ ID NO: 498228 - RNA, 19 nt, Artificial Sequence
  Description of Artificial Sequence: Synthetic oligonucleotide
  Antisense Strand to SEQ ID NO: 498227
ucuuuaagcaauauuccca

SEQ ID NO: 498229 - RNA, 19 nt, Artificial Sequence
  Description of Artificial Sequence: Synthetic oligonucleotide
  Sense strand starting at position 3939 of SEQ ID NO: 317611
auaugacaucuaugcugga

SEQ ID NO: 498230 - RNA, 19 nt, Artificial Sequence
  Description of Artificial Sequence: Synthetic oligonucleotide
  Antisense Strand to SEQ ID NO: 498229
uccagcauagaugucauau

SEQ ID NO: 498231 - RNA, 19 nt, Artificial Sequence
  Description of Artificial Sequence: Synthetic oligonucleotide
  Sense strand starting at position 3944 of SEQ ID NO: 317611
acaucuaugcuggaauugu

SEQ ID NO: 498232 - RNA, 19 nt, Artificial Sequence
  Description of Artificial Sequence: Synthetic oligonucleotide
  Antisense Strand to SEQ ID NO: 498231
acaauuccagcauagaugu

SEQ ID NO: 498233 - RNA, 19 nt, Artificial Sequence
  Description of Artificial Sequence: Synthetic oligonucleotide
  Sense strand starting at position 3960 of SEQ ID NO: 317611
uguaguuauuuccuuacuu

SEQ ID NO: 498234 - RNA, 19 nt, Artificial Sequence
  Description of Artificial Sequence: Synthetic oligonucleotide
  Antisense Strand to SEQ ID NO: 498233
aaguaaggaaauaacuaca

SEQ ID NO: 498235 - RNA, 19 nt, Artificial Sequence
  Description of Artificial Sequence: Synthetic oligonucleotide
  Sense strand starting at position 3961 of SEQ ID NO: 317611
guaguuauuuccuuacuuu

SEQ ID NO: 498236 - RNA, 19 nt, Artificial Sequence
  Description of Artificial Sequence: Synthetic oligonucleotide
  Antisense Strand to SEQ ID NO: 498235
aaaguaaggaaauaacuac

SEQ ID NO: 498237 - RNA, 19 nt, Artificial Sequence
  Description of Artificial Sequence: Synthetic oligonucleotide
  Sense strand starting at position 6 of SEQ ID NO: 317612
agccaagaaugucaauaca

SEQ ID NO: 498238 - RNA, 19 nt, Artificial Sequence
  Description of Artificial Sequence: Synthetic oligonucleotide
  Antisense Strand to SEQ ID NO: 498237
uguauugacauucuuggcu

SEQ ID NO: 498239 - RNA, 19 nt, Artificial Sequence
  Description of Artificial Sequence: Synthetic oligonucleotide
  Sense strand starting at position 84 of SEQ ID NO: 317612
cacaaagugucauuggaac

SEQ ID NO: 498240 - RNA, 19 nt, Artificial Sequence
  Description of Artificial Sequence: Synthetic oligonucleotide
  Antisense Strand to SEQ ID NO: 498239
guuccaaugacacuuugug

SEQ ID NO: 498241 - RNA, 19 nt, Artificial Sequence
  Description of Artificial Sequence: Synthetic oligonucleotide
  Sense strand starting at position 86 of SEQ ID NO: 317612
caaagugucauuggaacgu

SEQ ID NO: 498242 - RNA, 19 nt, Artificial Sequence
  Description of Artificial Sequence: Synthetic oligonucleotide
  Antisense Strand to SEQ ID NO: 498241
acguuccaaugacacuuug

SEQ ID NO: 498243 - RNA, 19 nt, Artificial Sequence
  Description of Artificial Sequence: Synthetic oligonucleotide
  Sense strand starting at position 416 of SEQ ID NO: 317612
ggccuagagcucgggacau

SEQ ID NO: 498244 - RNA, 19 nt, Artificial Sequence
  Description of Artificial Sequence: Synthetic oligonucleotide
  Antisense Strand to SEQ ID NO: 498243
augucccgagcucuaggcc

SEQ ID NO: 498245 - RNA, 19 nt, Artificial Sequence
  Description of Artificial Sequence: Synthetic oligonucleotide
  Sense strand starting at position 604 of SEQ ID NO: 317612
gauacagaauaaucagugu

SEQ ID NO: 498246 - RNA, 19 nt, Artificial Sequence
  Description of Artificial Sequence: Synthetic oligonucleotide
  Antisense Strand to SEQ ID NO: 498245
acacugauuauucuguauc

SEQ ID NO: 498247 - RNA, 19 nt, Artificial Sequence
  Description of Artificial Sequence: Synthetic oligonucleotide
  Sense strand starting at position 607 of SEQ ID NO: 317612
acagaauaaucaguguccu

SEQ ID NO: 498248 - RNA, 19 nt, Artificial Sequence
  Description of Artificial Sequence: Synthetic oligonucleotide
  Antisense Strand to SEQ ID NO: 498247
aggacacugauuauucugu

SEQ ID NO: 498249 - RNA, 19 nt, Artificial Sequence
  Description of Artificial Sequence: Synthetic oligonucleotide
  Sense strand starting at position 613 of SEQ ID NO: 317612
uaaucaguguccucgacuu

SEQ ID NO: 498250 - RNA, 19 nt, Artificial Sequence
  Description of Artificial Sequence: Synthetic oligonucleotide
  Antisense Strand to SEQ ID NO: 498249
aagucgaggacacugauua

SEQ ID NO: 498251 - RNA, 19 nt, Artificial Sequence
  Description of Artificial Sequence: Synthetic oligonucleotide
  Sense strand starting at position 615 of SEQ ID NO: 317612
aucaguguccucgacuuau

SEQ ID NO: 498252 - RNA, 19 nt, Artificial Sequence
  Description of Artificial Sequence: Synthetic oligonucleotide
  Antisense Strand to SEQ ID NO: 498251
auaagucgaggacacugau

SEQ ID NO: 498253 - RNA, 19 nt, Artificial Sequence
  Description of Artificial Sequence: Synthetic oligonucleotide
  Sense strand starting at position 829 of SEQ ID NO: 317612
gcacguuucucucugaauc

SEQ ID NO: 498254 - RNA, 19 nt, Artificial Sequence
  Description of Artificial Sequence: Synthetic oligonucleotide
  Antisense Strand to SEQ ID NO: 498253
gauucagagagaaacgugc

SEQ ID NO: 498255 - RNA, 19 nt, Artificial Sequence
  Description of Artificial Sequence: Synthetic oligonucleotide
  Sense strand starting at position 875 of SEQ ID NO: 317612
ggaugugcuccagaccaca

SEQ ID NO: 498256 - RNA, 19 nt, Artificial Sequence
  Description of Artificial Sequence: Synthetic oligonucleotide
  Antisense Strand to SEQ ID NO: 498255
uguggucuggagcacaucc

SEQ ID NO: 498257 - RNA, 19 nt, Artificial Sequence
  Description of Artificial Sequence: Synthetic oligonucleotide
  Sense strand starting at position 1090 of SEQ ID NO: 317612
gggccagucaguuacuguu

SEQ ID NO: 498258 - RNA, 19 nt, Artificial Sequence
  Description of Artificial Sequence: Synthetic oligonucleotide
  Antisense Strand to SEQ ID NO: 498257
aacaguaacugacuggccc

SEQ ID NO: 498259 - RNA, 19 nt, Artificial Sequence
  Description of Artificial Sequence: Synthetic oligonucleotide
  Sense strand starting at position 1213 of SEQ ID NO: 317612
guuucugauccauaucuag

SEQ ID NO: 498260 - RNA, 19 nt, Artificial Sequence
  Description of Artificial Sequence: Synthetic oligonucleotide
  Antisense Strand to SEQ ID NO: 498259
cuagauauggaucagaaac

SEQ ID NO: 498261 - RNA, 19 nt, Artificial Sequence
  Description of Artificial Sequence: Synthetic oligonucleotide
  Sense strand starting at position 1270 of SEQ ID NO: 317612
uuuauagcucucgguguua

SEQ ID NO: 498262 - RNA, 19 nt, Artificial Sequence
  Description of Artificial Sequence: Synthetic oligonucleotide
  Antisense Strand to SEQ ID NO: 498261
uaacaccgagagcuauaaa

SEQ ID NO: 498263 - RNA, 19 nt, Artificial Sequence
  Description of Artificial Sequence: Synthetic oligonucleotide
  Sense strand starting at position 1272 of SEQ ID NO: 317612
uauagcucucgguguuauu

SEQ ID NO: 498264 - RNA, 19 nt, Artificial Sequence
  Description of Artificial Sequence: Synthetic oligonucleotide
  Antisense Strand to SEQ ID NO: 498263
aauaacaccgagagcuaua

SEQ ID NO: 498265 - RNA, 19 nt, Artificial Sequence
  Description of Artificial Sequence: Synthetic oligonucleotide
  Sense strand starting at position 1281 of SEQ ID NO: 317612
cgguguuauuaacguguuu

SEQ ID NO: 498266 - RNA, 19 nt, Artificial Sequence
  Description of Artificial Sequence: Synthetic oligonucleotide
  Antisense Strand to SEQ ID NO: 498265
aaacacguuaauaacaccg

SEQ ID NO: 498267 - RNA, 19 nt, Artificial Sequence
  Description of Artificial Sequence: Synthetic oligonucleotide
  Sense strand starting at position 1283 of SEQ ID NO: 317612
guguuauuaacguguuuac

SEQ ID NO: 498268 - RNA, 19 nt, Artificial Sequence
  Description of Artificial Sequence: Synthetic oligonucleotide
  Antisense Strand to SEQ ID NO: 498267
guaaacacguuaauaacac

SEQ ID NO: 498269 - RNA, 19 nt, Artificial Sequence
  Description of Artificial Sequence: Synthetic oligonucleotide
  Sense strand starting at position 1292 of SEQ ID NO: 317612
acguguuuacuggguucca

SEQ ID NO: 498270 - RNA, 19 nt, Artificial Sequence
  Description of Artificial Sequence: Synthetic oligonucleotide
  Antisense Strand to SEQ ID NO: 498269
uggaacccaguaaacacgu

SEQ ID NO: 498271 - RNA, 19 nt, Artificial Sequence
  Description of Artificial Sequence: Synthetic oligonucleotide
  Sense strand starting at position 1297 of SEQ ID NO: 317612
uuuacuggguuccacuaua

SEQ ID NO: 498272 - RNA, 19 nt, Artificial Sequence
  Description of Artificial Sequence: Synthetic oligonucleotide
  Antisense Strand to SEQ ID NO: 498271
uauaguggaacccaguaaa

SEQ ID NO: 498273 - RNA, 19 nt, Artificial Sequence
  Description of Artificial Sequence: Synthetic oligonucleotide
  Sense strand starting at position 1359 of SEQ ID NO: 317612
gggugccucucugggaaau

SEQ ID NO: 498274 - RNA, 19 nt, Artificial Sequence
  Description of Artificial Sequence: Synthetic oligonucleotide
  Antisense Strand to SEQ ID NO: 498273
auuucccagagaggcaccc

SEQ ID NO: 498275 - RNA, 19 nt, Artificial Sequence
  Description of Artificial Sequence: Synthetic oligonucleotide
  Sense strand starting at position 1360 of SEQ ID NO: 317612
ggugccucucugggaaaua

SEQ ID NO: 498276 - RNA, 19 nt, Artificial Sequence
  Description of Artificial Sequence: Synthetic oligonucleotide
  Antisense Strand to SEQ ID NO: 498275
uauuucccagagaggcacc

SEQ ID NO: 498277 - RNA, 19 nt, Artificial Sequence
  Description of Artificial Sequence: Synthetic oligonucleotide
  Sense strand starting at position 1361 of SEQ ID NO: 317612
gugccucucugggaaauau

SEQ ID NO: 498278 - RNA, 19 nt, Artificial Sequence
  Description of Artificial Sequence: Synthetic oligonucleotide
  Antisense Strand to SEQ ID NO: 498277
auauuucccagagaggcac

SEQ ID NO: 498279 - RNA, 19 nt, Artificial Sequence
  Description of Artificial Sequence: Synthetic oligonucleotide
  Sense strand starting at position 1370 of SEQ ID NO: 317612
ugggaaauaugugugucca

SEQ ID NO: 498280 - RNA, 19 nt, Artificial Sequence
  Description of Artificial Sequence: Synthetic oligonucleotide
  Antisense Strand to SEQ ID NO: 498279
uggacacacauauuuccca

SEQ ID NO: 498281 - RNA, 19 nt, Artificial Sequence
  Description of Artificial Sequence: Synthetic oligonucleotide
  Sense strand starting at position 1371 of SEQ ID NO: 317612
gggaaauauguguguccag

SEQ ID NO: 498282 - RNA, 19 nt, Artificial Sequence
  Description of Artificial Sequence: Synthetic oligonucleotide
  Antisense Strand to SEQ ID NO: 498281
cuggacacacauauuuccc

SEQ ID NO: 498283 - RNA, 19 nt, Artificial Sequence
  Description of Artificial Sequence: Synthetic oligonucleotide
  Sense strand starting at position 1374 of SEQ ID NO: 317612
aaauauguguguccagcaa

SEQ ID NO: 498284 - RNA, 19 nt, Artificial Sequence
  Description of Artificial Sequence: Synthetic oligonucleotide
  Antisense Strand to SEQ ID NO: 498283
uugcuggacacacauauuu

SEQ ID NO: 498285 - RNA, 19 nt, Artificial Sequence
  Description of Artificial Sequence: Synthetic oligonucleotide
  Sense strand starting at position 1393 of SEQ ID NO: 317612
ggccuuuacggcggugauu

SEQ ID NO: 498286 - RNA, 19 nt, Artificial Sequence
  Description of Artificial Sequence: Synthetic oligonucleotide
  Antisense Strand to SEQ ID NO: 498285
aaucaccgccguaaaggcc

SEQ ID NO: 498287 - RNA, 19 nt, Artificial Sequence
  Description of Artificial Sequence: Synthetic oligonucleotide
  Sense strand starting at position 1471 of SEQ ID NO: 317612
cauugagggucgugcguua

SEQ ID NO: 498288 - RNA, 19 nt, Artificial Sequence
  Description of Artificial Sequence: Synthetic oligonucleotide
  Antisense Strand to SEQ ID NO: 498287
uaacgcacgacccucaaug

SEQ ID NO: 498289 - RNA, 19 nt, Artificial Sequence
  Description of Artificial Sequence: Synthetic oligonucleotide
  Sense strand starting at position 1473 of SEQ ID NO: 317612
uugagggucgugcguuaaa

SEQ ID NO: 498290 - RNA, 19 nt, Artificial Sequence
  Description of Artificial Sequence: Synthetic oligonucleotide
  Antisense Strand to SEQ ID NO: 498289
uuuaacgcacgacccucaa

SEQ ID NO: 498291 - RNA, 19 nt, Artificial Sequence
  Description of Artificial Sequence: Synthetic oligonucleotide
  Sense strand starting at position 3088 of SEQ ID NO: 317612
ucacaacucuguuaaucgu

SEQ ID NO: 498292 - RNA, 19 nt, Artificial Sequence
  Description of Artificial Sequence: Synthetic oligonucleotide
  Antisense Strand to SEQ ID NO: 498291
acgauuaacagaguuguga

SEQ ID NO: 498293 - RNA, 19 nt, Artificial Sequence
  Description of Artificial Sequence: Synthetic oligonucleotide
  Sense strand starting at position 3121 of SEQ ID NO: 317612
gguuucaggaugugugagu

SEQ ID NO: 498294 - RNA, 19 nt, Artificial Sequence
  Description of Artificial Sequence: Synthetic oligonucleotide
  Antisense Strand to SEQ ID NO: 498293
acucacacauccugaaacc

SEQ ID NO: 498295 - RNA, 19 nt, Artificial Sequence
  Description of Artificial Sequence: Synthetic oligonucleotide
  Sense strand starting at position 3122 of SEQ ID NO: 317612
guuucaggaugugugaguu

SEQ ID NO: 498296 - RNA, 19 nt, Artificial Sequence
  Description of Artificial Sequence: Synthetic oligonucleotide
  Antisense Strand to SEQ ID NO: 498295
aacucacacauccugaaac

SEQ ID NO: 498297 - RNA, 19 nt, Artificial Sequence
  Description of Artificial Sequence: Synthetic oligonucleotide
  Sense strand starting at position 3126 of SEQ ID NO: 317612
caggaugugugaguuauau

SEQ ID NO: 498298 - RNA, 19 nt, Artificial Sequence
  Description of Artificial Sequence: Synthetic oligonucleotide
  Antisense Strand to SEQ ID NO: 498297
auauaacucacacauccug

SEQ ID NO: 498299 - RNA, 19 nt, Artificial Sequence
  Description of Artificial Sequence: Synthetic oligonucleotide
  Sense strand starting at position 3128 of SEQ ID NO: 317612
ggaugugugaguuauaucu

SEQ ID NO: 498300 - RNA, 19 nt, Artificial Sequence
  Description of Artificial Sequence: Synthetic oligonucleotide
  Antisense Strand to SEQ ID NO: 498299
agauauaacucacacaucc

SEQ ID NO: 498301 - RNA, 19 nt, Artificial Sequence
  Description of Artificial Sequence: Synthetic oligonucleotide
  Sense strand starting at position 3130 of SEQ ID NO: 317612
augugugaguuauaucuca

SEQ ID NO: 498302 - RNA, 19 nt, Artificial Sequence
  Description of Artificial Sequence: Synthetic oligonucleotide
  Antisense Strand to SEQ ID NO: 498301
ugagauauaacucacacau

SEQ ID NO: 498303 - RNA, 19 nt, Artificial Sequence
  Description of Artificial Sequence: Synthetic oligonucleotide
  Sense strand starting at position 3441 of SEQ ID NO: 317612
uguuguuacuaguucucau

SEQ ID NO: 498304 - RNA, 19 nt, Artificial Sequence
  Description of Artificial Sequence: Synthetic oligonucleotide
  Antisense Strand to SEQ ID NO: 498303
augagaacuaguaacaaca

SEQ ID NO: 498305 - RNA, 19 nt, Artificial Sequence
  Description of Artificial Sequence: Synthetic oligonucleotide
  Sense strand starting at position 3445 of SEQ ID NO: 317612
guuacuaguucucauuagu

SEQ ID NO: 498306 - RNA, 19 nt, Artificial Sequence
  Description of Artificial Sequence: Synthetic oligonucleotide
  Antisense Strand to SEQ ID NO: 498305
acuaaugagaacuaguaac

SEQ ID NO: 498307 - RNA, 19 nt, Artificial Sequence
  Description of Artificial Sequence: Synthetic oligonucleotide
  Sense strand starting at position 3448 of SEQ ID NO: 317612
acuaguucucauuaguaua

SEQ ID NO: 498308 - RNA, 19 nt, Artificial Sequence
  Description of Artificial Sequence: Synthetic oligonucleotide
  Antisense Strand to SEQ ID NO: 498307
uauacuaaugagaacuagu

SEQ ID NO: 498309 - RNA, 19 nt, Artificial Sequence
  Description of Artificial Sequence: Synthetic oligonucleotide
  Sense strand starting at position 3473 of SEQ ID NO: 317612
ugccguuucucccauacua

SEQ ID NO: 498310 - RNA, 19 nt, Artificial Sequence
  Description of Artificial Sequence: Synthetic oligonucleotide
  Antisense Strand to SEQ ID NO: 498309
uaguaugggagaaacggca

SEQ ID NO: 498311 - RNA, 19 nt, Artificial Sequence
  Description of Artificial Sequence: Synthetic oligonucleotide
  Sense strand starting at position 3982 of SEQ ID NO: 317612
uucuguucgcuuggaccaa

SEQ ID NO: 498312 - RNA, 19 nt, Artificial Sequence
  Description of Artificial Sequence: Synthetic oligonucleotide
  Antisense Strand to SEQ ID NO: 498311
uugguccaagcgaacagaa

SEQ ID NO: 498313 - RNA, 19 nt, Artificial Sequence
  Description of Artificial Sequence: Synthetic oligonucleotide
  Sense strand starting at position 3983 of SEQ ID NO: 317612
ucuguucgcuuggaccaau

SEQ ID NO: 498314 - RNA, 19 nt, Artificial Sequence
  Description of Artificial Sequence: Synthetic oligonucleotide
  Antisense Strand to SEQ ID NO: 498313
auugguccaagcgaacaga

SEQ ID NO: 498315 - RNA, 19 nt, Artificial Sequence
  Description of Artificial Sequence: Synthetic oligonucleotide
  Sense strand starting at position 45 of SEQ ID NO: 317613
uauugagccgauuauuaca

SEQ ID NO: 498316 - RNA, 19 nt, Artificial Sequence
  Description of Artificial Sequence: Synthetic oligonucleotide
  Antisense Strand to SEQ ID NO: 498315
uguaauaaucggcucaaua

SEQ ID NO: 498317 - RNA, 19 nt, Artificial Sequence
  Description of Artificial Sequence: Synthetic oligonucleotide
  Sense strand starting at position 57 of SEQ ID NO: 317613
uauuacauuucugcgguau

SEQ ID NO: 498318 - RNA, 19 nt, Artificial Sequence
  Description of Artificial Sequence: Synthetic oligonucleotide
  Antisense Strand to SEQ ID NO: 498317
auaccgcagaaauguaaua

SEQ ID NO: 498319 - RNA, 19 nt, Artificial Sequence
  Description of Artificial Sequence: Synthetic oligonucleotide
  Sense strand starting at position 58 of SEQ ID NO: 317613
auuacauuucugcgguauu

SEQ ID NO: 498320 - RNA, 19 nt, Artificial Sequence
  Description of Artificial Sequence: Synthetic oligonucleotide
  Antisense Strand to SEQ ID NO: 498319
aauaccgcagaaauguaau

SEQ ID NO: 498321 - RNA, 19 nt, Artificial Sequence
  Description of Artificial Sequence: Synthetic oligonucleotide
  Sense strand starting at position 300 of SEQ ID NO: 317613
cuucucaaucuuuaagugu

SEQ ID NO: 498322 - RNA, 19 nt, Artificial Sequence
  Description of Artificial Sequence: Synthetic oligonucleotide
  Antisense Strand to SEQ ID NO: 498321
acacuuaaagauugagaag

SEQ ID NO: 498323 - RNA, 19 nt, Artificial Sequence
  Description of Artificial Sequence: Synthetic oligonucleotide
  Sense strand starting at position 380 of SEQ ID NO: 317613
guauguguuaaucaacagu

SEQ ID NO: 498324 - RNA, 19 nt, Artificial Sequence
  Description of Artificial Sequence: Synthetic oligonucleotide
  Antisense Strand to SEQ ID NO: 498323
acuguugauuaacacauac

SEQ ID NO: 498325 - RNA, 19 nt, Artificial Sequence
  Description of Artificial Sequence: Synthetic oligonucleotide
  Sense strand starting at position 383 of SEQ ID NO: 317613
uguguuaaucaacagucaa

SEQ ID NO: 498326 - RNA, 19 nt, Artificial Sequence
  Description of Artificial Sequence: Synthetic oligonucleotide
  Antisense Strand to SEQ ID NO: 498325
uugacuguugauuaacaca

SEQ ID NO: 498327 - RNA, 19 nt, Artificial Sequence
  Description of Artificial Sequence: Synthetic oligonucleotide
  Sense strand starting at position 402 of SEQ ID NO: 317613
auuaaaguugacuguaaca

SEQ ID NO: 498328 - RNA, 19 nt, Artificial Sequence
  Description of Artificial Sequence: Synthetic oligonucleotide
  Antisense Strand to SEQ ID NO: 498327
uguuacagucaacuuuaau

SEQ ID NO: 498329 - RNA, 19 nt, Artificial Sequence
  Description of Artificial Sequence: Synthetic oligonucleotide
  Sense strand starting at position 495 of SEQ ID NO: 317613
aguguuugaacugaaaugu

SEQ ID NO: 498330 - RNA, 19 nt, Artificial Sequence
  Description of Artificial Sequence: Synthetic oligonucleotide
  Antisense Strand to SEQ ID NO: 498329
acauuucaguucaaacacu

SEQ ID NO: 498331 - RNA, 19 nt, Artificial Sequence
  Description of Artificial Sequence: Synthetic oligonucleotide
  Sense strand starting at position 499 of SEQ ID NO: 317613
uuugaacugaaaugucgaa

SEQ ID NO: 498332 - RNA, 19 nt, Artificial Sequence
  Description of Artificial Sequence: Synthetic oligonucleotide
  Antisense Strand to SEQ ID NO: 498331
uucgacauuucaguucaaa

SEQ ID NO: 498333 - RNA, 19 nt, Artificial Sequence
  Description of Artificial Sequence: Synthetic oligonucleotide
  Sense strand starting at position 548 of SEQ ID NO: 317613
acucuauaugguuauggca

SEQ ID NO: 498334 - RNA, 19 nt, Artificial Sequence
  Description of Artificial Sequence: Synthetic oligonucleotide
  Antisense Strand to SEQ ID NO: 498333
ugccauaaccauauagagu

SEQ ID NO: 498335 - RNA, 19 nt, Artificial Sequence
  Description of Artificial Sequence: Synthetic oligonucleotide
  Sense strand starting at position 557 of SEQ ID NO: 317613
gguuauggcagguaugaac

SEQ ID NO: 498336 - RNA, 19 nt, Artificial Sequence
  Description of Artificial Sequence: Synthetic oligonucleotide
  Antisense Strand to SEQ ID NO: 498335
guucauaccugccauaacc

SEQ ID NO: 498337 - RNA, 19 nt, Artificial Sequence
  Description of Artificial Sequence: Synthetic oligonucleotide
  Sense strand starting at position 764 of SEQ ID NO: 317613
gcaguaucucaugaccaga

SEQ ID NO: 498338 - RNA, 19 nt, Artificial Sequence
  Description of Artificial Sequence: Synthetic oligonucleotide
  Antisense Strand to SEQ ID NO: 498337
ucuggucaugagauacugc

SEQ ID NO: 498339 - RNA, 19 nt, Artificial Sequence
  Description of Artificial Sequence: Synthetic oligonucleotide
  Sense strand starting at position 766 of SEQ ID NO: 317613
aguaucucaugaccagauu

SEQ ID NO: 498340 - RNA, 19 nt, Artificial Sequence
  Description of Artificial Sequence: Synthetic oligonucleotide
  Antisense Strand to SEQ ID NO: 498339
aaucuggucaugagauacu

SEQ ID NO: 498341 - RNA, 19 nt, Artificial Sequence
  Description of Artificial Sequence: Synthetic oligonucleotide
  Sense strand starting at position 990 of SEQ ID NO: 317613
gaaaguaaggcuggguuga

SEQ ID NO: 498342 - RNA, 19 nt, Artificial Sequence
  Description of Artificial Sequence: Synthetic oligonucleotide
  Antisense Strand to SEQ ID NO: 498341
ucaacccagccuuacuuuc

SEQ ID NO: 498343 - RNA, 19 nt, Artificial Sequence
  Description of Artificial Sequence: Synthetic oligonucleotide
  Sense strand starting at position 1021 of SEQ ID NO: 317613
gucccagaaucuguuugga

SEQ ID NO: 498344 - RNA, 19 nt, Artificial Sequence
  Description of Artificial Sequence: Synthetic oligonucleotide
  Antisense Strand to SEQ ID NO: 498343
uccaaacagauucugggac

SEQ ID NO: 498345 - RNA, 19 nt, Artificial Sequence
  Description of Artificial Sequence: Synthetic oligonucleotide
  Sense strand starting at position 1023 of SEQ ID NO: 317613
cccagaaucuguuuggagu

SEQ ID NO: 498346 - RNA, 19 nt, Artificial Sequence
  Description of Artificial Sequence: Synthetic oligonucleotide
  Antisense Strand to SEQ ID NO: 498345
acuccaaacagauucuggg

SEQ ID NO: 498347 - RNA, 19 nt, Artificial Sequence
  Description of Artificial Sequence: Synthetic oligonucleotide
  Sense strand starting at position 1034 of SEQ ID NO: 317613
uuuggagucccaugaauca

SEQ ID NO: 498348 - RNA, 19 nt, Artificial Sequence
  Description of Artificial Sequence: Synthetic oligonucleotide
  Antisense Strand to SEQ ID NO: 498347
ugauucaugggacuccaaa

SEQ ID NO: 498349 - RNA, 19 nt, Artificial Sequence
  Description of Artificial Sequence: Synthetic oligonucleotide
  Sense strand starting at position 2575 of SEQ ID NO: 317613
cugcucaaaguuuggaaau

SEQ ID NO: 498350 - RNA, 19 nt, Artificial Sequence
  Description of Artificial Sequence: Synthetic oligonucleotide
  Antisense Strand to SEQ ID NO: 498349
auuuccaaacuuugagcag

SEQ ID NO: 498351 - RNA, 19 nt, Artificial Sequence
  Description of Artificial Sequence: Synthetic oligonucleotide
  Sense strand starting at position 2623 of SEQ ID NO: 317613
aggucaucacuaugucaga

SEQ ID NO: 498352 - RNA, 19 nt, Artificial Sequence
  Description of Artificial Sequence: Synthetic oligonucleotide
  Antisense Strand to SEQ ID NO: 498351
ucugacauagugaugaccu

SEQ ID NO: 498353 - RNA, 19 nt, Artificial Sequence
  Description of Artificial Sequence: Synthetic oligonucleotide
  Sense strand starting at position 2692 of SEQ ID NO: 317613
uugaaaguugccugaugau

SEQ ID NO: 498354 - RNA, 19 nt, Artificial Sequence
  Description of Artificial Sequence: Synthetic oligonucleotide
  Antisense Strand to SEQ ID NO: 498353
aucaucaggcaacuuucaa

SEQ ID NO: 498355 - RNA, 19 nt, Artificial Sequence
  Description of Artificial Sequence: Synthetic oligonucleotide
  Sense strand starting at position 2698 of SEQ ID NO: 317613
guugccugaugauccaaga

SEQ ID NO: 498356 - RNA, 19 nt, Artificial Sequence
  Description of Artificial Sequence: Synthetic oligonucleotide
  Antisense Strand to SEQ ID NO: 498355
ucuuggaucaucaggcaac

SEQ ID NO: 498357 - RNA, 19 nt, Artificial Sequence
  Description of Artificial Sequence: Synthetic oligonucleotide
  Sense strand starting at position 2754 of SEQ ID NO: 317613
ggaugcuaaugaucccuuu

SEQ ID NO: 498358 - RNA, 19 nt, Artificial Sequence
  Description of Artificial Sequence: Synthetic oligonucleotide
  Antisense Strand to SEQ ID NO: 498357
aaagggaucauuagcaucc

SEQ ID NO: 498359 - RNA, 19 nt, Artificial Sequence
  Description of Artificial Sequence: Synthetic oligonucleotide
  Sense strand starting at position 2757 of SEQ ID NO: 317613
ugcuaaugaucccuuugga

SEQ ID NO: 498360 - RNA, 19 nt, Artificial Sequence
  Description of Artificial Sequence: Synthetic oligonucleotide
  Antisense Strand to SEQ ID NO: 498359
uccaaagggaucauuagca

SEQ ID NO: 498361 - RNA, 19 nt, Artificial Sequence
  Description of Artificial Sequence: Synthetic oligonucleotide
  Sense strand starting at position 2809 of SEQ ID NO: 317613
agaaucuucguggagagua

SEQ ID NO: 498362 - RNA, 19 nt, Artificial Sequence
  Description of Artificial Sequence: Synthetic oligonucleotide
  Antisense Strand to SEQ ID NO: 498361
uacucuccacgaagauucu

SEQ ID NO: 498363 - RNA, 19 nt, Artificial Sequence
  Description of Artificial Sequence: Synthetic oligonucleotide
  Sense strand starting at position 2811 of SEQ ID NO: 317613
aaucuucguggagaguaaa

SEQ ID NO: 498364 - RNA, 19 nt, Artificial Sequence
  Description of Artificial Sequence: Synthetic oligonucleotide
  Antisense Strand to SEQ ID NO: 498363
uuuacucuccacgaagauu

SEQ ID NO: 498365 - RNA, 19 nt, Artificial Sequence
  Description of Artificial Sequence: Synthetic oligonucleotide
  Sense strand starting at position 2854 of SEQ ID NO: 317613
gaaguugguuuacuugaaa

SEQ ID NO: 498366 - RNA, 19 nt, Artificial Sequence
  Description of Artificial Sequence: Synthetic oligonucleotide
  Antisense Strand to SEQ ID NO: 498365
uuucaaguaaaccaacuuc

SEQ ID NO: 498367 - RNA, 19 nt, Artificial Sequence
  Description of Artificial Sequence: Synthetic oligonucleotide
  Sense strand starting at position 2881 of SEQ ID NO: 317613
gauaaagagagaugugugu

SEQ ID NO: 498368 - RNA, 19 nt, Artificial Sequence
  Description of Artificial Sequence: Synthetic oligonucleotide
  Antisense Strand to SEQ ID NO: 498367
acacacaucucucuuuauc

SEQ ID NO: 498369 - RNA, 19 nt, Artificial Sequence
  Description of Artificial Sequence: Synthetic oligonucleotide
  Sense strand starting at position 2894 of SEQ ID NO: 317613
gugugugagacauauucca

SEQ ID NO: 498370 - RNA, 19 nt, Artificial Sequence
  Description of Artificial Sequence: Synthetic oligonucleotide
  Antisense Strand to SEQ ID NO: 498369
uggaauaugucucacacac

SEQ ID NO: 498371 - RNA, 19 nt, Artificial Sequence
  Description of Artificial Sequence: Synthetic oligonucleotide
  Sense strand starting at position 2911 of SEQ ID NO: 317613
cagaaaggauguguagcau

SEQ ID NO: 498372 - RNA, 19 nt, Artificial Sequence
  Description of Artificial Sequence: Synthetic oligonucleotide
  Antisense Strand to SEQ ID NO: 498371
augcuacacauccuuucug

SEQ ID NO: 498373 - RNA, 19 nt, Artificial Sequence
  Description of Artificial Sequence: Synthetic oligonucleotide
  Sense strand starting at position 3116 of SEQ ID NO: 317613
auguuauagguccauaaua

SEQ ID NO: 498374 - RNA, 19 nt, Artificial Sequence
  Description of Artificial Sequence: Synthetic oligonucleotide
  Antisense Strand to SEQ ID NO: 498373
uauuauggaccuauaacau

SEQ ID NO: 498375 - RNA, 19 nt, Artificial Sequence
  Description of Artificial Sequence: Synthetic oligonucleotide
  Sense strand starting at position 3118 of SEQ ID NO: 317613
guuauagguccauaauauc

SEQ ID NO: 498376 - RNA, 19 nt, Artificial Sequence
  Description of Artificial Sequence: Synthetic oligonucleotide
  Antisense Strand to SEQ ID NO: 498375
gauauuauggaccuauaac

SEQ ID NO: 498377 - RNA, 19 nt, Artificial Sequence
  Description of Artificial Sequence: Synthetic oligonucleotide
  Sense strand starting at position 3149 of SEQ ID NO: 317613
gagacuuucuuaucugguu

SEQ ID NO: 498378 - RNA, 19 nt, Artificial Sequence
  Description of Artificial Sequence: Synthetic oligonucleotide
  Antisense Strand to SEQ ID NO: 498377
aaccagauaagaaagucuc

SEQ ID NO: 498379 - RNA, 19 nt, Artificial Sequence
  Description of Artificial Sequence: Synthetic oligonucleotide
  Sense strand starting at position 3506 of SEQ ID NO: 317613
aaguaugcgguugagaaca

SEQ ID NO: 498380 - RNA, 19 nt, Artificial Sequence
  Description of Artificial Sequence: Synthetic oligonucleotide
  Antisense Strand to SEQ ID NO: 498379
uguucucaaccgcauacuu

SEQ ID NO: 498381 - RNA, 19 nt, Artificial Sequence
  Description of Artificial Sequence: Synthetic oligonucleotide
  Sense strand starting at position 3533 of SEQ ID NO: 317613
uacuuagugcuguaaugag

SEQ ID NO: 498382 - RNA, 19 nt, Artificial Sequence
  Description of Artificial Sequence: Synthetic oligonucleotide
  Antisense Strand to SEQ ID NO: 498381
cucauuacagcacuaagua

SEQ ID NO: 498383 - RNA, 19 nt, Artificial Sequence
  Description of Artificial Sequence: Synthetic oligonucleotide
  Sense strand starting at position 3718 of SEQ ID NO: 317613
uggaguuaaguuuacugua

SEQ ID NO: 498384 - RNA, 19 nt, Artificial Sequence
  Description of Artificial Sequence: Synthetic oligonucleotide
  Antisense Strand to SEQ ID NO: 498383
uacaguaaacuuaacucca

SEQ ID NO: 498385 - RNA, 19 nt, Artificial Sequence
  Description of Artificial Sequence: Synthetic oligonucleotide
  Sense strand starting at position 3723 of SEQ ID NO: 317613
uuaaguuuacuguauccaa

SEQ ID NO: 498386 - RNA, 19 nt, Artificial Sequence
  Description of Artificial Sequence: Synthetic oligonucleotide
  Antisense Strand to SEQ ID NO: 498385
uuggauacaguaaacuuaa

SEQ ID NO: 498387 - RNA, 19 nt, Artificial Sequence
  Description of Artificial Sequence: Synthetic oligonucleotide
  Sense strand starting at position 3726 of SEQ ID NO: 317613
aguuuacuguauccaagau

SEQ ID NO: 498388 - RNA, 19 nt, Artificial Sequence
  Description of Artificial Sequence: Synthetic oligonucleotide
  Antisense Strand to SEQ ID NO: 498387
aucuuggauacaguaaacu

SEQ ID NO: 498389 - RNA, 19 nt, Artificial Sequence
  Description of Artificial Sequence: Synthetic oligonucleotide
  Sense strand starting at position 3781 of SEQ ID NO: 317613
agacucgguccaugaucua

SEQ ID NO: 498390 - RNA, 19 nt, Artificial Sequence
  Description of Artificial Sequence: Synthetic oligonucleotide
  Antisense Strand to SEQ ID NO: 498389
uagaucauggaccgagucu

SEQ ID NO: 498391 - RNA, 19 nt, Artificial Sequence
  Description of Artificial Sequence: Synthetic oligonucleotide
  Sense strand starting at position 3825 of SEQ ID NO: 317613
gaacauggucaguguauca

SEQ ID NO: 498392 - RNA, 19 nt, Artificial Sequence
  Description of Artificial Sequence: Synthetic oligonucleotide
  Antisense Strand to SEQ ID NO: 498391
ugauacacugaccauguuc

SEQ ID NO: 498393 - RNA, 19 nt, Artificial Sequence
  Description of Artificial Sequence: Synthetic oligonucleotide
  Sense strand starting at position 3873 of SEQ ID NO: 317613
auuugaucagccugccaua

SEQ ID NO: 498394 - RNA, 19 nt, Artificial Sequence
  Description of Artificial Sequence: Synthetic oligonucleotide
  Antisense Strand to SEQ ID NO: 498393
uauggcaggcugaucaaau

SEQ ID NO: 498395 - RNA, 19 nt, Artificial Sequence
  Description of Artificial Sequence: Synthetic oligonucleotide
  Sense strand starting at position 135 of SEQ ID NO: 317614
aaaguugagcaguggaauu

SEQ ID NO: 498396 - RNA, 19 nt, Artificial Sequence
  Description of Artificial Sequence: Synthetic oligonucleotide
  Antisense Strand to SEQ ID NO: 498395
aauuccacugcucaacuuu

SEQ ID NO: 498397 - RNA, 19 nt, Artificial Sequence
  Description of Artificial Sequence: Synthetic oligonucleotide
  Sense strand starting at position 473 of SEQ ID NO: 317614
gaaagaaacuagcaguaga

SEQ ID NO: 498398 - RNA, 19 nt, Artificial Sequence
  Description of Artificial Sequence: Synthetic oligonucleotide
  Antisense Strand to SEQ ID NO: 498397
ucuacugcuaguuucuuuc

SEQ ID NO: 498399 - RNA, 19 nt, Artificial Sequence
  Description of Artificial Sequence: Synthetic oligonucleotide
  Sense strand starting at position 487 of SEQ ID NO: 317614
guagaaaccucuuucuagc

SEQ ID NO: 498400 - RNA, 19 nt, Artificial Sequence
  Description of Artificial Sequence: Synthetic oligonucleotide
  Antisense Strand to SEQ ID NO: 498399
gcuagaaagagguuucuac

SEQ ID NO: 498401 - RNA, 19 nt, Artificial Sequence
  Description of Artificial Sequence: Synthetic oligonucleotide
  Sense strand starting at position 498 of SEQ ID NO: 317614
uuucuagcagcuugagaua

SEQ ID NO: 498402 - RNA, 19 nt, Artificial Sequence
  Description of Artificial Sequence: Synthetic oligonucleotide
  Antisense Strand to SEQ ID NO: 498401
uaucucaagcugcuagaaa

SEQ ID NO: 498403 - RNA, 19 nt, Artificial Sequence
  Description of Artificial Sequence: Synthetic oligonucleotide
  Sense strand starting at position 550 of SEQ ID NO: 317614
gcucaaauaucauaggaag

SEQ ID NO: 498404 - RNA, 19 nt, Artificial Sequence
  Description of Artificial Sequence: Synthetic oligonucleotide
  Antisense Strand to SEQ ID NO: 498403
cuuccuaugauauuugagc

SEQ ID NO: 498405 - RNA, 19 nt, Artificial Sequence
  Description of Artificial Sequence: Synthetic oligonucleotide
  Sense strand starting at position 553 of SEQ ID NO: 317614
caaauaucauaggaagagu

SEQ ID NO: 498406 - RNA, 19 nt, Artificial Sequence
  Description of Artificial Sequence: Synthetic oligonucleotide
  Antisense Strand to SEQ ID NO: 498405
acucuuccuaugauauuug

SEQ ID NO: 498407 - RNA, 19 nt, Artificial Sequence
  Description of Artificial Sequence: Synthetic oligonucleotide
  Sense strand starting at position 562 of SEQ ID NO: 317614
uaggaagaguucucaauuc

SEQ ID NO: 498408 - RNA, 19 nt, Artificial Sequence
  Description of Artificial Sequence: Synthetic oligonucleotide
  Antisense Strand to SEQ ID NO: 498407
gaauugagaacucuuccua

SEQ ID NO: 498409 - RNA, 19 nt, Artificial Sequence
  Description of Artificial Sequence: Synthetic oligonucleotide
  Sense strand starting at position 752 of SEQ ID NO: 317614
guuuguuacgucgccugau

SEQ ID NO: 498410 - RNA, 19 nt, Artificial Sequence
  Description of Artificial Sequence: Synthetic oligonucleotide
  Antisense Strand to SEQ ID NO: 498409
aucaggcgacguaacaaac

SEQ ID NO: 498411 - RNA, 19 nt, Artificial Sequence
  Description of Artificial Sequence: Synthetic oligonucleotide
  Sense strand starting at position 754 of SEQ ID NO: 317614
uuguuacgucgccugauag

SEQ ID NO: 498412 - RNA, 19 nt, Artificial Sequence
  Description of Artificial Sequence: Synthetic oligonucleotide
  Antisense Strand to SEQ ID NO: 498411
cuaucaggcgacguaacaa

SEQ ID NO: 498413 - RNA, 19 nt, Artificial Sequence
  Description of Artificial Sequence: Synthetic oligonucleotide
  Sense strand starting at position 902 of SEQ ID NO: 317614
guuggcaaccauuacugaa

SEQ ID NO: 498414 - RNA, 19 nt, Artificial Sequence
  Description of Artificial Sequence: Synthetic oligonucleotide
  Antisense Strand to SEQ ID NO: 498413
uucaguaaugguugccaac

SEQ ID NO: 498415 - RNA, 19 nt, Artificial Sequence
  Description of Artificial Sequence: Synthetic oligonucleotide
  Sense strand starting at position 1039 of SEQ ID NO: 317614
guuguaucacauuguuucu

SEQ ID NO: 498416 - RNA, 19 nt, Artificial Sequence
  Description of Artificial Sequence: Synthetic oligonucleotide
  Antisense Strand to SEQ ID NO: 498415
agaaacaaugugauacaac

SEQ ID NO: 498417 - RNA, 19 nt, Artificial Sequence
  Description of Artificial Sequence: Synthetic oligonucleotide
  Sense strand starting at position 1044 of SEQ ID NO: 317614
aucacauuguuucugugaa

SEQ ID NO: 498418 - RNA, 19 nt, Artificial Sequence
  Description of Artificial Sequence: Synthetic oligonucleotide
  Antisense Strand to SEQ ID NO: 498417
uucacagaaacaaugugau

SEQ ID NO: 498419 - RNA, 19 nt, Artificial Sequence
  Description of Artificial Sequence: Synthetic oligonucleotide
  Sense strand starting at position 1070 of SEQ ID NO: 317614
ccugauauugcagaucuca

SEQ ID NO: 498420 - RNA, 19 nt, Artificial Sequence
  Description of Artificial Sequence: Synthetic oligonucleotide
  Antisense Strand to SEQ ID NO: 498419
ugagaucugcaauaucagg

SEQ ID NO: 498421 - RNA, 19 nt, Artificial Sequence
  Description of Artificial Sequence: Synthetic oligonucleotide
  Sense strand starting at position 1144 of SEQ ID NO: 317614
gauggccuuugguuggaaa

SEQ ID NO: 498422 - RNA, 19 nt, Artificial Sequence
  Description of Artificial Sequence: Synthetic oligonucleotide
  Antisense Strand to SEQ ID NO: 498421
uuuccaaccaaaggccauc

SEQ ID NO: 498423 - RNA, 19 nt, Artificial Sequence
  Description of Artificial Sequence: Synthetic oligonucleotide
  Sense strand starting at position 1163 of SEQ ID NO: 317614
ggucucaucugcuucuuaa

SEQ ID NO: 498424 - RNA, 19 nt, Artificial Sequence
  Description of Artificial Sequence: Synthetic oligonucleotide
  Antisense Strand to SEQ ID NO: 498423
uuaagaagcagaugagacc

SEQ ID NO: 498425 - RNA, 19 nt, Artificial Sequence
  Description of Artificial Sequence: Synthetic oligonucleotide
  Sense strand starting at position 1192 of SEQ ID NO: 317614
aacugugaauguuugcgau

SEQ ID NO: 498426 - RNA, 19 nt, Artificial Sequence
  Description of Artificial Sequence: Synthetic oligonucleotide
  Antisense Strand to SEQ ID NO: 498425
aucgcaaacauucacaguu

SEQ ID NO: 498427 - RNA, 19 nt, Artificial Sequence
  Description of Artificial Sequence: Synthetic oligonucleotide
  Sense strand starting at position 1249 of SEQ ID NO: 317614
uggcuccuuccauaaucga

SEQ ID NO: 498428 - RNA, 19 nt, Artificial Sequence
  Description of Artificial Sequence: Synthetic oligonucleotide
  Antisense Strand to SEQ ID NO: 498427
ucgauuauggaaggagcca

SEQ ID NO: 498429 - RNA, 19 nt, Artificial Sequence
  Description of Artificial Sequence: Synthetic oligonucleotide
  Sense strand starting at position 2155 of SEQ ID NO: 317614
ucggguuucuucucuccau

SEQ ID NO: 498430 - RNA, 19 nt, Artificial Sequence
  Description of Artificial Sequence: Synthetic oligonucleotide
  Antisense Strand to SEQ ID NO: 498429
auggagagaagaaacccga

SEQ ID NO: 498431 - RNA, 19 nt, Artificial Sequence
  Description of Artificial Sequence: Synthetic oligonucleotide
  Sense strand starting at position 2748 of SEQ ID NO: 317614
uuacucuagccagaguaua

SEQ ID NO: 498432 - RNA, 19 nt, Artificial Sequence
  Description of Artificial Sequence: Synthetic oligonucleotide
  Antisense Strand to SEQ ID NO: 498431
uauacucuggcuagaguaa

SEQ ID NO: 498433 - RNA, 19 nt, Artificial Sequence
  Description of Artificial Sequence: Synthetic oligonucleotide
  Sense strand starting at position 2840 of SEQ ID NO: 317614
ccgugaugggacuguaguu

SEQ ID NO: 498434 - RNA, 19 nt, Artificial Sequence
  Description of Artificial Sequence: Synthetic oligonucleotide
  Antisense Strand to SEQ ID NO: 498433
aacuacagucccaucacgg

SEQ ID NO: 498435 - RNA, 19 nt, Artificial Sequence
  Description of Artificial Sequence: Synthetic oligonucleotide
  Sense strand starting at position 2877 of SEQ ID NO: 317614
uggugccuuccgucaguga

SEQ ID NO: 498436 - RNA, 19 nt, Artificial Sequence
  Description of Artificial Sequence: Synthetic oligonucleotide
  Antisense Strand to SEQ ID NO: 498435
ucacugacggaaggcacca

SEQ ID NO: 498437 - RNA, 19 nt, Artificial Sequence
  Description of Artificial Sequence: Synthetic oligonucleotide
  Sense strand starting at position 2898 of SEQ ID NO: 317614
uugagucgguugccuaaga

SEQ ID NO: 498438 - RNA, 19 nt, Artificial Sequence
  Description of Artificial Sequence: Synthetic oligonucleotide
  Antisense Strand to SEQ ID NO: 498437
ucuuaggcaaccgacucaa

SEQ ID NO: 498439 - RNA, 19 nt, Artificial Sequence
  Description of Artificial Sequence: Synthetic oligonucleotide
  Sense strand starting at position 2899 of SEQ ID NO: 317614
ugagucgguugccuaagau

SEQ ID NO: 498440 - RNA, 19 nt, Artificial Sequence
  Description of Artificial Sequence: Synthetic oligonucleotide
  Antisense Strand to SEQ ID NO: 498439
aucuuaggcaaccgacuca

SEQ ID NO: 498441 - RNA, 19 nt, Artificial Sequence
  Description of Artificial Sequence: Synthetic oligonucleotide
  Sense strand starting at position 2946 of SEQ ID NO: 317614
gggcauuauuuauaccuuu

SEQ ID NO: 498442 - RNA, 19 nt, Artificial Sequence
  Description of Artificial Sequence: Synthetic oligonucleotide
  Antisense Strand to SEQ ID NO: 498441
aaagguauaaauaaugccc

SEQ ID NO: 498443 - RNA, 19 nt, Artificial Sequence
  Description of Artificial Sequence: Synthetic oligonucleotide
  Sense strand starting at position 3019 of SEQ ID NO: 317614
cugccaagugaucaucauu

SEQ ID NO: 498444 - RNA, 19 nt, Artificial Sequence
  Description of Artificial Sequence: Synthetic oligonucleotide
  Antisense Strand to SEQ ID NO: 498443
aaugaugaucacuuggcag

SEQ ID NO: 498445 - RNA, 19 nt, Artificial Sequence
  Description of Artificial Sequence: Synthetic oligonucleotide
  Sense strand starting at position 3104 of SEQ ID NO: 317614
caaacugagucagcaguua

SEQ ID NO: 498446 - RNA, 19 nt, Artificial Sequence
  Description of Artificial Sequence: Synthetic oligonucleotide
  Antisense Strand to SEQ ID NO: 498445
uaacugcugacucaguuug

SEQ ID NO: 498447 - RNA, 19 nt, Artificial Sequence
  Description of Artificial Sequence: Synthetic oligonucleotide
  Sense strand starting at position 3163 of SEQ ID NO: 317614
uggucauaacaucgcugua

SEQ ID NO: 498448 - RNA, 19 nt, Artificial Sequence
  Description of Artificial Sequence: Synthetic oligonucleotide
  Antisense Strand to SEQ ID NO: 498447
uacagcgauguuaugacca

SEQ ID NO: 498449 - RNA, 19 nt, Artificial Sequence
  Description of Artificial Sequence: Synthetic oligonucleotide
  Sense strand starting at position 3165 of SEQ ID NO: 317614
gucauaacaucgcuguaau

SEQ ID NO: 498450 - RNA, 19 nt, Artificial Sequence
  Description of Artificial Sequence: Synthetic oligonucleotide
  Antisense Strand to SEQ ID NO: 498449
auuacagcgauguuaugac

SEQ ID NO: 498451 - RNA, 19 nt, Artificial Sequence
  Description of Artificial Sequence: Synthetic oligonucleotide
  Sense strand starting at position 3166 of SEQ ID NO: 317614
ucauaacaucgcuguaauc

SEQ ID NO: 498452 - RNA, 19 nt, Artificial Sequence
  Description of Artificial Sequence: Synthetic oligonucleotide
  Antisense Strand to SEQ ID NO: 498451
gauuacagcgauguuauga

SEQ ID NO: 498453 - RNA, 19 nt, Artificial Sequence
  Description of Artificial Sequence: Synthetic oligonucleotide
  Sense strand starting at position 3168 of SEQ ID NO: 317614
auaacaucgcuguaaucac

SEQ ID NO: 498454 - RNA, 19 nt, Artificial Sequence
  Description of Artificial Sequence: Synthetic oligonucleotide
  Antisense Strand to SEQ ID NO: 498453
gugauuacagcgauguuau

SEQ ID NO: 498455 - RNA, 19 nt, Artificial Sequence
  Description of Artificial Sequence: Synthetic oligonucleotide
  Sense strand starting at position 3310 of SEQ ID NO: 317614
uguaaugauuuacucguca

SEQ ID NO: 498456 - RNA, 19 nt, Artificial Sequence
  Description of Artificial Sequence: Synthetic oligonucleotide
  Antisense Strand to SEQ ID NO: 498455
ugacgaguaaaucauuaca

SEQ ID NO: 498457 - RNA, 19 nt, Artificial Sequence
  Description of Artificial Sequence: Synthetic oligonucleotide
  Sense strand starting at position 3322 of SEQ ID NO: 317614
cucgucaauuacuccaaga

SEQ ID NO: 498458 - RNA, 19 nt, Artificial Sequence
  Description of Artificial Sequence: Synthetic oligonucleotide
  Antisense Strand to SEQ ID NO: 498457
ucuuggaguaauugacgag

SEQ ID NO: 498459 - RNA, 19 nt, Artificial Sequence
  Description of Artificial Sequence: Synthetic oligonucleotide
  Sense strand starting at position 3324 of SEQ ID NO: 317614
cgucaauuacuccaagaua

SEQ ID NO: 498460 - RNA, 19 nt, Artificial Sequence
  Description of Artificial Sequence: Synthetic oligonucleotide
  Antisense Strand to SEQ ID NO: 498459
uaucuuggaguaauugacg

SEQ ID NO: 498461 - RNA, 19 nt, Artificial Sequence
  Description of Artificial Sequence: Synthetic oligonucleotide
  Sense strand starting at position 3476 of SEQ ID NO: 317614
agacuaguguguucaaagg

SEQ ID NO: 498462 - RNA, 19 nt, Artificial Sequence
  Description of Artificial Sequence: Synthetic oligonucleotide
  Antisense Strand to SEQ ID NO: 498461
ccuuugaacacacuagucu

SEQ ID NO: 498463 - RNA, 19 nt, Artificial Sequence
  Description of Artificial Sequence: Synthetic oligonucleotide
  Sense strand starting at position 3492 of SEQ ID NO: 317614
agguuagucccuuaaacag

SEQ ID NO: 498464 - RNA, 19 nt, Artificial Sequence
  Description of Artificial Sequence: Synthetic oligonucleotide
  Antisense Strand to SEQ ID NO: 498463
cuguuuaagggacuaaccu

SEQ ID NO: 498465 - RNA, 19 nt, Artificial Sequence
  Description of Artificial Sequence: Synthetic oligonucleotide
  Sense strand starting at position 3510 of SEQ ID NO: 317614
gaccaaaugugggcagaaa

SEQ ID NO: 498466 - RNA, 19 nt, Artificial Sequence
  Description of Artificial Sequence: Synthetic oligonucleotide
  Antisense Strand to SEQ ID NO: 498465
uuucugcccacauuugguc

SEQ ID NO: 498467 - RNA, 19 nt, Artificial Sequence
  Description of Artificial Sequence: Synthetic oligonucleotide
  Sense strand starting at position 3720 of SEQ ID NO: 317614
auuuaauccucacgaagua

SEQ ID NO: 498468 - RNA, 19 nt, Artificial Sequence
  Description of Artificial Sequence: Synthetic oligonucleotide
  Antisense Strand to SEQ ID NO: 498467
uacuucgugaggauuaaau

SEQ ID NO: 498469 - RNA, 19 nt, Artificial Sequence
  Description of Artificial Sequence: Synthetic oligonucleotide
  Sense strand starting at position 3721 of SEQ ID NO: 317614
uuuaauccucacgaaguaa

SEQ ID NO: 498470 - RNA, 19 nt, Artificial Sequence
  Description of Artificial Sequence: Synthetic oligonucleotide
  Antisense Strand to SEQ ID NO: 498469
uuacuucgugaggauuaaa

SEQ ID NO: 498471 - RNA, 19 nt, Artificial Sequence
  Description of Artificial Sequence: Synthetic oligonucleotide
  Sense strand starting at position 3851 of SEQ ID NO: 317614
uaaaguauuugagacagca

SEQ ID NO: 498472 - RNA, 19 nt, Artificial Sequence
  Description of Artificial Sequence: Synthetic oligonucleotide
  Antisense Strand to SEQ ID NO: 498471
ugcugucucaaauacuuua

SEQ ID NO: 498473 - RNA, 19 nt, Artificial Sequence
  Description of Artificial Sequence: Synthetic oligonucleotide
  Sense strand starting at position 3859 of SEQ ID NO: 317614
uugagacagcauuguacaa

SEQ ID NO: 498474 - RNA, 19 nt, Artificial Sequence
  Description of Artificial Sequence: Synthetic oligonucleotide
  Antisense Strand to SEQ ID NO: 498473
uuguacaaugcugucucaa

SEQ ID NO: 498475 - RNA, 19 nt, Artificial Sequence
  Description of Artificial Sequence: Synthetic oligonucleotide
  Sense strand starting at position 114 of SEQ ID NO: 317615
gggaaaucaggcugacuuu

SEQ ID NO: 498476 - RNA, 19 nt, Artificial Sequence
  Description of Artificial Sequence: Synthetic oligonucleotide
  Antisense Strand to SEQ ID NO: 498475
aaagucagccugauuuccc

SEQ ID NO: 498477 - RNA, 19 nt, Artificial Sequence
  Description of Artificial Sequence: Synthetic oligonucleotide
  Sense strand starting at position 123 of SEQ ID NO: 317615
ggcugacuuuaaguugaca

SEQ ID NO: 498478 - RNA, 19 nt, Artificial Sequence
  Description of Artificial Sequence: Synthetic oligonucleotide
  Antisense Strand to SEQ ID NO: 498477
ugucaacuuaaagucagcc

SEQ ID NO: 498479 - RNA, 19 nt, Artificial Sequence
  Description of Artificial Sequence: Synthetic oligonucleotide
  Sense strand starting at position 151 of SEQ ID NO: 317615
ugccuauggcaucaaucaa

SEQ ID NO: 498480 - RNA, 19 nt, Artificial Sequence
  Description of Artificial Sequence: Synthetic oligonucleotide
  Antisense Strand to SEQ ID NO: 498479
uugauugaugccauaggca

SEQ ID NO: 498481 - RNA, 19 nt, Artificial Sequence
  Description of Artificial Sequence: Synthetic oligonucleotide
  Sense strand starting at position 430 of SEQ ID NO: 317615
gaggcuugcagagaaugau

SEQ ID NO: 498482 - RNA, 19 nt, Artificial Sequence
  Description of Artificial Sequence: Synthetic oligonucleotide
  Antisense Strand to SEQ ID NO: 498481
aucauucucugcaagccuc

SEQ ID NO: 498483 - RNA, 19 nt, Artificial Sequence
  Description of Artificial Sequence: Synthetic oligonucleotide
  Sense strand starting at position 562 of SEQ ID NO: 317615
ggguauuaacagcgaguua

SEQ ID NO: 498484 - RNA, 19 nt, Artificial Sequence
  Description of Artificial Sequence: Synthetic oligonucleotide
  Antisense Strand to SEQ ID NO: 498483
uaacucgcuguuaauaccc

SEQ ID NO: 498485 - RNA, 19 nt, Artificial Sequence
  Description of Artificial Sequence: Synthetic oligonucleotide
  Sense strand starting at position 563 of SEQ ID NO: 317615
gguauuaacagcgaguuag

SEQ ID NO: 498486 - RNA, 19 nt, Artificial Sequence
  Description of Artificial Sequence: Synthetic oligonucleotide
  Antisense Strand to SEQ ID NO: 498485
cuaacucgcuguuaauacc

SEQ ID NO: 498487 - RNA, 19 nt, Artificial Sequence
  Description of Artificial Sequence: Synthetic oligonucleotide
  Sense strand starting at position 573 of SEQ ID NO: 317615
gcgaguuagcugagugcca

SEQ ID NO: 498488 - RNA, 19 nt, Artificial Sequence
  Description of Artificial Sequence: Synthetic oligonucleotide
  Antisense Strand to SEQ ID NO: 498487
uggcacucagcuaacucgc

SEQ ID NO: 498489 - RNA, 19 nt, Artificial Sequence
  Description of Artificial Sequence: Synthetic oligonucleotide
  Sense strand starting at position 684 of SEQ ID NO: 317615
aagcgagaguggucaucau

SEQ ID NO: 498490 - RNA, 19 nt, Artificial Sequence
  Description of Artificial Sequence: Synthetic oligonucleotide
  Antisense Strand to SEQ ID NO: 498489
augaugaccacucucgcuu

SEQ ID NO: 498491 - RNA, 19 nt, Artificial Sequence
  Description of Artificial Sequence: Synthetic oligonucleotide
  Sense strand starting at position 688 of SEQ ID NO: 317615
gagaguggucaucaucuca

SEQ ID NO: 498492 - RNA, 19 nt, Artificial Sequence
  Description of Artificial Sequence: Synthetic oligonucleotide
  Antisense Strand to SEQ ID NO: 498491
ugagaugaugaccacucuc

SEQ ID NO: 498493 - RNA, 19 nt, Artificial Sequence
  Description of Artificial Sequence: Synthetic oligonucleotide
  Sense strand starting at position 788 of SEQ ID NO: 317615
gggucagucugaucccuca

SEQ ID NO: 498494 - RNA, 19 nt, Artificial Sequence
  Description of Artificial Sequence: Synthetic oligonucleotide
  Antisense Strand to SEQ ID NO: 498493
ugagggaucagacugaccc

SEQ ID NO: 498495 - RNA, 19 nt, Artificial Sequence
  Description of Artificial Sequence: Synthetic oligonucleotide
  Sense strand starting at position 919 of SEQ ID NO: 317615
gugcuaugaccguagacag

SEQ ID NO: 498496 - RNA, 19 nt, Artificial Sequence
  Description of Artificial Sequence: Synthetic oligonucleotide
  Antisense Strand to SEQ ID NO: 498495
cugucuacggucauagcac

SEQ ID NO: 498497 - RNA, 19 nt, Artificial Sequence
  Description of Artificial Sequence: Synthetic oligonucleotide
  Sense strand starting at position 1164 of SEQ ID NO: 317615
gucgauguuccuuaggaug

SEQ ID NO: 498498 - RNA, 19 nt, Artificial Sequence
  Description of Artificial Sequence: Synthetic oligonucleotide
  Antisense Strand to SEQ ID NO: 498497
cauccuaaggaacaucgac

SEQ ID NO: 498499 - RNA, 19 nt, Artificial Sequence
  Description of Artificial Sequence: Synthetic oligonucleotide
  Sense strand starting at position 1189 of SEQ ID NO: 317615
uuuccauugguguacagaa

SEQ ID NO: 498500 - RNA, 19 nt, Artificial Sequence
  Description of Artificial Sequence: Synthetic oligonucleotide
  Antisense Strand to SEQ ID NO: 498499
uucuguacaccaauggaaa

SEQ ID NO: 498501 - RNA, 19 nt, Artificial Sequence
  Description of Artificial Sequence: Synthetic oligonucleotide
  Sense strand starting at position 1776 of SEQ ID NO: 317615
gcgaauuacaccucgccga

SEQ ID NO: 498502 - RNA, 19 nt, Artificial Sequence
  Description of Artificial Sequence: Synthetic oligonucleotide
  Antisense Strand to SEQ ID NO: 498501
ucggcgagguguaauucgc

SEQ ID NO: 498503 - RNA, 19 nt, Artificial Sequence
  Description of Artificial Sequence: Synthetic oligonucleotide
  Sense strand starting at position 2078 of SEQ ID NO: 317615
ccggaagugacguauagca

SEQ ID NO: 498504 - RNA, 19 nt, Artificial Sequence
  Description of Artificial Sequence: Synthetic oligonucleotide
  Antisense Strand to SEQ ID NO: 498503
ugcuauacgucacuuccgg

SEQ ID NO: 498505 - RNA, 19 nt, Artificial Sequence
  Description of Artificial Sequence: Synthetic oligonucleotide
  Sense strand starting at position 2129 of SEQ ID NO: 317615
caagcagccgcgucagaau

SEQ ID NO: 498506 - RNA, 19 nt, Artificial Sequence
  Description of Artificial Sequence: Synthetic oligonucleotide
  Antisense Strand to SEQ ID NO: 498505
auucugacgcggcugcuug

SEQ ID NO: 498507 - RNA, 19 nt, Artificial Sequence
  Description of Artificial Sequence: Synthetic oligonucleotide
  Sense strand starting at position 2232 of SEQ ID NO: 317615
ucuuaaagacgcugaaagu

SEQ ID NO: 498508 - RNA, 19 nt, Artificial Sequence
  Description of Artificial Sequence: Synthetic oligonucleotide
  Antisense Strand to SEQ ID NO: 498507
acuuucagcgucuuuaaga

SEQ ID NO: 498509 - RNA, 19 nt, Artificial Sequence
  Description of Artificial Sequence: Synthetic oligonucleotide
  Sense strand starting at position 2233 of SEQ ID NO: 317615
cuuaaagacgcugaaagua

SEQ ID NO: 498510 - RNA, 19 nt, Artificial Sequence
  Description of Artificial Sequence: Synthetic oligonucleotide
  Antisense Strand to SEQ ID NO: 498509
uacuuucagcgucuuuaag

SEQ ID NO: 498511 - RNA, 19 nt, Artificial Sequence
  Description of Artificial Sequence: Synthetic oligonucleotide
  Sense strand starting at position 2414 of SEQ ID NO: 317615
cuucuuaaaguacgguuaa

SEQ ID NO: 498512 - RNA, 19 nt, Artificial Sequence
  Description of Artificial Sequence: Synthetic oligonucleotide
  Antisense Strand to SEQ ID NO: 498511
uuaaccguacuuuaagaag

SEQ ID NO: 498513 - RNA, 19 nt, Artificial Sequence
  Description of Artificial Sequence: Synthetic oligonucleotide
  Sense strand starting at position 2563 of SEQ ID NO: 317615
gucggucuuaaggaaguua

SEQ ID NO: 498514 - RNA, 19 nt, Artificial Sequence
  Description of Artificial Sequence: Synthetic oligonucleotide
  Antisense Strand to SEQ ID NO: 498513
uaacuuccuuaagaccgac

SEQ ID NO: 498515 - RNA, 19 nt, Artificial Sequence
  Description of Artificial Sequence: Synthetic oligonucleotide
  Sense strand starting at position 2658 of SEQ ID NO: 317615
cuguaaaguguccaaguuu

SEQ ID NO: 498516 - RNA, 19 nt, Artificial Sequence
  Description of Artificial Sequence: Synthetic oligonucleotide
  Antisense Strand to SEQ ID NO: 498515
aaacuuggacacuuuacag

SEQ ID NO: 498517 - RNA, 19 nt, Artificial Sequence
  Description of Artificial Sequence: Synthetic oligonucleotide
  Sense strand starting at position 2669 of SEQ ID NO: 317615
ccaaguuucuagucucauc

SEQ ID NO: 498518 - RNA, 19 nt, Artificial Sequence
  Description of Artificial Sequence: Synthetic oligonucleotide
  Antisense Strand to SEQ ID NO: 498517
gaugagacuagaaacuugg

SEQ ID NO: 498519 - RNA, 19 nt, Artificial Sequence
  Description of Artificial Sequence: Synthetic oligonucleotide
  Sense strand starting at position 2795 of SEQ ID NO: 317615
uguuguuguaaguggaaga

SEQ ID NO: 498520 - RNA, 19 nt, Artificial Sequence
  Description of Artificial Sequence: Synthetic oligonucleotide
  Antisense Strand to SEQ ID NO: 498519
ucuuccacuuacaacaaca

SEQ ID NO: 498521 - RNA, 19 nt, Artificial Sequence
  Description of Artificial Sequence: Synthetic oligonucleotide
  Sense strand starting at position 2882 of SEQ ID NO: 317615
gaacguaaggguuacucuu

SEQ ID NO: 498522 - RNA, 19 nt, Artificial Sequence
  Description of Artificial Sequence: Synthetic oligonucleotide
  Antisense Strand to SEQ ID NO: 498521
aagaguaacccuuacguuc

SEQ ID NO: 498523 - RNA, 19 nt, Artificial Sequence
  Description of Artificial Sequence: Synthetic oligonucleotide
  Sense strand starting at position 2888 of SEQ ID NO: 317615
aaggguuacucuuuguuag

SEQ ID NO: 498524 - RNA, 19 nt, Artificial Sequence
  Description of Artificial Sequence: Synthetic oligonucleotide
  Antisense Strand to SEQ ID NO: 498523
cuaacaaagaguaacccuu

SEQ ID NO: 498525 - RNA, 19 nt, Artificial Sequence
  Description of Artificial Sequence: Synthetic oligonucleotide
  Sense strand starting at position 2895 of SEQ ID NO: 317615
acucuuuguuaggccugaa

SEQ ID NO: 498526 - RNA, 19 nt, Artificial Sequence
  Description of Artificial Sequence: Synthetic oligonucleotide
  Antisense Strand to SEQ ID NO: 498525
uucaggccuaacaaagagu

SEQ ID NO: 498527 - RNA, 19 nt, Artificial Sequence
  Description of Artificial Sequence: Synthetic oligonucleotide
  Sense strand starting at position 2994 of SEQ ID NO: 317615
guuauuuccuaagaaagca

SEQ ID NO: 498528 - RNA, 19 nt, Artificial Sequence
  Description of Artificial Sequence: Synthetic oligonucleotide
  Antisense Strand to SEQ ID NO: 498527
ugcuuucuuaggaaauaac

SEQ ID NO: 498529 - RNA, 19 nt, Artificial Sequence
  Description of Artificial Sequence: Synthetic oligonucleotide
  Sense strand starting at position 3065 of SEQ ID NO: 317615
cugugaaguguacaaguuu

SEQ ID NO: 498530 - RNA, 19 nt, Artificial Sequence
  Description of Artificial Sequence: Synthetic oligonucleotide
  Antisense Strand to SEQ ID NO: 498529
aaacuuguacacuucacag

SEQ ID NO: 498531 - RNA, 19 nt, Artificial Sequence
  Description of Artificial Sequence: Synthetic oligonucleotide
  Sense strand starting at position 3076 of SEQ ID NO: 317615
acaaguuucuagucucauc

SEQ ID NO: 498532 - RNA, 19 nt, Artificial Sequence
  Description of Artificial Sequence: Synthetic oligonucleotide
  Antisense Strand to SEQ ID NO: 498531
gaugagacuagaaacuugu

SEQ ID NO: 498533 - RNA, 19 nt, Artificial Sequence
  Description of Artificial Sequence: Synthetic oligonucleotide
  Sense strand starting at position 3236 of SEQ ID NO: 317615
acgguuaacugcccuugaa

SEQ ID NO: 498534 - RNA, 19 nt, Artificial Sequence
  Description of Artificial Sequence: Synthetic oligonucleotide
  Antisense Strand to SEQ ID NO: 498533
uucaagggcaguuaaccgu

SEQ ID NO: 498535 - RNA, 19 nt, Artificial Sequence
  Description of Artificial Sequence: Synthetic oligonucleotide
  Sense strand starting at position 3372 of SEQ ID NO: 317615
gcuacuucuaaggacguua

SEQ ID NO: 498536 - RNA, 19 nt, Artificial Sequence
  Description of Artificial Sequence: Synthetic oligonucleotide
  Antisense Strand to SEQ ID NO: 498535
uaacguccuuagaaguagc

SEQ ID NO: 498537 - RNA, 19 nt, Artificial Sequence
  Description of Artificial Sequence: Synthetic oligonucleotide
  Sense strand starting at position 3386 of SEQ ID NO: 317615
cguuaaggguuacuucaga

SEQ ID NO: 498538 - RNA, 19 nt, Artificial Sequence
  Description of Artificial Sequence: Synthetic oligonucleotide
  Antisense Strand to SEQ ID NO: 498537
ucugaaguaacccuuaacg

SEQ ID NO: 498539 - RNA, 19 nt, Artificial Sequence
  Description of Artificial Sequence: Synthetic oligonucleotide
  Sense strand starting at position 3463 of SEQ ID NO: 317615
gggaaugugaaguguccaa

SEQ ID NO: 498540 - RNA, 19 nt, Artificial Sequence
  Description of Artificial Sequence: Synthetic oligonucleotide
  Antisense Strand to SEQ ID NO: 498539
uuggacacuucacauuccc

SEQ ID NO: 498541 - RNA, 19 nt, Artificial Sequence
  Description of Artificial Sequence: Synthetic oligonucleotide
  Sense strand starting at position 3467 of SEQ ID NO: 317615
augugaaguguccaagcuu

SEQ ID NO: 498542 - RNA, 19 nt, Artificial Sequence
  Description of Artificial Sequence: Synthetic oligonucleotide
  Antisense Strand to SEQ ID NO: 498541
aagcuuggacacuucacau

SEQ ID NO: 498543 - RNA, 19 nt, Artificial Sequence
  Description of Artificial Sequence: Synthetic oligonucleotide
  Sense strand starting at position 3615 of SEQ ID NO: 317615
gguuccugcuucucugaaa

SEQ ID NO: 498544 - RNA, 19 nt, Artificial Sequence
  Description of Artificial Sequence: Synthetic oligonucleotide
  Antisense Strand to SEQ ID NO: 498543
uuucagagaagcaggaacc

SEQ ID NO: 498545 - RNA, 19 nt, Artificial Sequence
  Description of Artificial Sequence: Synthetic oligonucleotide
  Sense strand starting at position 3757 of SEQ ID NO: 317615
guguucuccagguagcuga

SEQ ID NO: 498546 - RNA, 19 nt, Artificial Sequence
  Description of Artificial Sequence: Synthetic oligonucleotide
  Antisense Strand to SEQ ID NO: 498545
ucagcuaccuggagaacac

SEQ ID NO: 498547 - RNA, 19 nt, Artificial Sequence
  Description of Artificial Sequence: Synthetic oligonucleotide
  Sense strand starting at position 3770 of SEQ ID NO: 317615
agcugagugauccauccga

SEQ ID NO: 498548 - RNA, 19 nt, Artificial Sequence
  Description of Artificial Sequence: Synthetic oligonucleotide
  Antisense Strand to SEQ ID NO: 498547
ucggauggaucacucagcu

SEQ ID NO: 498549 - RNA, 19 nt, Artificial Sequence
  Description of Artificial Sequence: Synthetic oligonucleotide
  Sense strand starting at position 3774 of SEQ ID NO: 317615
gagugauccauccgaagua

SEQ ID NO: 498550 - RNA, 19 nt, Artificial Sequence
  Description of Artificial Sequence: Synthetic oligonucleotide
  Antisense Strand to SEQ ID NO: 498549
uacuucggauggaucacuc

SEQ ID NO: 498551 - RNA, 19 nt, Artificial Sequence
  Description of Artificial Sequence: Synthetic oligonucleotide
  Sense strand starting at position 3979 of SEQ ID NO: 317615
cugagaucuacuuggcuga

SEQ ID NO: 498552 - RNA, 19 nt, Artificial Sequence
  Description of Artificial Sequence: Synthetic oligonucleotide
  Antisense Strand to SEQ ID NO: 498551
ucagccaaguagaucucag

SEQ ID NO: 498553 - RNA, 19 nt, Artificial Sequence
  Description of Artificial Sequence: Synthetic oligonucleotide
  Sense strand starting at position 3981 of SEQ ID NO: 317615
gagaucuacuuggcugacu

SEQ ID NO: 498554 - RNA, 19 nt, Artificial Sequence
  Description of Artificial Sequence: Synthetic oligonucleotide
  Antisense Strand to SEQ ID NO: 498553
agucagccaaguagaucuc

SEQ ID NO: 498555 - RNA, 19 nt, Artificial Sequence
  Description of Artificial Sequence: Synthetic oligonucleotide
  Sense strand starting at position 67 of SEQ ID NO: 317616
caagauagagucuguagaa

SEQ ID NO: 498556 - RNA, 19 nt, Artificial Sequence
  Description of Artificial Sequence: Synthetic oligonucleotide
  Antisense Strand to SEQ ID NO: 498555
uucuacagacucuaucuug

SEQ ID NO: 498557 - RNA, 19 nt, Artificial Sequence
  Description of Artificial Sequence: Synthetic oligonucleotide
  Sense strand starting at position 392 of SEQ ID NO: 317616
cauaauuacguuugcagaa

SEQ ID NO: 498558 - RNA, 19 nt, Artificial Sequence
  Description of Artificial Sequence: Synthetic oligonucleotide
  Antisense Strand to SEQ ID NO: 498557
uucugcaaacguaauuaug

SEQ ID NO: 498559 - RNA, 19 nt, Artificial Sequence
  Description of Artificial Sequence: Synthetic oligonucleotide
  Sense strand starting at position 404 of SEQ ID NO: 317616
ugcagaacucaagagcuuu

SEQ ID NO: 498560 - RNA, 19 nt, Artificial Sequence
  Description of Artificial Sequence: Synthetic oligonucleotide
  Antisense Strand to SEQ ID NO: 498559
aaagcucuugaguucugca

SEQ ID NO: 498561 - RNA, 19 nt, Artificial Sequence
  Description of Artificial Sequence: Synthetic oligonucleotide
  Sense strand starting at position 430 of SEQ ID NO: 317616
guauaugcccuuugaaaua

SEQ ID NO: 498562 - RNA, 19 nt, Artificial Sequence
  Description of Artificial Sequence: Synthetic oligonucleotide
  Antisense Strand to SEQ ID NO: 498561
uauuucaaagggcauauac

SEQ ID NO: 498563 - RNA, 19 nt, Artificial Sequence
  Description of Artificial Sequence: Synthetic oligonucleotide
  Sense strand starting at position 517 of SEQ ID NO: 317616
aguaaaggauguuucccaa

SEQ ID NO: 498564 - RNA, 19 nt, Artificial Sequence
  Description of Artificial Sequence: Synthetic oligonucleotide
  Antisense Strand to SEQ ID NO: 498563
uugggaaacauccuuuacu

SEQ ID NO: 498565 - RNA, 19 nt, Artificial Sequence
  Description of Artificial Sequence: Synthetic oligonucleotide
  Sense strand starting at position 717 of SEQ ID NO: 317616
gagugcuuucuccacagag

SEQ ID NO: 498566 - RNA, 19 nt, Artificial Sequence
  Description of Artificial Sequence: Synthetic oligonucleotide
  Antisense Strand to SEQ ID NO: 498565
cucuguggagaaagcacuc

SEQ ID NO: 498567 - RNA, 19 nt, Artificial Sequence
  Description of Artificial Sequence: Synthetic oligonucleotide
  Sense strand starting at position 887 of SEQ ID NO: 317616
gcagaaauguuauuagagu

SEQ ID NO: 498568 - RNA, 19 nt, Artificial Sequence
  Description of Artificial Sequence: Synthetic oligonucleotide
  Antisense Strand to SEQ ID NO: 498567
acucuaauaacauuucugc

SEQ ID NO: 498569 - RNA, 19 nt, Artificial Sequence
  Description of Artificial Sequence: Synthetic oligonucleotide
  Sense strand starting at position 893 of SEQ ID NO: 317616
auguuauuagagugcuaag

SEQ ID NO: 498570 - RNA, 19 nt, Artificial Sequence
  Description of Artificial Sequence: Synthetic oligonucleotide
  Antisense Strand to SEQ ID NO: 498569
cuuagcacucuaauaacau

SEQ ID NO: 498571 - RNA, 19 nt, Artificial Sequence
  Description of Artificial Sequence: Synthetic oligonucleotide
  Sense strand starting at position 938 of SEQ ID NO: 317616
gggcuuuggccguuucgua

SEQ ID NO: 498572 - RNA, 19 nt, Artificial Sequence
  Description of Artificial Sequence: Synthetic oligonucleotide
  Antisense Strand to SEQ ID NO: 498571
uacgaaacggccaaagccc

SEQ ID NO: 498573 - RNA, 19 nt, Artificial Sequence
  Description of Artificial Sequence: Synthetic oligonucleotide
  Sense strand starting at position 939 of SEQ ID NO: 317616
ggcuuuggccguuucguau

SEQ ID NO: 498574 - RNA, 19 nt, Artificial Sequence
  Description of Artificial Sequence: Synthetic oligonucleotide
  Antisense Strand to SEQ ID NO: 498573
auacgaaacggccaaagcc

SEQ ID NO: 498575 - RNA, 19 nt, Artificial Sequence
  Description of Artificial Sequence: Synthetic oligonucleotide
  Sense strand starting at position 999 of SEQ ID NO: 317616
aaggguauuuaugaaagau

SEQ ID NO: 498576 - RNA, 19 nt, Artificial Sequence
  Description of Artificial Sequence: Synthetic oligonucleotide
  Antisense Strand to SEQ ID NO: 498575
aucuuucauaaauacccuu

SEQ ID NO: 498577 - RNA, 19 nt, Artificial Sequence
  Description of Artificial Sequence: Synthetic oligonucleotide
  Sense strand starting at position 1479 of SEQ ID NO: 317616
ccucgaaauguccacaguu

SEQ ID NO: 498578 - RNA, 19 nt, Artificial Sequence
  Description of Artificial Sequence: Synthetic oligonucleotide
  Antisense Strand to SEQ ID NO: 498577
aacuguggacauuucgagg

SEQ ID NO: 498579 - RNA, 19 nt, Artificial Sequence
  Description of Artificial Sequence: Synthetic oligonucleotide
  Sense strand starting at position 1481 of SEQ ID NO: 317616
ucgaaauguccacaguuua

SEQ ID NO: 498580 - RNA, 19 nt, Artificial Sequence
  Description of Artificial Sequence: Synthetic oligonucleotide
  Antisense Strand to SEQ ID NO: 498579
uaaacuguggacauuucga

SEQ ID NO: 498581 - RNA, 19 nt, Artificial Sequence
  Description of Artificial Sequence: Synthetic oligonucleotide
  Sense strand starting at position 1502 of SEQ ID NO: 317616
cugcaaugguaguuuagau

SEQ ID NO: 498582 - RNA, 19 nt, Artificial Sequence
  Description of Artificial Sequence: Synthetic oligonucleotide
  Antisense Strand to SEQ ID NO: 498581
aucuaaacuaccauugcag

SEQ ID NO: 498583 - RNA, 19 nt, Artificial Sequence
  Description of Artificial Sequence: Synthetic oligonucleotide
  Sense strand starting at position 1578 of SEQ ID NO: 317616
ucaguugauuaucucauca

SEQ ID NO: 498584 - RNA, 19 nt, Artificial Sequence
  Description of Artificial Sequence: Synthetic oligonucleotide
  Antisense Strand to SEQ ID NO: 498583
ugaugagauaaucaacuga

SEQ ID NO: 498585 - RNA, 19 nt, Artificial Sequence
  Description of Artificial Sequence: Synthetic oligonucleotide
  Sense strand starting at position 1582 of SEQ ID NO: 317616
uugauuaucucaucaggca

SEQ ID NO: 498586 - RNA, 19 nt, Artificial Sequence
  Description of Artificial Sequence: Synthetic oligonucleotide
  Antisense Strand to SEQ ID NO: 498585
ugccugaugagauaaucaa

SEQ ID NO: 498587 - RNA, 19 nt, Artificial Sequence
  Description of Artificial Sequence: Synthetic oligonucleotide
  Sense strand starting at position 1745 of SEQ ID NO: 317616
cggcuucuuaccuggagga

SEQ ID NO: 498588 - RNA, 19 nt, Artificial Sequence
  Description of Artificial Sequence: Synthetic oligonucleotide
  Antisense Strand to SEQ ID NO: 498587
uccuccagguaagaagccg

SEQ ID NO: 498589 - RNA, 19 nt, Artificial Sequence
  Description of Artificial Sequence: Synthetic oligonucleotide
  Sense strand starting at position 2090 of SEQ ID NO: 317616
agaagugguuaccuggcaa

SEQ ID NO: 498590 - RNA, 19 nt, Artificial Sequence
  Description of Artificial Sequence: Synthetic oligonucleotide
  Antisense Strand to SEQ ID NO: 498589
uugccagguaaccacuucu

SEQ ID NO: 498591 - RNA, 19 nt, Artificial Sequence
  Description of Artificial Sequence: Synthetic oligonucleotide
  Sense strand starting at position 2109 of SEQ ID NO: 317616
cagagaaaguguguugaag

SEQ ID NO: 498592 - RNA, 19 nt, Artificial Sequence
  Description of Artificial Sequence: Synthetic oligonucleotide
  Antisense Strand to SEQ ID NO: 498591
cuucaacacacuuucucug

SEQ ID NO: 498593 - RNA, 19 nt, Artificial Sequence
  Description of Artificial Sequence: Synthetic oligonucleotide
  Sense strand starting at position 2336 of SEQ ID NO: 317616
ccuggaaugugagugcaga

SEQ ID NO: 498594 - RNA, 19 nt, Artificial Sequence
  Description of Artificial Sequence: Synthetic oligonucleotide
  Antisense Strand to SEQ ID NO: 498593
ucugcacucacauuccagg

SEQ ID NO: 498595 - RNA, 19 nt, Artificial Sequence
  Description of Artificial Sequence: Synthetic oligonucleotide
  Sense strand starting at position 2337 of SEQ ID NO: 317616
cuggaaugugagugcagaa

SEQ ID NO: 498596 - RNA, 19 nt, Artificial Sequence
  Description of Artificial Sequence: Synthetic oligonucleotide
  Antisense Strand to SEQ ID NO: 498595
uucugcacucacauuccag

SEQ ID NO: 498597 - RNA, 19 nt, Artificial Sequence
  Description of Artificial Sequence: Synthetic oligonucleotide
  Sense strand starting at position 2395 of SEQ ID NO: 317616
caagaaggucugugggaga

SEQ ID NO: 498598 - RNA, 19 nt, Artificial Sequence
  Description of Artificial Sequence: Synthetic oligonucleotide
  Antisense Strand to SEQ ID NO: 498597
ucucccacagaccuucuug

SEQ ID NO: 498599 - RNA, 19 nt, Artificial Sequence
  Description of Artificial Sequence: Synthetic oligonucleotide
  Sense strand starting at position 2435 of SEQ ID NO: 317616
guuuauauuaaucgaguug

SEQ ID NO: 498600 - RNA, 19 nt, Artificial Sequence
  Description of Artificial Sequence: Synthetic oligonucleotide
  Antisense Strand to SEQ ID NO: 498599
caacucgauuaauauaaac

SEQ ID NO: 498601 - RNA, 19 nt, Artificial Sequence
  Description of Artificial Sequence: Synthetic oligonucleotide
  Sense strand starting at position 2512 of SEQ ID NO: 317616
aauggaagugcuggauguu

SEQ ID NO: 498602 - RNA, 19 nt, Artificial Sequence
  Description of Artificial Sequence: Synthetic oligonucleotide
  Antisense Strand to SEQ ID NO: 498601
aacauccagcacuuccauu

SEQ ID NO: 498603 - RNA, 19 nt, Artificial Sequence
  Description of Artificial Sequence: Synthetic oligonucleotide
  Sense strand starting at position 2574 of SEQ ID NO: 317616
accuguggccuuuauccaa

SEQ ID NO: 498604 - RNA, 19 nt, Artificial Sequence
  Description of Artificial Sequence: Synthetic oligonucleotide
  Antisense Strand to SEQ ID NO: 498603
uuggauaaaggccacaggu

SEQ ID NO: 498605 - RNA, 19 nt, Artificial Sequence
  Description of Artificial Sequence: Synthetic oligonucleotide
  Sense strand starting at position 2602 of SEQ ID NO: 317616
gagaauaagccucgacgua

SEQ ID NO: 498606 - RNA, 19 nt, Artificial Sequence
  Description of Artificial Sequence: Synthetic oligonucleotide
  Antisense Strand to SEQ ID NO: 498605
uacgucgaggcuuauucuc

SEQ ID NO: 498607 - RNA, 19 nt, Artificial Sequence
  Description of Artificial Sequence: Synthetic oligonucleotide
  Sense strand starting at position 2710 of SEQ ID NO: 317616
gagaaagucccugggccua

SEQ ID NO: 498608 - RNA, 19 nt, Artificial Sequence
  Description of Artificial Sequence: Synthetic oligonucleotide
  Antisense Strand to SEQ ID NO: 498607
uaggcccagggacuuucuc

SEQ ID NO: 498609 - RNA, 19 nt, Artificial Sequence
  Description of Artificial Sequence: Synthetic oligonucleotide
  Sense strand starting at position 2712 of SEQ ID NO: 317616
gaaagucccugggccuaau

SEQ ID NO: 498610 - RNA, 19 nt, Artificial Sequence
  Description of Artificial Sequence: Synthetic oligonucleotide
  Antisense Strand to SEQ ID NO: 498609
auuaggcccagggacuuuc

SEQ ID NO: 498611 - RNA, 19 nt, Artificial Sequence
  Description of Artificial Sequence: Synthetic oligonucleotide
  Sense strand starting at position 2865 of SEQ ID NO: 317616
agaauaaacuuguuaaagc

SEQ ID NO: 498612 - RNA, 19 nt, Artificial Sequence
  Description of Artificial Sequence: Synthetic oligonucleotide
  Antisense Strand to SEQ ID NO: 498611
gcuuuaacaaguuuauucu

SEQ ID NO: 498613 - RNA, 19 nt, Artificial Sequence
  Description of Artificial Sequence: Synthetic oligonucleotide
  Sense strand starting at position 3036 of SEQ ID NO: 317616
auaacucaauguguuaagu

SEQ ID NO: 498614 - RNA, 19 nt, Artificial Sequence
  Description of Artificial Sequence: Synthetic oligonucleotide
  Antisense Strand to SEQ ID NO: 498613
acuuaacacauugaguuau

SEQ ID NO: 498615 - RNA, 19 nt, Artificial Sequence
  Description of Artificial Sequence: Synthetic oligonucleotide
  Sense strand starting at position 3377 of SEQ ID NO: 317616
aaacuugauugggaaagau

SEQ ID NO: 498616 - RNA, 19 nt, Artificial Sequence
  Description of Artificial Sequence: Synthetic oligonucleotide
  Antisense Strand to SEQ ID NO: 498615
aucuuucccaaucaaguuu

SEQ ID NO: 498617 - RNA, 19 nt, Artificial Sequence
  Description of Artificial Sequence: Synthetic oligonucleotide
  Sense strand starting at position 3525 of SEQ ID NO: 317616
ugaagaacauggucuguua

SEQ ID NO: 498618 - RNA, 19 nt, Artificial Sequence
  Description of Artificial Sequence: Synthetic oligonucleotide
  Antisense Strand to SEQ ID NO: 498617
uaacagaccauguucuuca

SEQ ID NO: 498619 - RNA, 19 nt, Artificial Sequence
  Description of Artificial Sequence: Synthetic oligonucleotide
  Sense strand starting at position 3528 of SEQ ID NO: 317616
agaacauggucuguuagga

SEQ ID NO: 498620 - RNA, 19 nt, Artificial Sequence
  Description of Artificial Sequence: Synthetic oligonucleotide
  Antisense Strand to SEQ ID NO: 498619
uccuaacagaccauguucu

SEQ ID NO: 498621 - RNA, 19 nt, Artificial Sequence
  Description of Artificial Sequence: Synthetic oligonucleotide
  Sense strand starting at position 3575 of SEQ ID NO: 317616
ugcugaugaccugaguuaa

SEQ ID NO: 498622 - RNA, 19 nt, Artificial Sequence
  Description of Artificial Sequence: Synthetic oligonucleotide
  Antisense Strand to SEQ ID NO: 498621
uuaacucaggucaucagca

SEQ ID NO: 498623 - RNA, 19 nt, Artificial Sequence
  Description of Artificial Sequence: Synthetic oligonucleotide
  Sense strand starting at position 3686 of SEQ ID NO: 317616
agguauagugcugaauagu

SEQ ID NO: 498624 - RNA, 19 nt, Artificial Sequence
  Description of Artificial Sequence: Synthetic oligonucleotide
  Antisense Strand to SEQ ID NO: 498623
acuauucagcacuauaccu

SEQ ID NO: 498625 - RNA, 19 nt, Artificial Sequence
  Description of Artificial Sequence: Synthetic oligonucleotide
  Sense strand starting at position 3689 of SEQ ID NO: 317616
uauagugcugaauagucaa

SEQ ID NO: 498626 - RNA, 19 nt, Artificial Sequence
  Description of Artificial Sequence: Synthetic oligonucleotide
  Antisense Strand to SEQ ID NO: 498625
uugacuauucagcacuaua

SEQ ID NO: 498627 - RNA, 19 nt, Artificial Sequence
  Description of Artificial Sequence: Synthetic oligonucleotide
  Sense strand starting at position 3696 of SEQ ID NO: 317616
cugaauagucaauggugua

SEQ ID NO: 498628 - RNA, 19 nt, Artificial Sequence
  Description of Artificial Sequence: Synthetic oligonucleotide
  Antisense Strand to SEQ ID NO: 498627
uacaccauugacuauucag

SEQ ID NO: 498629 - RNA, 19 nt, Artificial Sequence
  Description of Artificial Sequence: Synthetic oligonucleotide
  Sense strand starting at position 3697 of SEQ ID NO: 317616
ugaauagucaaugguguac

SEQ ID NO: 498630 - RNA, 19 nt, Artificial Sequence
  Description of Artificial Sequence: Synthetic oligonucleotide
  Antisense Strand to SEQ ID NO: 498629
guacaccauugacuauuca

SEQ ID NO: 498631 - RNA, 19 nt, Artificial Sequence
  Description of Artificial Sequence: Synthetic oligonucleotide
  Sense strand starting at position 3701 of SEQ ID NO: 317616
uagucaaugguguacauga

SEQ ID NO: 498632 - RNA, 19 nt, Artificial Sequence
  Description of Artificial Sequence: Synthetic oligonucleotide
  Antisense Strand to SEQ ID NO: 498631
ucauguacaccauugacua

SEQ ID NO: 498633 - RNA, 19 nt, Artificial Sequence
  Description of Artificial Sequence: Synthetic oligonucleotide
  Sense strand starting at position 3734 of SEQ ID NO: 317616
agauacaacgucuagcuua

SEQ ID NO: 498634 - RNA, 19 nt, Artificial Sequence
  Description of Artificial Sequence: Synthetic oligonucleotide
  Antisense Strand to SEQ ID NO: 498633
uaagcuagacguuguaucu

SEQ ID NO: 498635 - RNA, 19 nt, Artificial Sequence
  Description of Artificial Sequence: Synthetic oligonucleotide
  Sense strand starting at position 330 of SEQ ID NO: 317617
agaggugggcuaugaucau

SEQ ID NO: 498636 - RNA, 19 nt, Artificial Sequence
  Description of Artificial Sequence: Synthetic oligonucleotide
  Antisense Strand to SEQ ID NO: 498635
augaucauagcccaccucu

SEQ ID NO: 498637 - RNA, 19 nt, Artificial Sequence
  Description of Artificial Sequence: Synthetic oligonucleotide
  Sense strand starting at position 337 of SEQ ID NO: 317617
ggcuaugaucaugggacau

SEQ ID NO: 498638 - RNA, 19 nt, Artificial Sequence
  Description of Artificial Sequence: Synthetic oligonucleotide
  Antisense Strand to SEQ ID NO: 498637
augucccaugaucauagcc

SEQ ID NO: 498639 - RNA, 19 nt, Artificial Sequence
  Description of Artificial Sequence: Synthetic oligonucleotide
  Sense strand starting at position 459 of SEQ ID NO: 317617
gugagaaguccuuaaacuu

SEQ ID NO: 498640 - RNA, 19 nt, Artificial Sequence
  Description of Artificial Sequence: Synthetic oligonucleotide
  Antisense Strand to SEQ ID NO: 498639
aaguuuaaggacuucucac

SEQ ID NO: 498641 - RNA, 19 nt, Artificial Sequence
  Description of Artificial Sequence: Synthetic oligonucleotide
  Sense strand starting at position 636 of SEQ ID NO: 317617
gcuguagggcuuuaaguaa

SEQ ID NO: 498642 - RNA, 19 nt, Artificial Sequence
  Description of Artificial Sequence: Synthetic oligonucleotide
  Antisense Strand to SEQ ID NO: 498641
uuacuuaaagcccuacagc

SEQ ID NO: 498643 - RNA, 19 nt, Artificial Sequence
  Description of Artificial Sequence: Synthetic oligonucleotide
  Sense strand starting at position 649 of SEQ ID NO: 317617
aaguaagucguuuaaauug

SEQ ID NO: 498644 - RNA, 19 nt, Artificial Sequence
  Description of Artificial Sequence: Synthetic oligonucleotide
  Antisense Strand to SEQ ID NO: 498643
caauuuaaacgacuuacuu

SEQ ID NO: 498645 - RNA, 19 nt, Artificial Sequence
  Description of Artificial Sequence: Synthetic oligonucleotide
  Sense strand starting at position 760 of SEQ ID NO: 317617
gggaguuaugauuacuggu

SEQ ID NO: 498646 - RNA, 19 nt, Artificial Sequence
  Description of Artificial Sequence: Synthetic oligonucleotide
  Antisense Strand to SEQ ID NO: 498645
accaguaaucauaacuccc

SEQ ID NO: 498647 - RNA, 19 nt, Artificial Sequence
  Description of Artificial Sequence: Synthetic oligonucleotide
  Sense strand starting at position 1291 of SEQ ID NO: 317617
ggugcagauuucccgucaa

SEQ ID NO: 498648 - RNA, 19 nt, Artificial Sequence
  Description of Artificial Sequence: Synthetic oligonucleotide
  Antisense Strand to SEQ ID NO: 498647
uugacgggaaaucugcacc

SEQ ID NO: 498649 - RNA, 19 nt, Artificial Sequence
  Description of Artificial Sequence: Synthetic oligonucleotide
  Sense strand starting at position 1329 of SEQ ID NO: 317617
ggugauuggacuggucaca

SEQ ID NO: 498650 - RNA, 19 nt, Artificial Sequence
  Description of Artificial Sequence: Synthetic oligonucleotide
  Antisense Strand to SEQ ID NO: 498649
ugugaccaguccaaucacc

SEQ ID NO: 498651 - RNA, 19 nt, Artificial Sequence
  Description of Artificial Sequence: Synthetic oligonucleotide
  Sense strand starting at position 1360 of SEQ ID NO: 317617
ugaaguuauucuuuaggag

SEQ ID NO: 498652 - RNA, 19 nt, Artificial Sequence
  Description of Artificial Sequence: Synthetic oligonucleotide
  Antisense Strand to SEQ ID NO: 498651
cuccuaaagaauaacuuca

SEQ ID NO: 498653 - RNA, 19 nt, Artificial Sequence
  Description of Artificial Sequence: Synthetic oligonucleotide
  Sense strand starting at position 1495 of SEQ ID NO: 317617
gcguuaacucgaccaguuc

SEQ ID NO: 498654 - RNA, 19 nt, Artificial Sequence
  Description of Artificial Sequence: Synthetic oligonucleotide
  Antisense Strand to SEQ ID NO: 498653
gaacuggucgaguuaacgc

SEQ ID NO: 498655 - RNA, 19 nt, Artificial Sequence
  Description of Artificial Sequence: Synthetic oligonucleotide
  Sense strand starting at position 1509 of SEQ ID NO: 317617
aguucuuuccgcgugcgaa

SEQ ID NO: 498656 - RNA, 19 nt, Artificial Sequence
  Description of Artificial Sequence: Synthetic oligonucleotide
  Antisense Strand to SEQ ID NO: 498655
uucgcacgcggaaagaacu

SEQ ID NO: 498657 - RNA, 19 nt, Artificial Sequence
  Description of Artificial Sequence: Synthetic oligonucleotide
  Sense strand starting at position 2041 of SEQ ID NO: 317617
gguggaaucacaugacauc

SEQ ID NO: 498658 - RNA, 19 nt, Artificial Sequence
  Description of Artificial Sequence: Synthetic oligonucleotide
  Antisense Strand to SEQ ID NO: 498657
gaugucaugugauuccacc

SEQ ID NO: 498659 - RNA, 19 nt, Artificial Sequence
  Description of Artificial Sequence: Synthetic oligonucleotide
  Sense strand starting at position 2044 of SEQ ID NO: 317617
ggaaucacaugacaucaga

SEQ ID NO: 498660 - RNA, 19 nt, Artificial Sequence
  Description of Artificial Sequence: Synthetic oligonucleotide
  Antisense Strand to SEQ ID NO: 498659
ucugaugucaugugauucc

SEQ ID NO: 498661 - RNA, 19 nt, Artificial Sequence
  Description of Artificial Sequence: Synthetic oligonucleotide
  Sense strand starting at position 2064 of SEQ ID NO: 317617
acgcuaacccugggaaguu

SEQ ID NO: 498662 - RNA, 19 nt, Artificial Sequence
  Description of Artificial Sequence: Synthetic oligonucleotide
  Antisense Strand to SEQ ID NO: 498661
aacuucccaggguuagcgu

SEQ ID NO: 498663 - RNA, 19 nt, Artificial Sequence
  Description of Artificial Sequence: Synthetic oligonucleotide
  Sense strand starting at position 2119 of SEQ ID NO: 317617
gcuggcucugauuggauga

SEQ ID NO: 498664 - RNA, 19 nt, Artificial Sequence
  Description of Artificial Sequence: Synthetic oligonucleotide
  Antisense Strand to SEQ ID NO: 498663
ucauccaaucagagccagc

SEQ ID NO: 498665 - RNA, 19 nt, Artificial Sequence
  Description of Artificial Sequence: Synthetic oligonucleotide
  Sense strand starting at position 2132 of SEQ ID NO: 317617
ggaugagauucguccggga

SEQ ID NO: 498666 - RNA, 19 nt, Artificial Sequence
  Description of Artificial Sequence: Synthetic oligonucleotide
  Antisense Strand to SEQ ID NO: 498665
ucccggacgaaucucaucc

SEQ ID NO: 498667 - RNA, 19 nt, Artificial Sequence
  Description of Artificial Sequence: Synthetic oligonucleotide
  Sense strand starting at position 2134 of SEQ ID NO: 317617
augagauucguccgggaga

SEQ ID NO: 498668 - RNA, 19 nt, Artificial Sequence
  Description of Artificial Sequence: Synthetic oligonucleotide
  Antisense Strand to SEQ ID NO: 498667
ucucccggacgaaucucau

SEQ ID NO: 498669 - RNA, 19 nt, Artificial Sequence
  Description of Artificial Sequence: Synthetic oligonucleotide
  Sense strand starting at position 2136 of SEQ ID NO: 317617
gagauucguccgggagaga

SEQ ID NO: 498670 - RNA, 19 nt, Artificial Sequence
  Description of Artificial Sequence: Synthetic oligonucleotide
  Antisense Strand to SEQ ID NO: 498669
ucucucccggacgaaucuc

SEQ ID NO: 498671 - RNA, 19 nt, Artificial Sequence
  Description of Artificial Sequence: Synthetic oligonucleotide
  Sense strand starting at position 2137 of SEQ ID NO: 317617
agauucguccgggagagac

SEQ ID NO: 498672 - RNA, 19 nt, Artificial Sequence
  Description of Artificial Sequence: Synthetic oligonucleotide
  Antisense Strand to SEQ ID NO: 498671
gucucucccggacgaaucu

SEQ ID NO: 498673 - RNA, 19 nt, Artificial Sequence
  Description of Artificial Sequence: Synthetic oligonucleotide
  Sense strand starting at position 2191 of SEQ ID NO: 317617
uuuggaccgcgaugacuaa

SEQ ID NO: 498674 - RNA, 19 nt, Artificial Sequence
  Description of Artificial Sequence: Synthetic oligonucleotide
  Antisense Strand to SEQ ID NO: 498673
uuagucaucgcgguccaaa

SEQ ID NO: 498675 - RNA, 19 nt, Artificial Sequence
  Description of Artificial Sequence: Synthetic oligonucleotide
  Sense strand starting at position 2288 of SEQ ID NO: 317617
ugggcuaaauacuccuaua

SEQ ID NO: 498676 - RNA, 19 nt, Artificial Sequence
  Description of Artificial Sequence: Synthetic oligonucleotide
  Antisense Strand to SEQ ID NO: 498675
uauaggaguauuuagccca

SEQ ID NO: 498677 - RNA, 19 nt, Artificial Sequence
  Description of Artificial Sequence: Synthetic oligonucleotide
  Sense strand starting at position 2384 of SEQ ID NO: 317617
gcauaagagguacaauagu

SEQ ID NO: 498678 - RNA, 19 nt, Artificial Sequence
  Description of Artificial Sequence: Synthetic oligonucleotide
  Antisense Strand to SEQ ID NO: 498677
acuauuguaccucuuaugc

SEQ ID NO: 498679 - RNA, 19 nt, Artificial Sequence
  Description of Artificial Sequence: Synthetic oligonucleotide
  Sense strand starting at position 2576 of SEQ ID NO: 317617
uacaguauuugugcugcau

SEQ ID NO: 498680 - RNA, 19 nt, Artificial Sequence
  Description of Artificial Sequence: Synthetic oligonucleotide
  Antisense Strand to SEQ ID NO: 498679
augcagcacaaauacugua

SEQ ID NO: 498681 - RNA, 19 nt, Artificial Sequence
  Description of Artificial Sequence: Synthetic oligonucleotide
  Sense strand starting at position 2580 of SEQ ID NO: 317617
guauuugugcugcauuauu

SEQ ID NO: 498682 - RNA, 19 nt, Artificial Sequence
  Description of Artificial Sequence: Synthetic oligonucleotide
  Antisense Strand to SEQ ID NO: 498681
aauaaugcagcacaaauac

SEQ ID NO: 498683 - RNA, 19 nt, Artificial Sequence
  Description of Artificial Sequence: Synthetic oligonucleotide
  Sense strand starting at position 2640 of SEQ ID NO: 317617
guugaaacagucuaccuuu

SEQ ID NO: 498684 - RNA, 19 nt, Artificial Sequence
  Description of Artificial Sequence: Synthetic oligonucleotide
  Antisense Strand to SEQ ID NO: 498683
aaagguagacuguuucaac

SEQ ID NO: 498685 - RNA, 19 nt, Artificial Sequence
  Description of Artificial Sequence: Synthetic oligonucleotide
  Sense strand starting at position 2680 of SEQ ID NO: 317617
guaggaaucugauuggcuu

SEQ ID NO: 498686 - RNA, 19 nt, Artificial Sequence
  Description of Artificial Sequence: Synthetic oligonucleotide
  Antisense Strand to SEQ ID NO: 498685
aagccaaucagauuccuac

SEQ ID NO: 498687 - RNA, 19 nt, Artificial Sequence
  Description of Artificial Sequence: Synthetic oligonucleotide
  Sense strand starting at position 2681 of SEQ ID NO: 317617
uaggaaucugauuggcuua

SEQ ID NO: 498688 - RNA, 19 nt, Artificial Sequence
  Description of Artificial Sequence: Synthetic oligonucleotide
  Antisense Strand to SEQ ID NO: 498687
uaagccaaucagauuccua

SEQ ID NO: 498689 - RNA, 19 nt, Artificial Sequence
  Description of Artificial Sequence: Synthetic oligonucleotide
  Sense strand starting at position 2683 of SEQ ID NO: 317617
ggaaucugauuggcuuaga

SEQ ID NO: 498690 - RNA, 19 nt, Artificial Sequence
  Description of Artificial Sequence: Synthetic oligonucleotide
  Antisense Strand to SEQ ID NO: 498689
ucuaagccaaucagauucc

SEQ ID NO: 498691 - RNA, 19 nt, Artificial Sequence
  Description of Artificial Sequence: Synthetic oligonucleotide
  Sense strand starting at position 2740 of SEQ ID NO: 317617
guuugcaaauucuuaagua

SEQ ID NO: 498692 - RNA, 19 nt, Artificial Sequence
  Description of Artificial Sequence: Synthetic oligonucleotide
  Antisense Strand to SEQ ID NO: 498691
uacuuaagaauuugcaaac

SEQ ID NO: 498693 - RNA, 19 nt, Artificial Sequence
  Description of Artificial Sequence: Synthetic oligonucleotide
  Sense strand starting at position 2760 of SEQ ID NO: 317617
ggugcuaugccuuugcacu

SEQ ID NO: 498694 - RNA, 19 nt, Artificial Sequence
  Description of Artificial Sequence: Synthetic oligonucleotide
  Antisense Strand to SEQ ID NO: 498693
agugcaaaggcauagcacc

SEQ ID NO: 498695 - RNA, 19 nt, Artificial Sequence
  Description of Artificial Sequence: Synthetic oligonucleotide
  Sense strand starting at position 2861 of SEQ ID NO: 317617
gggcgaguucucagugcug

SEQ ID NO: 498696 - RNA, 19 nt, Artificial Sequence
  Description of Artificial Sequence: Synthetic oligonucleotide
  Antisense Strand to SEQ ID NO: 498695
cagcacugagaacucgccc

SEQ ID NO: 498697 - RNA, 19 nt, Artificial Sequence
  Description of Artificial Sequence: Synthetic oligonucleotide
  Sense strand starting at position 3018 of SEQ ID NO: 317617
gcuacaaggguuugugauc

SEQ ID NO: 498698 - RNA, 19 nt, Artificial Sequence
  Description of Artificial Sequence: Synthetic oligonucleotide
  Antisense Strand to SEQ ID NO: 498697
gaucacaaacccuuguagc

SEQ ID NO: 498699 - RNA, 19 nt, Artificial Sequence
  Description of Artificial Sequence: Synthetic oligonucleotide
  Sense strand starting at position 3023 of SEQ ID NO: 317617
aaggguuugugaucaaaga

SEQ ID NO: 498700 - RNA, 19 nt, Artificial Sequence
  Description of Artificial Sequence: Synthetic oligonucleotide
  Antisense Strand to SEQ ID NO: 498699
ucuuugaucacaaacccuu

SEQ ID NO: 498701 - RNA, 19 nt, Artificial Sequence
  Description of Artificial Sequence: Synthetic oligonucleotide
  Sense strand starting at position 3280 of SEQ ID NO: 317617
gccucugacaguuagguua

SEQ ID NO: 498702 - RNA, 19 nt, Artificial Sequence
  Description of Artificial Sequence: Synthetic oligonucleotide
  Antisense Strand to SEQ ID NO: 498701
uaaccuaacugucagaggc

SEQ ID NO: 498703 - RNA, 19 nt, Artificial Sequence
  Description of Artificial Sequence: Synthetic oligonucleotide
  Sense strand starting at position 3283 of SEQ ID NO: 317617
ucugacaguuagguuaauu

SEQ ID NO: 498704 - RNA, 19 nt, Artificial Sequence
  Description of Artificial Sequence: Synthetic oligonucleotide
  Antisense Strand to SEQ ID NO: 498703
aauuaaccuaacugucaga

SEQ ID NO: 498705 - RNA, 19 nt, Artificial Sequence
  Description of Artificial Sequence: Synthetic oligonucleotide
  Sense strand starting at position 3315 of SEQ ID NO: 317617
cugaaagauuccucugcug

SEQ ID NO: 498706 - RNA, 19 nt, Artificial Sequence
  Description of Artificial Sequence: Synthetic oligonucleotide
  Antisense Strand to SEQ ID NO: 498705
cagcagaggaaucuuucag

SEQ ID NO: 498707 - RNA, 19 nt, Artificial Sequence
  Description of Artificial Sequence: Synthetic oligonucleotide
  Sense strand starting at position 3439 of SEQ ID NO: 317617
gccuaaacuaccugggaga

SEQ ID NO: 498708 - RNA, 19 nt, Artificial Sequence
  Description of Artificial Sequence: Synthetic oligonucleotide
  Antisense Strand to SEQ ID NO: 498707
ucucccagguaguuuaggc

SEQ ID NO: 498709 - RNA, 19 nt, Artificial Sequence
  Description of Artificial Sequence: Synthetic oligonucleotide
  Sense strand starting at position 3497 of SEQ ID NO: 317617
uccacuuaagugugggaga

SEQ ID NO: 498710 - RNA, 19 nt, Artificial Sequence
  Description of Artificial Sequence: Synthetic oligonucleotide
  Antisense Strand to SEQ ID NO: 498709
ucucccacacuuaagugga

SEQ ID NO: 498711 - RNA, 19 nt, Artificial Sequence
  Description of Artificial Sequence: Synthetic oligonucleotide
  Sense strand starting at position 3499 of SEQ ID NO: 317617
cacuuaagugugggagauu

SEQ ID NO: 498712 - RNA, 19 nt, Artificial Sequence
  Description of Artificial Sequence: Synthetic oligonucleotide
  Antisense Strand to SEQ ID NO: 498711
aaucucccacacuuaagug

SEQ ID NO: 498713 - RNA, 19 nt, Artificial Sequence
  Description of Artificial Sequence: Synthetic oligonucleotide
  Sense strand starting at position 3957 of SEQ ID NO: 317617
aggcaagacucugcucaaa

SEQ ID NO: 498714 - RNA, 19 nt, Artificial Sequence
  Description of Artificial Sequence: Synthetic oligonucleotide
  Antisense Strand to SEQ ID NO: 498713
uuugagcagagucuugccu

SEQ ID NO: 498715 - RNA, 19 nt, Artificial Sequence
  Description of Artificial Sequence: Synthetic oligonucleotide
  Sense strand starting at position 499 of SEQ ID NO: 317618
ucuuccauccugggaaaga

SEQ ID NO: 498716 - RNA, 19 nt, Artificial Sequence
  Description of Artificial Sequence: Synthetic oligonucleotide
  Antisense Strand to SEQ ID NO: 498715
ucuuucccaggauggaaga

SEQ ID NO: 498717 - RNA, 19 nt, Artificial Sequence
  Description of Artificial Sequence: Synthetic oligonucleotide
  Sense strand starting at position 500 of SEQ ID NO: 317618
cuuccauccugggaaagaa

SEQ ID NO: 498718 - RNA, 19 nt, Artificial Sequence
  Description of Artificial Sequence: Synthetic oligonucleotide
  Antisense Strand to SEQ ID NO: 498717
uucuuucccaggauggaag

SEQ ID NO: 498719 - RNA, 19 nt, Artificial Sequence
  Description of Artificial Sequence: Synthetic oligonucleotide
  Sense strand starting at position 590 of SEQ ID NO: 317618
gaggcugaaauguggagaa

SEQ ID NO: 498720 - RNA, 19 nt, Artificial Sequence
  Description of Artificial Sequence: Synthetic oligonucleotide
  Antisense Strand to SEQ ID NO: 498719
uucuccacauuucagccuc

SEQ ID NO: 498721 - RNA, 19 nt, Artificial Sequence
  Description of Artificial Sequence: Synthetic oligonucleotide
  Sense strand starting at position 615 of SEQ ID NO: 317618
cuccaaaucccugguugga

SEQ ID NO: 498722 - RNA, 19 nt, Artificial Sequence
  Description of Artificial Sequence: Synthetic oligonucleotide
  Antisense Strand to SEQ ID NO: 498721
uccaaccagggauuuggag

SEQ ID NO: 498723 - RNA, 19 nt, Artificial Sequence
  Description of Artificial Sequence: Synthetic oligonucleotide
  Sense strand starting at position 617 of SEQ ID NO: 317618
ccaaaucccugguuggaua

SEQ ID NO: 498724 - RNA, 19 nt, Artificial Sequence
  Description of Artificial Sequence: Synthetic oligonucleotide
  Antisense Strand to SEQ ID NO: 498723
uauccaaccagggauuugg

SEQ ID NO: 498725 - RNA, 19 nt, Artificial Sequence
  Description of Artificial Sequence: Synthetic oligonucleotide
  Sense strand starting at position 776 of SEQ ID NO: 317618
ggcacagcuccuugaguga

SEQ ID NO: 498726 - RNA, 19 nt, Artificial Sequence
  Description of Artificial Sequence: Synthetic oligonucleotide
  Antisense Strand to SEQ ID NO: 498725
ucacucaaggagcugugcc

SEQ ID NO: 498727 - RNA, 19 nt, Artificial Sequence
  Description of Artificial Sequence: Synthetic oligonucleotide
  Sense strand starting at position 781 of SEQ ID NO: 317618
agcuccuugagugauggau

SEQ ID NO: 498728 - RNA, 19 nt, Artificial Sequence
  Description of Artificial Sequence: Synthetic oligonucleotide
  Antisense Strand to SEQ ID NO: 498727
auccaucacucaaggagcu

SEQ ID NO: 498729 - RNA, 19 nt, Artificial Sequence
  Description of Artificial Sequence: Synthetic oligonucleotide
  Sense strand starting at position 793 of SEQ ID NO: 317618
gauggaugcuggcauaaga

SEQ ID NO: 498730 - RNA, 19 nt, Artificial Sequence
  Description of Artificial Sequence: Synthetic oligonucleotide
  Antisense Strand to SEQ ID NO: 498729
ucuuaugccagcauccauc

SEQ ID NO: 498731 - RNA, 19 nt, Artificial Sequence
  Description of Artificial Sequence: Synthetic oligonucleotide
  Sense strand starting at position 884 of SEQ ID NO: 317618
gcugcuucuggagagauag

SEQ ID NO: 498732 - RNA, 19 nt, Artificial Sequence
  Description of Artificial Sequence: Synthetic oligonucleotide
  Antisense Strand to SEQ ID NO: 498731
cuaucucuccagaagcagc

SEQ ID NO: 498733 - RNA, 19 nt, Artificial Sequence
  Description of Artificial Sequence: Synthetic oligonucleotide
  Sense strand starting at position 1032 of SEQ ID NO: 317618
ggguuaaaucuggguggug

SEQ ID NO: 498734 - RNA, 19 nt, Artificial Sequence
  Description of Artificial Sequence: Synthetic oligonucleotide
  Antisense Strand to SEQ ID NO: 498733
caccacccagauuuaaccc

SEQ ID NO: 498735 - RNA, 19 nt, Artificial Sequence
  Description of Artificial Sequence: Synthetic oligonucleotide
  Sense strand starting at position 1062 of SEQ ID NO: 317618
aaaugcgacuuccuuggaa

SEQ ID NO: 498736 - RNA, 19 nt, Artificial Sequence
  Description of Artificial Sequence: Synthetic oligonucleotide
  Antisense Strand to SEQ ID NO: 498735
uuccaaggaagucgcauuu

SEQ ID NO: 498737 - RNA, 19 nt, Artificial Sequence
  Description of Artificial Sequence: Synthetic oligonucleotide
  Sense strand starting at position 1064 of SEQ ID NO: 317618
augcgacuuccuuggaauu

SEQ ID NO: 498738 - RNA, 19 nt, Artificial Sequence
  Description of Artificial Sequence: Synthetic oligonucleotide
  Antisense Strand to SEQ ID NO: 498737
aauuccaaggaagucgcau

SEQ ID NO: 498739 - RNA, 19 nt, Artificial Sequence
  Description of Artificial Sequence: Synthetic oligonucleotide
  Sense strand starting at position 1140 of SEQ ID NO: 317618
uggguaggauucuccagaa

SEQ ID NO: 498740 - RNA, 19 nt, Artificial Sequence
  Description of Artificial Sequence: Synthetic oligonucleotide
  Antisense Strand to SEQ ID NO: 498739
uucuggagaauccuaccca

SEQ ID NO: 498741 - RNA, 19 nt, Artificial Sequence
  Description of Artificial Sequence: Synthetic oligonucleotide
  Sense strand starting at position 1182 of SEQ ID NO: 317618
gcuaaugauccagagggug

SEQ ID NO: 498742 - RNA, 19 nt, Artificial Sequence
  Description of Artificial Sequence: Synthetic oligonucleotide
  Antisense Strand to SEQ ID NO: 498741
cacccucuggaucauuagc

SEQ ID NO: 498743 - RNA, 19 nt, Artificial Sequence
  Description of Artificial Sequence: Synthetic oligonucleotide
  Sense strand starting at position 2314 of SEQ ID NO: 317618
gugguuuggacccguggaa

SEQ ID NO: 498744 - RNA, 19 nt, Artificial Sequence
  Description of Artificial Sequence: Synthetic oligonucleotide
  Antisense Strand to SEQ ID NO: 498743
uuccacggguccaaaccac

SEQ ID NO: 498745 - RNA, 19 nt, Artificial Sequence
  Description of Artificial Sequence: Synthetic oligonucleotide
  Sense strand starting at position 2496 of SEQ ID NO: 317618
gggccuguuugaaacgagu

SEQ ID NO: 498746 - RNA, 19 nt, Artificial Sequence
  Description of Artificial Sequence: Synthetic oligonucleotide
  Antisense Strand to SEQ ID NO: 498745
acucguuucaaacaggccc

SEQ ID NO: 498747 - RNA, 19 nt, Artificial Sequence
  Description of Artificial Sequence: Synthetic oligonucleotide
  Sense strand starting at position 2498 of SEQ ID NO: 317618
gccuguuugaaacgagugu

SEQ ID NO: 498748 - RNA, 19 nt, Artificial Sequence
  Description of Artificial Sequence: Synthetic oligonucleotide
  Antisense Strand to SEQ ID NO: 498747
acacucguuucaaacaggc

SEQ ID NO: 498749 - RNA, 19 nt, Artificial Sequence
  Description of Artificial Sequence: Synthetic oligonucleotide
  Sense strand starting at position 2585 of SEQ ID NO: 317618
gugggauuccuuuaaagug

SEQ ID NO: 498750 - RNA, 19 nt, Artificial Sequence
  Description of Artificial Sequence: Synthetic oligonucleotide
  Antisense Strand to SEQ ID NO: 498749
cacuuuaaaggaaucccac

SEQ ID NO: 498751 - RNA, 19 nt, Artificial Sequence
  Description of Artificial Sequence: Synthetic oligonucleotide
  Sense strand starting at position 2603 of SEQ ID NO: 317618
guguguuagcccagggagu

SEQ ID NO: 498752 - RNA, 19 nt, Artificial Sequence
  Description of Artificial Sequence: Synthetic oligonucleotide
  Antisense Strand to SEQ ID NO: 498751
acucccugggcuaacacac

SEQ ID NO: 498753 - RNA, 19 nt, Artificial Sequence
  Description of Artificial Sequence: Synthetic oligonucleotide
  Sense strand starting at position 2671 of SEQ ID NO: 317618
ggaggcgugguuuggagau

SEQ ID NO: 498754 - RNA, 19 nt, Artificial Sequence
  Description of Artificial Sequence: Synthetic oligonucleotide
  Antisense Strand to SEQ ID NO: 498753
aucuccaaaccacgccucc

SEQ ID NO: 498755 - RNA, 19 nt, Artificial Sequence
  Description of Artificial Sequence: Synthetic oligonucleotide
  Sense strand starting at position 2696 of SEQ ID NO: 317618
gagggucuauccuugagag

SEQ ID NO: 498756 - RNA, 19 nt, Artificial Sequence
  Description of Artificial Sequence: Synthetic oligonucleotide
  Antisense Strand to SEQ ID NO: 498755
cucucaaggauagacccuc

SEQ ID NO: 498757 - RNA, 19 nt, Artificial Sequence
  Description of Artificial Sequence: Synthetic oligonucleotide
  Sense strand starting at position 2769 of SEQ ID NO: 317618
ugagcuaccuguccuaguu

SEQ ID NO: 498758 - RNA, 19 nt, Artificial Sequence
  Description of Artificial Sequence: Synthetic oligonucleotide
  Antisense Strand to SEQ ID NO: 498757
aacuaggacagguagcuca

SEQ ID NO: 498759 - RNA, 19 nt, Artificial Sequence
  Description of Artificial Sequence: Synthetic oligonucleotide
  Sense strand starting at position 2809 of SEQ ID NO: 317618
cggagugacugucagagau

SEQ ID NO: 498760 - RNA, 19 nt, Artificial Sequence
  Description of Artificial Sequence: Synthetic oligonucleotide
  Antisense Strand to SEQ ID NO: 498759
aucucugacagucacuccg

SEQ ID NO: 498761 - RNA, 19 nt, Artificial Sequence
  Description of Artificial Sequence: Synthetic oligonucleotide
  Sense strand starting at position 2811 of SEQ ID NO: 317618
gagugacugucagagauaa

SEQ ID NO: 498762 - RNA, 19 nt, Artificial Sequence
  Description of Artificial Sequence: Synthetic oligonucleotide
  Antisense Strand to SEQ ID NO: 498761
uuaucucugacagucacuc

SEQ ID NO: 498763 - RNA, 19 nt, Artificial Sequence
  Description of Artificial Sequence: Synthetic oligonucleotide
  Sense strand starting at position 2850 of SEQ ID NO: 317618
gcaaauauuccagauggcu

SEQ ID NO: 498764 - RNA, 19 nt, Artificial Sequence
  Description of Artificial Sequence: Synthetic oligonucleotide
  Antisense Strand to SEQ ID NO: 498763
agccaucuggaauauuugc

SEQ ID NO: 498765 - RNA, 19 nt, Artificial Sequence
  Description of Artificial Sequence: Synthetic oligonucleotide
  Sense strand starting at position 2858 of SEQ ID NO: 317618
uccagauggcuuuggagau

SEQ ID NO: 498766 - RNA, 19 nt, Artificial Sequence
  Description of Artificial Sequence: Synthetic oligonucleotide
  Antisense Strand to SEQ ID NO: 498765
aucuccaaagccaucugga

SEQ ID NO: 498767 - RNA, 19 nt, Artificial Sequence
  Description of Artificial Sequence: Synthetic oligonucleotide
  Sense strand starting at position 2862 of SEQ ID NO: 317618
gauggcuuuggagaugagu

SEQ ID NO: 498768 - RNA, 19 nt, Artificial Sequence
  Description of Artificial Sequence: Synthetic oligonucleotide
  Antisense Strand to SEQ ID NO: 498767
acucaucuccaaagccauc

SEQ ID NO: 498769 - RNA, 19 nt, Artificial Sequence
  Description of Artificial Sequence: Synthetic oligonucleotide
  Sense strand starting at position 2871 of SEQ ID NO: 317618
ggagaugaguucugaacac

SEQ ID NO: 498770 - RNA, 19 nt, Artificial Sequence
  Description of Artificial Sequence: Synthetic oligonucleotide
  Antisense Strand to SEQ ID NO: 498769
guguucagaacucaucucc

SEQ ID NO: 498771 - RNA, 19 nt, Artificial Sequence
  Description of Artificial Sequence: Synthetic oligonucleotide
  Sense strand starting at position 2889 of SEQ ID NO: 317618
cacuacuucggaggacuuu

SEQ ID NO: 498772 - RNA, 19 nt, Artificial Sequence
  Description of Artificial Sequence: Synthetic oligonucleotide
  Antisense Strand to SEQ ID NO: 498771
aaaguccuccgaaguagug

SEQ ID NO: 498773 - RNA, 19 nt, Artificial Sequence
  Description of Artificial Sequence: Synthetic oligonucleotide
  Sense strand starting at position 2925 of SEQ ID NO: 317618
ucaugucagucaccucauu

SEQ ID NO: 498774 - RNA, 19 nt, Artificial Sequence
  Description of Artificial Sequence: Synthetic oligonucleotide
  Antisense Strand to SEQ ID NO: 498773
aaugaggugacugacauga

SEQ ID NO: 498775 - RNA, 19 nt, Artificial Sequence
  Description of Artificial Sequence: Synthetic oligonucleotide
  Sense strand starting at position 3172 of SEQ ID NO: 317618
ugcccaaagucuugaagau

SEQ ID NO: 498776 - RNA, 19 nt, Artificial Sequence
  Description of Artificial Sequence: Synthetic oligonucleotide
  Antisense Strand to SEQ ID NO: 498775
aucuucaagacuuugggca

SEQ ID NO: 498777 - RNA, 19 nt, Artificial Sequence
  Description of Artificial Sequence: Synthetic oligonucleotide
  Sense strand starting at position 3181 of SEQ ID NO: 317618
ucuugaagaugucuuucca

SEQ ID NO: 498778 - RNA, 19 nt, Artificial Sequence
  Description of Artificial Sequence: Synthetic oligonucleotide
  Antisense Strand to SEQ ID NO: 498777
uggaaagacaucuucaaga

SEQ ID NO: 498779 - RNA, 19 nt, Artificial Sequence
  Description of Artificial Sequence: Synthetic oligonucleotide
  Sense strand starting at position 3289 of SEQ ID NO: 317618
uugugagauuuaugcacau

SEQ ID NO: 498780 - RNA, 19 nt, Artificial Sequence
  Description of Artificial Sequence: Synthetic oligonucleotide
  Antisense Strand to SEQ ID NO: 498779
augugcauaaaucucacaa

SEQ ID NO: 498781 - RNA, 19 nt, Artificial Sequence
  Description of Artificial Sequence: Synthetic oligonucleotide
  Sense strand starting at position 3597 of SEQ ID NO: 317618
ggaagauaauguggaguaa

SEQ ID NO: 498782 - RNA, 19 nt, Artificial Sequence
  Description of Artificial Sequence: Synthetic oligonucleotide
  Antisense Strand to SEQ ID NO: 498781
uuacuccacauuaucuucc

SEQ ID NO: 498783 - RNA, 19 nt, Artificial Sequence
  Description of Artificial Sequence: Synthetic oligonucleotide
  Sense strand starting at position 3689 of SEQ ID NO: 317618
ggagguguauugcacaaag

SEQ ID NO: 498784 - RNA, 19 nt, Artificial Sequence
  Description of Artificial Sequence: Synthetic oligonucleotide
  Antisense Strand to SEQ ID NO: 498783
cuuugugcaauacaccucc

SEQ ID NO: 498785 - RNA, 19 nt, Artificial Sequence
  Description of Artificial Sequence: Synthetic oligonucleotide
  Sense strand starting at position 3691 of SEQ ID NO: 317618
agguguauugcacaaagga

SEQ ID NO: 498786 - RNA, 19 nt, Artificial Sequence
  Description of Artificial Sequence: Synthetic oligonucleotide
  Antisense Strand to SEQ ID NO: 498785
uccuuugugcaauacaccu

SEQ ID NO: 498787 - RNA, 19 nt, Artificial Sequence
  Description of Artificial Sequence: Synthetic oligonucleotide
  Sense strand starting at position 3761 of SEQ ID NO: 317618
gagaacgugucccuggaaa

SEQ ID NO: 498788 - RNA, 19 nt, Artificial Sequence
  Description of Artificial Sequence: Synthetic oligonucleotide
  Antisense Strand to SEQ ID NO: 498787
uuuccagggacacguucuc

SEQ ID NO: 498789 - RNA, 19 nt, Artificial Sequence
  Description of Artificial Sequence: Synthetic oligonucleotide
  Sense strand starting at position 3763 of SEQ ID NO: 317618
gaacgugucccuggaaauc

SEQ ID NO: 498790 - RNA, 19 nt, Artificial Sequence
  Description of Artificial Sequence: Synthetic oligonucleotide
  Antisense Strand to SEQ ID NO: 498789
gauuuccagggacacguuc

SEQ ID NO: 498791 - RNA, 19 nt, Artificial Sequence
  Description of Artificial Sequence: Synthetic oligonucleotide
  Sense strand starting at position 3781 of SEQ ID NO: 317618
cccagaugccaaggauaaa

SEQ ID NO: 498792 - RNA, 19 nt, Artificial Sequence
  Description of Artificial Sequence: Synthetic oligonucleotide
  Antisense Strand to SEQ ID NO: 498791
uuuauccuuggcaucuggg

SEQ ID NO: 498793 - RNA, 19 nt, Artificial Sequence
  Description of Artificial Sequence: Synthetic oligonucleotide
  Sense strand starting at position 3879 of SEQ ID NO: 317618
gagcaauguccagggacuc

SEQ ID NO: 498794 - RNA, 19 nt, Artificial Sequence
  Description of Artificial Sequence: Synthetic oligonucleotide
  Antisense Strand to SEQ ID NO: 498793
gagucccuggacauugcuc

SEQ ID NO: 498795 - RNA, 19 nt, Artificial Sequence
  Description of Artificial Sequence: Synthetic oligonucleotide
  Sense strand starting at position 8 of SEQ ID NO: 317619
guuuauauguuacauacga

SEQ ID NO: 498796 - RNA, 19 nt, Artificial Sequence
  Description of Artificial Sequence: Synthetic oligonucleotide
  Antisense Strand to SEQ ID NO: 498795
ucguauguaacauauaaac

SEQ ID NO: 498797 - RNA, 19 nt, Artificial Sequence
  Description of Artificial Sequence: Synthetic oligonucleotide
  Sense strand starting at position 13 of SEQ ID NO: 317619
uauguuacauacgaauaga

SEQ ID NO: 498798 - RNA, 19 nt, Artificial Sequence
  Description of Artificial Sequence: Synthetic oligonucleotide
  Antisense Strand to SEQ ID NO: 498797
ucuauucguauguaacaua

SEQ ID NO: 498799 - RNA, 19 nt, Artificial Sequence
  Description of Artificial Sequence: Synthetic oligonucleotide
  Sense strand starting at position 23 of SEQ ID NO: 317619
acgaauagauacgauaaau

SEQ ID NO: 498800 - RNA, 19 nt, Artificial Sequence
  Description of Artificial Sequence: Synthetic oligonucleotide
  Antisense Strand to SEQ ID NO: 498799
auuuaucguaucuauucgu

SEQ ID NO: 498801 - RNA, 19 nt, Artificial Sequence
  Description of Artificial Sequence: Synthetic oligonucleotide
  Sense strand starting at position 33 of SEQ ID NO: 317619
acgauaaauuguccaucau

SEQ ID NO: 498802 - RNA, 19 nt, Artificial Sequence
  Description of Artificial Sequence: Synthetic oligonucleotide
  Antisense Strand to SEQ ID NO: 498801
augauggacaauuuaucgu

SEQ ID NO: 498803 - RNA, 19 nt, Artificial Sequence
  Description of Artificial Sequence: Synthetic oligonucleotide
  Sense strand starting at position 34 of SEQ ID NO: 317619
cgauaaauuguccaucauu

SEQ ID NO: 498804 - RNA, 19 nt, Artificial Sequence
  Description of Artificial Sequence: Synthetic oligonucleotide
  Antisense Strand to SEQ ID NO: 498803
aaugauggacaauuuaucg

SEQ ID NO: 498805 - RNA, 19 nt, Artificial Sequence
  Description of Artificial Sequence: Synthetic oligonucleotide
  Sense strand starting at position 102 of SEQ ID NO: 317619
cuguuauaaucagaggcca

SEQ ID NO: 498806 - RNA, 19 nt, Artificial Sequence
  Description of Artificial Sequence: Synthetic oligonucleotide
  Antisense Strand to SEQ ID NO: 498805
uggccucugauuauaacag

SEQ ID NO: 498807 - RNA, 19 nt, Artificial Sequence
  Description of Artificial Sequence: Synthetic oligonucleotide
  Sense strand starting at position 104 of SEQ ID NO: 317619
guuauaaucagaggccaga

SEQ ID NO: 498808 - RNA, 19 nt, Artificial Sequence
  Description of Artificial Sequence: Synthetic oligonucleotide
  Antisense Strand to SEQ ID NO: 498807
ucuggccucugauuauaac

SEQ ID NO: 498809 - RNA, 19 nt, Artificial Sequence
  Description of Artificial Sequence: Synthetic oligonucleotide
  Sense strand starting at position 114 of SEQ ID NO: 317619
gaggccagacucugguauu

SEQ ID NO: 498810 - RNA, 19 nt, Artificial Sequence
  Description of Artificial Sequence: Synthetic oligonucleotide
  Antisense Strand to SEQ ID NO: 498809
aauaccagagucuggccuc

SEQ ID NO: 498811 - RNA, 19 nt, Artificial Sequence
  Description of Artificial Sequence: Synthetic oligonucleotide
  Sense strand starting at position 115 of SEQ ID NO: 317619
aggccagacucugguauua

SEQ ID NO: 498812 - RNA, 19 nt, Artificial Sequence
  Description of Artificial Sequence: Synthetic oligonucleotide
  Antisense Strand to SEQ ID NO: 498811
uaauaccagagucuggccu

SEQ ID NO: 498813 - RNA, 19 nt, Artificial Sequence
  Description of Artificial Sequence: Synthetic oligonucleotide
  Sense strand starting at position 117 of SEQ ID NO: 317619
gccagacucugguauuaau

SEQ ID NO: 498814 - RNA, 19 nt, Artificial Sequence
  Description of Artificial Sequence: Synthetic oligonucleotide
  Antisense Strand to SEQ ID NO: 498813
auuaauaccagagucuggc

SEQ ID NO: 498815 - RNA, 19 nt, Artificial Sequence
  Description of Artificial Sequence: Synthetic oligonucleotide
  Sense strand starting at position 207 of SEQ ID NO: 317619
ugcaguaaguccucacucu

SEQ ID NO: 498816 - RNA, 19 nt, Artificial Sequence
  Description of Artificial Sequence: Synthetic oligonucleotide
  Antisense Strand to SEQ ID NO: 498815
agagugaggacuuacugca

SEQ ID NO: 498817 - RNA, 19 nt, Artificial Sequence
  Description of Artificial Sequence: Synthetic oligonucleotide
  Sense strand starting at position 208 of SEQ ID NO: 317619
gcaguaaguccucacucua

SEQ ID NO: 498818 - RNA, 19 nt, Artificial Sequence
  Description of Artificial Sequence: Synthetic oligonucleotide
  Antisense Strand to SEQ ID NO: 498817
uagagugaggacuuacugc

SEQ ID NO: 498819 - RNA, 19 nt, Artificial Sequence
  Description of Artificial Sequence: Synthetic oligonucleotide
  Sense strand starting at position 257 of SEQ ID NO: 317619
ggguuuggguggcugagaa

SEQ ID NO: 498820 - RNA, 19 nt, Artificial Sequence
  Description of Artificial Sequence: Synthetic oligonucleotide
  Antisense Strand to SEQ ID NO: 498819
uucucagccacccaaaccc

SEQ ID NO: 498821 - RNA, 19 nt, Artificial Sequence
  Description of Artificial Sequence: Synthetic oligonucleotide
  Sense strand starting at position 258 of SEQ ID NO: 317619
gguuuggguggcugagaaa

SEQ ID NO: 498822 - RNA, 19 nt, Artificial Sequence
  Description of Artificial Sequence: Synthetic oligonucleotide
  Antisense Strand to SEQ ID NO: 498821
uuucucagccacccaaacc

SEQ ID NO: 498823 - RNA, 19 nt, Artificial Sequence
  Description of Artificial Sequence: Synthetic oligonucleotide
  Sense strand starting at position 305 of SEQ ID NO: 317619
aaguaaucgugcuuaaagc

SEQ ID NO: 498824 - RNA, 19 nt, Artificial Sequence
  Description of Artificial Sequence: Synthetic oligonucleotide
  Antisense Strand to SEQ ID NO: 498823
gcuuuaagcacgauuacuu

SEQ ID NO: 498825 - RNA, 19 nt, Artificial Sequence
  Description of Artificial Sequence: Synthetic oligonucleotide
  Sense strand starting at position 306 of SEQ ID NO: 317619
aguaaucgugcuuaaagca

SEQ ID NO: 498826 - RNA, 19 nt, Artificial Sequence
  Description of Artificial Sequence: Synthetic oligonucleotide
  Antisense Strand to SEQ ID NO: 498825
ugcuuuaagcacgauuacu

SEQ ID NO: 498827 - RNA, 19 nt, Artificial Sequence
  Description of Artificial Sequence: Synthetic oligonucleotide
  Sense strand starting at position 410 of SEQ ID NO: 317619
aaaggcugugcucacagaa

SEQ ID NO: 498828 - RNA, 19 nt, Artificial Sequence
  Description of Artificial Sequence: Synthetic oligonucleotide
  Antisense Strand to SEQ ID NO: 498827
uucugugagcacagccuuu

SEQ ID NO: 498829 - RNA, 19 nt, Artificial Sequence
  Description of Artificial Sequence: Synthetic oligonucleotide
  Sense strand starting at position 423 of SEQ ID NO: 317619
acagaacuuguuugcuuua

SEQ ID NO: 498830 - RNA, 19 nt, Artificial Sequence
  Description of Artificial Sequence: Synthetic oligonucleotide
  Antisense Strand to SEQ ID NO: 498829
uaaagcaaacaaguucugu

SEQ ID NO: 498831 - RNA, 19 nt, Artificial Sequence
  Description of Artificial Sequence: Synthetic oligonucleotide
  Sense strand starting at position 426 of SEQ ID NO: 317619
gaacuuguuugcuuuaugu

SEQ ID NO: 498832 - RNA, 19 nt, Artificial Sequence
  Description of Artificial Sequence: Synthetic oligonucleotide
  Antisense Strand to SEQ ID NO: 498831
acauaaagcaaacaaguuc

SEQ ID NO: 498833 - RNA, 19 nt, Artificial Sequence
  Description of Artificial Sequence: Synthetic oligonucleotide
  Sense strand starting at position 448 of SEQ ID NO: 317619
uggcguucugcucuuuaaa

SEQ ID NO: 498834 - RNA, 19 nt, Artificial Sequence
  Description of Artificial Sequence: Synthetic oligonucleotide
  Antisense Strand to SEQ ID NO: 498833
uuuaaagagcagaacgcca

SEQ ID NO: 498835 - RNA, 19 nt, Artificial Sequence
  Description of Artificial Sequence: Synthetic oligonucleotide
  Sense strand starting at position 557 of SEQ ID NO: 317619
ugggauggcuccuaaguua

SEQ ID NO: 498836 - RNA, 19 nt, Artificial Sequence
  Description of Artificial Sequence: Synthetic oligonucleotide
  Antisense Strand to SEQ ID NO: 498835
uaacuuaggagccauccca

SEQ ID NO: 498837 - RNA, 19 nt, Artificial Sequence
  Description of Artificial Sequence: Synthetic oligonucleotide
  Sense strand starting at position 613 of SEQ ID NO: 317619
gaauauaacccaugcguga

SEQ ID NO: 498838 - RNA, 19 nt, Artificial Sequence
  Description of Artificial Sequence: Synthetic oligonucleotide
  Antisense Strand to SEQ ID NO: 498837
ucacgcauggguuauauuc

SEQ ID NO: 498839 - RNA, 19 nt, Artificial Sequence
  Description of Artificial Sequence: Synthetic oligonucleotide
  Sense strand starting at position 625 of SEQ ID NO: 317619
ugcgugaugcuggcguuua

SEQ ID NO: 498840 - RNA, 19 nt, Artificial Sequence
  Description of Artificial Sequence: Synthetic oligonucleotide
  Antisense Strand to SEQ ID NO: 498839
uaaacgccagcaucacgca

SEQ ID NO: 498841 - RNA, 19 nt, Artificial Sequence
  Description of Artificial Sequence: Synthetic oligonucleotide
  Sense strand starting at position 663 of SEQ ID NO: 317619
cuugaaagucugugaagca

SEQ ID NO: 498842 - RNA, 19 nt, Artificial Sequence
  Description of Artificial Sequence: Synthetic oligonucleotide
  Antisense Strand to SEQ ID NO: 498841
ugcuucacagacuuucaag

SEQ ID NO: 498843 - RNA, 19 nt, Artificial Sequence
  Description of Artificial Sequence: Synthetic oligonucleotide
  Sense strand starting at position 714 of SEQ ID NO: 317619
aggccugaacuuuauccaa

SEQ ID NO: 498844 - RNA, 19 nt, Artificial Sequence
  Description of Artificial Sequence: Synthetic oligonucleotide
  Antisense Strand to SEQ ID NO: 498843
uuggauaaaguucaggccu

SEQ ID NO: 498845 - RNA, 19 nt, Artificial Sequence
  Description of Artificial Sequence: Synthetic oligonucleotide
  Sense strand starting at position 855 of SEQ ID NO: 317619
aacgauuaacgucaccaca

SEQ ID NO: 498846 - RNA, 19 nt, Artificial Sequence
  Description of Artificial Sequence: Synthetic oligonucleotide
  Antisense Strand to SEQ ID NO: 498845
uguggugacguuaaucguu

SEQ ID NO: 498847 - RNA, 19 nt, Artificial Sequence
  Description of Artificial Sequence: Synthetic oligonucleotide
  Sense strand starting at position 939 of SEQ ID NO: 317619
ugcaauggguccuauacaa

SEQ ID NO: 498848 - RNA, 19 nt, Artificial Sequence
  Description of Artificial Sequence: Synthetic oligonucleotide
  Antisense Strand to SEQ ID NO: 498847
uuguauaggacccauugca

SEQ ID NO: 498849 - RNA, 19 nt, Artificial Sequence
  Description of Artificial Sequence: Synthetic oligonucleotide
  Sense strand starting at position 2336 of SEQ ID NO: 317619
cgcucagugacgucacgau

SEQ ID NO: 498850 - RNA, 19 nt, Artificial Sequence
  Description of Artificial Sequence: Synthetic oligonucleotide
  Antisense Strand to SEQ ID NO: 498849
aucgugacgucacugagcg

SEQ ID NO: 498851 - RNA, 19 nt, Artificial Sequence
  Description of Artificial Sequence: Synthetic oligonucleotide
  Sense strand starting at position 2898 of SEQ ID NO: 317619
gguugaagccggugugauu

SEQ ID NO: 498852 - RNA, 19 nt, Artificial Sequence
  Description of Artificial Sequence: Synthetic oligonucleotide
  Antisense Strand to SEQ ID NO: 498851
aaucacaccggcuucaacc

SEQ ID NO: 498853 - RNA, 19 nt, Artificial Sequence
  Description of Artificial Sequence: Synthetic oligonucleotide
  Sense strand starting at position 3034 of SEQ ID NO: 317619
uagugucugcucgagcuuu

SEQ ID NO: 498854 - RNA, 19 nt, Artificial Sequence
  Description of Artificial Sequence: Synthetic oligonucleotide
  Antisense Strand to SEQ ID NO: 498853
aaagcucgagcagacacua

SEQ ID NO: 498855 - RNA, 19 nt, Artificial Sequence
  Description of Artificial Sequence: Synthetic oligonucleotide
  Sense strand starting at position 3099 of SEQ ID NO: 317619
uggcgagaguuuggucaag

SEQ ID NO: 498856 - RNA, 19 nt, Artificial Sequence
  Description of Artificial Sequence: Synthetic oligonucleotide
  Antisense Strand to SEQ ID NO: 498855
cuugaccaaacucucgcca

SEQ ID NO: 498857 - RNA, 19 nt, Artificial Sequence
  Description of Artificial Sequence: Synthetic oligonucleotide
  Sense strand starting at position 3101 of SEQ ID NO: 317619
gcgagaguuuggucaagga

SEQ ID NO: 498858 - RNA, 19 nt, Artificial Sequence
  Description of Artificial Sequence: Synthetic oligonucleotide
  Antisense Strand to SEQ ID NO: 498857
uccuugaccaaacucucgc

SEQ ID NO: 498859 - RNA, 19 nt, Artificial Sequence
  Description of Artificial Sequence: Synthetic oligonucleotide
  Sense strand starting at position 3102 of SEQ ID NO: 317619
cgagaguuuggucaaggag

SEQ ID NO: 498860 - RNA, 19 nt, Artificial Sequence
  Description of Artificial Sequence: Synthetic oligonucleotide
  Antisense Strand to SEQ ID NO: 498859
cuccuugaccaaacucucg

SEQ ID NO: 498861 - RNA, 19 nt, Artificial Sequence
  Description of Artificial Sequence: Synthetic oligonucleotide
  Sense strand starting at position 3114 of SEQ ID NO: 317619
caaggagagcuuugugaaa

SEQ ID NO: 498862 - RNA, 19 nt, Artificial Sequence
  Description of Artificial Sequence: Synthetic oligonucleotide
  Antisense Strand to SEQ ID NO: 498861
uuucacaaagcucuccuug

SEQ ID NO: 498863 - RNA, 19 nt, Artificial Sequence
  Description of Artificial Sequence: Synthetic oligonucleotide
  Sense strand starting at position 3116 of SEQ ID NO: 317619
aggagagcuuugugaaagu

SEQ ID NO: 498864 - RNA, 19 nt, Artificial Sequence
  Description of Artificial Sequence: Synthetic oligonucleotide
  Antisense Strand to SEQ ID NO: 498863
acuuucacaaagcucuccu

SEQ ID NO: 498865 - RNA, 19 nt, Artificial Sequence
  Description of Artificial Sequence: Synthetic oligonucleotide
  Sense strand starting at position 3322 of SEQ ID NO: 317619
cugcaagacuuacuauaag

SEQ ID NO: 498866 - RNA, 19 nt, Artificial Sequence
  Description of Artificial Sequence: Synthetic oligonucleotide
  Antisense Strand to SEQ ID NO: 498865
cuuauaguaagucuugcag

SEQ ID NO: 498867 - RNA, 19 nt, Artificial Sequence
  Description of Artificial Sequence: Synthetic oligonucleotide
  Sense strand starting at position 3340 of SEQ ID NO: 317619
ggcuacaguaauugagaca

SEQ ID NO: 498868 - RNA, 19 nt, Artificial Sequence
  Description of Artificial Sequence: Synthetic oligonucleotide
  Antisense Strand to SEQ ID NO: 498867
ugucucaauuacuguagcc

SEQ ID NO: 498869 - RNA, 19 nt, Artificial Sequence
  Description of Artificial Sequence: Synthetic oligonucleotide
  Sense strand starting at position 3353 of SEQ ID NO: 317619
gagacauugugguacuggu

SEQ ID NO: 498870 - RNA, 19 nt, Artificial Sequence
  Description of Artificial Sequence: Synthetic oligonucleotide
  Antisense Strand to SEQ ID NO: 498869
accaguaccacaaugucuc

SEQ ID NO: 498871 - RNA, 19 nt, Artificial Sequence
  Description of Artificial Sequence: Synthetic oligonucleotide
  Sense strand starting at position 3594 of SEQ ID NO: 317619
ggcucacaccugugagaag

SEQ ID NO: 498872 - RNA, 19 nt, Artificial Sequence
  Description of Artificial Sequence: Synthetic oligonucleotide
  Antisense Strand to SEQ ID NO: 498871
cuucucacaggugugagcc

SEQ ID NO: 498873 - RNA, 19 nt, Artificial Sequence
  Description of Artificial Sequence: Synthetic oligonucleotide
  Sense strand starting at position 3595 of SEQ ID NO: 317619
gcucacaccugugagaagu

SEQ ID NO: 498874 - RNA, 19 nt, Artificial Sequence
  Description of Artificial Sequence: Synthetic oligonucleotide
  Antisense Strand to SEQ ID NO: 498873
acuucucacaggugugagc

SEQ ID NO: 498875 - RNA, 19 nt, Artificial Sequence
  Description of Artificial Sequence: Synthetic oligonucleotide
  Sense strand starting at position 35 of SEQ ID NO: 317620
ugcaguucuaguuggagag

SEQ ID NO: 498876 - RNA, 19 nt, Artificial Sequence
  Description of Artificial Sequence: Synthetic oligonucleotide
  Antisense Strand to SEQ ID NO: 498875
cucuccaacuagaacugca

SEQ ID NO: 498877 - RNA, 19 nt, Artificial Sequence
  Description of Artificial Sequence: Synthetic oligonucleotide
  Sense strand starting at position 39 of SEQ ID NO: 317620
guucuaguuggagaggcuu

SEQ ID NO: 498878 - RNA, 19 nt, Artificial Sequence
  Description of Artificial Sequence: Synthetic oligonucleotide
  Antisense Strand to SEQ ID NO: 498877
aagccucuccaacuagaac

SEQ ID NO: 498879 - RNA, 19 nt, Artificial Sequence
  Description of Artificial Sequence: Synthetic oligonucleotide
  Sense strand starting at position 145 of SEQ ID NO: 317620
augcaauggugccaucaca

SEQ ID NO: 498880 - RNA, 19 nt, Artificial Sequence
  Description of Artificial Sequence: Synthetic oligonucleotide
  Antisense Strand to SEQ ID NO: 498879
ugugauggcaccauugcau

SEQ ID NO: 498881 - RNA, 19 nt, Artificial Sequence
  Description of Artificial Sequence: Synthetic oligonucleotide
  Sense strand starting at position 437 of SEQ ID NO: 317620
acccuauguucugagcaaa

SEQ ID NO: 498882 - RNA, 19 nt, Artificial Sequence
  Description of Artificial Sequence: Synthetic oligonucleotide
  Antisense Strand to SEQ ID NO: 498881
uuugcucagaacauagggu

SEQ ID NO: 498883 - RNA, 19 nt, Artificial Sequence
  Description of Artificial Sequence: Synthetic oligonucleotide
  Sense strand starting at position 475 of SEQ ID NO: 317620
cuagauacauuguauugaa

SEQ ID NO: 498884 - RNA, 19 nt, Artificial Sequence
  Description of Artificial Sequence: Synthetic oligonucleotide
  Antisense Strand to SEQ ID NO: 498883
uucaauacaauguaucuag

SEQ ID NO: 498885 - RNA, 19 nt, Artificial Sequence
  Description of Artificial Sequence: Synthetic oligonucleotide
  Sense strand starting at position 478 of SEQ ID NO: 317620
gauacauuguauugaaaug

SEQ ID NO: 498886 - RNA, 19 nt, Artificial Sequence
  Description of Artificial Sequence: Synthetic oligonucleotide
  Antisense Strand to SEQ ID NO: 498885
cauuucaauacaauguauc

SEQ ID NO: 498887 - RNA, 19 nt, Artificial Sequence
  Description of Artificial Sequence: Synthetic oligonucleotide
  Sense strand starting at position 683 of SEQ ID NO: 317620
ccuacaguccuagaagcua

SEQ ID NO: 498888 - RNA, 19 nt, Artificial Sequence
  Description of Artificial Sequence: Synthetic oligonucleotide
  Antisense Strand to SEQ ID NO: 498887
uagcuucuaggacuguagg

SEQ ID NO: 498889 - RNA, 19 nt, Artificial Sequence
  Description of Artificial Sequence: Synthetic oligonucleotide
  Sense strand starting at position 691 of SEQ ID NO: 317620
ccuagaagcuaguccuaga

SEQ ID NO: 498890 - RNA, 19 nt, Artificial Sequence
  Description of Artificial Sequence: Synthetic oligonucleotide
  Antisense Strand to SEQ ID NO: 498889
ucuaggacuagcuucuagg

SEQ ID NO: 498891 - RNA, 19 nt, Artificial Sequence
  Description of Artificial Sequence: Synthetic oligonucleotide
  Sense strand starting at position 696 of SEQ ID NO: 317620
aagcuaguccuagaagcua

SEQ ID NO: 498892 - RNA, 19 nt, Artificial Sequence
  Description of Artificial Sequence: Synthetic oligonucleotide
  Antisense Strand to SEQ ID NO: 498891
uagcuucuaggacuagcuu

SEQ ID NO: 498893 - RNA, 19 nt, Artificial Sequence
  Description of Artificial Sequence: Synthetic oligonucleotide
  Sense strand starting at position 756 of SEQ ID NO: 317620
gccuaagaauucgaggcua

SEQ ID NO: 498894 - RNA, 19 nt, Artificial Sequence
  Description of Artificial Sequence: Synthetic oligonucleotide
  Antisense Strand to SEQ ID NO: 498893
uagccucgaauucuuaggc

SEQ ID NO: 498895 - RNA, 19 nt, Artificial Sequence
  Description of Artificial Sequence: Synthetic oligonucleotide
  Sense strand starting at position 758 of SEQ ID NO: 317620
cuaagaauucgaggcuaca

SEQ ID NO: 498896 - RNA, 19 nt, Artificial Sequence
  Description of Artificial Sequence: Synthetic oligonucleotide
  Antisense Strand to SEQ ID NO: 498895
uguagccucgaauucuuag

SEQ ID NO: 498897 - RNA, 19 nt, Artificial Sequence
  Description of Artificial Sequence: Synthetic oligonucleotide
  Sense strand starting at position 818 of SEQ ID NO: 317620
gagcaagacugucugucaa

SEQ ID NO: 498898 - RNA, 19 nt, Artificial Sequence
  Description of Artificial Sequence: Synthetic oligonucleotide
  Antisense Strand to SEQ ID NO: 498897
uugacagacagucuugcuc

SEQ ID NO: 498899 - RNA, 19 nt, Artificial Sequence
  Description of Artificial Sequence: Synthetic oligonucleotide
  Sense strand starting at position 820 of SEQ ID NO: 317620
gcaagacugucugucaauc

SEQ ID NO: 498900 - RNA, 19 nt, Artificial Sequence
  Description of Artificial Sequence: Synthetic oligonucleotide
  Antisense Strand to SEQ ID NO: 498899
gauugacagacagucuugc

SEQ ID NO: 498901 - RNA, 19 nt, Artificial Sequence
  Description of Artificial Sequence: Synthetic oligonucleotide
  Sense strand starting at position 1278 of SEQ ID NO: 317620
ugcaaagacugagaguuua

SEQ ID NO: 498902 - RNA, 19 nt, Artificial Sequence
  Description of Artificial Sequence: Synthetic oligonucleotide
  Antisense Strand to SEQ ID NO: 498901
uaaacucucagucuuugca

SEQ ID NO: 498903 - RNA, 19 nt, Artificial Sequence
  Description of Artificial Sequence: Synthetic oligonucleotide
  Sense strand starting at position 1599 of SEQ ID NO: 317620
cugagaguuuaauaugcau

SEQ ID NO: 498904 - RNA, 19 nt, Artificial Sequence
  Description of Artificial Sequence: Synthetic oligonucleotide
  Antisense Strand to SEQ ID NO: 498903
augcauauuaaacucucag

SEQ ID NO: 498905 - RNA, 19 nt, Artificial Sequence
  Description of Artificial Sequence: Synthetic oligonucleotide
  Sense strand starting at position 1668 of SEQ ID NO: 317620
ggauuagaguuagagaugu

SEQ ID NO: 498906 - RNA, 19 nt, Artificial Sequence
  Description of Artificial Sequence: Synthetic oligonucleotide
  Antisense Strand to SEQ ID NO: 498905
acaucucuaacucuaaucc

SEQ ID NO: 498907 - RNA, 19 nt, Artificial Sequence
  Description of Artificial Sequence: Synthetic oligonucleotide
  Sense strand starting at position 1712 of SEQ ID NO: 317620
gaaucagauugguacugga

SEQ ID NO: 498908 - RNA, 19 nt, Artificial Sequence
  Description of Artificial Sequence: Synthetic oligonucleotide
  Antisense Strand to SEQ ID NO: 498907
uccaguaccaaucugauuc

SEQ ID NO: 498909 - RNA, 19 nt, Artificial Sequence
  Description of Artificial Sequence: Synthetic oligonucleotide
  Sense strand starting at position 1715 of SEQ ID NO: 317620
ucagauugguacuggagaa

SEQ ID NO: 498910 - RNA, 19 nt, Artificial Sequence
  Description of Artificial Sequence: Synthetic oligonucleotide
  Antisense Strand to SEQ ID NO: 498909
uucuccaguaccaaucuga

SEQ ID NO: 498911 - RNA, 19 nt, Artificial Sequence
  Description of Artificial Sequence: Synthetic oligonucleotide
  Sense strand starting at position 1733 of SEQ ID NO: 317620
agugcuguuguaggaagaa

SEQ ID NO: 498912 - RNA, 19 nt, Artificial Sequence
  Description of Artificial Sequence: Synthetic oligonucleotide
  Antisense Strand to SEQ ID NO: 498911
uucuuccuacaacagcacu

SEQ ID NO: 498913 - RNA, 19 nt, Artificial Sequence
  Description of Artificial Sequence: Synthetic oligonucleotide
  Sense strand starting at position 1760 of SEQ ID NO: 317620
accuaagaauuccucguuu

SEQ ID NO: 498914 - RNA, 19 nt, Artificial Sequence
  Description of Artificial Sequence: Synthetic oligonucleotide
  Antisense Strand to SEQ ID NO: 498913
aaacgaggaauucuuaggu

SEQ ID NO: 498915 - RNA, 19 nt, Artificial Sequence
  Description of Artificial Sequence: Synthetic oligonucleotide
  Sense strand starting at position 1762 of SEQ ID NO: 317620
cuaagaauuccucguuuau

SEQ ID NO: 498916 - RNA, 19 nt, Artificial Sequence
  Description of Artificial Sequence: Synthetic oligonucleotide
  Antisense Strand to SEQ ID NO: 498915
auaaacgaggaauucuuag

SEQ ID NO: 498917 - RNA, 19 nt, Artificial Sequence
  Description of Artificial Sequence: Synthetic oligonucleotide
  Sense strand starting at position 2021 of SEQ ID NO: 317620
acccgucccuacuaaagau

SEQ ID NO: 498918 - RNA, 19 nt, Artificial Sequence
  Description of Artificial Sequence: Synthetic oligonucleotide
  Antisense Strand to SEQ ID NO: 498917
aucuuuaguagggacgggu

SEQ ID NO: 498919 - RNA, 19 nt, Artificial Sequence
  Description of Artificial Sequence: Synthetic oligonucleotide
  Sense strand starting at position 2255 of SEQ ID NO: 317620
agaguuaagcaucacauug

SEQ ID NO: 498920 - RNA, 19 nt, Artificial Sequence
  Description of Artificial Sequence: Synthetic oligonucleotide
  Antisense Strand to SEQ ID NO: 498919
caaugugaugcuuaacucu

SEQ ID NO: 498921 - RNA, 19 nt, Artificial Sequence
  Description of Artificial Sequence: Synthetic oligonucleotide
  Sense strand starting at position 2286 of SEQ ID NO: 317620
auaagugcuuaggaauuau

SEQ ID NO: 498922 - RNA, 19 nt, Artificial Sequence
  Description of Artificial Sequence: Synthetic oligonucleotide
  Antisense Strand to SEQ ID NO: 498921
auaauuccuaagcacuuau

SEQ ID NO: 498923 - RNA, 19 nt, Artificial Sequence
  Description of Artificial Sequence: Synthetic oligonucleotide
  Sense strand starting at position 2337 of SEQ ID NO: 317620
acaguauuaccugacacgu

SEQ ID NO: 498924 - RNA, 19 nt, Artificial Sequence
  Description of Artificial Sequence: Synthetic oligonucleotide
  Antisense Strand to SEQ ID NO: 498923
acgugucagguaauacugu

SEQ ID NO: 498925 - RNA, 19 nt, Artificial Sequence
  Description of Artificial Sequence: Synthetic oligonucleotide
  Sense strand starting at position 2339 of SEQ ID NO: 317620
aguauuaccugacacguua

SEQ ID NO: 498926 - RNA, 19 nt, Artificial Sequence
  Description of Artificial Sequence: Synthetic oligonucleotide
  Antisense Strand to SEQ ID NO: 498925
uaacgugucagguaauacu

SEQ ID NO: 498927 - RNA, 19 nt, Artificial Sequence
  Description of Artificial Sequence: Synthetic oligonucleotide
  Sense strand starting at position 2677 of SEQ ID NO: 317620
ucuccagcacuuggaaaua

SEQ ID NO: 498928 - RNA, 19 nt, Artificial Sequence
  Description of Artificial Sequence: Synthetic oligonucleotide
  Antisense Strand to SEQ ID NO: 498927
uauuuccaagugcuggaga

SEQ ID NO: 498929 - RNA, 19 nt, Artificial Sequence
  Description of Artificial Sequence: Synthetic oligonucleotide
  Sense strand starting at position 2717 of SEQ ID NO: 317620
ccuuauucuugaggugcua

SEQ ID NO: 498930 - RNA, 19 nt, Artificial Sequence
  Description of Artificial Sequence: Synthetic oligonucleotide
  Antisense Strand to SEQ ID NO: 498929
uagcaccucaagaauaagg

SEQ ID NO: 498931 - RNA, 19 nt, Artificial Sequence
  Description of Artificial Sequence: Synthetic oligonucleotide
  Sense strand starting at position 2730 of SEQ ID NO: 317620
gugcuaauauucuagagga

SEQ ID NO: 498932 - RNA, 19 nt, Artificial Sequence
  Description of Artificial Sequence: Synthetic oligonucleotide
  Antisense Strand to SEQ ID NO: 498931
uccucuagaauauuagcac

SEQ ID NO: 498933 - RNA, 19 nt, Artificial Sequence
  Description of Artificial Sequence: Synthetic oligonucleotide
  Sense strand starting at position 2860 of SEQ ID NO: 317620
gugcauuucuggugagguu

SEQ ID NO: 498934 - RNA, 19 nt, Artificial Sequence
  Description of Artificial Sequence: Synthetic oligonucleotide
  Antisense Strand to SEQ ID NO: 498933
aaccucaccagaaaugcac

SEQ ID NO: 498935 - RNA, 19 nt, Artificial Sequence
  Description of Artificial Sequence: Synthetic oligonucleotide
  Sense strand starting at position 3271 of SEQ ID NO: 317620
uggcuuagaugucagcuaa

SEQ ID NO: 498936 - RNA, 19 nt, Artificial Sequence
  Description of Artificial Sequence: Synthetic oligonucleotide
  Antisense Strand to SEQ ID NO: 498935
uuagcugacaucuaagcca

SEQ ID NO: 498937 - RNA, 19 nt, Artificial Sequence
  Description of Artificial Sequence: Synthetic oligonucleotide
  Sense strand starting at position 3296 of SEQ ID NO: 317620
cucugauaauuccgugaau

SEQ ID NO: 498938 - RNA, 19 nt, Artificial Sequence
  Description of Artificial Sequence: Synthetic oligonucleotide
  Antisense Strand to SEQ ID NO: 498937
auucacggaauuaucagag

SEQ ID NO: 498939 - RNA, 19 nt, Artificial Sequence
  Description of Artificial Sequence: Synthetic oligonucleotide
  Sense strand starting at position 3297 of SEQ ID NO: 317620
ucugauaauuccgugaauc

SEQ ID NO: 498940 - RNA, 19 nt, Artificial Sequence
  Description of Artificial Sequence: Synthetic oligonucleotide
  Antisense Strand to SEQ ID NO: 498939
gauucacggaauuaucaga

SEQ ID NO: 498941 - RNA, 19 nt, Artificial Sequence
  Description of Artificial Sequence: Synthetic oligonucleotide
  Sense strand starting at position 3298 of SEQ ID NO: 317620
cugauaauuccgugaaucc

SEQ ID NO: 498942 - RNA, 19 nt, Artificial Sequence
  Description of Artificial Sequence: Synthetic oligonucleotide
  Antisense Strand to SEQ ID NO: 498941
ggauucacggaauuaucag

SEQ ID NO: 498943 - RNA, 19 nt, Artificial Sequence
  Description of Artificial Sequence: Synthetic oligonucleotide
  Sense strand starting at position 3299 of SEQ ID NO: 317620
ugauaauuccgugaaucca

SEQ ID NO: 498944 - RNA, 19 nt, Artificial Sequence
  Description of Artificial Sequence: Synthetic oligonucleotide
  Antisense Strand to SEQ ID NO: 498943
uggauucacggaauuauca

SEQ ID NO: 498945 - RNA, 19 nt, Artificial Sequence
  Description of Artificial Sequence: Synthetic oligonucleotide
  Sense strand starting at position 3342 of SEQ ID NO: 317620
cuaggacagcagugagaua

SEQ ID NO: 498946 - RNA, 19 nt, Artificial Sequence
  Description of Artificial Sequence: Synthetic oligonucleotide
  Antisense Strand to SEQ ID NO: 498945
uaucucacugcuguccuag

SEQ ID NO: 498947 - RNA, 19 nt, Artificial Sequence
  Description of Artificial Sequence: Synthetic oligonucleotide
  Sense strand starting at position 3504 of SEQ ID NO: 317620
acacuagucugccugaaau

SEQ ID NO: 498948 - RNA, 19 nt, Artificial Sequence
  Description of Artificial Sequence: Synthetic oligonucleotide
  Antisense Strand to SEQ ID NO: 498947
auuucaggcagacuagugu

SEQ ID NO: 498949 - RNA, 19 nt, Artificial Sequence
  Description of Artificial Sequence: Synthetic oligonucleotide
  Sense strand starting at position 3506 of SEQ ID NO: 317620
acuagucugccugaaauau

SEQ ID NO: 498950 - RNA, 19 nt, Artificial Sequence
  Description of Artificial Sequence: Synthetic oligonucleotide
  Antisense Strand to SEQ ID NO: 498949
auauuucaggcagacuagu

SEQ ID NO: 498951 - RNA, 19 nt, Artificial Sequence
  Description of Artificial Sequence: Synthetic oligonucleotide
  Sense strand starting at position 3532 of SEQ ID NO: 317620
cccugcuaucacugaauga

SEQ ID NO: 498952 - RNA, 19 nt, Artificial Sequence
  Description of Artificial Sequence: Synthetic oligonucleotide
  Antisense Strand to SEQ ID NO: 498951
ucauucagugauagcaggg

SEQ ID NO: 498953 - RNA, 19 nt, Artificial Sequence
  Description of Artificial Sequence: Synthetic oligonucleotide
  Sense strand starting at position 3552 of SEQ ID NO: 317620
gguagaaccucuguucuca

SEQ ID NO: 498954 - RNA, 19 nt, Artificial Sequence
  Description of Artificial Sequence: Synthetic oligonucleotide
  Antisense Strand to SEQ ID NO: 498953
ugagaacagagguucuacc

SEQ ID NO: 498955 - RNA, 19 nt, Artificial Sequence
  Description of Artificial Sequence: Synthetic oligonucleotide
  Sense strand starting at position 323 of SEQ ID NO: 317621
uguugugagccaugaucac

SEQ ID NO: 498956 - RNA, 19 nt, Artificial Sequence
  Description of Artificial Sequence: Synthetic oligonucleotide
  Antisense Strand to SEQ ID NO: 498955
gugaucauggcucacaaca

SEQ ID NO: 498957 - RNA, 19 nt, Artificial Sequence
  Description of Artificial Sequence: Synthetic oligonucleotide
  Sense strand starting at position 422 of SEQ ID NO: 317621
gccauuacaugagcgagaa

SEQ ID NO: 498958 - RNA, 19 nt, Artificial Sequence
  Description of Artificial Sequence: Synthetic oligonucleotide
  Antisense Strand to SEQ ID NO: 498957
uucucgcucauguaauggc

SEQ ID NO: 498959 - RNA, 19 nt, Artificial Sequence
  Description of Artificial Sequence: Synthetic oligonucleotide
  Sense strand starting at position 445 of SEQ ID NO: 317621
acagcuccugaguaaucaa

SEQ ID NO: 498960 - RNA, 19 nt, Artificial Sequence
  Description of Artificial Sequence: Synthetic oligonucleotide
  Antisense Strand to SEQ ID NO: 498959
uugauuacucaggagcugu

SEQ ID NO: 498961 - RNA, 19 nt, Artificial Sequence
  Description of Artificial Sequence: Synthetic oligonucleotide
  Sense strand starting at position 612 of SEQ ID NO: 317621
gguuguuuccuauggcuua

SEQ ID NO: 498962 - RNA, 19 nt, Artificial Sequence
  Description of Artificial Sequence: Synthetic oligonucleotide
  Antisense Strand to SEQ ID NO: 498961
uaagccauaggaaacaacc

SEQ ID NO: 498963 - RNA, 19 nt, Artificial Sequence
  Description of Artificial Sequence: Synthetic oligonucleotide
  Sense strand starting at position 625 of SEQ ID NO: 317621
ggcuuauacucauccgagu

SEQ ID NO: 498964 - RNA, 19 nt, Artificial Sequence
  Description of Artificial Sequence: Synthetic oligonucleotide
  Antisense Strand to SEQ ID NO: 498963
acucggaugaguauaagcc

SEQ ID NO: 498965 - RNA, 19 nt, Artificial Sequence
  Description of Artificial Sequence: Synthetic oligonucleotide
  Sense strand starting at position 715 of SEQ ID NO: 317621
acaccuuuccaucgcaagu

SEQ ID NO: 498966 - RNA, 19 nt, Artificial Sequence
  Description of Artificial Sequence: Synthetic oligonucleotide
  Antisense Strand to SEQ ID NO: 498965
acuugcgauggaaaggugu

SEQ ID NO: 498967 - RNA, 19 nt, Artificial Sequence
  Description of Artificial Sequence: Synthetic oligonucleotide
  Sense strand starting at position 741 of SEQ ID NO: 317621
aggaaacacucauucgcuu

SEQ ID NO: 498968 - RNA, 19 nt, Artificial Sequence
  Description of Artificial Sequence: Synthetic oligonucleotide
  Antisense Strand to SEQ ID NO: 498967
aagcgaaugaguguuuccu

SEQ ID NO: 498969 - RNA, 19 nt, Artificial Sequence
  Description of Artificial Sequence: Synthetic oligonucleotide
  Sense strand starting at position 1035 of SEQ ID NO: 317621
aagaguguagccugacguu

SEQ ID NO: 498970 - RNA, 19 nt, Artificial Sequence
  Description of Artificial Sequence: Synthetic oligonucleotide
  Antisense Strand to SEQ ID NO: 498969
aacgucaggcuacacucuu

SEQ ID NO: 498971 - RNA, 19 nt, Artificial Sequence
  Description of Artificial Sequence: Synthetic oligonucleotide
  Sense strand starting at position 1057 of SEQ ID NO: 317621
aagcaagggcucugaaacu

SEQ ID NO: 498972 - RNA, 19 nt, Artificial Sequence
  Description of Artificial Sequence: Synthetic oligonucleotide
  Antisense Strand to SEQ ID NO: 498971
aguuucagagcccuugcuu

SEQ ID NO: 498973 - RNA, 19 nt, Artificial Sequence
  Description of Artificial Sequence: Synthetic oligonucleotide
  Sense strand starting at position 1077 of SEQ ID NO: 317621
gcagaaccacguuaagaaa

SEQ ID NO: 498974 - RNA, 19 nt, Artificial Sequence
  Description of Artificial Sequence: Synthetic oligonucleotide
  Antisense Strand to SEQ ID NO: 498973
uuucuuaacgugguucugc

SEQ ID NO: 498975 - RNA, 19 nt, Artificial Sequence
  Description of Artificial Sequence: Synthetic oligonucleotide
  Sense strand starting at position 1993 of SEQ ID NO: 317621
cuuagaacacuaugguauu

SEQ ID NO: 498976 - RNA, 19 nt, Artificial Sequence
  Description of Artificial Sequence: Synthetic oligonucleotide
  Antisense Strand to SEQ ID NO: 498975
aauaccauaguguucuaag

SEQ ID NO: 498977 - RNA, 19 nt, Artificial Sequence
  Description of Artificial Sequence: Synthetic oligonucleotide
  Sense strand starting at position 1996 of SEQ ID NO: 317621
agaacacuaugguauuaaa

SEQ ID NO: 498978 - RNA, 19 nt, Artificial Sequence
  Description of Artificial Sequence: Synthetic oligonucleotide
  Antisense Strand to SEQ ID NO: 498977
uuuaauaccauaguguucu

SEQ ID NO: 498979 - RNA, 19 nt, Artificial Sequence
  Description of Artificial Sequence: Synthetic oligonucleotide
  Sense strand starting at position 2106 of SEQ ID NO: 317621
guaagcaauuuaugauguu

SEQ ID NO: 498980 - RNA, 19 nt, Artificial Sequence
  Description of Artificial Sequence: Synthetic oligonucleotide
  Antisense Strand to SEQ ID NO: 498979
aacaucauaaauugcuuac

SEQ ID NO: 498981 - RNA, 19 nt, Artificial Sequence
  Description of Artificial Sequence: Synthetic oligonucleotide
  Sense strand starting at position 2367 of SEQ ID NO: 317621
agcuaauaugugugaggca

SEQ ID NO: 498982 - RNA, 19 nt, Artificial Sequence
  Description of Artificial Sequence: Synthetic oligonucleotide
  Antisense Strand to SEQ ID NO: 498981
ugccucacacauauuagcu

SEQ ID NO: 498983 - RNA, 19 nt, Artificial Sequence
  Description of Artificial Sequence: Synthetic oligonucleotide
  Sense strand starting at position 2389 of SEQ ID NO: 317621
ggcauaaugccaggccuau

SEQ ID NO: 498984 - RNA, 19 nt, Artificial Sequence
  Description of Artificial Sequence: Synthetic oligonucleotide
  Antisense Strand to SEQ ID NO: 498983
auaggccuggcauuaugcc

SEQ ID NO: 498985 - RNA, 19 nt, Artificial Sequence
  Description of Artificial Sequence: Synthetic oligonucleotide
  Sense strand starting at position 2478 of SEQ ID NO: 317621
uccuguuacagcugaggua

SEQ ID NO: 498986 - RNA, 19 nt, Artificial Sequence
  Description of Artificial Sequence: Synthetic oligonucleotide
  Antisense Strand to SEQ ID NO: 498985
uaccucagcuguaacagga

SEQ ID NO: 498987 - RNA, 19 nt, Artificial Sequence
  Description of Artificial Sequence: Synthetic oligonucleotide
  Sense strand starting at position 2479 of SEQ ID NO: 317621
ccuguuacagcugagguau

SEQ ID NO: 498988 - RNA, 19 nt, Artificial Sequence
  Description of Artificial Sequence: Synthetic oligonucleotide
  Antisense Strand to SEQ ID NO: 498987
auaccucagcuguaacagg

SEQ ID NO: 498989 - RNA, 19 nt, Artificial Sequence
  Description of Artificial Sequence: Synthetic oligonucleotide
  Sense strand starting at position 2508 of SEQ ID NO: 317621
cucagaaugugcccaagau

SEQ ID NO: 498990 - RNA, 19 nt, Artificial Sequence
  Description of Artificial Sequence: Synthetic oligonucleotide
  Antisense Strand to SEQ ID NO: 498989
aucuugggcacauucugag

SEQ ID NO: 498991 - RNA, 19 nt, Artificial Sequence
  Description of Artificial Sequence: Synthetic oligonucleotide
  Sense strand starting at position 2509 of SEQ ID NO: 317621
ucagaaugugcccaagaug

SEQ ID NO: 498992 - RNA, 19 nt, Artificial Sequence
  Description of Artificial Sequence: Synthetic oligonucleotide
  Antisense Strand to SEQ ID NO: 498991
caucuugggcacauucuga

SEQ ID NO: 498993 - RNA, 19 nt, Artificial Sequence
  Description of Artificial Sequence: Synthetic oligonucleotide
  Sense strand starting at position 2574 of SEQ ID NO: 317621
ggauuagcuccagguugau

SEQ ID NO: 498994 - RNA, 19 nt, Artificial Sequence
  Description of Artificial Sequence: Synthetic oligonucleotide
  Antisense Strand to SEQ ID NO: 498993
aucaaccuggagcuaaucc

SEQ ID NO: 498995 - RNA, 19 nt, Artificial Sequence
  Description of Artificial Sequence: Synthetic oligonucleotide
  Sense strand starting at position 2614 of SEQ ID NO: 317621
aagagucuccaagggugaa

SEQ ID NO: 498996 - RNA, 19 nt, Artificial Sequence
  Description of Artificial Sequence: Synthetic oligonucleotide
  Antisense Strand to SEQ ID NO: 498995
uucacccuuggagacucuu

SEQ ID NO: 498997 - RNA, 19 nt, Artificial Sequence
  Description of Artificial Sequence: Synthetic oligonucleotide
  Sense strand starting at position 2615 of SEQ ID NO: 317621
agagucuccaagggugaaa

SEQ ID NO: 498998 - RNA, 19 nt, Artificial Sequence
  Description of Artificial Sequence: Synthetic oligonucleotide
  Antisense Strand to SEQ ID NO: 498997
uuucacccuuggagacucu

SEQ ID NO: 498999 - RNA, 19 nt, Artificial Sequence
  Description of Artificial Sequence: Synthetic oligonucleotide
  Sense strand starting at position 2665 of SEQ ID NO: 317621
ccaguauucuuaucucagu

SEQ ID NO: 499000 - RNA, 19 nt, Artificial Sequence
  Description of Artificial Sequence: Synthetic oligonucleotide
  Antisense Strand to SEQ ID NO: 498999
acugagauaagaauacugg

SEQ ID NO: 499001 - RNA, 19 nt, Artificial Sequence
  Description of Artificial Sequence: Synthetic oligonucleotide
  Sense strand starting at position 2859 of SEQ ID NO: 317621
gcaguuuaggaagguaacu

SEQ ID NO: 499002 - RNA, 19 nt, Artificial Sequence
  Description of Artificial Sequence: Synthetic oligonucleotide
  Antisense Strand to SEQ ID NO: 499001
aguuaccuuccuaaacugc

SEQ ID NO: 499003 - RNA, 19 nt, Artificial Sequence
  Description of Artificial Sequence: Synthetic oligonucleotide
  Sense strand starting at position 2898 of SEQ ID NO: 317621
gggucuucccugcaaagcu

SEQ ID NO: 499004 - RNA, 19 nt, Artificial Sequence
  Description of Artificial Sequence: Synthetic oligonucleotide
  Antisense Strand to SEQ ID NO: 499003
agcuuugcagggaagaccc

SEQ ID NO: 499005 - RNA, 19 nt, Artificial Sequence
  Description of Artificial Sequence: Synthetic oligonucleotide
  Sense strand starting at position 2919 of SEQ ID NO: 317621
agucccuaaucugagacau

SEQ ID NO: 499006 - RNA, 19 nt, Artificial Sequence
  Description of Artificial Sequence: Synthetic oligonucleotide
  Antisense Strand to SEQ ID NO: 499005
augucucagauuagggacu

SEQ ID NO: 499007 - RNA, 19 nt, Artificial Sequence
  Description of Artificial Sequence: Synthetic oligonucleotide
  Sense strand starting at position 3007 of SEQ ID NO: 317621
gaaggcaucucucaggagu

SEQ ID NO: 499008 - RNA, 19 nt, Artificial Sequence
  Description of Artificial Sequence: Synthetic oligonucleotide
  Antisense Strand to SEQ ID NO: 499007
acuccugagagaugccuuc

SEQ ID NO: 499009 - RNA, 19 nt, Artificial Sequence
  Description of Artificial Sequence: Synthetic oligonucleotide
  Sense strand starting at position 3010 of SEQ ID NO: 317621
ggcaucucucaggaguaca

SEQ ID NO: 499010 - RNA, 19 nt, Artificial Sequence
  Description of Artificial Sequence: Synthetic oligonucleotide
  Antisense Strand to SEQ ID NO: 499009
uguacuccugagagaugcc

SEQ ID NO: 499011 - RNA, 19 nt, Artificial Sequence
  Description of Artificial Sequence: Synthetic oligonucleotide
  Sense strand starting at position 3062 of SEQ ID NO: 317621
gccagaaaucaauagcauc

SEQ ID NO: 499012 - RNA, 19 nt, Artificial Sequence
  Description of Artificial Sequence: Synthetic oligonucleotide
  Antisense Strand to SEQ ID NO: 499011
gaugcuauugauuucuggc

SEQ ID NO: 499013 - RNA, 19 nt, Artificial Sequence
  Description of Artificial Sequence: Synthetic oligonucleotide
  Sense strand starting at position 3065 of SEQ ID NO: 317621
agaaaucaauagcaucaga

SEQ ID NO: 499014 - RNA, 19 nt, Artificial Sequence
  Description of Artificial Sequence: Synthetic oligonucleotide
  Antisense Strand to SEQ ID NO: 499013
ucugaugcuauugauuucu

SEQ ID NO: 499015 - RNA, 19 nt, Artificial Sequence
  Description of Artificial Sequence: Synthetic oligonucleotide
  Sense strand starting at position 3114 of SEQ ID NO: 317621
cagagaugcccguggacua

SEQ ID NO: 499016 - RNA, 19 nt, Artificial Sequence
  Description of Artificial Sequence: Synthetic oligonucleotide
  Antisense Strand to SEQ ID NO: 499015
uaguccacgggcaucucug

SEQ ID NO: 499017 - RNA, 19 nt, Artificial Sequence
  Description of Artificial Sequence: Synthetic oligonucleotide
  Sense strand starting at position 3477 of SEQ ID NO: 317621
ucaugugcucuggacaacu

SEQ ID NO: 499018 - RNA, 19 nt, Artificial Sequence
  Description of Artificial Sequence: Synthetic oligonucleotide
  Antisense Strand to SEQ ID NO: 499017
aguuguccagagcacauga

SEQ ID NO: 499019 - RNA, 19 nt, Artificial Sequence
  Description of Artificial Sequence: Synthetic oligonucleotide
  Sense strand starting at position 3513 of SEQ ID NO: 317621
auacaaauguguucugucu

SEQ ID NO: 499020 - RNA, 19 nt, Artificial Sequence
  Description of Artificial Sequence: Synthetic oligonucleotide
  Antisense Strand to SEQ ID NO: 499019
agacagaacacauuuguau

SEQ ID NO: 499021 - RNA, 19 nt, Artificial Sequence
  Description of Artificial Sequence: Synthetic oligonucleotide
  Sense strand starting at position 3526 of SEQ ID NO: 317621
cugucugacccgcacaauu

SEQ ID NO: 499022 - RNA, 19 nt, Artificial Sequence
  Description of Artificial Sequence: Synthetic oligonucleotide
  Antisense Strand to SEQ ID NO: 499021
aauugugcgggucagacag

SEQ ID NO: 499023 - RNA, 19 nt, Artificial Sequence
  Description of Artificial Sequence: Synthetic oligonucleotide
  Sense strand starting at position 3690 of SEQ ID NO: 317621
ggaaccaacuguugaaaga

SEQ ID NO: 499024 - RNA, 19 nt, Artificial Sequence
  Description of Artificial Sequence: Synthetic oligonucleotide
  Antisense Strand to SEQ ID NO: 499023
ucuuucaacaguugguucc

SEQ ID NO: 499025 - RNA, 19 nt, Artificial Sequence
  Description of Artificial Sequence: Synthetic oligonucleotide
  Sense strand starting at position 3751 of SEQ ID NO: 317621
ugaggagaguuugaagcaa

SEQ ID NO: 499026 - RNA, 19 nt, Artificial Sequence
  Description of Artificial Sequence: Synthetic oligonucleotide
  Antisense Strand to SEQ ID NO: 499025
uugcuucaaacucuccuca

SEQ ID NO: 499027 - RNA, 19 nt, Artificial Sequence
  Description of Artificial Sequence: Synthetic oligonucleotide
  Sense strand starting at position 3850 of SEQ ID NO: 317621
gcccaaauuccaggcugau

SEQ ID NO: 499028 - RNA, 19 nt, Artificial Sequence
  Description of Artificial Sequence: Synthetic oligonucleotide
  Antisense Strand to SEQ ID NO: 499027
aucagccuggaauuugggc

SEQ ID NO: 499029 - RNA, 19 nt, Artificial Sequence
  Description of Artificial Sequence: Synthetic oligonucleotide
  Sense strand starting at position 3873 of SEQ ID NO: 317621
agcagccuaguuuaugaaa

SEQ ID NO: 499030 - RNA, 19 nt, Artificial Sequence
  Description of Artificial Sequence: Synthetic oligonucleotide
  Antisense Strand to SEQ ID NO: 499029
uuucauaaacuaggcugcu

SEQ ID NO: 499031 - RNA, 19 nt, Artificial Sequence
  Description of Artificial Sequence: Synthetic oligonucleotide
  Sense strand starting at position 3876 of SEQ ID NO: 317621
agccuaguuuaugaaauaa

SEQ ID NO: 499032 - RNA, 19 nt, Artificial Sequence
  Description of Artificial Sequence: Synthetic oligonucleotide
  Antisense Strand to SEQ ID NO: 499031
uuauuucauaaacuaggcu

SEQ ID NO: 499033 - RNA, 19 nt, Artificial Sequence
  Description of Artificial Sequence: Synthetic oligonucleotide
  Sense strand starting at position 3901 of SEQ ID NO: 317621
agagauuccagcugcugga

SEQ ID NO: 499034 - RNA, 19 nt, Artificial Sequence
  Description of Artificial Sequence: Synthetic oligonucleotide
  Antisense Strand to SEQ ID NO: 499033
uccagcagcuggaaucucu

SEQ ID NO: 499035 - RNA, 19 nt, Artificial Sequence
  Description of Artificial Sequence: Synthetic oligonucleotide
  Sense strand starting at position 55 of SEQ ID NO: 317622
uuguaauccuuuccgguaa

SEQ ID NO: 499036 - RNA, 19 nt, Artificial Sequence
  Description of Artificial Sequence: Synthetic oligonucleotide
  Antisense Strand to SEQ ID NO: 499035
uuaccggaaaggauuacaa

SEQ ID NO: 499037 - RNA, 19 nt, Artificial Sequence
  Description of Artificial Sequence: Synthetic oligonucleotide
  Sense strand starting at position 82 of SEQ ID NO: 317622
gagauaauauaguaaagca

SEQ ID NO: 499038 - RNA, 19 nt, Artificial Sequence
  Description of Artificial Sequence: Synthetic oligonucleotide
  Antisense Strand to SEQ ID NO: 499037
ugcuuuacuauauuaucuc

SEQ ID NO: 499039 - RNA, 19 nt, Artificial Sequence
  Description of Artificial Sequence: Synthetic oligonucleotide
  Sense strand starting at position 217 of SEQ ID NO: 317622
gucaaauauuuauacaggu

SEQ ID NO: 499040 - RNA, 19 nt, Artificial Sequence
  Description of Artificial Sequence: Synthetic oligonucleotide
  Antisense Strand to SEQ ID NO: 499039
accuguauaaauauuugac

SEQ ID NO: 499041 - RNA, 19 nt, Artificial Sequence
  Description of Artificial Sequence: Synthetic oligonucleotide
  Sense strand starting at position 278 of SEQ ID NO: 317622
uuuacuaucuguuaaguag

SEQ ID NO: 499042 - RNA, 19 nt, Artificial Sequence
  Description of Artificial Sequence: Synthetic oligonucleotide
  Antisense Strand to SEQ ID NO: 499041
cuacuuaacagauaguaaa

SEQ ID NO: 499043 - RNA, 19 nt, Artificial Sequence
  Description of Artificial Sequence: Synthetic oligonucleotide
  Sense strand starting at position 303 of SEQ ID NO: 317622
agugcaauagcauaaguca

SEQ ID NO: 499044 - RNA, 19 nt, Artificial Sequence
  Description of Artificial Sequence: Synthetic oligonucleotide
  Antisense Strand to SEQ ID NO: 499043
ugacuuaugcuauugcacu

SEQ ID NO: 499045 - RNA, 19 nt, Artificial Sequence
  Description of Artificial Sequence: Synthetic oligonucleotide
  Sense strand starting at position 306 of SEQ ID NO: 317622
gcaauagcauaagucaaau

SEQ ID NO: 499046 - RNA, 19 nt, Artificial Sequence
  Description of Artificial Sequence: Synthetic oligonucleotide
  Antisense Strand to SEQ ID NO: 499045
auuugacuuaugcuauugc

SEQ ID NO: 499047 - RNA, 19 nt, Artificial Sequence
  Description of Artificial Sequence: Synthetic oligonucleotide
  Sense strand starting at position 328 of SEQ ID NO: 317622
uggcuuggagcgugaaguu

SEQ ID NO: 499048 - RNA, 19 nt, Artificial Sequence
  Description of Artificial Sequence: Synthetic oligonucleotide
  Antisense Strand to SEQ ID NO: 499047
aacuucacgcuccaagcca

SEQ ID NO: 499049 - RNA, 19 nt, Artificial Sequence
  Description of Artificial Sequence: Synthetic oligonucleotide
  Sense strand starting at position 329 of SEQ ID NO: 317622
ggcuuggagcgugaaguuu

SEQ ID NO: 499050 - RNA, 19 nt, Artificial Sequence
  Description of Artificial Sequence: Synthetic oligonucleotide
  Antisense Strand to SEQ ID NO: 499049
aaacuucacgcuccaagcc

SEQ ID NO: 499051 - RNA, 19 nt, Artificial Sequence
  Description of Artificial Sequence: Synthetic oligonucleotide
  Sense strand starting at position 335 of SEQ ID NO: 317622
gagcgugaaguuuaugaca

SEQ ID NO: 499052 - RNA, 19 nt, Artificial Sequence
  Description of Artificial Sequence: Synthetic oligonucleotide
  Antisense Strand to SEQ ID NO: 499051
ugucauaaacuucacgcuc

SEQ ID NO: 499053 - RNA, 19 nt, Artificial Sequence
  Description of Artificial Sequence: Synthetic oligonucleotide
  Sense strand starting at position 338 of SEQ ID NO: 317622
cgugaaguuuaugacaaca

SEQ ID NO: 499054 - RNA, 19 nt, Artificial Sequence
  Description of Artificial Sequence: Synthetic oligonucleotide
  Antisense Strand to SEQ ID NO: 499053
uguugucauaaacuucacg

SEQ ID NO: 499055 - RNA, 19 nt, Artificial Sequence
  Description of Artificial Sequence: Synthetic oligonucleotide
  Sense strand starting at position 340 of SEQ ID NO: 317622
ugaaguuuaugacaacaac

SEQ ID NO: 499056 - RNA, 19 nt, Artificial Sequence
  Description of Artificial Sequence: Synthetic oligonucleotide
  Antisense Strand to SEQ ID NO: 499055
guuguugucauaaacuuca

SEQ ID NO: 499057 - RNA, 19 nt, Artificial Sequence
  Description of Artificial Sequence: Synthetic oligonucleotide
  Sense strand starting at position 513 of SEQ ID NO: 317622
gaacaaggauuguuccaua

SEQ ID NO: 499058 - RNA, 19 nt, Artificial Sequence
  Description of Artificial Sequence: Synthetic oligonucleotide
  Antisense Strand to SEQ ID NO: 499057
uauggaacaauccuuguuc

SEQ ID NO: 499059 - RNA, 19 nt, Artificial Sequence
  Description of Artificial Sequence: Synthetic oligonucleotide
  Sense strand starting at position 747 of SEQ ID NO: 317622
aguccaaaugucgaaguua

SEQ ID NO: 499060 - RNA, 19 nt, Artificial Sequence
  Description of Artificial Sequence: Synthetic oligonucleotide
  Antisense Strand to SEQ ID NO: 499059
uaacuucgacauuuggacu

SEQ ID NO: 499061 - RNA, 19 nt, Artificial Sequence
  Description of Artificial Sequence: Synthetic oligonucleotide
  Sense strand starting at position 759 of SEQ ID NO: 317622
gaaguuaucccugguggca

SEQ ID NO: 499062 - RNA, 19 nt, Artificial Sequence
  Description of Artificial Sequence: Synthetic oligonucleotide
  Antisense Strand to SEQ ID NO: 499061
ugccaccagggauaacuuc

SEQ ID NO: 499063 - RNA, 19 nt, Artificial Sequence
  Description of Artificial Sequence: Synthetic oligonucleotide
  Sense strand starting at position 771 of SEQ ID NO: 317622
gguggcacguuauuuaaau

SEQ ID NO: 499064 - RNA, 19 nt, Artificial Sequence
  Description of Artificial Sequence: Synthetic oligonucleotide
  Antisense Strand to SEQ ID NO: 499063
auuuaaauaacgugccacc

SEQ ID NO: 499065 - RNA, 19 nt, Artificial Sequence
  Description of Artificial Sequence: Synthetic oligonucleotide
  Sense strand starting at position 772 of SEQ ID NO: 317622
guggcacguuauuuaaauu

SEQ ID NO: 499066 - RNA, 19 nt, Artificial Sequence
  Description of Artificial Sequence: Synthetic oligonucleotide
  Antisense Strand to SEQ ID NO: 499065
aauuuaaauaacgugccac

SEQ ID NO: 499067 - RNA, 19 nt, Artificial Sequence
  Description of Artificial Sequence: Synthetic oligonucleotide
  Sense strand starting at position 905 of SEQ ID NO: 317622
agaaacauuugugaaccuu

SEQ ID NO: 499068 - RNA, 19 nt, Artificial Sequence
  Description of Artificial Sequence: Synthetic oligonucleotide
  Antisense Strand to SEQ ID NO: 499067
aagguucacaaauguuucu

SEQ ID NO: 499069 - RNA, 19 nt, Artificial Sequence
  Description of Artificial Sequence: Synthetic oligonucleotide
  Sense strand starting at position 1031 of SEQ ID NO: 317622
caauaugccuguucccgau

SEQ ID NO: 499070 - RNA, 19 nt, Artificial Sequence
  Description of Artificial Sequence: Synthetic oligonucleotide
  Antisense Strand to SEQ ID NO: 499069
aucgggaacaggcauauug

SEQ ID NO: 499071 - RNA, 19 nt, Artificial Sequence
  Description of Artificial Sequence: Synthetic oligonucleotide
  Sense strand starting at position 2207 of SEQ ID NO: 317622
cccucauuugcaugcgauu

SEQ ID NO: 499072 - RNA, 19 nt, Artificial Sequence
  Description of Artificial Sequence: Synthetic oligonucleotide
  Antisense Strand to SEQ ID NO: 499071
aaucgcaugcaaaugaggg

SEQ ID NO: 499073 - RNA, 19 nt, Artificial Sequence
  Description of Artificial Sequence: Synthetic oligonucleotide
  Sense strand starting at position 2266 of SEQ ID NO: 317622
cgccgcauuccugagcuua

SEQ ID NO: 499074 - RNA, 19 nt, Artificial Sequence
  Description of Artificial Sequence: Synthetic oligonucleotide
  Antisense Strand to SEQ ID NO: 499073
uaagcucaggaaugcggcg

SEQ ID NO: 499075 - RNA, 19 nt, Artificial Sequence
  Description of Artificial Sequence: Synthetic oligonucleotide
  Sense strand starting at position 2268 of SEQ ID NO: 317622
ccgcauuccugagcuuaac

SEQ ID NO: 499076 - RNA, 19 nt, Artificial Sequence
  Description of Artificial Sequence: Synthetic oligonucleotide
  Antisense Strand to SEQ ID NO: 499075
guuaagcucaggaaugcgg

SEQ ID NO: 499077 - RNA, 19 nt, Artificial Sequence
  Description of Artificial Sequence: Synthetic oligonucleotide
  Sense strand starting at position 2417 of SEQ ID NO: 317622
ggccaaacgccgagagguu

SEQ ID NO: 499078 - RNA, 19 nt, Artificial Sequence
  Description of Artificial Sequence: Synthetic oligonucleotide
  Antisense Strand to SEQ ID NO: 499077
aaccucucggcguuuggcc

SEQ ID NO: 499079 - RNA, 19 nt, Artificial Sequence
  Description of Artificial Sequence: Synthetic oligonucleotide
  Sense strand starting at position 2488 of SEQ ID NO: 317622
ucuuucgucuucuagggaa

SEQ ID NO: 499080 - RNA, 19 nt, Artificial Sequence
  Description of Artificial Sequence: Synthetic oligonucleotide
  Antisense Strand to SEQ ID NO: 499079
uucccuagaagacgaaaga

SEQ ID NO: 499081 - RNA, 19 nt, Artificial Sequence
  Description of Artificial Sequence: Synthetic oligonucleotide
  Sense strand starting at position 2490 of SEQ ID NO: 317622
uuucgucuucuagggaaac

SEQ ID NO: 499082 - RNA, 19 nt, Artificial Sequence
  Description of Artificial Sequence: Synthetic oligonucleotide
  Antisense Strand to SEQ ID NO: 499081
guuucccuagaagacgaaa

SEQ ID NO: 499083 - RNA, 19 nt, Artificial Sequence
  Description of Artificial Sequence: Synthetic oligonucleotide
  Sense strand starting at position 2492 of SEQ ID NO: 317622
ucgucuucuagggaaacca

SEQ ID NO: 499084 - RNA, 19 nt, Artificial Sequence
  Description of Artificial Sequence: Synthetic oligonucleotide
  Antisense Strand to SEQ ID NO: 499083
ugguuucccuagaagacga

SEQ ID NO: 499085 - RNA, 19 nt, Artificial Sequence
  Description of Artificial Sequence: Synthetic oligonucleotide
  Sense strand starting at position 2544 of SEQ ID NO: 317622
ggagcucuccuccggagaa

SEQ ID NO: 499086 - RNA, 19 nt, Artificial Sequence
  Description of Artificial Sequence: Synthetic oligonucleotide
  Antisense Strand to SEQ ID NO: 499085
uucuccggaggagagcucc

SEQ ID NO: 499087 - RNA, 19 nt, Artificial Sequence
  Description of Artificial Sequence: Synthetic oligonucleotide
  Sense strand starting at position 3370 of SEQ ID NO: 317622
cguggugugaagucguuua

SEQ ID NO: 499088 - RNA, 19 nt, Artificial Sequence
  Description of Artificial Sequence: Synthetic oligonucleotide
  Antisense Strand to SEQ ID NO: 499087
uaaacgacuucacaccacg

SEQ ID NO: 499089 - RNA, 19 nt, Artificial Sequence
  Description of Artificial Sequence: Synthetic oligonucleotide
  Sense strand starting at position 3375 of SEQ ID NO: 317622
ugugaagucguuuaauccu

SEQ ID NO: 499090 - RNA, 19 nt, Artificial Sequence
  Description of Artificial Sequence: Synthetic oligonucleotide
  Antisense Strand to SEQ ID NO: 499089
aggauuaaacgacuucaca

SEQ ID NO: 499091 - RNA, 19 nt, Artificial Sequence
  Description of Artificial Sequence: Synthetic oligonucleotide
  Sense strand starting at position 3383 of SEQ ID NO: 317622
cguuuaauccugcccgcua

SEQ ID NO: 499092 - RNA, 19 nt, Artificial Sequence
  Description of Artificial Sequence: Synthetic oligonucleotide
  Antisense Strand to SEQ ID NO: 499091
uagcgggcaggauuaaacg

SEQ ID NO: 499093 - RNA, 19 nt, Artificial Sequence
  Description of Artificial Sequence: Synthetic oligonucleotide
  Sense strand starting at position 3384 of SEQ ID NO: 317622
guuuaauccugcccgcuaa

SEQ ID NO: 499094 - RNA, 19 nt, Artificial Sequence
  Description of Artificial Sequence: Synthetic oligonucleotide
  Antisense Strand to SEQ ID NO: 499093
uuagcgggcaggauuaaac

SEQ ID NO: 499095 - RNA, 19 nt, Artificial Sequence
  Description of Artificial Sequence: Synthetic oligonucleotide
  Sense strand starting at position 3385 of SEQ ID NO: 317622
uuuaauccugcccgcuaau

SEQ ID NO: 499096 - RNA, 19 nt, Artificial Sequence
  Description of Artificial Sequence: Synthetic oligonucleotide
  Antisense Strand to SEQ ID NO: 499095
auuagcgggcaggauuaaa

SEQ ID NO: 499097 - RNA, 19 nt, Artificial Sequence
  Description of Artificial Sequence: Synthetic oligonucleotide
  Sense strand starting at position 3503 of SEQ ID NO: 317622
gaggaagucgcgugaagga

SEQ ID NO: 499098 - RNA, 19 nt, Artificial Sequence
  Description of Artificial Sequence: Synthetic oligonucleotide
  Antisense Strand to SEQ ID NO: 499097
uccuucacgcgacuuccuc

SEQ ID NO: 499099 - RNA, 19 nt, Artificial Sequence
  Description of Artificial Sequence: Synthetic oligonucleotide
  Sense strand starting at position 3516 of SEQ ID NO: 317622
gaaggagauucgcuacugu

SEQ ID NO: 499100 - RNA, 19 nt, Artificial Sequence
  Description of Artificial Sequence: Synthetic oligonucleotide
  Antisense Strand to SEQ ID NO: 499099
acaguagcgaaucuccuuc

SEQ ID NO: 499101 - RNA, 19 nt, Artificial Sequence
  Description of Artificial Sequence: Synthetic oligonucleotide
  Sense strand starting at position 3694 of SEQ ID NO: 317622
ggucguguuugcccuuaga

SEQ ID NO: 499102 - RNA, 19 nt, Artificial Sequence
  Description of Artificial Sequence: Synthetic oligonucleotide
  Antisense Strand to SEQ ID NO: 499101
ucuaagggcaaacacgacc

SEQ ID NO: 499103 - RNA, 19 nt, Artificial Sequence
  Description of Artificial Sequence: Synthetic oligonucleotide
  Sense strand starting at position 3697 of SEQ ID NO: 317622
cguguuugcccuuagagca

SEQ ID NO: 499104 - RNA, 19 nt, Artificial Sequence
  Description of Artificial Sequence: Synthetic oligonucleotide
  Antisense Strand to SEQ ID NO: 499103
ugcucuaagggcaaacacg

SEQ ID NO: 499105 - RNA, 19 nt, Artificial Sequence
  Description of Artificial Sequence: Synthetic oligonucleotide
  Sense strand starting at position 3710 of SEQ ID NO: 317622
agagcagucugggcgugaa

SEQ ID NO: 499106 - RNA, 19 nt, Artificial Sequence
  Description of Artificial Sequence: Synthetic oligonucleotide
  Antisense Strand to SEQ ID NO: 499105
uucacgcccagacugcucu

SEQ ID NO: 499107 - RNA, 19 nt, Artificial Sequence
  Description of Artificial Sequence: Synthetic oligonucleotide
  Sense strand starting at position 3870 of SEQ ID NO: 317622
gccagccuucuggaaggua

SEQ ID NO: 499108 - RNA, 19 nt, Artificial Sequence
  Description of Artificial Sequence: Synthetic oligonucleotide
  Antisense Strand to SEQ ID NO: 499107
uaccuuccagaaggcuggc

SEQ ID NO: 499109 - RNA, 19 nt, Artificial Sequence
  Description of Artificial Sequence: Synthetic oligonucleotide
  Sense strand starting at position 3888 of SEQ ID NO: 317622
aggcuuugcgcuuggugaa

SEQ ID NO: 499110 - RNA, 19 nt, Artificial Sequence
  Description of Artificial Sequence: Synthetic oligonucleotide
  Antisense Strand to SEQ ID NO: 499109
uucaccaagcgcaaagccu

SEQ ID NO: 499111 - RNA, 19 nt, Artificial Sequence
  Description of Artificial Sequence: Synthetic oligonucleotide
  Sense strand starting at position 3979 of SEQ ID NO: 317622
ucucuaguucccgguggaa

SEQ ID NO: 499112 - RNA, 19 nt, Artificial Sequence
  Description of Artificial Sequence: Synthetic oligonucleotide
  Antisense Strand to SEQ ID NO: 499111
uuccaccgggaacuagaga

SEQ ID NO: 499113 - RNA, 19 nt, Artificial Sequence
  Description of Artificial Sequence: Synthetic oligonucleotide
  Sense strand starting at position 3981 of SEQ ID NO: 317622
ucuaguucccgguggaaug

SEQ ID NO: 499114 - RNA, 19 nt, Artificial Sequence
  Description of Artificial Sequence: Synthetic oligonucleotide
  Antisense Strand to SEQ ID NO: 499113
cauuccaccgggaacuaga

SEQ ID NO: 499115 - RNA, 19 nt, Artificial Sequence
  Description of Artificial Sequence: Synthetic oligonucleotide
  Sense strand starting at position 153 of SEQ ID NO: 317623
guuacuuaaguauacugua

SEQ ID NO: 499116 - RNA, 19 nt, Artificial Sequence
  Description of Artificial Sequence: Synthetic oligonucleotide
  Antisense Strand to SEQ ID NO: 499115
uacaguauacuuaaguaac

SEQ ID NO: 499117 - RNA, 19 nt, Artificial Sequence
  Description of Artificial Sequence: Synthetic oligonucleotide
  Sense strand starting at position 211 of SEQ ID NO: 317623
ucuaguuuagagggcaaga

SEQ ID NO: 499118 - RNA, 19 nt, Artificial Sequence
  Description of Artificial Sequence: Synthetic oligonucleotide
  Antisense Strand to SEQ ID NO: 499117
ucuugcccucuaaacuaga

SEQ ID NO: 499119 - RNA, 19 nt, Artificial Sequence
  Description of Artificial Sequence: Synthetic oligonucleotide
  Sense strand starting at position 277 of SEQ ID NO: 317623
uuacaauaugugggugaca

SEQ ID NO: 499120 - RNA, 19 nt, Artificial Sequence
  Description of Artificial Sequence: Synthetic oligonucleotide
  Antisense Strand to SEQ ID NO: 499119
ugucacccacauauuguaa

SEQ ID NO: 499121 - RNA, 19 nt, Artificial Sequence
  Description of Artificial Sequence: Synthetic oligonucleotide
  Sense strand starting at position 279 of SEQ ID NO: 317623
acaauaugugggugacaga

SEQ ID NO: 499122 - RNA, 19 nt, Artificial Sequence
  Description of Artificial Sequence: Synthetic oligonucleotide
  Antisense Strand to SEQ ID NO: 499121
ucugucacccacauauugu

SEQ ID NO: 499123 - RNA, 19 nt, Artificial Sequence
  Description of Artificial Sequence: Synthetic oligonucleotide
  Sense strand starting at position 335 of SEQ ID NO: 317623
aguacuuacuuucuagauc

SEQ ID NO: 499124 - RNA, 19 nt, Artificial Sequence
  Description of Artificial Sequence: Synthetic oligonucleotide
  Antisense Strand to SEQ ID NO: 499123
gaucuagaaaguaaguacu

SEQ ID NO: 499125 - RNA, 19 nt, Artificial Sequence
  Description of Artificial Sequence: Synthetic oligonucleotide
  Sense strand starting at position 396 of SEQ ID NO: 317623
ccugguuaucaauaguaaa

SEQ ID NO: 499126 - RNA, 19 nt, Artificial Sequence
  Description of Artificial Sequence: Synthetic oligonucleotide
  Antisense Strand to SEQ ID NO: 499125
uuuacuauugauaaccagg

SEQ ID NO: 499127 - RNA, 19 nt, Artificial Sequence
  Description of Artificial Sequence: Synthetic oligonucleotide
  Sense strand starting at position 536 of SEQ ID NO: 317623
ugacaaugugauuauggcu

SEQ ID NO: 499128 - RNA, 19 nt, Artificial Sequence
  Description of Artificial Sequence: Synthetic oligonucleotide
  Antisense Strand to SEQ ID NO: 499127
agccauaaucacauuguca

SEQ ID NO: 499129 - RNA, 19 nt, Artificial Sequence
  Description of Artificial Sequence: Synthetic oligonucleotide
  Sense strand starting at position 572 of SEQ ID NO: 317623
aaagauguccuuugaaugg

SEQ ID NO: 499130 - RNA, 19 nt, Artificial Sequence
  Description of Artificial Sequence: Synthetic oligonucleotide
  Antisense Strand to SEQ ID NO: 499129
ccauucaaaggacaucuuu

SEQ ID NO: 499131 - RNA, 19 nt, Artificial Sequence
  Description of Artificial Sequence: Synthetic oligonucleotide
  Sense strand starting at position 633 of SEQ ID NO: 317623
gaaaguuauuuacagaaug

SEQ ID NO: 499132 - RNA, 19 nt, Artificial Sequence
  Description of Artificial Sequence: Synthetic oligonucleotide
  Antisense Strand to SEQ ID NO: 499131
cauucuguaaauaacuuuc

SEQ ID NO: 499133 - RNA, 19 nt, Artificial Sequence
  Description of Artificial Sequence: Synthetic oligonucleotide
  Sense strand starting at position 901 of SEQ ID NO: 317623
ggauuauuaucugcaaaug

SEQ ID NO: 499134 - RNA, 19 nt, Artificial Sequence
  Description of Artificial Sequence: Synthetic oligonucleotide
  Antisense Strand to SEQ ID NO: 499133
cauuugcagauaauaaucc

SEQ ID NO: 499135 - RNA, 19 nt, Artificial Sequence
  Description of Artificial Sequence: Synthetic oligonucleotide
  Sense strand starting at position 1092 of SEQ ID NO: 317623
aagggaagucuuuguucua

SEQ ID NO: 499136 - RNA, 19 nt, Artificial Sequence
  Description of Artificial Sequence: Synthetic oligonucleotide
  Antisense Strand to SEQ ID NO: 499135
uagaacaaagacuucccuu

SEQ ID NO: 499137 - RNA, 19 nt, Artificial Sequence
  Description of Artificial Sequence: Synthetic oligonucleotide
  Sense strand starting at position 1308 of SEQ ID NO: 317623
acuggacaaaugugguuau

SEQ ID NO: 499138 - RNA, 19 nt, Artificial Sequence
  Description of Artificial Sequence: Synthetic oligonucleotide
  Antisense Strand to SEQ ID NO: 499137
auaaccacauuuguccagu

SEQ ID NO: 499139 - RNA, 19 nt, Artificial Sequence
  Description of Artificial Sequence: Synthetic oligonucleotide
  Sense strand starting at position 1400 of SEQ ID NO: 317623
aggaguaauccauaugcuu

SEQ ID NO: 499140 - RNA, 19 nt, Artificial Sequence
  Description of Artificial Sequence: Synthetic oligonucleotide
  Antisense Strand to SEQ ID NO: 499139
aagcauauggauuacuccu

SEQ ID NO: 499141 - RNA, 19 nt, Artificial Sequence
  Description of Artificial Sequence: Synthetic oligonucleotide
  Sense strand starting at position 1854 of SEQ ID NO: 317623
auaaccgagcuuuguauuu

SEQ ID NO: 499142 - RNA, 19 nt, Artificial Sequence
  Description of Artificial Sequence: Synthetic oligonucleotide
  Antisense Strand to SEQ ID NO: 499141
aaauacaaagcucgguuau

SEQ ID NO: 499143 - RNA, 19 nt, Artificial Sequence
  Description of Artificial Sequence: Synthetic oligonucleotide
  Sense strand starting at position 1995 of SEQ ID NO: 317623
ugacaugcuggcuauauau

SEQ ID NO: 499144 - RNA, 19 nt, Artificial Sequence
  Description of Artificial Sequence: Synthetic oligonucleotide
  Antisense Strand to SEQ ID NO: 499143
auauauagccagcauguca

SEQ ID NO: 499145 - RNA, 19 nt, Artificial Sequence
  Description of Artificial Sequence: Synthetic oligonucleotide
  Sense strand starting at position 2206 of SEQ ID NO: 317623
ucuauuaaacucugaggua

SEQ ID NO: 499146 - RNA, 19 nt, Artificial Sequence
  Description of Artificial Sequence: Synthetic oligonucleotide
  Antisense Strand to SEQ ID NO: 499145
uaccucagaguuuaauaga

SEQ ID NO: 499147 - RNA, 19 nt, Artificial Sequence
  Description of Artificial Sequence: Synthetic oligonucleotide
  Sense strand starting at position 2286 of SEQ ID NO: 317623
uggauuuccuaauaauaug

SEQ ID NO: 499148 - RNA, 19 nt, Artificial Sequence
  Description of Artificial Sequence: Synthetic oligonucleotide
  Antisense Strand to SEQ ID NO: 499147
cauauuauuaggaaaucca

SEQ ID NO: 499149 - RNA, 19 nt, Artificial Sequence
  Description of Artificial Sequence: Synthetic oligonucleotide
  Sense strand starting at position 2326 of SEQ ID NO: 317623
acaugaucuuauguagaag

SEQ ID NO: 499150 - RNA, 19 nt, Artificial Sequence
  Description of Artificial Sequence: Synthetic oligonucleotide
  Antisense Strand to SEQ ID NO: 499149
cuucuacauaagaucaugu

SEQ ID NO: 499151 - RNA, 19 nt, Artificial Sequence
  Description of Artificial Sequence: Synthetic oligonucleotide
  Sense strand starting at position 2413 of SEQ ID NO: 317623
agcaauauuuaagaagacu

SEQ ID NO: 499152 - RNA, 19 nt, Artificial Sequence
  Description of Artificial Sequence: Synthetic oligonucleotide
  Antisense Strand to SEQ ID NO: 499151
agucuucuuaaauauugcu

SEQ ID NO: 499153 - RNA, 19 nt, Artificial Sequence
  Description of Artificial Sequence: Synthetic oligonucleotide
  Sense strand starting at position 2482 of SEQ ID NO: 317623
ggccaagauggauaugcua

SEQ ID NO: 499154 - RNA, 19 nt, Artificial Sequence
  Description of Artificial Sequence: Synthetic oligonucleotide
  Antisense Strand to SEQ ID NO: 499153
uagcauauccaucuuggcc

SEQ ID NO: 499155 - RNA, 19 nt, Artificial Sequence
  Description of Artificial Sequence: Synthetic oligonucleotide
  Sense strand starting at position 2520 of SEQ ID NO: 317623
accugauggacagguucua

SEQ ID NO: 499156 - RNA, 19 nt, Artificial Sequence
  Description of Artificial Sequence: Synthetic oligonucleotide
  Antisense Strand to SEQ ID NO: 499155
uagaaccuguccaucaggu

SEQ ID NO: 499157 - RNA, 19 nt, Artificial Sequence
  Description of Artificial Sequence: Synthetic oligonucleotide
  Sense strand starting at position 2533 of SEQ ID NO: 317623
guucuauaccauuaucgag

SEQ ID NO: 499158 - RNA, 19 nt, Artificial Sequence
  Description of Artificial Sequence: Synthetic oligonucleotide
  Antisense Strand to SEQ ID NO: 499157
cucgauaaugguauagaac

SEQ ID NO: 499159 - RNA, 19 nt, Artificial Sequence
  Description of Artificial Sequence: Synthetic oligonucleotide
  Sense strand starting at position 2592 of SEQ ID NO: 317623
ucaggaagcucccugaauu

SEQ ID NO: 499160 - RNA, 19 nt, Artificial Sequence
  Description of Artificial Sequence: Synthetic oligonucleotide
  Antisense Strand to SEQ ID NO: 499159
aauucagggagcuuccuga

SEQ ID NO: 499161 - RNA, 19 nt, Artificial Sequence
  Description of Artificial Sequence: Synthetic oligonucleotide
  Sense strand starting at position 2593 of SEQ ID NO: 317623
caggaagcucccugaauug

SEQ ID NO: 499162 - RNA, 19 nt, Artificial Sequence
  Description of Artificial Sequence: Synthetic oligonucleotide
  Antisense Strand to SEQ ID NO: 499161
caauucagggagcuuccug

SEQ ID NO: 499163 - RNA, 19 nt, Artificial Sequence
  Description of Artificial Sequence: Synthetic oligonucleotide
  Sense strand starting at position 2654 of SEQ ID NO: 317623
cugguucugacccagguaa

SEQ ID NO: 499164 - RNA, 19 nt, Artificial Sequence
  Description of Artificial Sequence: Synthetic oligonucleotide
  Antisense Strand to SEQ ID NO: 499163
uuaccugggucagaaccag

SEQ ID NO: 499165 - RNA, 19 nt, Artificial Sequence
  Description of Artificial Sequence: Synthetic oligonucleotide
  Sense strand starting at position 2832 of SEQ ID NO: 317623
uguccaaaggcagauaauu

SEQ ID NO: 499166 - RNA, 19 nt, Artificial Sequence
  Description of Artificial Sequence: Synthetic oligonucleotide
  Antisense Strand to SEQ ID NO: 499165
aauuaucugccuuuggaca

SEQ ID NO: 499167 - RNA, 19 nt, Artificial Sequence
  Description of Artificial Sequence: Synthetic oligonucleotide
  Sense strand starting at position 2882 of SEQ ID NO: 317623
agcagaaugcuggaguaau

SEQ ID NO: 499168 - RNA, 19 nt, Artificial Sequence
  Description of Artificial Sequence: Synthetic oligonucleotide
  Antisense Strand to SEQ ID NO: 499167
auuacuccagcauucugcu

SEQ ID NO: 499169 - RNA, 19 nt, Artificial Sequence
  Description of Artificial Sequence: Synthetic oligonucleotide
  Sense strand starting at position 2977 of SEQ ID NO: 317623
ggcaacaauuggucacaca

SEQ ID NO: 499170 - RNA, 19 nt, Artificial Sequence
  Description of Artificial Sequence: Synthetic oligonucleotide
  Antisense Strand to SEQ ID NO: 499169
ugugugaccaauuguugcc

SEQ ID NO: 499171 - RNA, 19 nt, Artificial Sequence
  Description of Artificial Sequence: Synthetic oligonucleotide
  Sense strand starting at position 2978 of SEQ ID NO: 317623
gcaacaauuggucacacau

SEQ ID NO: 499172 - RNA, 19 nt, Artificial Sequence
  Description of Artificial Sequence: Synthetic oligonucleotide
  Antisense Strand to SEQ ID NO: 499171
augugugaccaauuguugc

SEQ ID NO: 499173 - RNA, 19 nt, Artificial Sequence
  Description of Artificial Sequence: Synthetic oligonucleotide
  Sense strand starting at position 3124 of SEQ ID NO: 317623
ugaauaacugggcauuguu

SEQ ID NO: 499174 - RNA, 19 nt, Artificial Sequence
  Description of Artificial Sequence: Synthetic oligonucleotide
  Antisense Strand to SEQ ID NO: 499173
aacaaugcccaguuauuca

SEQ ID NO: 499175 - RNA, 19 nt, Artificial Sequence
  Description of Artificial Sequence: Synthetic oligonucleotide
  Sense strand starting at position 3134 of SEQ ID NO: 317623
ggcauuguucuacaaacuu

SEQ ID NO: 499176 - RNA, 19 nt, Artificial Sequence
  Description of Artificial Sequence: Synthetic oligonucleotide
  Antisense Strand to SEQ ID NO: 499175
aaguuuguagaacaaugcc

SEQ ID NO: 499177 - RNA, 19 nt, Artificial Sequence
  Description of Artificial Sequence: Synthetic oligonucleotide
  Sense strand starting at position 3268 of SEQ ID NO: 317623
auguuugaaagcugacuga

SEQ ID NO: 499178 - RNA, 19 nt, Artificial Sequence
  Description of Artificial Sequence: Synthetic oligonucleotide
  Antisense Strand to SEQ ID NO: 499177
ucagucagcuuucaaacau

SEQ ID NO: 499179 - RNA, 19 nt, Artificial Sequence
  Description of Artificial Sequence: Synthetic oligonucleotide
  Sense strand starting at position 3338 of SEQ ID NO: 317623
uacuguuaagauggagagu

SEQ ID NO: 499180 - RNA, 19 nt, Artificial Sequence
  Description of Artificial Sequence: Synthetic oligonucleotide
  Antisense Strand to SEQ ID NO: 499179
acucuccaucuuaacagua

SEQ ID NO: 499181 - RNA, 19 nt, Artificial Sequence
  Description of Artificial Sequence: Synthetic oligonucleotide
  Sense strand starting at position 3504 of SEQ ID NO: 317623
ugguuucugguuuagaaau

SEQ ID NO: 499182 - RNA, 19 nt, Artificial Sequence
  Description of Artificial Sequence: Synthetic oligonucleotide
  Antisense Strand to SEQ ID NO: 499181
auuucuaaaccagaaacca

SEQ ID NO: 499183 - RNA, 19 nt, Artificial Sequence
  Description of Artificial Sequence: Synthetic oligonucleotide
  Sense strand starting at position 3625 of SEQ ID NO: 317623
ugguaaagagucuaaaggu

SEQ ID NO: 499184 - RNA, 19 nt, Artificial Sequence
  Description of Artificial Sequence: Synthetic oligonucleotide
  Antisense Strand to SEQ ID NO: 499183
accuuuagacucuuuacca

SEQ ID NO: 499185 - RNA, 19 nt, Artificial Sequence
  Description of Artificial Sequence: Synthetic oligonucleotide
  Sense strand starting at position 3655 of SEQ ID NO: 317623
aaugaaaugucauucuagg

SEQ ID NO: 499186 - RNA, 19 nt, Artificial Sequence
  Description of Artificial Sequence: Synthetic oligonucleotide
  Antisense Strand to SEQ ID NO: 499185
ccuagaaugacauuucauu

SEQ ID NO: 499187 - RNA, 19 nt, Artificial Sequence
  Description of Artificial Sequence: Synthetic oligonucleotide
  Sense strand starting at position 3663 of SEQ ID NO: 317623
gucauucuaggguaguaua

SEQ ID NO: 499188 - RNA, 19 nt, Artificial Sequence
  Description of Artificial Sequence: Synthetic oligonucleotide
  Antisense Strand to SEQ ID NO: 499187
uauacuacccuagaaugac

SEQ ID NO: 499189 - RNA, 19 nt, Artificial Sequence
  Description of Artificial Sequence: Synthetic oligonucleotide
  Sense strand starting at position 3699 of SEQ ID NO: 317623
auuagucacaaguggaaga

SEQ ID NO: 499190 - RNA, 19 nt, Artificial Sequence
  Description of Artificial Sequence: Synthetic oligonucleotide
  Antisense Strand to SEQ ID NO: 499189
ucuuccacuugugacuaau

SEQ ID NO: 499191 - RNA, 19 nt, Artificial Sequence
  Description of Artificial Sequence: Synthetic oligonucleotide
  Sense strand starting at position 3812 of SEQ ID NO: 317623
agucauggcaacugaggaa

SEQ ID NO: 499192 - RNA, 19 nt, Artificial Sequence
  Description of Artificial Sequence: Synthetic oligonucleotide
  Antisense Strand to SEQ ID NO: 499191
uuccucaguugccaugacu

SEQ ID NO: 499193 - RNA, 19 nt, Artificial Sequence
  Description of Artificial Sequence: Synthetic oligonucleotide
  Sense strand starting at position 3898 of SEQ ID NO: 317623
ugaugaguuauaugaacug

SEQ ID NO: 499194 - RNA, 19 nt, Artificial Sequence
  Description of Artificial Sequence: Synthetic oligonucleotide
  Antisense Strand to SEQ ID NO: 499193
caguucauauaacucauca

SEQ ID NO: 499195 - RNA, 19 nt, Artificial Sequence
  Description of Artificial Sequence: Synthetic oligonucleotide
  Sense strand starting at position 80 of SEQ ID NO: 317624
gcauuacugcgucuacucu

SEQ ID NO: 499196 - RNA, 19 nt, Artificial Sequence
  Description of Artificial Sequence: Synthetic oligonucleotide
  Antisense Strand to SEQ ID NO: 499195
agaguagacgcaguaaugc

SEQ ID NO: 499197 - RNA, 19 nt, Artificial Sequence
  Description of Artificial Sequence: Synthetic oligonucleotide
  Sense strand starting at position 238 of SEQ ID NO: 317624
caaucagauguuugcugaa

SEQ ID NO: 499198 - RNA, 19 nt, Artificial Sequence
  Description of Artificial Sequence: Synthetic oligonucleotide
  Antisense Strand to SEQ ID NO: 499197
uucagcaaacaucugauug

SEQ ID NO: 499199 - RNA, 19 nt, Artificial Sequence
  Description of Artificial Sequence: Synthetic oligonucleotide
  Sense strand starting at position 240 of SEQ ID NO: 317624
aucagauguuugcugaaua

SEQ ID NO: 499200 - RNA, 19 nt, Artificial Sequence
  Description of Artificial Sequence: Synthetic oligonucleotide
  Antisense Strand to SEQ ID NO: 499199
uauucagcaaacaucugau

SEQ ID NO: 499201 - RNA, 19 nt, Artificial Sequence
  Description of Artificial Sequence: Synthetic oligonucleotide
  Sense strand starting at position 407 of SEQ ID NO: 317624
cauuuaguuuaaggaugga

SEQ ID NO: 499202 - RNA, 19 nt, Artificial Sequence
  Description of Artificial Sequence: Synthetic oligonucleotide
  Antisense Strand to SEQ ID NO: 499201
uccauccuuaaacuaaaug

SEQ ID NO: 499203 - RNA, 19 nt, Artificial Sequence
  Description of Artificial Sequence: Synthetic oligonucleotide
  Sense strand starting at position 527 of SEQ ID NO: 317624
agggcaguucauugaagca

SEQ ID NO: 499204 - RNA, 19 nt, Artificial Sequence
  Description of Artificial Sequence: Synthetic oligonucleotide
  Antisense Strand to SEQ ID NO: 499203
ugcuucaaugaacugcccu

SEQ ID NO: 499205 - RNA, 19 nt, Artificial Sequence
  Description of Artificial Sequence: Synthetic oligonucleotide
  Sense strand starting at position 589 of SEQ ID NO: 317624
ggauuacacgccuaaugua

SEQ ID NO: 499206 - RNA, 19 nt, Artificial Sequence
  Description of Artificial Sequence: Synthetic oligonucleotide
  Antisense Strand to SEQ ID NO: 499205
uacauuaggcguguaaucc

SEQ ID NO: 499207 - RNA, 19 nt, Artificial Sequence
  Description of Artificial Sequence: Synthetic oligonucleotide
  Sense strand starting at position 1077 of SEQ ID NO: 317624
auaaguauucgaggaacaa

SEQ ID NO: 499208 - RNA, 19 nt, Artificial Sequence
  Description of Artificial Sequence: Synthetic oligonucleotide
  Antisense Strand to SEQ ID NO: 499207
uuguuccucgaauacuuau

SEQ ID NO: 499209 - RNA, 19 nt, Artificial Sequence
  Description of Artificial Sequence: Synthetic oligonucleotide
  Sense strand starting at position 1134 of SEQ ID NO: 317624
agaaguuauuugcagauau

SEQ ID NO: 499210 - RNA, 19 nt, Artificial Sequence
  Description of Artificial Sequence: Synthetic oligonucleotide
  Antisense Strand to SEQ ID NO: 499209
auaucugcaaauaacuucu

SEQ ID NO: 499211 - RNA, 19 nt, Artificial Sequence
  Description of Artificial Sequence: Synthetic oligonucleotide
  Sense strand starting at position 1145 of SEQ ID NO: 317624
gcagauauuucucaagauu

SEQ ID NO: 499212 - RNA, 19 nt, Artificial Sequence
  Description of Artificial Sequence: Synthetic oligonucleotide
  Antisense Strand to SEQ ID NO: 499211
aaucuugagaaauaucugc

SEQ ID NO: 499213 - RNA, 19 nt, Artificial Sequence
  Description of Artificial Sequence: Synthetic oligonucleotide
  Sense strand starting at position 1255 of SEQ ID NO: 317624
cagaaaugguuguccugaa

SEQ ID NO: 499214 - RNA, 19 nt, Artificial Sequence
  Description of Artificial Sequence: Synthetic oligonucleotide
  Antisense Strand to SEQ ID NO: 499213
uucaggacaaccauuucug

SEQ ID NO: 499215 - RNA, 19 nt, Artificial Sequence
  Description of Artificial Sequence: Synthetic oligonucleotide
  Sense strand starting at position 1256 of SEQ ID NO: 317624
agaaaugguuguccugaaa

SEQ ID NO: 499216 - RNA, 19 nt, Artificial Sequence
  Description of Artificial Sequence: Synthetic oligonucleotide
  Antisense Strand to SEQ ID NO: 499215
uuucaggacaaccauuucu

SEQ ID NO: 499217 - RNA, 19 nt, Artificial Sequence
  Description of Artificial Sequence: Synthetic oligonucleotide
  Sense strand starting at position 1364 of SEQ ID NO: 317624
cggaaagucaagcgugaaa

SEQ ID NO: 499218 - RNA, 19 nt, Artificial Sequence
  Description of Artificial Sequence: Synthetic oligonucleotide
  Antisense Strand to SEQ ID NO: 499217
uuucacgcuugacuuuccg

SEQ ID NO: 499219 - RNA, 19 nt, Artificial Sequence
  Description of Artificial Sequence: Synthetic oligonucleotide
  Sense strand starting at position 1366 of SEQ ID NO: 317624
gaaagucaagcgugaaauc

SEQ ID NO: 499220 - RNA, 19 nt, Artificial Sequence
  Description of Artificial Sequence: Synthetic oligonucleotide
  Antisense Strand to SEQ ID NO: 499219
gauuucacgcuugacuuuc

SEQ ID NO: 499221 - RNA, 19 nt, Artificial Sequence
  Description of Artificial Sequence: Synthetic oligonucleotide
  Sense strand starting at position 1409 of SEQ ID NO: 317624
gaugaagugcuaggccaua

SEQ ID NO: 499222 - RNA, 19 nt, Artificial Sequence
  Description of Artificial Sequence: Synthetic oligonucleotide
  Antisense Strand to SEQ ID NO: 499221
uauggccuagcacuucauc

SEQ ID NO: 499223 - RNA, 19 nt, Artificial Sequence
  Description of Artificial Sequence: Synthetic oligonucleotide
  Sense strand starting at position 2136 of SEQ ID NO: 317624
ggauuagguuacccagguu

SEQ ID NO: 499224 - RNA, 19 nt, Artificial Sequence
  Description of Artificial Sequence: Synthetic oligonucleotide
  Antisense Strand to SEQ ID NO: 499223
aaccuggguaaccuaaucc

SEQ ID NO: 499225 - RNA, 19 nt, Artificial Sequence
  Description of Artificial Sequence: Synthetic oligonucleotide
  Sense strand starting at position 2235 of SEQ ID NO: 317624
ggccuucuuagcuagaguc

SEQ ID NO: 499226 - RNA, 19 nt, Artificial Sequence
  Description of Artificial Sequence: Synthetic oligonucleotide
  Antisense Strand to SEQ ID NO: 499225
gacucuagcuaagaaggcc

SEQ ID NO: 499227 - RNA, 19 nt, Artificial Sequence
  Description of Artificial Sequence: Synthetic oligonucleotide
  Sense strand starting at position 2289 of SEQ ID NO: 317624
gagucuuauuuaggacaag

SEQ ID NO: 499228 - RNA, 19 nt, Artificial Sequence
  Description of Artificial Sequence: Synthetic oligonucleotide
  Antisense Strand to SEQ ID NO: 499227
cuuguccuaaauaagacuc

SEQ ID NO: 499229 - RNA, 19 nt, Artificial Sequence
  Description of Artificial Sequence: Synthetic oligonucleotide
  Sense strand starting at position 2290 of SEQ ID NO: 317624
agucuuauuuaggacaagu

SEQ ID NO: 499230 - RNA, 19 nt, Artificial Sequence
  Description of Artificial Sequence: Synthetic oligonucleotide
  Antisense Strand to SEQ ID NO: 499229
acuuguccuaaauaagacu

SEQ ID NO: 499231 - RNA, 19 nt, Artificial Sequence
  Description of Artificial Sequence: Synthetic oligonucleotide
  Sense strand starting at position 2300 of SEQ ID NO: 317624
aggacaagucugggugaau

SEQ ID NO: 499232 - RNA, 19 nt, Artificial Sequence
  Description of Artificial Sequence: Synthetic oligonucleotide
  Antisense Strand to SEQ ID NO: 499231
auucacccagacuuguccu

SEQ ID NO: 499233 - RNA, 19 nt, Artificial Sequence
  Description of Artificial Sequence: Synthetic oligonucleotide
  Sense strand starting at position 2301 of SEQ ID NO: 317624
ggacaagucugggugaauc

SEQ ID NO: 499234 - RNA, 19 nt, Artificial Sequence
  Description of Artificial Sequence: Synthetic oligonucleotide
  Antisense Strand to SEQ ID NO: 499233
gauucacccagacuugucc

SEQ ID NO: 499235 - RNA, 19 nt, Artificial Sequence
  Description of Artificial Sequence: Synthetic oligonucleotide
  Sense strand starting at position 2309 of SEQ ID NO: 317624
cugggugaaucccuuaugu

SEQ ID NO: 499236 - RNA, 19 nt, Artificial Sequence
  Description of Artificial Sequence: Synthetic oligonucleotide
  Antisense Strand to SEQ ID NO: 499235
acauaagggauucacccag

SEQ ID NO: 499237 - RNA, 19 nt, Artificial Sequence
  Description of Artificial Sequence: Synthetic oligonucleotide
  Sense strand starting at position 2311 of SEQ ID NO: 317624
gggugaaucccuuauguuu

SEQ ID NO: 499238 - RNA, 19 nt, Artificial Sequence
  Description of Artificial Sequence: Synthetic oligonucleotide
  Antisense Strand to SEQ ID NO: 499237
aaacauaagggauucaccc

SEQ ID NO: 499239 - RNA, 19 nt, Artificial Sequence
  Description of Artificial Sequence: Synthetic oligonucleotide
  Sense strand starting at position 2317 of SEQ ID NO: 317624
aucccuuauguuuaccaga

SEQ ID NO: 499240 - RNA, 19 nt, Artificial Sequence
  Description of Artificial Sequence: Synthetic oligonucleotide
  Antisense Strand to SEQ ID NO: 499239
ucugguaaacauaagggau

SEQ ID NO: 499241 - RNA, 19 nt, Artificial Sequence
  Description of Artificial Sequence: Synthetic oligonucleotide
  Sense strand starting at position 2319 of SEQ ID NO: 317624
cccuuauguuuaccagaug

SEQ ID NO: 499242 - RNA, 19 nt, Artificial Sequence
  Description of Artificial Sequence: Synthetic oligonucleotide
  Antisense Strand to SEQ ID NO: 499241
caucugguaaacauaaggg

SEQ ID NO: 499243 - RNA, 19 nt, Artificial Sequence
  Description of Artificial Sequence: Synthetic oligonucleotide
  Sense strand starting at position 2322 of SEQ ID NO: 317624
uuauguuuaccagauguac

SEQ ID NO: 499244 - RNA, 19 nt, Artificial Sequence
  Description of Artificial Sequence: Synthetic oligonucleotide
  Antisense Strand to SEQ ID NO: 499243
guacaucugguaaacauaa

SEQ ID NO: 499245 - RNA, 19 nt, Artificial Sequence
  Description of Artificial Sequence: Synthetic oligonucleotide
  Sense strand starting at position 2825 of SEQ ID NO: 317624
aacuacauagugugguaaa

SEQ ID NO: 499246 - RNA, 19 nt, Artificial Sequence
  Description of Artificial Sequence: Synthetic oligonucleotide
  Antisense Strand to SEQ ID NO: 499245
uuuaccacacuauguaguu

SEQ ID NO: 499247 - RNA, 19 nt, Artificial Sequence
  Description of Artificial Sequence: Synthetic oligonucleotide
  Sense strand starting at position 2904 of SEQ ID NO: 317624
cuugaacuauaacugaguu

SEQ ID NO: 499248 - RNA, 19 nt, Artificial Sequence
  Description of Artificial Sequence: Synthetic oligonucleotide
  Antisense Strand to SEQ ID NO: 499247
aacucaguuauaguucaag

SEQ ID NO: 499249 - RNA, 19 nt, Artificial Sequence
  Description of Artificial Sequence: Synthetic oligonucleotide
  Sense strand starting at position 2953 of SEQ ID NO: 317624
cuaaguaacuucgugauau

SEQ ID NO: 499250 - RNA, 19 nt, Artificial Sequence
  Description of Artificial Sequence: Synthetic oligonucleotide
  Antisense Strand to SEQ ID NO: 499249
auaucacgaaguuacuuag

SEQ ID NO: 499251 - RNA, 19 nt, Artificial Sequence
  Description of Artificial Sequence: Synthetic oligonucleotide
  Sense strand starting at position 2955 of SEQ ID NO: 317624
aaguaacuucgugauauga

SEQ ID NO: 499252 - RNA, 19 nt, Artificial Sequence
  Description of Artificial Sequence: Synthetic oligonucleotide
  Antisense Strand to SEQ ID NO: 499251
ucauaucacgaaguuacuu

SEQ ID NO: 499253 - RNA, 19 nt, Artificial Sequence
  Description of Artificial Sequence: Synthetic oligonucleotide
  Sense strand starting at position 3011 of SEQ ID NO: 317624
acaaguagucuagaagucu

SEQ ID NO: 499254 - RNA, 19 nt, Artificial Sequence
  Description of Artificial Sequence: Synthetic oligonucleotide
  Antisense Strand to SEQ ID NO: 499253
agacuucuagacuacuugu

SEQ ID NO: 499255 - RNA, 19 nt, Artificial Sequence
  Description of Artificial Sequence: Synthetic oligonucleotide
  Sense strand starting at position 3022 of SEQ ID NO: 317624
agaagucuagaauguggua

SEQ ID NO: 499256 - RNA, 19 nt, Artificial Sequence
  Description of Artificial Sequence: Synthetic oligonucleotide
  Antisense Strand to SEQ ID NO: 499255
uaccacauucuagacuucu

SEQ ID NO: 499257 - RNA, 19 nt, Artificial Sequence
  Description of Artificial Sequence: Synthetic oligonucleotide
  Sense strand starting at position 3216 of SEQ ID NO: 317624
auaccaucuccgcaagaug

SEQ ID NO: 499258 - RNA, 19 nt, Artificial Sequence
  Description of Artificial Sequence: Synthetic oligonucleotide
  Antisense Strand to SEQ ID NO: 499257
caucuugcggagaugguau

SEQ ID NO: 499259 - RNA, 19 nt, Artificial Sequence
  Description of Artificial Sequence: Synthetic oligonucleotide
  Sense strand starting at position 3266 of SEQ ID NO: 317624
gucuaaauccugggcucca

SEQ ID NO: 499260 - RNA, 19 nt, Artificial Sequence
  Description of Artificial Sequence: Synthetic oligonucleotide
  Antisense Strand to SEQ ID NO: 499259
uggagcccaggauuuagac

SEQ ID NO: 499261 - RNA, 19 nt, Artificial Sequence
  Description of Artificial Sequence: Synthetic oligonucleotide
  Sense strand starting at position 3315 of SEQ ID NO: 317624
cgggauuacaggugugaag

SEQ ID NO: 499262 - RNA, 19 nt, Artificial Sequence
  Description of Artificial Sequence: Synthetic oligonucleotide
  Antisense Strand to SEQ ID NO: 499261
cuucacaccuguaaucccg

SEQ ID NO: 499263 - RNA, 19 nt, Artificial Sequence
  Description of Artificial Sequence: Synthetic oligonucleotide
  Sense strand starting at position 3863 of SEQ ID NO: 317624
uaugguaucugggauuuau

SEQ ID NO: 499264 - RNA, 19 nt, Artificial Sequence
  Description of Artificial Sequence: Synthetic oligonucleotide
  Antisense Strand to SEQ ID NO: 499263
auaaaucccagauaccaua

SEQ ID NO: 499265 - RNA, 19 nt, Artificial Sequence
  Description of Artificial Sequence: Synthetic oligonucleotide
  Sense strand starting at position 3901 of SEQ ID NO: 317624
gcgaaauggguaggagaau

SEQ ID NO: 499266 - RNA, 19 nt, Artificial Sequence
  Description of Artificial Sequence: Synthetic oligonucleotide
  Antisense Strand to SEQ ID NO: 499265
auucuccuacccauuucgc

SEQ ID NO: 499267 - RNA, 19 nt, Artificial Sequence
  Description of Artificial Sequence: Synthetic oligonucleotide
  Sense strand starting at position 3931 of SEQ ID NO: 317624
gucuacccaugaguuaaca

SEQ ID NO: 499268 - RNA, 19 nt, Artificial Sequence
  Description of Artificial Sequence: Synthetic oligonucleotide
  Antisense Strand to SEQ ID NO: 499267
uguuaacucauggguagac

SEQ ID NO: 499269 - RNA, 19 nt, Artificial Sequence
  Description of Artificial Sequence: Synthetic oligonucleotide
  Sense strand starting at position 3956 of SEQ ID NO: 317624
gaagcugggcgauacauau

SEQ ID NO: 499270 - RNA, 19 nt, Artificial Sequence
  Description of Artificial Sequence: Synthetic oligonucleotide
  Antisense Strand to SEQ ID NO: 499269
auauguaucgcccagcuuc

SEQ ID NO: 499271 - RNA, 19 nt, Artificial Sequence
  Description of Artificial Sequence: Synthetic oligonucleotide
  Sense strand starting at position 3962 of SEQ ID NO: 317624
gggcgauacauaugugaaa

SEQ ID NO: 499272 - RNA, 19 nt, Artificial Sequence
  Description of Artificial Sequence: Synthetic oligonucleotide
  Antisense Strand to SEQ ID NO: 499271
uuucacauauguaucgccc

SEQ ID NO: 499273 - RNA, 19 nt, Artificial Sequence
  Description of Artificial Sequence: Synthetic oligonucleotide
  Sense strand starting at position 3963 of SEQ ID NO: 317624
ggcgauacauaugugaaag

SEQ ID NO: 499274 - RNA, 19 nt, Artificial Sequence
  Description of Artificial Sequence: Synthetic oligonucleotide
  Antisense Strand to SEQ ID NO: 499273
cuuucacauauguaucgcc

SEQ ID NO: 499275 - RNA, 19 nt, Artificial Sequence
  Description of Artificial Sequence: Synthetic oligonucleotide
  Sense strand starting at position 26 of SEQ ID NO: 317625
agcaguuaugcacacguuu

SEQ ID NO: 499276 - RNA, 19 nt, Artificial Sequence
  Description of Artificial Sequence: Synthetic oligonucleotide
  Antisense Strand to SEQ ID NO: 499275
aaacgugugcauaacugcu

SEQ ID NO: 499277 - RNA, 19 nt, Artificial Sequence
  Description of Artificial Sequence: Synthetic oligonucleotide
  Sense strand starting at position 97 of SEQ ID NO: 317625
ucugcucaccugugagacu

SEQ ID NO: 499278 - RNA, 19 nt, Artificial Sequence
  Description of Artificial Sequence: Synthetic oligonucleotide
  Antisense Strand to SEQ ID NO: 499277
agucucacaggugagcaga

SEQ ID NO: 499279 - RNA, 19 nt, Artificial Sequence
  Description of Artificial Sequence: Synthetic oligonucleotide
  Sense strand starting at position 116 of SEQ ID NO: 317625
gcgcuaaguccaggaaggu

SEQ ID NO: 499280 - RNA, 19 nt, Artificial Sequence
  Description of Artificial Sequence: Synthetic oligonucleotide
  Antisense Strand to SEQ ID NO: 499279
accuuccuggacuuagcgc

SEQ ID NO: 499281 - RNA, 19 nt, Artificial Sequence
  Description of Artificial Sequence: Synthetic oligonucleotide
  Sense strand starting at position 117 of SEQ ID NO: 317625
cgcuaaguccaggaagguu

SEQ ID NO: 499282 - RNA, 19 nt, Artificial Sequence
  Description of Artificial Sequence: Synthetic oligonucleotide
  Antisense Strand to SEQ ID NO: 499281
aaccuuccuggacuuagcg

SEQ ID NO: 499283 - RNA, 19 nt, Artificial Sequence
  Description of Artificial Sequence: Synthetic oligonucleotide
  Sense strand starting at position 129 of SEQ ID NO: 317625
gaagguuaugacuggccua

SEQ ID NO: 499284 - RNA, 19 nt, Artificial Sequence
  Description of Artificial Sequence: Synthetic oligonucleotide
  Antisense Strand to SEQ ID NO: 499283
uaggccagucauaaccuuc

SEQ ID NO: 499285 - RNA, 19 nt, Artificial Sequence
  Description of Artificial Sequence: Synthetic oligonucleotide
  Sense strand starting at position 134 of SEQ ID NO: 317625
uuaugacuggccuaagauc

SEQ ID NO: 499286 - RNA, 19 nt, Artificial Sequence
  Description of Artificial Sequence: Synthetic oligonucleotide
  Antisense Strand to SEQ ID NO: 499285
gaucuuaggccagucauaa

SEQ ID NO: 499287 - RNA, 19 nt, Artificial Sequence
  Description of Artificial Sequence: Synthetic oligonucleotide
  Sense strand starting at position 259 of SEQ ID NO: 317625
cugugguggccguggaaga

SEQ ID NO: 499288 - RNA, 19 nt, Artificial Sequence
  Description of Artificial Sequence: Synthetic oligonucleotide
  Antisense Strand to SEQ ID NO: 499287
ucuuccacggccaccacag

SEQ ID NO: 499289 - RNA, 19 nt, Artificial Sequence
  Description of Artificial Sequence: Synthetic oligonucleotide
  Sense strand starting at position 324 of SEQ ID NO: 317625
ccacuucugcuaggucaca

SEQ ID NO: 499290 - RNA, 19 nt, Artificial Sequence
  Description of Artificial Sequence: Synthetic oligonucleotide
  Antisense Strand to SEQ ID NO: 499289
ugugaccuagcagaagugg

SEQ ID NO: 499291 - RNA, 19 nt, Artificial Sequence
  Description of Artificial Sequence: Synthetic oligonucleotide
  Sense strand starting at position 410 of SEQ ID NO: 317625
guccaaaugcuuucgcagu

SEQ ID NO: 499292 - RNA, 19 nt, Artificial Sequence
  Description of Artificial Sequence: Synthetic oligonucleotide
  Antisense Strand to SEQ ID NO: 499291
acugcgaaagcauuuggac

SEQ ID NO: 499293 - RNA, 19 nt, Artificial Sequence
  Description of Artificial Sequence: Synthetic oligonucleotide
  Sense strand starting at position 412 of SEQ ID NO: 317625
ccaaaugcuuucgcaguau

SEQ ID NO: 499294 - RNA, 19 nt, Artificial Sequence
  Description of Artificial Sequence: Synthetic oligonucleotide
  Antisense Strand to SEQ ID NO: 499293
auacugcgaaagcauuugg

SEQ ID NO: 499295 - RNA, 19 nt, Artificial Sequence
  Description of Artificial Sequence: Synthetic oligonucleotide
  Sense strand starting at position 416 of SEQ ID NO: 317625
augcuuucgcaguauugga

SEQ ID NO: 499296 - RNA, 19 nt, Artificial Sequence
  Description of Artificial Sequence: Synthetic oligonucleotide
  Antisense Strand to SEQ ID NO: 499295
uccaauacugcgaaagcau

SEQ ID NO: 499297 - RNA, 19 nt, Artificial Sequence
  Description of Artificial Sequence: Synthetic oligonucleotide
  Sense strand starting at position 521 of SEQ ID NO: 317625
gcucguaaaggagaaauca

SEQ ID NO: 499298 - RNA, 19 nt, Artificial Sequence
  Description of Artificial Sequence: Synthetic oligonucleotide
  Antisense Strand to SEQ ID NO: 499297
ugauuucuccuuuacgagc

SEQ ID NO: 499299 - RNA, 19 nt, Artificial Sequence
  Description of Artificial Sequence: Synthetic oligonucleotide
  Sense strand starting at position 550 of SEQ ID NO: 317625
ccagaaucccagcaguuga

SEQ ID NO: 499300 - RNA, 19 nt, Artificial Sequence
  Description of Artificial Sequence: Synthetic oligonucleotide
  Antisense Strand to SEQ ID NO: 499299
ucaacugcugggauucugg

SEQ ID NO: 499301 - RNA, 19 nt, Artificial Sequence
  Description of Artificial Sequence: Synthetic oligonucleotide
  Sense strand starting at position 715 of SEQ ID NO: 317625
cgagguuuacagugcaaau

SEQ ID NO: 499302 - RNA, 19 nt, Artificial Sequence
  Description of Artificial Sequence: Synthetic oligonucleotide
  Antisense Strand to SEQ ID NO: 499301
auuugcacuguaaaccucg

SEQ ID NO: 499303 - RNA, 19 nt, Artificial Sequence
  Description of Artificial Sequence: Synthetic oligonucleotide
  Sense strand starting at position 717 of SEQ ID NO: 317625
agguuuacagugcaaauau

SEQ ID NO: 499304 - RNA, 19 nt, Artificial Sequence
  Description of Artificial Sequence: Synthetic oligonucleotide
  Antisense Strand to SEQ ID NO: 499303
auauuugcacuguaaaccu

SEQ ID NO: 499305 - RNA, 19 nt, Artificial Sequence
  Description of Artificial Sequence: Synthetic oligonucleotide
  Sense strand starting at position 725 of SEQ ID NO: 317625
agugcaaauauguggguua

SEQ ID NO: 499306 - RNA, 19 nt, Artificial Sequence
  Description of Artificial Sequence: Synthetic oligonucleotide
  Antisense Strand to SEQ ID NO: 499305
uaacccacauauuugcacu

SEQ ID NO: 499307 - RNA, 19 nt, Artificial Sequence
  Description of Artificial Sequence: Synthetic oligonucleotide
  Sense strand starting at position 727 of SEQ ID NO: 317625
ugcaaauauguggguuaua

SEQ ID NO: 499308 - RNA, 19 nt, Artificial Sequence
  Description of Artificial Sequence: Synthetic oligonucleotide
  Antisense Strand to SEQ ID NO: 499307
uauaacccacauauuugca

SEQ ID NO: 499309 - RNA, 19 nt, Artificial Sequence
  Description of Artificial Sequence: Synthetic oligonucleotide
  Sense strand starting at position 728 of SEQ ID NO: 317625
gcaaauauguggguuauaa

SEQ ID NO: 499310 - RNA, 19 nt, Artificial Sequence
  Description of Artificial Sequence: Synthetic oligonucleotide
  Antisense Strand to SEQ ID NO: 499309
uuauaacccacauauuugc

SEQ ID NO: 499311 - RNA, 19 nt, Artificial Sequence
  Description of Artificial Sequence: Synthetic oligonucleotide
  Sense strand starting at position 732 of SEQ ID NO: 317625
auauguggguuauaagaac

SEQ ID NO: 499312 - RNA, 19 nt, Artificial Sequence
  Description of Artificial Sequence: Synthetic oligonucleotide
  Antisense Strand to SEQ ID NO: 499311
guucuuauaacccacauau

SEQ ID NO: 499313 - RNA, 19 nt, Artificial Sequence
  Description of Artificial Sequence: Synthetic oligonucleotide
  Sense strand starting at position 825 of SEQ ID NO: 317625
ugugcugucaaggaagaca

SEQ ID NO: 499314 - RNA, 19 nt, Artificial Sequence
  Description of Artificial Sequence: Synthetic oligonucleotide
  Antisense Strand to SEQ ID NO: 499313
ugucuuccuugacagcaca

SEQ ID NO: 499315 - RNA, 19 nt, Artificial Sequence
  Description of Artificial Sequence: Synthetic oligonucleotide
  Sense strand starting at position 840 of SEQ ID NO: 317625
gacaccuaucgcggucauu

SEQ ID NO: 499316 - RNA, 19 nt, Artificial Sequence
  Description of Artificial Sequence: Synthetic oligonucleotide
  Antisense Strand to SEQ ID NO: 499315
aaugaccgcgauagguguc

SEQ ID NO: 499317 - RNA, 19 nt, Artificial Sequence
  Description of Artificial Sequence: Synthetic oligonucleotide
  Sense strand starting at position 853 of SEQ ID NO: 317625
gucauuggcugucucggaa

SEQ ID NO: 499318 - RNA, 19 nt, Artificial Sequence
  Description of Artificial Sequence: Synthetic oligonucleotide
  Antisense Strand to SEQ ID NO: 499317
uuccgagacagccaaugac

SEQ ID NO: 499319 - RNA, 19 nt, Artificial Sequence
  Description of Artificial Sequence: Synthetic oligonucleotide
  Sense strand starting at position 856 of SEQ ID NO: 317625
auuggcugucucggaaaua

SEQ ID NO: 499320 - RNA, 19 nt, Artificial Sequence
  Description of Artificial Sequence: Synthetic oligonucleotide
  Antisense Strand to SEQ ID NO: 499319
uauuuccgagacagccaau

SEQ ID NO: 499321 - RNA, 19 nt, Artificial Sequence
  Description of Artificial Sequence: Synthetic oligonucleotide
  Sense strand starting at position 2119 of SEQ ID NO: 317625
ucguccuucucccuacaga

SEQ ID NO: 499322 - RNA, 19 nt, Artificial Sequence
  Description of Artificial Sequence: Synthetic oligonucleotide
  Antisense Strand to SEQ ID NO: 499321
ucuguagggagaaggacga

SEQ ID NO: 499323 - RNA, 19 nt, Artificial Sequence
  Description of Artificial Sequence: Synthetic oligonucleotide
  Sense strand starting at position 2120 of SEQ ID NO: 317625
cguccuucucccuacagaa

SEQ ID NO: 499324 - RNA, 19 nt, Artificial Sequence
  Description of Artificial Sequence: Synthetic oligonucleotide
  Antisense Strand to SEQ ID NO: 499323
uucuguagggagaaggacg

SEQ ID NO: 499325 - RNA, 19 nt, Artificial Sequence
  Description of Artificial Sequence: Synthetic oligonucleotide
  Sense strand starting at position 2188 of SEQ ID NO: 317625
gagggcuuucuuugugaug

SEQ ID NO: 499326 - RNA, 19 nt, Artificial Sequence
  Description of Artificial Sequence: Synthetic oligonucleotide
  Antisense Strand to SEQ ID NO: 499325
caucacaaagaaagcccuc

SEQ ID NO: 499327 - RNA, 19 nt, Artificial Sequence
  Description of Artificial Sequence: Synthetic oligonucleotide
  Sense strand starting at position 2189 of SEQ ID NO: 317625
agggcuuucuuugugauga

SEQ ID NO: 499328 - RNA, 19 nt, Artificial Sequence
  Description of Artificial Sequence: Synthetic oligonucleotide
  Antisense Strand to SEQ ID NO: 499327
ucaucacaaagaaagcccu

SEQ ID NO: 499329 - RNA, 19 nt, Artificial Sequence
  Description of Artificial Sequence: Synthetic oligonucleotide
  Sense strand starting at position 2209 of SEQ ID NO: 317625
agggcugauccguaaggga

SEQ ID NO: 499330 - RNA, 19 nt, Artificial Sequence
  Description of Artificial Sequence: Synthetic oligonucleotide
  Antisense Strand to SEQ ID NO: 499329
ucccuuacggaucagcccu

SEQ ID NO: 499331 - RNA, 19 nt, Artificial Sequence
  Description of Artificial Sequence: Synthetic oligonucleotide
  Sense strand starting at position 2385 of SEQ ID NO: 317625
uggcuaagugagcgaaagu

SEQ ID NO: 499332 - RNA, 19 nt, Artificial Sequence
  Description of Artificial Sequence: Synthetic oligonucleotide
  Antisense Strand to SEQ ID NO: 499331
acuuucgcucacuuagcca

SEQ ID NO: 499333 - RNA, 19 nt, Artificial Sequence
  Description of Artificial Sequence: Synthetic oligonucleotide
  Sense strand starting at position 2415 of SEQ ID NO: 317625
ggaacuguucugggucuau

SEQ ID NO: 499334 - RNA, 19 nt, Artificial Sequence
  Description of Artificial Sequence: Synthetic oligonucleotide
  Antisense Strand to SEQ ID NO: 499333
auagacccagaacaguucc

SEQ ID NO: 499335 - RNA, 19 nt, Artificial Sequence
  Description of Artificial Sequence: Synthetic oligonucleotide
  Sense strand starting at position 2425 of SEQ ID NO: 317625
ugggucuauuacccguuaa

SEQ ID NO: 499336 - RNA, 19 nt, Artificial Sequence
  Description of Artificial Sequence: Synthetic oligonucleotide
  Antisense Strand to SEQ ID NO: 499335
uuaacggguaauagaccca

SEQ ID NO: 499337 - RNA, 19 nt, Artificial Sequence
  Description of Artificial Sequence: Synthetic oligonucleotide
  Sense strand starting at position 2426 of SEQ ID NO: 317625
gggucuauuacccguuaac

SEQ ID NO: 499338 - RNA, 19 nt, Artificial Sequence
  Description of Artificial Sequence: Synthetic oligonucleotide
  Antisense Strand to SEQ ID NO: 499337
guuaacggguaauagaccc

SEQ ID NO: 499339 - RNA, 19 nt, Artificial Sequence
  Description of Artificial Sequence: Synthetic oligonucleotide
  Sense strand starting at position 2438 of SEQ ID NO: 317625
cguuaacucagaugauaag

SEQ ID NO: 499340 - RNA, 19 nt, Artificial Sequence
  Description of Artificial Sequence: Synthetic oligonucleotide
  Antisense Strand to SEQ ID NO: 499339
cuuaucaucugaguuaacg

SEQ ID NO: 499341 - RNA, 19 nt, Artificial Sequence
  Description of Artificial Sequence: Synthetic oligonucleotide
  Sense strand starting at position 2444 of SEQ ID NO: 317625
cucagaugauaaguuuauu

SEQ ID NO: 499342 - RNA, 19 nt, Artificial Sequence
  Description of Artificial Sequence: Synthetic oligonucleotide
  Antisense Strand to SEQ ID NO: 499341
aauaaacuuaucaucugag

SEQ ID NO: 499343 - RNA, 19 nt, Artificial Sequence
  Description of Artificial Sequence: Synthetic oligonucleotide
  Sense strand starting at position 2450 of SEQ ID NO: 317625
ugauaaguuuauucucaga

SEQ ID NO: 499344 - RNA, 19 nt, Artificial Sequence
  Description of Artificial Sequence: Synthetic oligonucleotide
  Antisense Strand to SEQ ID NO: 499343
ucugagaauaaacuuauca

SEQ ID NO: 499345 - RNA, 19 nt, Artificial Sequence
  Description of Artificial Sequence: Synthetic oligonucleotide
  Sense strand starting at position 2715 of SEQ ID NO: 317625
gaacauggcuuguccacua

SEQ ID NO: 499346 - RNA, 19 nt, Artificial Sequence
  Description of Artificial Sequence: Synthetic oligonucleotide
  Antisense Strand to SEQ ID NO: 499345
uaguggacaagccauguuc

SEQ ID NO: 499347 - RNA, 19 nt, Artificial Sequence
  Description of Artificial Sequence: Synthetic oligonucleotide
  Sense strand starting at position 3819 of SEQ ID NO: 317625
agggaaaccuaguaauaga

SEQ ID NO: 499348 - RNA, 19 nt, Artificial Sequence
  Description of Artificial Sequence: Synthetic oligonucleotide
  Antisense Strand to SEQ ID NO: 499347
ucuauuacuagguuucccu

SEQ ID NO: 499349 - RNA, 19 nt, Artificial Sequence
  Description of Artificial Sequence: Synthetic oligonucleotide
  Sense strand starting at position 3838 of SEQ ID NO: 317625
aaauuacaaugagaugguu

SEQ ID NO: 499350 - RNA, 19 nt, Artificial Sequence
  Description of Artificial Sequence: Synthetic oligonucleotide
  Antisense Strand to SEQ ID NO: 499349
aaccaucucauuguaauuu

SEQ ID NO: 499351 - RNA, 19 nt, Artificial Sequence
  Description of Artificial Sequence: Synthetic oligonucleotide
  Sense strand starting at position 3932 of SEQ ID NO: 317625
ggagaccuuugacagaaua

SEQ ID NO: 499352 - RNA, 19 nt, Artificial Sequence
  Description of Artificial Sequence: Synthetic oligonucleotide
  Antisense Strand to SEQ ID NO: 499351
uauucugucaaaggucucc

SEQ ID NO: 499353 - RNA, 19 nt, Artificial Sequence
  Description of Artificial Sequence: Synthetic oligonucleotide
  Sense strand starting at position 3943 of SEQ ID NO: 317625
acagaauauuucugaagau

SEQ ID NO: 499354 - RNA, 19 nt, Artificial Sequence
  Description of Artificial Sequence: Synthetic oligonucleotide
  Antisense Strand to SEQ ID NO: 499353
aucuucagaaauauucugu

SEQ ID NO: 499355 - RNA, 19 nt, Artificial Sequence
  Description of Artificial Sequence: Synthetic oligonucleotide
  Sense strand starting at position 352 of SEQ ID NO: 317626
guaccaaaguuauuaaaug

SEQ ID NO: 499356 - RNA, 19 nt, Artificial Sequence
  Description of Artificial Sequence: Synthetic oligonucleotide
  Antisense Strand to SEQ ID NO: 499355
cauuuaauaacuuugguac

SEQ ID NO: 499357 - RNA, 19 nt, Artificial Sequence
  Description of Artificial Sequence: Synthetic oligonucleotide
  Sense strand starting at position 380 of SEQ ID NO: 317626
gaaauuaauuugggaggga

SEQ ID NO: 499358 - RNA, 19 nt, Artificial Sequence
  Description of Artificial Sequence: Synthetic oligonucleotide
  Antisense Strand to SEQ ID NO: 499357
ucccucccaaauuaauuuc

SEQ ID NO: 499359 - RNA, 19 nt, Artificial Sequence
  Description of Artificial Sequence: Synthetic oligonucleotide
  Sense strand starting at position 421 of SEQ ID NO: 317626
agacacaucuaugcugaaa

SEQ ID NO: 499360 - RNA, 19 nt, Artificial Sequence
  Description of Artificial Sequence: Synthetic oligonucleotide
  Antisense Strand to SEQ ID NO: 499359
uuucagcauagaugugucu

SEQ ID NO: 499361 - RNA, 19 nt, Artificial Sequence
  Description of Artificial Sequence: Synthetic oligonucleotide
  Sense strand starting at position 435 of SEQ ID NO: 317626
ugaaaugugaguuaaguuu

SEQ ID NO: 499362 - RNA, 19 nt, Artificial Sequence
  Description of Artificial Sequence: Synthetic oligonucleotide
  Antisense Strand to SEQ ID NO: 499361
aaacuuaacucacauuuca

SEQ ID NO: 499363 - RNA, 19 nt, Artificial Sequence
  Description of Artificial Sequence: Synthetic oligonucleotide
  Sense strand starting at position 446 of SEQ ID NO: 317626
uuaaguuugccagacuaaa

SEQ ID NO: 499364 - RNA, 19 nt, Artificial Sequence
  Description of Artificial Sequence: Synthetic oligonucleotide
  Antisense Strand to SEQ ID NO: 499363
uuuagucuggcaaacuuaa

SEQ ID NO: 499365 - RNA, 19 nt, Artificial Sequence
  Description of Artificial Sequence: Synthetic oligonucleotide
  Sense strand starting at position 660 of SEQ ID NO: 317626
ccuuguccauuucugugaa

SEQ ID NO: 499366 - RNA, 19 nt, Artificial Sequence
  Description of Artificial Sequence: Synthetic oligonucleotide
  Antisense Strand to SEQ ID NO: 499365
uucacagaaauggacaagg

SEQ ID NO: 499367 - RNA, 19 nt, Artificial Sequence
  Description of Artificial Sequence: Synthetic oligonucleotide
  Sense strand starting at position 662 of SEQ ID NO: 317626
uuguccauuucugugaauu

SEQ ID NO: 499368 - RNA, 19 nt, Artificial Sequence
  Description of Artificial Sequence: Synthetic oligonucleotide
  Antisense Strand to SEQ ID NO: 499367
aauucacagaaauggacaa

SEQ ID NO: 499369 - RNA, 19 nt, Artificial Sequence
  Description of Artificial Sequence: Synthetic oligonucleotide
  Sense strand starting at position 663 of SEQ ID NO: 317626
uguccauuucugugaauuc

SEQ ID NO: 499370 - RNA, 19 nt, Artificial Sequence
  Description of Artificial Sequence: Synthetic oligonucleotide
  Antisense Strand to SEQ ID NO: 499369
gaauucacagaaauggaca

SEQ ID NO: 499371 - RNA, 19 nt, Artificial Sequence
  Description of Artificial Sequence: Synthetic oligonucleotide
  Sense strand starting at position 683 of SEQ ID NO: 317626
uucuguuaugguuaaacug

SEQ ID NO: 499372 - RNA, 19 nt, Artificial Sequence
  Description of Artificial Sequence: Synthetic oligonucleotide
  Antisense Strand to SEQ ID NO: 499371
caguuuaaccauaacagaa

SEQ ID NO: 499373 - RNA, 19 nt, Artificial Sequence
  Description of Artificial Sequence: Synthetic oligonucleotide
  Sense strand starting at position 709 of SEQ ID NO: 317626
agcacuccagaaugugauu

SEQ ID NO: 499374 - RNA, 19 nt, Artificial Sequence
  Description of Artificial Sequence: Synthetic oligonucleotide
  Antisense Strand to SEQ ID NO: 499373
aaucacauucuggagugcu

SEQ ID NO: 499375 - RNA, 19 nt, Artificial Sequence
  Description of Artificial Sequence: Synthetic oligonucleotide
  Sense strand starting at position 714 of SEQ ID NO: 317626
uccagaaugugauuguauu

SEQ ID NO: 499376 - RNA, 19 nt, Artificial Sequence
  Description of Artificial Sequence: Synthetic oligonucleotide
  Antisense Strand to SEQ ID NO: 499375
aauacaaucacauucugga

SEQ ID NO: 499377 - RNA, 19 nt, Artificial Sequence
  Description of Artificial Sequence: Synthetic oligonucleotide
  Sense strand starting at position 734 of SEQ ID NO: 317626
ggagaucaggcuuguaaga

SEQ ID NO: 499378 - RNA, 19 nt, Artificial Sequence
  Description of Artificial Sequence: Synthetic oligonucleotide
  Antisense Strand to SEQ ID NO: 499377
ucuuacaagccugaucucc

SEQ ID NO: 499379 - RNA, 19 nt, Artificial Sequence
  Description of Artificial Sequence: Synthetic oligonucleotide
  Sense strand starting at position 779 of SEQ ID NO: 317626
uaaggugggcccuaauaca

SEQ ID NO: 499380 - RNA, 19 nt, Artificial Sequence
  Description of Artificial Sequence: Synthetic oligonucleotide
  Antisense Strand to SEQ ID NO: 499379
uguauuagggcccaccuua

SEQ ID NO: 499381 - RNA, 19 nt, Artificial Sequence
  Description of Artificial Sequence: Synthetic oligonucleotide
  Sense strand starting at position 842 of SEQ ID NO: 317626
agacgccagagaugugaaa

SEQ ID NO: 499382 - RNA, 19 nt, Artificial Sequence
  Description of Artificial Sequence: Synthetic oligonucleotide
  Antisense Strand to SEQ ID NO: 499381
uuucacaucucuggcgucu

SEQ ID NO: 499383 - RNA, 19 nt, Artificial Sequence
  Description of Artificial Sequence: Synthetic oligonucleotide
  Sense strand starting at position 906 of SEQ ID NO: 317626
gugcaagccaaggagaaau

SEQ ID NO: 499384 - RNA, 19 nt, Artificial Sequence
  Description of Artificial Sequence: Synthetic oligonucleotide
  Antisense Strand to SEQ ID NO: 499383
auuucuccuuggcuugcac

SEQ ID NO: 499385 - RNA, 19 nt, Artificial Sequence
  Description of Artificial Sequence: Synthetic oligonucleotide
  Sense strand starting at position 1125 of SEQ ID NO: 317626
gagugaagguuucucacaa

SEQ ID NO: 499386 - RNA, 19 nt, Artificial Sequence
  Description of Artificial Sequence: Synthetic oligonucleotide
  Antisense Strand to SEQ ID NO: 499385
uugugagaaaccuucacuc

SEQ ID NO: 499387 - RNA, 19 nt, Artificial Sequence
  Description of Artificial Sequence: Synthetic oligonucleotide
  Sense strand starting at position 1126 of SEQ ID NO: 317626
agugaagguuucucacaau

SEQ ID NO: 499388 - RNA, 19 nt, Artificial Sequence
  Description of Artificial Sequence: Synthetic oligonucleotide
  Antisense Strand to SEQ ID NO: 499387
auugugagaaaccuucacu

SEQ ID NO: 499389 - RNA, 19 nt, Artificial Sequence
  Description of Artificial Sequence: Synthetic oligonucleotide
  Sense strand starting at position 1278 of SEQ ID NO: 317626
ccacuagucuaagcgauuu

SEQ ID NO: 499390 - RNA, 19 nt, Artificial Sequence
  Description of Artificial Sequence: Synthetic oligonucleotide
  Antisense Strand to SEQ ID NO: 499389
aaaucgcuuagacuagugg

SEQ ID NO: 499391 - RNA, 19 nt, Artificial Sequence
  Description of Artificial Sequence: Synthetic oligonucleotide
  Sense strand starting at position 1350 of SEQ ID NO: 317626
ugacauucgcuuuacagau

SEQ ID NO: 499392 - RNA, 19 nt, Artificial Sequence
  Description of Artificial Sequence: Synthetic oligonucleotide
  Antisense Strand to SEQ ID NO: 499391
aucuguaaagcgaauguca

SEQ ID NO: 499393 - RNA, 19 nt, Artificial Sequence
  Description of Artificial Sequence: Synthetic oligonucleotide
  Sense strand starting at position 1387 of SEQ ID NO: 317626
gaggccacaccguaaugaa

SEQ ID NO: 499394 - RNA, 19 nt, Artificial Sequence
  Description of Artificial Sequence: Synthetic oligonucleotide
  Antisense Strand to SEQ ID NO: 499393
uucauuacgguguggccuc

SEQ ID NO: 499395 - RNA, 19 nt, Artificial Sequence
  Description of Artificial Sequence: Synthetic oligonucleotide
  Sense strand starting at position 1419 of SEQ ID NO: 317626
gugggcucugucgucuuaa

SEQ ID NO: 499396 - RNA, 19 nt, Artificial Sequence
  Description of Artificial Sequence: Synthetic oligonucleotide
  Antisense Strand to SEQ ID NO: 499395
uuaagacgacagagcccac

SEQ ID NO: 499397 - RNA, 19 nt, Artificial Sequence
  Description of Artificial Sequence: Synthetic oligonucleotide
  Sense strand starting at position 2048 of SEQ ID NO: 317626
gcgaauucugcaccgcgaa

SEQ ID NO: 499398 - RNA, 19 nt, Artificial Sequence
  Description of Artificial Sequence: Synthetic oligonucleotide
  Antisense Strand to SEQ ID NO: 499397
uucgcggugcagaauucgc

SEQ ID NO: 499399 - RNA, 19 nt, Artificial Sequence
  Description of Artificial Sequence: Synthetic oligonucleotide
  Sense strand starting at position 2311 of SEQ ID NO: 317626
gcaggaguccuggacuuag

SEQ ID NO: 499400 - RNA, 19 nt, Artificial Sequence
  Description of Artificial Sequence: Synthetic oligonucleotide
  Antisense Strand to SEQ ID NO: 499399
cuaaguccaggacuccugc

SEQ ID NO: 499401 - RNA, 19 nt, Artificial Sequence
  Description of Artificial Sequence: Synthetic oligonucleotide
  Sense strand starting at position 2585 of SEQ ID NO: 317626
gaugaccugguguaaguuu

SEQ ID NO: 499402 - RNA, 19 nt, Artificial Sequence
  Description of Artificial Sequence: Synthetic oligonucleotide
  Antisense Strand to SEQ ID NO: 499401
aaacuuacaccaggucauc

SEQ ID NO: 499403 - RNA, 19 nt, Artificial Sequence
  Description of Artificial Sequence: Synthetic oligonucleotide
  Sense strand starting at position 2683 of SEQ ID NO: 317626
ugaguagaaauguguuaac

SEQ ID NO: 499404 - RNA, 19 nt, Artificial Sequence
  Description of Artificial Sequence: Synthetic oligonucleotide
  Antisense Strand to SEQ ID NO: 499403
guuaacacauuucuacuca

SEQ ID NO: 499405 - RNA, 19 nt, Artificial Sequence
  Description of Artificial Sequence: Synthetic oligonucleotide
  Sense strand starting at position 2732 of SEQ ID NO: 317626
auguuaggauucucugaag

SEQ ID NO: 499406 - RNA, 19 nt, Artificial Sequence
  Description of Artificial Sequence: Synthetic oligonucleotide
  Antisense Strand to SEQ ID NO: 499405
cuucagagaauccuaacau

SEQ ID NO: 499407 - RNA, 19 nt, Artificial Sequence
  Description of Artificial Sequence: Synthetic oligonucleotide
  Sense strand starting at position 2901 of SEQ ID NO: 317626
gagugaagggaugguguuu

SEQ ID NO: 499408 - RNA, 19 nt, Artificial Sequence
  Description of Artificial Sequence: Synthetic oligonucleotide
  Antisense Strand to SEQ ID NO: 499407
aaacaccaucccuucacuc

SEQ ID NO: 499409 - RNA, 19 nt, Artificial Sequence
  Description of Artificial Sequence: Synthetic oligonucleotide
  Sense strand starting at position 2968 of SEQ ID NO: 317626
ggcuucugugccucaguuu

SEQ ID NO: 499410 - RNA, 19 nt, Artificial Sequence
  Description of Artificial Sequence: Synthetic oligonucleotide
  Antisense Strand to SEQ ID NO: 499409
aaacugaggcacagaagcc

SEQ ID NO: 499411 - RNA, 19 nt, Artificial Sequence
  Description of Artificial Sequence: Synthetic oligonucleotide
  Sense strand starting at position 2993 of SEQ ID NO: 317626
cuguuuaguggagauaggu

SEQ ID NO: 499412 - RNA, 19 nt, Artificial Sequence
  Description of Artificial Sequence: Synthetic oligonucleotide
  Antisense Strand to SEQ ID NO: 499411
accuaucuccacuaaacag

SEQ ID NO: 499413 - RNA, 19 nt, Artificial Sequence
  Description of Artificial Sequence: Synthetic oligonucleotide
  Sense strand starting at position 3045 of SEQ ID NO: 317626
gggagagauucucuccuug

SEQ ID NO: 499414 - RNA, 19 nt, Artificial Sequence
  Description of Artificial Sequence: Synthetic oligonucleotide
  Antisense Strand to SEQ ID NO: 499413
caaggagagaaucucuccc

SEQ ID NO: 499415 - RNA, 19 nt, Artificial Sequence
  Description of Artificial Sequence: Synthetic oligonucleotide
  Sense strand starting at position 3047 of SEQ ID NO: 317626
gagagauucucuccuugug

SEQ ID NO: 499416 - RNA, 19 nt, Artificial Sequence
  Description of Artificial Sequence: Synthetic oligonucleotide
  Antisense Strand to SEQ ID NO: 499415
cacaaggagagaaucucuc

SEQ ID NO: 499417 - RNA, 19 nt, Artificial Sequence
  Description of Artificial Sequence: Synthetic oligonucleotide
  Sense strand starting at position 3049 of SEQ ID NO: 317626
gagauucucuccuugugaa

SEQ ID NO: 499418 - RNA, 19 nt, Artificial Sequence
  Description of Artificial Sequence: Synthetic oligonucleotide
  Antisense Strand to SEQ ID NO: 499417
uucacaaggagagaaucuc

SEQ ID NO: 499419 - RNA, 19 nt, Artificial Sequence
  Description of Artificial Sequence: Synthetic oligonucleotide
  Sense strand starting at position 3050 of SEQ ID NO: 317626
agauucucuccuugugaau

SEQ ID NO: 499420 - RNA, 19 nt, Artificial Sequence
  Description of Artificial Sequence: Synthetic oligonucleotide
  Antisense Strand to SEQ ID NO: 499419
auucacaaggagagaaucu

SEQ ID NO: 499421 - RNA, 19 nt, Artificial Sequence
  Description of Artificial Sequence: Synthetic oligonucleotide
  Sense strand starting at position 3063 of SEQ ID NO: 317626
gugaaugucacccauugua

SEQ ID NO: 499422 - RNA, 19 nt, Artificial Sequence
  Description of Artificial Sequence: Synthetic oligonucleotide
  Antisense Strand to SEQ ID NO: 499421
uacaaugggugacauucac

SEQ ID NO: 499423 - RNA, 19 nt, Artificial Sequence
  Description of Artificial Sequence: Synthetic oligonucleotide
  Sense strand starting at position 3160 of SEQ ID NO: 317626
acccaugguuucucagaau

SEQ ID NO: 499424 - RNA, 19 nt, Artificial Sequence
  Description of Artificial Sequence: Synthetic oligonucleotide
  Antisense Strand to SEQ ID NO: 499423
auucugagaaaccaugggu

SEQ ID NO: 499425 - RNA, 19 nt, Artificial Sequence
  Description of Artificial Sequence: Synthetic oligonucleotide
  Sense strand starting at position 3353 of SEQ ID NO: 317626
gguaaugauguguagguca

SEQ ID NO: 499426 - RNA, 19 nt, Artificial Sequence
  Description of Artificial Sequence: Synthetic oligonucleotide
  Antisense Strand to SEQ ID NO: 499425
ugaccuacacaucauuacc

SEQ ID NO: 499427 - RNA, 19 nt, Artificial Sequence
  Description of Artificial Sequence: Synthetic oligonucleotide
  Sense strand starting at position 3380 of SEQ ID NO: 317626
augugcaugcaagaauauu

SEQ ID NO: 499428 - RNA, 19 nt, Artificial Sequence
  Description of Artificial Sequence: Synthetic oligonucleotide
  Antisense Strand to SEQ ID NO: 499427
aauauucuugcaugcacau

SEQ ID NO: 499429 - RNA, 19 nt, Artificial Sequence
  Description of Artificial Sequence: Synthetic oligonucleotide
  Sense strand starting at position 3858 of SEQ ID NO: 317626
gagugaauuuaugaacaua

SEQ ID NO: 499430 - RNA, 19 nt, Artificial Sequence
  Description of Artificial Sequence: Synthetic oligonucleotide
  Antisense Strand to SEQ ID NO: 499429
uauguucauaaauucacuc

SEQ ID NO: 499431 - RNA, 19 nt, Artificial Sequence
  Description of Artificial Sequence: Synthetic oligonucleotide
  Sense strand starting at position 3873 of SEQ ID NO: 317626
cauaaauggguggguugau

SEQ ID NO: 499432 - RNA, 19 nt, Artificial Sequence
  Description of Artificial Sequence: Synthetic oligonucleotide
  Antisense Strand to SEQ ID NO: 499431
aucaacccacccauuuaug

SEQ ID NO: 499433 - RNA, 19 nt, Artificial Sequence
  Description of Artificial Sequence: Synthetic oligonucleotide
  Sense strand starting at position 3938 of SEQ ID NO: 317626
agcauugaugugcaaauua

SEQ ID NO: 499434 - RNA, 19 nt, Artificial Sequence
  Description of Artificial Sequence: Synthetic oligonucleotide
  Antisense Strand to SEQ ID NO: 499433
uaauuugcacaucaaugcu

SEQ ID NO: 499435 - RNA, 19 nt, Artificial Sequence
  Description of Artificial Sequence: Synthetic oligonucleotide
  Sense strand starting at position 71 of SEQ ID NO: 317627
ggcgccuuugagagguaau

SEQ ID NO: 499436 - RNA, 19 nt, Artificial Sequence
  Description of Artificial Sequence: Synthetic oligonucleotide
  Antisense Strand to SEQ ID NO: 499435
auuaccucucaaaggcgcc

SEQ ID NO: 499437 - RNA, 19 nt, Artificial Sequence
  Description of Artificial Sequence: Synthetic oligonucleotide
  Sense strand starting at position 74 of SEQ ID NO: 317627
gccuuugagagguaauuac

SEQ ID NO: 499438 - RNA, 19 nt, Artificial Sequence
  Description of Artificial Sequence: Synthetic oligonucleotide
  Antisense Strand to SEQ ID NO: 499437
guaauuaccucucaaaggc

SEQ ID NO: 499439 - RNA, 19 nt, Artificial Sequence
  Description of Artificial Sequence: Synthetic oligonucleotide
  Sense strand starting at position 78 of SEQ ID NO: 317627
uugagagguaauuacguca

SEQ ID NO: 499440 - RNA, 19 nt, Artificial Sequence
  Description of Artificial Sequence: Synthetic oligonucleotide
  Antisense Strand to SEQ ID NO: 499439
ugacguaauuaccucucaa

SEQ ID NO: 499441 - RNA, 19 nt, Artificial Sequence
  Description of Artificial Sequence: Synthetic oligonucleotide
  Sense strand starting at position 81 of SEQ ID NO: 317627
agagguaauuacgucaaga

SEQ ID NO: 499442 - RNA, 19 nt, Artificial Sequence
  Description of Artificial Sequence: Synthetic oligonucleotide
  Antisense Strand to SEQ ID NO: 499441
ucuugacguaauuaccucu

SEQ ID NO: 499443 - RNA, 19 nt, Artificial Sequence
  Description of Artificial Sequence: Synthetic oligonucleotide
  Sense strand starting at position 86 of SEQ ID NO: 317627
uaauuacgucaagagggua

SEQ ID NO: 499444 - RNA, 19 nt, Artificial Sequence
  Description of Artificial Sequence: Synthetic oligonucleotide
  Antisense Strand to SEQ ID NO: 499443
uacccucuugacguaauua

SEQ ID NO: 499445 - RNA, 19 nt, Artificial Sequence
  Description of Artificial Sequence: Synthetic oligonucleotide
  Sense strand starting at position 120 of SEQ ID NO: 317627
agauuaguguccuucuaag

SEQ ID NO: 499446 - RNA, 19 nt, Artificial Sequence
  Description of Artificial Sequence: Synthetic oligonucleotide
  Antisense Strand to SEQ ID NO: 499445
cuuagaaggacacuaaucu

SEQ ID NO: 499447 - RNA, 19 nt, Artificial Sequence
  Description of Artificial Sequence: Synthetic oligonucleotide
  Sense strand starting at position 187 of SEQ ID NO: 317627
ggaugacccucugcaaauc

SEQ ID NO: 499448 - RNA, 19 nt, Artificial Sequence
  Description of Artificial Sequence: Synthetic oligonucleotide
  Antisense Strand to SEQ ID NO: 499447
gauuugcagagggucaucc

SEQ ID NO: 499449 - RNA, 19 nt, Artificial Sequence
  Description of Artificial Sequence: Synthetic oligonucleotide
  Sense strand starting at position 281 of SEQ ID NO: 317627
guaagaaacagaugucugu

SEQ ID NO: 499450 - RNA, 19 nt, Artificial Sequence
  Description of Artificial Sequence: Synthetic oligonucleotide
  Antisense Strand to SEQ ID NO: 499449
acagacaucuguuucuuac

SEQ ID NO: 499451 - RNA, 19 nt, Artificial Sequence
  Description of Artificial Sequence: Synthetic oligonucleotide
  Sense strand starting at position 413 of SEQ ID NO: 317627
uugagacaguaguuuaaga

SEQ ID NO: 499452 - RNA, 19 nt, Artificial Sequence
  Description of Artificial Sequence: Synthetic oligonucleotide
  Antisense Strand to SEQ ID NO: 499451
ucuuaaacuacugucucaa

SEQ ID NO: 499453 - RNA, 19 nt, Artificial Sequence
  Description of Artificial Sequence: Synthetic oligonucleotide
  Sense strand starting at position 420 of SEQ ID NO: 317627
aguaguuuaagauaucagu

SEQ ID NO: 499454 - RNA, 19 nt, Artificial Sequence
  Description of Artificial Sequence: Synthetic oligonucleotide
  Antisense Strand to SEQ ID NO: 499453
acugauaucuuaaacuacu

SEQ ID NO: 499455 - RNA, 19 nt, Artificial Sequence
  Description of Artificial Sequence: Synthetic oligonucleotide
  Sense strand starting at position 429 of SEQ ID NO: 317627
agauaucaguaaucagagu

SEQ ID NO: 499456 - RNA, 19 nt, Artificial Sequence
  Description of Artificial Sequence: Synthetic oligonucleotide
  Antisense Strand to SEQ ID NO: 499455
acucugauuacugauaucu

SEQ ID NO: 499457 - RNA, 19 nt, Artificial Sequence
  Description of Artificial Sequence: Synthetic oligonucleotide
  Sense strand starting at position 727 of SEQ ID NO: 317627
guccuaguuccagaauaga

SEQ ID NO: 499458 - RNA, 19 nt, Artificial Sequence
  Description of Artificial Sequence: Synthetic oligonucleotide
  Antisense Strand to SEQ ID NO: 499457
ucuauucuggaacuaggac

SEQ ID NO: 499459 - RNA, 19 nt, Artificial Sequence
  Description of Artificial Sequence: Synthetic oligonucleotide
  Sense strand starting at position 1179 of SEQ ID NO: 317627
cuucucuguguuuaaugaa

SEQ ID NO: 499460 - RNA, 19 nt, Artificial Sequence
  Description of Artificial Sequence: Synthetic oligonucleotide
  Antisense Strand to SEQ ID NO: 499459
uucauuaaacacagagaag

SEQ ID NO: 499461 - RNA, 19 nt, Artificial Sequence
  Description of Artificial Sequence: Synthetic oligonucleotide
  Sense strand starting at position 1227 of SEQ ID NO: 317627
ggcagugacuacuuauaaa

SEQ ID NO: 499462 - RNA, 19 nt, Artificial Sequence
  Description of Artificial Sequence: Synthetic oligonucleotide
  Antisense Strand to SEQ ID NO: 499461
uuuauaaguagucacugcc

SEQ ID NO: 499463 - RNA, 19 nt, Artificial Sequence
  Description of Artificial Sequence: Synthetic oligonucleotide
  Sense strand starting at position 1304 of SEQ ID NO: 317627
cuacguugugaauauuaca

SEQ ID NO: 499464 - RNA, 19 nt, Artificial Sequence
  Description of Artificial Sequence: Synthetic oligonucleotide
  Antisense Strand to SEQ ID NO: 499463
uguaauauucacaacguag

SEQ ID NO: 499465 - RNA, 19 nt, Artificial Sequence
  Description of Artificial Sequence: Synthetic oligonucleotide
  Sense strand starting at position 1381 of SEQ ID NO: 317627
gcgguuacccuugcaguga

SEQ ID NO: 499466 - RNA, 19 nt, Artificial Sequence
  Description of Artificial Sequence: Synthetic oligonucleotide
  Antisense Strand to SEQ ID NO: 499465
ucacugcaaggguaaccgc

SEQ ID NO: 499467 - RNA, 19 nt, Artificial Sequence
  Description of Artificial Sequence: Synthetic oligonucleotide
  Sense strand starting at position 1541 of SEQ ID NO: 317627
aguacuugucaacgagaac

SEQ ID NO: 499468 - RNA, 19 nt, Artificial Sequence
  Description of Artificial Sequence: Synthetic oligonucleotide
  Antisense Strand to SEQ ID NO: 499467
guucucguugacaaguacu

SEQ ID NO: 499469 - RNA, 19 nt, Artificial Sequence
  Description of Artificial Sequence: Synthetic oligonucleotide
  Sense strand starting at position 1542 of SEQ ID NO: 317627
guacuugucaacgagaacu

SEQ ID NO: 499470 - RNA, 19 nt, Artificial Sequence
  Description of Artificial Sequence: Synthetic oligonucleotide
  Antisense Strand to SEQ ID NO: 499469
aguucucguugacaaguac

SEQ ID NO: 499471 - RNA, 19 nt, Artificial Sequence
  Description of Artificial Sequence: Synthetic oligonucleotide
  Sense strand starting at position 1544 of SEQ ID NO: 317627
acuugucaacgagaacuau

SEQ ID NO: 499472 - RNA, 19 nt, Artificial Sequence
  Description of Artificial Sequence: Synthetic oligonucleotide
  Antisense Strand to SEQ ID NO: 499471
auaguucucguugacaagu

SEQ ID NO: 499473 - RNA, 19 nt, Artificial Sequence
  Description of Artificial Sequence: Synthetic oligonucleotide
  Sense strand starting at position 1620 of SEQ ID NO: 317627
ugaaauaguccuggagcca

SEQ ID NO: 499474 - RNA, 19 nt, Artificial Sequence
  Description of Artificial Sequence: Synthetic oligonucleotide
  Antisense Strand to SEQ ID NO: 499473
uggcuccaggacuauuuca

SEQ ID NO: 499475 - RNA, 19 nt, Artificial Sequence
  Description of Artificial Sequence: Synthetic oligonucleotide
  Sense strand starting at position 1649 of SEQ ID NO: 317627
aguggagacuugcucugaa

SEQ ID NO: 499476 - RNA, 19 nt, Artificial Sequence
  Description of Artificial Sequence: Synthetic oligonucleotide
  Antisense Strand to SEQ ID NO: 499475
uucagagcaagucuccacu

SEQ ID NO: 499477 - RNA, 19 nt, Artificial Sequence
  Description of Artificial Sequence: Synthetic oligonucleotide
  Sense strand starting at position 1670 of SEQ ID NO: 317627
uuucucaaguaaguugaaa

SEQ ID NO: 499478 - RNA, 19 nt, Artificial Sequence
  Description of Artificial Sequence: Synthetic oligonucleotide
  Antisense Strand to SEQ ID NO: 499477
uuucaacuuacuugagaaa

SEQ ID NO: 499479 - RNA, 19 nt, Artificial Sequence
  Description of Artificial Sequence: Synthetic oligonucleotide
  Sense strand starting at position 2253 of SEQ ID NO: 317627
gaacaaagacuugguugua

SEQ ID NO: 499480 - RNA, 19 nt, Artificial Sequence
  Description of Artificial Sequence: Synthetic oligonucleotide
  Antisense Strand to SEQ ID NO: 499479
uacaaccaagucuuuguuc

SEQ ID NO: 499481 - RNA, 19 nt, Artificial Sequence
  Description of Artificial Sequence: Synthetic oligonucleotide
  Sense strand starting at position 2254 of SEQ ID NO: 317627
aacaaagacuugguuguau

SEQ ID NO: 499482 - RNA, 19 nt, Artificial Sequence
  Description of Artificial Sequence: Synthetic oligonucleotide
  Antisense Strand to SEQ ID NO: 499481
auacaaccaagucuuuguu

SEQ ID NO: 499483 - RNA, 19 nt, Artificial Sequence
  Description of Artificial Sequence: Synthetic oligonucleotide
  Sense strand starting at position 2256 of SEQ ID NO: 317627
caaagacuugguuguauug

SEQ ID NO: 499484 - RNA, 19 nt, Artificial Sequence
  Description of Artificial Sequence: Synthetic oligonucleotide
  Antisense Strand to SEQ ID NO: 499483
caauacaaccaagucuuug

SEQ ID NO: 499485 - RNA, 19 nt, Artificial Sequence
  Description of Artificial Sequence: Synthetic oligonucleotide
  Sense strand starting at position 2395 of SEQ ID NO: 317627
uuggacaaugcugaaaguu

SEQ ID NO: 499486 - RNA, 19 nt, Artificial Sequence
  Description of Artificial Sequence: Synthetic oligonucleotide
  Antisense Strand to SEQ ID NO: 499485
aacuuucagcauuguccaa

SEQ ID NO: 499487 - RNA, 19 nt, Artificial Sequence
  Description of Artificial Sequence: Synthetic oligonucleotide
  Sense strand starting at position 2405 of SEQ ID NO: 317627
cugaaaguugcacaucaua

SEQ ID NO: 499488 - RNA, 19 nt, Artificial Sequence
  Description of Artificial Sequence: Synthetic oligonucleotide
  Antisense Strand to SEQ ID NO: 499487
uaugaugugcaacuuucag

SEQ ID NO: 499489 - RNA, 19 nt, Artificial Sequence
  Description of Artificial Sequence: Synthetic oligonucleotide
  Sense strand starting at position 2418 of SEQ ID NO: 317627
aucauaguugcauacucau

SEQ ID NO: 499490 - RNA, 19 nt, Artificial Sequence
  Description of Artificial Sequence: Synthetic oligonucleotide
  Antisense Strand to SEQ ID NO: 499489
augaguaugcaacuaugau

SEQ ID NO: 499491 - RNA, 19 nt, Artificial Sequence
  Description of Artificial Sequence: Synthetic oligonucleotide
  Sense strand starting at position 2421 of SEQ ID NO: 317627
auaguugcauacucauuga

SEQ ID NO: 499492 - RNA, 19 nt, Artificial Sequence
  Description of Artificial Sequence: Synthetic oligonucleotide
  Antisense Strand to SEQ ID NO: 499491
ucaaugaguaugcaacuau

SEQ ID NO: 499493 - RNA, 19 nt, Artificial Sequence
  Description of Artificial Sequence: Synthetic oligonucleotide
  Sense strand starting at position 2483 of SEQ ID NO: 317627
ugacaugauuguccacauu

SEQ ID NO: 499494 - RNA, 19 nt, Artificial Sequence
  Description of Artificial Sequence: Synthetic oligonucleotide
  Antisense Strand to SEQ ID NO: 499493
aauguggacaaucauguca

SEQ ID NO: 499495 - RNA, 19 nt, Artificial Sequence
  Description of Artificial Sequence: Synthetic oligonucleotide
  Sense strand starting at position 2560 of SEQ ID NO: 317627
gguugcaggauaugagaua

SEQ ID NO: 499496 - RNA, 19 nt, Artificial Sequence
  Description of Artificial Sequence: Synthetic oligonucleotide
  Antisense Strand to SEQ ID NO: 499495
uaucucauauccugcaacc

SEQ ID NO: 499497 - RNA, 19 nt, Artificial Sequence
  Description of Artificial Sequence: Synthetic oligonucleotide
  Sense strand starting at position 3307 of SEQ ID NO: 317627
agguuuaaugcuuauacag

SEQ ID NO: 499498 - RNA, 19 nt, Artificial Sequence
  Description of Artificial Sequence: Synthetic oligonucleotide
  Antisense Strand to SEQ ID NO: 499497
cuguauaagcauuaaaccu

SEQ ID NO: 499499 - RNA, 19 nt, Artificial Sequence
  Description of Artificial Sequence: Synthetic oligonucleotide
  Sense strand starting at position 3484 of SEQ ID NO: 317627
cuuauagugcaguaaucaa

SEQ ID NO: 499500 - RNA, 19 nt, Artificial Sequence
  Description of Artificial Sequence: Synthetic oligonucleotide
  Antisense Strand to SEQ ID NO: 499499
uugauuacugcacuauaag

SEQ ID NO: 499501 - RNA, 19 nt, Artificial Sequence
  Description of Artificial Sequence: Synthetic oligonucleotide
  Sense strand starting at position 3519 of SEQ ID NO: 317627
uaugguuguagacgaaaua

SEQ ID NO: 499502 - RNA, 19 nt, Artificial Sequence
  Description of Artificial Sequence: Synthetic oligonucleotide
  Antisense Strand to SEQ ID NO: 499501
uauuucgucuacaaccaua

SEQ ID NO: 499503 - RNA, 19 nt, Artificial Sequence
  Description of Artificial Sequence: Synthetic oligonucleotide
  Sense strand starting at position 3721 of SEQ ID NO: 317627
ucaaguuguccagaacacu

SEQ ID NO: 499504 - RNA, 19 nt, Artificial Sequence
  Description of Artificial Sequence: Synthetic oligonucleotide
  Antisense Strand to SEQ ID NO: 499503
aguguucuggacaacuuga

SEQ ID NO: 499505 - RNA, 19 nt, Artificial Sequence
  Description of Artificial Sequence: Synthetic oligonucleotide
  Sense strand starting at position 3750 of SEQ ID NO: 317627
auauuaucugcacaugucu

SEQ ID NO: 499506 - RNA, 19 nt, Artificial Sequence
  Description of Artificial Sequence: Synthetic oligonucleotide
  Antisense Strand to SEQ ID NO: 499505
agacaugugcagauaauau

SEQ ID NO: 499507 - RNA, 19 nt, Artificial Sequence
  Description of Artificial Sequence: Synthetic oligonucleotide
  Sense strand starting at position 3783 of SEQ ID NO: 317627
ggaaacuuucuacagcuau

SEQ ID NO: 499508 - RNA, 19 nt, Artificial Sequence
  Description of Artificial Sequence: Synthetic oligonucleotide
  Antisense Strand to SEQ ID NO: 499507
auagcuguagaaaguuucc

SEQ ID NO: 499509 - RNA, 19 nt, Artificial Sequence
  Description of Artificial Sequence: Synthetic oligonucleotide
  Sense strand starting at position 3789 of SEQ ID NO: 317627
uuucuacagcuaugaugau

SEQ ID NO: 499510 - RNA, 19 nt, Artificial Sequence
  Description of Artificial Sequence: Synthetic oligonucleotide
  Antisense Strand to SEQ ID NO: 499509
aucaucauagcuguagaaa

SEQ ID NO: 499511 - RNA, 19 nt, Artificial Sequence
  Description of Artificial Sequence: Synthetic oligonucleotide
  Sense strand starting at position 3805 of SEQ ID NO: 317627
gaugauacucucggacacu

SEQ ID NO: 499512 - RNA, 19 nt, Artificial Sequence
  Description of Artificial Sequence: Synthetic oligonucleotide
  Antisense Strand to SEQ ID NO: 499511
aguguccgagaguaucauc

SEQ ID NO: 499513 - RNA, 19 nt, Artificial Sequence
  Description of Artificial Sequence: Synthetic oligonucleotide
  Sense strand starting at position 3874 of SEQ ID NO: 317627
gugcccuaggcagaauaaa

SEQ ID NO: 499514 - RNA, 19 nt, Artificial Sequence
  Description of Artificial Sequence: Synthetic oligonucleotide
  Antisense Strand to SEQ ID NO: 499513
uuuauucugccuagggcac

SEQ ID NO: 499515 - RNA, 19 nt, Artificial Sequence
  Description of Artificial Sequence: Synthetic oligonucleotide
  Sense strand starting at position 27 of SEQ ID NO: 317628
auggaacuugacuguacau

SEQ ID NO: 499516 - RNA, 19 nt, Artificial Sequence
  Description of Artificial Sequence: Synthetic oligonucleotide
  Antisense Strand to SEQ ID NO: 499515
auguacagucaaguuccau

SEQ ID NO: 499517 - RNA, 19 nt, Artificial Sequence
  Description of Artificial Sequence: Synthetic oligonucleotide
  Sense strand starting at position 99 of SEQ ID NO: 317628
auucguucuaggugcugaa

SEQ ID NO: 499518 - RNA, 19 nt, Artificial Sequence
  Description of Artificial Sequence: Synthetic oligonucleotide
  Antisense Strand to SEQ ID NO: 499517
uucagcaccuagaacgaau

SEQ ID NO: 499519 - RNA, 19 nt, Artificial Sequence
  Description of Artificial Sequence: Synthetic oligonucleotide
  Sense strand starting at position 103 of SEQ ID NO: 317628
guucuaggugcugaacuua

SEQ ID NO: 499520 - RNA, 19 nt, Artificial Sequence
  Description of Artificial Sequence: Synthetic oligonucleotide
  Antisense Strand to SEQ ID NO: 499519
uaaguucagcaccuagaac

SEQ ID NO: 499521 - RNA, 19 nt, Artificial Sequence
  Description of Artificial Sequence: Synthetic oligonucleotide
  Sense strand starting at position 130 of SEQ ID NO: 317628
gaugcaaaguuccucguua

SEQ ID NO: 499522 - RNA, 19 nt, Artificial Sequence
  Description of Artificial Sequence: Synthetic oligonucleotide
  Antisense Strand to SEQ ID NO: 499521
uaacgaggaacuuugcauc

SEQ ID NO: 499523 - RNA, 19 nt, Artificial Sequence
  Description of Artificial Sequence: Synthetic oligonucleotide
  Sense strand starting at position 131 of SEQ ID NO: 317628
augcaaaguuccucguuaa

SEQ ID NO: 499524 - RNA, 19 nt, Artificial Sequence
  Description of Artificial Sequence: Synthetic oligonucleotide
  Antisense Strand to SEQ ID NO: 499523
uuaacgaggaacuuugcau

SEQ ID NO: 499525 - RNA, 19 nt, Artificial Sequence
  Description of Artificial Sequence: Synthetic oligonucleotide
  Sense strand starting at position 152 of SEQ ID NO: 317628
caaaguuuggugugggaca

SEQ ID NO: 499526 - RNA, 19 nt, Artificial Sequence
  Description of Artificial Sequence: Synthetic oligonucleotide
  Antisense Strand to SEQ ID NO: 499525
ugucccacaccaaacuuug

SEQ ID NO: 499527 - RNA, 19 nt, Artificial Sequence
  Description of Artificial Sequence: Synthetic oligonucleotide
  Sense strand starting at position 154 of SEQ ID NO: 317628
aaguuuggugugggacaga

SEQ ID NO: 499528 - RNA, 19 nt, Artificial Sequence
  Description of Artificial Sequence: Synthetic oligonucleotide
  Antisense Strand to SEQ ID NO: 499527
ucugucccacaccaaacuu

SEQ ID NO: 499529 - RNA, 19 nt, Artificial Sequence
  Description of Artificial Sequence: Synthetic oligonucleotide
  Sense strand starting at position 580 of SEQ ID NO: 317628
caucaugaaugucuggaaa

SEQ ID NO: 499530 - RNA, 19 nt, Artificial Sequence
  Description of Artificial Sequence: Synthetic oligonucleotide
  Antisense Strand to SEQ ID NO: 499529
uuuccagacauucaugaug

SEQ ID NO: 499531 - RNA, 19 nt, Artificial Sequence
  Description of Artificial Sequence: Synthetic oligonucleotide
  Sense strand starting at position 988 of SEQ ID NO: 317628
ucuauuagauuugggaauc

SEQ ID NO: 499532 - RNA, 19 nt, Artificial Sequence
  Description of Artificial Sequence: Synthetic oligonucleotide
  Antisense Strand to SEQ ID NO: 499531
gauucccaaaucuaauaga

SEQ ID NO: 499533 - RNA, 19 nt, Artificial Sequence
  Description of Artificial Sequence: Synthetic oligonucleotide
  Sense strand starting at position 1461 of SEQ ID NO: 317628
aagaaagagucuccuaggu

SEQ ID NO: 499534 - RNA, 19 nt, Artificial Sequence
  Description of Artificial Sequence: Synthetic oligonucleotide
  Antisense Strand to SEQ ID NO: 499533
accuaggagacucuuucuu

SEQ ID NO: 499535 - RNA, 19 nt, Artificial Sequence
  Description of Artificial Sequence: Synthetic oligonucleotide
  Sense strand starting at position 1510 of SEQ ID NO: 317628
uugccaucuccagagauaa

SEQ ID NO: 499536 - RNA, 19 nt, Artificial Sequence
  Description of Artificial Sequence: Synthetic oligonucleotide
  Antisense Strand to SEQ ID NO: 499535
uuaucucuggagauggcaa

SEQ ID NO: 499537 - RNA, 19 nt, Artificial Sequence
  Description of Artificial Sequence: Synthetic oligonucleotide
  Sense strand starting at position 1556 of SEQ ID NO: 317628
uggugucuugaucacaaug

SEQ ID NO: 499538 - RNA, 19 nt, Artificial Sequence
  Description of Artificial Sequence: Synthetic oligonucleotide
  Antisense Strand to SEQ ID NO: 499537
cauugugaucaagacacca

SEQ ID NO: 499539 - RNA, 19 nt, Artificial Sequence
  Description of Artificial Sequence: Synthetic oligonucleotide
  Sense strand starting at position 1662 of SEQ ID NO: 317628
uuaggaaaucaccgccaga

SEQ ID NO: 499540 - RNA, 19 nt, Artificial Sequence
  Description of Artificial Sequence: Synthetic oligonucleotide
  Antisense Strand to SEQ ID NO: 499539
ucuggcggugauuuccuaa

SEQ ID NO: 499541 - RNA, 19 nt, Artificial Sequence
  Description of Artificial Sequence: Synthetic oligonucleotide
  Sense strand starting at position 1679 of SEQ ID NO: 317628
gacacuugcuuucuugaga

SEQ ID NO: 499542 - RNA, 19 nt, Artificial Sequence
  Description of Artificial Sequence: Synthetic oligonucleotide
  Antisense Strand to SEQ ID NO: 499541
ucucaagaaagcaaguguc

SEQ ID NO: 499543 - RNA, 19 nt, Artificial Sequence
  Description of Artificial Sequence: Synthetic oligonucleotide
  Sense strand starting at position 1680 of SEQ ID NO: 317628
acacuugcuuucuugagag

SEQ ID NO: 499544 - RNA, 19 nt, Artificial Sequence
  Description of Artificial Sequence: Synthetic oligonucleotide
  Antisense Strand to SEQ ID NO: 499543
cucucaagaaagcaagugu

SEQ ID NO: 499545 - RNA, 19 nt, Artificial Sequence
  Description of Artificial Sequence: Synthetic oligonucleotide
  Sense strand starting at position 1687 of SEQ ID NO: 317628
cuuucuugagaguguauua

SEQ ID NO: 499546 - RNA, 19 nt, Artificial Sequence
  Description of Artificial Sequence: Synthetic oligonucleotide
  Antisense Strand to SEQ ID NO: 499545
uaauacacucucaagaaag

SEQ ID NO: 499547 - RNA, 19 nt, Artificial Sequence
  Description of Artificial Sequence: Synthetic oligonucleotide
  Sense strand starting at position 1698 of SEQ ID NO: 317628
guguauuacuugcccaucu

SEQ ID NO: 499548 - RNA, 19 nt, Artificial Sequence
  Description of Artificial Sequence: Synthetic oligonucleotide
  Antisense Strand to SEQ ID NO: 499547
agaugggcaaguaauacac

SEQ ID NO: 499549 - RNA, 19 nt, Artificial Sequence
  Description of Artificial Sequence: Synthetic oligonucleotide
  Sense strand starting at position 1867 of SEQ ID NO: 317628
ccaaguagugagcaacaca

SEQ ID NO: 499550 - RNA, 19 nt, Artificial Sequence
  Description of Artificial Sequence: Synthetic oligonucleotide
  Antisense Strand to SEQ ID NO: 499549
uguguugcucacuacuugg

SEQ ID NO: 499551 - RNA, 19 nt, Artificial Sequence
  Description of Artificial Sequence: Synthetic oligonucleotide
  Sense strand starting at position 2359 of SEQ ID NO: 317628
cguggugagcgcucaauaa

SEQ ID NO: 499552 - RNA, 19 nt, Artificial Sequence
  Description of Artificial Sequence: Synthetic oligonucleotide
  Antisense Strand to SEQ ID NO: 499551
uuauugagcgcucaccacg

SEQ ID NO: 499553 - RNA, 19 nt, Artificial Sequence
  Description of Artificial Sequence: Synthetic oligonucleotide
  Sense strand starting at position 2892 of SEQ ID NO: 317628
ccauuaaugugacuguauu

SEQ ID NO: 499554 - RNA, 19 nt, Artificial Sequence
  Description of Artificial Sequence: Synthetic oligonucleotide
  Antisense Strand to SEQ ID NO: 499553
aauacagucacauuaaugg

SEQ ID NO: 499555 - RNA, 19 nt, Artificial Sequence
  Description of Artificial Sequence: Synthetic oligonucleotide
  Sense strand starting at position 2932 of SEQ ID NO: 317628
uuugaaagcaauggucagu

SEQ ID NO: 499556 - RNA, 19 nt, Artificial Sequence
  Description of Artificial Sequence: Synthetic oligonucleotide
  Antisense Strand to SEQ ID NO: 499555
acugaccauugcuuucaaa

SEQ ID NO: 499557 - RNA, 19 nt, Artificial Sequence
  Description of Artificial Sequence: Synthetic oligonucleotide
  Sense strand starting at position 2935 of SEQ ID NO: 317628
gaaagcaauggucagucaa

SEQ ID NO: 499558 - RNA, 19 nt, Artificial Sequence
  Description of Artificial Sequence: Synthetic oligonucleotide
  Antisense Strand to SEQ ID NO: 499557
uugacugaccauugcuuuc

SEQ ID NO: 499559 - RNA, 19 nt, Artificial Sequence
  Description of Artificial Sequence: Synthetic oligonucleotide
  Sense strand starting at position 2946 of SEQ ID NO: 317628
ucagucaacgcucacuauu

SEQ ID NO: 499560 - RNA, 19 nt, Artificial Sequence
  Description of Artificial Sequence: Synthetic oligonucleotide
  Antisense Strand to SEQ ID NO: 499559
aauagugagcguugacuga

SEQ ID NO: 499561 - RNA, 19 nt, Artificial Sequence
  Description of Artificial Sequence: Synthetic oligonucleotide
  Sense strand starting at position 2978 of SEQ ID NO: 317628
ugaaauguaauaggucgua

SEQ ID NO: 499562 - RNA, 19 nt, Artificial Sequence
  Description of Artificial Sequence: Synthetic oligonucleotide
  Antisense Strand to SEQ ID NO: 499561
uacgaccuauuacauuuca

SEQ ID NO: 499563 - RNA, 19 nt, Artificial Sequence
  Description of Artificial Sequence: Synthetic oligonucleotide
  Sense strand starting at position 2981 of SEQ ID NO: 317628
aauguaauaggucguauaa

SEQ ID NO: 499564 - RNA, 19 nt, Artificial Sequence
  Description of Artificial Sequence: Synthetic oligonucleotide
  Antisense Strand to SEQ ID NO: 499563
uuauacgaccuauuacauu

SEQ ID NO: 499565 - RNA, 19 nt, Artificial Sequence
  Description of Artificial Sequence: Synthetic oligonucleotide
  Sense strand starting at position 3020 of SEQ ID NO: 317628
cgaaacccagaucgauauu

SEQ ID NO: 499566 - RNA, 19 nt, Artificial Sequence
  Description of Artificial Sequence: Synthetic oligonucleotide
  Antisense Strand to SEQ ID NO: 499565
aauaucgaucuggguuucg

SEQ ID NO: 499567 - RNA, 19 nt, Artificial Sequence
  Description of Artificial Sequence: Synthetic oligonucleotide
  Sense strand starting at position 3048 of SEQ ID NO: 317628
ccuaaauguugacuugaag

SEQ ID NO: 499568 - RNA, 19 nt, Artificial Sequence
  Description of Artificial Sequence: Synthetic oligonucleotide
  Antisense Strand to SEQ ID NO: 499567
cuucaagucaacauuuagg

SEQ ID NO: 499569 - RNA, 19 nt, Artificial Sequence
  Description of Artificial Sequence: Synthetic oligonucleotide
  Sense strand starting at position 3051 of SEQ ID NO: 317628
aaauguugacuugaagcuu

SEQ ID NO: 499570 - RNA, 19 nt, Artificial Sequence
  Description of Artificial Sequence: Synthetic oligonucleotide
  Antisense Strand to SEQ ID NO: 499569
aagcuucaagucaacauuu

SEQ ID NO: 499571 - RNA, 19 nt, Artificial Sequence
  Description of Artificial Sequence: Synthetic oligonucleotide
  Sense strand starting at position 3086 of SEQ ID NO: 317628
gggagcaguucuccacuuu

SEQ ID NO: 499572 - RNA, 19 nt, Artificial Sequence
  Description of Artificial Sequence: Synthetic oligonucleotide
  Antisense Strand to SEQ ID NO: 499571
aaaguggagaacugcuccc

SEQ ID NO: 499573 - RNA, 19 nt, Artificial Sequence
  Description of Artificial Sequence: Synthetic oligonucleotide
  Sense strand starting at position 3119 of SEQ ID NO: 317628
ucuguuucugaauaagcuu

SEQ ID NO: 499574 - RNA, 19 nt, Artificial Sequence
  Description of Artificial Sequence: Synthetic oligonucleotide
  Antisense Strand to SEQ ID NO: 499573
aagcuuauucagaaacaga

SEQ ID NO: 499575 - RNA, 19 nt, Artificial Sequence
  Description of Artificial Sequence: Synthetic oligonucleotide
  Sense strand starting at position 3517 of SEQ ID NO: 317628
gcgccuggccaauaggaua

SEQ ID NO: 499576 - RNA, 19 nt, Artificial Sequence
  Description of Artificial Sequence: Synthetic oligonucleotide
  Antisense Strand to SEQ ID NO: 499575
uauccuauuggccaggcgc

SEQ ID NO: 499577 - RNA, 19 nt, Artificial Sequence
  Description of Artificial Sequence: Synthetic oligonucleotide
  Sense strand starting at position 3631 of SEQ ID NO: 317628
cuuaguuccuuaccuuaga

SEQ ID NO: 499578 - RNA, 19 nt, Artificial Sequence
  Description of Artificial Sequence: Synthetic oligonucleotide
  Antisense Strand to SEQ ID NO: 499577
ucuaagguaaggaacuaag

SEQ ID NO: 499579 - RNA, 19 nt, Artificial Sequence
  Description of Artificial Sequence: Synthetic oligonucleotide
  Sense strand starting at position 3650 of SEQ ID NO: 317628
auguauuauuugcagacga

SEQ ID NO: 499580 - RNA, 19 nt, Artificial Sequence
  Description of Artificial Sequence: Synthetic oligonucleotide
  Antisense Strand to SEQ ID NO: 499579
ucgucugcaaauaauacau

SEQ ID NO: 499581 - RNA, 19 nt, Artificial Sequence
  Description of Artificial Sequence: Synthetic oligonucleotide
  Sense strand starting at position 3787 of SEQ ID NO: 317628
uuuguuucccuuggagaua

SEQ ID NO: 499582 - RNA, 19 nt, Artificial Sequence
  Description of Artificial Sequence: Synthetic oligonucleotide
  Antisense Strand to SEQ ID NO: 499581
uaucuccaagggaaacaaa

SEQ ID NO: 499583 - RNA, 19 nt, Artificial Sequence
  Description of Artificial Sequence: Synthetic oligonucleotide
  Sense strand starting at position 3815 of SEQ ID NO: 317628
acauuuggguuucgauaag

SEQ ID NO: 499584 - RNA, 19 nt, Artificial Sequence
  Description of Artificial Sequence: Synthetic oligonucleotide
  Antisense Strand to SEQ ID NO: 499583
cuuaucgaaacccaaaugu

SEQ ID NO: 499585 - RNA, 19 nt, Artificial Sequence
  Description of Artificial Sequence: Synthetic oligonucleotide
  Sense strand starting at position 3863 of SEQ ID NO: 317628
ccagaaccuucuuuguaag

SEQ ID NO: 499586 - RNA, 19 nt, Artificial Sequence
  Description of Artificial Sequence: Synthetic oligonucleotide
  Antisense Strand to SEQ ID NO: 499585
cuuacaaagaagguucugg

SEQ ID NO: 499587 - RNA, 19 nt, Artificial Sequence
  Description of Artificial Sequence: Synthetic oligonucleotide
  Sense strand starting at position 3889 of SEQ ID NO: 317628
guggcaaugucauugaaag

SEQ ID NO: 499588 - RNA, 19 nt, Artificial Sequence
  Description of Artificial Sequence: Synthetic oligonucleotide
  Antisense Strand to SEQ ID NO: 499587
cuuucaaugacauugccac

SEQ ID NO: 499589 - RNA, 19 nt, Artificial Sequence
  Description of Artificial Sequence: Synthetic oligonucleotide
  Sense strand starting at position 3890 of SEQ ID NO: 317628
uggcaaugucauugaaagc

SEQ ID NO: 499590 - RNA, 19 nt, Artificial Sequence
  Description of Artificial Sequence: Synthetic oligonucleotide
  Antisense Strand to SEQ ID NO: 499589
gcuuucaaugacauugcca

SEQ ID NO: 499591 - RNA, 19 nt, Artificial Sequence
  Description of Artificial Sequence: Synthetic oligonucleotide
  Sense strand starting at position 3948 of SEQ ID NO: 317628
agccgaggauccuuucuuu

SEQ ID NO: 499592 - RNA, 19 nt, Artificial Sequence
  Description of Artificial Sequence: Synthetic oligonucleotide
  Antisense Strand to SEQ ID NO: 499591
aaagaaaggauccucggcu

SEQ ID NO: 499593 - RNA, 19 nt, Artificial Sequence
  Description of Artificial Sequence: Synthetic oligonucleotide
  Sense strand starting at position 3961 of SEQ ID NO: 317628
uucuuuggguugucggaaa

SEQ ID NO: 499594 - RNA, 19 nt, Artificial Sequence
  Description of Artificial Sequence: Synthetic oligonucleotide
  Antisense Strand to SEQ ID NO: 499593
uuuccgacaacccaaagaa

SEQ ID NO: 499595 - RNA, 19 nt, Artificial Sequence
  Description of Artificial Sequence: Synthetic oligonucleotide
  Sense strand starting at position 384 of SEQ ID NO: 317629
ggaaaccucugccgugaca

SEQ ID NO: 499596 - RNA, 19 nt, Artificial Sequence
  Description of Artificial Sequence: Synthetic oligonucleotide
  Antisense Strand to SEQ ID NO: 499595
ugucacggcagagguuucc

SEQ ID NO: 499597 - RNA, 19 nt, Artificial Sequence
  Description of Artificial Sequence: Synthetic oligonucleotide
  Sense strand starting at position 927 of SEQ ID NO: 317629
ggaccugucccggauucca

SEQ ID NO: 499598 - RNA, 19 nt, Artificial Sequence
  Description of Artificial Sequence: Synthetic oligonucleotide
  Antisense Strand to SEQ ID NO: 499597
uggaauccgggacaggucc

SEQ ID NO: 499599 - RNA, 19 nt, Artificial Sequence
  Description of Artificial Sequence: Synthetic oligonucleotide
  Sense strand starting at position 1054 of SEQ ID NO: 317629
ucaggauccucucuggaca

SEQ ID NO: 499600 - RNA, 19 nt, Artificial Sequence
  Description of Artificial Sequence: Synthetic oligonucleotide
  Antisense Strand to SEQ ID NO: 499599
uguccagagaggauccuga

SEQ ID NO: 499601 - RNA, 19 nt, Artificial Sequence
  Description of Artificial Sequence: Synthetic oligonucleotide
  Sense strand starting at position 1055 of SEQ ID NO: 317629
caggauccucucuggacau

SEQ ID NO: 499602 - RNA, 19 nt, Artificial Sequence
  Description of Artificial Sequence: Synthetic oligonucleotide
  Antisense Strand to SEQ ID NO: 499601
auguccagagaggauccug

SEQ ID NO: 499603 - RNA, 19 nt, Artificial Sequence
  Description of Artificial Sequence: Synthetic oligonucleotide
  Sense strand starting at position 1109 of SEQ ID NO: 317629
aaauguggguucucucaga

SEQ ID NO: 499604 - RNA, 19 nt, Artificial Sequence
  Description of Artificial Sequence: Synthetic oligonucleotide
  Antisense Strand to SEQ ID NO: 499603
ucugagagaacccacauuu

SEQ ID NO: 499605 - RNA, 19 nt, Artificial Sequence
  Description of Artificial Sequence: Synthetic oligonucleotide
  Sense strand starting at position 1348 of SEQ ID NO: 317629
cguuguggcccuggauaga

SEQ ID NO: 499606 - RNA, 19 nt, Artificial Sequence
  Description of Artificial Sequence: Synthetic oligonucleotide
  Antisense Strand to SEQ ID NO: 499605
ucuauccagggccacaacg

SEQ ID NO: 499607 - RNA, 19 nt, Artificial Sequence
  Description of Artificial Sequence: Synthetic oligonucleotide
  Sense strand starting at position 1474 of SEQ ID NO: 317629
cgaugaagaucuguccaag

SEQ ID NO: 499608 - RNA, 19 nt, Artificial Sequence
  Description of Artificial Sequence: Synthetic oligonucleotide
  Antisense Strand to SEQ ID NO: 499607
cuuggacagaucuucaucg

SEQ ID NO: 499609 - RNA, 19 nt, Artificial Sequence
  Description of Artificial Sequence: Synthetic oligonucleotide
  Sense strand starting at position 1867 of SEQ ID NO: 317629
cccugaguaugcucugcaa

SEQ ID NO: 499610 - RNA, 19 nt, Artificial Sequence
  Description of Artificial Sequence: Synthetic oligonucleotide
  Antisense Strand to SEQ ID NO: 499609
uugcagagcauacucaggg

SEQ ID NO: 499611 - RNA, 19 nt, Artificial Sequence
  Description of Artificial Sequence: Synthetic oligonucleotide
  Sense strand starting at position 2242 of SEQ ID NO: 317629
cgcuguguauugugggagu

SEQ ID NO: 499612 - RNA, 19 nt, Artificial Sequence
  Description of Artificial Sequence: Synthetic oligonucleotide
  Antisense Strand to SEQ ID NO: 499611
acucccacaauacacagcg

SEQ ID NO: 499613 - RNA, 19 nt, Artificial Sequence
  Description of Artificial Sequence: Synthetic oligonucleotide
  Sense strand starting at position 2245 of SEQ ID NO: 317629
uguguauugugggaguugu

SEQ ID NO: 499614 - RNA, 19 nt, Artificial Sequence
  Description of Artificial Sequence: Synthetic oligonucleotide
  Antisense Strand to SEQ ID NO: 499613
acaacucccacaauacaca

SEQ ID NO: 499615 - RNA, 19 nt, Artificial Sequence
  Description of Artificial Sequence: Synthetic oligonucleotide
  Sense strand starting at position 2246 of SEQ ID NO: 317629
guguauugugggaguugua

SEQ ID NO: 499616 - RNA, 19 nt, Artificial Sequence
  Description of Artificial Sequence: Synthetic oligonucleotide
  Antisense Strand to SEQ ID NO: 499615
uacaacucccacaauacac

SEQ ID NO: 499617 - RNA, 19 nt, Artificial Sequence
  Description of Artificial Sequence: Synthetic oligonucleotide
  Sense strand starting at position 2622 of SEQ ID NO: 317629
aucagcggugcguucuaaa

SEQ ID NO: 499618 - RNA, 19 nt, Artificial Sequence
  Description of Artificial Sequence: Synthetic oligonucleotide
  Antisense Strand to SEQ ID NO: 499617
uuuagaacgcaccgcugau

SEQ ID NO: 499619 - RNA, 19 nt, Artificial Sequence
  Description of Artificial Sequence: Synthetic oligonucleotide
  Sense strand starting at position 2723 of SEQ ID NO: 317629
cuaugugucaagcagagag

SEQ ID NO: 499620 - RNA, 19 nt, Artificial Sequence
  Description of Artificial Sequence: Synthetic oligonucleotide
  Antisense Strand to SEQ ID NO: 499619
cucucugcuugacacauag

SEQ ID NO: 499621 - RNA, 19 nt, Artificial Sequence
  Description of Artificial Sequence: Synthetic oligonucleotide
  Sense strand starting at position 2727 of SEQ ID NO: 317629
gugucaagcagagagcuaa

SEQ ID NO: 499622 - RNA, 19 nt, Artificial Sequence
  Description of Artificial Sequence: Synthetic oligonucleotide
  Antisense Strand to SEQ ID NO: 499621
uuagcucucugcuugacac

SEQ ID NO: 499623 - RNA, 19 nt, Artificial Sequence
  Description of Artificial Sequence: Synthetic oligonucleotide
  Sense strand starting at position 2907 of SEQ ID NO: 317629
gucucuggcuuguugugaa

SEQ ID NO: 499624 - RNA, 19 nt, Artificial Sequence
  Description of Artificial Sequence: Synthetic oligonucleotide
  Antisense Strand to SEQ ID NO: 499623
uucacaacaagccagagac

SEQ ID NO: 499625 - RNA, 19 nt, Artificial Sequence
  Description of Artificial Sequence: Synthetic oligonucleotide
  Sense strand starting at position 2917 of SEQ ID NO: 317629
uguugugaaacgugcagau

SEQ ID NO: 499626 - RNA, 19 nt, Artificial Sequence
  Description of Artificial Sequence: Synthetic oligonucleotide
  Antisense Strand to SEQ ID NO: 499625
aucugcacguuucacaaca

SEQ ID NO: 499627 - RNA, 19 nt, Artificial Sequence
  Description of Artificial Sequence: Synthetic oligonucleotide
  Sense strand starting at position 2919 of SEQ ID NO: 317629
uugugaaacgugcagaugu

SEQ ID NO: 499628 - RNA, 19 nt, Artificial Sequence
  Description of Artificial Sequence: Synthetic oligonucleotide
  Antisense Strand to SEQ ID NO: 499627
acaucugcacguuucacaa

SEQ ID NO: 499629 - RNA, 19 nt, Artificial Sequence
  Description of Artificial Sequence: Synthetic oligonucleotide
  Sense strand starting at position 2921 of SEQ ID NO: 317629
gugaaacgugcagauguaa

SEQ ID NO: 499630 - RNA, 19 nt, Artificial Sequence
  Description of Artificial Sequence: Synthetic oligonucleotide
  Antisense Strand to SEQ ID NO: 499629
uuacaucugcacguuucac

SEQ ID NO: 499631 - RNA, 19 nt, Artificial Sequence
  Description of Artificial Sequence: Synthetic oligonucleotide
  Sense strand starting at position 2980 of SEQ ID NO: 317629
ugagaagucugaccuguuc

SEQ ID NO: 499632 - RNA, 19 nt, Artificial Sequence
  Description of Artificial Sequence: Synthetic oligonucleotide
  Antisense Strand to SEQ ID NO: 499631
gaacaggucagacuucuca

SEQ ID NO: 499633 - RNA, 19 nt, Artificial Sequence
  Description of Artificial Sequence: Synthetic oligonucleotide
  Sense strand starting at position 3018 of SEQ ID NO: 317629
agugccaggugcucagaaa

SEQ ID NO: 499634 - RNA, 19 nt, Artificial Sequence
  Description of Artificial Sequence: Synthetic oligonucleotide
  Antisense Strand to SEQ ID NO: 499633
uuucugagcaccuggcacu

SEQ ID NO: 499635 - RNA, 19 nt, Artificial Sequence
  Description of Artificial Sequence: Synthetic oligonucleotide
  Sense strand starting at position 3089 of SEQ ID NO: 317629
gcgcgcuggcaucuaagau

SEQ ID NO: 499636 - RNA, 19 nt, Artificial Sequence
  Description of Artificial Sequence: Synthetic oligonucleotide
  Antisense Strand to SEQ ID NO: 499635
aucuuagaugccagcgcgc

SEQ ID NO: 499637 - RNA, 19 nt, Artificial Sequence
  Description of Artificial Sequence: Synthetic oligonucleotide
  Sense strand starting at position 3090 of SEQ ID NO: 317629
cgcgcuggcaucuaagauu

SEQ ID NO: 499638 - RNA, 19 nt, Artificial Sequence
  Description of Artificial Sequence: Synthetic oligonucleotide
  Antisense Strand to SEQ ID NO: 499637
aaucuuagaugccagcgcg

SEQ ID NO: 499639 - RNA, 19 nt, Artificial Sequence
  Description of Artificial Sequence: Synthetic oligonucleotide
  Sense strand starting at position 3093 of SEQ ID NO: 317629
gcuggcaucuaagauuucu

SEQ ID NO: 499640 - RNA, 19 nt, Artificial Sequence
  Description of Artificial Sequence: Synthetic oligonucleotide
  Antisense Strand to SEQ ID NO: 499639
agaaaucuuagaugccagc

SEQ ID NO: 499641 - RNA, 19 nt, Artificial Sequence
  Description of Artificial Sequence: Synthetic oligonucleotide
  Sense strand starting at position 3247 of SEQ ID NO: 317629
acuuguucuuucuggaaac

SEQ ID NO: 499642 - RNA, 19 nt, Artificial Sequence
  Description of Artificial Sequence: Synthetic oligonucleotide
  Antisense Strand to SEQ ID NO: 499641
guuuccagaaagaacaagu

SEQ ID NO: 499643 - RNA, 19 nt, Artificial Sequence
  Description of Artificial Sequence: Synthetic oligonucleotide
  Sense strand starting at position 3249 of SEQ ID NO: 317629
uuguucuuucuggaaacua

SEQ ID NO: 499644 - RNA, 19 nt, Artificial Sequence
  Description of Artificial Sequence: Synthetic oligonucleotide
  Antisense Strand to SEQ ID NO: 499643
uaguuuccagaaagaacaa

SEQ ID NO: 499645 - RNA, 19 nt, Artificial Sequence
  Description of Artificial Sequence: Synthetic oligonucleotide
  Sense strand starting at position 3260 of SEQ ID NO: 317629
ggaaacuacucccaucaga

SEQ ID NO: 499646 - RNA, 19 nt, Artificial Sequence
  Description of Artificial Sequence: Synthetic oligonucleotide
  Antisense Strand to SEQ ID NO: 499645
ucugaugggaguaguuucc

SEQ ID NO: 499647 - RNA, 19 nt, Artificial Sequence
  Description of Artificial Sequence: Synthetic oligonucleotide
  Sense strand starting at position 3299 of SEQ ID NO: 317629
ugaagcucuuuaucaaagu

SEQ ID NO: 499648 - RNA, 19 nt, Artificial Sequence
  Description of Artificial Sequence: Synthetic oligonucleotide
  Antisense Strand to SEQ ID NO: 499647
acuuugauaaagagcuuca

SEQ ID NO: 499649 - RNA, 19 nt, Artificial Sequence
  Description of Artificial Sequence: Synthetic oligonucleotide
  Sense strand starting at position 3360 of SEQ ID NO: 317629
gcgcucaucucuuccuuga

SEQ ID NO: 499650 - RNA, 19 nt, Artificial Sequence
  Description of Artificial Sequence: Synthetic oligonucleotide
  Antisense Strand to SEQ ID NO: 499649
ucaaggaagagaugagcgc

SEQ ID NO: 499651 - RNA, 19 nt, Artificial Sequence
  Description of Artificial Sequence: Synthetic oligonucleotide
  Sense strand starting at position 3408 of SEQ ID NO: 317629
gugcccucuccgugacaca

SEQ ID NO: 499652 - RNA, 19 nt, Artificial Sequence
  Description of Artificial Sequence: Synthetic oligonucleotide
  Antisense Strand to SEQ ID NO: 499651
ugugucacggagagggcac

SEQ ID NO: 499653 - RNA, 19 nt, Artificial Sequence
  Description of Artificial Sequence: Synthetic oligonucleotide
  Sense strand starting at position 3430 of SEQ ID NO: 317629
uccucacuuggcugaaaca

SEQ ID NO: 499654 - RNA, 19 nt, Artificial Sequence
  Description of Artificial Sequence: Synthetic oligonucleotide
  Antisense Strand to SEQ ID NO: 499653
uguuucagccaagugagga

SEQ ID NO: 499655 - RNA, 19 nt, Artificial Sequence
  Description of Artificial Sequence: Synthetic oligonucleotide
  Sense strand starting at position 3836 of SEQ ID NO: 317629
gggcuuguccacugaguga

SEQ ID NO: 499656 - RNA, 19 nt, Artificial Sequence
  Description of Artificial Sequence: Synthetic oligonucleotide
  Antisense Strand to SEQ ID NO: 499655
ucacucaguggacaagccc

SEQ ID NO: 499657 - RNA, 19 nt, Artificial Sequence
  Description of Artificial Sequence: Synthetic oligonucleotide
  Sense strand starting at position 3858 of SEQ ID NO: 317629
gcuguucucugugggucua

SEQ ID NO: 499658 - RNA, 19 nt, Artificial Sequence
  Description of Artificial Sequence: Synthetic oligonucleotide
  Antisense Strand to SEQ ID NO: 499657
uagacccacagagaacagc

SEQ ID NO: 499659 - RNA, 19 nt, Artificial Sequence
  Description of Artificial Sequence: Synthetic oligonucleotide
  Sense strand starting at position 3869 of SEQ ID NO: 317629
ugggucuauccuuggccaa

SEQ ID NO: 499660 - RNA, 19 nt, Artificial Sequence
  Description of Artificial Sequence: Synthetic oligonucleotide
  Antisense Strand to SEQ ID NO: 499659
uuggccaaggauagaccca

SEQ ID NO: 499661 - RNA, 19 nt, Artificial Sequence
  Description of Artificial Sequence: Synthetic oligonucleotide
  Sense strand starting at position 3871 of SEQ ID NO: 317629
ggucuauccuuggccaacu

SEQ ID NO: 499662 - RNA, 19 nt, Artificial Sequence
  Description of Artificial Sequence: Synthetic oligonucleotide
  Antisense Strand to SEQ ID NO: 499661
aguuggccaaggauagacc

SEQ ID NO: 499663 - RNA, 19 nt, Artificial Sequence
  Description of Artificial Sequence: Synthetic oligonucleotide
  Sense strand starting at position 3902 of SEQ ID NO: 317629
gcaguuguaucugcucaga

SEQ ID NO: 499664 - RNA, 19 nt, Artificial Sequence
  Description of Artificial Sequence: Synthetic oligonucleotide
  Antisense Strand to SEQ ID NO: 499663
ucugagcagauacaacugc

SEQ ID NO: 499665 - RNA, 19 nt, Artificial Sequence
  Description of Artificial Sequence: Synthetic oligonucleotide
  Sense strand starting at position 3904 of SEQ ID NO: 317629
aguuguaucugcucagagg

SEQ ID NO: 499666 - RNA, 19 nt, Artificial Sequence
  Description of Artificial Sequence: Synthetic oligonucleotide
  Antisense Strand to SEQ ID NO: 499665
ccucugagcagauacaacu

SEQ ID NO: 499667 - RNA, 19 nt, Artificial Sequence
  Description of Artificial Sequence: Synthetic oligonucleotide
  Sense strand starting at position 3944 of SEQ ID NO: 317629
uuugaaauugugcauggga

SEQ ID NO: 499668 - RNA, 19 nt, Artificial Sequence
  Description of Artificial Sequence: Synthetic oligonucleotide
  Antisense Strand to SEQ ID NO: 499667
ucccaugcacaauuucaaa

SEQ ID NO: 499669 - RNA, 19 nt, Artificial Sequence
  Description of Artificial Sequence: Synthetic oligonucleotide
  Sense strand starting at position 3946 of SEQ ID NO: 317629
ugaaauugugcaugggaug

SEQ ID NO: 499670 - RNA, 19 nt, Artificial Sequence
  Description of Artificial Sequence: Synthetic oligonucleotide
  Antisense Strand to SEQ ID NO: 499669
caucccaugcacaauuuca

SEQ ID NO: 499671 - RNA, 19 nt, Artificial Sequence
  Description of Artificial Sequence: Synthetic oligonucleotide
  Sense strand starting at position 3947 of SEQ ID NO: 317629
gaaauugugcaugggauga

SEQ ID NO: 499672 - RNA, 19 nt, Artificial Sequence
  Description of Artificial Sequence: Synthetic oligonucleotide
  Antisense Strand to SEQ ID NO: 499671
ucaucccaugcacaauuuc

SEQ ID NO: 499673 - RNA, 19 nt, Artificial Sequence
  Description of Artificial Sequence: Synthetic oligonucleotide
  Sense strand starting at position 192 of SEQ ID NO: 317630
cuggcuacuuccuccgaga

SEQ ID NO: 499674 - RNA, 19 nt, Artificial Sequence
  Description of Artificial Sequence: Synthetic oligonucleotide
  Antisense Strand to SEQ ID NO: 499673
ucucggaggaaguagccag

SEQ ID NO: 499675 - RNA, 19 nt, Artificial Sequence
  Description of Artificial Sequence: Synthetic oligonucleotide
  Sense strand starting at position 194 of SEQ ID NO: 317630
ggcuacuuccuccgagacu

SEQ ID NO: 499676 - RNA, 19 nt, Artificial Sequence
  Description of Artificial Sequence: Synthetic oligonucleotide
  Antisense Strand to SEQ ID NO: 499675
agucucggaggaaguagcc

SEQ ID NO: 499677 - RNA, 19 nt, Artificial Sequence
  Description of Artificial Sequence: Synthetic oligonucleotide
  Sense strand starting at position 285 of SEQ ID NO: 317630
accggucaccugugagagu

SEQ ID NO: 499678 - RNA, 19 nt, Artificial Sequence
  Description of Artificial Sequence: Synthetic oligonucleotide
  Antisense Strand to SEQ ID NO: 499677
acucucacaggugaccggu

SEQ ID NO: 499679 - RNA, 19 nt, Artificial Sequence
  Description of Artificial Sequence: Synthetic oligonucleotide
  Sense strand starting at position 296 of SEQ ID NO: 317630
gugagaguggcauauaugu

SEQ ID NO: 499680 - RNA, 19 nt, Artificial Sequence
  Description of Artificial Sequence: Synthetic oligonucleotide
  Antisense Strand to SEQ ID NO: 499679
acauauaugccacucucac

SEQ ID NO: 499681 - RNA, 19 nt, Artificial Sequence
  Description of Artificial Sequence: Synthetic oligonucleotide
  Sense strand starting at position 298 of SEQ ID NO: 317630
gagaguggcauauauguca

SEQ ID NO: 499682 - RNA, 19 nt, Artificial Sequence
  Description of Artificial Sequence: Synthetic oligonucleotide
  Antisense Strand to SEQ ID NO: 499681
ugacauauaugccacucuc

SEQ ID NO: 499683 - RNA, 19 nt, Artificial Sequence
  Description of Artificial Sequence: Synthetic oligonucleotide
  Sense strand starting at position 305 of SEQ ID NO: 317630
gcauauaugucacccagcu

SEQ ID NO: 499684 - RNA, 19 nt, Artificial Sequence
  Description of Artificial Sequence: Synthetic oligonucleotide
  Antisense Strand to SEQ ID NO: 499683
agcugggugacauauaugc

SEQ ID NO: 499685 - RNA, 19 nt, Artificial Sequence
  Description of Artificial Sequence: Synthetic oligonucleotide
  Sense strand starting at position 339 of SEQ ID NO: 317630
aguggcauagcucagauaa

SEQ ID NO: 499686 - RNA, 19 nt, Artificial Sequence
  Description of Artificial Sequence: Synthetic oligonucleotide
  Antisense Strand to SEQ ID NO: 499685
uuaucugagcuaugccacu

SEQ ID NO: 499687 - RNA, 19 nt, Artificial Sequence
  Description of Artificial Sequence: Synthetic oligonucleotide
  Sense strand starting at position 350 of SEQ ID NO: 317630
ucagauaaucccugcagga

SEQ ID NO: 499688 - RNA, 19 nt, Artificial Sequence
  Description of Artificial Sequence: Synthetic oligonucleotide
  Antisense Strand to SEQ ID NO: 499687
uccugcagggauuaucuga

SEQ ID NO: 499689 - RNA, 19 nt, Artificial Sequence
  Description of Artificial Sequence: Synthetic oligonucleotide
  Sense strand starting at position 482 of SEQ ID NO: 317630
ggaacuuguccuugacccu

SEQ ID NO: 499690 - RNA, 19 nt, Artificial Sequence
  Description of Artificial Sequence: Synthetic oligonucleotide
  Antisense Strand to SEQ ID NO: 499689
agggucaaggacaaguucc

SEQ ID NO: 499691 - RNA, 19 nt, Artificial Sequence
  Description of Artificial Sequence: Synthetic oligonucleotide
  Sense strand starting at position 508 of SEQ ID NO: 317630
acuguaacagcuugaguua

SEQ ID NO: 499692 - RNA, 19 nt, Artificial Sequence
  Description of Artificial Sequence: Synthetic oligonucleotide
  Antisense Strand to SEQ ID NO: 499691
uaacucaagcuguuacagu

SEQ ID NO: 499693 - RNA, 19 nt, Artificial Sequence
  Description of Artificial Sequence: Synthetic oligonucleotide
  Sense strand starting at position 550 of SEQ ID NO: 317630
uucuuucucccuggaagca

SEQ ID NO: 499694 - RNA, 19 nt, Artificial Sequence
  Description of Artificial Sequence: Synthetic oligonucleotide
  Antisense Strand to SEQ ID NO: 499693
ugcuuccagggagaaagaa

SEQ ID NO: 499695 - RNA, 19 nt, Artificial Sequence
  Description of Artificial Sequence: Synthetic oligonucleotide
  Sense strand starting at position 641 of SEQ ID NO: 317630
cccuuuagcccuggugcaa

SEQ ID NO: 499696 - RNA, 19 nt, Artificial Sequence
  Description of Artificial Sequence: Synthetic oligonucleotide
  Antisense Strand to SEQ ID NO: 499695
uugcaccagggcuaaaggg

SEQ ID NO: 499697 - RNA, 19 nt, Artificial Sequence
  Description of Artificial Sequence: Synthetic oligonucleotide
  Sense strand starting at position 737 of SEQ ID NO: 317630
uccuaucuguaaguaauca

SEQ ID NO: 499698 - RNA, 19 nt, Artificial Sequence
  Description of Artificial Sequence: Synthetic oligonucleotide
  Antisense Strand to SEQ ID NO: 499697
ugauuacuuacagauagga

SEQ ID NO: 499699 - RNA, 19 nt, Artificial Sequence
  Description of Artificial Sequence: Synthetic oligonucleotide
  Sense strand starting at position 767 of SEQ ID NO: 317630
guaacuuguaugugagcau

SEQ ID NO: 499700 - RNA, 19 nt, Artificial Sequence
  Description of Artificial Sequence: Synthetic oligonucleotide
  Antisense Strand to SEQ ID NO: 499699
augcucacauacaaguuac

SEQ ID NO: 499701 - RNA, 19 nt, Artificial Sequence
  Description of Artificial Sequence: Synthetic oligonucleotide
  Sense strand starting at position 770 of SEQ ID NO: 317630
acuuguaugugagcaugua

SEQ ID NO: 499702 - RNA, 19 nt, Artificial Sequence
  Description of Artificial Sequence: Synthetic oligonucleotide
  Antisense Strand to SEQ ID NO: 499701
uacaugcucacauacaagu

SEQ ID NO: 499703 - RNA, 19 nt, Artificial Sequence
  Description of Artificial Sequence: Synthetic oligonucleotide
  Sense strand starting at position 841 of SEQ ID NO: 317630
gcagaaguuccugguauuu

SEQ ID NO: 499704 - RNA, 19 nt, Artificial Sequence
  Description of Artificial Sequence: Synthetic oligonucleotide
  Antisense Strand to SEQ ID NO: 499703
aaauaccaggaacuucugc

SEQ ID NO: 499705 - RNA, 19 nt, Artificial Sequence
  Description of Artificial Sequence: Synthetic oligonucleotide
  Sense strand starting at position 853 of SEQ ID NO: 317630
gguauuuggcuaugacgau

SEQ ID NO: 499706 - RNA, 19 nt, Artificial Sequence
  Description of Artificial Sequence: Synthetic oligonucleotide
  Antisense Strand to SEQ ID NO: 499705
aucgucauagccaaauacc

SEQ ID NO: 499707 - RNA, 19 nt, Artificial Sequence
  Description of Artificial Sequence: Synthetic oligonucleotide
  Sense strand starting at position 872 of SEQ ID NO: 317630
cuuugcuguucuccacgaa

SEQ ID NO: 499708 - RNA, 19 nt, Artificial Sequence
  Description of Artificial Sequence: Synthetic oligonucleotide
  Antisense Strand to SEQ ID NO: 499707
uucguggagaacagcaaag

SEQ ID NO: 499709 - RNA, 19 nt, Artificial Sequence
  Description of Artificial Sequence: Synthetic oligonucleotide
  Sense strand starting at position 875 of SEQ ID NO: 317630
ugcuguucuccacgaagua

SEQ ID NO: 499710 - RNA, 19 nt, Artificial Sequence
  Description of Artificial Sequence: Synthetic oligonucleotide
  Antisense Strand to SEQ ID NO: 499709
uacuucguggagaacagca

SEQ ID NO: 499711 - RNA, 19 nt, Artificial Sequence
  Description of Artificial Sequence: Synthetic oligonucleotide
  Sense strand starting at position 900 of SEQ ID NO: 317630
uucucuugggacugguaau

SEQ ID NO: 499712 - RNA, 19 nt, Artificial Sequence
  Description of Artificial Sequence: Synthetic oligonucleotide
  Antisense Strand to SEQ ID NO: 499711
auuaccagucccaagagaa

SEQ ID NO: 499713 - RNA, 19 nt, Artificial Sequence
  Description of Artificial Sequence: Synthetic oligonucleotide
  Sense strand starting at position 901 of SEQ ID NO: 317630
ucucuugggacugguaauu

SEQ ID NO: 499714 - RNA, 19 nt, Artificial Sequence
  Description of Artificial Sequence: Synthetic oligonucleotide
  Antisense Strand to SEQ ID NO: 499713
aauuaccagucccaagaga

SEQ ID NO: 499715 - RNA, 19 nt, Artificial Sequence
  Description of Artificial Sequence: Synthetic oligonucleotide
  Sense strand starting at position 907 of SEQ ID NO: 317630
gggacugguaauuagcgaa

SEQ ID NO: 499716 - RNA, 19 nt, Artificial Sequence
  Description of Artificial Sequence: Synthetic oligonucleotide
  Antisense Strand to SEQ ID NO: 499715
uucgcuaauuaccaguccc

SEQ ID NO: 499717 - RNA, 19 nt, Artificial Sequence
  Description of Artificial Sequence: Synthetic oligonucleotide
  Sense strand starting at position 919 of SEQ ID NO: 317630
uagcgaaucugcuuugaag

SEQ ID NO: 499718 - RNA, 19 nt, Artificial Sequence
  Description of Artificial Sequence: Synthetic oligonucleotide
  Antisense Strand to SEQ ID NO: 499717
cuucaaagcagauucgcua

SEQ ID NO: 499719 - RNA, 19 nt, Artificial Sequence
  Description of Artificial Sequence: Synthetic oligonucleotide
  Sense strand starting at position 1042 of SEQ ID NO: 317630
agcaaugaggccugcauuu

SEQ ID NO: 499720 - RNA, 19 nt, Artificial Sequence
  Description of Artificial Sequence: Synthetic oligonucleotide
  Antisense Strand to SEQ ID NO: 499719
aaaugcaggccucauugcu

SEQ ID NO: 499721 - RNA, 19 nt, Artificial Sequence
  Description of Artificial Sequence: Synthetic oligonucleotide
  Sense strand starting at position 1119 of SEQ ID NO: 317630
uugcuccugcuagguaaua

SEQ ID NO: 499722 - RNA, 19 nt, Artificial Sequence
  Description of Artificial Sequence: Synthetic oligonucleotide
  Antisense Strand to SEQ ID NO: 499721
uauuaccuagcaggagcaa

SEQ ID NO: 499723 - RNA, 19 nt, Artificial Sequence
  Description of Artificial Sequence: Synthetic oligonucleotide
  Sense strand starting at position 1120 of SEQ ID NO: 317630
ugcuccugcuagguaauaa

SEQ ID NO: 499724 - RNA, 19 nt, Artificial Sequence
  Description of Artificial Sequence: Synthetic oligonucleotide
  Antisense Strand to SEQ ID NO: 499723
uuauuaccuagcaggagca

SEQ ID NO: 499725 - RNA, 19 nt, Artificial Sequence
  Description of Artificial Sequence: Synthetic oligonucleotide
  Sense strand starting at position 1616 of SEQ ID NO: 317630
guggcugugccuguuuaga

SEQ ID NO: 499726 - RNA, 19 nt, Artificial Sequence
  Description of Artificial Sequence: Synthetic oligonucleotide
  Antisense Strand to SEQ ID NO: 499725
ucuaaacaggcacagccac

SEQ ID NO: 499727 - RNA, 19 nt, Artificial Sequence
  Description of Artificial Sequence: Synthetic oligonucleotide
  Sense strand starting at position 1624 of SEQ ID NO: 317630
gccuguuuagaggaauccu

SEQ ID NO: 499728 - RNA, 19 nt, Artificial Sequence
  Description of Artificial Sequence: Synthetic oligonucleotide
  Antisense Strand to SEQ ID NO: 499727
aggauuccucuaaacaggc

SEQ ID NO: 499729 - RNA, 19 nt, Artificial Sequence
  Description of Artificial Sequence: Synthetic oligonucleotide
  Sense strand starting at position 1748 of SEQ ID NO: 317630
ugauuagcaucugcaaagu

SEQ ID NO: 499730 - RNA, 19 nt, Artificial Sequence
  Description of Artificial Sequence: Synthetic oligonucleotide
  Antisense Strand to SEQ ID NO: 499729
acuuugcagaugcuaauca

SEQ ID NO: 499731 - RNA, 19 nt, Artificial Sequence
  Description of Artificial Sequence: Synthetic oligonucleotide
  Sense strand starting at position 1768 of SEQ ID NO: 317630
ggcuuaaggacgcagagaa

SEQ ID NO: 499732 - RNA, 19 nt, Artificial Sequence
  Description of Artificial Sequence: Synthetic oligonucleotide
  Antisense Strand to SEQ ID NO: 499731
uucucugcguccuuaagcc

SEQ ID NO: 499733 - RNA, 19 nt, Artificial Sequence
  Description of Artificial Sequence: Synthetic oligonucleotide
  Sense strand starting at position 1853 of SEQ ID NO: 317630
aggugaugagcauaacguu

SEQ ID NO: 499734 - RNA, 19 nt, Artificial Sequence
  Description of Artificial Sequence: Synthetic oligonucleotide
  Antisense Strand to SEQ ID NO: 499733
aacguuaugcucaucaccu

SEQ ID NO: 499735 - RNA, 19 nt, Artificial Sequence
  Description of Artificial Sequence: Synthetic oligonucleotide
  Sense strand starting at position 1983 of SEQ ID NO: 317630
cggcaaagucgcgagagua

SEQ ID NO: 499736 - RNA, 19 nt, Artificial Sequence
  Description of Artificial Sequence: Synthetic oligonucleotide
  Antisense Strand to SEQ ID NO: 499735
uacucucgcgacuuugccg

SEQ ID NO: 499737 - RNA, 19 nt, Artificial Sequence
  Description of Artificial Sequence: Synthetic oligonucleotide
  Sense strand starting at position 1984 of SEQ ID NO: 317630
ggcaaagucgcgagaguac

SEQ ID NO: 499738 - RNA, 19 nt, Artificial Sequence
  Description of Artificial Sequence: Synthetic oligonucleotide
  Antisense Strand to SEQ ID NO: 499737
guacucucgcgacuuugcc

SEQ ID NO: 499739 - RNA, 19 nt, Artificial Sequence
  Description of Artificial Sequence: Synthetic oligonucleotide
  Sense strand starting at position 2939 of SEQ ID NO: 317630
agaauaaauucugaaggaa

SEQ ID NO: 499740 - RNA, 19 nt, Artificial Sequence
  Description of Artificial Sequence: Synthetic oligonucleotide
  Antisense Strand to SEQ ID NO: 499739
uuccuucagaauuuauucu

SEQ ID NO: 499741 - RNA, 19 nt, Artificial Sequence
  Description of Artificial Sequence: Synthetic oligonucleotide
  Sense strand starting at position 3258 of SEQ ID NO: 317630
gggagugcgacgcagaauu

SEQ ID NO: 499742 - RNA, 19 nt, Artificial Sequence
  Description of Artificial Sequence: Synthetic oligonucleotide
  Antisense Strand to SEQ ID NO: 499741
aauucugcgucgcacuccc

SEQ ID NO: 499743 - RNA, 19 nt, Artificial Sequence
  Description of Artificial Sequence: Synthetic oligonucleotide
  Sense strand starting at position 3342 of SEQ ID NO: 317630
uguacauucugagauggaa

SEQ ID NO: 499744 - RNA, 19 nt, Artificial Sequence
  Description of Artificial Sequence: Synthetic oligonucleotide
  Antisense Strand to SEQ ID NO: 499743
uuccaucucagaauguaca

SEQ ID NO: 499745 - RNA, 19 nt, Artificial Sequence
  Description of Artificial Sequence: Synthetic oligonucleotide
  Sense strand starting at position 3404 of SEQ ID NO: 317630
guuaccagugcucauguuu

SEQ ID NO: 499746 - RNA, 19 nt, Artificial Sequence
  Description of Artificial Sequence: Synthetic oligonucleotide
  Antisense Strand to SEQ ID NO: 499745
aaacaugagcacugguaac

SEQ ID NO: 499747 - RNA, 19 nt, Artificial Sequence
  Description of Artificial Sequence: Synthetic oligonucleotide
  Sense strand starting at position 3424 of SEQ ID NO: 317630
auaagaaccugcuuaugca

SEQ ID NO: 499748 - RNA, 19 nt, Artificial Sequence
  Description of Artificial Sequence: Synthetic oligonucleotide
  Antisense Strand to SEQ ID NO: 499747
ugcauaagcagguucuuau

SEQ ID NO: 499749 - RNA, 19 nt, Artificial Sequence
  Description of Artificial Sequence: Synthetic oligonucleotide
  Sense strand starting at position 3507 of SEQ ID NO: 317630
aaaucagugcccugggaag

SEQ ID NO: 499750 - RNA, 19 nt, Artificial Sequence
  Description of Artificial Sequence: Synthetic oligonucleotide
  Antisense Strand to SEQ ID NO: 499749
cuucccagggcacugauuu

SEQ ID NO: 499751 - RNA, 19 nt, Artificial Sequence
  Description of Artificial Sequence: Synthetic oligonucleotide
  Sense strand starting at position 3812 of SEQ ID NO: 317630
ccuuuaucaccucagugua

SEQ ID NO: 499752 - RNA, 19 nt, Artificial Sequence
  Description of Artificial Sequence: Synthetic oligonucleotide
  Antisense Strand to SEQ ID NO: 499751
uacacugaggugauaaagg

SEQ ID NO: 499753 - RNA, 19 nt, Artificial Sequence
  Description of Artificial Sequence: Synthetic oligonucleotide
  Sense strand starting at position 200 of SEQ ID NO: 317631
auugcugaugccuaagaau

SEQ ID NO: 499754 - RNA, 19 nt, Artificial Sequence
  Description of Artificial Sequence: Synthetic oligonucleotide
  Antisense Strand to SEQ ID NO: 499753
auucuuaggcaucagcaau

SEQ ID NO: 499755 - RNA, 19 nt, Artificial Sequence
  Description of Artificial Sequence: Synthetic oligonucleotide
  Sense strand starting at position 249 of SEQ ID NO: 317631
acacuccugggcuagauau

SEQ ID NO: 499756 - RNA, 19 nt, Artificial Sequence
  Description of Artificial Sequence: Synthetic oligonucleotide
  Antisense Strand to SEQ ID NO: 499755
auaucuagcccaggagugu

SEQ ID NO: 499757 - RNA, 19 nt, Artificial Sequence
  Description of Artificial Sequence: Synthetic oligonucleotide
  Sense strand starting at position 260 of SEQ ID NO: 317631
cuagauaugcuguauacau

SEQ ID NO: 499758 - RNA, 19 nt, Artificial Sequence
  Description of Artificial Sequence: Synthetic oligonucleotide
  Antisense Strand to SEQ ID NO: 499757
auguauacagcauaucuag

SEQ ID NO: 499759 - RNA, 19 nt, Artificial Sequence
  Description of Artificial Sequence: Synthetic oligonucleotide
  Sense strand starting at position 273 of SEQ ID NO: 317631
auacauagaugagaauaca

SEQ ID NO: 499760 - RNA, 19 nt, Artificial Sequence
  Description of Artificial Sequence: Synthetic oligonucleotide
  Antisense Strand to SEQ ID NO: 499759
uguauucucaucuauguau

SEQ ID NO: 499761 - RNA, 19 nt, Artificial Sequence
  Description of Artificial Sequence: Synthetic oligonucleotide
  Sense strand starting at position 331 of SEQ ID NO: 317631
aucagaucuguuuaauagc

SEQ ID NO: 499762 - RNA, 19 nt, Artificial Sequence
  Description of Artificial Sequence: Synthetic oligonucleotide
  Antisense Strand to SEQ ID NO: 499761
gcuauuaaacagaucugau

SEQ ID NO: 499763 - RNA, 19 nt, Artificial Sequence
  Description of Artificial Sequence: Synthetic oligonucleotide
  Sense strand starting at position 705 of SEQ ID NO: 317631
cuauguaucaggcaggaau

SEQ ID NO: 499764 - RNA, 19 nt, Artificial Sequence
  Description of Artificial Sequence: Synthetic oligonucleotide
  Antisense Strand to SEQ ID NO: 499763
auuccugccugauacauag

SEQ ID NO: 499765 - RNA, 19 nt, Artificial Sequence
  Description of Artificial Sequence: Synthetic oligonucleotide
  Sense strand starting at position 716 of SEQ ID NO: 317631
gcaggaauuggacgagaua

SEQ ID NO: 499766 - RNA, 19 nt, Artificial Sequence
  Description of Artificial Sequence: Synthetic oligonucleotide
  Antisense Strand to SEQ ID NO: 499765
uaucucguccaauuccugc

SEQ ID NO: 499767 - RNA, 19 nt, Artificial Sequence
  Description of Artificial Sequence: Synthetic oligonucleotide
  Sense strand starting at position 766 of SEQ ID NO: 317631
ccugaagaauaagcauuau

SEQ ID NO: 499768 - RNA, 19 nt, Artificial Sequence
  Description of Artificial Sequence: Synthetic oligonucleotide
  Antisense Strand to SEQ ID NO: 499767
auaaugcuuauucuucagg

SEQ ID NO: 499769 - RNA, 19 nt, Artificial Sequence
  Description of Artificial Sequence: Synthetic oligonucleotide
  Sense strand starting at position 881 of SEQ ID NO: 317631
uugagauauuacuucugga

SEQ ID NO: 499770 - RNA, 19 nt, Artificial Sequence
  Description of Artificial Sequence: Synthetic oligonucleotide
  Antisense Strand to SEQ ID NO: 499769
uccagaaguaauaucucaa

SEQ ID NO: 499771 - RNA, 19 nt, Artificial Sequence
  Description of Artificial Sequence: Synthetic oligonucleotide
  Sense strand starting at position 933 of SEQ ID NO: 317631
acucuuaaaggaugguuaa

SEQ ID NO: 499772 - RNA, 19 nt, Artificial Sequence
  Description of Artificial Sequence: Synthetic oligonucleotide
  Antisense Strand to SEQ ID NO: 499771
uuaaccauccuuuaagagu

SEQ ID NO: 499773 - RNA, 19 nt, Artificial Sequence
  Description of Artificial Sequence: Synthetic oligonucleotide
  Sense strand starting at position 934 of SEQ ID NO: 317631
cucuuaaaggaugguuaaa

SEQ ID NO: 499774 - RNA, 19 nt, Artificial Sequence
  Description of Artificial Sequence: Synthetic oligonucleotide
  Antisense Strand to SEQ ID NO: 499773
uuuaaccauccuuuaagag

SEQ ID NO: 499775 - RNA, 19 nt, Artificial Sequence
  Description of Artificial Sequence: Synthetic oligonucleotide
  Sense strand starting at position 936 of SEQ ID NO: 317631
cuuaaaggaugguuaaauu

SEQ ID NO: 499776 - RNA, 19 nt, Artificial Sequence
  Description of Artificial Sequence: Synthetic oligonucleotide
  Antisense Strand to SEQ ID NO: 499775
aauuuaaccauccuuuaag

SEQ ID NO: 499777 - RNA, 19 nt, Artificial Sequence
  Description of Artificial Sequence: Synthetic oligonucleotide
  Sense strand starting at position 1100 of SEQ ID NO: 317631
auauuuaagugagaugcaa

SEQ ID NO: 499778 - RNA, 19 nt, Artificial Sequence
  Description of Artificial Sequence: Synthetic oligonucleotide
  Antisense Strand to SEQ ID NO: 499777
uugcaucucacuuaaauau

SEQ ID NO: 499779 - RNA, 19 nt, Artificial Sequence
  Description of Artificial Sequence: Synthetic oligonucleotide
  Sense strand starting at position 1145 of SEQ ID NO: 317631
ccacgucuaccagacaauu

SEQ ID NO: 499780 - RNA, 19 nt, Artificial Sequence
  Description of Artificial Sequence: Synthetic oligonucleotide
  Antisense Strand to SEQ ID NO: 499779
aauugucugguagacgugg

SEQ ID NO: 499781 - RNA, 19 nt, Artificial Sequence
  Description of Artificial Sequence: Synthetic oligonucleotide
  Sense strand starting at position 1175 of SEQ ID NO: 317631
cgacuucuaauaggugaaa

SEQ ID NO: 499782 - RNA, 19 nt, Artificial Sequence
  Description of Artificial Sequence: Synthetic oligonucleotide
  Antisense Strand to SEQ ID NO: 499781
uuucaccuauuagaagucg

SEQ ID NO: 499783 - RNA, 19 nt, Artificial Sequence
  Description of Artificial Sequence: Synthetic oligonucleotide
  Sense strand starting at position 1223 of SEQ ID NO: 317631
cccagaugcucugugauaa

SEQ ID NO: 499784 - RNA, 19 nt, Artificial Sequence
  Description of Artificial Sequence: Synthetic oligonucleotide
  Antisense Strand to SEQ ID NO: 499783
uuaucacagagcaucuggg

SEQ ID NO: 499785 - RNA, 19 nt, Artificial Sequence
  Description of Artificial Sequence: Synthetic oligonucleotide
  Sense strand starting at position 1310 of SEQ ID NO: 317631
acuauauguacggacgcaa

SEQ ID NO: 499786 - RNA, 19 nt, Artificial Sequence
  Description of Artificial Sequence: Synthetic oligonucleotide
  Antisense Strand to SEQ ID NO: 499785
uugcguccguacauauagu

SEQ ID NO: 499787 - RNA, 19 nt, Artificial Sequence
  Description of Artificial Sequence: Synthetic oligonucleotide
  Sense strand starting at position 1356 of SEQ ID NO: 317631
aguaaaguaugagccauua

SEQ ID NO: 499788 - RNA, 19 nt, Artificial Sequence
  Description of Artificial Sequence: Synthetic oligonucleotide
  Antisense Strand to SEQ ID NO: 499787
uaauggcucauacuuuacu

SEQ ID NO: 499789 - RNA, 19 nt, Artificial Sequence
  Description of Artificial Sequence: Synthetic oligonucleotide
  Sense strand starting at position 1444 of SEQ ID NO: 317631
cucuaaauaguucggauaa

SEQ ID NO: 499790 - RNA, 19 nt, Artificial Sequence
  Description of Artificial Sequence: Synthetic oligonucleotide
  Antisense Strand to SEQ ID NO: 499789
uuauccgaacuauuuagag

SEQ ID NO: 499791 - RNA, 19 nt, Artificial Sequence
  Description of Artificial Sequence: Synthetic oligonucleotide
  Sense strand starting at position 1883 of SEQ ID NO: 317631
gaauuucucccgcgaaaca

SEQ ID NO: 499792 - RNA, 19 nt, Artificial Sequence
  Description of Artificial Sequence: Synthetic oligonucleotide
  Antisense Strand to SEQ ID NO: 499791
uguuucgcgggagaaauuc

SEQ ID NO: 499793 - RNA, 19 nt, Artificial Sequence
  Description of Artificial Sequence: Synthetic oligonucleotide
  Sense strand starting at position 2234 of SEQ ID NO: 317631
agucgaacggaguaaguua

SEQ ID NO: 499794 - RNA, 19 nt, Artificial Sequence
  Description of Artificial Sequence: Synthetic oligonucleotide
  Antisense Strand to SEQ ID NO: 499793
uaacuuacuccguucgacu

SEQ ID NO: 499795 - RNA, 19 nt, Artificial Sequence
  Description of Artificial Sequence: Synthetic oligonucleotide
  Sense strand starting at position 2278 of SEQ ID NO: 317631
uugggcgaagucuaauuaa

SEQ ID NO: 499796 - RNA, 19 nt, Artificial Sequence
  Description of Artificial Sequence: Synthetic oligonucleotide
  Antisense Strand to SEQ ID NO: 499795
uuaauuagacuucgcccaa

SEQ ID NO: 499797 - RNA, 19 nt, Artificial Sequence
  Description of Artificial Sequence: Synthetic oligonucleotide
  Sense strand starting at position 2790 of SEQ ID NO: 317631
agaguaagaugccauuuaa

SEQ ID NO: 499798 - RNA, 19 nt, Artificial Sequence
  Description of Artificial Sequence: Synthetic oligonucleotide
  Antisense Strand to SEQ ID NO: 499797
uuaaauggcaucuuacucu

SEQ ID NO: 499799 - RNA, 19 nt, Artificial Sequence
  Description of Artificial Sequence: Synthetic oligonucleotide
  Sense strand starting at position 2968 of SEQ ID NO: 317631
uggauuagcuucucaggaa

SEQ ID NO: 499800 - RNA, 19 nt, Artificial Sequence
  Description of Artificial Sequence: Synthetic oligonucleotide
  Antisense Strand to SEQ ID NO: 499799
uuccugagaagcuaaucca

SEQ ID NO: 499801 - RNA, 19 nt, Artificial Sequence
  Description of Artificial Sequence: Synthetic oligonucleotide
  Sense strand starting at position 3319 of SEQ ID NO: 317631
auaauuuccucaggagaaa

SEQ ID NO: 499802 - RNA, 19 nt, Artificial Sequence
  Description of Artificial Sequence: Synthetic oligonucleotide
  Antisense Strand to SEQ ID NO: 499801
uuucuccugaggaaauuau

SEQ ID NO: 499803 - RNA, 19 nt, Artificial Sequence
  Description of Artificial Sequence: Synthetic oligonucleotide
  Sense strand starting at position 3469 of SEQ ID NO: 317631
ggaaauuagguuuguccag

SEQ ID NO: 499804 - RNA, 19 nt, Artificial Sequence
  Description of Artificial Sequence: Synthetic oligonucleotide
  Antisense Strand to SEQ ID NO: 499803
cuggacaaaccuaauuucc

SEQ ID NO: 499805 - RNA, 19 nt, Artificial Sequence
  Description of Artificial Sequence: Synthetic oligonucleotide
  Sense strand starting at position 3471 of SEQ ID NO: 317631
aaauuagguuuguccagua

SEQ ID NO: 499806 - RNA, 19 nt, Artificial Sequence
  Description of Artificial Sequence: Synthetic oligonucleotide
  Antisense Strand to SEQ ID NO: 499805
uacuggacaaaccuaauuu

SEQ ID NO: 499807 - RNA, 19 nt, Artificial Sequence
  Description of Artificial Sequence: Synthetic oligonucleotide
  Sense strand starting at position 3476 of SEQ ID NO: 317631
agguuuguccaguaaagau

SEQ ID NO: 499808 - RNA, 19 nt, Artificial Sequence
  Description of Artificial Sequence: Synthetic oligonucleotide
  Antisense Strand to SEQ ID NO: 499807
aucuuuacuggacaaaccu

SEQ ID NO: 499809 - RNA, 19 nt, Artificial Sequence
  Description of Artificial Sequence: Synthetic oligonucleotide
  Sense strand starting at position 3501 of SEQ ID NO: 317631
aauuauuguccugagcagu

SEQ ID NO: 499810 - RNA, 19 nt, Artificial Sequence
  Description of Artificial Sequence: Synthetic oligonucleotide
  Antisense Strand to SEQ ID NO: 499809
acugcucaggacaauaauu

SEQ ID NO: 499811 - RNA, 19 nt, Artificial Sequence
  Description of Artificial Sequence: Synthetic oligonucleotide
  Sense strand starting at position 3662 of SEQ ID NO: 317631
gucccauaagauuauaggu

SEQ ID NO: 499812 - RNA, 19 nt, Artificial Sequence
  Description of Artificial Sequence: Synthetic oligonucleotide
  Antisense Strand to SEQ ID NO: 499811
accuauaaucuuaugggac

SEQ ID NO: 499813 - RNA, 19 nt, Artificial Sequence
  Description of Artificial Sequence: Synthetic oligonucleotide
  Sense strand starting at position 3667 of SEQ ID NO: 317631
auaagauuauaggugagua

SEQ ID NO: 499814 - RNA, 19 nt, Artificial Sequence
  Description of Artificial Sequence: Synthetic oligonucleotide
  Antisense Strand to SEQ ID NO: 499813
uacucaccuauaaucuuau

SEQ ID NO: 499815 - RNA, 19 nt, Artificial Sequence
  Description of Artificial Sequence: Synthetic oligonucleotide
  Sense strand starting at position 3671 of SEQ ID NO: 317631
gauuauaggugaguaauag

SEQ ID NO: 499816 - RNA, 19 nt, Artificial Sequence
  Description of Artificial Sequence: Synthetic oligonucleotide
  Antisense Strand to SEQ ID NO: 499815
cuauuacucaccuauaauc

SEQ ID NO: 499817 - RNA, 19 nt, Artificial Sequence
  Description of Artificial Sequence: Synthetic oligonucleotide
  Sense strand starting at position 3677 of SEQ ID NO: 317631
aggugaguaauaggcaaua

SEQ ID NO: 499818 - RNA, 19 nt, Artificial Sequence
  Description of Artificial Sequence: Synthetic oligonucleotide
  Antisense Strand to SEQ ID NO: 499817
uauugccuauuacucaccu

SEQ ID NO: 499819 - RNA, 19 nt, Artificial Sequence
  Description of Artificial Sequence: Synthetic oligonucleotide
  Sense strand starting at position 3679 of SEQ ID NO: 317631
gugaguaauaggcaauagu

SEQ ID NO: 499820 - RNA, 19 nt, Artificial Sequence
  Description of Artificial Sequence: Synthetic oligonucleotide
  Antisense Strand to SEQ ID NO: 499819
acuauugccuauuacucac

SEQ ID NO: 499821 - RNA, 19 nt, Artificial Sequence
  Description of Artificial Sequence: Synthetic oligonucleotide
  Sense strand starting at position 3689 of SEQ ID NO: 317631
ggcaauaguaccuagguuu

SEQ ID NO: 499822 - RNA, 19 nt, Artificial Sequence
  Description of Artificial Sequence: Synthetic oligonucleotide
  Antisense Strand to SEQ ID NO: 499821
aaaccuagguacuauugcc

SEQ ID NO: 499823 - RNA, 19 nt, Artificial Sequence
  Description of Artificial Sequence: Synthetic oligonucleotide
  Sense strand starting at position 3799 of SEQ ID NO: 317631
acccaugacugugcuuaaa

SEQ ID NO: 499824 - RNA, 19 nt, Artificial Sequence
  Description of Artificial Sequence: Synthetic oligonucleotide
  Antisense Strand to SEQ ID NO: 499823
uuuaagcacagucaugggu

SEQ ID NO: 499825 - RNA, 19 nt, Artificial Sequence
  Description of Artificial Sequence: Synthetic oligonucleotide
  Sense strand starting at position 3909 of SEQ ID NO: 317631
agaauucuuguccagccaa

SEQ ID NO: 499826 - RNA, 19 nt, Artificial Sequence
  Description of Artificial Sequence: Synthetic oligonucleotide
  Antisense Strand to SEQ ID NO: 499825
uuggcuggacaagaauucu

SEQ ID NO: 499827 - RNA, 19 nt, Artificial Sequence
  Description of Artificial Sequence: Synthetic oligonucleotide
  Sense strand starting at position 3944 of SEQ ID NO: 317631
gauuaagaauuccugaguc

SEQ ID NO: 499828 - RNA, 19 nt, Artificial Sequence
  Description of Artificial Sequence: Synthetic oligonucleotide
  Antisense Strand to SEQ ID NO: 499827
gacucaggaauucuuaauc

SEQ ID NO: 499829 - RNA, 19 nt, Artificial Sequence
  Description of Artificial Sequence: Synthetic oligonucleotide
  Sense strand starting at position 3970 of SEQ ID NO: 317631
agaguccguggugauaaau

SEQ ID NO: 499830 - RNA, 19 nt, Artificial Sequence
  Description of Artificial Sequence: Synthetic oligonucleotide
  Antisense Strand to SEQ ID NO: 499829
auuuaucaccacggacucu

SEQ ID NO: 499831 - RNA, 19 nt, Artificial Sequence
  Description of Artificial Sequence: Synthetic oligonucleotide
  Sense strand starting at position 3981 of SEQ ID NO: 317631
ugauaaauugcgggaaauu

SEQ ID NO: 499832 - RNA, 19 nt, Artificial Sequence
  Description of Artificial Sequence: Synthetic oligonucleotide
  Antisense Strand to SEQ ID NO: 499831
aauuucccgcaauuuauca

SEQ ID NO: 499833 - RNA, 19 nt, Artificial Sequence
  Description of Artificial Sequence: Synthetic oligonucleotide
  Sense strand starting at position 7 of SEQ ID NO: 317632
gaaauugcggaauagguua

SEQ ID NO: 499834 - RNA, 19 nt, Artificial Sequence
  Description of Artificial Sequence: Synthetic oligonucleotide
  Antisense Strand to SEQ ID NO: 499833
uaaccuauuccgcaauuuc

SEQ ID NO: 499835 - RNA, 19 nt, Artificial Sequence
  Description of Artificial Sequence: Synthetic oligonucleotide
  Sense strand starting at position 12 of SEQ ID NO: 317632
ugcggaauagguuauauau

SEQ ID NO: 499836 - RNA, 19 nt, Artificial Sequence
  Description of Artificial Sequence: Synthetic oligonucleotide
  Antisense Strand to SEQ ID NO: 499835
auauauaaccuauuccgca

SEQ ID NO: 499837 - RNA, 19 nt, Artificial Sequence
  Description of Artificial Sequence: Synthetic oligonucleotide
  Sense strand starting at position 21 of SEQ ID NO: 317632
gguuauauauucuugcuau

SEQ ID NO: 499838 - RNA, 19 nt, Artificial Sequence
  Description of Artificial Sequence: Synthetic oligonucleotide
  Antisense Strand to SEQ ID NO: 499837
auagcaagaauauauaacc

SEQ ID NO: 499839 - RNA, 19 nt, Artificial Sequence
  Description of Artificial Sequence: Synthetic oligonucleotide
  Sense strand starting at position 247 of SEQ ID NO: 317632
ugauuuguauuugguccua

SEQ ID NO: 499840 - RNA, 19 nt, Artificial Sequence
  Description of Artificial Sequence: Synthetic oligonucleotide
  Antisense Strand to SEQ ID NO: 499839
uaggaccaaauacaaauca

SEQ ID NO: 499841 - RNA, 19 nt, Artificial Sequence
  Description of Artificial Sequence: Synthetic oligonucleotide
  Sense strand starting at position 290 of SEQ ID NO: 317632
ucuugaacucacuaacguu

SEQ ID NO: 499842 - RNA, 19 nt, Artificial Sequence
  Description of Artificial Sequence: Synthetic oligonucleotide
  Antisense Strand to SEQ ID NO: 499841
aacguuagugaguucaaga

SEQ ID NO: 499843 - RNA, 19 nt, Artificial Sequence
  Description of Artificial Sequence: Synthetic oligonucleotide
  Sense strand starting at position 388 of SEQ ID NO: 317632
gaagaaaggugcuaucaag

SEQ ID NO: 499844 - RNA, 19 nt, Artificial Sequence
  Description of Artificial Sequence: Synthetic oligonucleotide
  Antisense Strand to SEQ ID NO: 499843
cuugauagcaccuuucuuc

SEQ ID NO: 499845 - RNA, 19 nt, Artificial Sequence
  Description of Artificial Sequence: Synthetic oligonucleotide
  Sense strand starting at position 434 of SEQ ID NO: 317632
gacgaaaggacugguuugu

SEQ ID NO: 499846 - RNA, 19 nt, Artificial Sequence
  Description of Artificial Sequence: Synthetic oligonucleotide
  Antisense Strand to SEQ ID NO: 499845
acaaaccaguccuuucguc

SEQ ID NO: 499847 - RNA, 19 nt, Artificial Sequence
  Description of Artificial Sequence: Synthetic oligonucleotide
  Sense strand starting at position 474 of SEQ ID NO: 317632
agggcuaagcucuaacuga

SEQ ID NO: 499848 - RNA, 19 nt, Artificial Sequence
  Description of Artificial Sequence: Synthetic oligonucleotide
  Antisense Strand to SEQ ID NO: 499847
ucaguuagagcuuagcccu

SEQ ID NO: 499849 - RNA, 19 nt, Artificial Sequence
  Description of Artificial Sequence: Synthetic oligonucleotide
  Sense strand starting at position 481 of SEQ ID NO: 317632
agcucuaacugauuccuga

SEQ ID NO: 499850 - RNA, 19 nt, Artificial Sequence
  Description of Artificial Sequence: Synthetic oligonucleotide
  Antisense Strand to SEQ ID NO: 499849
ucaggaaucaguuagagcu

SEQ ID NO: 499851 - RNA, 19 nt, Artificial Sequence
  Description of Artificial Sequence: Synthetic oligonucleotide
  Sense strand starting at position 488 of SEQ ID NO: 317632
acugauuccugagcccaua

SEQ ID NO: 499852 - RNA, 19 nt, Artificial Sequence
  Description of Artificial Sequence: Synthetic oligonucleotide
  Antisense Strand to SEQ ID NO: 499851
uaugggcucaggaaucagu

SEQ ID NO: 499853 - RNA, 19 nt, Artificial Sequence
  Description of Artificial Sequence: Synthetic oligonucleotide
  Sense strand starting at position 677 of SEQ ID NO: 317632
gaacccuguccugggacaa

SEQ ID NO: 499854 - RNA, 19 nt, Artificial Sequence
  Description of Artificial Sequence: Synthetic oligonucleotide
  Antisense Strand to SEQ ID NO: 499853
uugucccaggacaggguuc

SEQ ID NO: 499855 - RNA, 19 nt, Artificial Sequence
  Description of Artificial Sequence: Synthetic oligonucleotide
  Sense strand starting at position 692 of SEQ ID NO: 317632
acaaguguggccgugcgaa

SEQ ID NO: 499856 - RNA, 19 nt, Artificial Sequence
  Description of Artificial Sequence: Synthetic oligonucleotide
  Antisense Strand to SEQ ID NO: 499855
uucgcacggccacacuugu

SEQ ID NO: 499857 - RNA, 19 nt, Artificial Sequence
  Description of Artificial Sequence: Synthetic oligonucleotide
  Sense strand starting at position 938 of SEQ ID NO: 317632
ucuuucuucugacaggaaa

SEQ ID NO: 499858 - RNA, 19 nt, Artificial Sequence
  Description of Artificial Sequence: Synthetic oligonucleotide
  Antisense Strand to SEQ ID NO: 499857
uuuccugucagaagaaaga

SEQ ID NO: 499859 - RNA, 19 nt, Artificial Sequence
  Description of Artificial Sequence: Synthetic oligonucleotide
  Sense strand starting at position 1554 of SEQ ID NO: 317632
gcggcuuccagauaagcua

SEQ ID NO: 499860 - RNA, 19 nt, Artificial Sequence
  Description of Artificial Sequence: Synthetic oligonucleotide
  Antisense Strand to SEQ ID NO: 499859
uagcuuaucuggaagccgc

SEQ ID NO: 499861 - RNA, 19 nt, Artificial Sequence
  Description of Artificial Sequence: Synthetic oligonucleotide
  Sense strand starting at position 1897 of SEQ ID NO: 317632
ggcugagcuguggccgaau

SEQ ID NO: 499862 - RNA, 19 nt, Artificial Sequence
  Description of Artificial Sequence: Synthetic oligonucleotide
  Antisense Strand to SEQ ID NO: 499861
auucggccacagcucagcc

SEQ ID NO: 499863 - RNA, 19 nt, Artificial Sequence
  Description of Artificial Sequence: Synthetic oligonucleotide
  Sense strand starting at position 2095 of SEQ ID NO: 317632
gccaucagaccuugaguga

SEQ ID NO: 499864 - RNA, 19 nt, Artificial Sequence
  Description of Artificial Sequence: Synthetic oligonucleotide
  Antisense Strand to SEQ ID NO: 499863
ucacucaaggucugauggc

SEQ ID NO: 499865 - RNA, 19 nt, Artificial Sequence
  Description of Artificial Sequence: Synthetic oligonucleotide
  Sense strand starting at position 2102 of SEQ ID NO: 317632
gaccuugagugacagaagu

SEQ ID NO: 499866 - RNA, 19 nt, Artificial Sequence
  Description of Artificial Sequence: Synthetic oligonucleotide
  Antisense Strand to SEQ ID NO: 499865
acuucugucacucaagguc

SEQ ID NO: 499867 - RNA, 19 nt, Artificial Sequence
  Description of Artificial Sequence: Synthetic oligonucleotide
  Sense strand starting at position 2256 of SEQ ID NO: 317632
gacguccauuuagaaauua

SEQ ID NO: 499868 - RNA, 19 nt, Artificial Sequence
  Description of Artificial Sequence: Synthetic oligonucleotide
  Antisense Strand to SEQ ID NO: 499867
uaauuucuaaauggacguc

SEQ ID NO: 499869 - RNA, 19 nt, Artificial Sequence
  Description of Artificial Sequence: Synthetic oligonucleotide
  Sense strand starting at position 2427 of SEQ ID NO: 317632
cgcgaaucaucucuccaca

SEQ ID NO: 499870 - RNA, 19 nt, Artificial Sequence
  Description of Artificial Sequence: Synthetic oligonucleotide
  Antisense Strand to SEQ ID NO: 499869
uguggagagaugauucgcg

SEQ ID NO: 499871 - RNA, 19 nt, Artificial Sequence
  Description of Artificial Sequence: Synthetic oligonucleotide
  Sense strand starting at position 2693 of SEQ ID NO: 317632
gucccugaccgcuguaaac

SEQ ID NO: 499872 - RNA, 19 nt, Artificial Sequence
  Description of Artificial Sequence: Synthetic oligonucleotide
  Antisense Strand to SEQ ID NO: 499871
guuuacagcggucagggac

SEQ ID NO: 499873 - RNA, 19 nt, Artificial Sequence
  Description of Artificial Sequence: Synthetic oligonucleotide
  Sense strand starting at position 2695 of SEQ ID NO: 317632
cccugaccgcuguaaacaa

SEQ ID NO: 499874 - RNA, 19 nt, Artificial Sequence
  Description of Artificial Sequence: Synthetic oligonucleotide
  Antisense Strand to SEQ ID NO: 499873
uuguuuacagcggucaggg

SEQ ID NO: 499875 - RNA, 19 nt, Artificial Sequence
  Description of Artificial Sequence: Synthetic oligonucleotide
  Sense strand starting at position 2738 of SEQ ID NO: 317632
ggcagcaaauucucaggaa

SEQ ID NO: 499876 - RNA, 19 nt, Artificial Sequence
  Description of Artificial Sequence: Synthetic oligonucleotide
  Antisense Strand to SEQ ID NO: 499875
uuccugagaauuugcugcc

SEQ ID NO: 499877 - RNA, 19 nt, Artificial Sequence
  Description of Artificial Sequence: Synthetic oligonucleotide
  Sense strand starting at position 2778 of SEQ ID NO: 317632
ucaccuucgugucuguaga

SEQ ID NO: 499878 - RNA, 19 nt, Artificial Sequence
  Description of Artificial Sequence: Synthetic oligonucleotide
  Antisense Strand to SEQ ID NO: 499877
ucuacagacacgaagguga

SEQ ID NO: 499879 - RNA, 19 nt, Artificial Sequence
  Description of Artificial Sequence: Synthetic oligonucleotide
  Sense strand starting at position 2779 of SEQ ID NO: 317632
caccuucgugucuguagaa

SEQ ID NO: 499880 - RNA, 19 nt, Artificial Sequence
  Description of Artificial Sequence: Synthetic oligonucleotide
  Antisense Strand to SEQ ID NO: 499879
uucuacagacacgaaggug

SEQ ID NO: 499881 - RNA, 19 nt, Artificial Sequence
  Description of Artificial Sequence: Synthetic oligonucleotide
  Sense strand starting at position 2780 of SEQ ID NO: 317632
accuucgugucuguagaau

SEQ ID NO: 499882 - RNA, 19 nt, Artificial Sequence
  Description of Artificial Sequence: Synthetic oligonucleotide
  Antisense Strand to SEQ ID NO: 499881
auucuacagacacgaaggu

SEQ ID NO: 499883 - RNA, 19 nt, Artificial Sequence
  Description of Artificial Sequence: Synthetic oligonucleotide
  Sense strand starting at position 3454 of SEQ ID NO: 317632
ggugcauuaagcgaucaga

SEQ ID NO: 499884 - RNA, 19 nt, Artificial Sequence
  Description of Artificial Sequence: Synthetic oligonucleotide
  Antisense Strand to SEQ ID NO: 499883
ucugaucgcuuaaugcacc

SEQ ID NO: 499885 - RNA, 19 nt, Artificial Sequence
  Description of Artificial Sequence: Synthetic oligonucleotide
  Sense strand starting at position 3515 of SEQ ID NO: 317632
agaaguguaugcucacgca

SEQ ID NO: 499886 - RNA, 19 nt, Artificial Sequence
  Description of Artificial Sequence: Synthetic oligonucleotide
  Antisense Strand to SEQ ID NO: 499885
ugcgugagcauacacuucu

SEQ ID NO: 499887 - RNA, 19 nt, Artificial Sequence
  Description of Artificial Sequence: Synthetic oligonucleotide
  Sense strand starting at position 3541 of SEQ ID NO: 317632
gacagcauucgcguaguuu

SEQ ID NO: 499888 - RNA, 19 nt, Artificial Sequence
  Description of Artificial Sequence: Synthetic oligonucleotide
  Antisense Strand to SEQ ID NO: 499887
aaacuacgcgaaugcuguc

SEQ ID NO: 499889 - RNA, 19 nt, Artificial Sequence
  Description of Artificial Sequence: Synthetic oligonucleotide
  Sense strand starting at position 3556 of SEQ ID NO: 317632
guuugacacuugucugcuu

SEQ ID NO: 499890 - RNA, 19 nt, Artificial Sequence
  Description of Artificial Sequence: Synthetic oligonucleotide
  Antisense Strand to SEQ ID NO: 499889
aagcagacaagugucaaac

SEQ ID NO: 499891 - RNA, 19 nt, Artificial Sequence
  Description of Artificial Sequence: Synthetic oligonucleotide
  Sense strand starting at position 3568 of SEQ ID NO: 317632
ucugcuugggcggauagau

SEQ ID NO: 499892 - RNA, 19 nt, Artificial Sequence
  Description of Artificial Sequence: Synthetic oligonucleotide
  Antisense Strand to SEQ ID NO: 499891
aucuauccgcccaagcaga

SEQ ID NO: 499893 - RNA, 19 nt, Artificial Sequence
  Description of Artificial Sequence: Synthetic oligonucleotide
  Sense strand starting at position 3577 of SEQ ID NO: 317632
gcggauagaugcucacaca

SEQ ID NO: 499894 - RNA, 19 nt, Artificial Sequence
  Description of Artificial Sequence: Synthetic oligonucleotide
  Antisense Strand to SEQ ID NO: 499893
ugugugagcaucuauccgc

SEQ ID NO: 499895 - RNA, 19 nt, Artificial Sequence
  Description of Artificial Sequence: Synthetic oligonucleotide
  Sense strand starting at position 3674 of SEQ ID NO: 317632
gcuauuuccagcuguguga

SEQ ID NO: 499896 - RNA, 19 nt, Artificial Sequence
  Description of Artificial Sequence: Synthetic oligonucleotide
  Antisense Strand to SEQ ID NO: 499895
ucacacagcuggaaauagc

SEQ ID NO: 499897 - RNA, 19 nt, Artificial Sequence
  Description of Artificial Sequence: Synthetic oligonucleotide
  Sense strand starting at position 3715 of SEQ ID NO: 317632
ugcucaguguccucuguaa

SEQ ID NO: 499898 - RNA, 19 nt, Artificial Sequence
  Description of Artificial Sequence: Synthetic oligonucleotide
  Antisense Strand to SEQ ID NO: 499897
uuacagaggacacugagca

SEQ ID NO: 499899 - RNA, 19 nt, Artificial Sequence
  Description of Artificial Sequence: Synthetic oligonucleotide
  Sense strand starting at position 3717 of SEQ ID NO: 317632
cucaguguccucuguaaag

SEQ ID NO: 499900 - RNA, 19 nt, Artificial Sequence
  Description of Artificial Sequence: Synthetic oligonucleotide
  Antisense Strand to SEQ ID NO: 499899
cuuuacagaggacacugag

SEQ ID NO: 499901 - RNA, 19 nt, Artificial Sequence
  Description of Artificial Sequence: Synthetic oligonucleotide
  Sense strand starting at position 3719 of SEQ ID NO: 317632
caguguccucuguaaagug

SEQ ID NO: 499902 - RNA, 19 nt, Artificial Sequence
  Description of Artificial Sequence: Synthetic oligonucleotide
  Antisense Strand to SEQ ID NO: 499901
cacuuuacagaggacacug

SEQ ID NO: 499903 - RNA, 19 nt, Artificial Sequence
  Description of Artificial Sequence: Synthetic oligonucleotide
  Sense strand starting at position 3789 of SEQ ID NO: 317632
cauguuauggcgucaugca

SEQ ID NO: 499904 - RNA, 19 nt, Artificial Sequence
  Description of Artificial Sequence: Synthetic oligonucleotide
  Antisense Strand to SEQ ID NO: 499903
ugcaugacgccauaacaug

SEQ ID NO: 499905 - RNA, 19 nt, Artificial Sequence
  Description of Artificial Sequence: Synthetic oligonucleotide
  Sense strand starting at position 3808 of SEQ ID NO: 317632
cacagucaccaucgguaaa

SEQ ID NO: 499906 - RNA, 19 nt, Artificial Sequence
  Description of Artificial Sequence: Synthetic oligonucleotide
  Antisense Strand to SEQ ID NO: 499905
uuuaccgauggugacugug

SEQ ID NO: 499907 - RNA, 19 nt, Artificial Sequence
  Description of Artificial Sequence: Synthetic oligonucleotide
  Sense strand starting at position 3810 of SEQ ID NO: 317632
cagucaccaucgguaaaua

SEQ ID NO: 499908 - RNA, 19 nt, Artificial Sequence
  Description of Artificial Sequence: Synthetic oligonucleotide
  Antisense Strand to SEQ ID NO: 499907
uauuuaccgauggugacug

SEQ ID NO: 499909 - RNA, 19 nt, Artificial Sequence
  Description of Artificial Sequence: Synthetic oligonucleotide
  Sense strand starting at position 3811 of SEQ ID NO: 317632
agucaccaucgguaaauau

SEQ ID NO: 499910 - RNA, 19 nt, Artificial Sequence
  Description of Artificial Sequence: Synthetic oligonucleotide
  Antisense Strand to SEQ ID NO: 499909
auauuuaccgauggugacu

SEQ ID NO: 499911 - RNA, 19 nt, Artificial Sequence
  Description of Artificial Sequence: Synthetic oligonucleotide
  Sense strand starting at position 3820 of SEQ ID NO: 317632
cgguaaauauagucuauua

SEQ ID NO: 499912 - RNA, 19 nt, Artificial Sequence
  Description of Artificial Sequence: Synthetic oligonucleotide
  Antisense Strand to SEQ ID NO: 499911
uaauagacuauauuuaccg

SEQ ID NO: 499913 - RNA, 19 nt, Artificial Sequence
  Description of Artificial Sequence: Synthetic oligonucleotide
  Sense strand starting at position 34 of SEQ ID NO: 317633
agauguuaaguaggaaguu

SEQ ID NO: 499914 - RNA, 19 nt, Artificial Sequence
  Description of Artificial Sequence: Synthetic oligonucleotide
  Antisense Strand to SEQ ID NO: 499913
aacuuccuacuuaacaucu

SEQ ID NO: 499915 - RNA, 19 nt, Artificial Sequence
  Description of Artificial Sequence: Synthetic oligonucleotide
  Sense strand starting at position 245 of SEQ ID NO: 317633
cagugaaaucaacagacgu

SEQ ID NO: 499916 - RNA, 19 nt, Artificial Sequence
  Description of Artificial Sequence: Synthetic oligonucleotide
  Antisense Strand to SEQ ID NO: 499915
acgucuguugauuucacug

SEQ ID NO: 499917 - RNA, 19 nt, Artificial Sequence
  Description of Artificial Sequence: Synthetic oligonucleotide
  Sense strand starting at position 258 of SEQ ID NO: 317633
agacgugccagagauacua

SEQ ID NO: 499918 - RNA, 19 nt, Artificial Sequence
  Description of Artificial Sequence: Synthetic oligonucleotide
  Antisense Strand to SEQ ID NO: 499917
uaguaucucuggcacgucu

SEQ ID NO: 499919 - RNA, 19 nt, Artificial Sequence
  Description of Artificial Sequence: Synthetic oligonucleotide
  Sense strand starting at position 260 of SEQ ID NO: 317633
acgugccagagauacuaaa

SEQ ID NO: 499920 - RNA, 19 nt, Artificial Sequence
  Description of Artificial Sequence: Synthetic oligonucleotide
  Antisense Strand to SEQ ID NO: 499919
uuuaguaucucuggcacgu

SEQ ID NO: 499921 - RNA, 19 nt, Artificial Sequence
  Description of Artificial Sequence: Synthetic oligonucleotide
  Sense strand starting at position 327 of SEQ ID NO: 317633
ucagguauacgucagauaa

SEQ ID NO: 499922 - RNA, 19 nt, Artificial Sequence
  Description of Artificial Sequence: Synthetic oligonucleotide
  Antisense Strand to SEQ ID NO: 499921
uuaucugacguauaccuga

SEQ ID NO: 499923 - RNA, 19 nt, Artificial Sequence
  Description of Artificial Sequence: Synthetic oligonucleotide
  Sense strand starting at position 388 of SEQ ID NO: 317633
agcugauaccauugaggca

SEQ ID NO: 499924 - RNA, 19 nt, Artificial Sequence
  Description of Artificial Sequence: Synthetic oligonucleotide
  Antisense Strand to SEQ ID NO: 499923
ugccucaaugguaucagcu

SEQ ID NO: 499925 - RNA, 19 nt, Artificial Sequence
  Description of Artificial Sequence: Synthetic oligonucleotide
  Sense strand starting at position 389 of SEQ ID NO: 317633
gcugauaccauugaggcau

SEQ ID NO: 499926 - RNA, 19 nt, Artificial Sequence
  Description of Artificial Sequence: Synthetic oligonucleotide
  Antisense Strand to SEQ ID NO: 499925
augccucaaugguaucagc

SEQ ID NO: 499927 - RNA, 19 nt, Artificial Sequence
  Description of Artificial Sequence: Synthetic oligonucleotide
  Sense strand starting at position 552 of SEQ ID NO: 317633
auaauugacugacugcauu

SEQ ID NO: 499928 - RNA, 19 nt, Artificial Sequence
  Description of Artificial Sequence: Synthetic oligonucleotide
  Antisense Strand to SEQ ID NO: 499927
aaugcagucagucaauuau

SEQ ID NO: 499929 - RNA, 19 nt, Artificial Sequence
  Description of Artificial Sequence: Synthetic oligonucleotide
  Sense strand starting at position 635 of SEQ ID NO: 317633
cuauccuuucgauaguuaa

SEQ ID NO: 499930 - RNA, 19 nt, Artificial Sequence
  Description of Artificial Sequence: Synthetic oligonucleotide
  Antisense Strand to SEQ ID NO: 499929
uuaacuaucgaaaggauag

SEQ ID NO: 499931 - RNA, 19 nt, Artificial Sequence
  Description of Artificial Sequence: Synthetic oligonucleotide
  Sense strand starting at position 664 of SEQ ID NO: 317633
agccuuaugaaacguuaag

SEQ ID NO: 499932 - RNA, 19 nt, Artificial Sequence
  Description of Artificial Sequence: Synthetic oligonucleotide
  Antisense Strand to SEQ ID NO: 499931
cuuaacguuucauaaggcu

SEQ ID NO: 499933 - RNA, 19 nt, Artificial Sequence
  Description of Artificial Sequence: Synthetic oligonucleotide
  Sense strand starting at position 670 of SEQ ID NO: 317633
augaaacguuaagcacaua

SEQ ID NO: 499934 - RNA, 19 nt, Artificial Sequence
  Description of Artificial Sequence: Synthetic oligonucleotide
  Antisense Strand to SEQ ID NO: 499933
uaugugcuuaacguuucau

SEQ ID NO: 499935 - RNA, 19 nt, Artificial Sequence
  Description of Artificial Sequence: Synthetic oligonucleotide
  Sense strand starting at position 717 of SEQ ID NO: 317633
acgcauuuauuggcacuaa

SEQ ID NO: 499936 - RNA, 19 nt, Artificial Sequence
  Description of Artificial Sequence: Synthetic oligonucleotide
  Antisense Strand to SEQ ID NO: 499935
uuagugccaauaaaugcgu

SEQ ID NO: 499937 - RNA, 19 nt, Artificial Sequence
  Description of Artificial Sequence: Synthetic oligonucleotide
  Sense strand starting at position 895 of SEQ ID NO: 317633
gagcauuauuuagccaguu

SEQ ID NO: 499938 - RNA, 19 nt, Artificial Sequence
  Description of Artificial Sequence: Synthetic oligonucleotide
  Antisense Strand to SEQ ID NO: 499937
aacuggcuaaauaaugcuc

SEQ ID NO: 499939 - RNA, 19 nt, Artificial Sequence
  Description of Artificial Sequence: Synthetic oligonucleotide
  Sense strand starting at position 896 of SEQ ID NO: 317633
agcauuauuuagccaguuu

SEQ ID NO: 499940 - RNA, 19 nt, Artificial Sequence
  Description of Artificial Sequence: Synthetic oligonucleotide
  Antisense Strand to SEQ ID NO: 499939
aaacuggcuaaauaaugcu

SEQ ID NO: 499941 - RNA, 19 nt, Artificial Sequence
  Description of Artificial Sequence: Synthetic oligonucleotide
  Sense strand starting at position 1224 of SEQ ID NO: 317633
ugaacugaaugcucaauua

SEQ ID NO: 499942 - RNA, 19 nt, Artificial Sequence
  Description of Artificial Sequence: Synthetic oligonucleotide
  Antisense Strand to SEQ ID NO: 499941
uaauugagcauucaguuca

SEQ ID NO: 499943 - RNA, 19 nt, Artificial Sequence
  Description of Artificial Sequence: Synthetic oligonucleotide
  Sense strand starting at position 1307 of SEQ ID NO: 317633
ugguuauuucgguaacgua

SEQ ID NO: 499944 - RNA, 19 nt, Artificial Sequence
  Description of Artificial Sequence: Synthetic oligonucleotide
  Antisense Strand to SEQ ID NO: 499943
uacguuaccgaaauaacca

SEQ ID NO: 499945 - RNA, 19 nt, Artificial Sequence
  Description of Artificial Sequence: Synthetic oligonucleotide
  Sense strand starting at position 1409 of SEQ ID NO: 317633
aaauaaucacgaggugauc

SEQ ID NO: 499946 - RNA, 19 nt, Artificial Sequence
  Description of Artificial Sequence: Synthetic oligonucleotide
  Antisense Strand to SEQ ID NO: 499945
gaucaccucgugauuauuu

SEQ ID NO: 499947 - RNA, 19 nt, Artificial Sequence
  Description of Artificial Sequence: Synthetic oligonucleotide
  Sense strand starting at position 1411 of SEQ ID NO: 317633
auaaucacgaggugaucau

SEQ ID NO: 499948 - RNA, 19 nt, Artificial Sequence
  Description of Artificial Sequence: Synthetic oligonucleotide
  Antisense Strand to SEQ ID NO: 499947
augaucaccucgugauuau

SEQ ID NO: 499949 - RNA, 19 nt, Artificial Sequence
  Description of Artificial Sequence: Synthetic oligonucleotide
  Sense strand starting at position 1421 of SEQ ID NO: 317633
ggugaucaugcggauuaac

SEQ ID NO: 499950 - RNA, 19 nt, Artificial Sequence
  Description of Artificial Sequence: Synthetic oligonucleotide
  Antisense Strand to SEQ ID NO: 499949
guuaauccgcaugaucacc

SEQ ID NO: 499951 - RNA, 19 nt, Artificial Sequence
  Description of Artificial Sequence: Synthetic oligonucleotide
  Sense strand starting at position 1424 of SEQ ID NO: 317633
gaucaugcggauuaacuuu

SEQ ID NO: 499952 - RNA, 19 nt, Artificial Sequence
  Description of Artificial Sequence: Synthetic oligonucleotide
  Antisense Strand to SEQ ID NO: 499951
aaaguuaauccgcaugauc

SEQ ID NO: 499953 - RNA, 19 nt, Artificial Sequence
  Description of Artificial Sequence: Synthetic oligonucleotide
  Sense strand starting at position 1430 of SEQ ID NO: 317633
gcggauuaacuuucugcgu

SEQ ID NO: 499954 - RNA, 19 nt, Artificial Sequence
  Description of Artificial Sequence: Synthetic oligonucleotide
  Antisense Strand to SEQ ID NO: 499953
acgcagaaaguuaauccgc

SEQ ID NO: 499955 - RNA, 19 nt, Artificial Sequence
  Description of Artificial Sequence: Synthetic oligonucleotide
  Sense strand starting at position 1453 of SEQ ID NO: 317633
agagauauccucugaaucc

SEQ ID NO: 499956 - RNA, 19 nt, Artificial Sequence
  Description of Artificial Sequence: Synthetic oligonucleotide
  Antisense Strand to SEQ ID NO: 499955
ggauucagaggauaucucu

SEQ ID NO: 499957 - RNA, 19 nt, Artificial Sequence
  Description of Artificial Sequence: Synthetic oligonucleotide
  Sense strand starting at position 1529 of SEQ ID NO: 317633
gagugaaucuucuucucag

SEQ ID NO: 499958 - RNA, 19 nt, Artificial Sequence
  Description of Artificial Sequence: Synthetic oligonucleotide
  Antisense Strand to SEQ ID NO: 499957
cugagaagaagauucacuc

SEQ ID NO: 499959 - RNA, 19 nt, Artificial Sequence
  Description of Artificial Sequence: Synthetic oligonucleotide
  Sense strand starting at position 1605 of SEQ ID NO: 317633
ugugucaccaaaugaggaa

SEQ ID NO: 499960 - RNA, 19 nt, Artificial Sequence
  Description of Artificial Sequence: Synthetic oligonucleotide
  Antisense Strand to SEQ ID NO: 499959
uuccucauuuggugacaca

SEQ ID NO: 499961 - RNA, 19 nt, Artificial Sequence
  Description of Artificial Sequence: Synthetic oligonucleotide
  Sense strand starting at position 2092 of SEQ ID NO: 317633
agcagaggaucugcagaaa

SEQ ID NO: 499962 - RNA, 19 nt, Artificial Sequence
  Description of Artificial Sequence: Synthetic oligonucleotide
  Antisense Strand to SEQ ID NO: 499961
uuucugcagauccucugcu

SEQ ID NO: 499963 - RNA, 19 nt, Artificial Sequence
  Description of Artificial Sequence: Synthetic oligonucleotide
  Sense strand starting at position 2229 of SEQ ID NO: 317633
agacuugguacuggaucaa

SEQ ID NO: 499964 - RNA, 19 nt, Artificial Sequence
  Description of Artificial Sequence: Synthetic oligonucleotide
  Antisense Strand to SEQ ID NO: 499963
uugauccaguaccaagucu

SEQ ID NO: 499965 - RNA, 19 nt, Artificial Sequence
  Description of Artificial Sequence: Synthetic oligonucleotide
  Sense strand starting at position 2393 of SEQ ID NO: 317633
ugucucuuauuucuguuau

SEQ ID NO: 499966 - RNA, 19 nt, Artificial Sequence
  Description of Artificial Sequence: Synthetic oligonucleotide
  Antisense Strand to SEQ ID NO: 499965
auaacagaaauaagagaca

SEQ ID NO: 499967 - RNA, 19 nt, Artificial Sequence
  Description of Artificial Sequence: Synthetic oligonucleotide
  Sense strand starting at position 2419 of SEQ ID NO: 317633
ggauuccauuccuuuguga

SEQ ID NO: 499968 - RNA, 19 nt, Artificial Sequence
  Description of Artificial Sequence: Synthetic oligonucleotide
  Antisense Strand to SEQ ID NO: 499967
ucacaaaggaauggaaucc

SEQ ID NO: 499969 - RNA, 19 nt, Artificial Sequence
  Description of Artificial Sequence: Synthetic oligonucleotide
  Sense strand starting at position 2466 of SEQ ID NO: 317633
auguguaaucugccugcuu

SEQ ID NO: 499970 - RNA, 19 nt, Artificial Sequence
  Description of Artificial Sequence: Synthetic oligonucleotide
  Antisense Strand to SEQ ID NO: 499969
aagcaggcagauuacacau

SEQ ID NO: 499971 - RNA, 19 nt, Artificial Sequence
  Description of Artificial Sequence: Synthetic oligonucleotide
  Sense strand starting at position 2515 of SEQ ID NO: 317633
aucagaaucuccuuccgau

SEQ ID NO: 499972 - RNA, 19 nt, Artificial Sequence
  Description of Artificial Sequence: Synthetic oligonucleotide
  Antisense Strand to SEQ ID NO: 499971
aucggaaggagauucugau

SEQ ID NO: 499973 - RNA, 19 nt, Artificial Sequence
  Description of Artificial Sequence: Synthetic oligonucleotide
  Sense strand starting at position 2790 of SEQ ID NO: 317633
ugucauuaagguuacuauu

SEQ ID NO: 499974 - RNA, 19 nt, Artificial Sequence
  Description of Artificial Sequence: Synthetic oligonucleotide
  Antisense Strand to SEQ ID NO: 499973
aauaguaaccuuaaugaca

SEQ ID NO: 499975 - RNA, 19 nt, Artificial Sequence
  Description of Artificial Sequence: Synthetic oligonucleotide
  Sense strand starting at position 2981 of SEQ ID NO: 317633
ccucauugauagucacaug

SEQ ID NO: 499976 - RNA, 19 nt, Artificial Sequence
  Description of Artificial Sequence: Synthetic oligonucleotide
  Antisense Strand to SEQ ID NO: 499975
caugugacuaucaaugagg

SEQ ID NO: 499977 - RNA, 19 nt, Artificial Sequence
  Description of Artificial Sequence: Synthetic oligonucleotide
  Sense strand starting at position 3079 of SEQ ID NO: 317633
caggaagcauacucugagu

SEQ ID NO: 499978 - RNA, 19 nt, Artificial Sequence
  Description of Artificial Sequence: Synthetic oligonucleotide
  Antisense Strand to SEQ ID NO: 499977
acucagaguaugcuuccug

SEQ ID NO: 499979 - RNA, 19 nt, Artificial Sequence
  Description of Artificial Sequence: Synthetic oligonucleotide
  Sense strand starting at position 3081 of SEQ ID NO: 317633
ggaagcauacucugaguca

SEQ ID NO: 499980 - RNA, 19 nt, Artificial Sequence
  Description of Artificial Sequence: Synthetic oligonucleotide
  Antisense Strand to SEQ ID NO: 499979
ugacucagaguaugcuucc

SEQ ID NO: 499981 - RNA, 19 nt, Artificial Sequence
  Description of Artificial Sequence: Synthetic oligonucleotide
  Sense strand starting at position 3104 of SEQ ID NO: 317633
agaguauaaugaguauguu

SEQ ID NO: 499982 - RNA, 19 nt, Artificial Sequence
  Description of Artificial Sequence: Synthetic oligonucleotide
  Antisense Strand to SEQ ID NO: 499981
aacauacucauuauacucu

SEQ ID NO: 499983 - RNA, 19 nt, Artificial Sequence
  Description of Artificial Sequence: Synthetic oligonucleotide
  Sense strand starting at position 3105 of SEQ ID NO: 317633
gaguauaaugaguauguua

SEQ ID NO: 499984 - RNA, 19 nt, Artificial Sequence
  Description of Artificial Sequence: Synthetic oligonucleotide
  Antisense Strand to SEQ ID NO: 499983
uaacauacucauuauacuc

SEQ ID NO: 499985 - RNA, 19 nt, Artificial Sequence
  Description of Artificial Sequence: Synthetic oligonucleotide
  Sense strand starting at position 3114 of SEQ ID NO: 317633
gaguauguuagggaaugcu

SEQ ID NO: 499986 - RNA, 19 nt, Artificial Sequence
  Description of Artificial Sequence: Synthetic oligonucleotide
  Antisense Strand to SEQ ID NO: 499985
agcauucccuaacauacuc

SEQ ID NO: 499987 - RNA, 19 nt, Artificial Sequence
  Description of Artificial Sequence: Synthetic oligonucleotide
  Sense strand starting at position 3397 of SEQ ID NO: 317633
ucagcagcucaggaaauaa

SEQ ID NO: 499988 - RNA, 19 nt, Artificial Sequence
  Description of Artificial Sequence: Synthetic oligonucleotide
  Antisense Strand to SEQ ID NO: 499987
uuauuuccugagcugcuga

SEQ ID NO: 499989 - RNA, 19 nt, Artificial Sequence
  Description of Artificial Sequence: Synthetic oligonucleotide
  Sense strand starting at position 3672 of SEQ ID NO: 317633
uaagcaauuugggauauga

SEQ ID NO: 499990 - RNA, 19 nt, Artificial Sequence
  Description of Artificial Sequence: Synthetic oligonucleotide
  Antisense Strand to SEQ ID NO: 499989
ucauaucccaaauugcuua

SEQ ID NO: 499991 - RNA, 19 nt, Artificial Sequence
  Description of Artificial Sequence: Synthetic oligonucleotide
  Sense strand starting at position 3903 of SEQ ID NO: 317633
ggugucagcaaauagacaa

SEQ ID NO: 499992 - RNA, 19 nt, Artificial Sequence
  Description of Artificial Sequence: Synthetic oligonucleotide
  Antisense Strand to SEQ ID NO: 499991
uugucuauuugcugacacc

SEQ ID NO: 499993 - RNA, 19 nt, Artificial Sequence
  Description of Artificial Sequence: Synthetic oligonucleotide
  Sense strand starting at position 3 of SEQ ID NO: 317634
uguuuaucaugaucaauag

SEQ ID NO: 499994 - RNA, 19 nt, Artificial Sequence
  Description of Artificial Sequence: Synthetic oligonucleotide
  Antisense Strand to SEQ ID NO: 499993
cuauugaucaugauaaaca

SEQ ID NO: 499995 - RNA, 19 nt, Artificial Sequence
  Description of Artificial Sequence: Synthetic oligonucleotide
  Sense strand starting at position 56 of SEQ ID NO: 317634
uucguacugguugaaagaa

SEQ ID NO: 499996 - RNA, 19 nt, Artificial Sequence
  Description of Artificial Sequence: Synthetic oligonucleotide
  Antisense Strand to SEQ ID NO: 499995
uucuuucaaccaguacgaa

SEQ ID NO: 499997 - RNA, 19 nt, Artificial Sequence
  Description of Artificial Sequence: Synthetic oligonucleotide
  Sense strand starting at position 236 of SEQ ID NO: 317634
agaucuucagaucggguau

SEQ ID NO: 499998 - RNA, 19 nt, Artificial Sequence
  Description of Artificial Sequence: Synthetic oligonucleotide
  Antisense Strand to SEQ ID NO: 499997
auacccgaucugaagaucu

SEQ ID NO: 499999 - RNA, 19 nt, Artificial Sequence
  Description of Artificial Sequence: Synthetic oligonucleotide
  Sense strand starting at position 317 of SEQ ID NO: 317634
uugcauuugcaaugaaugu

SEQ ID NO: 500000 - RNA, 19 nt, Artificial Sequence
  Description of Artificial Sequence: Synthetic oligonucleotide
  Antisense Strand to SEQ ID NO: 499999
acauucauugcaaaugcaa

SEQ ID NO: 500001 - RNA, 19 nt, Artificial Sequence
  Description of Artificial Sequence: Synthetic oligonucleotide
  Sense strand starting at position 330 of SEQ ID NO: 317634
gaauguuaucagcauagca

SEQ ID NO: 500002 - RNA, 19 nt, Artificial Sequence
  Description of Artificial Sequence: Synthetic oligonucleotide
  Antisense Strand to SEQ ID NO: 500001
ugcuaugcugauaacauuc

SEQ ID NO: 500003 - RNA, 19 nt, Artificial Sequence
  Description of Artificial Sequence: Synthetic oligonucleotide
  Sense strand starting at position 332 of SEQ ID NO: 317634
auguuaucagcauagcaaa

SEQ ID NO: 500004 - RNA, 19 nt, Artificial Sequence
  Description of Artificial Sequence: Synthetic oligonucleotide
  Antisense Strand to SEQ ID NO: 500003
uuugcuaugcugauaacau

SEQ ID NO: 500005 - RNA, 19 nt, Artificial Sequence
  Description of Artificial Sequence: Synthetic oligonucleotide
  Sense strand starting at position 418 of SEQ ID NO: 317634
auugcauccuaguuaaaga

SEQ ID NO: 500006 - RNA, 19 nt, Artificial Sequence
  Description of Artificial Sequence: Synthetic oligonucleotide
  Antisense Strand to SEQ ID NO: 500005
ucuuuaacuaggaugcaau

SEQ ID NO: 500007 - RNA, 19 nt, Artificial Sequence
  Description of Artificial Sequence: Synthetic oligonucleotide
  Sense strand starting at position 564 of SEQ ID NO: 317634
cugaacuuugcauauguga

SEQ ID NO: 500008 - RNA, 19 nt, Artificial Sequence
  Description of Artificial Sequence: Synthetic oligonucleotide
  Antisense Strand to SEQ ID NO: 500007
ucacauaugcaaaguucag

SEQ ID NO: 500009 - RNA, 19 nt, Artificial Sequence
  Description of Artificial Sequence: Synthetic oligonucleotide
  Sense strand starting at position 571 of SEQ ID NO: 317634
uugcauaugugacucaaga

SEQ ID NO: 500010 - RNA, 19 nt, Artificial Sequence
  Description of Artificial Sequence: Synthetic oligonucleotide
  Antisense Strand to SEQ ID NO: 500009
ucuugagucacauaugcaa

SEQ ID NO: 500011 - RNA, 19 nt, Artificial Sequence
  Description of Artificial Sequence: Synthetic oligonucleotide
  Sense strand starting at position 622 of SEQ ID NO: 317634
ucugcucuacuguagaaga

SEQ ID NO: 500012 - RNA, 19 nt, Artificial Sequence
  Description of Artificial Sequence: Synthetic oligonucleotide
  Antisense Strand to SEQ ID NO: 500011
ucuucuacaguagagcaga

SEQ ID NO: 500013 - RNA, 19 nt, Artificial Sequence
  Description of Artificial Sequence: Synthetic oligonucleotide
  Sense strand starting at position 624 of SEQ ID NO: 317634
ugcucuacuguagaagagu

SEQ ID NO: 500014 - RNA, 19 nt, Artificial Sequence
  Description of Artificial Sequence: Synthetic oligonucleotide
  Antisense Strand to SEQ ID NO: 500013
acucuucuacaguagagca

SEQ ID NO: 500015 - RNA, 19 nt, Artificial Sequence
  Description of Artificial Sequence: Synthetic oligonucleotide
  Sense strand starting at position 657 of SEQ ID NO: 317634
gagacccagguuugucuua

SEQ ID NO: 500016 - RNA, 19 nt, Artificial Sequence
  Description of Artificial Sequence: Synthetic oligonucleotide
  Antisense Strand to SEQ ID NO: 500015
uaagacaaaccugggucuc

SEQ ID NO: 500017 - RNA, 19 nt, Artificial Sequence
  Description of Artificial Sequence: Synthetic oligonucleotide
  Sense strand starting at position 659 of SEQ ID NO: 317634
gacccagguuugucuuaau

SEQ ID NO: 500018 - RNA, 19 nt, Artificial Sequence
  Description of Artificial Sequence: Synthetic oligonucleotide
  Antisense Strand to SEQ ID NO: 500017
auuaagacaaaccuggguc

SEQ ID NO: 500019 - RNA, 19 nt, Artificial Sequence
  Description of Artificial Sequence: Synthetic oligonucleotide
  Sense strand starting at position 742 of SEQ ID NO: 317634
cuacguagauuuguacuuu

SEQ ID NO: 500020 - RNA, 19 nt, Artificial Sequence
  Description of Artificial Sequence: Synthetic oligonucleotide
  Antisense Strand to SEQ ID NO: 500019
aaaguacaaaucuacguag

SEQ ID NO: 500021 - RNA, 19 nt, Artificial Sequence
  Description of Artificial Sequence: Synthetic oligonucleotide
  Sense strand starting at position 831 of SEQ ID NO: 317634
uuuaaagucagagguauug

SEQ ID NO: 500022 - RNA, 19 nt, Artificial Sequence
  Description of Artificial Sequence: Synthetic oligonucleotide
  Antisense Strand to SEQ ID NO: 500021
caauaccucugacuuuaaa

SEQ ID NO: 500023 - RNA, 19 nt, Artificial Sequence
  Description of Artificial Sequence: Synthetic oligonucleotide
  Sense strand starting at position 843 of SEQ ID NO: 317634
gguauuguaacgggauaca

SEQ ID NO: 500024 - RNA, 19 nt, Artificial Sequence
  Description of Artificial Sequence: Synthetic oligonucleotide
  Antisense Strand to SEQ ID NO: 500023
uguaucccguuacaauacc

SEQ ID NO: 500025 - RNA, 19 nt, Artificial Sequence
  Description of Artificial Sequence: Synthetic oligonucleotide
  Sense strand starting at position 917 of SEQ ID NO: 317634
uuuccuuucugguuaagaa

SEQ ID NO: 500026 - RNA, 19 nt, Artificial Sequence
  Description of Artificial Sequence: Synthetic oligonucleotide
  Antisense Strand to SEQ ID NO: 500025
uucuuaaccagaaaggaaa

SEQ ID NO: 500027 - RNA, 19 nt, Artificial Sequence
  Description of Artificial Sequence: Synthetic oligonucleotide
  Sense strand starting at position 918 of SEQ ID NO: 317634
uuccuuucugguuaagaaa

SEQ ID NO: 500028 - RNA, 19 nt, Artificial Sequence
  Description of Artificial Sequence: Synthetic oligonucleotide
  Antisense Strand to SEQ ID NO: 500027
uuucuuaaccagaaaggaa

SEQ ID NO: 500029 - RNA, 19 nt, Artificial Sequence
  Description of Artificial Sequence: Synthetic oligonucleotide
  Sense strand starting at position 955 of SEQ ID NO: 317634
cugcaauuucuuggcuuua

SEQ ID NO: 500030 - RNA, 19 nt, Artificial Sequence
  Description of Artificial Sequence: Synthetic oligonucleotide
  Antisense Strand to SEQ ID NO: 500029
uaaagccaagaaauugcag

SEQ ID NO: 500031 - RNA, 19 nt, Artificial Sequence
  Description of Artificial Sequence: Synthetic oligonucleotide
  Sense strand starting at position 957 of SEQ ID NO: 317634
gcaauuucuuggcuuuaca

SEQ ID NO: 500032 - RNA, 19 nt, Artificial Sequence
  Description of Artificial Sequence: Synthetic oligonucleotide
  Antisense Strand to SEQ ID NO: 500031
uguaaagccaagaaauugc

SEQ ID NO: 500033 - RNA, 19 nt, Artificial Sequence
  Description of Artificial Sequence: Synthetic oligonucleotide
  Sense strand starting at position 1328 of SEQ ID NO: 317634
gguucuuccaaccgaagaa

SEQ ID NO: 500034 - RNA, 19 nt, Artificial Sequence
  Description of Artificial Sequence: Synthetic oligonucleotide
  Antisense Strand to SEQ ID NO: 500033
uucuucgguuggaagaacc

SEQ ID NO: 500035 - RNA, 19 nt, Artificial Sequence
  Description of Artificial Sequence: Synthetic oligonucleotide
  Sense strand starting at position 2166 of SEQ ID NO: 317634
ggcuuagagcuugacccaa

SEQ ID NO: 500036 - RNA, 19 nt, Artificial Sequence
  Description of Artificial Sequence: Synthetic oligonucleotide
  Antisense Strand to SEQ ID NO: 500035
uugggucaagcucuaagcc

SEQ ID NO: 500037 - RNA, 19 nt, Artificial Sequence
  Description of Artificial Sequence: Synthetic oligonucleotide
  Sense strand starting at position 2398 of SEQ ID NO: 317634
aaacucgucuucuuggaga

SEQ ID NO: 500038 - RNA, 19 nt, Artificial Sequence
  Description of Artificial Sequence: Synthetic oligonucleotide
  Antisense Strand to SEQ ID NO: 500037
ucuccaagaagacgaguuu

SEQ ID NO: 500039 - RNA, 19 nt, Artificial Sequence
  Description of Artificial Sequence: Synthetic oligonucleotide
  Sense strand starting at position 2409 of SEQ ID NO: 317634
cuuggagagcuucagugaa

SEQ ID NO: 500040 - RNA, 19 nt, Artificial Sequence
  Description of Artificial Sequence: Synthetic oligonucleotide
  Antisense Strand to SEQ ID NO: 500039
uucacugaagcucuccaag

SEQ ID NO: 500041 - RNA, 19 nt, Artificial Sequence
  Description of Artificial Sequence: Synthetic oligonucleotide
  Sense strand starting at position 2427 of SEQ ID NO: 317634
aggagauggccuugaaguc

SEQ ID NO: 500042 - RNA, 19 nt, Artificial Sequence
  Description of Artificial Sequence: Synthetic oligonucleotide
  Antisense Strand to SEQ ID NO: 500041
gacuucaaggccaucuccu

SEQ ID NO: 500043 - RNA, 19 nt, Artificial Sequence
  Description of Artificial Sequence: Synthetic oligonucleotide
  Sense strand starting at position 2436 of SEQ ID NO: 317634
ccuugaaguccuggguaca

SEQ ID NO: 500044 - RNA, 19 nt, Artificial Sequence
  Description of Artificial Sequence: Synthetic oligonucleotide
  Antisense Strand to SEQ ID NO: 500043
uguacccaggacuucaagg

SEQ ID NO: 500045 - RNA, 19 nt, Artificial Sequence
  Description of Artificial Sequence: Synthetic oligonucleotide
  Sense strand starting at position 2554 of SEQ ID NO: 317634
gucguaugugaggcgcaaa

SEQ ID NO: 500046 - RNA, 19 nt, Artificial Sequence
  Description of Artificial Sequence: Synthetic oligonucleotide
  Antisense Strand to SEQ ID NO: 500045
uuugcgccucacauacgac

SEQ ID NO: 500047 - RNA, 19 nt, Artificial Sequence
  Description of Artificial Sequence: Synthetic oligonucleotide
  Sense strand starting at position 2610 of SEQ ID NO: 317634
ggacaaugacugugggagu

SEQ ID NO: 500048 - RNA, 19 nt, Artificial Sequence
  Description of Artificial Sequence: Synthetic oligonucleotide
  Antisense Strand to SEQ ID NO: 500047
acucccacagucauugucc

SEQ ID NO: 500049 - RNA, 19 nt, Artificial Sequence
  Description of Artificial Sequence: Synthetic oligonucleotide
  Sense strand starting at position 2888 of SEQ ID NO: 317634
caguuucuucgggaugaac

SEQ ID NO: 500050 - RNA, 19 nt, Artificial Sequence
  Description of Artificial Sequence: Synthetic oligonucleotide
  Antisense Strand to SEQ ID NO: 500049
guucaucccgaagaaacug

SEQ ID NO: 500051 - RNA, 19 nt, Artificial Sequence
  Description of Artificial Sequence: Synthetic oligonucleotide
  Sense strand starting at position 2890 of SEQ ID NO: 317634
guuucuucgggaugaacag

SEQ ID NO: 500052 - RNA, 19 nt, Artificial Sequence
  Description of Artificial Sequence: Synthetic oligonucleotide
  Antisense Strand to SEQ ID NO: 500051
cuguucaucccgaagaaac

SEQ ID NO: 500053 - RNA, 19 nt, Artificial Sequence
  Description of Artificial Sequence: Synthetic oligonucleotide
  Sense strand starting at position 3512 of SEQ ID NO: 317634
agaggcaacucuccuuaua

SEQ ID NO: 500054 - RNA, 19 nt, Artificial Sequence
  Description of Artificial Sequence: Synthetic oligonucleotide
  Antisense Strand to SEQ ID NO: 500053
uauaaggagaguugccucu

SEQ ID NO: 500055 - RNA, 19 nt, Artificial Sequence
  Description of Artificial Sequence: Synthetic oligonucleotide
  Sense strand starting at position 3615 of SEQ ID NO: 317634
ugaagugagaacugguuau

SEQ ID NO: 500056 - RNA, 19 nt, Artificial Sequence
  Description of Artificial Sequence: Synthetic oligonucleotide
  Antisense Strand to SEQ ID NO: 500055
auaaccaguucucacuuca

SEQ ID NO: 500057 - RNA, 19 nt, Artificial Sequence
  Description of Artificial Sequence: Synthetic oligonucleotide
  Sense strand starting at position 3639 of SEQ ID NO: 317634
ccaguucggccacauagaa

SEQ ID NO: 500058 - RNA, 19 nt, Artificial Sequence
  Description of Artificial Sequence: Synthetic oligonucleotide
  Antisense Strand to SEQ ID NO: 500057
uucuauguggccgaacugg

SEQ ID NO: 500059 - RNA, 19 nt, Artificial Sequence
  Description of Artificial Sequence: Synthetic oligonucleotide
  Sense strand starting at position 3783 of SEQ ID NO: 317634
gauagaagugacuguuaac

SEQ ID NO: 500060 - RNA, 19 nt, Artificial Sequence
  Description of Artificial Sequence: Synthetic oligonucleotide
  Antisense Strand to SEQ ID NO: 500059
guuaacagucacuucuauc

SEQ ID NO: 500061 - RNA, 19 nt, Artificial Sequence
  Description of Artificial Sequence: Synthetic oligonucleotide
  Sense strand starting at position 3830 of SEQ ID NO: 317634
gaugaaaugcuuuguggag

SEQ ID NO: 500062 - RNA, 19 nt, Artificial Sequence
  Description of Artificial Sequence: Synthetic oligonucleotide
  Antisense Strand to SEQ ID NO: 500061
cuccacaaagcauuucauc

SEQ ID NO: 500063 - RNA, 19 nt, Artificial Sequence
  Description of Artificial Sequence: Synthetic oligonucleotide
  Sense strand starting at position 3831 of SEQ ID NO: 317634
augaaaugcuuuguggagu

SEQ ID NO: 500064 - RNA, 19 nt, Artificial Sequence
  Description of Artificial Sequence: Synthetic oligonucleotide
  Antisense Strand to SEQ ID NO: 500063
acuccacaaagcauuucau

SEQ ID NO: 500065 - RNA, 19 nt, Artificial Sequence
  Description of Artificial Sequence: Synthetic oligonucleotide
  Sense strand starting at position 3844 of SEQ ID NO: 317634
uggagugucuggaaaugga

SEQ ID NO: 500066 - RNA, 19 nt, Artificial Sequence
  Description of Artificial Sequence: Synthetic oligonucleotide
  Antisense Strand to SEQ ID NO: 500065
uccauuuccagacacucca

SEQ ID NO: 500067 - RNA, 19 nt, Artificial Sequence
  Description of Artificial Sequence: Synthetic oligonucleotide
  Sense strand starting at position 3852 of SEQ ID NO: 317634
cuggaaauggaguguuuac

SEQ ID NO: 500068 - RNA, 19 nt, Artificial Sequence
  Description of Artificial Sequence: Synthetic oligonucleotide
  Antisense Strand to SEQ ID NO: 500067
guaaacacuccauuuccag

SEQ ID NO: 500069 - RNA, 19 nt, Artificial Sequence
  Description of Artificial Sequence: Synthetic oligonucleotide
  Sense strand starting at position 3909 of SEQ ID NO: 317634
agcagaaaccuuuaaggcu

SEQ ID NO: 500070 - RNA, 19 nt, Artificial Sequence
  Description of Artificial Sequence: Synthetic oligonucleotide
  Antisense Strand to SEQ ID NO: 500069
agccuuaaagguuucugcu

SEQ ID NO: 500071 - RNA, 19 nt, Artificial Sequence
  Description of Artificial Sequence: Synthetic oligonucleotide
  Sense strand starting at position 3921 of SEQ ID NO: 317634
uaaggcugaugucccuaaa

SEQ ID NO: 500072 - RNA, 19 nt, Artificial Sequence
  Description of Artificial Sequence: Synthetic oligonucleotide
  Antisense Strand to SEQ ID NO: 500071
uuuagggacaucagccuua

SEQ ID NO: 500073 - RNA, 19 nt, Artificial Sequence
  Description of Artificial Sequence: Synthetic oligonucleotide
  Sense strand starting at position 542 of SEQ ID NO: 317635
gaagcagguuccugcugua

SEQ ID NO: 500074 - RNA, 19 nt, Artificial Sequence
  Description of Artificial Sequence: Synthetic oligonucleotide
  Antisense Strand to SEQ ID NO: 500073
uacagcaggaaccugcuuc

SEQ ID NO: 500075 - RNA, 19 nt, Artificial Sequence
  Description of Artificial Sequence: Synthetic oligonucleotide
  Sense strand starting at position 545 of SEQ ID NO: 317635
gcagguuccugcuguagau

SEQ ID NO: 500076 - RNA, 19 nt, Artificial Sequence
  Description of Artificial Sequence: Synthetic oligonucleotide
  Antisense Strand to SEQ ID NO: 500075
aucuacagcaggaaccugc

SEQ ID NO: 500077 - RNA, 19 nt, Artificial Sequence
  Description of Artificial Sequence: Synthetic oligonucleotide
  Sense strand starting at position 563 of SEQ ID NO: 317635
uccggucugcgguugagau

SEQ ID NO: 500078 - RNA, 19 nt, Artificial Sequence
  Description of Artificial Sequence: Synthetic oligonucleotide
  Antisense Strand to SEQ ID NO: 500077
aucucaaccgcagaccgga

SEQ ID NO: 500079 - RNA, 19 nt, Artificial Sequence
  Description of Artificial Sequence: Synthetic oligonucleotide
  Sense strand starting at position 650 of SEQ ID NO: 317635
cacaauuccugagguggaa

SEQ ID NO: 500080 - RNA, 19 nt, Artificial Sequence
  Description of Artificial Sequence: Synthetic oligonucleotide
  Antisense Strand to SEQ ID NO: 500079
uuccaccucaggaauugug

SEQ ID NO: 500081 - RNA, 19 nt, Artificial Sequence
  Description of Artificial Sequence: Synthetic oligonucleotide
  Sense strand starting at position 716 of SEQ ID NO: 317635
ucaggaguggacuagcauu

SEQ ID NO: 500082 - RNA, 19 nt, Artificial Sequence
  Description of Artificial Sequence: Synthetic oligonucleotide
  Antisense Strand to SEQ ID NO: 500081
aaugcuaguccacuccuga

SEQ ID NO: 500083 - RNA, 19 nt, Artificial Sequence
  Description of Artificial Sequence: Synthetic oligonucleotide
  Sense strand starting at position 1229 of SEQ ID NO: 317635
agauguuacucaggaacag

SEQ ID NO: 500084 - RNA, 19 nt, Artificial Sequence
  Description of Artificial Sequence: Synthetic oligonucleotide
  Antisense Strand to SEQ ID NO: 500083
cuguuccugaguaacaucu

SEQ ID NO: 500085 - RNA, 19 nt, Artificial Sequence
  Description of Artificial Sequence: Synthetic oligonucleotide
  Sense strand starting at position 1274 of SEQ ID NO: 317635
agggacugguggaauaguu

SEQ ID NO: 500086 - RNA, 19 nt, Artificial Sequence
  Description of Artificial Sequence: Synthetic oligonucleotide
  Antisense Strand to SEQ ID NO: 500085
aacuauuccaccagucccu

SEQ ID NO: 500087 - RNA, 19 nt, Artificial Sequence
  Description of Artificial Sequence: Synthetic oligonucleotide
  Sense strand starting at position 1413 of SEQ ID NO: 317635
guuugcucacaugaacuuu

SEQ ID NO: 500088 - RNA, 19 nt, Artificial Sequence
  Description of Artificial Sequence: Synthetic oligonucleotide
  Antisense Strand to SEQ ID NO: 500087
aaaguucaugugagcaaac

SEQ ID NO: 500089 - RNA, 19 nt, Artificial Sequence
  Description of Artificial Sequence: Synthetic oligonucleotide
  Sense strand starting at position 1421 of SEQ ID NO: 317635
acaugaacuuuguuucgau

SEQ ID NO: 500090 - RNA, 19 nt, Artificial Sequence
  Description of Artificial Sequence: Synthetic oligonucleotide
  Antisense Strand to SEQ ID NO: 500089
aucgaaacaaaguucaugu

SEQ ID NO: 500091 - RNA, 19 nt, Artificial Sequence
  Description of Artificial Sequence: Synthetic oligonucleotide
  Sense strand starting at position 2032 of SEQ ID NO: 317635
ccgacacucugauuggaua

SEQ ID NO: 500092 - RNA, 19 nt, Artificial Sequence
  Description of Artificial Sequence: Synthetic oligonucleotide
  Antisense Strand to SEQ ID NO: 500091
uauccaaucagagugucgg

SEQ ID NO: 500093 - RNA, 19 nt, Artificial Sequence
  Description of Artificial Sequence: Synthetic oligonucleotide
  Sense strand starting at position 2033 of SEQ ID NO: 317635
cgacacucugauuggauau

SEQ ID NO: 500094 - RNA, 19 nt, Artificial Sequence
  Description of Artificial Sequence: Synthetic oligonucleotide
  Antisense Strand to SEQ ID NO: 500093
auauccaaucagagugucg

SEQ ID NO: 500095 - RNA, 19 nt, Artificial Sequence
  Description of Artificial Sequence: Synthetic oligonucleotide
  Sense strand starting at position 2035 of SEQ ID NO: 317635
acacucugauuggauauua

SEQ ID NO: 500096 - RNA, 19 nt, Artificial Sequence
  Description of Artificial Sequence: Synthetic oligonucleotide
  Antisense Strand to SEQ ID NO: 500095
uaauauccaaucagagugu

SEQ ID NO: 500097 - RNA, 19 nt, Artificial Sequence
  Description of Artificial Sequence: Synthetic oligonucleotide
  Sense strand starting at position 2065 of SEQ ID NO: 317635
gcccucgggccuugaguaa

SEQ ID NO: 500098 - RNA, 19 nt, Artificial Sequence
  Description of Artificial Sequence: Synthetic oligonucleotide
  Antisense Strand to SEQ ID NO: 500097
uuacucaaggcccgagggc

SEQ ID NO: 500099 - RNA, 19 nt, Artificial Sequence
  Description of Artificial Sequence: Synthetic oligonucleotide
  Sense strand starting at position 2072 of SEQ ID NO: 317635
ggccuugaguaacagaauu

SEQ ID NO: 500100 - RNA, 19 nt, Artificial Sequence
  Description of Artificial Sequence: Synthetic oligonucleotide
  Antisense Strand to SEQ ID NO: 500099
aauucuguuacucaaggcc

SEQ ID NO: 500101 - RNA, 19 nt, Artificial Sequence
  Description of Artificial Sequence: Synthetic oligonucleotide
  Sense strand starting at position 2203 of SEQ ID NO: 317635
uuaaccuuguuguguguaa

SEQ ID NO: 500102 - RNA, 19 nt, Artificial Sequence
  Description of Artificial Sequence: Synthetic oligonucleotide
  Antisense Strand to SEQ ID NO: 500101
uuacacacaacaagguuaa

SEQ ID NO: 500103 - RNA, 19 nt, Artificial Sequence
  Description of Artificial Sequence: Synthetic oligonucleotide
  Sense strand starting at position 2207 of SEQ ID NO: 317635
ccuuguuguguguaagguu

SEQ ID NO: 500104 - RNA, 19 nt, Artificial Sequence
  Description of Artificial Sequence: Synthetic oligonucleotide
  Antisense Strand to SEQ ID NO: 500103
aaccuuacacacaacaagg

SEQ ID NO: 500105 - RNA, 19 nt, Artificial Sequence
  Description of Artificial Sequence: Synthetic oligonucleotide
  Sense strand starting at position 2507 of SEQ ID NO: 317635
gagugaaguuguuuguaau

SEQ ID NO: 500106 - RNA, 19 nt, Artificial Sequence
  Description of Artificial Sequence: Synthetic oligonucleotide
  Antisense Strand to SEQ ID NO: 500105
auuacaaacaacuucacuc

SEQ ID NO: 500107 - RNA, 19 nt, Artificial Sequence
  Description of Artificial Sequence: Synthetic oligonucleotide
  Sense strand starting at position 2508 of SEQ ID NO: 317635
agugaaguuguuuguaaua

SEQ ID NO: 500108 - RNA, 19 nt, Artificial Sequence
  Description of Artificial Sequence: Synthetic oligonucleotide
  Antisense Strand to SEQ ID NO: 500107
uauuacaaacaacuucacu

SEQ ID NO: 500109 - RNA, 19 nt, Artificial Sequence
  Description of Artificial Sequence: Synthetic oligonucleotide
  Sense strand starting at position 2769 of SEQ ID NO: 317635
gcucucuucccuuagggaa

SEQ ID NO: 500110 - RNA, 19 nt, Artificial Sequence
  Description of Artificial Sequence: Synthetic oligonucleotide
  Antisense Strand to SEQ ID NO: 500109
uucccuaagggaagagagc

SEQ ID NO: 500111 - RNA, 19 nt, Artificial Sequence
  Description of Artificial Sequence: Synthetic oligonucleotide
  Sense strand starting at position 2909 of SEQ ID NO: 317635
agaguauccacgugaagac

SEQ ID NO: 500112 - RNA, 19 nt, Artificial Sequence
  Description of Artificial Sequence: Synthetic oligonucleotide
  Antisense Strand to SEQ ID NO: 500111
gucuucacguggauacucu

SEQ ID NO: 500113 - RNA, 19 nt, Artificial Sequence
  Description of Artificial Sequence: Synthetic oligonucleotide
  Sense strand starting at position 3190 of SEQ ID NO: 317635
ggguaaaguuccucacuaa

SEQ ID NO: 500114 - RNA, 19 nt, Artificial Sequence
  Description of Artificial Sequence: Synthetic oligonucleotide
  Antisense Strand to SEQ ID NO: 500113
uuagugaggaacuuuaccc

SEQ ID NO: 500115 - RNA, 19 nt, Artificial Sequence
  Description of Artificial Sequence: Synthetic oligonucleotide
  Sense strand starting at position 3191 of SEQ ID NO: 317635
gguaaaguuccucacuaag

SEQ ID NO: 500116 - RNA, 19 nt, Artificial Sequence
  Description of Artificial Sequence: Synthetic oligonucleotide
  Antisense Strand to SEQ ID NO: 500115
cuuagugaggaacuuuacc

SEQ ID NO: 500117 - RNA, 19 nt, Artificial Sequence
  Description of Artificial Sequence: Synthetic oligonucleotide
  Sense strand starting at position 3319 of SEQ ID NO: 317635
augucauguuaaugaccuu

SEQ ID NO: 500118 - RNA, 19 nt, Artificial Sequence
  Description of Artificial Sequence: Synthetic oligonucleotide
  Antisense Strand to SEQ ID NO: 500117
aaggucauuaacaugacau

SEQ ID NO: 500119 - RNA, 19 nt, Artificial Sequence
  Description of Artificial Sequence: Synthetic oligonucleotide
  Sense strand starting at position 3335 of SEQ ID NO: 317635
cuuauaaugagcuggguca

SEQ ID NO: 500120 - RNA, 19 nt, Artificial Sequence
  Description of Artificial Sequence: Synthetic oligonucleotide
  Antisense Strand to SEQ ID NO: 500119
ugacccagcucauuauaag

SEQ ID NO: 500121 - RNA, 19 nt, Artificial Sequence
  Description of Artificial Sequence: Synthetic oligonucleotide
  Sense strand starting at position 3357 of SEQ ID NO: 317635
uaaggacauuuggguugau

SEQ ID NO: 500122 - RNA, 19 nt, Artificial Sequence
  Description of Artificial Sequence: Synthetic oligonucleotide
  Antisense Strand to SEQ ID NO: 500121
aucaacccaaauguccuua

SEQ ID NO: 500123 - RNA, 19 nt, Artificial Sequence
  Description of Artificial Sequence: Synthetic oligonucleotide
  Sense strand starting at position 3374 of SEQ ID NO: 317635
auuuauugcgccugugcua

SEQ ID NO: 500124 - RNA, 19 nt, Artificial Sequence
  Description of Artificial Sequence: Synthetic oligonucleotide
  Antisense Strand to SEQ ID NO: 500123
uagcacaggcgcaauaaau

SEQ ID NO: 500125 - RNA, 19 nt, Artificial Sequence
  Description of Artificial Sequence: Synthetic oligonucleotide
  Sense strand starting at position 3375 of SEQ ID NO: 317635
uuuauugcgccugugcuaa

SEQ ID NO: 500126 - RNA, 19 nt, Artificial Sequence
  Description of Artificial Sequence: Synthetic oligonucleotide
  Antisense Strand to SEQ ID NO: 500125
uuagcacaggcgcaauaaa

SEQ ID NO: 500127 - RNA, 19 nt, Artificial Sequence
  Description of Artificial Sequence: Synthetic oligonucleotide
  Sense strand starting at position 3411 of SEQ ID NO: 317635
ggagcaacauccuggcaua

SEQ ID NO: 500128 - RNA, 19 nt, Artificial Sequence
  Description of Artificial Sequence: Synthetic oligonucleotide
  Antisense Strand to SEQ ID NO: 500127
uaugccaggauguugcucc

SEQ ID NO: 500129 - RNA, 19 nt, Artificial Sequence
  Description of Artificial Sequence: Synthetic oligonucleotide
  Sense strand starting at position 3651 of SEQ ID NO: 317635
agccuuguccuccagaguu

SEQ ID NO: 500130 - RNA, 19 nt, Artificial Sequence
  Description of Artificial Sequence: Synthetic oligonucleotide
  Antisense Strand to SEQ ID NO: 500129
aacucuggaggacaaggcu

SEQ ID NO: 500131 - RNA, 19 nt, Artificial Sequence
  Description of Artificial Sequence: Synthetic oligonucleotide
  Sense strand starting at position 3653 of SEQ ID NO: 317635
ccuuguccuccagaguuua

SEQ ID NO: 500132 - RNA, 19 nt, Artificial Sequence
  Description of Artificial Sequence: Synthetic oligonucleotide
  Antisense Strand to SEQ ID NO: 500131
uaaacucuggaggacaagg

SEQ ID NO: 500133 - RNA, 19 nt, Artificial Sequence
  Description of Artificial Sequence: Synthetic oligonucleotide
  Sense strand starting at position 3708 of SEQ ID NO: 317635
uuugcuauuuguccuugga

SEQ ID NO: 500134 - RNA, 19 nt, Artificial Sequence
  Description of Artificial Sequence: Synthetic oligonucleotide
  Antisense Strand to SEQ ID NO: 500133
uccaaggacaaauagcaaa

SEQ ID NO: 500135 - RNA, 19 nt, Artificial Sequence
  Description of Artificial Sequence: Synthetic oligonucleotide
  Sense strand starting at position 3711 of SEQ ID NO: 317635
gcuauuuguccuuggaccu

SEQ ID NO: 500136 - RNA, 19 nt, Artificial Sequence
  Description of Artificial Sequence: Synthetic oligonucleotide
  Antisense Strand to SEQ ID NO: 500135
agguccaaggacaaauagc

SEQ ID NO: 500137 - RNA, 19 nt, Artificial Sequence
  Description of Artificial Sequence: Synthetic oligonucleotide
  Sense strand starting at position 3793 of SEQ ID NO: 317635
cugugaguuuaagcaccaa

SEQ ID NO: 500138 - RNA, 19 nt, Artificial Sequence
  Description of Artificial Sequence: Synthetic oligonucleotide
  Antisense Strand to SEQ ID NO: 500137
uuggugcuuaaacucacag

SEQ ID NO: 500139 - RNA, 19 nt, Artificial Sequence
  Description of Artificial Sequence: Synthetic oligonucleotide
  Sense strand starting at position 3834 of SEQ ID NO: 317635
gcacuucuguucccagaac

SEQ ID NO: 500140 - RNA, 19 nt, Artificial Sequence
  Description of Artificial Sequence: Synthetic oligonucleotide
  Antisense Strand to SEQ ID NO: 500139
guucugggaacagaagugc

SEQ ID NO: 500141 - RNA, 19 nt, Artificial Sequence
  Description of Artificial Sequence: Synthetic oligonucleotide
  Sense strand starting at position 3953 of SEQ ID NO: 317635
gcggaaauuuauuaaggua

SEQ ID NO: 500142 - RNA, 19 nt, Artificial Sequence
  Description of Artificial Sequence: Synthetic oligonucleotide
  Antisense Strand to SEQ ID NO: 500141
uaccuuaauaaauuuccgc

SEQ ID NO: 500143 - RNA, 19 nt, Artificial Sequence
  Description of Artificial Sequence: Synthetic oligonucleotide
  Sense strand starting at position 3970 of SEQ ID NO: 317635
uaagaaauaggguggguau

SEQ ID NO: 500144 - RNA, 19 nt, Artificial Sequence
  Description of Artificial Sequence: Synthetic oligonucleotide
  Antisense Strand to SEQ ID NO: 500143
auacccacccuauuucuua

SEQ ID NO: 500145 - RNA, 19 nt, Artificial Sequence
  Description of Artificial Sequence: Synthetic oligonucleotide
  Sense strand starting at position 3982 of SEQ ID NO: 317635
uggguaugggcuugagcaa

SEQ ID NO: 500146 - RNA, 19 nt, Artificial Sequence
  Description of Artificial Sequence: Synthetic oligonucleotide
  Antisense Strand to SEQ ID NO: 500145
uugcucaagcccauaccca

SEQ ID NO: 500147 - RNA, 19 nt, Artificial Sequence
  Description of Artificial Sequence: Synthetic oligonucleotide
  Sense strand starting at position 29 of SEQ ID NO: 317636
guucccaaguccuagauaa

SEQ ID NO: 500148 - RNA, 19 nt, Artificial Sequence
  Description of Artificial Sequence: Synthetic oligonucleotide
  Antisense Strand to SEQ ID NO: 500147
uuaucuaggacuugggaac

SEQ ID NO: 500149 - RNA, 19 nt, Artificial Sequence
  Description of Artificial Sequence: Synthetic oligonucleotide
  Sense strand starting at position 45 of SEQ ID NO: 317636
uaaagacaagucugaguca

SEQ ID NO: 500150 - RNA, 19 nt, Artificial Sequence
  Description of Artificial Sequence: Synthetic oligonucleotide
  Antisense Strand to SEQ ID NO: 500149
ugacucagacuugucuuua

SEQ ID NO: 500151 - RNA, 19 nt, Artificial Sequence
  Description of Artificial Sequence: Synthetic oligonucleotide
  Sense strand starting at position 46 of SEQ ID NO: 317636
aaagacaagucugagucaa

SEQ ID NO: 500152 - RNA, 19 nt, Artificial Sequence
  Description of Artificial Sequence: Synthetic oligonucleotide
  Antisense Strand to SEQ ID NO: 500151
uugacucagacuugucuuu

SEQ ID NO: 500153 - RNA, 19 nt, Artificial Sequence
  Description of Artificial Sequence: Synthetic oligonucleotide
  Sense strand starting at position 255 of SEQ ID NO: 317636
aaggcauggucuugaauuc

SEQ ID NO: 500154 - RNA, 19 nt, Artificial Sequence
  Description of Artificial Sequence: Synthetic oligonucleotide
  Antisense Strand to SEQ ID NO: 500153
gaauucaagaccaugccuu

SEQ ID NO: 500155 - RNA, 19 nt, Artificial Sequence
  Description of Artificial Sequence: Synthetic oligonucleotide
  Sense strand starting at position 264 of SEQ ID NO: 317636
ucuugaauucccuaacguc

SEQ ID NO: 500156 - RNA, 19 nt, Artificial Sequence
  Description of Artificial Sequence: Synthetic oligonucleotide
  Antisense Strand to SEQ ID NO: 500155
gacguuagggaauucaaga

SEQ ID NO: 500157 - RNA, 19 nt, Artificial Sequence
  Description of Artificial Sequence: Synthetic oligonucleotide
  Sense strand starting at position 272 of SEQ ID NO: 317636
ucccuaacgucugaauucu

SEQ ID NO: 500158 - RNA, 19 nt, Artificial Sequence
  Description of Artificial Sequence: Synthetic oligonucleotide
  Antisense Strand to SEQ ID NO: 500157
agaauucagacguuaggga

SEQ ID NO: 500159 - RNA, 19 nt, Artificial Sequence
  Description of Artificial Sequence: Synthetic oligonucleotide
  Sense strand starting at position 284 of SEQ ID NO: 317636
gaauucuuguaggcacgua

SEQ ID NO: 500160 - RNA, 19 nt, Artificial Sequence
  Description of Artificial Sequence: Synthetic oligonucleotide
  Antisense Strand to SEQ ID NO: 500159
uacgugccuacaagaauuc

SEQ ID NO: 500161 - RNA, 19 nt, Artificial Sequence
  Description of Artificial Sequence: Synthetic oligonucleotide
  Sense strand starting at position 296 of SEQ ID NO: 317636
gcacguaagggaugaacuu

SEQ ID NO: 500162 - RNA, 19 nt, Artificial Sequence
  Description of Artificial Sequence: Synthetic oligonucleotide
  Antisense Strand to SEQ ID NO: 500161
aaguucaucccuuacgugc

SEQ ID NO: 500163 - RNA, 19 nt, Artificial Sequence
  Description of Artificial Sequence: Synthetic oligonucleotide
  Sense strand starting at position 374 of SEQ ID NO: 317636
aggagcuaucaagagccau

SEQ ID NO: 500164 - RNA, 19 nt, Artificial Sequence
  Description of Artificial Sequence: Synthetic oligonucleotide
  Antisense Strand to SEQ ID NO: 500163
auggcucuugauagcuccu

SEQ ID NO: 500165 - RNA, 19 nt, Artificial Sequence
  Description of Artificial Sequence: Synthetic oligonucleotide
  Sense strand starting at position 493 of SEQ ID NO: 317636
auaggagauuaagaucaga

SEQ ID NO: 500166 - RNA, 19 nt, Artificial Sequence
  Description of Artificial Sequence: Synthetic oligonucleotide
  Antisense Strand to SEQ ID NO: 500165
ucugaucuuaaucuccuau

SEQ ID NO: 500167 - RNA, 19 nt, Artificial Sequence
  Description of Artificial Sequence: Synthetic oligonucleotide
  Sense strand starting at position 654 of SEQ ID NO: 317636
aggguagaacccugucuua

SEQ ID NO: 500168 - RNA, 19 nt, Artificial Sequence
  Description of Artificial Sequence: Synthetic oligonucleotide
  Antisense Strand to SEQ ID NO: 500167
uaagacaggguucuacccu

SEQ ID NO: 500169 - RNA, 19 nt, Artificial Sequence
  Description of Artificial Sequence: Synthetic oligonucleotide
  Sense strand starting at position 757 of SEQ ID NO: 317636
aagggauguuucuuagaac

SEQ ID NO: 500170 - RNA, 19 nt, Artificial Sequence
  Description of Artificial Sequence: Synthetic oligonucleotide
  Antisense Strand to SEQ ID NO: 500169
guucuaagaaacaucccuu

SEQ ID NO: 500171 - RNA, 19 nt, Artificial Sequence
  Description of Artificial Sequence: Synthetic oligonucleotide
  Sense strand starting at position 758 of SEQ ID NO: 317636
agggauguuucuuagaacu

SEQ ID NO: 500172 - RNA, 19 nt, Artificial Sequence
  Description of Artificial Sequence: Synthetic oligonucleotide
  Antisense Strand to SEQ ID NO: 500171
aguucuaagaaacaucccu

SEQ ID NO: 500173 - RNA, 19 nt, Artificial Sequence
  Description of Artificial Sequence: Synthetic oligonucleotide
  Sense strand starting at position 760 of SEQ ID NO: 317636
ggauguuucuuagaacugc

SEQ ID NO: 500174 - RNA, 19 nt, Artificial Sequence
  Description of Artificial Sequence: Synthetic oligonucleotide
  Antisense Strand to SEQ ID NO: 500173
gcaguucuaagaaacaucc

SEQ ID NO: 500175 - RNA, 19 nt, Artificial Sequence
  Description of Artificial Sequence: Synthetic oligonucleotide
  Sense strand starting at position 2020 of SEQ ID NO: 317636
ucauucggcaguugucaau

SEQ ID NO: 500176 - RNA, 19 nt, Artificial Sequence
  Description of Artificial Sequence: Synthetic oligonucleotide
  Antisense Strand to SEQ ID NO: 500175
auugacaacugccgaauga

SEQ ID NO: 500177 - RNA, 19 nt, Artificial Sequence
  Description of Artificial Sequence: Synthetic oligonucleotide
  Sense strand starting at position 2041 of SEQ ID NO: 317636
agcgcucuaauuggauaga

SEQ ID NO: 500178 - RNA, 19 nt, Artificial Sequence
  Description of Artificial Sequence: Synthetic oligonucleotide
  Antisense Strand to SEQ ID NO: 500177
ucuauccaauuagagcgcu

SEQ ID NO: 500179 - RNA, 19 nt, Artificial Sequence
  Description of Artificial Sequence: Synthetic oligonucleotide
  Sense strand starting at position 2044 of SEQ ID NO: 317636
gcucuaauuggauagagcu

SEQ ID NO: 500180 - RNA, 19 nt, Artificial Sequence
  Description of Artificial Sequence: Synthetic oligonucleotide
  Antisense Strand to SEQ ID NO: 500179
agcucuauccaauuagagc

SEQ ID NO: 500181 - RNA, 19 nt, Artificial Sequence
  Description of Artificial Sequence: Synthetic oligonucleotide
  Sense strand starting at position 2050 of SEQ ID NO: 317636
auuggauagagcuguaagu

SEQ ID NO: 500182 - RNA, 19 nt, Artificial Sequence
  Description of Artificial Sequence: Synthetic oligonucleotide
  Antisense Strand to SEQ ID NO: 500181
acuuacagcucuauccaau

SEQ ID NO: 500183 - RNA, 19 nt, Artificial Sequence
  Description of Artificial Sequence: Synthetic oligonucleotide
  Sense strand starting at position 2052 of SEQ ID NO: 317636
uggauagagcuguaagucu

SEQ ID NO: 500184 - RNA, 19 nt, Artificial Sequence
  Description of Artificial Sequence: Synthetic oligonucleotide
  Antisense Strand to SEQ ID NO: 500183
agacuuacagcucuaucca

SEQ ID NO: 500185 - RNA, 19 nt, Artificial Sequence
  Description of Artificial Sequence: Synthetic oligonucleotide
  Sense strand starting at position 2080 of SEQ ID NO: 317636
ggccuugagugacagaagu

SEQ ID NO: 500186 - RNA, 19 nt, Artificial Sequence
  Description of Artificial Sequence: Synthetic oligonucleotide
  Antisense Strand to SEQ ID NO: 500185
acuucugucacucaaggcc

SEQ ID NO: 500187 - RNA, 19 nt, Artificial Sequence
  Description of Artificial Sequence: Synthetic oligonucleotide
  Sense strand starting at position 2151 of SEQ ID NO: 317636
gguacuuugaggcagguuu

SEQ ID NO: 500188 - RNA, 19 nt, Artificial Sequence
  Description of Artificial Sequence: Synthetic oligonucleotide
  Antisense Strand to SEQ ID NO: 500187
aaaccugccucaaaguacc

SEQ ID NO: 500189 - RNA, 19 nt, Artificial Sequence
  Description of Artificial Sequence: Synthetic oligonucleotide
  Sense strand starting at position 2392 of SEQ ID NO: 317636
caggguaucuguucgccua

SEQ ID NO: 500190 - RNA, 19 nt, Artificial Sequence
  Description of Artificial Sequence: Synthetic oligonucleotide
  Antisense Strand to SEQ ID NO: 500189
uaggcgaacagauacccug

SEQ ID NO: 500191 - RNA, 19 nt, Artificial Sequence
  Description of Artificial Sequence: Synthetic oligonucleotide
  Sense strand starting at position 2393 of SEQ ID NO: 317636
aggguaucuguucgccuau

SEQ ID NO: 500192 - RNA, 19 nt, Artificial Sequence
  Description of Artificial Sequence: Synthetic oligonucleotide
  Antisense Strand to SEQ ID NO: 500191
auaggcgaacagauacccu

SEQ ID NO: 500193 - RNA, 19 nt, Artificial Sequence
  Description of Artificial Sequence: Synthetic oligonucleotide
  Sense strand starting at position 2395 of SEQ ID NO: 317636
gguaucuguucgccuaugu

SEQ ID NO: 500194 - RNA, 19 nt, Artificial Sequence
  Description of Artificial Sequence: Synthetic oligonucleotide
  Antisense Strand to SEQ ID NO: 500193
acauaggcgaacagauacc

SEQ ID NO: 500195 - RNA, 19 nt, Artificial Sequence
  Description of Artificial Sequence: Synthetic oligonucleotide
  Sense strand starting at position 2466 of SEQ ID NO: 317636
ggguguuaucucugugcuu

SEQ ID NO: 500196 - RNA, 19 nt, Artificial Sequence
  Description of Artificial Sequence: Synthetic oligonucleotide
  Antisense Strand to SEQ ID NO: 500195
aagcacagagauaacaccc

SEQ ID NO: 500197 - RNA, 19 nt, Artificial Sequence
  Description of Artificial Sequence: Synthetic oligonucleotide
  Sense strand starting at position 2467 of SEQ ID NO: 317636
gguguuaucucugugcuug

SEQ ID NO: 500198 - RNA, 19 nt, Artificial Sequence
  Description of Artificial Sequence: Synthetic oligonucleotide
  Antisense Strand to SEQ ID NO: 500197
caagcacagagauaacacc

SEQ ID NO: 500199 - RNA, 19 nt, Artificial Sequence
  Description of Artificial Sequence: Synthetic oligonucleotide
  Sense strand starting at position 2513 of SEQ ID NO: 317636
uuaaccuugugguauguaa

SEQ ID NO: 500200 - RNA, 19 nt, Artificial Sequence
  Description of Artificial Sequence: Synthetic oligonucleotide
  Antisense Strand to SEQ ID NO: 500199
uuacauaccacaagguuaa

SEQ ID NO: 500201 - RNA, 19 nt, Artificial Sequence
  Description of Artificial Sequence: Synthetic oligonucleotide
  Sense strand starting at position 2517 of SEQ ID NO: 317636
ccuugugguauguaagguu

SEQ ID NO: 500202 - RNA, 19 nt, Artificial Sequence
  Description of Artificial Sequence: Synthetic oligonucleotide
  Antisense Strand to SEQ ID NO: 500201
aaccuuacauaccacaagg

SEQ ID NO: 500203 - RNA, 19 nt, Artificial Sequence
  Description of Artificial Sequence: Synthetic oligonucleotide
  Sense strand starting at position 2745 of SEQ ID NO: 317636
aauguuagcuauuagugaa

SEQ ID NO: 500204 - RNA, 19 nt, Artificial Sequence
  Description of Artificial Sequence: Synthetic oligonucleotide
  Antisense Strand to SEQ ID NO: 500203
uucacuaauagcuaacauu

SEQ ID NO: 500205 - RNA, 19 nt, Artificial Sequence
  Description of Artificial Sequence: Synthetic oligonucleotide
  Sense strand starting at position 2748 of SEQ ID NO: 317636
guuagcuauuagugaauuu

SEQ ID NO: 500206 - RNA, 19 nt, Artificial Sequence
  Description of Artificial Sequence: Synthetic oligonucleotide
  Antisense Strand to SEQ ID NO: 500205
aaauucacuaauagcuaac

SEQ ID NO: 500207 - RNA, 19 nt, Artificial Sequence
  Description of Artificial Sequence: Synthetic oligonucleotide
  Sense strand starting at position 2804 of SEQ ID NO: 317636
aagugagauuguuugugau

SEQ ID NO: 500208 - RNA, 19 nt, Artificial Sequence
  Description of Artificial Sequence: Synthetic oligonucleotide
  Antisense Strand to SEQ ID NO: 500207
aucacaaacaaucucacuu

SEQ ID NO: 500209 - RNA, 19 nt, Artificial Sequence
  Description of Artificial Sequence: Synthetic oligonucleotide
  Sense strand starting at position 2806 of SEQ ID NO: 317636
gugagauuguuugugauaa

SEQ ID NO: 500210 - RNA, 19 nt, Artificial Sequence
  Description of Artificial Sequence: Synthetic oligonucleotide
  Antisense Strand to SEQ ID NO: 500209
uuaucacaaacaaucucac

SEQ ID NO: 500211 - RNA, 19 nt, Artificial Sequence
  Description of Artificial Sequence: Synthetic oligonucleotide
  Sense strand starting at position 2807 of SEQ ID NO: 317636
ugagauuguuugugauaau

SEQ ID NO: 500212 - RNA, 19 nt, Artificial Sequence
  Description of Artificial Sequence: Synthetic oligonucleotide
  Antisense Strand to SEQ ID NO: 500211
auuaucacaaacaaucuca

SEQ ID NO: 500213 - RNA, 19 nt, Artificial Sequence
  Description of Artificial Sequence: Synthetic oligonucleotide
  Sense strand starting at position 2808 of SEQ ID NO: 317636
gagauuguuugugauaauu

SEQ ID NO: 500214 - RNA, 19 nt, Artificial Sequence
  Description of Artificial Sequence: Synthetic oligonucleotide
  Antisense Strand to SEQ ID NO: 500213
aauuaucacaaacaaucuc

SEQ ID NO: 500215 - RNA, 19 nt, Artificial Sequence
  Description of Artificial Sequence: Synthetic oligonucleotide
  Sense strand starting at position 2871 of SEQ ID NO: 317636
auauauaauugagagguga

SEQ ID NO: 500216 - RNA, 19 nt, Artificial Sequence
  Description of Artificial Sequence: Synthetic oligonucleotide
  Antisense Strand to SEQ ID NO: 500215
ucaccucucaauuauauau

SEQ ID NO: 500217 - RNA, 19 nt, Artificial Sequence
  Description of Artificial Sequence: Synthetic oligonucleotide
  Sense strand starting at position 2895 of SEQ ID NO: 317636
gcuggacuuccuggguaaa

SEQ ID NO: 500218 - RNA, 19 nt, Artificial Sequence
  Description of Artificial Sequence: Synthetic oligonucleotide
  Antisense Strand to SEQ ID NO: 500217
uuuacccaggaaguccagc

SEQ ID NO: 500219 - RNA, 19 nt, Artificial Sequence
  Description of Artificial Sequence: Synthetic oligonucleotide
  Sense strand starting at position 2896 of SEQ ID NO: 317636
cuggacuuccuggguaaac

SEQ ID NO: 500220 - RNA, 19 nt, Artificial Sequence
  Description of Artificial Sequence: Synthetic oligonucleotide
  Antisense Strand to SEQ ID NO: 500219
guuuacccaggaaguccag

SEQ ID NO: 500221 - RNA, 19 nt, Artificial Sequence
  Description of Artificial Sequence: Synthetic oligonucleotide
  Sense strand starting at position 2897 of SEQ ID NO: 317636
uggacuuccuggguaaacu

SEQ ID NO: 500222 - RNA, 19 nt, Artificial Sequence
  Description of Artificial Sequence: Synthetic oligonucleotide
  Antisense Strand to SEQ ID NO: 500221
aguuuacccaggaagucca

SEQ ID NO: 500223 - RNA, 19 nt, Artificial Sequence
  Description of Artificial Sequence: Synthetic oligonucleotide
  Sense strand starting at position 3105 of SEQ ID NO: 317636
ggcacugugauaggacaaa

SEQ ID NO: 500224 - RNA, 19 nt, Artificial Sequence
  Description of Artificial Sequence: Synthetic oligonucleotide
  Antisense Strand to SEQ ID NO: 500223
uuuguccuaucacagugcc

SEQ ID NO: 500225 - RNA, 19 nt, Artificial Sequence
  Description of Artificial Sequence: Synthetic oligonucleotide
  Sense strand starting at position 3831 of SEQ ID NO: 317636
ccacauugagugcagacau

SEQ ID NO: 500226 - RNA, 19 nt, Artificial Sequence
  Description of Artificial Sequence: Synthetic oligonucleotide
  Antisense Strand to SEQ ID NO: 500225
augucugcacucaaugugg

SEQ ID NO: 500227 - RNA, 19 nt, Artificial Sequence
  Description of Artificial Sequence: Synthetic oligonucleotide
  Sense strand starting at position 164 of SEQ ID NO: 317637
cuuuauagagcauguacua

SEQ ID NO: 500228 - RNA, 19 nt, Artificial Sequence
  Description of Artificial Sequence: Synthetic oligonucleotide
  Antisense Strand to SEQ ID NO: 500227
uaguacaugcucuauaaag

SEQ ID NO: 500229 - RNA, 19 nt, Artificial Sequence
  Description of Artificial Sequence: Synthetic oligonucleotide
  Sense strand starting at position 190 of SEQ ID NO: 317637
agaaguaugccauagagca

SEQ ID NO: 500230 - RNA, 19 nt, Artificial Sequence
  Description of Artificial Sequence: Synthetic oligonucleotide
  Antisense Strand to SEQ ID NO: 500229
ugcucuauggcauacuucu

SEQ ID NO: 500231 - RNA, 19 nt, Artificial Sequence
  Description of Artificial Sequence: Synthetic oligonucleotide
  Sense strand starting at position 234 of SEQ ID NO: 317637
guguuaauacuauaacauc

SEQ ID NO: 500232 - RNA, 19 nt, Artificial Sequence
  Description of Artificial Sequence: Synthetic oligonucleotide
  Antisense Strand to SEQ ID NO: 500231
gauguuauaguauuaacac

SEQ ID NO: 500233 - RNA, 19 nt, Artificial Sequence
  Description of Artificial Sequence: Synthetic oligonucleotide
  Sense strand starting at position 351 of SEQ ID NO: 317637
guagaauaauagcucaaua

SEQ ID NO: 500234 - RNA, 19 nt, Artificial Sequence
  Description of Artificial Sequence: Synthetic oligonucleotide
  Antisense Strand to SEQ ID NO: 500233
uauugagcuauuauucuac

SEQ ID NO: 500235 - RNA, 19 nt, Artificial Sequence
  Description of Artificial Sequence: Synthetic oligonucleotide
  Sense strand starting at position 501 of SEQ ID NO: 317637
uggauaggaugucucuaga

SEQ ID NO: 500236 - RNA, 19 nt, Artificial Sequence
  Description of Artificial Sequence: Synthetic oligonucleotide
  Antisense Strand to SEQ ID NO: 500235
ucuagagacauccuaucca

SEQ ID NO: 500237 - RNA, 19 nt, Artificial Sequence
  Description of Artificial Sequence: Synthetic oligonucleotide
  Sense strand starting at position 724 of SEQ ID NO: 317637
gguggaucugggcagaacu

SEQ ID NO: 500238 - RNA, 19 nt, Artificial Sequence
  Description of Artificial Sequence: Synthetic oligonucleotide
  Antisense Strand to SEQ ID NO: 500237
aguucugcccagauccacc

SEQ ID NO: 500239 - RNA, 19 nt, Artificial Sequence
  Description of Artificial Sequence: Synthetic oligonucleotide
  Sense strand starting at position 1028 of SEQ ID NO: 317637
ugaucagaugguggcauua

SEQ ID NO: 500240 - RNA, 19 nt, Artificial Sequence
  Description of Artificial Sequence: Synthetic oligonucleotide
  Antisense Strand to SEQ ID NO: 500239
uaaugccaccaucugauca

SEQ ID NO: 500241 - RNA, 19 nt, Artificial Sequence
  Description of Artificial Sequence: Synthetic oligonucleotide
  Sense strand starting at position 1188 of SEQ ID NO: 317637
ccaugacugcuuuaugucu

SEQ ID NO: 500242 - RNA, 19 nt, Artificial Sequence
  Description of Artificial Sequence: Synthetic oligonucleotide
  Antisense Strand to SEQ ID NO: 500241
agacauaaagcagucaugg

SEQ ID NO: 500243 - RNA, 19 nt, Artificial Sequence
  Description of Artificial Sequence: Synthetic oligonucleotide
  Sense strand starting at position 1250 of SEQ ID NO: 317637
caguuugagucuccagauu

SEQ ID NO: 500244 - RNA, 19 nt, Artificial Sequence
  Description of Artificial Sequence: Synthetic oligonucleotide
  Antisense Strand to SEQ ID NO: 500243
aaucuggagacucaaacug

SEQ ID NO: 500245 - RNA, 19 nt, Artificial Sequence
  Description of Artificial Sequence: Synthetic oligonucleotide
  Sense strand starting at position 1301 of SEQ ID NO: 317637
agcaauucuuaucugggua

SEQ ID NO: 500246 - RNA, 19 nt, Artificial Sequence
  Description of Artificial Sequence: Synthetic oligonucleotide
  Antisense Strand to SEQ ID NO: 500245
uacccagauaagaauugcu

SEQ ID NO: 500247 - RNA, 19 nt, Artificial Sequence
  Description of Artificial Sequence: Synthetic oligonucleotide
  Sense strand starting at position 1305 of SEQ ID NO: 317637
auucuuaucuggguacaaa

SEQ ID NO: 500248 - RNA, 19 nt, Artificial Sequence
  Description of Artificial Sequence: Synthetic oligonucleotide
  Antisense Strand to SEQ ID NO: 500247
uuuguacccagauaagaau

SEQ ID NO: 500249 - RNA, 19 nt, Artificial Sequence
  Description of Artificial Sequence: Synthetic oligonucleotide
  Sense strand starting at position 1306 of SEQ ID NO: 317637
uucuuaucuggguacaaac

SEQ ID NO: 500250 - RNA, 19 nt, Artificial Sequence
  Description of Artificial Sequence: Synthetic oligonucleotide
  Antisense Strand to SEQ ID NO: 500249
guuuguacccagauaagaa

SEQ ID NO: 500251 - RNA, 19 nt, Artificial Sequence
  Description of Artificial Sequence: Synthetic oligonucleotide
  Sense strand starting at position 1351 of SEQ ID NO: 317637
gaacaaacccugcaugagu

SEQ ID NO: 500252 - RNA, 19 nt, Artificial Sequence
  Description of Artificial Sequence: Synthetic oligonucleotide
  Antisense Strand to SEQ ID NO: 500251
acucaugcaggguuuguuc

SEQ ID NO: 500253 - RNA, 19 nt, Artificial Sequence
  Description of Artificial Sequence: Synthetic oligonucleotide
  Sense strand starting at position 1396 of SEQ ID NO: 317637
agaauuagaccuugucaga

SEQ ID NO: 500254 - RNA, 19 nt, Artificial Sequence
  Description of Artificial Sequence: Synthetic oligonucleotide
  Antisense Strand to SEQ ID NO: 500253
ucugacaaggucuaauucu

SEQ ID NO: 500255 - RNA, 19 nt, Artificial Sequence
  Description of Artificial Sequence: Synthetic oligonucleotide
  Sense strand starting at position 1456 of SEQ ID NO: 317637
cucaaagaugcugaguaau

SEQ ID NO: 500256 - RNA, 19 nt, Artificial Sequence
  Description of Artificial Sequence: Synthetic oligonucleotide
  Antisense Strand to SEQ ID NO: 500255
auuacucagcaucuuugag

SEQ ID NO: 500257 - RNA, 19 nt, Artificial Sequence
  Description of Artificial Sequence: Synthetic oligonucleotide
  Sense strand starting at position 1458 of SEQ ID NO: 317637
caaagaugcugaguaauga

SEQ ID NO: 500258 - RNA, 19 nt, Artificial Sequence
  Description of Artificial Sequence: Synthetic oligonucleotide
  Antisense Strand to SEQ ID NO: 500257
ucauuacucagcaucuuug

SEQ ID NO: 500259 - RNA, 19 nt, Artificial Sequence
  Description of Artificial Sequence: Synthetic oligonucleotide
  Sense strand starting at position 1468 of SEQ ID NO: 317637
gaguaaugaugcccucaua

SEQ ID NO: 500260 - RNA, 19 nt, Artificial Sequence
  Description of Artificial Sequence: Synthetic oligonucleotide
  Antisense Strand to SEQ ID NO: 500259
uaugagggcaucauuacuc

SEQ ID NO: 500261 - RNA, 19 nt, Artificial Sequence
  Description of Artificial Sequence: Synthetic oligonucleotide
  Sense strand starting at position 1471 of SEQ ID NO: 317637
uaaugaugcccucauagug

SEQ ID NO: 500262 - RNA, 19 nt, Artificial Sequence
  Description of Artificial Sequence: Synthetic oligonucleotide
  Antisense Strand to SEQ ID NO: 500261
cacuaugagggcaucauua

SEQ ID NO: 500263 - RNA, 19 nt, Artificial Sequence
  Description of Artificial Sequence: Synthetic oligonucleotide
  Sense strand starting at position 1483 of SEQ ID NO: 317637
cauagugauccacggagga

SEQ ID NO: 500264 - RNA, 19 nt, Artificial Sequence
  Description of Artificial Sequence: Synthetic oligonucleotide
  Antisense Strand to SEQ ID NO: 500263
uccuccguggaucacuaug

SEQ ID NO: 500265 - RNA, 19 nt, Artificial Sequence
  Description of Artificial Sequence: Synthetic oligonucleotide
  Sense strand starting at position 1669 of SEQ ID NO: 317637
uacacuugugauuaugguu

SEQ ID NO: 500266 - RNA, 19 nt, Artificial Sequence
  Description of Artificial Sequence: Synthetic oligonucleotide
  Antisense Strand to SEQ ID NO: 500265
aaccauaaucacaagugua

SEQ ID NO: 500267 - RNA, 19 nt, Artificial Sequence
  Description of Artificial Sequence: Synthetic oligonucleotide
  Sense strand starting at position 1681 of SEQ ID NO: 317637
uaugguugucauuaaggcu

SEQ ID NO: 500268 - RNA, 19 nt, Artificial Sequence
  Description of Artificial Sequence: Synthetic oligonucleotide
  Antisense Strand to SEQ ID NO: 500267
agccuuaaugacaaccaua

SEQ ID NO: 500269 - RNA, 19 nt, Artificial Sequence
  Description of Artificial Sequence: Synthetic oligonucleotide
  Sense strand starting at position 1689 of SEQ ID NO: 317637
ucauuaaggcucuggauau

SEQ ID NO: 500270 - RNA, 19 nt, Artificial Sequence
  Description of Artificial Sequence: Synthetic oligonucleotide
  Antisense Strand to SEQ ID NO: 500269
auauccagagccuuaauga

SEQ ID NO: 500271 - RNA, 19 nt, Artificial Sequence
  Description of Artificial Sequence: Synthetic oligonucleotide
  Sense strand starting at position 1763 of SEQ ID NO: 317637
acaggauucuguucccauc

SEQ ID NO: 500272 - RNA, 19 nt, Artificial Sequence
  Description of Artificial Sequence: Synthetic oligonucleotide
  Antisense Strand to SEQ ID NO: 500271
gaugggaacagaauccugu

SEQ ID NO: 500273 - RNA, 19 nt, Artificial Sequence
  Description of Artificial Sequence: Synthetic oligonucleotide
  Sense strand starting at position 1857 of SEQ ID NO: 317637
ggcuuaagaugucuacauu

SEQ ID NO: 500274 - RNA, 19 nt, Artificial Sequence
  Description of Artificial Sequence: Synthetic oligonucleotide
  Antisense Strand to SEQ ID NO: 500273
aauguagacaucuuaagcc

SEQ ID NO: 500275 - RNA, 19 nt, Artificial Sequence
  Description of Artificial Sequence: Synthetic oligonucleotide
  Sense strand starting at position 1858 of SEQ ID NO: 317637
gcuuaagaugucuacauug

SEQ ID NO: 500276 - RNA, 19 nt, Artificial Sequence
  Description of Artificial Sequence: Synthetic oligonucleotide
  Antisense Strand to SEQ ID NO: 500275
caauguagacaucuuaagc

SEQ ID NO: 500277 - RNA, 19 nt, Artificial Sequence
  Description of Artificial Sequence: Synthetic oligonucleotide
  Sense strand starting at position 1994 of SEQ ID NO: 317637
ggaucaaugugccucuaca

SEQ ID NO: 500278 - RNA, 19 nt, Artificial Sequence
  Description of Artificial Sequence: Synthetic oligonucleotide
  Antisense Strand to SEQ ID NO: 500277
uguagaggcacauugaucc

SEQ ID NO: 500279 - RNA, 19 nt, Artificial Sequence
  Description of Artificial Sequence: Synthetic oligonucleotide
  Sense strand starting at position 2106 of SEQ ID NO: 317637
aggaaauacugggauaaac

SEQ ID NO: 500280 - RNA, 19 nt, Artificial Sequence
  Description of Artificial Sequence: Synthetic oligonucleotide
  Antisense Strand to SEQ ID NO: 500279
guuuaucccaguauuuccu

SEQ ID NO: 500281 - RNA, 19 nt, Artificial Sequence
  Description of Artificial Sequence: Synthetic oligonucleotide
  Sense strand starting at position 2179 of SEQ ID NO: 317637
guauaaagcuaccugaaua

SEQ ID NO: 500282 - RNA, 19 nt, Artificial Sequence
  Description of Artificial Sequence: Synthetic oligonucleotide
  Antisense Strand to SEQ ID NO: 500281
uauucagguagcuuuauac

SEQ ID NO: 500283 - RNA, 19 nt, Artificial Sequence
  Description of Artificial Sequence: Synthetic oligonucleotide
  Sense strand starting at position 2297 of SEQ ID NO: 317637
gguuauauacauuguuaag

SEQ ID NO: 500284 - RNA, 19 nt, Artificial Sequence
  Description of Artificial Sequence: Synthetic oligonucleotide
  Antisense Strand to SEQ ID NO: 500283
cuuaacaauguauauaacc

SEQ ID NO: 500285 - RNA, 19 nt, Artificial Sequence
  Description of Artificial Sequence: Synthetic oligonucleotide
  Sense strand starting at position 2731 of SEQ ID NO: 317637
ggugaaauaacugauugcu

SEQ ID NO: 500286 - RNA, 19 nt, Artificial Sequence
  Description of Artificial Sequence: Synthetic oligonucleotide
  Antisense Strand to SEQ ID NO: 500285
agcaaucaguuauuucacc

SEQ ID NO: 500287 - RNA, 19 nt, Artificial Sequence
  Description of Artificial Sequence: Synthetic oligonucleotide
  Sense strand starting at position 2733 of SEQ ID NO: 317637
ugaaauaacugauugcugu

SEQ ID NO: 500288 - RNA, 19 nt, Artificial Sequence
  Description of Artificial Sequence: Synthetic oligonucleotide
  Antisense Strand to SEQ ID NO: 500287
acagcaaucaguuauuuca

SEQ ID NO: 500289 - RNA, 19 nt, Artificial Sequence
  Description of Artificial Sequence: Synthetic oligonucleotide
  Sense strand starting at position 2743 of SEQ ID NO: 317637
gauugcuguccugaaguga

SEQ ID NO: 500290 - RNA, 19 nt, Artificial Sequence
  Description of Artificial Sequence: Synthetic oligonucleotide
  Antisense Strand to SEQ ID NO: 500289
ucacuucaggacagcaauc

SEQ ID NO: 500291 - RNA, 19 nt, Artificial Sequence
  Description of Artificial Sequence: Synthetic oligonucleotide
  Sense strand starting at position 2778 of SEQ ID NO: 317637
gucuaacugcucuagaagg

SEQ ID NO: 500292 - RNA, 19 nt, Artificial Sequence
  Description of Artificial Sequence: Synthetic oligonucleotide
  Antisense Strand to SEQ ID NO: 500291
ccuucuagagcaguuagac

SEQ ID NO: 500293 - RNA, 19 nt, Artificial Sequence
  Description of Artificial Sequence: Synthetic oligonucleotide
  Sense strand starting at position 3428 of SEQ ID NO: 317637
agucaccauuaguucuuaa

SEQ ID NO: 500294 - RNA, 19 nt, Artificial Sequence
  Description of Artificial Sequence: Synthetic oligonucleotide
  Antisense Strand to SEQ ID NO: 500293
uuaagaacuaauggugacu

SEQ ID NO: 500295 - RNA, 19 nt, Artificial Sequence
  Description of Artificial Sequence: Synthetic oligonucleotide
  Sense strand starting at position 3435 of SEQ ID NO: 317637
auuaguucuuaaguagaag

SEQ ID NO: 500296 - RNA, 19 nt, Artificial Sequence
  Description of Artificial Sequence: Synthetic oligonucleotide
  Antisense Strand to SEQ ID NO: 500295
cuucuacuuaagaacuaau

SEQ ID NO: 500297 - RNA, 19 nt, Artificial Sequence
  Description of Artificial Sequence: Synthetic oligonucleotide
  Sense strand starting at position 3490 of SEQ ID NO: 317637
cuaguaauuugggagguaa

SEQ ID NO: 500298 - RNA, 19 nt, Artificial Sequence
  Description of Artificial Sequence: Synthetic oligonucleotide
  Antisense Strand to SEQ ID NO: 500297
uuaccucccaaauuacuag

SEQ ID NO: 500299 - RNA, 19 nt, Artificial Sequence
  Description of Artificial Sequence: Synthetic oligonucleotide
  Sense strand starting at position 3637 of SEQ ID NO: 317637
ugggauauauucuugcuau

SEQ ID NO: 500300 - RNA, 19 nt, Artificial Sequence
  Description of Artificial Sequence: Synthetic oligonucleotide
  Antisense Strand to SEQ ID NO: 500299
auagcaagaauauauccca

SEQ ID NO: 500301 - RNA, 19 nt, Artificial Sequence
  Description of Artificial Sequence: Synthetic oligonucleotide
  Sense strand starting at position 3690 of SEQ ID NO: 317637
uaaagacaagucugaguca

SEQ ID NO: 500302 - RNA, 19 nt, Artificial Sequence
  Description of Artificial Sequence: Synthetic oligonucleotide
  Antisense Strand to SEQ ID NO: 500301
ugacucagacuugucuuua

SEQ ID NO: 500303 - RNA, 19 nt, Artificial Sequence
  Description of Artificial Sequence: Synthetic oligonucleotide
  Sense strand starting at position 3909 of SEQ ID NO: 317637
ucuugaauucccuaacguc

SEQ ID NO: 500304 - RNA, 19 nt, Artificial Sequence
  Description of Artificial Sequence: Synthetic oligonucleotide
  Antisense Strand to SEQ ID NO: 500303
gacguuagggaauucaaga

SEQ ID NO: 500305 - RNA, 19 nt, Artificial Sequence
  Description of Artificial Sequence: Synthetic oligonucleotide
  Sense strand starting at position 3941 of SEQ ID NO: 317637
gcacguaagggaugaacuu

SEQ ID NO: 500306 - RNA, 19 nt, Artificial Sequence
  Description of Artificial Sequence: Synthetic oligonucleotide
  Antisense Strand to SEQ ID NO: 500305
aaguucaucccuuacgugc

SEQ ID NO: 500307 - RNA, 19 nt, Artificial Sequence
  Description of Artificial Sequence: Synthetic oligonucleotide
  Sense strand starting at position 10 of SEQ ID NO: 317638
gcuugccuuccuugaugaa

SEQ ID NO: 500308 - RNA, 19 nt, Artificial Sequence
  Description of Artificial Sequence: Synthetic oligonucleotide
  Antisense Strand to SEQ ID NO: 500307
uucaucaaggaaggcaagc

SEQ ID NO: 500309 - RNA, 19 nt, Artificial Sequence
  Description of Artificial Sequence: Synthetic oligonucleotide
  Sense strand starting at position 121 of SEQ ID NO: 317638
ggaacaaggucccagauuu

SEQ ID NO: 500310 - RNA, 19 nt, Artificial Sequence
  Description of Artificial Sequence: Synthetic oligonucleotide
  Antisense Strand to SEQ ID NO: 500309
aaaucugggaccuuguucc

SEQ ID NO: 500311 - RNA, 19 nt, Artificial Sequence
  Description of Artificial Sequence: Synthetic oligonucleotide
  Sense strand starting at position 151 of SEQ ID NO: 317638
cuaccaguuugggcaauaa

SEQ ID NO: 500312 - RNA, 19 nt, Artificial Sequence
  Description of Artificial Sequence: Synthetic oligonucleotide
  Antisense Strand to SEQ ID NO: 500311
uuauugcccaaacugguag

SEQ ID NO: 500313 - RNA, 19 nt, Artificial Sequence
  Description of Artificial Sequence: Synthetic oligonucleotide
  Sense strand starting at position 178 of SEQ ID NO: 317638
gccaauaccgaggaucaau

SEQ ID NO: 500314 - RNA, 19 nt, Artificial Sequence
  Description of Artificial Sequence: Synthetic oligonucleotide
  Antisense Strand to SEQ ID NO: 500313
auugauccucgguauuggc

SEQ ID NO: 500315 - RNA, 19 nt, Artificial Sequence
  Description of Artificial Sequence: Synthetic oligonucleotide
  Sense strand starting at position 216 of SEQ ID NO: 317638
ggguuaccuucacugagga

SEQ ID NO: 500316 - RNA, 19 nt, Artificial Sequence
  Description of Artificial Sequence: Synthetic oligonucleotide
  Antisense Strand to SEQ ID NO: 500315
uccucagugaagguaaccc

SEQ ID NO: 500317 - RNA, 19 nt, Artificial Sequence
  Description of Artificial Sequence: Synthetic oligonucleotide
  Sense strand starting at position 230 of SEQ ID NO: 317638
gaggaucucucagugcuua

SEQ ID NO: 500318 - RNA, 19 nt, Artificial Sequence
  Description of Artificial Sequence: Synthetic oligonucleotide
  Antisense Strand to SEQ ID NO: 500317
uaagcacugagagauccuc

SEQ ID NO: 500319 - RNA, 19 nt, Artificial Sequence
  Description of Artificial Sequence: Synthetic oligonucleotide
  Sense strand starting at position 231 of SEQ ID NO: 317638
aggaucucucagugcuuau

SEQ ID NO: 500320 - RNA, 19 nt, Artificial Sequence
  Description of Artificial Sequence: Synthetic oligonucleotide
  Antisense Strand to SEQ ID NO: 500319
auaagcacugagagauccu

SEQ ID NO: 500321 - RNA, 19 nt, Artificial Sequence
  Description of Artificial Sequence: Synthetic oligonucleotide
  Sense strand starting at position 241 of SEQ ID NO: 317638
agugcuuaucaaugucaau

SEQ ID NO: 500322 - RNA, 19 nt, Artificial Sequence
  Description of Artificial Sequence: Synthetic oligonucleotide
  Antisense Strand to SEQ ID NO: 500321
auugacauugauaagcacu

SEQ ID NO: 500323 - RNA, 19 nt, Artificial Sequence
  Description of Artificial Sequence: Synthetic oligonucleotide
  Sense strand starting at position 292 of SEQ ID NO: 317638
aggcuuauuucccaaaguu

SEQ ID NO: 500324 - RNA, 19 nt, Artificial Sequence
  Description of Artificial Sequence: Synthetic oligonucleotide
  Antisense Strand to SEQ ID NO: 500323
aacuuugggaaauaagccu

SEQ ID NO: 500325 - RNA, 19 nt, Artificial Sequence
  Description of Artificial Sequence: Synthetic oligonucleotide
  Sense strand starting at position 1074 of SEQ ID NO: 317638
gacauugguucuguccaga

SEQ ID NO: 500326 - RNA, 19 nt, Artificial Sequence
  Description of Artificial Sequence: Synthetic oligonucleotide
  Antisense Strand to SEQ ID NO: 500325
ucuggacagaaccaauguc

SEQ ID NO: 500327 - RNA, 19 nt, Artificial Sequence
  Description of Artificial Sequence: Synthetic oligonucleotide
  Sense strand starting at position 1146 of SEQ ID NO: 317638
cagacaaaugguugcaguu

SEQ ID NO: 500328 - RNA, 19 nt, Artificial Sequence
  Description of Artificial Sequence: Synthetic oligonucleotide
  Antisense Strand to SEQ ID NO: 500327
aacugcaaccauuugucug

SEQ ID NO: 500329 - RNA, 19 nt, Artificial Sequence
  Description of Artificial Sequence: Synthetic oligonucleotide
  Sense strand starting at position 1162 of SEQ ID NO: 317638
guuucuggguuucugauaa

SEQ ID NO: 500330 - RNA, 19 nt, Artificial Sequence
  Description of Artificial Sequence: Synthetic oligonucleotide
  Antisense Strand to SEQ ID NO: 500329
uuaucagaaacccagaaac

SEQ ID NO: 500331 - RNA, 19 nt, Artificial Sequence
  Description of Artificial Sequence: Synthetic oligonucleotide
  Sense strand starting at position 1189 of SEQ ID NO: 317638
aaaggaggcuaucaauaug

SEQ ID NO: 500332 - RNA, 19 nt, Artificial Sequence
  Description of Artificial Sequence: Synthetic oligonucleotide
  Antisense Strand to SEQ ID NO: 500331
cauauugauagccuccuuu

SEQ ID NO: 500333 - RNA, 19 nt, Artificial Sequence
  Description of Artificial Sequence: Synthetic oligonucleotide
  Sense strand starting at position 1192 of SEQ ID NO: 317638
ggaggcuaucaauaugcau

SEQ ID NO: 500334 - RNA, 19 nt, Artificial Sequence
  Description of Artificial Sequence: Synthetic oligonucleotide
  Antisense Strand to SEQ ID NO: 500333
augcauauugauagccucc

SEQ ID NO: 500335 - RNA, 19 nt, Artificial Sequence
  Description of Artificial Sequence: Synthetic oligonucleotide
  Sense strand starting at position 1416 of SEQ ID NO: 317638
ggauaaaccugaggauauc

SEQ ID NO: 500336 - RNA, 19 nt, Artificial Sequence
  Description of Artificial Sequence: Synthetic oligonucleotide
  Antisense Strand to SEQ ID NO: 500335
gauauccucagguuuaucc

SEQ ID NO: 500337 - RNA, 19 nt, Artificial Sequence
  Description of Artificial Sequence: Synthetic oligonucleotide
  Sense strand starting at position 1422 of SEQ ID NO: 317638
accugaggauaucauguaa

SEQ ID NO: 500338 - RNA, 19 nt, Artificial Sequence
  Description of Artificial Sequence: Synthetic oligonucleotide
  Antisense Strand to SEQ ID NO: 500337
uuacaugauauccucaggu

SEQ ID NO: 500339 - RNA, 19 nt, Artificial Sequence
  Description of Artificial Sequence: Synthetic oligonucleotide
  Sense strand starting at position 1501 of SEQ ID NO: 317638
cgaaguuaaucauuaagau

SEQ ID NO: 500340 - RNA, 19 nt, Artificial Sequence
  Description of Artificial Sequence: Synthetic oligonucleotide
  Antisense Strand to SEQ ID NO: 500339
aucuuaaugauuaacuucg

SEQ ID NO: 500341 - RNA, 19 nt, Artificial Sequence
  Description of Artificial Sequence: Synthetic oligonucleotide
  Sense strand starting at position 1522 of SEQ ID NO: 317638
uuaccaguugucugaggua

SEQ ID NO: 500342 - RNA, 19 nt, Artificial Sequence
  Description of Artificial Sequence: Synthetic oligonucleotide
  Antisense Strand to SEQ ID NO: 500341
uaccucagacaacugguaa

SEQ ID NO: 500343 - RNA, 19 nt, Artificial Sequence
  Description of Artificial Sequence: Synthetic oligonucleotide
  Sense strand starting at position 1957 of SEQ ID NO: 317638
uucguauguccgaggugac

SEQ ID NO: 500344 - RNA, 19 nt, Artificial Sequence
  Description of Artificial Sequence: Synthetic oligonucleotide
  Antisense Strand to SEQ ID NO: 500343
gucaccucggacauacgaa

SEQ ID NO: 500345 - RNA, 19 nt, Artificial Sequence
  Description of Artificial Sequence: Synthetic oligonucleotide
  Sense strand starting at position 2866 of SEQ ID NO: 317638
auguaaacgcaguauguaa

SEQ ID NO: 500346 - RNA, 19 nt, Artificial Sequence
  Description of Artificial Sequence: Synthetic oligonucleotide
  Antisense Strand to SEQ ID NO: 500345
uuacauacugcguuuacau

SEQ ID NO: 500347 - RNA, 19 nt, Artificial Sequence
  Description of Artificial Sequence: Synthetic oligonucleotide
  Sense strand starting at position 2922 of SEQ ID NO: 317638
ggucaagcucccuaaaugu

SEQ ID NO: 500348 - RNA, 19 nt, Artificial Sequence
  Description of Artificial Sequence: Synthetic oligonucleotide
  Antisense Strand to SEQ ID NO: 500347
acauuuagggagcuugacc

SEQ ID NO: 500349 - RNA, 19 nt, Artificial Sequence
  Description of Artificial Sequence: Synthetic oligonucleotide
  Sense strand starting at position 3017 of SEQ ID NO: 317638
uacugugggucccuaagau

SEQ ID NO: 500350 - RNA, 19 nt, Artificial Sequence
  Description of Artificial Sequence: Synthetic oligonucleotide
  Antisense Strand to SEQ ID NO: 500349
aucuuagggacccacagua

SEQ ID NO: 500351 - RNA, 19 nt, Artificial Sequence
  Description of Artificial Sequence: Synthetic oligonucleotide
  Sense strand starting at position 3105 of SEQ ID NO: 317638
ggguuauguagauaucgca

SEQ ID NO: 500352 - RNA, 19 nt, Artificial Sequence
  Description of Artificial Sequence: Synthetic oligonucleotide
  Antisense Strand to SEQ ID NO: 500351
ugcgauaucuacauaaccc

SEQ ID NO: 500353 - RNA, 19 nt, Artificial Sequence
  Description of Artificial Sequence: Synthetic oligonucleotide
  Sense strand starting at position 3112 of SEQ ID NO: 317638
guagauaucgcaggguaug

SEQ ID NO: 500354 - RNA, 19 nt, Artificial Sequence
  Description of Artificial Sequence: Synthetic oligonucleotide
  Antisense Strand to SEQ ID NO: 500353
cauacccugcgauaucuac

SEQ ID NO: 500355 - RNA, 19 nt, Artificial Sequence
  Description of Artificial Sequence: Synthetic oligonucleotide
  Sense strand starting at position 3113 of SEQ ID NO: 317638
uagauaucgcaggguaugu

SEQ ID NO: 500356 - RNA, 19 nt, Artificial Sequence
  Description of Artificial Sequence: Synthetic oligonucleotide
  Antisense Strand to SEQ ID NO: 500355
acauacccugcgauaucua

SEQ ID NO: 500357 - RNA, 19 nt, Artificial Sequence
  Description of Artificial Sequence: Synthetic oligonucleotide
  Sense strand starting at position 3123 of SEQ ID NO: 317638
aggguaugugcuggagaag

SEQ ID NO: 500358 - RNA, 19 nt, Artificial Sequence
  Description of Artificial Sequence: Synthetic oligonucleotide
  Antisense Strand to SEQ ID NO: 500357
cuucuccagcacauacccu

SEQ ID NO: 500359 - RNA, 19 nt, Artificial Sequence
  Description of Artificial Sequence: Synthetic oligonucleotide
  Sense strand starting at position 3124 of SEQ ID NO: 317638
ggguaugugcuggagaagu

SEQ ID NO: 500360 - RNA, 19 nt, Artificial Sequence
  Description of Artificial Sequence: Synthetic oligonucleotide
  Antisense Strand to SEQ ID NO: 500359
acuucuccagcacauaccc

SEQ ID NO: 500361 - RNA, 19 nt, Artificial Sequence
  Description of Artificial Sequence: Synthetic oligonucleotide
  Sense strand starting at position 3168 of SEQ ID NO: 317638
cuugaugcuaaggaaaguu

SEQ ID NO: 500362 - RNA, 19 nt, Artificial Sequence
  Description of Artificial Sequence: Synthetic oligonucleotide
  Antisense Strand to SEQ ID NO: 500361
aacuuuccuuagcaucaag

SEQ ID NO: 500363 - RNA, 19 nt, Artificial Sequence
  Description of Artificial Sequence: Synthetic oligonucleotide
  Sense strand starting at position 3420 of SEQ ID NO: 317638
cucgaaucaagguaaguuu

SEQ ID NO: 500364 - RNA, 19 nt, Artificial Sequence
  Description of Artificial Sequence: Synthetic oligonucleotide
  Antisense Strand to SEQ ID NO: 500363
aaacuuaccuugauucgag

SEQ ID NO: 500365 - RNA, 19 nt, Artificial Sequence
  Description of Artificial Sequence: Synthetic oligonucleotide
  Sense strand starting at position 3427 of SEQ ID NO: 317638
caagguaaguuugccuuaa

SEQ ID NO: 500366 - RNA, 19 nt, Artificial Sequence
  Description of Artificial Sequence: Synthetic oligonucleotide
  Antisense Strand to SEQ ID NO: 500365
uuaaggcaaacuuaccuug

SEQ ID NO: 500367 - RNA, 19 nt, Artificial Sequence
  Description of Artificial Sequence: Synthetic oligonucleotide
  Sense strand starting at position 3428 of SEQ ID NO: 317638
aagguaaguuugccuuaau

SEQ ID NO: 500368 - RNA, 19 nt, Artificial Sequence
  Description of Artificial Sequence: Synthetic oligonucleotide
  Antisense Strand to SEQ ID NO: 500367
auuaaggcaaacuuaccuu

SEQ ID NO: 500369 - RNA, 19 nt, Artificial Sequence
  Description of Artificial Sequence: Synthetic oligonucleotide
  Sense strand starting at position 3429 of SEQ ID NO: 317638
agguaaguuugccuuaaug

SEQ ID NO: 500370 - RNA, 19 nt, Artificial Sequence
  Description of Artificial Sequence: Synthetic oligonucleotide
  Antisense Strand to SEQ ID NO: 500369
cauuaaggcaaacuuaccu

SEQ ID NO: 500371 - RNA, 19 nt, Artificial Sequence
  Description of Artificial Sequence: Synthetic oligonucleotide
  Sense strand starting at position 3431 of SEQ ID NO: 317638
guaaguuugccuuaauguu

SEQ ID NO: 500372 - RNA, 19 nt, Artificial Sequence
  Description of Artificial Sequence: Synthetic oligonucleotide
  Antisense Strand to SEQ ID NO: 500371
aacauuaaggcaaacuuac

SEQ ID NO: 500373 - RNA, 19 nt, Artificial Sequence
  Description of Artificial Sequence: Synthetic oligonucleotide
  Sense strand starting at position 3496 of SEQ ID NO: 317638
guagucuuucgcuuggagu

SEQ ID NO: 500374 - RNA, 19 nt, Artificial Sequence
  Description of Artificial Sequence: Synthetic oligonucleotide
  Antisense Strand to SEQ ID NO: 500373
acuccaagcgaaagacuac

SEQ ID NO: 500375 - RNA, 19 nt, Artificial Sequence
  Description of Artificial Sequence: Synthetic oligonucleotide
  Sense strand starting at position 3720 of SEQ ID NO: 317638
ugcuuucuucuuuaaucgu

SEQ ID NO: 500376 - RNA, 19 nt, Artificial Sequence
  Description of Artificial Sequence: Synthetic oligonucleotide
  Antisense Strand to SEQ ID NO: 500375
acgauuaaagaagaaagca

SEQ ID NO: 500377 - RNA, 19 nt, Artificial Sequence
  Description of Artificial Sequence: Synthetic oligonucleotide
  Sense strand starting at position 3741 of SEQ ID NO: 317638
cugggucauuuacaaucuu

SEQ ID NO: 500378 - RNA, 19 nt, Artificial Sequence
  Description of Artificial Sequence: Synthetic oligonucleotide
  Antisense Strand to SEQ ID NO: 500377
aagauuguaaaugacccag

SEQ ID NO: 500379 - RNA, 19 nt, Artificial Sequence
  Description of Artificial Sequence: Synthetic oligonucleotide
  Sense strand starting at position 3749 of SEQ ID NO: 317638
uuuacaaucuuagaaggag

SEQ ID NO: 500380 - RNA, 19 nt, Artificial Sequence
  Description of Artificial Sequence: Synthetic oligonucleotide
  Antisense Strand to SEQ ID NO: 500379
cuccuucuaagauuguaaa

SEQ ID NO: 500381 - RNA, 19 nt, Artificial Sequence
  Description of Artificial Sequence: Synthetic oligonucleotide
  Sense strand starting at position 3790 of SEQ ID NO: 317638
gucucuagacuuuauagau

SEQ ID NO: 500382 - RNA, 19 nt, Artificial Sequence
  Description of Artificial Sequence: Synthetic oligonucleotide
  Antisense Strand to SEQ ID NO: 500381
aucuauaaagucuagagac

SEQ ID NO: 500383 - RNA, 19 nt, Artificial Sequence
  Description of Artificial Sequence: Synthetic oligonucleotide
  Sense strand starting at position 3870 of SEQ ID NO: 317638
augaucaaaucaguauguu

SEQ ID NO: 500384 - RNA, 19 nt, Artificial Sequence
  Description of Artificial Sequence: Synthetic oligonucleotide
  Antisense Strand to SEQ ID NO: 500383
aacauacugauuugaucau

SEQ ID NO: 500385 - RNA, 19 nt, Artificial Sequence
  Description of Artificial Sequence: Synthetic oligonucleotide
  Sense strand starting at position 3871 of SEQ ID NO: 317638
ugaucaaaucaguauguuc

SEQ ID NO: 500386 - RNA, 19 nt, Artificial Sequence
  Description of Artificial Sequence: Synthetic oligonucleotide
  Antisense Strand to SEQ ID NO: 500385
gaacauacugauuugauca

SEQ ID NO: 500387 - RNA, 19 nt, Artificial Sequence
  Description of Artificial Sequence: Synthetic oligonucleotide
  Sense strand starting at position 180 of SEQ ID NO: 317639
cuucguuuccaagaaucua

SEQ ID NO: 500388 - RNA, 19 nt, Artificial Sequence
  Description of Artificial Sequence: Synthetic oligonucleotide
  Antisense Strand to SEQ ID NO: 500387
uagauucuuggaaacgaag

SEQ ID NO: 500389 - RNA, 19 nt, Artificial Sequence
  Description of Artificial Sequence: Synthetic oligonucleotide
  Sense strand starting at position 279 of SEQ ID NO: 317639
gauacacgucaaugacaga

SEQ ID NO: 500390 - RNA, 19 nt, Artificial Sequence
  Description of Artificial Sequence: Synthetic oligonucleotide
  Antisense Strand to SEQ ID NO: 500389
ucugucauugacguguauc

SEQ ID NO: 500391 - RNA, 19 nt, Artificial Sequence
  Description of Artificial Sequence: Synthetic oligonucleotide
  Sense strand starting at position 381 of SEQ ID NO: 317639
guucuaagcugguuaauga

SEQ ID NO: 500392 - RNA, 19 nt, Artificial Sequence
  Description of Artificial Sequence: Synthetic oligonucleotide
  Antisense Strand to SEQ ID NO: 500391
ucauuaaccagcuuagaac

SEQ ID NO: 500393 - RNA, 19 nt, Artificial Sequence
  Description of Artificial Sequence: Synthetic oligonucleotide
  Sense strand starting at position 418 of SEQ ID NO: 317639
ucuagaaggugaguaaaca

SEQ ID NO: 500394 - RNA, 19 nt, Artificial Sequence
  Description of Artificial Sequence: Synthetic oligonucleotide
  Antisense Strand to SEQ ID NO: 500393
uguuuacucaccuucuaga

SEQ ID NO: 500395 - RNA, 19 nt, Artificial Sequence
  Description of Artificial Sequence: Synthetic oligonucleotide
  Sense strand starting at position 460 of SEQ ID NO: 317639
cuuugaaugagagggcuuu

SEQ ID NO: 500396 - RNA, 19 nt, Artificial Sequence
  Description of Artificial Sequence: Synthetic oligonucleotide
  Antisense Strand to SEQ ID NO: 500395
aaagcccucucauucaaag

SEQ ID NO: 500397 - RNA, 19 nt, Artificial Sequence
  Description of Artificial Sequence: Synthetic oligonucleotide
  Sense strand starting at position 562 of SEQ ID NO: 317639
guauuucacguguggcuca

SEQ ID NO: 500398 - RNA, 19 nt, Artificial Sequence
  Description of Artificial Sequence: Synthetic oligonucleotide
  Antisense Strand to SEQ ID NO: 500397
ugagccacacgugaaauac

SEQ ID NO: 500399 - RNA, 19 nt, Artificial Sequence
  Description of Artificial Sequence: Synthetic oligonucleotide
  Sense strand starting at position 567 of SEQ ID NO: 317639
ucacguguggcucaagaca

SEQ ID NO: 500400 - RNA, 19 nt, Artificial Sequence
  Description of Artificial Sequence: Synthetic oligonucleotide
  Antisense Strand to SEQ ID NO: 500399
ugucuugagccacacguga

SEQ ID NO: 500401 - RNA, 19 nt, Artificial Sequence
  Description of Artificial Sequence: Synthetic oligonucleotide
  Sense strand starting at position 619 of SEQ ID NO: 317639
uuggaaaccugugcuuuaa

SEQ ID NO: 500402 - RNA, 19 nt, Artificial Sequence
  Description of Artificial Sequence: Synthetic oligonucleotide
  Antisense Strand to SEQ ID NO: 500401
uuaaagcacagguuuccaa

SEQ ID NO: 500403 - RNA, 19 nt, Artificial Sequence
  Description of Artificial Sequence: Synthetic oligonucleotide
  Sense strand starting at position 621 of SEQ ID NO: 317639
ggaaaccugugcuuuaaac

SEQ ID NO: 500404 - RNA, 19 nt, Artificial Sequence
  Description of Artificial Sequence: Synthetic oligonucleotide
  Antisense Strand to SEQ ID NO: 500403
guuuaaagcacagguuucc

SEQ ID NO: 500405 - RNA, 19 nt, Artificial Sequence
  Description of Artificial Sequence: Synthetic oligonucleotide
  Sense strand starting at position 1053 of SEQ ID NO: 317639
uggcucucccuguaaacuu

SEQ ID NO: 500406 - RNA, 19 nt, Artificial Sequence
  Description of Artificial Sequence: Synthetic oligonucleotide
  Antisense Strand to SEQ ID NO: 500405
aaguuuacagggagagcca

SEQ ID NO: 500407 - RNA, 19 nt, Artificial Sequence
  Description of Artificial Sequence: Synthetic oligonucleotide
  Sense strand starting at position 1329 of SEQ ID NO: 317639
cuuucuuugcuccagauag

SEQ ID NO: 500408 - RNA, 19 nt, Artificial Sequence
  Description of Artificial Sequence: Synthetic oligonucleotide
  Antisense Strand to SEQ ID NO: 500407
cuaucuggagcaaagaaag

SEQ ID NO: 500409 - RNA, 19 nt, Artificial Sequence
  Description of Artificial Sequence: Synthetic oligonucleotide
  Sense strand starting at position 1331 of SEQ ID NO: 317639
uucuuugcuccagauagau

SEQ ID NO: 500410 - RNA, 19 nt, Artificial Sequence
  Description of Artificial Sequence: Synthetic oligonucleotide
  Antisense Strand to SEQ ID NO: 500409
aucuaucuggagcaaagaa

SEQ ID NO: 500411 - RNA, 19 nt, Artificial Sequence
  Description of Artificial Sequence: Synthetic oligonucleotide
  Sense strand starting at position 1454 of SEQ ID NO: 317639
aagagaaauuauggaagau

SEQ ID NO: 500412 - RNA, 19 nt, Artificial Sequence
  Description of Artificial Sequence: Synthetic oligonucleotide
  Antisense Strand to SEQ ID NO: 500411
aucuuccauaauuucucuu

SEQ ID NO: 500413 - RNA, 19 nt, Artificial Sequence
  Description of Artificial Sequence: Synthetic oligonucleotide
  Sense strand starting at position 1495 of SEQ ID NO: 317639
uguuuccuggcagaaucuu

SEQ ID NO: 500414 - RNA, 19 nt, Artificial Sequence
  Description of Artificial Sequence: Synthetic oligonucleotide
  Antisense Strand to SEQ ID NO: 500413
aagauucugccaggaaaca

SEQ ID NO: 500415 - RNA, 19 nt, Artificial Sequence
  Description of Artificial Sequence: Synthetic oligonucleotide
  Sense strand starting at position 1530 of SEQ ID NO: 317639
uuuaaaucuguggguucua

SEQ ID NO: 500416 - RNA, 19 nt, Artificial Sequence
  Description of Artificial Sequence: Synthetic oligonucleotide
  Antisense Strand to SEQ ID NO: 500415
uagaacccacagauuuaaa

SEQ ID NO: 500417 - RNA, 19 nt, Artificial Sequence
  Description of Artificial Sequence: Synthetic oligonucleotide
  Sense strand starting at position 1531 of SEQ ID NO: 317639
uuaaaucuguggguucuaa

SEQ ID NO: 500418 - RNA, 19 nt, Artificial Sequence
  Description of Artificial Sequence: Synthetic oligonucleotide
  Antisense Strand to SEQ ID NO: 500417
uuagaacccacagauuuaa

SEQ ID NO: 500419 - RNA, 19 nt, Artificial Sequence
  Description of Artificial Sequence: Synthetic oligonucleotide
  Sense strand starting at position 1635 of SEQ ID NO: 317639
uuucgagaauuaccacuaa

SEQ ID NO: 500420 - RNA, 19 nt, Artificial Sequence
  Description of Artificial Sequence: Synthetic oligonucleotide
  Antisense Strand to SEQ ID NO: 500419
uuagugguaauucucgaaa

SEQ ID NO: 500421 - RNA, 19 nt, Artificial Sequence
  Description of Artificial Sequence: Synthetic oligonucleotide
  Sense strand starting at position 1744 of SEQ ID NO: 317639
cccaacaguuucuugaaga

SEQ ID NO: 500422 - RNA, 19 nt, Artificial Sequence
  Description of Artificial Sequence: Synthetic oligonucleotide
  Antisense Strand to SEQ ID NO: 500421
ucuucaagaaacuguuggg

SEQ ID NO: 500423 - RNA, 19 nt, Artificial Sequence
  Description of Artificial Sequence: Synthetic oligonucleotide
  Sense strand starting at position 1847 of SEQ ID NO: 317639
ggaauuauuuacugaaguu

SEQ ID NO: 500424 - RNA, 19 nt, Artificial Sequence
  Description of Artificial Sequence: Synthetic oligonucleotide
  Antisense Strand to SEQ ID NO: 500423
aacuucaguaaauaauucc

SEQ ID NO: 500425 - RNA, 19 nt, Artificial Sequence
  Description of Artificial Sequence: Synthetic oligonucleotide
  Sense strand starting at position 2074 of SEQ ID NO: 317639
cugacaugugacugacuga

SEQ ID NO: 500426 - RNA, 19 nt, Artificial Sequence
  Description of Artificial Sequence: Synthetic oligonucleotide
  Antisense Strand to SEQ ID NO: 500425
ucagucagucacaugucag

SEQ ID NO: 500427 - RNA, 19 nt, Artificial Sequence
  Description of Artificial Sequence: Synthetic oligonucleotide
  Sense strand starting at position 2077 of SEQ ID NO: 317639
acaugugacugacugagau

SEQ ID NO: 500428 - RNA, 19 nt, Artificial Sequence
  Description of Artificial Sequence: Synthetic oligonucleotide
  Antisense Strand to SEQ ID NO: 500427
aucucagucagucacaugu

SEQ ID NO: 500429 - RNA, 19 nt, Artificial Sequence
  Description of Artificial Sequence: Synthetic oligonucleotide
  Sense strand starting at position 2139 of SEQ ID NO: 317639
auucuauagcucugcagaa

SEQ ID NO: 500430 - RNA, 19 nt, Artificial Sequence
  Description of Artificial Sequence: Synthetic oligonucleotide
  Antisense Strand to SEQ ID NO: 500429
uucugcagagcuauagaau

SEQ ID NO: 500431 - RNA, 19 nt, Artificial Sequence
  Description of Artificial Sequence: Synthetic oligonucleotide
  Sense strand starting at position 2140 of SEQ ID NO: 317639
uucuauagcucugcagaaa

SEQ ID NO: 500432 - RNA, 19 nt, Artificial Sequence
  Description of Artificial Sequence: Synthetic oligonucleotide
  Antisense Strand to SEQ ID NO: 500431
uuucugcagagcuauagaa

SEQ ID NO: 500433 - RNA, 19 nt, Artificial Sequence
  Description of Artificial Sequence: Synthetic oligonucleotide
  Sense strand starting at position 2275 of SEQ ID NO: 317639
cucagcucucaugaaagua

SEQ ID NO: 500434 - RNA, 19 nt, Artificial Sequence
  Description of Artificial Sequence: Synthetic oligonucleotide
  Antisense Strand to SEQ ID NO: 500433
uacuuucaugagagcugag

SEQ ID NO: 500435 - RNA, 19 nt, Artificial Sequence
  Description of Artificial Sequence: Synthetic oligonucleotide
  Sense strand starting at position 2283 of SEQ ID NO: 317639
ucaugaaaguaucuggaau

SEQ ID NO: 500436 - RNA, 19 nt, Artificial Sequence
  Description of Artificial Sequence: Synthetic oligonucleotide
  Antisense Strand to SEQ ID NO: 500435
auuccagauacuuucauga

SEQ ID NO: 500437 - RNA, 19 nt, Artificial Sequence
  Description of Artificial Sequence: Synthetic oligonucleotide
  Sense strand starting at position 2316 of SEQ ID NO: 317639
cuuggccucgcuguaauau

SEQ ID NO: 500438 - RNA, 19 nt, Artificial Sequence
  Description of Artificial Sequence: Synthetic oligonucleotide
  Antisense Strand to SEQ ID NO: 500437
auauuacagcgaggccaag

SEQ ID NO: 500439 - RNA, 19 nt, Artificial Sequence
  Description of Artificial Sequence: Synthetic oligonucleotide
  Sense strand starting at position 2327 of SEQ ID NO: 317639
uguaauaugcgaggaacuu

SEQ ID NO: 500440 - RNA, 19 nt, Artificial Sequence
  Description of Artificial Sequence: Synthetic oligonucleotide
  Antisense Strand to SEQ ID NO: 500439
aaguuccucgcauauuaca

SEQ ID NO: 500441 - RNA, 19 nt, Artificial Sequence
  Description of Artificial Sequence: Synthetic oligonucleotide
  Sense strand starting at position 2328 of SEQ ID NO: 317639
guaauaugcgaggaacuua

SEQ ID NO: 500442 - RNA, 19 nt, Artificial Sequence
  Description of Artificial Sequence: Synthetic oligonucleotide
  Antisense Strand to SEQ ID NO: 500441
uaaguuccucgcauauuac

SEQ ID NO: 500443 - RNA, 19 nt, Artificial Sequence
  Description of Artificial Sequence: Synthetic oligonucleotide
  Sense strand starting at position 2522 of SEQ ID NO: 317639
ucggccucacuguaacaaa

SEQ ID NO: 500444 - RNA, 19 nt, Artificial Sequence
  Description of Artificial Sequence: Synthetic oligonucleotide
  Antisense Strand to SEQ ID NO: 500443
uuuguuacagugaggccga

SEQ ID NO: 500445 - RNA, 19 nt, Artificial Sequence
  Description of Artificial Sequence: Synthetic oligonucleotide
  Sense strand starting at position 2630 of SEQ ID NO: 317639
uuaccacucggcuagagaa

SEQ ID NO: 500446 - RNA, 19 nt, Artificial Sequence
  Description of Artificial Sequence: Synthetic oligonucleotide
  Antisense Strand to SEQ ID NO: 500445
uucucuagccgagugguaa

SEQ ID NO: 500447 - RNA, 19 nt, Artificial Sequence
  Description of Artificial Sequence: Synthetic oligonucleotide
  Sense strand starting at position 3136 of SEQ ID NO: 317639
acaugugcgccugcauuaa

SEQ ID NO: 500448 - RNA, 19 nt, Artificial Sequence
  Description of Artificial Sequence: Synthetic oligonucleotide
  Antisense Strand to SEQ ID NO: 500447
uuaaugcaggcgcacaugu

SEQ ID NO: 500449 - RNA, 19 nt, Artificial Sequence
  Description of Artificial Sequence: Synthetic oligonucleotide
  Sense strand starting at position 3148 of SEQ ID NO: 317639
gcauuaaugcgguauuuau

SEQ ID NO: 500450 - RNA, 19 nt, Artificial Sequence
  Description of Artificial Sequence: Synthetic oligonucleotide
  Antisense Strand to SEQ ID NO: 500449
auaaauaccgcauuaaugc

SEQ ID NO: 500451 - RNA, 19 nt, Artificial Sequence
  Description of Artificial Sequence: Synthetic oligonucleotide
  Sense strand starting at position 3219 of SEQ ID NO: 317639
cucacauuauguguaaauu

SEQ ID NO: 500452 - RNA, 19 nt, Artificial Sequence
  Description of Artificial Sequence: Synthetic oligonucleotide
  Antisense Strand to SEQ ID NO: 500451
aauuuacacauaaugugag

SEQ ID NO: 500453 - RNA, 19 nt, Artificial Sequence
  Description of Artificial Sequence: Synthetic oligonucleotide
  Sense strand starting at position 3220 of SEQ ID NO: 317639
ucacauuauguguaaauuc

SEQ ID NO: 500454 - RNA, 19 nt, Artificial Sequence
  Description of Artificial Sequence: Synthetic oligonucleotide
  Antisense Strand to SEQ ID NO: 500453
gaauuuacacauaauguga

SEQ ID NO: 500455 - RNA, 19 nt, Artificial Sequence
  Description of Artificial Sequence: Synthetic oligonucleotide
  Sense strand starting at position 3260 of SEQ ID NO: 317639
gcacuaaguguccaauacu

SEQ ID NO: 500456 - RNA, 19 nt, Artificial Sequence
  Description of Artificial Sequence: Synthetic oligonucleotide
  Antisense Strand to SEQ ID NO: 500455
aguauuggacacuuagugc

SEQ ID NO: 500457 - RNA, 19 nt, Artificial Sequence
  Description of Artificial Sequence: Synthetic oligonucleotide
  Sense strand starting at position 3269 of SEQ ID NO: 317639
guccaauacuucccaggau

SEQ ID NO: 500458 - RNA, 19 nt, Artificial Sequence
  Description of Artificial Sequence: Synthetic oligonucleotide
  Antisense Strand to SEQ ID NO: 500457
auccugggaaguauuggac

SEQ ID NO: 500459 - RNA, 19 nt, Artificial Sequence
  Description of Artificial Sequence: Synthetic oligonucleotide
  Sense strand starting at position 3748 of SEQ ID NO: 317639
gagagugggcccuagacuu

SEQ ID NO: 500460 - RNA, 19 nt, Artificial Sequence
  Description of Artificial Sequence: Synthetic oligonucleotide
  Antisense Strand to SEQ ID NO: 500459
aagucuagggcccacucuc

SEQ ID NO: 500461 - RNA, 19 nt, Artificial Sequence
  Description of Artificial Sequence: Synthetic oligonucleotide
  Sense strand starting at position 3759 of SEQ ID NO: 317639
cuagacuucuguucucuau

SEQ ID NO: 500462 - RNA, 19 nt, Artificial Sequence
  Description of Artificial Sequence: Synthetic oligonucleotide
  Antisense Strand to SEQ ID NO: 500461
auagagaacagaagucuag

SEQ ID NO: 500463 - RNA, 19 nt, Artificial Sequence
  Description of Artificial Sequence: Synthetic oligonucleotide
  Sense strand starting at position 3770 of SEQ ID NO: 317639
uucucuaugccgcuaaguu

SEQ ID NO: 500464 - RNA, 19 nt, Artificial Sequence
  Description of Artificial Sequence: Synthetic oligonucleotide
  Antisense Strand to SEQ ID NO: 500463
aacuuagcggcauagagaa

SEQ ID NO: 500465 - RNA, 19 nt, Artificial Sequence
  Description of Artificial Sequence: Synthetic oligonucleotide
  Sense strand starting at position 3957 of SEQ ID NO: 317639
uauucuuagcaagguaaag

SEQ ID NO: 500466 - RNA, 19 nt, Artificial Sequence
  Description of Artificial Sequence: Synthetic oligonucleotide
  Antisense Strand to SEQ ID NO: 500465
cuuuaccuugcuaagaaua

SEQ ID NO: 500467 - RNA, 19 nt, Artificial Sequence
  Description of Artificial Sequence: Synthetic oligonucleotide
  Sense strand starting at position 74 of SEQ ID NO: 317640
ggaauguuugcggagcgga

SEQ ID NO: 500468 - RNA, 19 nt, Artificial Sequence
  Description of Artificial Sequence: Synthetic oligonucleotide
  Antisense Strand to SEQ ID NO: 500467
uccgcuccgcaaacauucc

SEQ ID NO: 500469 - RNA, 19 nt, Artificial Sequence
  Description of Artificial Sequence: Synthetic oligonucleotide
  Sense strand starting at position 721 of SEQ ID NO: 317640
uuaagagucgcgcaaagaa

SEQ ID NO: 500470 - RNA, 19 nt, Artificial Sequence
  Description of Artificial Sequence: Synthetic oligonucleotide
  Antisense Strand to SEQ ID NO: 500469
uucuuugcgcgacucuuaa

SEQ ID NO: 500471 - RNA, 19 nt, Artificial Sequence
  Description of Artificial Sequence: Synthetic oligonucleotide
  Sense strand starting at position 1721 of SEQ ID NO: 317640
ggcugaucaucaccaacau

SEQ ID NO: 500472 - RNA, 19 nt, Artificial Sequence
  Description of Artificial Sequence: Synthetic oligonucleotide
  Antisense Strand to SEQ ID NO: 500471
auguuggugaugaucagcc

SEQ ID NO: 500473 - RNA, 19 nt, Artificial Sequence
  Description of Artificial Sequence: Synthetic oligonucleotide
  Sense strand starting at position 1899 of SEQ ID NO: 317640
ggaugacuuacgugaggga

SEQ ID NO: 500474 - RNA, 19 nt, Artificial Sequence
  Description of Artificial Sequence: Synthetic oligonucleotide
  Antisense Strand to SEQ ID NO: 500473
ucccucacguaagucaucc

SEQ ID NO: 500475 - RNA, 19 nt, Artificial Sequence
  Description of Artificial Sequence: Synthetic oligonucleotide
  Sense strand starting at position 1968 of SEQ ID NO: 317640
acauucuccuccuugguua

SEQ ID NO: 500476 - RNA, 19 nt, Artificial Sequence
  Description of Artificial Sequence: Synthetic oligonucleotide
  Antisense Strand to SEQ ID NO: 500475
uaaccaaggaggagaaugu

SEQ ID NO: 500477 - RNA, 19 nt, Artificial Sequence
  Description of Artificial Sequence: Synthetic oligonucleotide
  Sense strand starting at position 2240 of SEQ ID NO: 317640
ggaucuaauaggugugagu

SEQ ID NO: 500478 - RNA, 19 nt, Artificial Sequence
  Description of Artificial Sequence: Synthetic oligonucleotide
  Antisense Strand to SEQ ID NO: 500477
acucacaccuauuagaucc

SEQ ID NO: 500479 - RNA, 19 nt, Artificial Sequence
  Description of Artificial Sequence: Synthetic oligonucleotide
  Sense strand starting at position 2242 of SEQ ID NO: 317640
aucuaauaggugugagugu

SEQ ID NO: 500480 - RNA, 19 nt, Artificial Sequence
  Description of Artificial Sequence: Synthetic oligonucleotide
  Antisense Strand to SEQ ID NO: 500479
acacucacaccuauuagau

SEQ ID NO: 500481 - RNA, 19 nt, Artificial Sequence
  Description of Artificial Sequence: Synthetic oligonucleotide
  Sense strand starting at position 2357 of SEQ ID NO: 317640
aacacuaaugucgggauca

SEQ ID NO: 500482 - RNA, 19 nt, Artificial Sequence
  Description of Artificial Sequence: Synthetic oligonucleotide
  Antisense Strand to SEQ ID NO: 500481
ugaucccgacauuaguguu

SEQ ID NO: 500483 - RNA, 19 nt, Artificial Sequence
  Description of Artificial Sequence: Synthetic oligonucleotide
  Sense strand starting at position 2623 of SEQ ID NO: 317640
ccgcucugucuggaaagaa

SEQ ID NO: 500484 - RNA, 19 nt, Artificial Sequence
  Description of Artificial Sequence: Synthetic oligonucleotide
  Antisense Strand to SEQ ID NO: 500483
uucuuuccagacagagcgg

SEQ ID NO: 500485 - RNA, 19 nt, Artificial Sequence
  Description of Artificial Sequence: Synthetic oligonucleotide
  Sense strand starting at position 2864 of SEQ ID NO: 317640
cuuaaaucuggagguuauc

SEQ ID NO: 500486 - RNA, 19 nt, Artificial Sequence
  Description of Artificial Sequence: Synthetic oligonucleotide
  Antisense Strand to SEQ ID NO: 500485
gauaaccuccagauuuaag

SEQ ID NO: 500487 - RNA, 19 nt, Artificial Sequence
  Description of Artificial Sequence: Synthetic oligonucleotide
  Sense strand starting at position 2954 of SEQ ID NO: 317640
aucaauaacuugguugaca

SEQ ID NO: 500488 - RNA, 19 nt, Artificial Sequence
  Description of Artificial Sequence: Synthetic oligonucleotide
  Antisense Strand to SEQ ID NO: 500487
ugucaaccaaguuauugau

SEQ ID NO: 500489 - RNA, 19 nt, Artificial Sequence
  Description of Artificial Sequence: Synthetic oligonucleotide
  Sense strand starting at position 2956 of SEQ ID NO: 317640
caauaacuugguugacagu

SEQ ID NO: 500490 - RNA, 19 nt, Artificial Sequence
  Description of Artificial Sequence: Synthetic oligonucleotide
  Antisense Strand to SEQ ID NO: 500489
acugucaaccaaguuauug

SEQ ID NO: 500491 - RNA, 19 nt, Artificial Sequence
  Description of Artificial Sequence: Synthetic oligonucleotide
  Sense strand starting at position 2963 of SEQ ID NO: 317640
uugguugacaguugacaga

SEQ ID NO: 500492 - RNA, 19 nt, Artificial Sequence
  Description of Artificial Sequence: Synthetic oligonucleotide
  Antisense Strand to SEQ ID NO: 500491
ucugucaacugucaaccaa

SEQ ID NO: 500493 - RNA, 19 nt, Artificial Sequence
  Description of Artificial Sequence: Synthetic oligonucleotide
  Sense strand starting at position 2978 of SEQ ID NO: 317640
cagaauaagugcccaguuu

SEQ ID NO: 500494 - RNA, 19 nt, Artificial Sequence
  Description of Artificial Sequence: Synthetic oligonucleotide
  Antisense Strand to SEQ ID NO: 500493
aaacugggcacuuauucug

SEQ ID NO: 500495 - RNA, 19 nt, Artificial Sequence
  Description of Artificial Sequence: Synthetic oligonucleotide
  Sense strand starting at position 2997 of SEQ ID NO: 317640
uggaguguccacuggaguu

SEQ ID NO: 500496 - RNA, 19 nt, Artificial Sequence
  Description of Artificial Sequence: Synthetic oligonucleotide
  Antisense Strand to SEQ ID NO: 500495
aacuccaguggacacucca

SEQ ID NO: 500497 - RNA, 19 nt, Artificial Sequence
  Description of Artificial Sequence: Synthetic oligonucleotide
  Sense strand starting at position 2999 of SEQ ID NO: 317640
gaguguccacuggaguuaa

SEQ ID NO: 500498 - RNA, 19 nt, Artificial Sequence
  Description of Artificial Sequence: Synthetic oligonucleotide
  Antisense Strand to SEQ ID NO: 500497
uuaacuccaguggacacuc

SEQ ID NO: 500499 - RNA, 19 nt, Artificial Sequence
  Description of Artificial Sequence: Synthetic oligonucleotide
  Sense strand starting at position 3087 of SEQ ID NO: 317640
ccugaugguugcuuuaacu

SEQ ID NO: 500500 - RNA, 19 nt, Artificial Sequence
  Description of Artificial Sequence: Synthetic oligonucleotide
  Antisense Strand to SEQ ID NO: 500499
aguuaaagcaaccaucagg

SEQ ID NO: 500501 - RNA, 19 nt, Artificial Sequence
  Description of Artificial Sequence: Synthetic oligonucleotide
  Sense strand starting at position 3111 of SEQ ID NO: 317640
gugauacuccuagagugca

SEQ ID NO: 500502 - RNA, 19 nt, Artificial Sequence
  Description of Artificial Sequence: Synthetic oligonucleotide
  Antisense Strand to SEQ ID NO: 500501
ugcacucuaggaguaucac

SEQ ID NO: 500503 - RNA, 19 nt, Artificial Sequence
  Description of Artificial Sequence: Synthetic oligonucleotide
  Sense strand starting at position 3133 of SEQ ID NO: 317640
agcaaucuuuacuucggaa

SEQ ID NO: 500504 - RNA, 19 nt, Artificial Sequence
  Description of Artificial Sequence: Synthetic oligonucleotide
  Antisense Strand to SEQ ID NO: 500503
uuccgaaguaaagauugcu

SEQ ID NO: 500505 - RNA, 19 nt, Artificial Sequence
  Description of Artificial Sequence: Synthetic oligonucleotide
  Sense strand starting at position 3167 of SEQ ID NO: 317640
ugcuauauacugcagguau

SEQ ID NO: 500506 - RNA, 19 nt, Artificial Sequence
  Description of Artificial Sequence: Synthetic oligonucleotide
  Antisense Strand to SEQ ID NO: 500505
auaccugcaguauauagca

SEQ ID NO: 500507 - RNA, 19 nt, Artificial Sequence
  Description of Artificial Sequence: Synthetic oligonucleotide
  Sense strand starting at position 3184 of SEQ ID NO: 317640
auaugaaguuuacccugaa

SEQ ID NO: 500508 - RNA, 19 nt, Artificial Sequence
  Description of Artificial Sequence: Synthetic oligonucleotide
  Antisense Strand to SEQ ID NO: 500507
uucaggguaaacuucauau

SEQ ID NO: 500509 - RNA, 19 nt, Artificial Sequence
  Description of Artificial Sequence: Synthetic oligonucleotide
  Sense strand starting at position 3185 of SEQ ID NO: 317640
uaugaaguuuacccugaag

SEQ ID NO: 500510 - RNA, 19 nt, Artificial Sequence
  Description of Artificial Sequence: Synthetic oligonucleotide
  Antisense Strand to SEQ ID NO: 500509
cuucaggguaaacuucaua

SEQ ID NO: 500511 - RNA, 19 nt, Artificial Sequence
  Description of Artificial Sequence: Synthetic oligonucleotide
  Sense strand starting at position 3187 of SEQ ID NO: 317640
ugaaguuuacccugaagca

SEQ ID NO: 500512 - RNA, 19 nt, Artificial Sequence
  Description of Artificial Sequence: Synthetic oligonucleotide
  Antisense Strand to SEQ ID NO: 500511
ugcuucaggguaaacuuca

SEQ ID NO: 500513 - RNA, 19 nt, Artificial Sequence
  Description of Artificial Sequence: Synthetic oligonucleotide
  Sense strand starting at position 3216 of SEQ ID NO: 317640
gcauuaugagcccaauaua

SEQ ID NO: 500514 - RNA, 19 nt, Artificial Sequence
  Description of Artificial Sequence: Synthetic oligonucleotide
  Antisense Strand to SEQ ID NO: 500513
uauauugggcucauaaugc

SEQ ID NO: 500515 - RNA, 19 nt, Artificial Sequence
  Description of Artificial Sequence: Synthetic oligonucleotide
  Sense strand starting at position 3219 of SEQ ID NO: 317640
uuaugagcccaauauagca

SEQ ID NO: 500516 - RNA, 19 nt, Artificial Sequence
  Description of Artificial Sequence: Synthetic oligonucleotide
  Antisense Strand to SEQ ID NO: 500515
ugcuauauugggcucauaa

SEQ ID NO: 500517 - RNA, 19 nt, Artificial Sequence
  Description of Artificial Sequence: Synthetic oligonucleotide
  Sense strand starting at position 3349 of SEQ ID NO: 317640
gguacuuggugaaagagga

SEQ ID NO: 500518 - RNA, 19 nt, Artificial Sequence
  Description of Artificial Sequence: Synthetic oligonucleotide
  Antisense Strand to SEQ ID NO: 500517
uccucuuucaccaaguacc

SEQ ID NO: 500519 - RNA, 19 nt, Artificial Sequence
  Description of Artificial Sequence: Synthetic oligonucleotide
  Sense strand starting at position 3362 of SEQ ID NO: 317640
agaggacuguucucuuugu

SEQ ID NO: 500520 - RNA, 19 nt, Artificial Sequence
  Description of Artificial Sequence: Synthetic oligonucleotide
  Antisense Strand to SEQ ID NO: 500519
acaaagagaacaguccucu

SEQ ID NO: 500521 - RNA, 19 nt, Artificial Sequence
  Description of Artificial Sequence: Synthetic oligonucleotide
  Sense strand starting at position 3406 of SEQ ID NO: 317640
ucacucagagguuguuaau

SEQ ID NO: 500522 - RNA, 19 nt, Artificial Sequence
  Description of Artificial Sequence: Synthetic oligonucleotide
  Antisense Strand to SEQ ID NO: 500521
auuaacaaccucugaguga

SEQ ID NO: 500523 - RNA, 19 nt, Artificial Sequence
  Description of Artificial Sequence: Synthetic oligonucleotide
  Sense strand starting at position 3505 of SEQ ID NO: 317640
agaggaaacuuugaacuua

SEQ ID NO: 500524 - RNA, 19 nt, Artificial Sequence
  Description of Artificial Sequence: Synthetic oligonucleotide
  Antisense Strand to SEQ ID NO: 500523
uaaguucaaaguuuccucu

SEQ ID NO: 500525 - RNA, 19 nt, Artificial Sequence
  Description of Artificial Sequence: Synthetic oligonucleotide
  Sense strand starting at position 3523 of SEQ ID NO: 317640
agcagaauacauuauaugu

SEQ ID NO: 500526 - RNA, 19 nt, Artificial Sequence
  Description of Artificial Sequence: Synthetic oligonucleotide
  Antisense Strand to SEQ ID NO: 500525
acauauaauguauucugcu

SEQ ID NO: 500527 - RNA, 19 nt, Artificial Sequence
  Description of Artificial Sequence: Synthetic oligonucleotide
  Sense strand starting at position 3533 of SEQ ID NO: 317640
auuauaugucaugagucau

SEQ ID NO: 500528 - RNA, 19 nt, Artificial Sequence
  Description of Artificial Sequence: Synthetic oligonucleotide
  Antisense Strand to SEQ ID NO: 500527
augacucaugacauauaau

SEQ ID NO: 500529 - RNA, 19 nt, Artificial Sequence
  Description of Artificial Sequence: Synthetic oligonucleotide
  Sense strand starting at position 3541 of SEQ ID NO: 317640
ucaugagucauguagcuag

SEQ ID NO: 500530 - RNA, 19 nt, Artificial Sequence
  Description of Artificial Sequence: Synthetic oligonucleotide
  Antisense Strand to SEQ ID NO: 500529
cuagcuacaugacucauga

SEQ ID NO: 500531 - RNA, 19 nt, Artificial Sequence
  Description of Artificial Sequence: Synthetic oligonucleotide
  Sense strand starting at position 3544 of SEQ ID NO: 317640
ugagucauguagcuagaaa

SEQ ID NO: 500532 - RNA, 19 nt, Artificial Sequence
  Description of Artificial Sequence: Synthetic oligonucleotide
  Antisense Strand to SEQ ID NO: 500531
uuucuagcuacaugacuca

SEQ ID NO: 500533 - RNA, 19 nt, Artificial Sequence
  Description of Artificial Sequence: Synthetic oligonucleotide
  Sense strand starting at position 3724 of SEQ ID NO: 317640
ucuauaagccuacauggau

SEQ ID NO: 500534 - RNA, 19 nt, Artificial Sequence
  Description of Artificial Sequence: Synthetic oligonucleotide
  Antisense Strand to SEQ ID NO: 500533
auccauguaggcuuauaga

SEQ ID NO: 500535 - RNA, 19 nt, Artificial Sequence
  Description of Artificial Sequence: Synthetic oligonucleotide
  Sense strand starting at position 3751 of SEQ ID NO: 317640
ccucuuugagguugaguua

SEQ ID NO: 500536 - RNA, 19 nt, Artificial Sequence
  Description of Artificial Sequence: Synthetic oligonucleotide
  Antisense Strand to SEQ ID NO: 500535
uaacucaaccucaaagagg

SEQ ID NO: 500537 - RNA, 19 nt, Artificial Sequence
  Description of Artificial Sequence: Synthetic oligonucleotide
  Sense strand starting at position 3752 of SEQ ID NO: 317640
cucuuugagguugaguuaa

SEQ ID NO: 500538 - RNA, 19 nt, Artificial Sequence
  Description of Artificial Sequence: Synthetic oligonucleotide
  Antisense Strand to SEQ ID NO: 500537
uuaacucaaccucaaagag

SEQ ID NO: 500539 - RNA, 19 nt, Artificial Sequence
  Description of Artificial Sequence: Synthetic oligonucleotide
  Sense strand starting at position 3754 of SEQ ID NO: 317640
cuuugagguugaguuaauu

SEQ ID NO: 500540 - RNA, 19 nt, Artificial Sequence
  Description of Artificial Sequence: Synthetic oligonucleotide
  Antisense Strand to SEQ ID NO: 500539
aauuaacucaaccucaaag

SEQ ID NO: 500541 - RNA, 19 nt, Artificial Sequence
  Description of Artificial Sequence: Synthetic oligonucleotide
  Sense strand starting at position 3809 of SEQ ID NO: 317640
guuaaauucugacuugccu

SEQ ID NO: 500542 - RNA, 19 nt, Artificial Sequence
  Description of Artificial Sequence: Synthetic oligonucleotide
  Antisense Strand to SEQ ID NO: 500541
aggcaagucagaauuuaac

SEQ ID NO: 500543 - RNA, 19 nt, Artificial Sequence
  Description of Artificial Sequence: Synthetic oligonucleotide
  Sense strand starting at position 3963 of SEQ ID NO: 317640
agaucuagcuucccaguaa

SEQ ID NO: 500544 - RNA, 19 nt, Artificial Sequence
  Description of Artificial Sequence: Synthetic oligonucleotide
  Antisense Strand to SEQ ID NO: 500543
uuacugggaagcuagaucu

SEQ ID NO: 500545 - RNA, 19 nt, Artificial Sequence
  Description of Artificial Sequence: Synthetic oligonucleotide
  Sense strand starting at position 3967 of SEQ ID NO: 317640
cuagcuucccaguaacaag

SEQ ID NO: 500546 - RNA, 19 nt, Artificial Sequence
  Description of Artificial Sequence: Synthetic oligonucleotide
  Antisense Strand to SEQ ID NO: 500545
cuuguuacugggaagcuag

SEQ ID NO: 500547 - RNA, 19 nt, Artificial Sequence
  Description of Artificial Sequence: Synthetic oligonucleotide
  Sense strand starting at position 10 of SEQ ID NO: 317641
caauaaggucuugauaguu

SEQ ID NO: 500548 - RNA, 19 nt, Artificial Sequence
  Description of Artificial Sequence: Synthetic oligonucleotide
  Antisense strand to SEQ ID NO: 500547
aacuaucaagaccuuauug

SEQ ID NO: 500549 - RNA, 19 nt, Artificial Sequence
  Description of Artificial Sequence: Synthetic oligonucleotide
  Sense strand starting at position 66 of SEQ ID NO: 317641
aaguguagauucuuagauu

SEQ ID NO: 500550 - RNA, 19 nt, Artificial Sequence
  Description of Artificial Sequence: Synthetic oligonucleotide
  Antisense strand to SEQ ID NO: 500549
aaucuaagaaucuacacuu

SEQ ID NO: 500551 - RNA, 19 nt, Artificial Sequence
  Description of Artificial Sequence: Synthetic oligonucleotide
  Sense strand starting at position 404 of SEQ ID NO: 317641
uuagaaggcuuucuaauuc

SEQ ID NO: 500552 - RNA, 19 nt, Artificial Sequence
  Description of Artificial Sequence: Synthetic oligonucleotide
  Antisense strand to SEQ ID NO: 500551
gaauuagaaagccuucuaa

SEQ ID NO: 500553 - RNA, 19 nt, Artificial Sequence
  Description of Artificial Sequence: Synthetic oligonucleotide
  Sense strand starting at position 440 of SEQ ID NO: 317641
agaugagcagucugagaug

SEQ ID NO: 500554 - RNA, 19 nt, Artificial Sequence
  Description of Artificial Sequence: Synthetic oligonucleotide
  Antisense strand to SEQ ID NO: 500553
caucucagacugcucaucu

SEQ ID NO: 500555 - RNA, 19 nt, Artificial Sequence
  Description of Artificial Sequence: Synthetic oligonucleotide
  Sense strand starting at position 494 of SEQ ID NO: 317641
ggaagugacuguucauagg

SEQ ID NO: 500556 - RNA, 19 nt, Artificial Sequence
  Description of Artificial Sequence: Synthetic oligonucleotide
  Antisense strand to SEQ ID NO: 500555
ccuaugaacagucacuucc

SEQ ID NO: 500557 - RNA, 19 nt, Artificial Sequence
  Description of Artificial Sequence: Synthetic oligonucleotide
  Sense strand starting at position 668 of SEQ ID NO: 317641
cugcauucucaguagcuga

SEQ ID NO: 500558 - RNA, 19 nt, Artificial Sequence
  Description of Artificial Sequence: Synthetic oligonucleotide
  Antisense strand to SEQ ID NO: 500557
ucagcuacugagaaugcag

SEQ ID NO: 500559 - RNA, 19 nt, Artificial Sequence
  Description of Artificial Sequence: Synthetic oligonucleotide
  Sense strand starting at position 778 of SEQ ID NO: 317641
gucuucuuguucucaagga

SEQ ID NO: 500560 - RNA, 19 nt, Artificial Sequence
  Description of Artificial Sequence: Synthetic oligonucleotide
  Antisense strand to SEQ ID NO: 500559
uccuugagaacaagaagac

SEQ ID NO: 500561 - RNA, 19 nt, Artificial Sequence
  Description of Artificial Sequence: Synthetic oligonucleotide
  Sense strand starting at position 785 of SEQ ID NO: 317641
uguucucaaggauagcuaa

SEQ ID NO: 500562 - RNA, 19 nt, Artificial Sequence
  Description of Artificial Sequence: Synthetic oligonucleotide
  Antisense strand to SEQ ID NO: 500561
uuagcuauccuugagaaca

SEQ ID NO: 500563 - RNA, 19 nt, Artificial Sequence
  Description of Artificial Sequence: Synthetic oligonucleotide
  Sense strand starting at position 899 of SEQ ID NO: 317641
cuuggcgauuauuuguuua

SEQ ID NO: 500564 - RNA, 19 nt, Artificial Sequence
  Description of Artificial Sequence: Synthetic oligonucleotide
  Antisense strand to SEQ ID NO: 500563
uaaacaaauaaucgccaag

SEQ ID NO: 500565 - RNA, 19 nt, Artificial Sequence
  Description of Artificial Sequence: Synthetic oligonucleotide
  Sense strand starting at position 901 of SEQ ID NO: 317641
uggcgauuauuuguuuauc

SEQ ID NO: 500566 - RNA, 19 nt, Artificial Sequence
  Description of Artificial Sequence: Synthetic oligonucleotide
  Antisense strand to SEQ ID NO: 500565
gauaaacaaauaaucgcca

SEQ ID NO: 500567 - RNA, 19 nt, Artificial Sequence
  Description of Artificial Sequence: Synthetic oligonucleotide
  Sense strand starting at position 902 of SEQ ID NO: 317641
ggcgauuauuuguuuauca

SEQ ID NO: 500568 - RNA, 19 nt, Artificial Sequence
  Description of Artificial Sequence: Synthetic oligonucleotide
  Antisense strand to SEQ ID NO: 500567
ugauaaacaaauaaucgcc

SEQ ID NO: 500569 - RNA, 19 nt, Artificial Sequence
  Description of Artificial Sequence: Synthetic oligonucleotide
  Sense strand starting at position 903 of SEQ ID NO: 317641
gcgauuauuuguuuaucaa

SEQ ID NO: 500570 - RNA, 19 nt, Artificial Sequence
  Description of Artificial Sequence: Synthetic oligonucleotide
  Antisense strand to SEQ ID NO: 500569
uugauaaacaaauaaucgc

SEQ ID NO: 500571 - RNA, 19 nt, Artificial Sequence
  Description of Artificial Sequence: Synthetic oligonucleotide
  Sense strand starting at position 1257 of SEQ ID NO: 317641
gggucauguguccagagau

SEQ ID NO: 500572 - RNA, 19 nt, Artificial Sequence
  Description of Artificial Sequence: Synthetic oligonucleotide
  Antisense strand to SEQ ID NO: 500571
aucucuggacacaugaccc

SEQ ID NO: 500573 - RNA, 19 nt, Artificial Sequence
  Description of Artificial Sequence: Synthetic oligonucleotide
  Sense strand starting at position 1361 of SEQ ID NO: 317641
ggaggauccacuuacugcu

SEQ ID NO: 500574 - RNA, 19 nt, Artificial Sequence
  Description of Artificial Sequence: Synthetic oligonucleotide
  Antisense strand to SEQ ID NO: 500573
agcaguaaguggauccucc

SEQ ID NO: 500575 - RNA, 19 nt, Artificial Sequence
  Description of Artificial Sequence: Synthetic oligonucleotide
  Sense strand starting at position 2096 of SEQ ID NO: 317641
ggccuugugagauggacga

SEQ ID NO: 500576 - RNA, 19 nt, Artificial Sequence
  Description of Artificial Sequence: Synthetic oligonucleotide
  Antisense strand to SEQ ID NO: 500575
ucguccaucucacaaggcc

SEQ ID NO: 500577 - RNA, 19 nt, Artificial Sequence
  Description of Artificial Sequence: Synthetic oligonucleotide
  Sense strand starting at position 2117 of SEQ ID NO: 317641
ccuuguguccugggaccaa

SEQ ID NO: 500578 - RNA, 19 nt, Artificial Sequence
  Description of Artificial Sequence: Synthetic oligonucleotide
  Antisense strand to SEQ ID NO: 500577
uuggucccaggacacaagg

SEQ ID NO: 500579 - RNA, 19 nt, Artificial Sequence
  Description of Artificial Sequence: Synthetic oligonucleotide
  Sense strand starting at position 2242 of SEQ ID NO: 317641
cuggcuuugcaggaagaca

SEQ ID NO: 500580 - RNA, 19 nt, Artificial Sequence
  Description of Artificial Sequence: Synthetic oligonucleotide
  Antisense strand to SEQ ID NO: 500579
ugucuuccugcaaagccag

SEQ ID NO: 500581 - RNA, 19 nt, Artificial Sequence
  Description of Artificial Sequence: Synthetic oligonucleotide
  Sense strand starting at position 2348 of SEQ ID NO: 317641
gaauauggcgucuggacaa

SEQ ID NO: 500582 - RNA, 19 nt, Artificial Sequence
  Description of Artificial Sequence: Synthetic oligonucleotide
  Antisense strand to SEQ ID NO: 500581
uuguccagacgccauauuc

SEQ ID NO: 500583 - RNA, 19 nt, Artificial Sequence
  Description of Artificial Sequence: Synthetic oligonucleotide
  Sense strand starting at position 2567 of SEQ ID NO: 317641
ggcauauaguggcuaccaa

SEQ ID NO: 500584 - RNA, 19 nt, Artificial Sequence
  Description of Artificial Sequence: Synthetic oligonucleotide
  Antisense strand to SEQ ID NO: 500583
uugguagccacuauaugcc

SEQ ID NO: 500585 - RNA, 19 nt, Artificial Sequence
  Description of Artificial Sequence: Synthetic oligonucleotide
  Sense strand starting at position 2568 of SEQ ID NO: 317641
gcauauaguggcuaccaau

SEQ ID NO: 500586 - RNA, 19 nt, Artificial Sequence
  Description of Artificial Sequence: Synthetic oligonucleotide
  Antisense strand to SEQ ID NO: 500585
auugguagccacuauaugc

SEQ ID NO: 500587 - RNA, 19 nt, Artificial Sequence
  Description of Artificial Sequence: Synthetic oligonucleotide
  Sense strand starting at position 2574 of SEQ ID NO: 317641
aguggcuaccaauaaauau

SEQ ID NO: 500588 - RNA, 19 nt, Artificial Sequence
  Description of Artificial Sequence: Synthetic oligonucleotide
  Antisense strand to SEQ ID NO: 500587
auauuuauugguagccacu

SEQ ID NO: 500589 - RNA, 19 nt, Artificial Sequence
  Description of Artificial Sequence: Synthetic oligonucleotide
  Sense strand starting at position 2588 of SEQ ID NO: 317641
aauauuuguugacagagca

SEQ ID NO: 500590 - RNA, 19 nt, Artificial Sequence
  Description of Artificial Sequence: Synthetic oligonucleotide
  Antisense strand to SEQ ID NO: 500589
ugcucugucaacaaauauu

SEQ ID NO: 500591 - RNA, 19 nt, Artificial Sequence
  Description of Artificial Sequence: Synthetic oligonucleotide
  Sense strand starting at position 2796 of SEQ ID NO: 317641
ugucuuauacguguguauu

SEQ ID NO: 500592 - RNA, 19 nt, Artificial Sequence
  Description of Artificial Sequence: Synthetic oligonucleotide
  Antisense strand to SEQ ID NO: 500591
aauacacacguauaagaca

SEQ ID NO: 500593 - RNA, 19 nt, Artificial Sequence
  Description of Artificial Sequence: Synthetic oligonucleotide
  Sense strand starting at position 2872 of SEQ ID NO: 317641
uuuacauuccugugacuac

SEQ ID NO: 500594 - RNA, 19 nt, Artificial Sequence
  Description of Artificial Sequence: Synthetic oligonucleotide
  Antisense strand to SEQ ID NO: 500593
guagucacaggaauguaaa

SEQ ID NO: 500595 - RNA, 19 nt, Artificial Sequence
  Description of Artificial Sequence: Synthetic oligonucleotide
  Sense strand starting at position 2875 of SEQ ID NO: 317641
acauuccugugacuacuua

SEQ ID NO: 500596 - RNA, 19 nt, Artificial Sequence
  Description of Artificial Sequence: Synthetic oligonucleotide
  Antisense strand to SEQ ID NO: 500595
uaaguagucacaggaaugu

SEQ ID NO: 500597 - RNA, 19 nt, Artificial Sequence
  Description of Artificial Sequence: Synthetic oligonucleotide
  Sense strand starting at position 2883 of SEQ ID NO: 317641
gugacuacuuacucuguca

SEQ ID NO: 500598 - RNA, 19 nt, Artificial Sequence
  Description of Artificial Sequence: Synthetic oligonucleotide
  Antisense strand to SEQ ID NO: 500597
ugacagaguaaguagucac

SEQ ID NO: 500599 - RNA, 19 nt, Artificial Sequence
  Description of Artificial Sequence: Synthetic oligonucleotide
  Sense strand starting at position 2922 of SEQ ID NO: 317641
aucauagaagcaugacuuu

SEQ ID NO: 500600 - RNA, 19 nt, Artificial Sequence
  Description of Artificial Sequence: Synthetic oligonucleotide
  Antisense strand to SEQ ID NO: 500599
aaagucaugcuucuaugau

SEQ ID NO: 500601 - RNA, 19 nt, Artificial Sequence
  Description of Artificial Sequence: Synthetic oligonucleotide
  Sense strand starting at position 2967 of SEQ ID NO: 317641
ggcacaugauccuugucua

SEQ ID NO: 500602 - RNA, 19 nt, Artificial Sequence
  Description of Artificial Sequence: Synthetic oligonucleotide
  Antisense strand to SEQ ID NO: 500601
uagacaaggaucaugugcc

SEQ ID NO: 500603 - RNA, 19 nt, Artificial Sequence
  Description of Artificial Sequence: Synthetic oligonucleotide
  Sense strand starting at position 2970 of SEQ ID NO: 317641
acaugauccuugucuauag

SEQ ID NO: 500604 - RNA, 19 nt, Artificial Sequence
  Description of Artificial Sequence: Synthetic oligonucleotide
  Antisense strand to SEQ ID NO: 500603
cuauagacaaggaucaugu

SEQ ID NO: 500605 - RNA, 19 nt, Artificial Sequence
  Description of Artificial Sequence: Synthetic oligonucleotide
  Sense strand starting at position 3113 of SEQ ID NO: 317641
gcagaaucggaccagaucu

SEQ ID NO: 500606 - RNA, 19 nt, Artificial Sequence
  Description of Artificial Sequence: Synthetic oligonucleotide
  Antisense strand to SEQ ID NO: 500605
agaucugguccgauucugc

SEQ ID NO: 500607 - RNA, 19 nt, Artificial Sequence
  Description of Artificial Sequence: Synthetic oligonucleotide
  Sense strand starting at position 3170 of SEQ ID NO: 317641
ugcacuaaagucugggaua

SEQ ID NO: 500608 - RNA, 19 nt, Artificial Sequence
  Description of Artificial Sequence: Synthetic oligonucleotide
  Antisense strand to SEQ ID NO: 500607
uaucccagacuuuagugca

SEQ ID NO: 500609 - RNA, 19 nt, Artificial Sequence
  Description of Artificial Sequence: Synthetic oligonucleotide
  Sense strand starting at position 3172 of SEQ ID NO: 317641
cacuaaagucugggauauc

SEQ ID NO: 500610 - RNA, 19 nt, Artificial Sequence
  Description of Artificial Sequence: Synthetic oligonucleotide
  Antisense strand to SEQ ID NO: 500609
gauaucccagacuuuagug

SEQ ID NO: 500611 - RNA, 19 nt, Artificial Sequence
  Description of Artificial Sequence: Synthetic oligonucleotide
  Sense strand starting at position 3181 of SEQ ID NO: 317641
cugggauaucagugugaga

SEQ ID NO: 500612 - RNA, 19 nt, Artificial Sequence
  Description of Artificial Sequence: Synthetic oligonucleotide
  Antisense strand to SEQ ID NO: 500611
ucucacacugauaucccag

SEQ ID NO: 500613 - RNA, 19 nt, Artificial Sequence
  Description of Artificial Sequence: Synthetic oligonucleotide
  Sense strand starting at position 3183 of SEQ ID NO: 317641
gggauaucagugugagauu

SEQ ID NO: 500614 - RNA, 19 nt, Artificial Sequence
  Description of Artificial Sequence: Synthetic oligonucleotide
  Antisense strand to SEQ ID NO: 500613
aaucucacacugauauccc

SEQ ID NO: 500615 - RNA, 19 nt, Artificial Sequence
  Description of Artificial Sequence: Synthetic oligonucleotide
  Sense strand starting at position 3376 of SEQ ID NO: 317641
ugaaacacauuugauagau

SEQ ID NO: 500616 - RNA, 19 nt, Artificial Sequence
  Description of Artificial Sequence: Synthetic oligonucleotide
  Antisense strand to SEQ ID NO: 500615
aucuaucaaauguguuuca

SEQ ID NO: 500617 - RNA, 19 nt, Artificial Sequence
  Description of Artificial Sequence: Synthetic oligonucleotide
  Sense strand starting at position 3734 of SEQ ID NO: 317641
auaacaaacgccugagaua

SEQ ID NO: 500618 - RNA, 19 nt, Artificial Sequence
  Description of Artificial Sequence: Synthetic oligonucleotide
  Antisense strand to SEQ ID NO: 500617
uaucucaggcguuuguuau

SEQ ID NO: 500619 - RNA, 19 nt, Artificial Sequence
  Description of Artificial Sequence: Synthetic oligonucleotide
  Sense strand starting at position 3869 of SEQ ID NO: 317641
aaacguaagugauuaguaa

SEQ ID NO: 500620 - RNA, 19 nt, Artificial Sequence
  Description of Artificial Sequence: Synthetic oligonucleotide
  Antisense strand to SEQ ID NO: 500619
uuacuaaucacuuacguuu

SEQ ID NO: 500621 - RNA, 19 nt, Artificial Sequence
  Description of Artificial Sequence: Synthetic oligonucleotide
  Sense strand starting at position 3870 of SEQ ID NO: 317641
aacguaagugauuaguaaa

SEQ ID NO: 500622 - RNA, 19 nt, Artificial Sequence
  Description of Artificial Sequence: Synthetic oligonucleotide
  Antisense strand to SEQ ID NO: 500621
uuuacuaaucacuuacguu

SEQ ID NO: 500623 - RNA, 19 nt, Artificial Sequence
  Description of Artificial Sequence: Synthetic oligonucleotide
  Sense strand starting at position 3961 of SEQ ID NO: 317641
gguaacuugcuagauucua

SEQ ID NO: 500624 - RNA, 19 nt, Artificial Sequence
  Description of Artificial Sequence: Synthetic oligonucleotide
  Antisense strand to SEQ ID NO: 500623
uagaaucuagcaaguuacc

SEQ ID NO: 500625 - RNA, 19 nt, Artificial Sequence
  Description of Artificial Sequence: Synthetic oligonucleotide
  Sense strand starting at position 3972 of SEQ ID NO: 317641
agauucuaaugcuuggaaa

SEQ ID NO: 500626 - RNA, 19 nt, Artificial Sequence
  Description of Artificial Sequence: Synthetic oligonucleotide
  Antisense strand to SEQ ID NO: 500625
uuuccaagcauuagaaucu

SEQ ID NO: 500627 - RNA, 19 nt, Artificial Sequence
  Description of Artificial Sequence: Synthetic oligonucleotide
  Sense strand starting at position 36 of SEQ ID NO: 317642
gucaguugccuguuucuuu

SEQ ID NO: 500628 - RNA, 19 nt, Artificial Sequence
  Description of Artificial Sequence: Synthetic oligonucleotide
  Antisense strand to SEQ ID NO: 500627
aaagaaacaggcaacugac

SEQ ID NO: 500629 - RNA, 19 nt, Artificial Sequence
  Description of Artificial Sequence: Synthetic oligonucleotide
  Sense strand starting at position 92 of SEQ ID NO: 317642
uucugucacuuagugggaa

SEQ ID NO: 500630 - RNA, 19 nt, Artificial Sequence
  Description of Artificial Sequence: Synthetic oligonucleotide
  Antisense strand to SEQ ID NO: 500629
uucccacuaagugacagaa

SEQ ID NO: 500631 - RNA, 19 nt, Artificial Sequence
  Description of Artificial Sequence: Synthetic oligonucleotide
  Sense strand starting at position 199 of SEQ ID NO: 317642
gcaaacaugugacccacua

SEQ ID NO: 500632 - RNA, 19 nt, Artificial Sequence
  Description of Artificial Sequence: Synthetic oligonucleotide
  Antisense strand to SEQ ID NO: 500631
uagugggucacauguuugc

SEQ ID NO: 500633 - RNA, 19 nt, Artificial Sequence
  Description of Artificial Sequence: Synthetic oligonucleotide
  Sense strand starting at position 304 of SEQ ID NO: 317642
aaauucuuuggcuguaaga

SEQ ID NO: 500634 - RNA, 19 nt, Artificial Sequence
  Description of Artificial Sequence: Synthetic oligonucleotide
  Antisense strand to SEQ ID NO: 500633
ucuuacagccaaagaauuu

SEQ ID NO: 500635 - RNA, 19 nt, Artificial Sequence
  Description of Artificial Sequence: Synthetic oligonucleotide
  Sense strand starting at position 347 of SEQ ID NO: 317642
gcuagcuuagcauagauau

SEQ ID NO: 500636 - RNA, 19 nt, Artificial Sequence
  Description of Artificial Sequence: Synthetic oligonucleotide
  Antisense strand to SEQ ID NO: 500635
auaucuaugcuaagcuagc

SEQ ID NO: 500637 - RNA, 19 nt, Artificial Sequence
  Description of Artificial Sequence: Synthetic oligonucleotide
  Sense strand starting at position 390 of SEQ ID NO: 317642
agagaugaaucauacaaau

SEQ ID NO: 500638 - RNA, 19 nt, Artificial Sequence
  Description of Artificial Sequence: Synthetic oligonucleotide
  Antisense strand to SEQ ID NO: 500637
auuuguaugauucaucucu

SEQ ID NO: 500639 - RNA, 19 nt, Artificial Sequence
  Description of Artificial Sequence: Synthetic oligonucleotide
  Sense strand starting at position 536 of SEQ ID NO: 317642
caauaaggucuugauaguu

SEQ ID NO: 500640 - RNA, 19 nt, Artificial Sequence
  Description of Artificial Sequence: Synthetic oligonucleotide
  Antisense strand to SEQ ID NO: 500639
aacuaucaagaccuuauug

SEQ ID NO: 500641 - RNA, 19 nt, Artificial Sequence
  Description of Artificial Sequence: Synthetic oligonucleotide
  Sense strand starting at position 592 of SEQ ID NO: 317642
aaguguagauucuuagauu

SEQ ID NO: 500642 - RNA, 19 nt, Artificial Sequence
  Description of Artificial Sequence: Synthetic oligonucleotide
  Antisense strand to SEQ ID NO: 500641
aaucuaagaaucuacacuu

SEQ ID NO: 500643 - RNA, 19 nt, Artificial Sequence
  Description of Artificial Sequence: Synthetic oligonucleotide
  Sense strand starting at position 930 of SEQ ID NO: 317642
uuagaaggcuuucuaauuc

SEQ ID NO: 500644 - RNA, 19 nt, Artificial Sequence
  Description of Artificial Sequence: Synthetic oligonucleotide
  Antisense strand to SEQ ID NO: 500643
gaauuagaaagccuucuaa

SEQ ID NO: 500645 - RNA, 19 nt, Artificial Sequence
  Description of Artificial Sequence: Synthetic oligonucleotide
  Sense strand starting at position 966 of SEQ ID NO: 317642
agaugagcagucugagaug

SEQ ID NO: 500646 - RNA, 19 nt, Artificial Sequence
  Description of Artificial Sequence: Synthetic oligonucleotide
  Antisense strand to SEQ ID NO: 500645
caucucagacugcucaucu

SEQ ID NO: 500647 - RNA, 19 nt, Artificial Sequence
  Description of Artificial Sequence: Synthetic oligonucleotide
  Sense strand starting at position 1020 of SEQ ID NO: 317642
ggaagugacuguucauagg

SEQ ID NO: 500648 - RNA, 19 nt, Artificial Sequence
  Description of Artificial Sequence: Synthetic oligonucleotide
  Antisense strand to SEQ ID NO: 500647
ccuaugaacagucacuucc

SEQ ID NO: 500649 - RNA, 19 nt, Artificial Sequence
  Description of Artificial Sequence: Synthetic oligonucleotide
  Sense strand starting at position 1304 of SEQ ID NO: 317642
gucuucuuguucucaagga

SEQ ID NO: 500650 - RNA, 19 nt, Artificial Sequence
  Description of Artificial Sequence: Synthetic oligonucleotide
  Antisense strand to SEQ ID NO: 500649
uccuugagaacaagaagac

SEQ ID NO: 500651 - RNA, 19 nt, Artificial Sequence
  Description of Artificial Sequence: Synthetic oligonucleotide
  Sense strand starting at position 1311 of SEQ ID NO: 317642
uguucucaaggauagcuaa

SEQ ID NO: 500652 - RNA, 19 nt, Artificial Sequence
  Description of Artificial Sequence: Synthetic oligonucleotide
  Antisense strand to SEQ ID NO: 500651
uuagcuauccuugagaaca

SEQ ID NO: 500653 - RNA, 19 nt, Artificial Sequence
  Description of Artificial Sequence: Synthetic oligonucleotide
  Sense strand starting at position 1425 of SEQ ID NO: 317642
cuuggcgauuauuuguuua

SEQ ID NO: 500654 - RNA, 19 nt, Artificial Sequence
  Description of Artificial Sequence: Synthetic oligonucleotide
  Antisense strand to SEQ ID NO: 500653
uaaacaaauaaucgccaag

SEQ ID NO: 500655 - RNA, 19 nt, Artificial Sequence
  Description of Artificial Sequence: Synthetic oligonucleotide
  Sense strand starting at position 1427 of SEQ ID NO: 317642
uggcgauuauuuguuuauc

SEQ ID NO: 500656 - RNA, 19 nt, Artificial Sequence
  Description of Artificial Sequence: Synthetic oligonucleotide
  Antisense strand to SEQ ID NO: 500655
gauaaacaaauaaucgcca

SEQ ID NO: 500657 - RNA, 19 nt, Artificial Sequence
  Description of Artificial Sequence: Synthetic oligonucleotide
  Sense strand starting at position 1428 of SEQ ID NO: 317642
ggcgauuauuuguuuauca

SEQ ID NO: 500658 - RNA, 19 nt, Artificial Sequence
  Description of Artificial Sequence: Synthetic oligonucleotide
  Antisense strand to SEQ ID NO: 500657
ugauaaacaaauaaucgcc

SEQ ID NO: 500659 - RNA, 19 nt, Artificial Sequence
  Description of Artificial Sequence: Synthetic oligonucleotide
  Sense strand starting at position 1429 of SEQ ID NO: 317642
gcgauuauuuguuuaucaa

SEQ ID NO: 500660 - RNA, 19 nt, Artificial Sequence
  Description of Artificial Sequence: Synthetic oligonucleotide
  Antisense strand to SEQ ID NO: 500659
uugauaaacaaauaaucgc

SEQ ID NO: 500661 - RNA, 19 nt, Artificial Sequence
  Description of Artificial Sequence: Synthetic oligonucleotide
  Sense strand starting at position 1783 of SEQ ID NO: 317642
gggucauguguccagagau

SEQ ID NO: 500662 - RNA, 19 nt, Artificial Sequence
  Description of Artificial Sequence: Synthetic oligonucleotide
  Antisense strand to SEQ ID NO: 500661
aucucuggacacaugaccc

SEQ ID NO: 500663 - RNA, 19 nt, Artificial Sequence
  Description of Artificial Sequence: Synthetic oligonucleotide
  Sense strand starting at position 1887 of SEQ ID NO: 317642
ggaggauccacuuacugcu

SEQ ID NO: 500664 - RNA, 19 nt, Artificial Sequence
  Description of Artificial Sequence: Synthetic oligonucleotide
  Antisense strand to SEQ ID NO: 500663
agcaguaaguggauccucc

SEQ ID NO: 500665 - RNA, 19 nt, Artificial Sequence
  Description of Artificial Sequence: Synthetic oligonucleotide
  Sense strand starting at position 2622 of SEQ ID NO: 317642
ggccuugugagauggacga

SEQ ID NO: 500666 - RNA, 19 nt, Artificial Sequence
  Description of Artificial Sequence: Synthetic oligonucleotide
  Antisense strand to SEQ ID NO: 500665
ucguccaucucacaaggcc

SEQ ID NO: 500667 - RNA, 19 nt, Artificial Sequence
  Description of Artificial Sequence: Synthetic oligonucleotide
  Sense strand starting at position 2643 of SEQ ID NO: 317642
ccuuguguccugggaccaa

SEQ ID NO: 500668 - RNA, 19 nt, Artificial Sequence
  Description of Artificial Sequence: Synthetic oligonucleotide
  Antisense strand to SEQ ID NO: 500667
uuggucccaggacacaagg

SEQ ID NO: 500669 - RNA, 19 nt, Artificial Sequence
  Description of Artificial Sequence: Synthetic oligonucleotide
  Sense strand starting at position 2768 of SEQ ID NO: 317642
cuggcuuugcaggaagaca

SEQ ID NO: 500670 - RNA, 19 nt, Artificial Sequence
  Description of Artificial Sequence: Synthetic oligonucleotide
  Antisense strand to SEQ ID NO: 500669
ugucuuccugcaaagccag

SEQ ID NO: 500671 - RNA, 19 nt, Artificial Sequence
  Description of Artificial Sequence: Synthetic oligonucleotide
  Sense strand starting at position 2874 of SEQ ID NO: 317642
gaauauggcgucuggacaa

SEQ ID NO: 500672 - RNA, 19 nt, Artificial Sequence
  Description of Artificial Sequence: Synthetic oligonucleotide
  Antisense strand to SEQ ID NO: 500671
uuguccagacgccauauuc

SEQ ID NO: 500673 - RNA, 19 nt, Artificial Sequence
  Description of Artificial Sequence: Synthetic oligonucleotide
  Sense strand starting at position 3093 of SEQ ID NO: 317642
ggcauauaguggcuaccaa

SEQ ID NO: 500674 - RNA, 19 nt, Artificial Sequence
  Description of Artificial Sequence: Synthetic oligonucleotide
  Antisense strand to SEQ ID NO: 500673
uugguagccacuauaugcc

SEQ ID NO: 500675 - RNA, 19 nt, Artificial Sequence
  Description of Artificial Sequence: Synthetic oligonucleotide
  Sense strand starting at position 3094 of SEQ ID NO: 317642
gcauauaguggcuaccaau

SEQ ID NO: 500676 - RNA, 19 nt, Artificial Sequence
  Description of Artificial Sequence: Synthetic oligonucleotide
  Antisense strand to SEQ ID NO: 500675
auugguagccacuauaugc

SEQ ID NO: 500677 - RNA, 19 nt, Artificial Sequence
  Description of Artificial Sequence: Synthetic oligonucleotide
  Sense strand starting at position 3100 of SEQ ID NO: 317642
aguggcuaccaauaaauau

SEQ ID NO: 500678 - RNA, 19 nt, Artificial Sequence
  Description of Artificial Sequence: Synthetic oligonucleotide
  Antisense strand to SEQ ID NO: 500677
auauuuauugguagccacu

SEQ ID NO: 500679 - RNA, 19 nt, Artificial Sequence
  Description of Artificial Sequence: Synthetic oligonucleotide
  Sense strand starting at position 3114 of SEQ ID NO: 317642
aauauuuguugacagagca

SEQ ID NO: 500680 - RNA, 19 nt, Artificial Sequence
  Description of Artificial Sequence: Synthetic oligonucleotide
  Antisense strand to SEQ ID NO: 500679
ugcucugucaacaaauauu

SEQ ID NO: 500681 - RNA, 19 nt, Artificial Sequence
  Description of Artificial Sequence: Synthetic oligonucleotide
  Sense strand starting at position 3322 of SEQ ID NO: 317642
ugucuuauacguguguauu

SEQ ID NO: 500682 - RNA, 19 nt, Artificial Sequence
  Description of Artificial Sequence: Synthetic oligonucleotide
  Antisense strand to SEQ ID NO: 500681
aauacacacguauaagaca

SEQ ID NO: 500683 - RNA, 19 nt, Artificial Sequence
  Description of Artificial Sequence: Synthetic oligonucleotide
  Sense strand starting at position 3398 of SEQ ID NO: 317642
uuuacauuccugugacuac

SEQ ID NO: 500684 - RNA, 19 nt, Artificial Sequence
  Description of Artificial Sequence: Synthetic oligonucleotide
  Antisense strand to SEQ ID NO: 500683
guagucacaggaauguaaa

SEQ ID NO: 500685 - RNA, 19 nt, Artificial Sequence
  Description of Artificial Sequence: Synthetic oligonucleotide
  Sense strand starting at position 3401 of SEQ ID NO: 317642
acauuccugugacuacuua

SEQ ID NO: 500686 - RNA, 19 nt, Artificial Sequence
  Description of Artificial Sequence: Synthetic oligonucleotide
  Antisense strand to SEQ ID NO: 500685
uaaguagucacaggaaugu

SEQ ID NO: 500687 - RNA, 19 nt, Artificial Sequence
  Description of Artificial Sequence: Synthetic oligonucleotide
  Sense strand starting at position 3409 of SEQ ID NO: 317642
gugacuacuuacucuguca

SEQ ID NO: 500688 - RNA, 19 nt, Artificial Sequence
  Description of Artificial Sequence: Synthetic oligonucleotide
  Antisense strand to SEQ ID NO: 500687
ugacagaguaaguagucac

SEQ ID NO: 500689 - RNA, 19 nt, Artificial Sequence
  Description of Artificial Sequence: Synthetic oligonucleotide
  Sense strand starting at position 3448 of SEQ ID NO: 317642
aucauagaagcaugacuuu

SEQ ID NO: 500690 - RNA, 19 nt, Artificial Sequence
  Description of Artificial Sequence: Synthetic oligonucleotide
  Antisense strand to SEQ ID NO: 500689
aaagucaugcuucuaugau

SEQ ID NO: 500691 - RNA, 19 nt, Artificial Sequence
  Description of Artificial Sequence: Synthetic oligonucleotide
  Sense strand starting at position 3493 of SEQ ID NO: 317642
ggcacaugauccuugucua

SEQ ID NO: 500692 - RNA, 19 nt, Artificial Sequence
  Description of Artificial Sequence: Synthetic oligonucleotide
  Antisense strand to SEQ ID NO: 500691
uagacaaggaucaugugcc

SEQ ID NO: 500693 - RNA, 19 nt, Artificial Sequence
  Description of Artificial Sequence: Synthetic oligonucleotide
  Sense strand starting at position 3496 of SEQ ID NO: 317642
acaugauccuugucuauag

SEQ ID NO: 500694 - RNA, 19 nt, Artificial Sequence
  Description of Artificial Sequence: Synthetic oligonucleotide
  Antisense strand to SEQ ID NO: 500693
cuauagacaaggaucaugu

SEQ ID NO: 500695 - RNA, 19 nt, Artificial Sequence
  Description of Artificial Sequence: Synthetic oligonucleotide
  Sense strand starting at position 3639 of SEQ ID NO: 317642
gcagaaucggaccagaucu

SEQ ID NO: 500696 - RNA, 19 nt, Artificial Sequence
  Description of Artificial Sequence: Synthetic oligonucleotide
  Antisense strand to SEQ ID NO: 500695
agaucugguccgauucugc

SEQ ID NO: 500697 - RNA, 19 nt, Artificial Sequence
  Description of Artificial Sequence: Synthetic oligonucleotide
  Sense strand starting at position 3696 of SEQ ID NO: 317642
ugcacuaaagucugggaua

SEQ ID NO: 500698 - RNA, 19 nt, Artificial Sequence
  Description of Artificial Sequence: Synthetic oligonucleotide
  Antisense strand to SEQ ID NO: 500697
uaucccagacuuuagugca

SEQ ID NO: 500699 - RNA, 19 nt, Artificial Sequence
  Description of Artificial Sequence: Synthetic oligonucleotide
  Sense strand starting at position 3698 of SEQ ID NO: 317642
cacuaaagucugggauauc

SEQ ID NO: 500700 - RNA, 19 nt, Artificial Sequence
  Description of Artificial Sequence: Synthetic oligonucleotide
  Antisense strand to SEQ ID NO: 500699
gauaucccagacuuuagug

SEQ ID NO: 500701 - RNA, 19 nt, Artificial Sequence
  Description of Artificial Sequence: Synthetic oligonucleotide
  Sense strand starting at position 3707 of SEQ ID NO: 317642
cugggauaucagugugaga

SEQ ID NO: 500702 - RNA, 19 nt, Artificial Sequence
  Description of Artificial Sequence: Synthetic oligonucleotide
  Antisense strand to SEQ ID NO: 500701
ucucacacugauaucccag

SEQ ID NO: 500703 - RNA, 19 nt, Artificial Sequence
  Description of Artificial Sequence: Synthetic oligonucleotide
  Sense strand starting at position 3709 of SEQ ID NO: 317642
gggauaucagugugagauu

SEQ ID NO: 500704 - RNA, 19 nt, Artificial Sequence
  Description of Artificial Sequence: Synthetic oligonucleotide
  Antisense strand to SEQ ID NO: 500703
aaucucacacugauauccc

SEQ ID NO: 500705 - RNA, 19 nt, Artificial Sequence
  Description of Artificial Sequence: Synthetic oligonucleotide
  Sense strand starting at position 3902 of SEQ ID NO: 317642
ugaaacacauuugauagau

SEQ ID NO: 500706 - RNA, 19 nt, Artificial Sequence
  Description of Artificial Sequence: Synthetic oligonucleotide
  Antisense strand to SEQ ID NO: 500705
aucuaucaaauguguuuca

SEQ ID NO: 500707 - RNA, 19 nt, Artificial Sequence
  Description of Artificial Sequence: Synthetic oligonucleotide
  Sense strand starting at position 17 of SEQ ID NO: 317643
cugggauugcaguaaugug

SEQ ID NO: 500708 - RNA, 19 nt, Artificial Sequence
  Description of Artificial Sequence: Synthetic oligonucleotide
  Antisense strand to SEQ ID NO: 500707
cacauuacugcaaucccag

SEQ ID NO: 500709 - RNA, 19 nt, Artificial Sequence
  Description of Artificial Sequence: Synthetic oligonucleotide
  Sense strand starting at position 26 of SEQ ID NO: 317643
caguaauguggcuaaagag

SEQ ID NO: 500710 - RNA, 19 nt, Artificial Sequence
  Description of Artificial Sequence: Synthetic oligonucleotide
  Antisense strand to SEQ ID NO: 500709
cucuuuagccacauuacug

SEQ ID NO: 500711 - RNA, 19 nt, Artificial Sequence
  Description of Artificial Sequence: Synthetic oligonucleotide
  Sense strand starting at position 43 of SEQ ID NO: 317643
agauaaugcuggccuauaa

SEQ ID NO: 500712 - RNA, 19 nt, Artificial Sequence
  Description of Artificial Sequence: Synthetic oligonucleotide
  Antisense strand to SEQ ID NO: 500711
uuauaggccagcauuaucu

SEQ ID NO: 500713 - RNA, 19 nt, Artificial Sequence
  Description of Artificial Sequence: Synthetic oligonucleotide
  Sense strand starting at position 164 of SEQ ID NO: 317643
accauaaaguguuuaacac

SEQ ID NO: 500714 - RNA, 19 nt, Artificial Sequence
  Description of Artificial Sequence: Synthetic oligonucleotide
  Antisense strand to SEQ ID NO: 500713
guguuaaacacuuuauggu

SEQ ID NO: 500715 - RNA, 19 nt, Artificial Sequence
  Description of Artificial Sequence: Synthetic oligonucleotide
  Sense strand starting at position 290 of SEQ ID NO: 317643
gguauagaguaauugauug

SEQ ID NO: 500716 - RNA, 19 nt, Artificial Sequence
  Description of Artificial Sequence: Synthetic oligonucleotide
  Antisense strand to SEQ ID NO: 500715
caaucaauuacucuauacc

SEQ ID NO: 500717 - RNA, 19 nt, Artificial Sequence
  Description of Artificial Sequence: Synthetic oligonucleotide
  Sense strand starting at position 294 of SEQ ID NO: 317643
uagaguaauugauugucaa

SEQ ID NO: 500718 - RNA, 19 nt, Artificial Sequence
  Description of Artificial Sequence: Synthetic oligonucleotide
  Antisense strand to SEQ ID NO: 500717
uugacaaucaauuacucua

SEQ ID NO: 500719 - RNA, 19 nt, Artificial Sequence
  Description of Artificial Sequence: Synthetic oligonucleotide
  Sense strand starting at position 295 of SEQ ID NO: 317643
agaguaauugauugucaau

SEQ ID NO: 500720 - RNA, 19 nt, Artificial Sequence
  Description of Artificial Sequence: Synthetic oligonucleotide
  Antisense strand to SEQ ID NO: 500719
auugacaaucaauuacucu

SEQ ID NO: 500721 - RNA, 19 nt, Artificial Sequence
  Description of Artificial Sequence: Synthetic oligonucleotide
  Sense strand starting at position 297 of SEQ ID NO: 317643
aguaauugauugucaauug

SEQ ID NO: 500722 - RNA, 19 nt, Artificial Sequence
  Description of Artificial Sequence: Synthetic oligonucleotide
  Antisense strand to SEQ ID NO: 500721
caauugacaaucaauuacu

SEQ ID NO: 500723 - RNA, 19 nt, Artificial Sequence
  Description of Artificial Sequence: Synthetic oligonucleotide
  Sense strand starting at position 320 of SEQ ID NO: 317643
uuuccaugguuuccaaaga

SEQ ID NO: 500724 - RNA, 19 nt, Artificial Sequence
  Description of Artificial Sequence: Synthetic oligonucleotide
  Antisense strand to SEQ ID NO: 500723
ucuuuggaaaccauggaaa

SEQ ID NO: 500725 - RNA, 19 nt, Artificial Sequence
  Description of Artificial Sequence: Synthetic oligonucleotide
  Sense strand starting at position 515 of SEQ ID NO: 317643
uuccuauguguggauuaau

SEQ ID NO: 500726 - RNA, 19 nt, Artificial Sequence
  Description of Artificial Sequence: Synthetic oligonucleotide
  Antisense strand to SEQ ID NO: 500725
auuaauccacacauaggaa

SEQ ID NO: 500727 - RNA, 19 nt, Artificial Sequence
  Description of Artificial Sequence: Synthetic oligonucleotide
  Sense strand starting at position 1002 of SEQ ID NO: 317643
ugcagaagcagguaugagu

SEQ ID NO: 500728 - RNA, 19 nt, Artificial Sequence
  Description of Artificial Sequence: Synthetic oligonucleotide
  Antisense strand to SEQ ID NO: 500727
acucauaccugcuucugca

SEQ ID NO: 500729 - RNA, 19 nt, Artificial Sequence
  Description of Artificial Sequence: Synthetic oligonucleotide
  Sense strand starting at position 1015 of SEQ ID NO: 317643
augaguagucagcaauccu

SEQ ID NO: 500730 - RNA, 19 nt, Artificial Sequence
  Description of Artificial Sequence: Synthetic oligonucleotide
  Antisense strand to SEQ ID NO: 500729
aggauugcugacuacucau

SEQ ID NO: 500731 - RNA, 19 nt, Artificial Sequence
  Description of Artificial Sequence: Synthetic oligonucleotide
  Sense strand starting at position 1049 of SEQ ID NO: 317643
uagagagacucgccaggau

SEQ ID NO: 500732 - RNA, 19 nt, Artificial Sequence
  Description of Artificial Sequence: Synthetic oligonucleotide
  Antisense strand to SEQ ID NO: 500731
auccuggcgagucucucua

SEQ ID NO: 500733 - RNA, 19 nt, Artificial Sequence
  Description of Artificial Sequence: Synthetic oligonucleotide
  Sense strand starting at position 1053 of SEQ ID NO: 317643
gagacucgccaggauguaa

SEQ ID NO: 500734 - RNA, 19 nt, Artificial Sequence
  Description of Artificial Sequence: Synthetic oligonucleotide
  Antisense strand to SEQ ID NO: 500733
uuacauccuggcgagucuc

SEQ ID NO: 500735 - RNA, 19 nt, Artificial Sequence
  Description of Artificial Sequence: Synthetic oligonucleotide
  Sense strand starting at position 1064 of SEQ ID NO: 317643
ggauguaaccuuuaucacc

SEQ ID NO: 500736 - RNA, 19 nt, Artificial Sequence
  Description of Artificial Sequence: Synthetic oligonucleotide
  Antisense strand to SEQ ID NO: 500735
ggugauaaagguuacaucc

SEQ ID NO: 500737 - RNA, 19 nt, Artificial Sequence
  Description of Artificial Sequence: Synthetic oligonucleotide
  Sense strand starting at position 1193 of SEQ ID NO: 317643
uuuccauuacgguaaaugu

SEQ ID NO: 500738 - RNA, 19 nt, Artificial Sequence
  Description of Artificial Sequence: Synthetic oligonucleotide
  Antisense strand to SEQ ID NO: 500737
acauuuaccguaauggaaa

SEQ ID NO: 500739 - RNA, 19 nt, Artificial Sequence
  Description of Artificial Sequence: Synthetic oligonucleotide
  Sense strand starting at position 1419 of SEQ ID NO: 317643
gcgucugugguccuaguua

SEQ ID NO: 500740 - RNA, 19 nt, Artificial Sequence
  Description of Artificial Sequence: Synthetic oligonucleotide
  Antisense strand to SEQ ID NO: 500739
uaacuaggaccacagacgc

SEQ ID NO: 500741 - RNA, 19 nt, Artificial Sequence
  Description of Artificial Sequence: Synthetic oligonucleotide
  Sense strand starting at position 2107 of SEQ ID NO: 317643
acugucaucccaggacuau

SEQ ID NO: 500742 - RNA, 19 nt, Artificial Sequence
  Description of Artificial Sequence: Synthetic oligonucleotide
  Antisense strand to SEQ ID NO: 500741
auaguccugggaugacagu

SEQ ID NO: 500743 - RNA, 19 nt, Artificial Sequence
  Description of Artificial Sequence: Synthetic oligonucleotide
  Sense strand starting at position 2108 of SEQ ID NO: 317643
cugucaucccaggacuauc

SEQ ID NO: 500744 - RNA, 19 nt, Artificial Sequence
  Description of Artificial Sequence: Synthetic oligonucleotide
  Antisense strand to SEQ ID NO: 500743
gauaguccugggaugacag

SEQ ID NO: 500745 - RNA, 19 nt, Artificial Sequence
  Description of Artificial Sequence: Synthetic oligonucleotide
  Sense strand starting at position 2305 of SEQ ID NO: 317643
agcaguccucauuagggaa

SEQ ID NO: 500746 - RNA, 19 nt, Artificial Sequence
  Description of Artificial Sequence: Synthetic oligonucleotide
  Antisense strand to SEQ ID NO: 500745
uucccuaaugaggacugcu

SEQ ID NO: 500747 - RNA, 19 nt, Artificial Sequence
  Description of Artificial Sequence: Synthetic oligonucleotide
  Sense strand starting at position 2349 of SEQ ID NO: 317643
aucuaauggauugguggau

SEQ ID NO: 500748 - RNA, 19 nt, Artificial Sequence
  Description of Artificial Sequence: Synthetic oligonucleotide
  Antisense strand to SEQ ID NO: 500747
auccaccaauccauuagau

SEQ ID NO: 500749 - RNA, 19 nt, Artificial Sequence
  Description of Artificial Sequence: Synthetic oligonucleotide
  Sense strand starting at position 2355 of SEQ ID NO: 317643
uggauugguggaugucuga

SEQ ID NO: 500750 - RNA, 19 nt, Artificial Sequence
  Description of Artificial Sequence: Synthetic oligonucleotide
  Antisense strand to SEQ ID NO: 500749
ucagacauccaccaaucca

SEQ ID NO: 500751 - RNA, 19 nt, Artificial Sequence
  Description of Artificial Sequence: Synthetic oligonucleotide
  Sense strand starting at position 2599 of SEQ ID NO: 317643
gcgacaucagaauggagau

SEQ ID NO: 500752 - RNA, 19 nt, Artificial Sequence
  Description of Artificial Sequence: Synthetic oligonucleotide
  Antisense strand to SEQ ID NO: 500751
aucuccauucugaugucgc

SEQ ID NO: 500753 - RNA, 19 nt, Artificial Sequence
  Description of Artificial Sequence: Synthetic oligonucleotide
  Sense strand starting at position 2678 of SEQ ID NO: 317643
aaauguugacuugauagcu

SEQ ID NO: 500754 - RNA, 19 nt, Artificial Sequence
  Description of Artificial Sequence: Synthetic oligonucleotide
  Antisense strand to SEQ ID NO: 500753
agcuaucaagucaacauuu

SEQ ID NO: 500755 - RNA, 19 nt, Artificial Sequence
  Description of Artificial Sequence: Synthetic oligonucleotide
  Sense strand starting at position 2874 of SEQ ID NO: 317643
augauaacguuauuacauc

SEQ ID NO: 500756 - RNA, 19 nt, Artificial Sequence
  Description of Artificial Sequence: Synthetic oligonucleotide
  Antisense strand to SEQ ID NO: 500755
gauguaauaacguuaucau

SEQ ID NO: 500757 - RNA, 19 nt, Artificial Sequence
  Description of Artificial Sequence: Synthetic oligonucleotide
  Sense strand starting at position 2898 of SEQ ID NO: 317643
uggcacuccuccuuggaaa

SEQ ID NO: 500758 - RNA, 19 nt, Artificial Sequence
  Description of Artificial Sequence: Synthetic oligonucleotide
  Antisense strand to SEQ ID NO: 500757
uuuccaaggaggagugcca

SEQ ID NO: 500759 - RNA, 19 nt, Artificial Sequence
  Description of Artificial Sequence: Synthetic oligonucleotide
  Sense strand starting at position 2992 of SEQ ID NO: 317643
accaauaacucugugagag

SEQ ID NO: 500760 - RNA, 19 nt, Artificial Sequence
  Description of Artificial Sequence: Synthetic oligonucleotide
  Antisense strand to SEQ ID NO: 500759
cucucacagaguuauuggu

SEQ ID NO: 500761 - RNA, 19 nt, Artificial Sequence
  Description of Artificial Sequence: Synthetic oligonucleotide
  Sense strand starting at position 2993 of SEQ ID NO: 317643
ccaauaacucugugagagu

SEQ ID NO: 500762 - RNA, 19 nt, Artificial Sequence
  Description of Artificial Sequence: Synthetic oligonucleotide
  Antisense strand to SEQ ID NO: 500761
acucucacagaguuauugg

SEQ ID NO: 500763 - RNA, 19 nt, Artificial Sequence
  Description of Artificial Sequence: Synthetic oligonucleotide
  Sense strand starting at position 3043 of SEQ ID NO: 317643
uugcuuaagaauggaaugu

SEQ ID NO: 500764 - RNA, 19 nt, Artificial Sequence
  Description of Artificial Sequence: Synthetic oligonucleotide
  Antisense strand to SEQ ID NO: 500763
acauuccauucuuaagcaa

SEQ ID NO: 500765 - RNA, 19 nt, Artificial Sequence
  Description of Artificial Sequence: Synthetic oligonucleotide
  Sense strand starting at position 3063 of SEQ ID NO: 317643
gagagauagcaguguacca

SEQ ID NO: 500766 - RNA, 19 nt, Artificial Sequence
  Description of Artificial Sequence: Synthetic oligonucleotide
  Antisense strand to SEQ ID NO: 500765
ugguacacugcuaucucuc

SEQ ID NO: 500767 - RNA, 19 nt, Artificial Sequence
  Description of Artificial Sequence: Synthetic oligonucleotide
  Sense strand starting at position 3109 of SEQ ID NO: 317643
uucuguucucaggaacauc

SEQ ID NO: 500768 - RNA, 19 nt, Artificial Sequence
  Description of Artificial Sequence: Synthetic oligonucleotide
  Antisense strand to SEQ ID NO: 500767
gauguuccugagaacagaa

SEQ ID NO: 500769 - RNA, 19 nt, Artificial Sequence
  Description of Artificial Sequence: Synthetic oligonucleotide
  Sense strand starting at position 3286 of SEQ ID NO: 317643
uguugugugccacugugau

SEQ ID NO: 500770 - RNA, 19 nt, Artificial Sequence
  Description of Artificial Sequence: Synthetic oligonucleotide
  Antisense strand to SEQ ID NO: 500769
aucacaguggcacacaaca

SEQ ID NO: 500771 - RNA, 19 nt, Artificial Sequence
  Description of Artificial Sequence: Synthetic oligonucleotide
  Sense strand starting at position 3334 of SEQ ID NO: 317643
cugacaguuacaugaguga

SEQ ID NO: 500772 - RNA, 19 nt, Artificial Sequence
  Description of Artificial Sequence: Synthetic oligonucleotide
  Antisense strand to SEQ ID NO: 500771
ucacucauguaacugucag

SEQ ID NO: 500773 - RNA, 19 nt, Artificial Sequence
  Description of Artificial Sequence: Synthetic oligonucleotide
  Sense strand starting at position 3337 of SEQ ID NO: 317643
acaguuacaugagugaacu

SEQ ID NO: 500774 - RNA, 19 nt, Artificial Sequence
  Description of Artificial Sequence: Synthetic oligonucleotide
  Antisense strand to SEQ ID NO: 500773
aguucacucauguaacugu

SEQ ID NO: 500775 - RNA, 19 nt, Artificial Sequence
  Description of Artificial Sequence: Synthetic oligonucleotide
  Sense strand starting at position 3401 of SEQ ID NO: 317643
gcauuuaggcuggguugua

SEQ ID NO: 500776 - RNA, 19 nt, Artificial Sequence
  Description of Artificial Sequence: Synthetic oligonucleotide
  Antisense strand to SEQ ID NO: 500775
uacaacccagccuaaaugc

SEQ ID NO: 500777 - RNA, 19 nt, Artificial Sequence
  Description of Artificial Sequence: Synthetic oligonucleotide
  Sense strand starting at position 3402 of SEQ ID NO: 317643
cauuuaggcuggguuguau

SEQ ID NO: 500778 - RNA, 19 nt, Artificial Sequence
  Description of Artificial Sequence: Synthetic oligonucleotide
  Antisense strand to SEQ ID NO: 500777
auacaacccagccuaaaug

SEQ ID NO: 500779 - RNA, 19 nt, Artificial Sequence
  Description of Artificial Sequence: Synthetic oligonucleotide
  Sense strand starting at position 3438 of SEQ ID NO: 317643
ggugacuaaaguggugaua

SEQ ID NO: 500780 - RNA, 19 nt, Artificial Sequence
  Description of Artificial Sequence: Synthetic oligonucleotide
  Antisense strand to SEQ ID NO: 500779
uaucaccacuuuagucacc

SEQ ID NO: 500781 - RNA, 19 nt, Artificial Sequence
  Description of Artificial Sequence: Synthetic oligonucleotide
  Sense strand starting at position 3451 of SEQ ID NO: 317643
gugauauugaauuaugugu

SEQ ID NO: 500782 - RNA, 19 nt, Artificial Sequence
  Description of Artificial Sequence: Synthetic oligonucleotide
  Antisense strand to SEQ ID NO: 500781
acacauaauucaauaucac

SEQ ID NO: 500783 - RNA, 19 nt, Artificial Sequence
  Description of Artificial Sequence: Synthetic oligonucleotide
  Sense strand starting at position 3457 of SEQ ID NO: 317643
uugaauuauguguaugguu

SEQ ID NO: 500784 - RNA, 19 nt, Artificial Sequence
  Description of Artificial Sequence: Synthetic oligonucleotide
  Antisense strand to SEQ ID NO: 500783
aaccauacacauaauucaa

SEQ ID NO: 500785 - RNA, 19 nt, Artificial Sequence
  Description of Artificial Sequence: Synthetic oligonucleotide
  Sense strand starting at position 3940 of SEQ ID NO: 317643
auuaucuccuguuuagaug

SEQ ID NO: 500786 - RNA, 19 nt, Artificial Sequence
  Description of Artificial Sequence: Synthetic oligonucleotide
  Antisense strand to SEQ ID NO: 500785
caucuaaacaggagauaau

SEQ ID NO: 500787 - RNA, 19 nt, Artificial Sequence
  Description of Artificial Sequence: Synthetic oligonucleotide
  Sense strand starting at position 9 of SEQ ID NO: 317644
auagucucucagugaggca

SEQ ID NO: 500788 - RNA, 19 nt, Artificial Sequence
  Description of Artificial Sequence: Synthetic oligonucleotide
  Antisense strand to SEQ ID NO: 500787
ugccucacugagagacuau

SEQ ID NO: 500789 - RNA, 19 nt, Artificial Sequence
  Description of Artificial Sequence: Synthetic oligonucleotide
  Sense strand starting at position 185 of SEQ ID NO: 317644
ggucacaaguggucuugca

SEQ ID NO: 500790 - RNA, 19 nt, Artificial Sequence
  Description of Artificial Sequence: Synthetic oligonucleotide
  Antisense strand to SEQ ID NO: 500789
ugcaagaccacuugugacc

SEQ ID NO: 500791 - RNA, 19 nt, Artificial Sequence
  Description of Artificial Sequence: Synthetic oligonucleotide
  Sense strand starting at position 346 of SEQ ID NO: 317644
gcauuaaaugguggcuguu

SEQ ID NO: 500792 - RNA, 19 nt, Artificial Sequence
  Description of Artificial Sequence: Synthetic oligonucleotide
  Antisense strand to SEQ ID NO: 500791
aacagccaccauuuaaugc

SEQ ID NO: 500793 - RNA, 19 nt, Artificial Sequence
  Description of Artificial Sequence: Synthetic oligonucleotide
  Sense strand starting at position 563 of SEQ ID NO: 317644
gucccuguggccuaacuua

SEQ ID NO: 500794 - RNA, 19 nt, Artificial Sequence
  Description of Artificial Sequence: Synthetic oligonucleotide
  Antisense strand to SEQ ID NO: 500793
uaaguuaggccacagggac

SEQ ID NO: 500795 - RNA, 19 nt, Artificial Sequence
  Description of Artificial Sequence: Synthetic oligonucleotide
  Sense strand starting at position 657 of SEQ ID NO: 317644
cuuagcauugguugaucaa

SEQ ID NO: 500796 - RNA, 19 nt, Artificial Sequence
  Description of Artificial Sequence: Synthetic oligonucleotide
  Antisense strand to SEQ ID NO: 500795
uugaucaaccaaugcuaag

SEQ ID NO: 500797 - RNA, 19 nt, Artificial Sequence
  Description of Artificial Sequence: Synthetic oligonucleotide
  Sense strand starting at position 658 of SEQ ID NO: 317644
uuagcauugguugaucaau

SEQ ID NO: 500798 - RNA, 19 nt, Artificial Sequence
  Description of Artificial Sequence: Synthetic oligonucleotide
  Antisense strand to SEQ ID NO: 500797
auugaucaaccaaugcuaa

SEQ ID NO: 500799 - RNA, 19 nt, Artificial Sequence
  Description of Artificial Sequence: Synthetic oligonucleotide
  Sense strand starting at position 660 of SEQ ID NO: 317644
agcauugguugaucaauua

SEQ ID NO: 500800 - RNA, 19 nt, Artificial Sequence
  Description of Artificial Sequence: Synthetic oligonucleotide
  Antisense strand to SEQ ID NO: 500799
uaauugaucaaccaaugcu

SEQ ID NO: 500801 - RNA, 19 nt, Artificial Sequence
  Description of Artificial Sequence: Synthetic oligonucleotide
  Sense strand starting at position 703 of SEQ ID NO: 317644
gccaaauauccaugugaca

SEQ ID NO: 500802 - RNA, 19 nt, Artificial Sequence
  Description of Artificial Sequence: Synthetic oligonucleotide
  Antisense strand to SEQ ID NO: 500801
ugucacauggauauuuggc

SEQ ID NO: 500803 - RNA, 19 nt, Artificial Sequence
  Description of Artificial Sequence: Synthetic oligonucleotide
  Sense strand starting at position 809 of SEQ ID NO: 317644
cguacaaagccucagguaa

SEQ ID NO: 500804 - RNA, 19 nt, Artificial Sequence
  Description of Artificial Sequence: Synthetic oligonucleotide
  Antisense strand to SEQ ID NO: 500803
uuaccugaggcuuuguacg

SEQ ID NO: 500805 - RNA, 19 nt, Artificial Sequence
  Description of Artificial Sequence: Synthetic oligonucleotide
  Sense strand starting at position 891 of SEQ ID NO: 317644
gauggugcuguuugaaugu

SEQ ID NO: 500806 - RNA, 19 nt, Artificial Sequence
  Description of Artificial Sequence: Synthetic oligonucleotide
  Antisense strand to SEQ ID NO: 500805
acauucaaacagcaccauc

SEQ ID NO: 500807 - RNA, 19 nt, Artificial Sequence
  Description of Artificial Sequence: Synthetic oligonucleotide
  Sense strand starting at position 897 of SEQ ID NO: 317644
gcuguuugaaugugagaua

SEQ ID NO: 500808 - RNA, 19 nt, Artificial Sequence
  Description of Artificial Sequence: Synthetic oligonucleotide
  Antisense strand to SEQ ID NO: 500807
uaucucacauucaaacagc

SEQ ID NO: 500809 - RNA, 19 nt, Artificial Sequence
  Description of Artificial Sequence: Synthetic oligonucleotide
  Sense strand starting at position 938 of SEQ ID NO: 317644
gagcauuugcuguggccua

SEQ ID NO: 500810 - RNA, 19 nt, Artificial Sequence
  Description of Artificial Sequence: Synthetic oligonucleotide
  Antisense strand to SEQ ID NO: 500809
uaggccacagcaaaugcuc

SEQ ID NO: 500811 - RNA, 19 nt, Artificial Sequence
  Description of Artificial Sequence: Synthetic oligonucleotide
  Sense strand starting at position 950 of SEQ ID NO: 317644
uggccuaggacagguuuaa

SEQ ID NO: 500812 - RNA, 19 nt, Artificial Sequence
  Description of Artificial Sequence: Synthetic oligonucleotide
  Antisense strand to SEQ ID NO: 500811
uuaaaccuguccuaggcca

SEQ ID NO: 500813 - RNA, 19 nt, Artificial Sequence
  Description of Artificial Sequence: Synthetic oligonucleotide
  Sense strand starting at position 968 of SEQ ID NO: 317644
aggccaauuuaaggaucaa

SEQ ID NO: 500814 - RNA, 19 nt, Artificial Sequence
  Description of Artificial Sequence: Synthetic oligonucleotide
  Antisense strand to SEQ ID NO: 500813
uugauccuuaaauuggccu

SEQ ID NO: 500815 - RNA, 19 nt, Artificial Sequence
  Description of Artificial Sequence: Synthetic oligonucleotide
  Sense strand starting at position 1041 of SEQ ID NO: 317644
ggagauccuuuagugguau

SEQ ID NO: 500816 - RNA, 19 nt, Artificial Sequence
  Description of Artificial Sequence: Synthetic oligonucleotide
  Antisense strand to SEQ ID NO: 500815
auaccacuaaaggaucucc

SEQ ID NO: 500817 - RNA, 19 nt, Artificial Sequence
  Description of Artificial Sequence: Synthetic oligonucleotide
  Sense strand starting at position 1053 of SEQ ID NO: 317644
gugguauuauacucuggag

SEQ ID NO: 500818 - RNA, 19 nt, Artificial Sequence
  Description of Artificial Sequence: Synthetic oligonucleotide
  Antisense strand to SEQ ID NO: 500817
cuccagaguauaauaccac

SEQ ID NO: 500819 - RNA, 19 nt, Artificial Sequence
  Description of Artificial Sequence: Synthetic oligonucleotide
  Sense strand starting at position 1055 of SEQ ID NO: 317644
gguauuauacucuggagga

SEQ ID NO: 500820 - RNA, 19 nt, Artificial Sequence
  Description of Artificial Sequence: Synthetic oligonucleotide
  Antisense strand to SEQ ID NO: 500819
uccuccagaguauaauacc

SEQ ID NO: 500821 - RNA, 19 nt, Artificial Sequence
  Description of Artificial Sequence: Synthetic oligonucleotide
  Sense strand starting at position 1221 of SEQ ID NO: 317644
uaagaagugcaguggugaa

SEQ ID NO: 500822 - RNA, 19 nt, Artificial Sequence
  Description of Artificial Sequence: Synthetic oligonucleotide
  Antisense strand to SEQ ID NO: 500821
uucaccacugcacuucuua

SEQ ID NO: 500823 - RNA, 19 nt, Artificial Sequence
  Description of Artificial Sequence: Synthetic oligonucleotide
  Sense strand starting at position 1239 of SEQ ID NO: 317644
agcugacuccugugaggug

SEQ ID NO: 500824 - RNA, 19 nt, Artificial Sequence
  Description of Artificial Sequence: Synthetic oligonucleotide
  Antisense strand to SEQ ID NO: 500823
caccucacaggagucagcu

SEQ ID NO: 500825 - RNA, 19 nt, Artificial Sequence
  Description of Artificial Sequence: Synthetic oligonucleotide
  Sense strand starting at position 1314 of SEQ ID NO: 317644
ccaggugaacccuaccuua

SEQ ID NO: 500826 - RNA, 19 nt, Artificial Sequence
  Description of Artificial Sequence: Synthetic oligonucleotide
  Antisense strand to SEQ ID NO: 500825
uaagguaggguucaccugg

SEQ ID NO: 500827 - RNA, 19 nt, Artificial Sequence
  Description of Artificial Sequence: Synthetic oligonucleotide
  Sense strand starting at position 1341 of SEQ ID NO: 317644
uuguacucuggcugaagga

SEQ ID NO: 500828 - RNA, 19 nt, Artificial Sequence
  Description of Artificial Sequence: Synthetic oligonucleotide
  Antisense strand to SEQ ID NO: 500827
uccuucagccagaguacaa

SEQ ID NO: 500829 - RNA, 19 nt, Artificial Sequence
  Description of Artificial Sequence: Synthetic oligonucleotide
  Sense strand starting at position 1545 of SEQ ID NO: 317644
gguccuugccaucagggaa

SEQ ID NO: 500830 - RNA, 19 nt, Artificial Sequence
  Description of Artificial Sequence: Synthetic oligonucleotide
  Antisense strand to SEQ ID NO: 500829
uucccugauggcaaggacc

SEQ ID NO: 500831 - RNA, 19 nt, Artificial Sequence
  Description of Artificial Sequence: Synthetic oligonucleotide
  Sense strand starting at position 1832 of SEQ ID NO: 317644
cgggcacuuaccuacgaau

SEQ ID NO: 500832 - RNA, 19 nt, Artificial Sequence
  Description of Artificial Sequence: Synthetic oligonucleotide
  Antisense strand to SEQ ID NO: 500831
auucguagguaagugcccg

SEQ ID NO: 500833 - RNA, 19 nt, Artificial Sequence
  Description of Artificial Sequence: Synthetic oligonucleotide
  Sense strand starting at position 2419 of SEQ ID NO: 317644
gcgguuaccuguccuagga

SEQ ID NO: 500834 - RNA, 19 nt, Artificial Sequence
  Description of Artificial Sequence: Synthetic oligonucleotide
  Antisense strand to SEQ ID NO: 500833
uccuaggacagguaaccgc

SEQ ID NO: 500835 - RNA, 19 nt, Artificial Sequence
  Description of Artificial Sequence: Synthetic oligonucleotide
  Sense strand starting at position 2561 of SEQ ID NO: 317644
ucaccuaggcucugacaaa

SEQ ID NO: 500836 - RNA, 19 nt, Artificial Sequence
  Description of Artificial Sequence: Synthetic oligonucleotide
  Antisense strand to SEQ ID NO: 500835
uuugucagagccuagguga

SEQ ID NO: 500837 - RNA, 19 nt, Artificial Sequence
  Description of Artificial Sequence: Synthetic oligonucleotide
  Sense strand starting at position 2593 of SEQ ID NO: 317644
ccagauagugcccagauca

SEQ ID NO: 500838 - RNA, 19 nt, Artificial Sequence
  Description of Artificial Sequence: Synthetic oligonucleotide
  Antisense strand to SEQ ID NO: 500837
ugaucugggcacuaucugg

SEQ ID NO: 500839 - RNA, 19 nt, Artificial Sequence
  Description of Artificial Sequence: Synthetic oligonucleotide
  Sense strand starting at position 2653 of SEQ ID NO: 317644
acaggagacucagugugau

SEQ ID NO: 500840 - RNA, 19 nt, Artificial Sequence
  Description of Artificial Sequence: Synthetic oligonucleotide
  Antisense strand to SEQ ID NO: 500839
aucacacugagucuccugu

SEQ ID NO: 500841 - RNA, 19 nt, Artificial Sequence
  Description of Artificial Sequence: Synthetic oligonucleotide
  Sense strand starting at position 2724 of SEQ ID NO: 317644
uggaaucacaggugucuca

SEQ ID NO: 500842 - RNA, 19 nt, Artificial Sequence
  Description of Artificial Sequence: Synthetic oligonucleotide
  Antisense strand to SEQ ID NO: 500841
ugagacaccugugauucca

SEQ ID NO: 500843 - RNA, 19 nt, Artificial Sequence
  Description of Artificial Sequence: Synthetic oligonucleotide
  Sense strand starting at position 2745 of SEQ ID NO: 317644
aggaaaucaugaucuucgu

SEQ ID NO: 500844 - RNA, 19 nt, Artificial Sequence
  Description of Artificial Sequence: Synthetic oligonucleotide
  Antisense strand to SEQ ID NO: 500843
acgaagaucaugauuuccu

SEQ ID NO: 500845 - RNA, 19 nt, Artificial Sequence
  Description of Artificial Sequence: Synthetic oligonucleotide
  Sense strand starting at position 2887 of SEQ ID NO: 317644
gugucugccauugaaagga

SEQ ID NO: 500846 - RNA, 19 nt, Artificial Sequence
  Description of Artificial Sequence: Synthetic oligonucleotide
  Antisense strand to SEQ ID NO: 500845
uccuuucaauggcagacac

SEQ ID NO: 500847 - RNA, 19 nt, Artificial Sequence
  Description of Artificial Sequence: Synthetic oligonucleotide
  Sense strand starting at position 3545 of SEQ ID NO: 317644
guaacauggcuuugagaau

SEQ ID NO: 500848 - RNA, 19 nt, Artificial Sequence
  Description of Artificial Sequence: Synthetic oligonucleotide
  Antisense strand to SEQ ID NO: 500847
auucucaaagccauguuac

SEQ ID NO: 500849 - RNA, 19 nt, Artificial Sequence
  Description of Artificial Sequence: Synthetic oligonucleotide
  Sense strand starting at position 3681 of SEQ ID NO: 317644
cagauuggucuagggaggu

SEQ ID NO: 500850 - RNA, 19 nt, Artificial Sequence
  Description of Artificial Sequence: Synthetic oligonucleotide
  Antisense strand to SEQ ID NO: 500849
accucccuagaccaaucug

SEQ ID NO: 500851 - RNA, 19 nt, Artificial Sequence
  Description of Artificial Sequence: Synthetic oligonucleotide
  Sense strand starting at position 3719 of SEQ ID NO: 317644
aggccagugguucaacaga

SEQ ID NO: 500852 - RNA, 19 nt, Artificial Sequence
  Description of Artificial Sequence: Synthetic oligonucleotide
  Antisense strand to SEQ ID NO: 500851
ucuguugaaccacuggccu

SEQ ID NO: 500853 - RNA, 19 nt, Artificial Sequence
  Description of Artificial Sequence: Synthetic oligonucleotide
  Sense strand starting at position 3851 of SEQ ID NO: 317644
gagugaugucaugggacac

SEQ ID NO: 500854 - RNA, 19 nt, Artificial Sequence
  Description of Artificial Sequence: Synthetic oligonucleotide
  Antisense strand to SEQ ID NO: 500853
gugucccaugacaucacuc

SEQ ID NO: 500855 - RNA, 19 nt, Artificial Sequence
  Description of Artificial Sequence: Synthetic oligonucleotide
  Sense strand starting at position 3852 of SEQ ID NO: 317644
agugaugucaugggacaca

SEQ ID NO: 500856 - RNA, 19 nt, Artificial Sequence
  Description of Artificial Sequence: Synthetic oligonucleotide
  Antisense strand to SEQ ID NO: 500855
ugugucccaugacaucacu

SEQ ID NO: 500857 - RNA, 19 nt, Artificial Sequence
  Description of Artificial Sequence: Synthetic oligonucleotide
  Sense strand starting at position 3902 of SEQ ID NO: 317644
ccguuacucucccuacaga

SEQ ID NO: 500858 - RNA, 19 nt, Artificial Sequence
  Description of Artificial Sequence: Synthetic oligonucleotide
  Antisense strand to SEQ ID NO: 500857
ucuguagggagaguaacgg

SEQ ID NO: 500859 - RNA, 19 nt, Artificial Sequence
  Description of Artificial Sequence: Synthetic oligonucleotide
  Sense strand starting at position 3903 of SEQ ID NO: 317644
cguuacucucccuacagau

SEQ ID NO: 500860 - RNA, 19 nt, Artificial Sequence
  Description of Artificial Sequence: Synthetic oligonucleotide
  Antisense strand to SEQ ID NO: 500859
aucuguagggagaguaacg

SEQ ID NO: 500861 - RNA, 19 nt, Artificial Sequence
  Description of Artificial Sequence: Synthetic oligonucleotide
  Sense strand starting at position 3916 of SEQ ID NO: 317644
acagaugucucugcuacuu

SEQ ID NO: 500862 - RNA, 19 nt, Artificial Sequence
  Description of Artificial Sequence: Synthetic oligonucleotide
  Antisense strand to SEQ ID NO: 500861
aaguagcagagacaucugu

SEQ ID NO: 500863 - RNA, 19 nt, Artificial Sequence
  Description of Artificial Sequence: Synthetic oligonucleotide
  Sense strand starting at position 3921 of SEQ ID NO: 317644
ugucucugcuacuugugaa

SEQ ID NO: 500864 - RNA, 19 nt, Artificial Sequence
  Description of Artificial Sequence: Synthetic oligonucleotide
  Antisense strand to SEQ ID NO: 500863
uucacaaguagcagagaca

SEQ ID NO: 500865 - RNA, 19 nt, Artificial Sequence
  Description of Artificial Sequence: Synthetic oligonucleotide
  Sense strand starting at position 3974 of SEQ ID NO: 317644
cugauucuagcuuagccaa

SEQ ID NO: 500866 - RNA, 19 nt, Artificial Sequence
  Description of Artificial Sequence: Synthetic oligonucleotide
  Antisense strand to SEQ ID NO: 500865
uuggcuaagcuagaaucag

SEQ ID NO: 500867 - RNA, 19 nt, Artificial Sequence
  Description of Artificial Sequence: Synthetic oligonucleotide
  Sense strand starting at position 311 of SEQ ID NO: 317645
gucccuguggccuaacuua

SEQ ID NO: 500868 - RNA, 19 nt, Artificial Sequence
  Description of Artificial Sequence: Synthetic oligonucleotide
  Antisense strand to SEQ ID NO: 500867
uaaguuaggccacagggac

SEQ ID NO: 500869 - RNA, 19 nt, Artificial Sequence
  Description of Artificial Sequence: Synthetic oligonucleotide
  Sense strand starting at position 405 of SEQ ID NO: 317645
cuuagcauugguugaucaa

SEQ ID NO: 500870 - RNA, 19 nt, Artificial Sequence
  Description of Artificial Sequence: Synthetic oligonucleotide
  Antisense strand to SEQ ID NO: 500869
uugaucaaccaaugcuaag

SEQ ID NO: 500871 - RNA, 19 nt, Artificial Sequence
  Description of Artificial Sequence: Synthetic oligonucleotide
  Sense strand starting at position 406 of SEQ ID NO: 317645
uuagcauugguugaucaau

SEQ ID NO: 500872 - RNA, 19 nt, Artificial Sequence
  Description of Artificial Sequence: Synthetic oligonucleotide
  Antisense strand to SEQ ID NO: 500871
auugaucaaccaaugcuaa

SEQ ID NO: 500873 - RNA, 19 nt, Artificial Sequence
  Description of Artificial Sequence: Synthetic oligonucleotide
  Sense strand starting at position 408 of SEQ ID NO: 317645
agcauugguugaucaauua

SEQ ID NO: 500874 - RNA, 19 nt, Artificial Sequence
  Description of Artificial Sequence: Synthetic oligonucleotide
  Antisense strand to SEQ ID NO: 500873
uaauugaucaaccaaugcu

SEQ ID NO: 500875 - RNA, 19 nt, Artificial Sequence
  Description of Artificial Sequence: Synthetic oligonucleotide
  Sense strand starting at position 451 of SEQ ID NO: 317645
gccaaauauccaugugaca

SEQ ID NO: 500876 - RNA, 19 nt, Artificial Sequence
  Description of Artificial Sequence: Synthetic oligonucleotide
  Antisense strand to SEQ ID NO: 500875
ugucacauggauauuuggc

SEQ ID NO: 500877 - RNA, 19 nt, Artificial Sequence
  Description of Artificial Sequence: Synthetic oligonucleotide
  Sense strand starting at position 557 of SEQ ID NO: 317645
cguacaaagccucagguaa

SEQ ID NO: 500878 - RNA, 19 nt, Artificial Sequence
  Description of Artificial Sequence: Synthetic oligonucleotide
  Antisense strand to SEQ ID NO: 500877
uuaccugaggcuuuguacg

SEQ ID NO: 500879 - RNA, 19 nt, Artificial Sequence
  Description of Artificial Sequence: Synthetic oligonucleotide
  Sense strand starting at position 639 of SEQ ID NO: 317645
gauggugcuguuugaaugu

SEQ ID NO: 500880 - RNA, 19 nt, Artificial Sequence
  Description of Artificial Sequence: Synthetic oligonucleotide
  Antisense strand to SEQ ID NO: 500879
acauucaaacagcaccauc

SEQ ID NO: 500881 - RNA, 19 nt, Artificial Sequence
  Description of Artificial Sequence: Synthetic oligonucleotide
  Sense strand starting at position 645 of SEQ ID NO: 317645
gcuguuugaaugugagaua

SEQ ID NO: 500882 - RNA, 19 nt, Artificial Sequence
  Description of Artificial Sequence: Synthetic oligonucleotide
  Antisense strand to SEQ ID NO: 500881
uaucucacauucaaacagc

SEQ ID NO: 500883 - RNA, 19 nt, Artificial Sequence
  Description of Artificial Sequence: Synthetic oligonucleotide
  Sense strand starting at position 686 of SEQ ID NO: 317645
gagcauuugcuguggccua

SEQ ID NO: 500884 - RNA, 19 nt, Artificial Sequence
  Description of Artificial Sequence: Synthetic oligonucleotide
  Antisense strand to SEQ ID NO: 500883
uaggccacagcaaaugcuc

SEQ ID NO: 500885 - RNA, 19 nt, Artificial Sequence
  Description of Artificial Sequence: Synthetic oligonucleotide
  Sense strand starting at position 698 of SEQ ID NO: 317645
uggccuaggacagguuuaa

SEQ ID NO: 500886 - RNA, 19 nt, Artificial Sequence
  Description of Artificial Sequence: Synthetic oligonucleotide
  Antisense strand to SEQ ID NO: 500885
uuaaaccuguccuaggcca

SEQ ID NO: 500887 - RNA, 19 nt, Artificial Sequence
  Description of Artificial Sequence: Synthetic oligonucleotide
  Sense strand starting at position 716 of SEQ ID NO: 317645
aggccaauuuaaggaucaa

SEQ ID NO: 500888 - RNA, 19 nt, Artificial Sequence
  Description of Artificial Sequence: Synthetic oligonucleotide
  Antisense strand to SEQ ID NO: 500887
uugauccuuaaauuggccu

SEQ ID NO: 500889 - RNA, 19 nt, Artificial Sequence
  Description of Artificial Sequence: Synthetic oligonucleotide
  Sense strand starting at position 789 of SEQ ID NO: 317645
ggagauccuuuagugguau

SEQ ID NO: 500890 - RNA, 19 nt, Artificial Sequence
  Description of Artificial Sequence: Synthetic oligonucleotide
  Antisense strand to SEQ ID NO: 500889
auaccacuaaaggaucucc

SEQ ID NO: 500891 - RNA, 19 nt, Artificial Sequence
  Description of Artificial Sequence: Synthetic oligonucleotide
  Sense strand starting at position 801 of SEQ ID NO: 317645
gugguauuauacucuggag

SEQ ID NO: 500892 - RNA, 19 nt, Artificial Sequence
  Description of Artificial Sequence: Synthetic oligonucleotide
  Antisense strand to SEQ ID NO: 500891
cuccagaguauaauaccac

SEQ ID NO: 500893 - RNA, 19 nt, Artificial Sequence
  Description of Artificial Sequence: Synthetic oligonucleotide
  Sense strand starting at position 803 of SEQ ID NO: 317645
gguauuauacucuggagga

SEQ ID NO: 500894 - RNA, 19 nt, Artificial Sequence
  Description of Artificial Sequence: Synthetic oligonucleotide
  Antisense strand to SEQ ID NO: 500893
uccuccagaguauaauacc

SEQ ID NO: 500895 - RNA, 19 nt, Artificial Sequence
  Description of Artificial Sequence: Synthetic oligonucleotide
  Sense strand starting at position 969 of SEQ ID NO: 317645
uaagaagugcaguggugaa

SEQ ID NO: 500896 - RNA, 19 nt, Artificial Sequence
  Description of Artificial Sequence: Synthetic oligonucleotide
  Antisense strand to SEQ ID NO: 500895
uucaccacugcacuucuua

SEQ ID NO: 500897 - RNA, 19 nt, Artificial Sequence
  Description of Artificial Sequence: Synthetic oligonucleotide
  Sense strand starting at position 987 of SEQ ID NO: 317645
agcugacuccugugaggug

SEQ ID NO: 500898 - RNA, 19 nt, Artificial Sequence
  Description of Artificial Sequence: Synthetic oligonucleotide
  Antisense strand to SEQ ID NO: 500897
caccucacaggagucagcu

SEQ ID NO: 500899 - RNA, 19 nt, Artificial Sequence
  Description of Artificial Sequence: Synthetic oligonucleotide
  Sense strand starting at position 1062 of SEQ ID NO: 317645
ccaggugaacccuaccuua

SEQ ID NO: 500900 - RNA, 19 nt, Artificial Sequence
  Description of Artificial Sequence: Synthetic oligonucleotide
  Antisense strand to SEQ ID NO: 500899
uaagguaggguucaccugg

SEQ ID NO: 500901 - RNA, 19 nt, Artificial Sequence
  Description of Artificial Sequence: Synthetic oligonucleotide
  Sense strand starting at position 1089 of SEQ ID NO: 317645
uuguacucuggcugaagga

SEQ ID NO: 500902 - RNA, 19 nt, Artificial Sequence
  Description of Artificial Sequence: Synthetic oligonucleotide
  Antisense strand to SEQ ID NO: 500901
uccuucagccagaguacaa

SEQ ID NO: 500903 - RNA, 19 nt, Artificial Sequence
  Description of Artificial Sequence: Synthetic oligonucleotide
  Sense strand starting at position 1293 of SEQ ID NO: 317645
gguccuugccaucagggaa

SEQ ID NO: 500904 - RNA, 19 nt, Artificial Sequence
  Description of Artificial Sequence: Synthetic oligonucleotide
  Antisense strand to SEQ ID NO: 500903
uucccugauggcaaggacc

SEQ ID NO: 500905 - RNA, 19 nt, Artificial Sequence
  Description of Artificial Sequence: Synthetic oligonucleotide
  Sense strand starting at position 1580 of SEQ ID NO: 317645
cgggcacuuaccuacgaau

SEQ ID NO: 500906 - RNA, 19 nt, Artificial Sequence
  Description of Artificial Sequence: Synthetic oligonucleotide
  Antisense strand to SEQ ID NO: 500905
auucguagguaagugcccg

SEQ ID NO: 500907 - RNA, 19 nt, Artificial Sequence
  Description of Artificial Sequence: Synthetic oligonucleotide
  Sense strand starting at position 2167 of SEQ ID NO: 317645
gcgguuaccuguccuagga

SEQ ID NO: 500908 - RNA, 19 nt, Artificial Sequence
  Description of Artificial Sequence: Synthetic oligonucleotide
  Antisense strand to SEQ ID NO: 500907
uccuaggacagguaaccgc

SEQ ID NO: 500909 - RNA, 19 nt, Artificial Sequence
  Description of Artificial Sequence: Synthetic oligonucleotide
  Sense strand starting at position 2309 of SEQ ID NO: 317645
ucaccuaggcucugacaaa

SEQ ID NO: 500910 - RNA, 19 nt, Artificial Sequence
  Description of Artificial Sequence: Synthetic oligonucleotide
  Antisense strand to SEQ ID NO: 500909
uuugucagagccuagguga

SEQ ID NO: 500911 - RNA, 19 nt, Artificial Sequence
  Description of Artificial Sequence: Synthetic oligonucleotide
  Sense strand starting at position 2341 of SEQ ID NO: 317645
ccagauagugcccagauca

SEQ ID NO: 500912 - RNA, 19 nt, Artificial Sequence
  Description of Artificial Sequence: Synthetic oligonucleotide
  Antisense strand to SEQ ID NO: 500911
ugaucugggcacuaucugg

SEQ ID NO: 500913 - RNA, 19 nt, Artificial Sequence
  Description of Artificial Sequence: Synthetic oligonucleotide
  Sense strand starting at position 2401 of SEQ ID NO: 317645
acaggagacucagugugau

SEQ ID NO: 500914 - RNA, 19 nt, Artificial Sequence
  Description of Artificial Sequence: Synthetic oligonucleotide
  Antisense strand to SEQ ID NO: 500913
aucacacugagucuccugu

SEQ ID NO: 500915 - RNA, 19 nt, Artificial Sequence
  Description of Artificial Sequence: Synthetic oligonucleotide
  Sense strand starting at position 2472 of SEQ ID NO: 317645
uggaaucacaggugucuca

SEQ ID NO: 500916 - RNA, 19 nt, Artificial Sequence
  Description of Artificial Sequence: Synthetic oligonucleotide
  Antisense strand to SEQ ID NO: 500915
ugagacaccugugauucca

SEQ ID NO: 500917 - RNA, 19 nt, Artificial Sequence
  Description of Artificial Sequence: Synthetic oligonucleotide
  Sense strand starting at position 2493 of SEQ ID NO: 317645
aggaaaucaugaucuucgu

SEQ ID NO: 500918 - RNA, 19 nt, Artificial Sequence
  Description of Artificial Sequence: Synthetic oligonucleotide
  Antisense strand to SEQ ID NO: 500917
acgaagaucaugauuuccu

SEQ ID NO: 500919 - RNA, 19 nt, Artificial Sequence
  Description of Artificial Sequence: Synthetic oligonucleotide
  Sense strand starting at position 2635 of SEQ ID NO: 317645
gugucugccauugaaagga

SEQ ID NO: 500920 - RNA, 19 nt, Artificial Sequence
  Description of Artificial Sequence: Synthetic oligonucleotide
  Antisense strand to SEQ ID NO: 500919
uccuuucaauggcagacac

SEQ ID NO: 500921 - RNA, 19 nt, Artificial Sequence
  Description of Artificial Sequence: Synthetic oligonucleotide
  Sense strand starting at position 3293 of SEQ ID NO: 317645
guaacauggcuuugagaau

SEQ ID NO: 500922 - RNA, 19 nt, Artificial Sequence
  Description of Artificial Sequence: Synthetic oligonucleotide
  Antisense strand to SEQ ID NO: 500921
auucucaaagccauguuac

SEQ ID NO: 500923 - RNA, 19 nt, Artificial Sequence
  Description of Artificial Sequence: Synthetic oligonucleotide
  Sense strand starting at position 3429 of SEQ ID NO: 317645
cagauuggucuagggaggu

SEQ ID NO: 500924 - RNA, 19 nt, Artificial Sequence
  Description of Artificial Sequence: Synthetic oligonucleotide
  Antisense strand to SEQ ID NO: 500923
accucccuagaccaaucug

SEQ ID NO: 500925 - RNA, 19 nt, Artificial Sequence
  Description of Artificial Sequence: Synthetic oligonucleotide
  Sense strand starting at position 3467 of SEQ ID NO: 317645
aggccagugguucaacaga

SEQ ID NO: 500926 - RNA, 19 nt, Artificial Sequence
  Description of Artificial Sequence: Synthetic oligonucleotide
  Antisense strand to SEQ ID NO: 500925
ucuguugaaccacuggccu

SEQ ID NO: 500927 - RNA, 19 nt, Artificial Sequence
  Description of Artificial Sequence: Synthetic oligonucleotide
  Sense strand starting at position 3599 of SEQ ID NO: 317645
gagugaugucaugggacac

SEQ ID NO: 500928 - RNA, 19 nt, Artificial Sequence
  Description of Artificial Sequence: Synthetic oligonucleotide
  Antisense strand to SEQ ID NO: 500927
gugucccaugacaucacuc

SEQ ID NO: 500929 - RNA, 19 nt, Artificial Sequence
  Description of Artificial Sequence: Synthetic oligonucleotide
  Sense strand starting at position 3600 of SEQ ID NO: 317645
agugaugucaugggacaca

SEQ ID NO: 500930 - RNA, 19 nt, Artificial Sequence
  Description of Artificial Sequence: Synthetic oligonucleotide
  Antisense strand to SEQ ID NO: 500929
ugugucccaugacaucacu

SEQ ID NO: 500931 - RNA, 19 nt, Artificial Sequence
  Description of Artificial Sequence: Synthetic oligonucleotide
  Sense strand starting at position 3650 of SEQ ID NO: 317645
ccguuacucucccuacaga

SEQ ID NO: 500932 - RNA, 19 nt, Artificial Sequence
  Description of Artificial Sequence: Synthetic oligonucleotide
  Antisense strand to SEQ ID NO: 500931
ucuguagggagaguaacgg

SEQ ID NO: 500933 - RNA, 19 nt, Artificial Sequence
  Description of Artificial Sequence: Synthetic oligonucleotide
  Sense strand starting at position 3651 of SEQ ID NO: 317645
cguuacucucccuacagau

SEQ ID NO: 500934 - RNA, 19 nt, Artificial Sequence
  Description of Artificial Sequence: Synthetic oligonucleotide
  Antisense strand to SEQ ID NO: 500933
aucuguagggagaguaacg

SEQ ID NO: 500935 - RNA, 19 nt, Artificial Sequence
  Description of Artificial Sequence: Synthetic oligonucleotide
  Sense strand starting at position 3664 of SEQ ID NO: 317645
acagaugucucugcuacuu

SEQ ID NO: 500936 - RNA, 19 nt, Artificial Sequence
  Description of Artificial Sequence: Synthetic oligonucleotide
  Antisense strand to SEQ ID NO: 500935
aaguagcagagacaucugu

SEQ ID NO: 500937 - RNA, 19 nt, Artificial Sequence
  Description of Artificial Sequence: Synthetic oligonucleotide
  Sense strand starting at position 3669 of SEQ ID NO: 317645
ugucucugcuacuugugaa

SEQ ID NO: 500938 - RNA, 19 nt, Artificial Sequence
  Description of Artificial Sequence: Synthetic oligonucleotide
  Antisense strand to SEQ ID NO: 500937
uucacaaguagcagagaca

SEQ ID NO: 500939 - RNA, 19 nt, Artificial Sequence
  Description of Artificial Sequence: Synthetic oligonucleotide
  Sense strand starting at position 3722 of SEQ ID NO: 317645
cugauucuagcuuagccaa

SEQ ID NO: 500940 - RNA, 19 nt, Artificial Sequence
  Description of Artificial Sequence: Synthetic oligonucleotide
  Antisense strand to SEQ ID NO: 500939
uuggcuaagcuagaaucag

SEQ ID NO: 500941 - RNA, 19 nt, Artificial Sequence
  Description of Artificial Sequence: Synthetic oligonucleotide
  Sense strand starting at position 3851 of SEQ ID NO: 317645
uguuccuuccacugaguaa

SEQ ID NO: 500942 - RNA, 19 nt, Artificial Sequence
  Description of Artificial Sequence: Synthetic oligonucleotide
  Antisense strand to SEQ ID NO: 500941
uuacucaguggaaggaaca

SEQ ID NO: 500943 - RNA, 19 nt, Artificial Sequence
  Description of Artificial Sequence: Synthetic oligonucleotide
  Sense strand starting at position 3865 of SEQ ID NO: 317645
aguaaugggacuuguucuu

SEQ ID NO: 500944 - RNA, 19 nt, Artificial Sequence
  Description of Artificial Sequence: Synthetic oligonucleotide
  Antisense strand to SEQ ID NO: 500943
aagaacaagucccauuacu

SEQ ID NO: 500945 - RNA, 19 nt, Artificial Sequence
  Description of Artificial Sequence: Synthetic oligonucleotide
  Sense strand starting at position 3871 of SEQ ID NO: 317645
gggacuuguucuuuccugu

SEQ ID NO: 500946 - RNA, 19 nt, Artificial Sequence
  Description of Artificial Sequence: Synthetic oligonucleotide
  Antisense strand to SEQ ID NO: 500945
acaggaaagaacaaguccc

SEQ ID NO: 500947 - RNA, 19 nt, Artificial Sequence
  Description of Artificial Sequence: Synthetic oligonucleotide
  Sense strand starting at position 157 of SEQ ID NO: 317646
gucccuguggccuaacuua

SEQ ID NO: 500948 - RNA, 19 nt, Artificial Sequence
  Description of Artificial Sequence: Synthetic oligonucleotide
  Antisense strand to SEQ ID NO: 500947
uaaguuaggccacagggac

SEQ ID NO: 500949 - RNA, 19 nt, Artificial Sequence
  Description of Artificial Sequence: Synthetic oligonucleotide
  Sense strand starting at position 251 of SEQ ID NO: 317646
cuuagcauugguugaucaa

SEQ ID NO: 500950 - RNA, 19 nt, Artificial Sequence
  Description of Artificial Sequence: Synthetic oligonucleotide
  Antisense strand to SEQ ID NO: 500949
uugaucaaccaaugcuaag

SEQ ID NO: 500951 - RNA, 19 nt, Artificial Sequence
  Description of Artificial Sequence: Synthetic oligonucleotide
  Sense strand starting at position 252 of SEQ ID NO: 317646
uuagcauugguugaucaau

SEQ ID NO: 500952 - RNA, 19 nt, Artificial Sequence
  Description of Artificial Sequence: Synthetic oligonucleotide
  Antisense strand to SEQ ID NO: 500951
auugaucaaccaaugcuaa

SEQ ID NO: 500953 - RNA, 19 nt, Artificial Sequence
  Description of Artificial Sequence: Synthetic oligonucleotide
  Sense strand starting at position 254 of SEQ ID NO: 317646
agcauugguugaucaauua

SEQ ID NO: 500954 - RNA, 19 nt, Artificial Sequence
  Description of Artificial Sequence: Synthetic oligonucleotide
  Antisense strand to SEQ ID NO: 500953
uaauugaucaaccaaugcu

SEQ ID NO: 500955 - RNA, 19 nt, Artificial Sequence
  Description of Artificial Sequence: Synthetic oligonucleotide
  Sense strand starting at position 297 of SEQ ID NO: 317646
gccaaauauccaugugaca

SEQ ID NO: 500956 - RNA, 19 nt, Artificial Sequence
  Description of Artificial Sequence: Synthetic oligonucleotide
  Antisense strand to SEQ ID NO: 500955
ugucacauggauauuuggc

SEQ ID NO: 500957 - RNA, 19 nt, Artificial Sequence
  Description of Artificial Sequence: Synthetic oligonucleotide
  Sense strand starting at position 403 of SEQ ID NO: 317646
cguacaaagccucagguaa

SEQ ID NO: 500958 - RNA, 19 nt, Artificial Sequence
  Description of Artificial Sequence: Synthetic oligonucleotide
  Antisense strand to SEQ ID NO: 500957
uuaccugaggcuuuguacg

SEQ ID NO: 500959 - RNA, 19 nt, Artificial Sequence
  Description of Artificial Sequence: Synthetic oligonucleotide
  Sense strand starting at position 485 of SEQ ID NO: 317646
gauggugcuguuugaaugu

SEQ ID NO: 500960 - RNA, 19 nt, Artificial Sequence
  Description of Artificial Sequence: Synthetic oligonucleotide
  Antisense strand to SEQ ID NO: 500959
acauucaaacagcaccauc

SEQ ID NO: 500961 - RNA, 19 nt, Artificial Sequence
  Description of Artificial Sequence: Synthetic oligonucleotide
  Sense strand starting at position 491 of SEQ ID NO: 317646
gcuguuugaaugugagaua

SEQ ID NO: 500962 - RNA, 19 nt, Artificial Sequence
  Description of Artificial Sequence: Synthetic oligonucleotide
  Antisense strand to SEQ ID NO: 500961
uaucucacauucaaacagc

SEQ ID NO: 500963 - RNA, 19 nt, Artificial Sequence
  Description of Artificial Sequence: Synthetic oligonucleotide
  Sense strand starting at position 532 of SEQ ID NO: 317646
gagcauuugcuguggccua

SEQ ID NO: 500964 - RNA, 19 nt, Artificial Sequence
  Description of Artificial Sequence: Synthetic oligonucleotide
  Antisense strand to SEQ ID NO: 500963
uaggccacagcaaaugcuc

SEQ ID NO: 500965 - RNA, 19 nt, Artificial Sequence
  Description of Artificial Sequence: Synthetic oligonucleotide
  Sense strand starting at position 544 of SEQ ID NO: 317646
uggccuaggacagguuuaa

SEQ ID NO: 500966 - RNA, 19 nt, Artificial Sequence
  Description of Artificial Sequence: Synthetic oligonucleotide
  Antisense strand to SEQ ID NO: 500965
uuaaaccuguccuaggcca

SEQ ID NO: 500967 - RNA, 19 nt, Artificial Sequence
  Description of Artificial Sequence: Synthetic oligonucleotide
  Sense strand starting at position 562 of SEQ ID NO: 317646
aggccaauuuaaggaucaa

SEQ ID NO: 500968 - RNA, 19 nt, Artificial Sequence
  Description of Artificial Sequence: Synthetic oligonucleotide
  Antisense strand to SEQ ID NO: 500967
uugauccuuaaauuggccu

SEQ ID NO: 500969 - RNA, 19 nt, Artificial Sequence
  Description of Artificial Sequence: Synthetic oligonucleotide
  Sense strand starting at position 635 of SEQ ID NO: 317646
ggagauccuuuagugguau

SEQ ID NO: 500970 - RNA, 19 nt, Artificial Sequence
  Description of Artificial Sequence: Synthetic oligonucleotide
  Antisense strand to SEQ ID NO: 500969
auaccacuaaaggaucucc

SEQ ID NO: 500971 - RNA, 19 nt, Artificial Sequence
  Description of Artificial Sequence: Synthetic oligonucleotide
  Sense strand starting at position 647 of SEQ ID NO: 317646
gugguauuauacucuggag

SEQ ID NO: 500972 - RNA, 19 nt, Artificial Sequence
  Description of Artificial Sequence: Synthetic oligonucleotide
  Antisense strand to SEQ ID NO: 500971
cuccagaguauaauaccac

SEQ ID NO: 500973 - RNA, 19 nt, Artificial Sequence
  Description of Artificial Sequence: Synthetic oligonucleotide
  Sense strand starting at position 649 of SEQ ID NO: 317646
gguauuauacucuggagga

SEQ ID NO: 500974 - RNA, 19 nt, Artificial Sequence
  Description of Artificial Sequence: Synthetic oligonucleotide
  Antisense strand to SEQ ID NO: 500973
uccuccagaguauaauacc

SEQ ID NO: 500975 - RNA, 19 nt, Artificial Sequence
  Description of Artificial Sequence: Synthetic oligonucleotide
  Sense strand starting at position 815 of SEQ ID NO: 317646
uaagaagugcaguggugaa

SEQ ID NO: 500976 - RNA, 19 nt, Artificial Sequence
  Description of Artificial Sequence: Synthetic oligonucleotide
  Antisense strand to SEQ ID NO: 500975
uucaccacugcacuucuua

SEQ ID NO: 500977 - RNA, 19 nt, Artificial Sequence
  Description of Artificial Sequence: Synthetic oligonucleotide
  Sense strand starting at position 833 of SEQ ID NO: 317646
agcugacuccugugaggug

SEQ ID NO: 500978 - RNA, 19 nt, Artificial Sequence
  Description of Artificial Sequence: Synthetic oligonucleotide
  Antisense strand to SEQ ID NO: 500977
caccucacaggagucagcu

SEQ ID NO: 500979 - RNA, 19 nt, Artificial Sequence
  Description of Artificial Sequence: Synthetic oligonucleotide
  Sense strand starting at position 908 of SEQ ID NO: 317646
ccaggugaacccuaccuua

SEQ ID NO: 500980 - RNA, 19 nt, Artificial Sequence
  Description of Artificial Sequence: Synthetic oligonucleotide
  Antisense strand to SEQ ID NO: 500979
uaagguaggguucaccugg

SEQ ID NO: 500981 - RNA, 19 nt, Artificial Sequence
  Description of Artificial Sequence: Synthetic oligonucleotide
  Sense strand starting at position 935 of SEQ ID NO: 317646
uuguacucuggcugaagga

SEQ ID NO: 500982 - RNA, 19 nt, Artificial Sequence
  Description of Artificial Sequence: Synthetic oligonucleotide
  Antisense strand to SEQ ID NO: 500981
uccuucagccagaguacaa

SEQ ID NO: 500983 - RNA, 19 nt, Artificial Sequence
  Description of Artificial Sequence: Synthetic oligonucleotide
  Sense strand starting at position 1139 of SEQ ID NO: 317646
gguccuugccaucagggaa

SEQ ID NO: 500984 - RNA, 19 nt, Artificial Sequence
  Description of Artificial Sequence: Synthetic oligonucleotide
  Antisense strand to SEQ ID NO: 500983
uucccugauggcaaggacc

SEQ ID NO: 500985 - RNA, 19 nt, Artificial Sequence
  Description of Artificial Sequence: Synthetic oligonucleotide
  Sense strand starting at position 1426 of SEQ ID NO: 317646
cgggcacuuaccuacgaau

SEQ ID NO: 500986 - RNA, 19 nt, Artificial Sequence
  Description of Artificial Sequence: Synthetic oligonucleotide
  Antisense strand to SEQ ID NO: 500985
auucguagguaagugcccg

SEQ ID NO: 500987 - RNA, 19 nt, Artificial Sequence
  Description of Artificial Sequence: Synthetic oligonucleotide
  Sense strand starting at position 2155 of SEQ ID NO: 317646
ucaccuaggcucugacaaa

SEQ ID NO: 500988 - RNA, 19 nt, Artificial Sequence
  Description of Artificial Sequence: Synthetic oligonucleotide
  Antisense strand to SEQ ID NO: 500987
uuugucagagccuagguga

SEQ ID NO: 500989 - RNA, 19 nt, Artificial Sequence
  Description of Artificial Sequence: Synthetic oligonucleotide
  Sense strand starting at position 2187 of SEQ ID NO: 317646
ccagauagugcccagauca

SEQ ID NO: 500990 - RNA, 19 nt, Artificial Sequence
  Description of Artificial Sequence: Synthetic oligonucleotide
  Antisense strand to SEQ ID NO: 500989
ugaucugggcacuaucugg

SEQ ID NO: 500991 - RNA, 19 nt, Artificial Sequence
  Description of Artificial Sequence: Synthetic oligonucleotide
  Sense strand starting at position 2247 of SEQ ID NO: 317646
acaggagacucagugugau

SEQ ID NO: 500992 - RNA, 19 nt, Artificial Sequence
  Description of Artificial Sequence: Synthetic oligonucleotide
  Antisense strand to SEQ ID NO: 500991
aucacacugagucuccugu

SEQ ID NO: 500993 - RNA, 19 nt, Artificial Sequence
  Description of Artificial Sequence: Synthetic oligonucleotide
  Sense strand starting at position 2318 of SEQ ID NO: 317646
uggaaucacaggugucuca

SEQ ID NO: 500994 - RNA, 19 nt, Artificial Sequence
  Description of Artificial Sequence: Synthetic oligonucleotide
  Antisense strand to SEQ ID NO: 500993
ugagacaccugugauucca

SEQ ID NO: 500995 - RNA, 19 nt, Artificial Sequence
  Description of Artificial Sequence: Synthetic oligonucleotide
  Sense strand starting at position 2339 of SEQ ID NO: 317646
aggaaaucaugaucuucgu

SEQ ID NO: 500996 - RNA, 19 nt, Artificial Sequence
  Description of Artificial Sequence: Synthetic oligonucleotide
  Antisense strand to SEQ ID NO: 500995
acgaagaucaugauuuccu

SEQ ID NO: 500997 - RNA, 19 nt, Artificial Sequence
  Description of Artificial Sequence: Synthetic oligonucleotide
  Sense strand starting at position 2481 of SEQ ID NO: 317646
gugucugccauugaaagga

SEQ ID NO: 500998 - RNA, 19 nt, Artificial Sequence
  Description of Artificial Sequence: Synthetic oligonucleotide
  Antisense strand to SEQ ID NO: 500997
uccuuucaauggcagacac

SEQ ID NO: 500999 - RNA, 19 nt, Artificial Sequence
  Description of Artificial Sequence: Synthetic oligonucleotide
  Sense strand starting at position 3139 of SEQ ID NO: 317646
guaacauggcuuugagaau

SEQ ID NO: 501000 - RNA, 19 nt, Artificial Sequence
  Description of Artificial Sequence: Synthetic oligonucleotide
  Antisense strand to SEQ ID NO: 500999
auucucaaagccauguuac

SEQ ID NO: 501001 - RNA, 19 nt, Artificial Sequence
  Description of Artificial Sequence: Synthetic oligonucleotide
  Sense strand starting at position 3275 of SEQ ID NO: 317646
cagauuggucuagggaggu

SEQ ID NO: 501002 - RNA, 19 nt, Artificial Sequence
  Description of Artificial Sequence: Synthetic oligonucleotide
  Antisense strand to SEQ ID NO: 501001
accucccuagaccaaucug

SEQ ID NO: 501003 - RNA, 19 nt, Artificial Sequence
  Description of Artificial Sequence: Synthetic oligonucleotide
  Sense strand starting at position 3313 of SEQ ID NO: 317646
aggccagugguucaacaga

SEQ ID NO: 501004 - RNA, 19 nt, Artificial Sequence
  Description of Artificial Sequence: Synthetic oligonucleotide
  Antisense strand to SEQ ID NO: 501003
ucuguugaaccacuggccu

SEQ ID NO: 501005 - RNA, 19 nt, Artificial Sequence
  Description of Artificial Sequence: Synthetic oligonucleotide
  Sense strand starting at position 3445 of SEQ ID NO: 317646
gagugaugucaugggacac

SEQ ID NO: 501006 - RNA, 19 nt, Artificial Sequence
  Description of Artificial Sequence: Synthetic oligonucleotide
  Antisense strand to SEQ ID NO: 501005
gugucccaugacaucacuc

SEQ ID NO: 501007 - RNA, 19 nt, Artificial Sequence
  Description of Artificial Sequence: Synthetic oligonucleotide
  Sense strand starting at position 3446 of SEQ ID NO: 317646
agugaugucaugggacaca

SEQ ID NO: 501008 - RNA, 19 nt, Artificial Sequence
  Description of Artificial Sequence: Synthetic oligonucleotide
  Antisense strand to SEQ ID NO: 501007
ugugucccaugacaucacu

SEQ ID NO: 501009 - RNA, 19 nt, Artificial Sequence
  Description of Artificial Sequence: Synthetic oligonucleotide
  Sense strand starting at position 3496 of SEQ ID NO: 317646
ccguuacucucccuacaga

SEQ ID NO: 501010 - RNA, 19 nt, Artificial Sequence
  Description of Artificial Sequence: Synthetic oligonucleotide
  Antisense strand to SEQ ID NO: 501009
ucuguagggagaguaacgg

SEQ ID NO: 501011 - RNA, 19 nt, Artificial Sequence
  Description of Artificial Sequence: Synthetic oligonucleotide
  Sense strand starting at position 3497 of SEQ ID NO: 317646
cguuacucucccuacagau

SEQ ID NO: 501012 - RNA, 19 nt, Artificial Sequence
  Description of Artificial Sequence: Synthetic oligonucleotide
  Antisense strand to SEQ ID NO: 501011
aucuguagggagaguaacg

SEQ ID NO: 501013 - RNA, 19 nt, Artificial Sequence
  Description of Artificial Sequence: Synthetic oligonucleotide
  Sense strand starting at position 3510 of SEQ ID NO: 317646
acagaugucucugcuacuu

SEQ ID NO: 501014 - RNA, 19 nt, Artificial Sequence
  Description of Artificial Sequence: Synthetic oligonucleotide
  Antisense strand to SEQ ID NO: 501013
aaguagcagagacaucugu

SEQ ID NO: 501015 - RNA, 19 nt, Artificial Sequence
  Description of Artificial Sequence: Synthetic oligonucleotide
  Sense strand starting at position 3515 of SEQ ID NO: 317646
ugucucugcuacuugugaa

SEQ ID NO: 501016 - RNA, 19 nt, Artificial Sequence
  Description of Artificial Sequence: Synthetic oligonucleotide
  Antisense strand to SEQ ID NO: 501015
uucacaaguagcagagaca

SEQ ID NO: 501017 - RNA, 19 nt, Artificial Sequence
  Description of Artificial Sequence: Synthetic oligonucleotide
  Sense strand starting at position 3568 of SEQ ID NO: 317646
cugauucuagcuuagccaa

SEQ ID NO: 501018 - RNA, 19 nt, Artificial Sequence
  Description of Artificial Sequence: Synthetic oligonucleotide
  Antisense strand to SEQ ID NO: 501017
uuggcuaagcuagaaucag

SEQ ID NO: 501019 - RNA, 19 nt, Artificial Sequence
  Description of Artificial Sequence: Synthetic oligonucleotide
  Sense strand starting at position 3697 of SEQ ID NO: 317646
uguuccuuccacugaguaa

SEQ ID NO: 501020 - RNA, 19 nt, Artificial Sequence
  Description of Artificial Sequence: Synthetic oligonucleotide
  Antisense strand to SEQ ID NO: 501019
uuacucaguggaaggaaca

SEQ ID NO: 501021 - RNA, 19 nt, Artificial Sequence
  Description of Artificial Sequence: Synthetic oligonucleotide
  Sense strand starting at position 3711 of SEQ ID NO: 317646
aguaaugggacuuguucuu

SEQ ID NO: 501022 - RNA, 19 nt, Artificial Sequence
  Description of Artificial Sequence: Synthetic oligonucleotide
  Antisense strand to SEQ ID NO: 501021
aagaacaagucccauuacu

SEQ ID NO: 501023 - RNA, 19 nt, Artificial Sequence
  Description of Artificial Sequence: Synthetic oligonucleotide
  Sense strand starting at position 3717 of SEQ ID NO: 317646
gggacuuguucuuuccugu

SEQ ID NO: 501024 - RNA, 19 nt, Artificial Sequence
  Description of Artificial Sequence: Synthetic oligonucleotide
  Antisense strand to SEQ ID NO: 501023
acaggaaagaacaaguccc

SEQ ID NO: 501025 - RNA, 19 nt, Artificial Sequence
  Description of Artificial Sequence: Synthetic oligonucleotide
  Sense strand starting at position 3833 of SEQ ID NO: 317646
ggguguggcauccauggaa

SEQ ID NO: 501026 - RNA, 19 nt, Artificial Sequence
  Description of Artificial Sequence: Synthetic oligonucleotide
  Antisense strand to SEQ ID NO: 501025
uuccauggaugccacaccc

SEQ ID NO: 501027 - RNA, 19 nt, Artificial Sequence
  Description of Artificial Sequence: Synthetic oligonucleotide
  Sense strand starting at position 113 of SEQ ID NO: 317647
gucucauuaugcuuauuua

SEQ ID NO: 501028 - RNA, 19 nt, Artificial Sequence
  Description of Artificial Sequence: Synthetic oligonucleotide
  Antisense strand to SEQ ID NO: 501027
uaaauaagcauaaugagac

SEQ ID NO: 501029 - RNA, 19 nt, Artificial Sequence
  Description of Artificial Sequence: Synthetic oligonucleotide
  Sense strand starting at position 415 of SEQ ID NO: 317647
uuuagcgagaacuaaguuu

SEQ ID NO: 501030 - RNA, 19 nt, Artificial Sequence
  Description of Artificial Sequence: Synthetic oligonucleotide
  Antisense strand to SEQ ID NO: 501029
aaacuuaguucucgcuaaa

SEQ ID NO: 501031 - RNA, 19 nt, Artificial Sequence
  Description of Artificial Sequence: Synthetic oligonucleotide
  Sense strand starting at position 599 of SEQ ID NO: 317647
ugguuaucuggguaagagc

SEQ ID NO: 501032 - RNA, 19 nt, Artificial Sequence
  Description of Artificial Sequence: Synthetic oligonucleotide
  Antisense strand to SEQ ID NO: 501031
gcucuuacccagauaacca

SEQ ID NO: 501033 - RNA, 19 nt, Artificial Sequence
  Description of Artificial Sequence: Synthetic oligonucleotide
  Sense strand starting at position 647 of SEQ ID NO: 317647
gcugguuuacacuaggaag

SEQ ID NO: 501034 - RNA, 19 nt, Artificial Sequence
  Description of Artificial Sequence: Synthetic oligonucleotide
  Antisense strand to SEQ ID NO: 501033
cuuccuaguguaaaccagc

SEQ ID NO: 501035 - RNA, 19 nt, Artificial Sequence
  Description of Artificial Sequence: Synthetic oligonucleotide
  Sense strand starting at position 668 of SEQ ID NO: 317647
ugacguauuuaccucgauu

SEQ ID NO: 501036 - RNA, 19 nt, Artificial Sequence
  Description of Artificial Sequence: Synthetic oligonucleotide
  Antisense strand to SEQ ID NO: 501035
aaucgagguaaauacguca

SEQ ID NO: 501037 - RNA, 19 nt, Artificial Sequence
  Description of Artificial Sequence: Synthetic oligonucleotide
  Sense strand starting at position 670 of SEQ ID NO: 317647
acguauuuaccucgauucu

SEQ ID NO: 501038 - RNA, 19 nt, Artificial Sequence
  Description of Artificial Sequence: Synthetic oligonucleotide
  Antisense strand to SEQ ID NO: 501037
agaaucgagguaaauacgu

SEQ ID NO: 501039 - RNA, 19 nt, Artificial Sequence
  Description of Artificial Sequence: Synthetic oligonucleotide
  Sense strand starting at position 740 of SEQ ID NO: 317647
auguaagcccacuaauaug

SEQ ID NO: 501040 - RNA, 19 nt, Artificial Sequence
  Description of Artificial Sequence: Synthetic oligonucleotide
  Antisense strand to SEQ ID NO: 501039
cauauuagugggcuuacau

SEQ ID NO: 501041 - RNA, 19 nt, Artificial Sequence
  Description of Artificial Sequence: Synthetic oligonucleotide
  Sense strand starting at position 985 of SEQ ID NO: 317647
gugcucccuccagauaaca

SEQ ID NO: 501042 - RNA, 19 nt, Artificial Sequence
  Description of Artificial Sequence: Synthetic oligonucleotide
  Antisense strand to SEQ ID NO: 501041
uguuaucuggagggagcac

SEQ ID NO: 501043 - RNA, 19 nt, Artificial Sequence
  Description of Artificial Sequence: Synthetic oligonucleotide
  Sense strand starting at position 1062 of SEQ ID NO: 317647
gguugucucauggauccca

SEQ ID NO: 501044 - RNA, 19 nt, Artificial Sequence
  Description of Artificial Sequence: Synthetic oligonucleotide
  Antisense strand to SEQ ID NO: 501043
ugggauccaugagacaacc

SEQ ID NO: 501045 - RNA, 19 nt, Artificial Sequence
  Description of Artificial Sequence: Synthetic oligonucleotide
  Sense strand starting at position 1082 of SEQ ID NO: 317647
uggacucaaugcccagaaa

SEQ ID NO: 501046 - RNA, 19 nt, Artificial Sequence
  Description of Artificial Sequence: Synthetic oligonucleotide
  Antisense strand to SEQ ID NO: 501045
uuucugggcauugagucca

SEQ ID NO: 501047 - RNA, 19 nt, Artificial Sequence
  Description of Artificial Sequence: Synthetic oligonucleotide
  Sense strand starting at position 1329 of SEQ ID NO: 317647
gagguaaucagucaggucu

SEQ ID NO: 501048 - RNA, 19 nt, Artificial Sequence
  Description of Artificial Sequence: Synthetic oligonucleotide
  Antisense strand to SEQ ID NO: 501047
agaccugacugauuaccuc

SEQ ID NO: 501049 - RNA, 19 nt, Artificial Sequence
  Description of Artificial Sequence: Synthetic oligonucleotide
  Sense strand starting at position 1512 of SEQ ID NO: 317647
guugaaagccucgaacaug

SEQ ID NO: 501050 - RNA, 19 nt, Artificial Sequence
  Description of Artificial Sequence: Synthetic oligonucleotide
  Antisense strand to SEQ ID NO: 501049
cauguucgaggcuuucaac

SEQ ID NO: 501051 - RNA, 19 nt, Artificial Sequence
  Description of Artificial Sequence: Synthetic oligonucleotide
  Sense strand starting at position 1673 of SEQ ID NO: 317647
cuccaugcucgauaggaua

SEQ ID NO: 501052 - RNA, 19 nt, Artificial Sequence
  Description of Artificial Sequence: Synthetic oligonucleotide
  Antisense strand to SEQ ID NO: 501051
uauccuaucgagcauggag

SEQ ID NO: 501053 - RNA, 19 nt, Artificial Sequence
  Description of Artificial Sequence: Synthetic oligonucleotide
  Sense strand starting at position 1817 of SEQ ID NO: 317647
gggcaucgucaccaccaaa

SEQ ID NO: 501054 - RNA, 19 nt, Artificial Sequence
  Description of Artificial Sequence: Synthetic oligonucleotide
  Antisense strand to SEQ ID NO: 501053
uuugguggugacgaugccc

SEQ ID NO: 501055 - RNA, 19 nt, Artificial Sequence
  Description of Artificial Sequence: Synthetic oligonucleotide
  Sense strand starting at position 1908 of SEQ ID NO: 317647
ugagaucuuccagacgagu

SEQ ID NO: 501056 - RNA, 19 nt, Artificial Sequence
  Description of Artificial Sequence: Synthetic oligonucleotide
  Antisense strand to SEQ ID NO: 501055
acucgucuggaagaucuca

SEQ ID NO: 501057 - RNA, 19 nt, Artificial Sequence
  Description of Artificial Sequence: Synthetic oligonucleotide
  Sense strand starting at position 1910 of SEQ ID NO: 317647
agaucuuccagacgaguga

SEQ ID NO: 501058 - RNA, 19 nt, Artificial Sequence
  Description of Artificial Sequence: Synthetic oligonucleotide
  Antisense strand to SEQ ID NO: 501057
ucacucgucuggaagaucu

SEQ ID NO: 501059 - RNA, 19 nt, Artificial Sequence
  Description of Artificial Sequence: Synthetic oligonucleotide
  Sense strand starting at position 1938 of SEQ ID NO: 317647
gugaauagacagugaguaa

SEQ ID NO: 501060 - RNA, 19 nt, Artificial Sequence
  Description of Artificial Sequence: Synthetic oligonucleotide
  Antisense strand to SEQ ID NO: 501059
uuacucacugucuauucac

SEQ ID NO: 501061 - RNA, 19 nt, Artificial Sequence
  Description of Artificial Sequence: Synthetic oligonucleotide
  Sense strand starting at position 2230 of SEQ ID NO: 317647
uggugaggucucuagauaa

SEQ ID NO: 501062 - RNA, 19 nt, Artificial Sequence
  Description of Artificial Sequence: Synthetic oligonucleotide
  Antisense strand to SEQ ID NO: 501061
uuaucuagagaccucacca

SEQ ID NO: 501063 - RNA, 19 nt, Artificial Sequence
  Description of Artificial Sequence: Synthetic oligonucleotide
  Sense strand starting at position 2237 of SEQ ID NO: 317647
gucucuagauaacuaugau

SEQ ID NO: 501064 - RNA, 19 nt, Artificial Sequence
  Description of Artificial Sequence: Synthetic oligonucleotide
  Antisense strand to SEQ ID NO: 501063
aucauaguuaucuagagac

SEQ ID NO: 501065 - RNA, 19 nt, Artificial Sequence
  Description of Artificial Sequence: Synthetic oligonucleotide
  Sense strand starting at position 2321 of SEQ ID NO: 317647
gaggaaggcucccuccuua

SEQ ID NO: 501066 - RNA, 19 nt, Artificial Sequence
  Description of Artificial Sequence: Synthetic oligonucleotide
  Antisense strand to SEQ ID NO: 501065
uaaggagggagccuuccuc

SEQ ID NO: 501067 - RNA, 19 nt, Artificial Sequence
  Description of Artificial Sequence: Synthetic oligonucleotide
  Sense strand starting at position 2387 of SEQ ID NO: 317647
uuaagauacuguucugaug

SEQ ID NO: 501068 - RNA, 19 nt, Artificial Sequence
  Description of Artificial Sequence: Synthetic oligonucleotide
  Antisense strand to SEQ ID NO: 501067
caucagaacaguaucuuaa

SEQ ID NO: 501069 - RNA, 19 nt, Artificial Sequence
  Description of Artificial Sequence: Synthetic oligonucleotide
  Sense strand starting at position 2621 of SEQ ID NO: 317647
auagaaugauugcuaaagu

SEQ ID NO: 501070 - RNA, 19 nt, Artificial Sequence
  Description of Artificial Sequence: Synthetic oligonucleotide
  Antisense strand to SEQ ID NO: 501069
acuuuagcaaucauucuau

SEQ ID NO: 501071 - RNA, 19 nt, Artificial Sequence
  Description of Artificial Sequence: Synthetic oligonucleotide
  Sense strand starting at position 2752 of SEQ ID NO: 317647
uuguauaaugacugaaugu

SEQ ID NO: 501072 - RNA, 19 nt, Artificial Sequence
  Description of Artificial Sequence: Synthetic oligonucleotide
  Antisense strand to SEQ ID NO: 501071
acauucagucauuauacaa

SEQ ID NO: 501073 - RNA, 19 nt, Artificial Sequence
  Description of Artificial Sequence: Synthetic oligonucleotide
  Sense strand starting at position 2789 of SEQ ID NO: 317647
uauuaagaugcagguuaua

SEQ ID NO: 501074 - RNA, 19 nt, Artificial Sequence
  Description of Artificial Sequence: Synthetic oligonucleotide
  Antisense strand to SEQ ID NO: 501073
uauaaccugcaucuuaaua

SEQ ID NO: 501075 - RNA, 19 nt, Artificial Sequence
  Description of Artificial Sequence: Synthetic oligonucleotide
  Sense strand starting at position 2823 of SEQ ID NO: 317647
gcaacaacucuugaguucu

SEQ ID NO: 501076 - RNA, 19 nt, Artificial Sequence
  Description of Artificial Sequence: Synthetic oligonucleotide
  Antisense strand to SEQ ID NO: 501075
agaacucaagaguuguugc

SEQ ID NO: 501077 - RNA, 19 nt, Artificial Sequence
  Description of Artificial Sequence: Synthetic oligonucleotide
  Sense strand starting at position 2831 of SEQ ID NO: 317647
ucuugaguucugcaacaau

SEQ ID NO: 501078 - RNA, 19 nt, Artificial Sequence
  Description of Artificial Sequence: Synthetic oligonucleotide
  Antisense strand to SEQ ID NO: 501077
auuguugcagaacucaaga

SEQ ID NO: 501079 - RNA, 19 nt, Artificial Sequence
  Description of Artificial Sequence: Synthetic oligonucleotide
  Sense strand starting at position 2834 of SEQ ID NO: 317647
ugaguucugcaacaaugga

SEQ ID NO: 501080 - RNA, 19 nt, Artificial Sequence
  Description of Artificial Sequence: Synthetic oligonucleotide
  Antisense strand to SEQ ID NO: 501079
uccauuguugcagaacuca

SEQ ID NO: 501081 - RNA, 19 nt, Artificial Sequence
  Description of Artificial Sequence: Synthetic oligonucleotide
  Sense strand starting at position 3041 of SEQ ID NO: 317647
gcaacaauuuguuuggguu

SEQ ID NO: 501082 - RNA, 19 nt, Artificial Sequence
  Description of Artificial Sequence: Synthetic oligonucleotide
  Antisense strand to SEQ ID NO: 501081
aacccaaacaaauuguugc

SEQ ID NO: 501083 - RNA, 19 nt, Artificial Sequence
  Description of Artificial Sequence: Synthetic oligonucleotide
  Sense strand starting at position 3182 of SEQ ID NO: 317647
guguuaggcgaauagaaua

SEQ ID NO: 501084 - RNA, 19 nt, Artificial Sequence
  Description of Artificial Sequence: Synthetic oligonucleotide
  Antisense strand to SEQ ID NO: 501083
uauucuauucgccuaacac

SEQ ID NO: 501085 - RNA, 19 nt, Artificial Sequence
  Description of Artificial Sequence: Synthetic oligonucleotide
  Sense strand starting at position 3237 of SEQ ID NO: 317647
uuuccaugucuacaucuga

SEQ ID NO: 501086 - RNA, 19 nt, Artificial Sequence
  Description of Artificial Sequence: Synthetic oligonucleotide
  Antisense strand to SEQ ID NO: 501085
ucagauguagacauggaaa

SEQ ID NO: 501087 - RNA, 19 nt, Artificial Sequence
  Description of Artificial Sequence: Synthetic oligonucleotide
  Sense strand starting at position 3315 of SEQ ID NO: 317647
cuuuguaagagguagcaca

SEQ ID NO: 501088 - RNA, 19 nt, Artificial Sequence
  Description of Artificial Sequence: Synthetic oligonucleotide
  Antisense strand to SEQ ID NO: 501087
ugugcuaccucuuacaaag

SEQ ID NO: 501089 - RNA, 19 nt, Artificial Sequence
  Description of Artificial Sequence: Synthetic oligonucleotide
  Sense strand starting at position 3377 of SEQ ID NO: 317647
ggagaacuaaccugagucu

SEQ ID NO: 501090 - RNA, 19 nt, Artificial Sequence
  Description of Artificial Sequence: Synthetic oligonucleotide
  Antisense strand to SEQ ID NO: 501089
agacucagguuaguucucc

SEQ ID NO: 501091 - RNA, 19 nt, Artificial Sequence
  Description of Artificial Sequence: Synthetic oligonucleotide
  Sense strand starting at position 3380 of SEQ ID NO: 317647
gaacuaaccugagucuuug

SEQ ID NO: 501092 - RNA, 19 nt, Artificial Sequence
  Description of Artificial Sequence: Synthetic oligonucleotide
  Antisense strand to SEQ ID NO: 501091
caaagacucagguuaguuc

SEQ ID NO: 501093 - RNA, 19 nt, Artificial Sequence
  Description of Artificial Sequence: Synthetic oligonucleotide
  Sense strand starting at position 3405 of SEQ ID NO: 317647
gagccucuuggagagucau

SEQ ID NO: 501094 - RNA, 19 nt, Artificial Sequence
  Description of Artificial Sequence: Synthetic oligonucleotide
  Antisense strand to SEQ ID NO: 501093
augacucuccaagaggcuc

SEQ ID NO: 501095 - RNA, 19 nt, Artificial Sequence
  Description of Artificial Sequence: Synthetic oligonucleotide
  Sense strand starting at position 3462 of SEQ ID NO: 317647
ugucuauagcuugauauag

SEQ ID NO: 501096 - RNA, 19 nt, Artificial Sequence
  Description of Artificial Sequence: Synthetic oligonucleotide
  Antisense strand to SEQ ID NO: 501095
cuauaucaagcuauagaca

SEQ ID NO: 501097 - RNA, 19 nt, Artificial Sequence
  Description of Artificial Sequence: Synthetic oligonucleotide
  Sense strand starting at position 3525 of SEQ ID NO: 317647
gugacaaucagucauggca

SEQ ID NO: 501098 - RNA, 19 nt, Artificial Sequence
  Description of Artificial Sequence: Synthetic oligonucleotide
  Antisense strand to SEQ ID NO: 501097
ugccaugacugauugucac

SEQ ID NO: 501099 - RNA, 19 nt, Artificial Sequence
  Description of Artificial Sequence: Synthetic oligonucleotide
  Sense strand starting at position 3528 of SEQ ID NO: 317647
acaaucagucauggcagaa

SEQ ID NO: 501100 - RNA, 19 nt, Artificial Sequence
  Description of Artificial Sequence: Synthetic oligonucleotide
  Antisense strand to SEQ ID NO: 501099
uucugccaugacugauugu

SEQ ID NO: 501101 - RNA, 19 nt, Artificial Sequence
  Description of Artificial Sequence: Synthetic oligonucleotide
  Sense strand starting at position 3532 of SEQ ID NO: 317647
ucagucauggcagaaugua

SEQ ID NO: 501102 - RNA, 19 nt, Artificial Sequence
  Description of Artificial Sequence: Synthetic oligonucleotide
  Antisense strand to SEQ ID NO: 501101
uacauucugccaugacuga

SEQ ID NO: 501103 - RNA, 19 nt, Artificial Sequence
  Description of Artificial Sequence: Synthetic oligonucleotide
  Sense strand starting at position 3576 of SEQ ID NO: 317647
ugcuuuagggcucaccaaa

SEQ ID NO: 501104 - RNA, 19 nt, Artificial Sequence
  Description of Artificial Sequence: Synthetic oligonucleotide
  Antisense strand to SEQ ID NO: 501103
uuuggugagcccuaaagca

SEQ ID NO: 501105 - RNA, 19 nt, Artificial Sequence
  Description of Artificial Sequence: Synthetic oligonucleotide
  Sense strand starting at position 3977 of SEQ ID NO: 317647
agggauauuugguacugag

SEQ ID NO: 501106 - RNA, 19 nt, Artificial Sequence
  Description of Artificial Sequence: Synthetic oligonucleotide
  Antisense strand to SEQ ID NO: 501105
cucaguaccaaauaucccu

SEQ ID NO: 501107 - RNA, 19 nt, Artificial Sequence
  Description of Artificial Sequence: Synthetic oligonucleotide
  Sense strand starting at position 132 of SEQ ID NO: 317648
ugaauaaaucuuggccaca

SEQ ID NO: 501108 - RNA, 19 nt, Artificial Sequence
  Description of Artificial Sequence: Synthetic oligonucleotide
  Antisense strand to SEQ ID NO: 501107
uguggccaagauuuauuca

SEQ ID NO: 501109 - RNA, 19 nt, Artificial Sequence
  Description of Artificial Sequence: Synthetic oligonucleotide
  Sense strand starting at position 150 of SEQ ID NO: 317648
auuuguaugagucguguuu

SEQ ID NO: 501110 - RNA, 19 nt, Artificial Sequence
  Description of Artificial Sequence: Synthetic oligonucleotide
  Antisense strand to SEQ ID NO: 501109
aaacacgacucauacaaau

SEQ ID NO: 501111 - RNA, 19 nt, Artificial Sequence
  Description of Artificial Sequence: Synthetic oligonucleotide
  Sense strand starting at position 214 of SEQ ID NO: 317648
cagagaauuugaugaugug

SEQ ID NO: 501112 - RNA, 19 nt, Artificial Sequence
  Description of Artificial Sequence: Synthetic oligonucleotide
  Antisense strand to SEQ ID NO: 501111
cacaucaucaaauucucug

SEQ ID NO: 501113 - RNA, 19 nt, Artificial Sequence
  Description of Artificial Sequence: Synthetic oligonucleotide
  Sense strand starting at position 276 of SEQ ID NO: 317648
uguacuuauggguaugguu

SEQ ID NO: 501114 - RNA, 19 nt, Artificial Sequence
  Description of Artificial Sequence: Synthetic oligonucleotide
  Antisense strand to SEQ ID NO: 501113
aaccauacccauaaguaca

SEQ ID NO: 501115 - RNA, 19 nt, Artificial Sequence
  Description of Artificial Sequence: Synthetic oligonucleotide
  Sense strand starting at position 424 of SEQ ID NO: 317648
gauauucuacagcaagugu

SEQ ID NO: 501116 - RNA, 19 nt, Artificial Sequence
  Description of Artificial Sequence: Synthetic oligonucleotide
  Antisense strand to SEQ ID NO: 501115
acacuugcuguagaauauc

SEQ ID NO: 501117 - RNA, 19 nt, Artificial Sequence
  Description of Artificial Sequence: Synthetic oligonucleotide
  Sense strand starting at position 435 of SEQ ID NO: 317648
gcaaguguucuccaaggac

SEQ ID NO: 501118 - RNA, 19 nt, Artificial Sequence
  Description of Artificial Sequence: Synthetic oligonucleotide
  Antisense strand to SEQ ID NO: 501117
guccuuggagaacacuugc

SEQ ID NO: 501119 - RNA, 19 nt, Artificial Sequence
  Description of Artificial Sequence: Synthetic oligonucleotide
  Sense strand starting at position 438 of SEQ ID NO: 317648
aguguucuccaaggacuca

SEQ ID NO: 501120 - RNA, 19 nt, Artificial Sequence
  Description of Artificial Sequence: Synthetic oligonucleotide
  Antisense strand to SEQ ID NO: 501119
ugaguccuuggagaacacu

SEQ ID NO: 501121 - RNA, 19 nt, Artificial Sequence
  Description of Artificial Sequence: Synthetic oligonucleotide
  Sense strand starting at position 738 of SEQ ID NO: 317648
cggugcucgcucuauuuga

SEQ ID NO: 501122 - RNA, 19 nt, Artificial Sequence
  Description of Artificial Sequence: Synthetic oligonucleotide
  Antisense strand to SEQ ID NO: 501121
ucaaauagagcgagcaccg

SEQ ID NO: 501123 - RNA, 19 nt, Artificial Sequence
  Description of Artificial Sequence: Synthetic oligonucleotide
  Sense strand starting at position 833 of SEQ ID NO: 317648
gccuucuccggucauaaug

SEQ ID NO: 501124 - RNA, 19 nt, Artificial Sequence
  Description of Artificial Sequence: Synthetic oligonucleotide
  Antisense strand to SEQ ID NO: 501123
cauuaugaccggagaaggc

SEQ ID NO: 501125 - RNA, 19 nt, Artificial Sequence
  Description of Artificial Sequence: Synthetic oligonucleotide
  Sense strand starting at position 931 of SEQ ID NO: 317648
gggauuggugucugggaaa

SEQ ID NO: 501126 - RNA, 19 nt, Artificial Sequence
  Description of Artificial Sequence: Synthetic oligonucleotide
  Antisense strand to SEQ ID NO: 501125
uuucccagacaccaauccc

SEQ ID NO: 501127 - RNA, 19 nt, Artificial Sequence
  Description of Artificial Sequence: Synthetic oligonucleotide
  Sense strand starting at position 968 of SEQ ID NO: 317648
gacaucacccggcaucuua

SEQ ID NO: 501128 - RNA, 19 nt, Artificial Sequence
  Description of Artificial Sequence: Synthetic oligonucleotide
  Antisense strand to SEQ ID NO: 501127
uaagaugccgggugauguc

SEQ ID NO: 501129 - RNA, 19 nt, Artificial Sequence
  Description of Artificial Sequence: Synthetic oligonucleotide
  Sense strand starting at position 976 of SEQ ID NO: 317648
ccggcaucuuagcuggaaa

SEQ ID NO: 501130 - RNA, 19 nt, Artificial Sequence
  Description of Artificial Sequence: Synthetic oligonucleotide
  Antisense strand to SEQ ID NO: 501129
uuuccagcuaagaugccgg

SEQ ID NO: 501131 - RNA, 19 nt, Artificial Sequence
  Description of Artificial Sequence: Synthetic oligonucleotide
  Sense strand starting at position 977 of SEQ ID NO: 317648
cggcaucuuagcuggaaac

SEQ ID NO: 501132 - RNA, 19 nt, Artificial Sequence
  Description of Artificial Sequence: Synthetic oligonucleotide
  Antisense strand to SEQ ID NO: 501131
guuuccagcuaagaugccg

SEQ ID NO: 501133 - RNA, 19 nt, Artificial Sequence
  Description of Artificial Sequence: Synthetic oligonucleotide
  Sense strand starting at position 978 of SEQ ID NO: 317648
ggcaucuuagcuggaaaca

SEQ ID NO: 501134 - RNA, 19 nt, Artificial Sequence
  Description of Artificial Sequence: Synthetic oligonucleotide
  Antisense strand to SEQ ID NO: 501133
uguuuccagcuaagaugcc

SEQ ID NO: 501135 - RNA, 19 nt, Artificial Sequence
  Description of Artificial Sequence: Synthetic oligonucleotide
  Sense strand starting at position 979 of SEQ ID NO: 317648
gcaucuuagcuggaaacau

SEQ ID NO: 501136 - RNA, 19 nt, Artificial Sequence
  Description of Artificial Sequence: Synthetic oligonucleotide
  Antisense strand to SEQ ID NO: 501135
auguuuccagcuaagaugc

SEQ ID NO: 501137 - RNA, 19 nt, Artificial Sequence
  Description of Artificial Sequence: Synthetic oligonucleotide
  Sense strand starting at position 1068 of SEQ ID NO: 317648
gaaagagagcccugguuuc

SEQ ID NO: 501138 - RNA, 19 nt, Artificial Sequence
  Description of Artificial Sequence: Synthetic oligonucleotide
  Antisense strand to SEQ ID NO: 501137
gaaaccagggcucucuuuc

SEQ ID NO: 501139 - RNA, 19 nt, Artificial Sequence
  Description of Artificial Sequence: Synthetic oligonucleotide
  Sense strand starting at position 2223 of SEQ ID NO: 317648
gcuucuaggaguuaaacug

SEQ ID NO: 501140 - RNA, 19 nt, Artificial Sequence
  Description of Artificial Sequence: Synthetic oligonucleotide
  Antisense strand to SEQ ID NO: 501139
caguuuaacuccuagaagc

SEQ ID NO: 501141 - RNA, 19 nt, Artificial Sequence
  Description of Artificial Sequence: Synthetic oligonucleotide
  Sense strand starting at position 2298 of SEQ ID NO: 317648
gugacacucagaggugauu

SEQ ID NO: 501142 - RNA, 19 nt, Artificial Sequence
  Description of Artificial Sequence: Synthetic oligonucleotide
  Antisense strand to SEQ ID NO: 501141
aaucaccucugagugucac

SEQ ID NO: 501143 - RNA, 19 nt, Artificial Sequence
  Description of Artificial Sequence: Synthetic oligonucleotide
  Sense strand starting at position 2528 of SEQ ID NO: 317648
ggagaagccaucugagauc

SEQ ID NO: 501144 - RNA, 19 nt, Artificial Sequence
  Description of Artificial Sequence: Synthetic oligonucleotide
  Antisense strand to SEQ ID NO: 501143
gaucucagauggcuucucc

SEQ ID NO: 501145 - RNA, 19 nt, Artificial Sequence
  Description of Artificial Sequence: Synthetic oligonucleotide
  Sense strand starting at position 2706 of SEQ ID NO: 317648
uacuguuacuuauugagga

SEQ ID NO: 501146 - RNA, 19 nt, Artificial Sequence
  Description of Artificial Sequence: Synthetic oligonucleotide
  Antisense strand to SEQ ID NO: 501145
uccucaauaaguaacagua

SEQ ID NO: 501147 - RNA, 19 nt, Artificial Sequence
  Description of Artificial Sequence: Synthetic oligonucleotide
  Sense strand starting at position 2720 of SEQ ID NO: 317648
gaggacuuucuauguacua

SEQ ID NO: 501148 - RNA, 19 nt, Artificial Sequence
  Description of Artificial Sequence: Synthetic oligonucleotide
  Antisense strand to SEQ ID NO: 501147
uaguacauagaaaguccuc

SEQ ID NO: 501149 - RNA, 19 nt, Artificial Sequence
  Description of Artificial Sequence: Synthetic oligonucleotide
  Sense strand starting at position 2986 of SEQ ID NO: 317648
uaaugucagugccuagauu

SEQ ID NO: 501150 - RNA, 19 nt, Artificial Sequence
  Description of Artificial Sequence: Synthetic oligonucleotide
  Antisense strand to SEQ ID NO: 501149
aaucuaggcacugacauua

SEQ ID NO: 501151 - RNA, 19 nt, Artificial Sequence
  Description of Artificial Sequence: Synthetic oligonucleotide
  Sense strand starting at position 3060 of SEQ ID NO: 317648
uggagaaacugauaaugag

SEQ ID NO: 501152 - RNA, 19 nt, Artificial Sequence
  Description of Artificial Sequence: Synthetic oligonucleotide
  Antisense strand to SEQ ID NO: 501151
cucauuaucaguuucucca

SEQ ID NO: 501153 - RNA, 19 nt, Artificial Sequence
  Description of Artificial Sequence: Synthetic oligonucleotide
  Sense strand starting at position 3063 of SEQ ID NO: 317648
agaaacugauaaugagaga

SEQ ID NO: 501154 - RNA, 19 nt, Artificial Sequence
  Description of Artificial Sequence: Synthetic oligonucleotide
  Antisense strand to SEQ ID NO: 501153
ucucucauuaucaguuucu

SEQ ID NO: 501155 - RNA, 19 nt, Artificial Sequence
  Description of Artificial Sequence: Synthetic oligonucleotide
  Sense strand starting at position 3204 of SEQ ID NO: 317648
agaagugcuaaguguugga

SEQ ID NO: 501156 - RNA, 19 nt, Artificial Sequence
  Description of Artificial Sequence: Synthetic oligonucleotide
  Antisense strand to SEQ ID NO: 501155
uccaacacuuagcacuucu

SEQ ID NO: 501157 - RNA, 19 nt, Artificial Sequence
  Description of Artificial Sequence: Synthetic oligonucleotide
  Sense strand starting at position 3239 of SEQ ID NO: 317648
ugaagaugauggguaggua

SEQ ID NO: 501158 - RNA, 19 nt, Artificial Sequence
  Description of Artificial Sequence: Synthetic oligonucleotide
  Antisense strand to SEQ ID NO: 501157
uaccuacccaucaucuuca

SEQ ID NO: 501159 - RNA, 19 nt, Artificial Sequence
  Description of Artificial Sequence: Synthetic oligonucleotide
  Sense strand starting at position 3304 of SEQ ID NO: 317648
agugguucuggccauuaau

SEQ ID NO: 501160 - RNA, 19 nt, Artificial Sequence
  Description of Artificial Sequence: Synthetic oligonucleotide
  Antisense strand to SEQ ID NO: 501159
auuaauggccagaaccacu

SEQ ID NO: 501161 - RNA, 19 nt, Artificial Sequence
  Description of Artificial Sequence: Synthetic oligonucleotide
  Sense strand starting at position 3315 of SEQ ID NO: 317648
ccauuaaugucguuuggga

SEQ ID NO: 501162 - RNA, 19 nt, Artificial Sequence
  Description of Artificial Sequence: Synthetic oligonucleotide
  Antisense strand to SEQ ID NO: 501161
ucccaaacgacauuaaugg

SEQ ID NO: 501163 - RNA, 19 nt, Artificial Sequence
  Description of Artificial Sequence: Synthetic oligonucleotide
  Sense strand starting at position 3317 of SEQ ID NO: 317648
auuaaugucguuugggacu

SEQ ID NO: 501164 - RNA, 19 nt, Artificial Sequence
  Description of Artificial Sequence: Synthetic oligonucleotide
  Antisense strand to SEQ ID NO: 501163
agucccaaacgacauuaau

SEQ ID NO: 501165 - RNA, 19 nt, Artificial Sequence
  Description of Artificial Sequence: Synthetic oligonucleotide
  Sense strand starting at position 3323 of SEQ ID NO: 317648
gucguuugggacuccguua

SEQ ID NO: 501166 - RNA, 19 nt, Artificial Sequence
  Description of Artificial Sequence: Synthetic oligonucleotide
  Antisense strand to SEQ ID NO: 501165
uaacggagucccaaacgac

SEQ ID NO: 501167 - RNA, 19 nt, Artificial Sequence
  Description of Artificial Sequence: Synthetic oligonucleotide
  Sense strand starting at position 3370 of SEQ ID NO: 317648
uucugugaacccgaaauau

SEQ ID NO: 501168 - RNA, 19 nt, Artificial Sequence
  Description of Artificial Sequence: Synthetic oligonucleotide
  Antisense strand to SEQ ID NO: 501167
auauuucggguucacagaa

SEQ ID NO: 501169 - RNA, 19 nt, Artificial Sequence
  Description of Artificial Sequence: Synthetic oligonucleotide
  Sense strand starting at position 3401 of SEQ ID NO: 317648
ucagucaauuuagaagguu

SEQ ID NO: 501170 - RNA, 19 nt, Artificial Sequence
  Description of Artificial Sequence: Synthetic oligonucleotide
  Antisense strand to SEQ ID NO: 501169
aaccuucuaaauugacuga

SEQ ID NO: 501171 - RNA, 19 nt, Artificial Sequence
  Description of Artificial Sequence: Synthetic oligonucleotide
  Sense strand starting at position 3434 of SEQ ID NO: 317648
uaagaacgugcucaugaca

SEQ ID NO: 501172 - RNA, 19 nt, Artificial Sequence
  Description of Artificial Sequence: Synthetic oligonucleotide
  Antisense strand to SEQ ID NO: 501171
ugucaugagcacguucuua

SEQ ID NO: 501173 - RNA, 19 nt, Artificial Sequence
  Description of Artificial Sequence: Synthetic oligonucleotide
  Sense strand starting at position 3534 of SEQ ID NO: 317648
caaucaauauguguaggau

SEQ ID NO: 501174 - RNA, 19 nt, Artificial Sequence
  Description of Artificial Sequence: Synthetic oligonucleotide
  Antisense strand to SEQ ID NO: 501173
auccuacacauauugauug

SEQ ID NO: 501175 - RNA, 19 nt, Artificial Sequence
  Description of Artificial Sequence: Synthetic oligonucleotide
  Sense strand starting at position 3537 of SEQ ID NO: 317648
ucaauauguguaggaugua

SEQ ID NO: 501176 - RNA, 19 nt, Artificial Sequence
  Description of Artificial Sequence: Synthetic oligonucleotide
  Antisense strand to SEQ ID NO: 501175
uacauccuacacauauuga

SEQ ID NO: 501177 - RNA, 19 nt, Artificial Sequence
  Description of Artificial Sequence: Synthetic oligonucleotide
  Sense strand starting at position 3540 of SEQ ID NO: 317648
auauguguaggauguacau

SEQ ID NO: 501178 - RNA, 19 nt, Artificial Sequence
  Description of Artificial Sequence: Synthetic oligonucleotide
  Antisense strand to SEQ ID NO: 501177
auguacauccuacacauau

SEQ ID NO: 501179 - RNA, 19 nt, Artificial Sequence
  Description of Artificial Sequence: Synthetic oligonucleotide
  Sense strand starting at position 3607 of SEQ ID NO: 317648
gugcuuccagguuauaagu

SEQ ID NO: 501180 - RNA, 19 nt, Artificial Sequence
  Description of Artificial Sequence: Synthetic oligonucleotide
  Antisense strand to SEQ ID NO: 501179
acuuauaaccuggaagcac

SEQ ID NO: 501181 - RNA, 19 nt, Artificial Sequence
  Description of Artificial Sequence: Synthetic oligonucleotide
  Sense strand starting at position 3690 of SEQ ID NO: 317648
uuuagucuagcucagugaa

SEQ ID NO: 501182 - RNA, 19 nt, Artificial Sequence
  Description of Artificial Sequence: Synthetic oligonucleotide
  Antisense strand to SEQ ID NO: 501181
uucacugagcuagacuaaa

SEQ ID NO: 501183 - RNA, 19 nt, Artificial Sequence
  Description of Artificial Sequence: Synthetic oligonucleotide
  Sense strand starting at position 3753 of SEQ ID NO: 317648
augcauuuguuuccgguga

SEQ ID NO: 501184 - RNA, 19 nt, Artificial Sequence
  Description of Artificial Sequence: Synthetic oligonucleotide
  Antisense strand to SEQ ID NO: 501183
ucaccggaaacaaaugcau

SEQ ID NO: 501185 - RNA, 19 nt, Artificial Sequence
  Description of Artificial Sequence: Synthetic oligonucleotide
  Sense strand starting at position 3757 of SEQ ID NO: 317648
auuuguuuccggugagccu

SEQ ID NO: 501186 - RNA, 19 nt, Artificial Sequence
  Description of Artificial Sequence: Synthetic oligonucleotide
  Antisense strand to SEQ ID NO: 501185
aggcucaccggaaacaaau

SEQ ID NO: 501187 - RNA, 19 nt, Artificial Sequence
  Description of Artificial Sequence: Synthetic oligonucleotide
  Sense strand starting at position 22 of SEQ ID NO: 317649
uggauacucucagcacaua

SEQ ID NO: 501188 - RNA, 19 nt, Artificial Sequence
  Description of Artificial Sequence: Synthetic oligonucleotide
  Antisense strand to SEQ ID NO: 501187
uaugugcugagaguaucca

SEQ ID NO: 501189 - RNA, 19 nt, Artificial Sequence
  Description of Artificial Sequence: Synthetic oligonucleotide
  Sense strand starting at position 33 of SEQ ID NO: 317649
agcacauagcucuagauag

SEQ ID NO: 501190 - RNA, 19 nt, Artificial Sequence
  Description of Artificial Sequence: Synthetic oligonucleotide
  Antisense strand to SEQ ID NO: 501189
cuaucuagagcuaugugcu

SEQ ID NO: 501191 - RNA, 19 nt, Artificial Sequence
  Description of Artificial Sequence: Synthetic oligonucleotide
  Sense strand starting at position 76 of SEQ ID NO: 317649
ucucacuuuccagagagca

SEQ ID NO: 501192 - RNA, 19 nt, Artificial Sequence
  Description of Artificial Sequence: Synthetic oligonucleotide
  Antisense strand to SEQ ID NO: 501191
ugcucucuggaaagugaga

SEQ ID NO: 501193 - RNA, 19 nt, Artificial Sequence
  Description of Artificial Sequence: Synthetic oligonucleotide
  Sense strand starting at position 130 of SEQ ID NO: 317649
gcugaauucccuuacaaag

SEQ ID NO: 501194 - RNA, 19 nt, Artificial Sequence
  Description of Artificial Sequence: Synthetic oligonucleotide
  Antisense strand to SEQ ID NO: 501193
cuuuguaagggaauucagc

SEQ ID NO: 501195 - RNA, 19 nt, Artificial Sequence
  Description of Artificial Sequence: Synthetic oligonucleotide
  Sense strand starting at position 177 of SEQ ID NO: 317649
ccaggagaaugugugucuu

SEQ ID NO: 501196 - RNA, 19 nt, Artificial Sequence
  Description of Artificial Sequence: Synthetic oligonucleotide
  Antisense strand to SEQ ID NO: 501195
aagacacacauucuccugg

SEQ ID NO: 501197 - RNA, 19 nt, Artificial Sequence
  Description of Artificial Sequence: Synthetic oligonucleotide
  Sense strand starting at position 179 of SEQ ID NO: 317649
aggagaaugugugucuuug

SEQ ID NO: 501198 - RNA, 19 nt, Artificial Sequence
  Description of Artificial Sequence: Synthetic oligonucleotide
  Antisense strand to SEQ ID NO: 501197
caaagacacacauucuccu

SEQ ID NO: 501199 - RNA, 19 nt, Artificial Sequence
  Description of Artificial Sequence: Synthetic oligonucleotide
  Sense strand starting at position 181 of SEQ ID NO: 317649
gagaaugugugucuuugaa

SEQ ID NO: 501200 - RNA, 19 nt, Artificial Sequence
  Description of Artificial Sequence: Synthetic oligonucleotide
  Antisense strand to SEQ ID NO: 501199
uucaaagacacacauucuc

SEQ ID NO: 501201 - RNA, 19 nt, Artificial Sequence
  Description of Artificial Sequence: Synthetic oligonucleotide
  Sense strand starting at position 189 of SEQ ID NO: 317649
gugucuuugaacgaaauca

SEQ ID NO: 501202 - RNA, 19 nt, Artificial Sequence
  Description of Artificial Sequence: Synthetic oligonucleotide
  Antisense strand to SEQ ID NO: 501201
ugauuucguucaaagacac

SEQ ID NO: 501203 - RNA, 19 nt, Artificial Sequence
  Description of Artificial Sequence: Synthetic oligonucleotide
  Sense strand starting at position 199 of SEQ ID NO: 317649
acgaaaucaucuccaaaug

SEQ ID NO: 501204 - RNA, 19 nt, Artificial Sequence
  Description of Artificial Sequence: Synthetic oligonucleotide
  Antisense strand to SEQ ID NO: 501203
cauuuggagaugauuucgu

SEQ ID NO: 501205 - RNA, 19 nt, Artificial Sequence
  Description of Artificial Sequence: Synthetic oligonucleotide
  Sense strand starting at position 210 of SEQ ID NO: 317649
uccaaaugcccugggaagu

SEQ ID NO: 501206 - RNA, 19 nt, Artificial Sequence
  Description of Artificial Sequence: Synthetic oligonucleotide
  Antisense strand to SEQ ID NO: 501205
acuucccagggcauuugga

SEQ ID NO: 501207 - RNA, 19 nt, Artificial Sequence
  Description of Artificial Sequence: Synthetic oligonucleotide
  Sense strand starting at position 437 of SEQ ID NO: 317649
cugauacgucuugaagcca

SEQ ID NO: 501208 - RNA, 19 nt, Artificial Sequence
  Description of Artificial Sequence: Synthetic oligonucleotide
  Antisense strand to SEQ ID NO: 501207
uggcuucaagacguaucag

SEQ ID NO: 501209 - RNA, 19 nt, Artificial Sequence
  Description of Artificial Sequence: Synthetic oligonucleotide
  Sense strand starting at position 460 of SEQ ID NO: 317649
agaugaguuguccagcaau

SEQ ID NO: 501210 - RNA, 19 nt, Artificial Sequence
  Description of Artificial Sequence: Synthetic oligonucleotide
  Antisense strand to SEQ ID NO: 501209
auugcuggacaacucaucu

SEQ ID NO: 501211 - RNA, 19 nt, Artificial Sequence
  Description of Artificial Sequence: Synthetic oligonucleotide
  Sense strand starting at position 463 of SEQ ID NO: 317649
ugaguuguccagcaauauu

SEQ ID NO: 501212 - RNA, 19 nt, Artificial Sequence
  Description of Artificial Sequence: Synthetic oligonucleotide
  Antisense strand to SEQ ID NO: 501211
aauauugcuggacaacuca

SEQ ID NO: 501213 - RNA, 19 nt, Artificial Sequence
  Description of Artificial Sequence: Synthetic oligonucleotide
  Sense strand starting at position 718 of SEQ ID NO: 317649
cuauuauugcuacaggaca

SEQ ID NO: 501214 - RNA, 19 nt, Artificial Sequence
  Description of Artificial Sequence: Synthetic oligonucleotide
  Antisense strand to SEQ ID NO: 501213
uguccuguagcaauaauag

SEQ ID NO: 501215 - RNA, 19 nt, Artificial Sequence
  Description of Artificial Sequence: Synthetic oligonucleotide
  Sense strand starting at position 731 of SEQ ID NO: 317649
aggacagugcugcaugauu

SEQ ID NO: 501216 - RNA, 19 nt, Artificial Sequence
  Description of Artificial Sequence: Synthetic oligonucleotide
  Antisense strand to SEQ ID NO: 501215
aaucaugcagcacuguccu

SEQ ID NO: 501217 - RNA, 19 nt, Artificial Sequence
  Description of Artificial Sequence: Synthetic oligonucleotide
  Sense strand starting at position 1160 of SEQ ID NO: 317649
cccuuauggagguauaguu

SEQ ID NO: 501218 - RNA, 19 nt, Artificial Sequence
  Description of Artificial Sequence: Synthetic oligonucleotide
  Antisense strand to SEQ ID NO: 501217
aacuauaccuccauaaggg

SEQ ID NO: 501219 - RNA, 19 nt, Artificial Sequence
  Description of Artificial Sequence: Synthetic oligonucleotide
  Sense strand starting at position 1749 of SEQ ID NO: 317649
ggcugucucccauagcaaa

SEQ ID NO: 501220 - RNA, 19 nt, Artificial Sequence
  Description of Artificial Sequence: Synthetic oligonucleotide
  Antisense strand to SEQ ID NO: 501219
uuugcuaugggagacagcc

SEQ ID NO: 501221 - RNA, 19 nt, Artificial Sequence
  Description of Artificial Sequence: Synthetic oligonucleotide
  Sense strand starting at position 1877 of SEQ ID NO: 317649
agcccucagcuccagaaau

SEQ ID NO: 501222 - RNA, 19 nt, Artificial Sequence
  Description of Artificial Sequence: Synthetic oligonucleotide
  Antisense strand to SEQ ID NO: 501221
auuucuggagcugagggcu

SEQ ID NO: 501223 - RNA, 19 nt, Artificial Sequence
  Description of Artificial Sequence: Synthetic oligonucleotide
  Sense strand starting at position 2044 of SEQ ID NO: 317649
gggagugauucagcugaca

SEQ ID NO: 501224 - RNA, 19 nt, Artificial Sequence
  Description of Artificial Sequence: Synthetic oligonucleotide
  Antisense strand to SEQ ID NO: 501223
ugucagcugaaucacuccc

SEQ ID NO: 501225 - RNA, 19 nt, Artificial Sequence
  Description of Artificial Sequence: Synthetic oligonucleotide
  Sense strand starting at position 2464 of SEQ ID NO: 317649
ccaacaucgcucuaucaag

SEQ ID NO: 501226 - RNA, 19 nt, Artificial Sequence
  Description of Artificial Sequence: Synthetic oligonucleotide
  Antisense strand to SEQ ID NO: 501225
cuugauagagcgauguugg

SEQ ID NO: 501227 - RNA, 19 nt, Artificial Sequence
  Description of Artificial Sequence: Synthetic oligonucleotide
  Sense strand starting at position 2579 of SEQ ID NO: 317649
ugcgcuaaucugcuaaugu

SEQ ID NO: 501228 - RNA, 19 nt, Artificial Sequence
  Description of Artificial Sequence: Synthetic oligonucleotide
  Antisense strand to SEQ ID NO: 501227
acauuagcagauuagcgca

SEQ ID NO: 501229 - RNA, 19 nt, Artificial Sequence
  Description of Artificial Sequence: Synthetic oligonucleotide
  Sense strand starting at position 2588 of SEQ ID NO: 317649
cugcuaaugugaccucaga

SEQ ID NO: 501230 - RNA, 19 nt, Artificial Sequence
  Description of Artificial Sequence: Synthetic oligonucleotide
  Antisense strand to SEQ ID NO: 501229
ucugaggucacauuagcag

SEQ ID NO: 501231 - RNA, 19 nt, Artificial Sequence
  Description of Artificial Sequence: Synthetic oligonucleotide
  Sense strand starting at position 3024 of SEQ ID NO: 317649
ucaagaguucugggauacc

SEQ ID NO: 501232 - RNA, 19 nt, Artificial Sequence
  Description of Artificial Sequence: Synthetic oligonucleotide
  Antisense strand to SEQ ID NO: 501231
gguaucccagaacucuuga

SEQ ID NO: 501233 - RNA, 19 nt, Artificial Sequence
  Description of Artificial Sequence: Synthetic oligonucleotide
  Sense strand starting at position 3081 of SEQ ID NO: 317649
caaacucaguggucugaaa

SEQ ID NO: 501234 - RNA, 19 nt, Artificial Sequence
  Description of Artificial Sequence: Synthetic oligonucleotide
  Antisense strand to SEQ ID NO: 501233
uuucagaccacugaguuug

SEQ ID NO: 501235 - RNA, 19 nt, Artificial Sequence
  Description of Artificial Sequence: Synthetic oligonucleotide
  Sense strand starting at position 3107 of SEQ ID NO: 317649
gguccucucagauguggaa

SEQ ID NO: 501236 - RNA, 19 nt, Artificial Sequence
  Description of Artificial Sequence: Synthetic oligonucleotide
  Antisense strand to SEQ ID NO: 501235
uuccacaucugagaggacc

SEQ ID NO: 501237 - RNA, 19 nt, Artificial Sequence
  Description of Artificial Sequence: Synthetic oligonucleotide
  Sense strand starting at position 3142 of SEQ ID NO: 317649
cuuugagagguauaugcua

SEQ ID NO: 501238 - RNA, 19 nt, Artificial Sequence
  Description of Artificial Sequence: Synthetic oligonucleotide
  Antisense strand to SEQ ID NO: 501237
uagcauauaccucucaaag

SEQ ID NO: 501239 - RNA, 19 nt, Artificial Sequence
  Description of Artificial Sequence: Synthetic oligonucleotide
  Sense strand starting at position 3144 of SEQ ID NO: 317649
uugagagguauaugcuagu

SEQ ID NO: 501240 - RNA, 19 nt, Artificial Sequence
  Description of Artificial Sequence: Synthetic oligonucleotide
  Antisense strand to SEQ ID NO: 501239
acuagcauauaccucucaa

SEQ ID NO: 501241 - RNA, 19 nt, Artificial Sequence
  Description of Artificial Sequence: Synthetic oligonucleotide
  Sense strand starting at position 3174 of SEQ ID NO: 317649
gguguuacaaguuaccaua

SEQ ID NO: 501242 - RNA, 19 nt, Artificial Sequence
  Description of Artificial Sequence: Synthetic oligonucleotide
  Antisense strand to SEQ ID NO: 501241
uaugguaacuuguaacacc

SEQ ID NO: 501243 - RNA, 19 nt, Artificial Sequence
  Description of Artificial Sequence: Synthetic oligonucleotide
  Sense strand starting at position 3176 of SEQ ID NO: 317649
uguuacaaguuaccauaaa

SEQ ID NO: 501244 - RNA, 19 nt, Artificial Sequence
  Description of Artificial Sequence: Synthetic oligonucleotide
  Antisense strand to SEQ ID NO: 501243
uuuaugguaacuuguaaca

SEQ ID NO: 501245 - RNA, 19 nt, Artificial Sequence
  Description of Artificial Sequence: Synthetic oligonucleotide
  Sense strand starting at position 3239 of SEQ ID NO: 317649
aucugaaacuggucucacu

SEQ ID NO: 501246 - RNA, 19 nt, Artificial Sequence
  Description of Artificial Sequence: Synthetic oligonucleotide
  Antisense strand to SEQ ID NO: 501245
agugagaccaguuucagau

SEQ ID NO: 501247 - RNA, 19 nt, Artificial Sequence
  Description of Artificial Sequence: Synthetic oligonucleotide
  Sense strand starting at position 3246 of SEQ ID NO: 317649
acuggucucacugggcuaa

SEQ ID NO: 501248 - RNA, 19 nt, Artificial Sequence
  Description of Artificial Sequence: Synthetic oligonucleotide
  Antisense strand to SEQ ID NO: 501247
uuagcccagugagaccagu

SEQ ID NO: 501249 - RNA, 19 nt, Artificial Sequence
  Description of Artificial Sequence: Synthetic oligonucleotide
  Sense strand starting at position 3350 of SEQ ID NO: 317649
gccugaauuccucagcuca

SEQ ID NO: 501250 - RNA, 19 nt, Artificial Sequence
  Description of Artificial Sequence: Synthetic oligonucleotide
  Antisense strand to SEQ ID NO: 501249
ugagcugaggaauucaggc

SEQ ID NO: 501251 - RNA, 19 nt, Artificial Sequence
  Description of Artificial Sequence: Synthetic oligonucleotide
  Sense strand starting at position 3352 of SEQ ID NO: 317649
cugaauuccucagcucaug

SEQ ID NO: 501252 - RNA, 19 nt, Artificial Sequence
  Description of Artificial Sequence: Synthetic oligonucleotide
  Antisense strand to SEQ ID NO: 501251
caugagcugaggaauucag

SEQ ID NO: 501253 - RNA, 19 nt, Artificial Sequence
  Description of Artificial Sequence: Synthetic oligonucleotide
  Sense strand starting at position 3403 of SEQ ID NO: 317649
cuuugagucuuucucacau

SEQ ID NO: 501254 - RNA, 19 nt, Artificial Sequence
  Description of Artificial Sequence: Synthetic oligonucleotide
  Antisense strand to SEQ ID NO: 501253
augugagaaagacucaaag

SEQ ID NO: 501255 - RNA, 19 nt, Artificial Sequence
  Description of Artificial Sequence: Synthetic oligonucleotide
  Sense strand starting at position 3458 of SEQ ID NO: 317649
gacccuugcgauuacauua

SEQ ID NO: 501256 - RNA, 19 nt, Artificial Sequence
  Description of Artificial Sequence: Synthetic oligonucleotide
  Antisense strand to SEQ ID NO: 501255
uaauguaaucgcaaggguc

SEQ ID NO: 501257 - RNA, 19 nt, Artificial Sequence
  Description of Artificial Sequence: Synthetic oligonucleotide
  Sense strand starting at position 3471 of SEQ ID NO: 317649
acauuagacucauccuggu

SEQ ID NO: 501258 - RNA, 19 nt, Artificial Sequence
  Description of Artificial Sequence: Synthetic oligonucleotide
  Antisense strand to SEQ ID NO: 501257
accaggaugagucuaaugu

SEQ ID NO: 501259 - RNA, 19 nt, Artificial Sequence
  Description of Artificial Sequence: Synthetic oligonucleotide
  Sense strand starting at position 3506 of SEQ ID NO: 317649
cuaaucagcugauuagcaa

SEQ ID NO: 501260 - RNA, 19 nt, Artificial Sequence
  Description of Artificial Sequence: Synthetic oligonucleotide
  Antisense strand to SEQ ID NO: 501259
uugcuaaucagcugauuag

SEQ ID NO: 501261 - RNA, 19 nt, Artificial Sequence
  Description of Artificial Sequence: Synthetic oligonucleotide
  Sense strand starting at position 3559 of SEQ ID NO: 317649
cguguaacagaacauguuu

SEQ ID NO: 501262 - RNA, 19 nt, Artificial Sequence
  Description of Artificial Sequence: Synthetic oligonucleotide
  Antisense strand to SEQ ID NO: 501261
aaacauguucuguuacacg

SEQ ID NO: 501263 - RNA, 19 nt, Artificial Sequence
  Description of Artificial Sequence: Synthetic oligonucleotide
  Sense strand starting at position 3715 of SEQ ID NO: 317649
gaacaacuuugggcuagaa

SEQ ID NO: 501264 - RNA, 19 nt, Artificial Sequence
  Description of Artificial Sequence: Synthetic oligonucleotide
  Antisense strand to SEQ ID NO: 501263
uucuagcccaaaguuguuc

SEQ ID NO: 501265 - RNA, 19 nt, Artificial Sequence
  Description of Artificial Sequence: Synthetic oligonucleotide
  Sense strand starting at position 3878 of SEQ ID NO: 317649
gcaagaucuuguccaaagg

SEQ ID NO: 501266 - RNA, 19 nt, Artificial Sequence
  Description of Artificial Sequence: Synthetic oligonucleotide
  Antisense strand to SEQ ID NO: 501265
ccuuuggacaagaucuugc

SEQ ID NO: 501267 - RNA, 19 nt, Artificial Sequence
  Description of Artificial Sequence: Synthetic oligonucleotide
  Sense strand starting at position 81 of SEQ ID NO: 317650
ugaaucacuuuaggagaaa

SEQ ID NO: 501268 - RNA, 19 nt, Artificial Sequence
  Description of Artificial Sequence: Synthetic oligonucleotide
  Antisense strand to SEQ ID NO: 501267
uuucuccuaaagugauuca

SEQ ID NO: 501269 - RNA, 19 nt, Artificial Sequence
  Description of Artificial Sequence: Synthetic oligonucleotide
  Sense strand starting at position 133 of SEQ ID NO: 317650
cuucuuucuucugugucua

SEQ ID NO: 501270 - RNA, 19 nt, Artificial Sequence
  Description of Artificial Sequence: Synthetic oligonucleotide
  Antisense strand to SEQ ID NO: 501269
uagacacagaagaaagaag

SEQ ID NO: 501271 - RNA, 19 nt, Artificial Sequence
  Description of Artificial Sequence: Synthetic oligonucleotide
  Sense strand starting at position 137 of SEQ ID NO: 317650
uuucuucugugucuauaau

SEQ ID NO: 501272 - RNA, 19 nt, Artificial Sequence
  Description of Artificial Sequence: Synthetic oligonucleotide
  Antisense strand to SEQ ID NO: 501271
auuauagacacagaagaaa

SEQ ID NO: 501273 - RNA, 19 nt, Artificial Sequence
  Description of Artificial Sequence: Synthetic oligonucleotide
  Sense strand starting at position 210 of SEQ ID NO: 317650
cugagucccucuggaauuu

SEQ ID NO: 501274 - RNA, 19 nt, Artificial Sequence
  Description of Artificial Sequence: Synthetic oligonucleotide
  Antisense strand to SEQ ID NO: 501273
aaauuccagagggacucag

SEQ ID NO: 501275 - RNA, 19 nt, Artificial Sequence
  Description of Artificial Sequence: Synthetic oligonucleotide
  Sense strand starting at position 370 of SEQ ID NO: 317650
acaagaggauagucuguaa

SEQ ID NO: 501276 - RNA, 19 nt, Artificial Sequence
  Description of Artificial Sequence: Synthetic oligonucleotide
  Antisense strand to SEQ ID NO: 501275
uuacagacuauccucuugu

SEQ ID NO: 501277 - RNA, 19 nt, Artificial Sequence
  Description of Artificial Sequence: Synthetic oligonucleotide
  Sense strand starting at position 373 of SEQ ID NO: 317650
agaggauagucuguaaaug

SEQ ID NO: 501278 - RNA, 19 nt, Artificial Sequence
  Description of Artificial Sequence: Synthetic oligonucleotide
  Antisense strand to SEQ ID NO: 501277
cauuuacagacuauccucu

SEQ ID NO: 501279 - RNA, 19 nt, Artificial Sequence
  Description of Artificial Sequence: Synthetic oligonucleotide
  Sense strand starting at position 489 of SEQ ID NO: 317650
guacuauggugagcgucaa

SEQ ID NO: 501280 - RNA, 19 nt, Artificial Sequence
  Description of Artificial Sequence: Synthetic oligonucleotide
  Antisense strand to SEQ ID NO: 501279
uugacgcucaccauaguac

SEQ ID NO: 501281 - RNA, 19 nt, Artificial Sequence
  Description of Artificial Sequence: Synthetic oligonucleotide
  Sense strand starting at position 490 of SEQ ID NO: 317650
uacuauggugagcgucaau

SEQ ID NO: 501282 - RNA, 19 nt, Artificial Sequence
  Description of Artificial Sequence: Synthetic oligonucleotide
  Antisense strand to SEQ ID NO: 501281
auugacgcucaccauagua

SEQ ID NO: 501283 - RNA, 19 nt, Artificial Sequence
  Description of Artificial Sequence: Synthetic oligonucleotide
  Sense strand starting at position 539 of SEQ ID NO: 317650
guacucauuuggcagggaa

SEQ ID NO: 501284 - RNA, 19 nt, Artificial Sequence
  Description of Artificial Sequence: Synthetic oligonucleotide
  Antisense strand to SEQ ID NO: 501283
uucccugccaaaugaguac

SEQ ID NO: 501285 - RNA, 19 nt, Artificial Sequence
  Description of Artificial Sequence: Synthetic oligonucleotide
  Sense strand starting at position 579 of SEQ ID NO: 317650
auauuaagugcuugccuuu

SEQ ID NO: 501286 - RNA, 19 nt, Artificial Sequence
  Description of Artificial Sequence: Synthetic oligonucleotide
  Antisense strand to SEQ ID NO: 501285
aaaggcaagcacuuaauau

SEQ ID NO: 501287 - RNA, 19 nt, Artificial Sequence
  Description of Artificial Sequence: Synthetic oligonucleotide
  Sense strand starting at position 584 of SEQ ID NO: 317650
aagugcuugccuuuauguu

SEQ ID NO: 501288 - RNA, 19 nt, Artificial Sequence
  Description of Artificial Sequence: Synthetic oligonucleotide
  Antisense strand to SEQ ID NO: 501287
aacauaaaggcaagcacuu

SEQ ID NO: 501289 - RNA, 19 nt, Artificial Sequence
  Description of Artificial Sequence: Synthetic oligonucleotide
  Sense strand starting at position 585 of SEQ ID NO: 317650
agugcuugccuuuauguua

SEQ ID NO: 501290 - RNA, 19 nt, Artificial Sequence
  Description of Artificial Sequence: Synthetic oligonucleotide
  Antisense strand to SEQ ID NO: 501289
uaacauaaaggcaagcacu

SEQ ID NO: 501291 - RNA, 19 nt, Artificial Sequence
  Description of Artificial Sequence: Synthetic oligonucleotide
  Sense strand starting at position 628 of SEQ ID NO: 317650
cugagaaauucugaauugu

SEQ ID NO: 501292 - RNA, 19 nt, Artificial Sequence
  Description of Artificial Sequence: Synthetic oligonucleotide
  Antisense strand to SEQ ID NO: 501291
acaauucagaauuucucag

SEQ ID NO: 501293 - RNA, 19 nt, Artificial Sequence
  Description of Artificial Sequence: Synthetic oligonucleotide
  Sense strand starting at position 672 of SEQ ID NO: 317650
gaaauacauugagagaaug

SEQ ID NO: 501294 - RNA, 19 nt, Artificial Sequence
  Description of Artificial Sequence: Synthetic oligonucleotide
  Antisense strand to SEQ ID NO: 501293
cauucucucaauguauuuc

SEQ ID NO: 501295 - RNA, 19 nt, Artificial Sequence
  Description of Artificial Sequence: Synthetic oligonucleotide
  Sense strand starting at position 774 of SEQ ID NO: 317650
uauuaacugucauuggaug

SEQ ID NO: 501296 - RNA, 19 nt, Artificial Sequence
  Description of Artificial Sequence: Synthetic oligonucleotide
  Antisense strand to SEQ ID NO: 501295
cauccaaugacaguuaaua

SEQ ID NO: 501297 - RNA, 19 nt, Artificial Sequence
  Description of Artificial Sequence: Synthetic oligonucleotide
  Sense strand starting at position 785 of SEQ ID NO: 317650
auuggauggguucagguua

SEQ ID NO: 501298 - RNA, 19 nt, Artificial Sequence
  Description of Artificial Sequence: Synthetic oligonucleotide
  Antisense strand to SEQ ID NO: 501297
uaaccugaacccauccaau

SEQ ID NO: 501299 - RNA, 19 nt, Artificial Sequence
  Description of Artificial Sequence: Synthetic oligonucleotide
  Sense strand starting at position 830 of SEQ ID NO: 317650
acaccugcguucucauuua

SEQ ID NO: 501300 - RNA, 19 nt, Artificial Sequence
  Description of Artificial Sequence: Synthetic oligonucleotide
  Antisense strand to SEQ ID NO: 501299
uaaaugagaacgcaggugu

SEQ ID NO: 501301 - RNA, 19 nt, Artificial Sequence
  Description of Artificial Sequence: Synthetic oligonucleotide
  Sense strand starting at position 842 of SEQ ID NO: 317650
ucauuuaccugaugcagua

SEQ ID NO: 501302 - RNA, 19 nt, Artificial Sequence
  Description of Artificial Sequence: Synthetic oligonucleotide
  Antisense strand to SEQ ID NO: 501301
uacugcaucagguaaauga

SEQ ID NO: 501303 - RNA, 19 nt, Artificial Sequence
  Description of Artificial Sequence: Synthetic oligonucleotide
  Sense strand starting at position 898 of SEQ ID NO: 317650
uuccaaaugucacuuguaa

SEQ ID NO: 501304 - RNA, 19 nt, Artificial Sequence
  Description of Artificial Sequence: Synthetic oligonucleotide
  Antisense strand to SEQ ID NO: 501303
uuacaagugacauuuggaa

SEQ ID NO: 501305 - RNA, 19 nt, Artificial Sequence
  Description of Artificial Sequence: Synthetic oligonucleotide
  Sense strand starting at position 906 of SEQ ID NO: 317650
gucacuuguaaguggcaga

SEQ ID NO: 501306 - RNA, 19 nt, Artificial Sequence
  Description of Artificial Sequence: Synthetic oligonucleotide
  Antisense strand to SEQ ID NO: 501305
ucugccacuuacaagugac

SEQ ID NO: 501307 - RNA, 19 nt, Artificial Sequence
  Description of Artificial Sequence: Synthetic oligonucleotide
  Sense strand starting at position 968 of SEQ ID NO: 317650
caaauuguggcccaggaua

SEQ ID NO: 501308 - RNA, 19 nt, Artificial Sequence
  Description of Artificial Sequence: Synthetic oligonucleotide
  Antisense strand to SEQ ID NO: 501307
uauccugggccacaauuug

SEQ ID NO: 501309 - RNA, 19 nt, Artificial Sequence
  Description of Artificial Sequence: Synthetic oligonucleotide
  Sense strand starting at position 982 of SEQ ID NO: 317650
ggauaugaacguugcugau

SEQ ID NO: 501310 - RNA, 19 nt, Artificial Sequence
  Description of Artificial Sequence: Synthetic oligonucleotide
  Antisense strand to SEQ ID NO: 501309
aucagcaacguucauaucc

SEQ ID NO: 501311 - RNA, 19 nt, Artificial Sequence
  Description of Artificial Sequence: Synthetic oligonucleotide
  Sense strand starting at position 1002 of SEQ ID NO: 317650
gugucacaaucagcugauu

SEQ ID NO: 501312 - RNA, 19 nt, Artificial Sequence
  Description of Artificial Sequence: Synthetic oligonucleotide
  Antisense strand to SEQ ID NO: 501311
aaucagcugauugugacac

SEQ ID NO: 501313 - RNA, 19 nt, Artificial Sequence
  Description of Artificial Sequence: Synthetic oligonucleotide
  Sense strand starting at position 1030 of SEQ ID NO: 317650
aggcacuauuauguuugaa

SEQ ID NO: 501314 - RNA, 19 nt, Artificial Sequence
  Description of Artificial Sequence: Synthetic oligonucleotide
  Antisense strand to SEQ ID NO: 501313
uucaaacauaauagugccu

SEQ ID NO: 501315 - RNA, 19 nt, Artificial Sequence
  Description of Artificial Sequence: Synthetic oligonucleotide
  Sense strand starting at position 1032 of SEQ ID NO: 317650
gcacuauuauguuugaagu

SEQ ID NO: 501316 - RNA, 19 nt, Artificial Sequence
  Description of Artificial Sequence: Synthetic oligonucleotide
  Antisense strand to SEQ ID NO: 501315
acuucaaacauaauagugc

SEQ ID NO: 501317 - RNA, 19 nt, Artificial Sequence
  Description of Artificial Sequence: Synthetic oligonucleotide
  Sense strand starting at position 1045 of SEQ ID NO: 317650
ugaaguacgcccugauugu

SEQ ID NO: 501318 - RNA, 19 nt, Artificial Sequence
  Description of Artificial Sequence: Synthetic oligonucleotide
  Antisense strand to SEQ ID NO: 501317
acaaucagggcguacuuca

SEQ ID NO: 501319 - RNA, 19 nt, Artificial Sequence
  Description of Artificial Sequence: Synthetic oligonucleotide
  Sense strand starting at position 1046 of SEQ ID NO: 317650
gaaguacgcccugauuguu

SEQ ID NO: 501320 - RNA, 19 nt, Artificial Sequence
  Description of Artificial Sequence: Synthetic oligonucleotide
  Antisense strand to SEQ ID NO: 501319
aacaaucagggcguacuuc

SEQ ID NO: 501321 - RNA, 19 nt, Artificial Sequence
  Description of Artificial Sequence: Synthetic oligonucleotide
  Sense strand starting at position 1066 of SEQ ID NO: 317650
gagcauuaacuuugguauu

SEQ ID NO: 501322 - RNA, 19 nt, Artificial Sequence
  Description of Artificial Sequence: Synthetic oligonucleotide
  Antisense strand to SEQ ID NO: 501321
aauaccaaaguuaaugcuc

SEQ ID NO: 501323 - RNA, 19 nt, Artificial Sequence
  Description of Artificial Sequence: Synthetic oligonucleotide
  Sense strand starting at position 1068 of SEQ ID NO: 317650
gcauuaacuuugguauuga

SEQ ID NO: 501324 - RNA, 19 nt, Artificial Sequence
  Description of Artificial Sequence: Synthetic oligonucleotide
  Antisense strand to SEQ ID NO: 501323
ucaauaccaaaguuaaugc

SEQ ID NO: 501325 - RNA, 19 nt, Artificial Sequence
  Description of Artificial Sequence: Synthetic oligonucleotide
  Sense strand starting at position 1077 of SEQ ID NO: 317650
uugguauugagaugcuaag

SEQ ID NO: 501326 - RNA, 19 nt, Artificial Sequence
  Description of Artificial Sequence: Synthetic oligonucleotide
  Antisense strand to SEQ ID NO: 501325
cuuagcaucucaauaccaa

SEQ ID NO: 501327 - RNA, 19 nt, Artificial Sequence
  Description of Artificial Sequence: Synthetic oligonucleotide
  Sense strand starting at position 1226 of SEQ ID NO: 317650
guaauuugcucuuuaugac

SEQ ID NO: 501328 - RNA, 19 nt, Artificial Sequence
  Description of Artificial Sequence: Synthetic oligonucleotide
  Antisense strand to SEQ ID NO: 501327
gucauaaagagcaaauuac

SEQ ID NO: 501329 - RNA, 19 nt, Artificial Sequence
  Description of Artificial Sequence: Synthetic oligonucleotide
  Sense strand starting at position 1243 of SEQ ID NO: 317650
acggcuuugaugcauacau

SEQ ID NO: 501330 - RNA, 19 nt, Artificial Sequence
  Description of Artificial Sequence: Synthetic oligonucleotide
  Antisense strand to SEQ ID NO: 501329
auguaugcaucaaagccgu

SEQ ID NO: 501331 - RNA, 19 nt, Artificial Sequence
  Description of Artificial Sequence: Synthetic oligonucleotide
  Sense strand starting at position 1245 of SEQ ID NO: 317650
ggcuuugaugcauacauua

SEQ ID NO: 501332 - RNA, 19 nt, Artificial Sequence
  Description of Artificial Sequence: Synthetic oligonucleotide
  Antisense strand to SEQ ID NO: 501331
uaauguaugcaucaaagcc

SEQ ID NO: 501333 - RNA, 19 nt, Artificial Sequence
  Description of Artificial Sequence: Synthetic oligonucleotide
  Sense strand starting at position 1267 of SEQ ID NO: 317650
gcuuuagauucuuccuaag

SEQ ID NO: 501334 - RNA, 19 nt, Artificial Sequence
  Description of Artificial Sequence: Synthetic oligonucleotide
  Antisense strand to SEQ ID NO: 501333
cuuaggaagaaucuaaagc

SEQ ID NO: 501335 - RNA, 19 nt, Artificial Sequence
  Description of Artificial Sequence: Synthetic oligonucleotide
  Sense strand starting at position 1374 of SEQ ID NO: 317650
auguaaauauugguggaaa

SEQ ID NO: 501336 - RNA, 19 nt, Artificial Sequence
  Description of Artificial Sequence: Synthetic oligonucleotide
  Antisense strand to SEQ ID NO: 501335
uuuccaccaauauuuacau

SEQ ID NO: 501337 - RNA, 19 nt, Artificial Sequence
  Description of Artificial Sequence: Synthetic oligonucleotide
  Sense strand starting at position 1376 of SEQ ID NO: 317650
guaaauauugguggaaauc

SEQ ID NO: 501338 - RNA, 19 nt, Artificial Sequence
  Description of Artificial Sequence: Synthetic oligonucleotide
  Antisense strand to SEQ ID NO: 501337
gauuuccaccaauauuuac

SEQ ID NO: 501339 - RNA, 19 nt, Artificial Sequence
  Description of Artificial Sequence: Synthetic oligonucleotide
  Sense strand starting at position 2621 of SEQ ID NO: 317650
cuggaguuugcggagcgau

SEQ ID NO: 501340 - RNA, 19 nt, Artificial Sequence
  Description of Artificial Sequence: Synthetic oligonucleotide
  Antisense strand to SEQ ID NO: 501339
aucgcuccgcaaacuccag

SEQ ID NO: 501341 - RNA, 19 nt, Artificial Sequence
  Description of Artificial Sequence: Synthetic oligonucleotide
  Sense strand starting at position 2622 of SEQ ID NO: 317650
uggaguuugcggagcgauc

SEQ ID NO: 501342 - RNA, 19 nt, Artificial Sequence
  Description of Artificial Sequence: Synthetic oligonucleotide
  Antisense strand to SEQ ID NO: 501341
gaucgcuccgcaaacucca

SEQ ID NO: 501343 - RNA, 19 nt, Artificial Sequence
  Description of Artificial Sequence: Synthetic oligonucleotide
  Sense strand starting at position 3010 of SEQ ID NO: 317650
cccauagugugucuggaau

SEQ ID NO: 501344 - RNA, 19 nt, Artificial Sequence
  Description of Artificial Sequence: Synthetic oligonucleotide
  Antisense strand to SEQ ID NO: 501343
auuccagacacacuauggg

SEQ ID NO: 501345 - RNA, 19 nt, Artificial Sequence
  Description of Artificial Sequence: Synthetic oligonucleotide
  Sense strand starting at position 3106 of SEQ ID NO: 317650
gugcgucuggaguuuguua

SEQ ID NO: 501346 - RNA, 19 nt, Artificial Sequence
  Description of Artificial Sequence: Synthetic oligonucleotide
  Antisense strand to SEQ ID NO: 501345
uaacaaacuccagacgcac

SEQ ID NO: 501347 - RNA, 19 nt, Artificial Sequence
  Description of Artificial Sequence: Synthetic oligonucleotide
  Sense strand starting at position 115 of SEQ ID NO: 317651
acagguguccaguaugacu

SEQ ID NO: 501348 - RNA, 19 nt, Artificial Sequence
  Description of Artificial Sequence: Synthetic oligonucleotide
  Antisense strand to SEQ ID NO: 501347
agucauacuggacaccugu

SEQ ID NO: 501349 - RNA, 19 nt, Artificial Sequence
  Description of Artificial Sequence: Synthetic oligonucleotide
  Sense strand starting at position 123 of SEQ ID NO: 317651
ccaguaugacucuggaugu

SEQ ID NO: 501350 - RNA, 19 nt, Artificial Sequence
  Description of Artificial Sequence: Synthetic oligonucleotide
  Antisense strand to SEQ ID NO: 501349
acauccagagucauacugg

SEQ ID NO: 501351 - RNA, 19 nt, Artificial Sequence
  Description of Artificial Sequence: Synthetic oligonucleotide
  Sense strand starting at position 129 of SEQ ID NO: 317651
ugacucuggauguguuuaa

SEQ ID NO: 501352 - RNA, 19 nt, Artificial Sequence
  Description of Artificial Sequence: Synthetic oligonucleotide
  Antisense strand to SEQ ID NO: 501351
uuaaacacauccagaguca

SEQ ID NO: 501353 - RNA, 19 nt, Artificial Sequence
  Description of Artificial Sequence: Synthetic oligonucleotide
  Sense strand starting at position 130 of SEQ ID NO: 317651
gacucuggauguguuuaaa

SEQ ID NO: 501354 - RNA, 19 nt, Artificial Sequence
  Description of Artificial Sequence: Synthetic oligonucleotide
  Antisense strand to SEQ ID NO: 501353
uuuaaacacauccagaguc

SEQ ID NO: 501355 - RNA, 19 nt, Artificial Sequence
  Description of Artificial Sequence: Synthetic oligonucleotide
  Sense strand starting at position 133 of SEQ ID NO: 317651
ucuggauguguuuaaauuc

SEQ ID NO: 501356 - RNA, 19 nt, Artificial Sequence
  Description of Artificial Sequence: Synthetic oligonucleotide
  Antisense strand to SEQ ID NO: 501355
gaauuuaaacacauccaga

SEQ ID NO: 501357 - RNA, 19 nt, Artificial Sequence
  Description of Artificial Sequence: Synthetic oligonucleotide
  Sense strand starting at position 358 of SEQ ID NO: 317651
aguugagccauugggaaga

SEQ ID NO: 501358 - RNA, 19 nt, Artificial Sequence
  Description of Artificial Sequence: Synthetic oligonucleotide
  Antisense strand to SEQ ID NO: 501357
ucuucccaauggcucaacu

SEQ ID NO: 501359 - RNA, 19 nt, Artificial Sequence
  Description of Artificial Sequence: Synthetic oligonucleotide
  Sense strand starting at position 471 of SEQ ID NO: 317651
acacaacugcccuggagau

SEQ ID NO: 501360 - RNA, 19 nt, Artificial Sequence
  Description of Artificial Sequence: Synthetic oligonucleotide
  Antisense strand to SEQ ID NO: 501359
aucuccagggcaguugugu

SEQ ID NO: 501361 - RNA, 19 nt, Artificial Sequence
  Description of Artificial Sequence: Synthetic oligonucleotide
  Sense strand starting at position 486 of SEQ ID NO: 317651
agauguuccaugggaggca

SEQ ID NO: 501362 - RNA, 19 nt, Artificial Sequence
  Description of Artificial Sequence: Synthetic oligonucleotide
  Antisense strand to SEQ ID NO: 501361
ugccucccauggaacaucu

SEQ ID NO: 501363 - RNA, 19 nt, Artificial Sequence
  Description of Artificial Sequence: Synthetic oligonucleotide
  Sense strand starting at position 566 of SEQ ID NO: 317651
ggagaaggugcaugcaaau

SEQ ID NO: 501364 - RNA, 19 nt, Artificial Sequence
  Description of Artificial Sequence: Synthetic oligonucleotide
  Antisense strand to SEQ ID NO: 501363
auuugcaugcaccuucucc

SEQ ID NO: 501365 - RNA, 19 nt, Artificial Sequence
  Description of Artificial Sequence: Synthetic oligonucleotide
  Sense strand starting at position 1429 of SEQ ID NO: 317651
ccgucuagacccugaaacu

SEQ ID NO: 501366 - RNA, 19 nt, Artificial Sequence
  Description of Artificial Sequence: Synthetic oligonucleotide
  Antisense strand to SEQ ID NO: 501365
aguuucagggucuagacgg

SEQ ID NO: 501367 - RNA, 19 nt, Artificial Sequence
  Description of Artificial Sequence: Synthetic oligonucleotide
  Sense strand starting at position 1460 of SEQ ID NO: 317651
aagccuugcgaucagauua

SEQ ID NO: 501368 - RNA, 19 nt, Artificial Sequence
  Description of Artificial Sequence: Synthetic oligonucleotide
  Antisense strand to SEQ ID NO: 501367
uaaucugaucgcaaggcuu

SEQ ID NO: 501369 - RNA, 19 nt, Artificial Sequence
  Description of Artificial Sequence: Synthetic oligonucleotide
  Sense strand starting at position 1613 of SEQ ID NO: 317651
aaguguaugcuagagcaga

SEQ ID NO: 501370 - RNA, 19 nt, Artificial Sequence
  Description of Artificial Sequence: Synthetic oligonucleotide
  Antisense strand to SEQ ID NO: 501369
ucugcucuagcauacacuu

SEQ ID NO: 501371 - RNA, 19 nt, Artificial Sequence
  Description of Artificial Sequence: Synthetic oligonucleotide
  Sense strand starting at position 1905 of SEQ ID NO: 317651
cgagaaagucacggaagaa

SEQ ID NO: 501372 - RNA, 19 nt, Artificial Sequence
  Description of Artificial Sequence: Synthetic oligonucleotide
  Antisense strand to SEQ ID NO: 501371
uucuuccgugacuuucucg

SEQ ID NO: 501373 - RNA, 19 nt, Artificial Sequence
  Description of Artificial Sequence: Synthetic oligonucleotide
  Sense strand starting at position 2286 of SEQ ID NO: 317651
ggcgaauuaggagaugagu

SEQ ID NO: 501374 - RNA, 19 nt, Artificial Sequence
  Description of Artificial Sequence: Synthetic oligonucleotide
  Antisense strand to SEQ ID NO: 501373
acucaucuccuaauucgcc

SEQ ID NO: 501375 - RNA, 19 nt, Artificial Sequence
  Description of Artificial Sequence: Synthetic oligonucleotide
  Sense strand starting at position 2288 of SEQ ID NO: 317651
cgaauuaggagaugagucu

SEQ ID NO: 501376 - RNA, 19 nt, Artificial Sequence
  Description of Artificial Sequence: Synthetic oligonucleotide
  Antisense strand to SEQ ID NO: 501375
agacucaucuccuaauucg

SEQ ID NO: 501377 - RNA, 19 nt, Artificial Sequence
  Description of Artificial Sequence: Synthetic oligonucleotide
  Sense strand starting at position 2712 of SEQ ID NO: 317651
gugacuuugcgggacaaag

SEQ ID NO: 501378 - RNA, 19 nt, Artificial Sequence
  Description of Artificial Sequence: Synthetic oligonucleotide
  Antisense strand to SEQ ID NO: 501377
cuuugucccgcaaagucac

SEQ ID NO: 501379 - RNA, 19 nt, Artificial Sequence
  Description of Artificial Sequence: Synthetic oligonucleotide
  Sense strand starting at position 2912 of SEQ ID NO: 317651
gucaaauucgcacaucaca

SEQ ID NO: 501380 - RNA, 19 nt, Artificial Sequence
  Description of Artificial Sequence: Synthetic oligonucleotide
  Antisense strand to SEQ ID NO: 501379
ugugaugugcgaauuugac

SEQ ID NO: 501381 - RNA, 19 nt, Artificial Sequence
  Description of Artificial Sequence: Synthetic oligonucleotide
  Sense strand starting at position 3019 of SEQ ID NO: 317651
uuucuaagcccggagauaa

SEQ ID NO: 501382 - RNA, 19 nt, Artificial Sequence
  Description of Artificial Sequence: Synthetic oligonucleotide
  Antisense strand to SEQ ID NO: 501381
uuaucuccgggcuuagaaa

SEQ ID NO: 501383 - RNA, 19 nt, Artificial Sequence
  Description of Artificial Sequence: Synthetic oligonucleotide
  Sense strand starting at position 3031 of SEQ ID NO: 317651
gagauaauguaauucguca

SEQ ID NO: 501384 - RNA, 19 nt, Artificial Sequence
  Description of Artificial Sequence: Synthetic oligonucleotide
  Antisense strand to SEQ ID NO: 501383
ugacgaauuacauuaucuc

SEQ ID NO: 501385 - RNA, 19 nt, Artificial Sequence
  Description of Artificial Sequence: Synthetic oligonucleotide
  Sense strand starting at position 3035 of SEQ ID NO: 317651
uaauguaauucgucaugga

SEQ ID NO: 501386 - RNA, 19 nt, Artificial Sequence
  Description of Artificial Sequence: Synthetic oligonucleotide
  Antisense strand to SEQ ID NO: 501385
uccaugacgaauuacauua

SEQ ID NO: 501387 - RNA, 19 nt, Artificial Sequence
  Description of Artificial Sequence: Synthetic oligonucleotide
  Sense strand starting at position 3036 of SEQ ID NO: 317651
aauguaauucgucauggaa

SEQ ID NO: 501388 - RNA, 19 nt, Artificial Sequence
  Description of Artificial Sequence: Synthetic oligonucleotide
  Antisense strand to SEQ ID NO: 501387
uuccaugacgaauuacauu

SEQ ID NO: 501389 - RNA, 19 nt, Artificial Sequence
  Description of Artificial Sequence: Synthetic oligonucleotide
  Sense strand starting at position 3039 of SEQ ID NO: 317651
guaauucgucauggaauau

SEQ ID NO: 501390 - RNA, 19 nt, Artificial Sequence
  Description of Artificial Sequence: Synthetic oligonucleotide
  Antisense strand to SEQ ID NO: 501389
auauuccaugacgaauuac

SEQ ID NO: 501391 - RNA, 19 nt, Artificial Sequence
  Description of Artificial Sequence: Synthetic oligonucleotide
  Sense strand starting at position 3050 of SEQ ID NO: 317651
uggaauaugcuuuaaaguu

SEQ ID NO: 501392 - RNA, 19 nt, Artificial Sequence
  Description of Artificial Sequence: Synthetic oligonucleotide
  Antisense strand to SEQ ID NO: 501391
aacuuuaaagcauauucca

SEQ ID NO: 501393 - RNA, 19 nt, Artificial Sequence
  Description of Artificial Sequence: Synthetic oligonucleotide
  Sense strand starting at position 3058 of SEQ ID NO: 317651
gcuuuaaaguuucccagga

SEQ ID NO: 501394 - RNA, 19 nt, Artificial Sequence
  Description of Artificial Sequence: Synthetic oligonucleotide
  Antisense strand to SEQ ID NO: 501393
uccugggaaacuuuaaagc

SEQ ID NO: 501395 - RNA, 19 nt, Artificial Sequence
  Description of Artificial Sequence: Synthetic oligonucleotide
  Sense strand starting at position 3062 of SEQ ID NO: 317651
uaaaguuucccaggacagu

SEQ ID NO: 501396 - RNA, 19 nt, Artificial Sequence
  Description of Artificial Sequence: Synthetic oligonucleotide
  Antisense strand to SEQ ID NO: 501395
acuguccugggaaacuuua

SEQ ID NO: 501397 - RNA, 19 nt, Artificial Sequence
  Description of Artificial Sequence: Synthetic oligonucleotide
  Sense strand starting at position 3625 of SEQ ID NO: 317651
ugucaaaggugacuacuau

SEQ ID NO: 501398 - RNA, 19 nt, Artificial Sequence
  Description of Artificial Sequence: Synthetic oligonucleotide
  Antisense strand to SEQ ID NO: 501397
auaguagucaccuuugaca

SEQ ID NO: 501399 - RNA, 19 nt, Artificial Sequence
  Description of Artificial Sequence: Synthetic oligonucleotide
  Sense strand starting at position 3637 of SEQ ID NO: 317651
cuacuaugccuuuaaggga

SEQ ID NO: 501400 - RNA, 19 nt, Artificial Sequence
  Description of Artificial Sequence: Synthetic oligonucleotide
  Antisense strand to SEQ ID NO: 501399
ucccuuaaaggcauaguag

SEQ ID NO: 501401 - RNA, 19 nt, Artificial Sequence
  Description of Artificial Sequence: Synthetic oligonucleotide
  Sense strand starting at position 3678 of SEQ ID NO: 317651
gaaagccauuguuugaauu

SEQ ID NO: 501402 - RNA, 19 nt, Artificial Sequence
  Description of Artificial Sequence: Synthetic oligonucleotide
  Antisense strand to SEQ ID NO: 501401
aauucaaacaauggcuuuc

SEQ ID NO: 501403 - RNA, 19 nt, Artificial Sequence
  Description of Artificial Sequence: Synthetic oligonucleotide
  Sense strand starting at position 3691 of SEQ ID NO: 317651
ugaauuagcugaguccuau

SEQ ID NO: 501404 - RNA, 19 nt, Artificial Sequence
  Description of Artificial Sequence: Synthetic oligonucleotide
  Antisense strand to SEQ ID NO: 501403
auaggacucagcuaauuca

SEQ ID NO: 501405 - RNA, 19 nt, Artificial Sequence
  Description of Artificial Sequence: Synthetic oligonucleotide
  Sense strand starting at position 3697 of SEQ ID NO: 317651
agcugaguccuauaauacu

SEQ ID NO: 501406 - RNA, 19 nt, Artificial Sequence
  Description of Artificial Sequence: Synthetic oligonucleotide
  Antisense strand to SEQ ID NO: 501405
aguauuauaggacucagcu

SEQ ID NO: 501407 - RNA, 19 nt, Artificial Sequence
  Description of Artificial Sequence: Synthetic oligonucleotide
  Sense strand starting at position 3716 of SEQ ID NO: 317651
uucuuugaguuguccagag

SEQ ID NO: 501408 - RNA, 19 nt, Artificial Sequence
  Description of Artificial Sequence: Synthetic oligonucleotide
  Antisense strand to SEQ ID NO: 501407
cucuggacaacucaaagaa

SEQ ID NO: 501409 - RNA, 19 nt, Artificial Sequence
  Description of Artificial Sequence: Synthetic oligonucleotide
  Sense strand starting at position 3718 of SEQ ID NO: 317651
cuuugaguuguccagaguu

SEQ ID NO: 501410 - RNA, 19 nt, Artificial Sequence
  Description of Artificial Sequence: Synthetic oligonucleotide
  Antisense strand to SEQ ID NO: 501409
aacucuggacaacucaaag

SEQ ID NO: 501411 - RNA, 19 nt, Artificial Sequence
  Description of Artificial Sequence: Synthetic oligonucleotide
  Sense strand starting at position 3720 of SEQ ID NO: 317651
uugaguuguccagaguuua

SEQ ID NO: 501412 - RNA, 19 nt, Artificial Sequence
  Description of Artificial Sequence: Synthetic oligonucleotide
  Antisense strand to SEQ ID NO: 501411
uaaacucuggacaacucaa

SEQ ID NO: 501413 - RNA, 19 nt, Artificial Sequence
  Description of Artificial Sequence: Synthetic oligonucleotide
  Sense strand starting at position 3759 of SEQ ID NO: 317651
caaggugacuuugucaaga

SEQ ID NO: 501414 - RNA, 19 nt, Artificial Sequence
  Description of Artificial Sequence: Synthetic oligonucleotide
  Antisense strand to SEQ ID NO: 501413
ucuugacaaagucaccuug

SEQ ID NO: 501415 - RNA, 19 nt, Artificial Sequence
  Description of Artificial Sequence: Synthetic oligonucleotide
  Sense strand starting at position 3764 of SEQ ID NO: 317651
ugacuuugucaagagugau

SEQ ID NO: 501416 - RNA, 19 nt, Artificial Sequence
  Description of Artificial Sequence: Synthetic oligonucleotide
  Antisense strand to SEQ ID NO: 501415
aucacucuugacaaaguca

SEQ ID NO: 501417 - RNA, 19 nt, Artificial Sequence
  Description of Artificial Sequence: Synthetic oligonucleotide
  Sense strand starting at position 3808 of SEQ ID NO: 317651
aucucuaaugcuggaguaa

SEQ ID NO: 501418 - RNA, 19 nt, Artificial Sequence
  Description of Artificial Sequence: Synthetic oligonucleotide
  Antisense strand to SEQ ID NO: 501417
uuacuccagcauuagagau

SEQ ID NO: 501419 - RNA, 19 nt, Artificial Sequence
  Description of Artificial Sequence: Synthetic oligonucleotide
  Sense strand starting at position 3809 of SEQ ID NO: 317651
ucucuaaugcuggaguaac

SEQ ID NO: 501420 - RNA, 19 nt, Artificial Sequence
  Description of Artificial Sequence: Synthetic oligonucleotide
  Antisense strand to SEQ ID NO: 501419
guuacuccagcauuagaga

SEQ ID NO: 501421 - RNA, 19 nt, Artificial Sequence
  Description of Artificial Sequence: Synthetic oligonucleotide
  Sense strand starting at position 3852 of SEQ ID NO: 317651
aagaaauaucuggguuacu

SEQ ID NO: 501422 - RNA, 19 nt, Artificial Sequence
  Description of Artificial Sequence: Synthetic oligonucleotide
  Antisense strand to SEQ ID NO: 501421
aguaacccagauauuucuu

SEQ ID NO: 501423 - RNA, 19 nt, Artificial Sequence
  Description of Artificial Sequence: Synthetic oligonucleotide
  Sense strand starting at position 3853 of SEQ ID NO: 317651
agaaauaucuggguuacuu

SEQ ID NO: 501424 - RNA, 19 nt, Artificial Sequence
  Description of Artificial Sequence: Synthetic oligonucleotide
  Antisense strand to SEQ ID NO: 501423
aaguaacccagauauuucu

SEQ ID NO: 501425 - RNA, 19 nt, Artificial Sequence
  Description of Artificial Sequence: Synthetic oligonucleotide
  Sense strand starting at position 3857 of SEQ ID NO: 317651
auaucuggguuacuuagaa

SEQ ID NO: 501426 - RNA, 19 nt, Artificial Sequence
  Description of Artificial Sequence: Synthetic oligonucleotide
  Antisense strand to SEQ ID NO: 501425
uucuaaguaacccagauau

SEQ ID NO: 501427 - RNA, 19 nt, Artificial Sequence
  Description of Artificial Sequence: Synthetic oligonucleotide
  Sense strand starting at position 519 of SEQ ID NO: 317652
ggccaaagaccgugacauu

SEQ ID NO: 501428 - RNA, 19 nt, Artificial Sequence
  Description of Artificial Sequence: Synthetic oligonucleotide
  Antisense strand to SEQ ID NO: 501427
aaugucacggucuuuggcc

SEQ ID NO: 501429 - RNA, 19 nt, Artificial Sequence
  Description of Artificial Sequence: Synthetic oligonucleotide
  Sense strand starting at position 522 of SEQ ID NO: 317652
caaagaccgugacauugua

SEQ ID NO: 501430 - RNA, 19 nt, Artificial Sequence
  Description of Artificial Sequence: Synthetic oligonucleotide
  Antisense strand to SEQ ID NO: 501429
uacaaugucacggucuuug

SEQ ID NO: 501431 - RNA, 19 nt, Artificial Sequence
  Description of Artificial Sequence: Synthetic oligonucleotide
  Sense strand starting at position 746 of SEQ ID NO: 317652
ggcguuagaucggcggaga

SEQ ID NO: 501432 - RNA, 19 nt, Artificial Sequence
  Description of Artificial Sequence: Synthetic oligonucleotide
  Antisense strand to SEQ ID NO: 501431
ucuccgccgaucuaacgcc

SEQ ID NO: 501433 - RNA, 19 nt, Artificial Sequence
  Description of Artificial Sequence: Synthetic oligonucleotide
  Sense strand starting at position 2399 of SEQ ID NO: 317652
acccaucagcccuggaauu

SEQ ID NO: 501434 - RNA, 19 nt, Artificial Sequence
  Description of Artificial Sequence: Synthetic oligonucleotide
  Antisense strand to SEQ ID NO: 501433
aauuccagggcugaugggu

SEQ ID NO: 501435 - RNA, 19 nt, Artificial Sequence
  Description of Artificial Sequence: Synthetic oligonucleotide
  Sense strand starting at position 2902 of SEQ ID NO: 317652
gggccaguuugcuguuaga

SEQ ID NO: 501436 - RNA, 19 nt, Artificial Sequence
  Description of Artificial Sequence: Synthetic oligonucleotide
  Antisense strand to SEQ ID NO: 501435
ucuaacagcaaacuggccc

SEQ ID NO: 501437 - RNA, 19 nt, Artificial Sequence
  Description of Artificial Sequence: Synthetic oligonucleotide
  Sense strand starting at position 2904 of SEQ ID NO: 317652
gccaguuugcuguuagagc

SEQ ID NO: 501438 - RNA, 19 nt, Artificial Sequence
  Description of Artificial Sequence: Synthetic oligonucleotide
  Antisense strand to SEQ ID NO: 501437
gcucuaacagcaaacuggc

SEQ ID NO: 501439 - RNA, 19 nt, Artificial Sequence
  Description of Artificial Sequence: Synthetic oligonucleotide
  Sense strand starting at position 3031 of SEQ ID NO: 317652
cucucaggcuguugaucau

SEQ ID NO: 501440 - RNA, 19 nt, Artificial Sequence
  Description of Artificial Sequence: Synthetic oligonucleotide
  Antisense strand to SEQ ID NO: 501439
augaucaacagccugagag

SEQ ID NO: 501441 - RNA, 19 nt, Artificial Sequence
  Description of Artificial Sequence: Synthetic oligonucleotide
  Sense strand starting at position 3258 of SEQ ID NO: 317652
ggcucuaacugugaucuca

SEQ ID NO: 501442 - RNA, 19 nt, Artificial Sequence
  Description of Artificial Sequence: Synthetic oligonucleotide
  Antisense strand to SEQ ID NO: 501441
ugagaucacaguuagagcc

SEQ ID NO: 501443 - RNA, 19 nt, Artificial Sequence
  Description of Artificial Sequence: Synthetic oligonucleotide
  Sense strand starting at position 3278 of SEQ ID NO: 317652
guccuugguucuuucgauu

SEQ ID NO: 501444 - RNA, 19 nt, Artificial Sequence
  Description of Artificial Sequence: Synthetic oligonucleotide
  Antisense strand to SEQ ID NO: 501443
aaucgaaagaaccaaggac

SEQ ID NO: 501445 - RNA, 19 nt, Artificial Sequence
  Description of Artificial Sequence: Synthetic oligonucleotide
  Sense strand starting at position 3284 of SEQ ID NO: 317652
gguucuuucgauugugggu

SEQ ID NO: 501446 - RNA, 19 nt, Artificial Sequence
  Description of Artificial Sequence: Synthetic oligonucleotide
  Antisense strand to SEQ ID NO: 501445
acccacaaucgaaagaacc

SEQ ID NO: 501447 - RNA, 19 nt, Artificial Sequence
  Description of Artificial Sequence: Synthetic oligonucleotide
  Sense strand starting at position 3350 of SEQ ID NO: 317652
cuguacucuuucuguguca

SEQ ID NO: 501448 - RNA, 19 nt, Artificial Sequence
  Description of Artificial Sequence: Synthetic oligonucleotide
  Antisense strand to SEQ ID NO: 501447
ugacacagaaagaguacag

SEQ ID NO: 501449 - RNA, 19 nt, Artificial Sequence
  Description of Artificial Sequence: Synthetic oligonucleotide
  Sense strand starting at position 3456 of SEQ ID NO: 317652
ggaagauguggccacgcua

SEQ ID NO: 501450 - RNA, 19 nt, Artificial Sequence
  Description of Artificial Sequence: Synthetic oligonucleotide
  Antisense strand to SEQ ID NO: 501449
uagcguggccacaucuucc

SEQ ID NO: 501451 - RNA, 19 nt, Artificial Sequence
  Description of Artificial Sequence: Synthetic oligonucleotide
  Sense strand starting at position 3585 of SEQ ID NO: 317652
cccaacugguuccagagaa

SEQ ID NO: 501452 - RNA, 19 nt, Artificial Sequence
  Description of Artificial Sequence: Synthetic oligonucleotide
  Antisense strand to SEQ ID NO: 501451
uucucuggaaccaguuggg

SEQ ID NO: 501453 - RNA, 19 nt, Artificial Sequence
  Description of Artificial Sequence: Synthetic oligonucleotide
  Sense strand starting at position 3612 of SEQ ID NO: 317652
cuggaauccuaguauacca

SEQ ID NO: 501454 - RNA, 19 nt, Artificial Sequence
  Description of Artificial Sequence: Synthetic oligonucleotide
  Antisense strand to SEQ ID NO: 501453
ugguauacuaggauuccag

SEQ ID NO: 501455 - RNA, 19 nt, Artificial Sequence
  Description of Artificial Sequence: Synthetic oligonucleotide
  Sense strand starting at position 3678 of SEQ ID NO: 317652
guggcaugaguugaauugu

SEQ ID NO: 501456 - RNA, 19 nt, Artificial Sequence
  Description of Artificial Sequence: Synthetic oligonucleotide
  Antisense strand to SEQ ID NO: 501455
acaauucaacucaugccac

SEQ ID NO: 501457 - RNA, 19 nt, Artificial Sequence
  Description of Artificial Sequence: Synthetic oligonucleotide
  Sense strand starting at position 3735 of SEQ ID NO: 317652
gccaguugcuguccuggaa

SEQ ID NO: 501458 - RNA, 19 nt, Artificial Sequence
  Description of Artificial Sequence: Synthetic oligonucleotide
  Antisense strand to SEQ ID NO: 501457
uuccaggacagcaacuggc

SEQ ID NO: 501459 - RNA, 19 nt, Artificial Sequence
  Description of Artificial Sequence: Synthetic oligonucleotide
  Sense strand starting at position 3760 of SEQ ID NO: 317652
acgcauuccuccugugguu

SEQ ID NO: 501460 - RNA, 19 nt, Artificial Sequence
  Description of Artificial Sequence: Synthetic oligonucleotide
  Antisense strand to SEQ ID NO: 501459
aaccacaggaggaaugcgu

SEQ ID NO: 501461 - RNA, 19 nt, Artificial Sequence
  Description of Artificial Sequence: Synthetic oligonucleotide
  Sense strand starting at position 3865 of SEQ ID NO: 317652
ccgugucuaugguugggua

SEQ ID NO: 501462 - RNA, 19 nt, Artificial Sequence
  Description of Artificial Sequence: Synthetic oligonucleotide
  Antisense strand to SEQ ID NO: 501461
uacccaaccauagacacgg

SEQ ID NO: 501463 - RNA, 19 nt, Artificial Sequence
  Description of Artificial Sequence: Synthetic oligonucleotide
  Sense strand starting at position 3866 of SEQ ID NO: 317652
cgugucuaugguuggguau

SEQ ID NO: 501464 - RNA, 19 nt, Artificial Sequence
  Description of Artificial Sequence: Synthetic oligonucleotide
  Antisense strand to SEQ ID NO: 501463
auacccaaccauagacacg

SEQ ID NO: 501465 - RNA, 19 nt, Artificial Sequence
  Description of Artificial Sequence: Synthetic oligonucleotide
  Sense strand starting at position 3867 of SEQ ID NO: 317652
gugucuaugguuggguauu

SEQ ID NO: 501466 - RNA, 19 nt, Artificial Sequence
  Description of Artificial Sequence: Synthetic oligonucleotide
  Antisense strand to SEQ ID NO: 501465
aauacccaaccauagacac

SEQ ID NO: 501467 - RNA, 19 nt, Artificial Sequence
  Description of Artificial Sequence: Synthetic oligonucleotide
  Sense strand starting at position 3868 of SEQ ID NO: 317652
ugucuaugguuggguauuu

SEQ ID NO: 501468 - RNA, 19 nt, Artificial Sequence
  Description of Artificial Sequence: Synthetic oligonucleotide
  Antisense strand to SEQ ID NO: 501467
aaauacccaaccauagaca

SEQ ID NO: 501469 - RNA, 19 nt, Artificial Sequence
  Description of Artificial Sequence: Synthetic oligonucleotide
  Sense strand starting at position 3958 of SEQ ID NO: 317652
ccagcaucucaccauguuu

SEQ ID NO: 501470 - RNA, 19 nt, Artificial Sequence
  Description of Artificial Sequence: Synthetic oligonucleotide
  Antisense strand to SEQ ID NO: 501469
aaacauggugagaugcugg

SEQ ID NO: 501471 - RNA, 19 nt, Artificial Sequence
  Description of Artificial Sequence: Synthetic oligonucleotide
  Sense strand starting at position 5 of SEQ ID NO: 317653
agcuguggcaaaugaauga

SEQ ID NO: 501472 - RNA, 19 nt, Artificial Sequence
  Description of Artificial Sequence: Synthetic oligonucleotide
  Antisense strand to SEQ ID NO: 501471
ucauucauuugccacagcu

SEQ ID NO: 501473 - RNA, 19 nt, Artificial Sequence
  Description of Artificial Sequence: Synthetic oligonucleotide
  Sense strand starting at position 492 of SEQ ID NO: 317653
ccugguugaguugauccua

SEQ ID NO: 501474 - RNA, 19 nt, Artificial Sequence
  Description of Artificial Sequence: Synthetic oligonucleotide
  Antisense strand to SEQ ID NO: 501473
uaggaucaacucaaccagg

SEQ ID NO: 501475 - RNA, 19 nt, Artificial Sequence
  Description of Artificial Sequence: Synthetic oligonucleotide
  Sense strand starting at position 662 of SEQ ID NO: 317653
cucagugcgcuuucucaau

SEQ ID NO: 501476 - RNA, 19 nt, Artificial Sequence
  Description of Artificial Sequence: Synthetic oligonucleotide
  Antisense strand to SEQ ID NO: 501475
auugagaaagcgcacugag

SEQ ID NO: 501477 - RNA, 19 nt, Artificial Sequence
  Description of Artificial Sequence: Synthetic oligonucleotide
  Sense strand starting at position 729 of SEQ ID NO: 317653
ggaauuguagcacauauua

SEQ ID NO: 501478 - RNA, 19 nt, Artificial Sequence
  Description of Artificial Sequence: Synthetic oligonucleotide
  Antisense strand to SEQ ID NO: 501477
uaauaugugcuacaauucc

SEQ ID NO: 501479 - RNA, 19 nt, Artificial Sequence
  Description of Artificial Sequence: Synthetic oligonucleotide
  Sense strand starting at position 804 of SEQ ID NO: 317653
ccugaacuuuggucccaua

SEQ ID NO: 501480 - RNA, 19 nt, Artificial Sequence
  Description of Artificial Sequence: Synthetic oligonucleotide
  Antisense strand to SEQ ID NO: 501479
uaugggaccaaaguucagg

SEQ ID NO: 501481 - RNA, 19 nt, Artificial Sequence
  Description of Artificial Sequence: Synthetic oligonucleotide
  Sense strand starting at position 926 of SEQ ID NO: 317653
cuuugauuagccuauuaag

SEQ ID NO: 501482 - RNA, 19 nt, Artificial Sequence
  Description of Artificial Sequence: Synthetic oligonucleotide
  Antisense strand to SEQ ID NO: 501481
cuuaauaggcuaaucaaag

SEQ ID NO: 501483 - RNA, 19 nt, Artificial Sequence
  Description of Artificial Sequence: Synthetic oligonucleotide
  Sense strand starting at position 1016 of SEQ ID NO: 317653
auaugcacuugucugaaga

SEQ ID NO: 501484 - RNA, 19 nt, Artificial Sequence
  Description of Artificial Sequence: Synthetic oligonucleotide
  Antisense strand to SEQ ID NO: 501483
ucuucagacaagugcauau

SEQ ID NO: 501485 - RNA, 19 nt, Artificial Sequence
  Description of Artificial Sequence: Synthetic oligonucleotide
  Sense strand starting at position 1245 of SEQ ID NO: 317653
cugcaagucccagaauucu

SEQ ID NO: 501486 - RNA, 19 nt, Artificial Sequence
  Description of Artificial Sequence: Synthetic oligonucleotide
  Antisense strand to SEQ ID NO: 501485
agaauucugggacuugcag

SEQ ID NO: 501487 - RNA, 19 nt, Artificial Sequence
  Description of Artificial Sequence: Synthetic oligonucleotide
  Sense strand starting at position 1271 of SEQ ID NO: 317653
ccgacaagucuggaguuaa

SEQ ID NO: 501488 - RNA, 19 nt, Artificial Sequence
  Description of Artificial Sequence: Synthetic oligonucleotide
  Antisense strand to SEQ ID NO: 501487
uuaacuccagacuugucgg

SEQ ID NO: 501489 - RNA, 19 nt, Artificial Sequence
  Description of Artificial Sequence: Synthetic oligonucleotide
  Sense strand starting at position 1509 of SEQ ID NO: 317653
uagagauugcacuggacga

SEQ ID NO: 501490 - RNA, 19 nt, Artificial Sequence
  Description of Artificial Sequence: Synthetic oligonucleotide
  Antisense strand to SEQ ID NO: 501489
ucguccagugcaaucucua

SEQ ID NO: 501491 - RNA, 19 nt, Artificial Sequence
  Description of Artificial Sequence: Synthetic oligonucleotide
  Sense strand starting at position 1655 of SEQ ID NO: 317653
ccgggcuuuagagaacuga

SEQ ID NO: 501492 - RNA, 19 nt, Artificial Sequence
  Description of Artificial Sequence: Synthetic oligonucleotide
  Antisense strand to SEQ ID NO: 501491
ucaguucucuaaagcccgg

SEQ ID NO: 501493 - RNA, 19 nt, Artificial Sequence
  Description of Artificial Sequence: Synthetic oligonucleotide
  Sense strand starting at position 1715 of SEQ ID NO: 317653
aggcuaucacucugagaug

SEQ ID NO: 501494 - RNA, 19 nt, Artificial Sequence
  Description of Artificial Sequence: Synthetic oligonucleotide
  Antisense strand to SEQ ID NO: 501493
caucucagagugauagccu

SEQ ID NO: 501495 - RNA, 19 nt, Artificial Sequence
  Description of Artificial Sequence: Synthetic oligonucleotide
  Sense strand starting at position 1837 of SEQ ID NO: 317653
ccucucuuccuggaaagcu

SEQ ID NO: 501496 - RNA, 19 nt, Artificial Sequence
  Description of Artificial Sequence: Synthetic oligonucleotide
  Antisense strand to SEQ ID NO: 501495
agcuuuccaggaagagagg

SEQ ID NO: 501497 - RNA, 19 nt, Artificial Sequence
  Description of Artificial Sequence: Synthetic oligonucleotide
  Sense strand starting at position 1852 of SEQ ID NO: 317653
agcuuagugccuuugcuau

SEQ ID NO: 501498 - RNA, 19 nt, Artificial Sequence
  Description of Artificial Sequence: Synthetic oligonucleotide
  Antisense strand to SEQ ID NO: 501497
auagcaaaggcacuaagcu

SEQ ID NO: 501499 - RNA, 19 nt, Artificial Sequence
  Description of Artificial Sequence: Synthetic oligonucleotide
  Sense strand starting at position 1951 of SEQ ID NO: 317653
gaaguagcccuagaucuca

SEQ ID NO: 501500 - RNA, 19 nt, Artificial Sequence
  Description of Artificial Sequence: Synthetic oligonucleotide
  Antisense strand to SEQ ID NO: 501499
ugagaucuagggcuacuuc

SEQ ID NO: 501501 - RNA, 19 nt, Artificial Sequence
  Description of Artificial Sequence: Synthetic oligonucleotide
  Sense strand starting at position 1988 of SEQ ID NO: 317653
cuugaauugcagcaggaga

SEQ ID NO: 501502 - RNA, 19 nt, Artificial Sequence
  Description of Artificial Sequence: Synthetic oligonucleotide
  Antisense strand to SEQ ID NO: 501501
ucuccugcugcaauucaag

SEQ ID NO: 501503 - RNA, 19 nt, Artificial Sequence
  Description of Artificial Sequence: Synthetic oligonucleotide
  Sense strand starting at position 1990 of SEQ ID NO: 317653
ugaauugcagcaggagaaa

SEQ ID NO: 501504 - RNA, 19 nt, Artificial Sequence
  Description of Artificial Sequence: Synthetic oligonucleotide
  Antisense strand to SEQ ID NO: 501503
uuucuccugcugcaauuca

SEQ ID NO: 501505 - RNA, 19 nt, Artificial Sequence
  Description of Artificial Sequence: Synthetic oligonucleotide
  Sense strand starting at position 2299 of SEQ ID NO: 317653
auuaguuguuucuuggaaa

SEQ ID NO: 501506 - RNA, 19 nt, Artificial Sequence
  Description of Artificial Sequence: Synthetic oligonucleotide
  Antisense strand to SEQ ID NO: 501505
uuuccaagaaacaacuaau

SEQ ID NO: 501507 - RNA, 19 nt, Artificial Sequence
  Description of Artificial Sequence: Synthetic oligonucleotide
  Sense strand starting at position 2355 of SEQ ID NO: 317653
ggacuaaugucacuguuaa

SEQ ID NO: 501508 - RNA, 19 nt, Artificial Sequence
  Description of Artificial Sequence: Synthetic oligonucleotide
  Antisense strand to SEQ ID NO: 501507
uuaacagugacauuagucc

SEQ ID NO: 501509 - RNA, 19 nt, Artificial Sequence
  Description of Artificial Sequence: Synthetic oligonucleotide
  Sense strand starting at position 2356 of SEQ ID NO: 317653
gacuaaugucacuguuaag

SEQ ID NO: 501510 - RNA, 19 nt, Artificial Sequence
  Description of Artificial Sequence: Synthetic oligonucleotide
  Antisense strand to SEQ ID NO: 501509
cuuaacagugacauuaguc

SEQ ID NO: 501511 - RNA, 19 nt, Artificial Sequence
  Description of Artificial Sequence: Synthetic oligonucleotide
  Sense strand starting at position 2698 of SEQ ID NO: 317653
aagagagaagcuugcauua

SEQ ID NO: 501512 - RNA, 19 nt, Artificial Sequence
  Description of Artificial Sequence: Synthetic oligonucleotide
  Antisense strand to SEQ ID NO: 501511
uaaugcaagcuucucucuu

SEQ ID NO: 501513 - RNA, 19 nt, Artificial Sequence
  Description of Artificial Sequence: Synthetic oligonucleotide
  Sense strand starting at position 2792 of SEQ ID NO: 317653
aagucaguccauugaauga

SEQ ID NO: 501514 - RNA, 19 nt, Artificial Sequence
  Description of Artificial Sequence: Synthetic oligonucleotide
  Antisense strand to SEQ ID NO: 501513
ucauucaauggacugacuu

SEQ ID NO: 501515 - RNA, 19 nt, Artificial Sequence
  Description of Artificial Sequence: Synthetic oligonucleotide
  Sense strand starting at position 2899 of SEQ ID NO: 317653
cugcgaucucaagauaaac

SEQ ID NO: 501516 - RNA, 19 nt, Artificial Sequence
  Description of Artificial Sequence: Synthetic oligonucleotide
  Antisense strand to SEQ ID NO: 501515
guuuaucuugagaucgcag

SEQ ID NO: 501517 - RNA, 19 nt, Artificial Sequence
  Description of Artificial Sequence: Synthetic oligonucleotide
  Sense strand starting at position 3114 of SEQ ID NO: 317653
ggcacauacaucggaaaca

SEQ ID NO: 501518 - RNA, 19 nt, Artificial Sequence
  Description of Artificial Sequence: Synthetic oligonucleotide
  Antisense strand to SEQ ID NO: 501517
uguuuccgauguaugugcc

SEQ ID NO: 501519 - RNA, 19 nt, Artificial Sequence
  Description of Artificial Sequence: Synthetic oligonucleotide
  Sense strand starting at position 3176 of SEQ ID NO: 317653
cgguguaaucugcugcauc

SEQ ID NO: 501520 - RNA, 19 nt, Artificial Sequence
  Description of Artificial Sequence: Synthetic oligonucleotide
  Antisense strand to SEQ ID NO: 501519
gaugcagcagauuacaccg

SEQ ID NO: 501521 - RNA, 19 nt, Artificial Sequence
  Description of Artificial Sequence: Synthetic oligonucleotide
  Sense strand starting at position 3203 of SEQ ID NO: 317653
gucucuaccauugagugua

SEQ ID NO: 501522 - RNA, 19 nt, Artificial Sequence
  Description of Artificial Sequence: Synthetic oligonucleotide
  Antisense strand to SEQ ID NO: 501521
uacacucaaugguagagac

SEQ ID NO: 501523 - RNA, 19 nt, Artificial Sequence
  Description of Artificial Sequence: Synthetic oligonucleotide
  Sense strand starting at position 3206 of SEQ ID NO: 317653
ucuaccauugaguguagaa

SEQ ID NO: 501524 - RNA, 19 nt, Artificial Sequence
  Description of Artificial Sequence: Synthetic oligonucleotide
  Antisense strand to SEQ ID NO: 501523
uucuacacucaaugguaga

SEQ ID NO: 501525 - RNA, 19 nt, Artificial Sequence
  Description of Artificial Sequence: Synthetic oligonucleotide
  Sense strand starting at position 3221 of SEQ ID NO: 317653
agaauagggagcuguuuaa

SEQ ID NO: 501526 - RNA, 19 nt, Artificial Sequence
  Description of Artificial Sequence: Synthetic oligonucleotide
  Antisense strand to SEQ ID NO: 501525
uuaaacagcucccuauucu

SEQ ID NO: 501527 - RNA, 19 nt, Artificial Sequence
  Description of Artificial Sequence: Synthetic oligonucleotide
  Sense strand starting at position 3225 of SEQ ID NO: 317653
uagggagcuguuuaagagu

SEQ ID NO: 501528 - RNA, 19 nt, Artificial Sequence
  Description of Artificial Sequence: Synthetic oligonucleotide
  Antisense strand to SEQ ID NO: 501527
acucuuaaacagcucccua

SEQ ID NO: 501529 - RNA, 19 nt, Artificial Sequence
  Description of Artificial Sequence: Synthetic oligonucleotide
  Sense strand starting at position 3483 of SEQ ID NO: 317653
cuaugaauaguuggcuaaa

SEQ ID NO: 501530 - RNA, 19 nt, Artificial Sequence
  Description of Artificial Sequence: Synthetic oligonucleotide
  Antisense strand to SEQ ID NO: 501529
uuuagccaacuauucauag

SEQ ID NO: 501531 - RNA, 19 nt, Artificial Sequence
  Description of Artificial Sequence: Synthetic oligonucleotide
  Sense strand starting at position 3573 of SEQ ID NO: 317653
gaaagcaucuguccacaga

SEQ ID NO: 501532 - RNA, 19 nt, Artificial Sequence
  Description of Artificial Sequence: Synthetic oligonucleotide
  Antisense strand to SEQ ID NO: 501531
ucuguggacagaugcuuuc

SEQ ID NO: 501533 - RNA, 19 nt, Artificial Sequence
  Description of Artificial Sequence: Synthetic oligonucleotide
  Sense strand starting at position 3576 of SEQ ID NO: 317653
agcaucuguccacagagua

SEQ ID NO: 501534 - RNA, 19 nt, Artificial Sequence
  Description of Artificial Sequence: Synthetic oligonucleotide
  Antisense strand to SEQ ID NO: 501533
uacucuguggacagaugcu

SEQ ID NO: 501535 - RNA, 19 nt, Artificial Sequence
  Description of Artificial Sequence: Synthetic oligonucleotide
  Sense strand starting at position 3591 of SEQ ID NO: 317653
aguaaauaguccucauccu

SEQ ID NO: 501536 - RNA, 19 nt, Artificial Sequence
  Description of Artificial Sequence: Synthetic oligonucleotide
  Antisense strand to SEQ ID NO: 501535
aggaugaggacuauuuacu

SEQ ID NO: 501537 - RNA, 19 nt, Artificial Sequence
  Description of Artificial Sequence: Synthetic oligonucleotide
  Sense strand starting at position 3609 of SEQ ID NO: 317653
ugaccuuaaucaguaguau

SEQ ID NO: 501538 - RNA, 19 nt, Artificial Sequence
  Description of Artificial Sequence: Synthetic oligonucleotide
  Antisense strand to SEQ ID NO: 501537
auacuacugauuaagguca

SEQ ID NO: 501539 - RNA, 19 nt, Artificial Sequence
  Description of Artificial Sequence: Synthetic oligonucleotide
  Sense strand starting at position 3717 of SEQ ID NO: 317653
gugcguauuuguaugugua

SEQ ID NO: 501540 - RNA, 19 nt, Artificial Sequence
  Description of Artificial Sequence: Synthetic oligonucleotide
  Antisense strand to SEQ ID NO: 501539
uacacauacaaauacgcac

SEQ ID NO: 501541 - RNA, 19 nt, Artificial Sequence
  Description of Artificial Sequence: Synthetic oligonucleotide
  Sense strand starting at position 3744 of SEQ ID NO: 317653
uguguacauauaugugaaa

SEQ ID NO: 501542 - RNA, 19 nt, Artificial Sequence
  Description of Artificial Sequence: Synthetic oligonucleotide
  Antisense strand to SEQ ID NO: 501541
uuucacauauauguacaca

SEQ ID NO: 501543 - RNA, 19 nt, Artificial Sequence
  Description of Artificial Sequence: Synthetic oligonucleotide
  Sense strand starting at position 3745 of SEQ ID NO: 317653
guguacauauaugugaaau

SEQ ID NO: 501544 - RNA, 19 nt, Artificial Sequence
  Description of Artificial Sequence: Synthetic oligonucleotide
  Antisense strand to SEQ ID NO: 501543
auuucacauauauguacac

SEQ ID NO: 501545 - RNA, 19 nt, Artificial Sequence
  Description of Artificial Sequence: Synthetic oligonucleotide
  Sense strand starting at position 3755 of SEQ ID NO: 317653
augugaaauacaugaggua

SEQ ID NO: 501546 - RNA, 19 nt, Artificial Sequence
  Description of Artificial Sequence: Synthetic oligonucleotide
  Antisense strand to SEQ ID NO: 501545
uaccucauguauuucacau

SEQ ID NO: 501547 - RNA, 19 nt, Artificial Sequence
  Description of Artificial Sequence: Synthetic oligonucleotide
  Sense strand starting at position 3840 of SEQ ID NO: 317653
aguguugaaccuuaaccuu

SEQ ID NO: 501548 - RNA, 19 nt, Artificial Sequence
  Description of Artificial Sequence: Synthetic oligonucleotide
  Antisense strand to SEQ ID NO: 501547
aagguuaagguucaacacu

SEQ ID NO: 501549 - RNA, 19 nt, Artificial Sequence
  Description of Artificial Sequence: Synthetic oligonucleotide
  Sense strand starting at position 3918 of SEQ ID NO: 317653
agguaugagcaguaaacau

SEQ ID NO: 501550 - RNA, 19 nt, Artificial Sequence
  Description of Artificial Sequence: Synthetic oligonucleotide
  Antisense strand to SEQ ID NO: 501549
auguuuacugcucauaccu

SEQ ID NO: 501551 - RNA, 19 nt, Artificial Sequence
  Description of Artificial Sequence: Synthetic oligonucleotide
  Sense strand starting at position 56 of SEQ ID NO: 317654
ccuuuccauuuagaagaga

SEQ ID NO: 501552 - RNA, 19 nt, Artificial Sequence
  Description of Artificial Sequence: Synthetic oligonucleotide
  Antisense strand to SEQ ID NO: 501551
ucucuucuaaauggaaagg

SEQ ID NO: 501553 - RNA, 19 nt, Artificial Sequence
  Description of Artificial Sequence: Synthetic oligonucleotide
  Sense strand starting at position 85 of SEQ ID NO: 317654
gcagguuugaauuacaggu

SEQ ID NO: 501554 - RNA, 19 nt, Artificial Sequence
  Description of Artificial Sequence: Synthetic oligonucleotide
  Antisense strand to SEQ ID NO: 501553
accuguaauucaaaccugc

SEQ ID NO: 501555 - RNA, 19 nt, Artificial Sequence
  Description of Artificial Sequence: Synthetic oligonucleotide
  Sense strand starting at position 209 of SEQ ID NO: 317654
uagagauccugcuugccca

SEQ ID NO: 501556 - RNA, 19 nt, Artificial Sequence
  Description of Artificial Sequence: Synthetic oligonucleotide
  Antisense strand to SEQ ID NO: 501555
ugggcaagcaggaucucua

SEQ ID NO: 501557 - RNA, 19 nt, Artificial Sequence
  Description of Artificial Sequence: Synthetic oligonucleotide
  Sense strand starting at position 310 of SEQ ID NO: 317654
auagaaggcugguuacaug

SEQ ID NO: 501558 - RNA, 19 nt, Artificial Sequence
  Description of Artificial Sequence: Synthetic oligonucleotide
  Antisense strand to SEQ ID NO: 501557
cauguaaccagccuucuau

SEQ ID NO: 501559 - RNA, 19 nt, Artificial Sequence
  Description of Artificial Sequence: Synthetic oligonucleotide
  Sense strand starting at position 317 of SEQ ID NO: 317654
gcugguuacauguggagag

SEQ ID NO: 501560 - RNA, 19 nt, Artificial Sequence
  Description of Artificial Sequence: Synthetic oligonucleotide
  Antisense strand to SEQ ID NO: 501559
cucuccacauguaaccagc

SEQ ID NO: 501561 - RNA, 19 nt, Artificial Sequence
  Description of Artificial Sequence: Synthetic oligonucleotide
  Sense strand starting at position 320 of SEQ ID NO: 317654
gguuacauguggagagagu

SEQ ID NO: 501562 - RNA, 19 nt, Artificial Sequence
  Description of Artificial Sequence: Synthetic oligonucleotide
  Antisense strand to SEQ ID NO: 501561
acucucuccacauguaacc

SEQ ID NO: 501563 - RNA, 19 nt, Artificial Sequence
  Description of Artificial Sequence: Synthetic oligonucleotide
  Sense strand starting at position 389 of SEQ ID NO: 317654
cugcucuagguuugauagu

SEQ ID NO: 501564 - RNA, 19 nt, Artificial Sequence
  Description of Artificial Sequence: Synthetic oligonucleotide
  Antisense strand to SEQ ID NO: 501563
acuaucaaaccuagagcag

SEQ ID NO: 501565 - RNA, 19 nt, Artificial Sequence
  Description of Artificial Sequence: Synthetic oligonucleotide
  Sense strand starting at position 395 of SEQ ID NO: 317654
uagguuugauaguacaaga

SEQ ID NO: 501566 - RNA, 19 nt, Artificial Sequence
  Description of Artificial Sequence: Synthetic oligonucleotide
  Antisense strand to SEQ ID NO: 501565
ucuuguacuaucaaaccua

SEQ ID NO: 501567 - RNA, 19 nt, Artificial Sequence
  Description of Artificial Sequence: Synthetic oligonucleotide
  Sense strand starting at position 414 of SEQ ID NO: 317654
gccagugugugaucuguga

SEQ ID NO: 501568 - RNA, 19 nt, Artificial Sequence
  Description of Artificial Sequence: Synthetic oligonucleotide
  Antisense strand to SEQ ID NO: 501567
ucacagaucacacacuggc

SEQ ID NO: 501569 - RNA, 19 nt, Artificial Sequence
  Description of Artificial Sequence: Synthetic oligonucleotide
  Sense strand starting at position 416 of SEQ ID NO: 317654
cagugugugaucugugacu

SEQ ID NO: 501570 - RNA, 19 nt, Artificial Sequence
  Description of Artificial Sequence: Synthetic oligonucleotide
  Antisense strand to SEQ ID NO: 501569
agucacagaucacacacug

SEQ ID NO: 501571 - RNA, 19 nt, Artificial Sequence
  Description of Artificial Sequence: Synthetic oligonucleotide
  Sense strand starting at position 418 of SEQ ID NO: 317654
gugugugaucugugacuuc

SEQ ID NO: 501572 - RNA, 19 nt, Artificial Sequence
  Description of Artificial Sequence: Synthetic oligonucleotide
  Antisense strand to SEQ ID NO: 501571
gaagucacagaucacacac

SEQ ID NO: 501573 - RNA, 19 nt, Artificial Sequence
  Description of Artificial Sequence: Synthetic oligonucleotide
  Sense strand starting at position 535 of SEQ ID NO: 317654
acaugaugguaacaauucu

SEQ ID NO: 501574 - RNA, 19 nt, Artificial Sequence
  Description of Artificial Sequence: Synthetic oligonucleotide
  Antisense strand to SEQ ID NO: 501573
agaauuguuaccaucaugu

SEQ ID NO: 501575 - RNA, 19 nt, Artificial Sequence
  Description of Artificial Sequence: Synthetic oligonucleotide
  Sense strand starting at position 783 of SEQ ID NO: 317654
aaacucacugguggauaau

SEQ ID NO: 501576 - RNA, 19 nt, Artificial Sequence
  Description of Artificial Sequence: Synthetic oligonucleotide
  Antisense strand to SEQ ID NO: 501575
auuauccaccagugaguuu

SEQ ID NO: 501577 - RNA, 19 nt, Artificial Sequence
  Description of Artificial Sequence: Synthetic oligonucleotide
  Sense strand starting at position 869 of SEQ ID NO: 317654
agaucaguaacaggaaguu

SEQ ID NO: 501578 - RNA, 19 nt, Artificial Sequence
  Description of Artificial Sequence: Synthetic oligonucleotide
  Antisense strand to SEQ ID NO: 501577
aacuuccuguuacugaucu

SEQ ID NO: 501579 - RNA, 19 nt, Artificial Sequence
  Description of Artificial Sequence: Synthetic oligonucleotide
  Sense strand starting at position 881 of SEQ ID NO: 317654
ggaaguuaucgccaucuac

SEQ ID NO: 501580 - RNA, 19 nt, Artificial Sequence
  Description of Artificial Sequence: Synthetic oligonucleotide
  Antisense strand to SEQ ID NO: 501579
guagauggcgauaacuucc

SEQ ID NO: 501581 - RNA, 19 nt, Artificial Sequence
  Description of Artificial Sequence: Synthetic oligonucleotide
  Sense strand starting at position 976 of SEQ ID NO: 317654
gcuguugagcugcauuaua

SEQ ID NO: 501582 - RNA, 19 nt, Artificial Sequence
  Description of Artificial Sequence: Synthetic oligonucleotide
  Antisense strand to SEQ ID NO: 501581
uauaaugcagcucaacagc

SEQ ID NO: 501583 - RNA, 19 nt, Artificial Sequence
  Description of Artificial Sequence: Synthetic oligonucleotide
  Sense strand starting at position 987 of SEQ ID NO: 317654
gcauuauacuccucgugau

SEQ ID NO: 501584 - RNA, 19 nt, Artificial Sequence
  Description of Artificial Sequence: Synthetic oligonucleotide
  Antisense strand to SEQ ID NO: 501583
aucacgaggaguauaaugc

SEQ ID NO: 501585 - RNA, 19 nt, Artificial Sequence
  Description of Artificial Sequence: Synthetic oligonucleotide
  Sense strand starting at position 988 of SEQ ID NO: 317654
cauuauacuccucgugaug

SEQ ID NO: 501586 - RNA, 19 nt, Artificial Sequence
  Description of Artificial Sequence: Synthetic oligonucleotide
  Antisense strand to SEQ ID NO: 501585
caucacgaggaguauaaug

SEQ ID NO: 501587 - RNA, 19 nt, Artificial Sequence
  Description of Artificial Sequence: Synthetic oligonucleotide
  Sense strand starting at position 991 of SEQ ID NO: 317654
uauacuccucgugaugaaa

SEQ ID NO: 501588 - RNA, 19 nt, Artificial Sequence
  Description of Artificial Sequence: Synthetic oligonucleotide
  Antisense strand to SEQ ID NO: 501587
uuucaucacgaggaguaua

SEQ ID NO: 501589 - RNA, 19 nt, Artificial Sequence
  Description of Artificial Sequence: Synthetic oligonucleotide
  Sense strand starting at position 1040 of SEQ ID NO: 317654
acacguuacuucuuuagaa

SEQ ID NO: 501590 - RNA, 19 nt, Artificial Sequence
  Description of Artificial Sequence: Synthetic oligonucleotide
  Antisense strand to SEQ ID NO: 501589
uucuaaagaaguaacgugu

SEQ ID NO: 501591 - RNA, 19 nt, Artificial Sequence
  Description of Artificial Sequence: Synthetic oligonucleotide
  Sense strand starting at position 1042 of SEQ ID NO: 317654
acguuacuucuuuagaaac

SEQ ID NO: 501592 - RNA, 19 nt, Artificial Sequence
  Description of Artificial Sequence: Synthetic oligonucleotide
  Antisense strand to SEQ ID NO: 501591
guuucuaaagaaguaacgu

SEQ ID NO: 501593 - RNA, 19 nt, Artificial Sequence
  Description of Artificial Sequence: Synthetic oligonucleotide
  Sense strand starting at position 1065 of SEQ ID NO: 317654
aagcaaucguccgucccaa

SEQ ID NO: 501594 - RNA, 19 nt, Artificial Sequence
  Description of Artificial Sequence: Synthetic oligonucleotide
  Antisense strand to SEQ ID NO: 501593
uugggacggacgauugcuu

SEQ ID NO: 501595 - RNA, 19 nt, Artificial Sequence
  Description of Artificial Sequence: Synthetic oligonucleotide
  Sense strand starting at position 1093 of SEQ ID NO: 317654
aacuguagucucugagaug

SEQ ID NO: 501596 - RNA, 19 nt, Artificial Sequence
  Description of Artificial Sequence: Synthetic oligonucleotide
  Antisense strand to SEQ ID NO: 501595
caucucagagacuacaguu

SEQ ID NO: 501597 - RNA, 19 nt, Artificial Sequence
  Description of Artificial Sequence: Synthetic oligonucleotide
  Sense strand starting at position 1094 of SEQ ID NO: 317654
acuguagucucugagauga

SEQ ID NO: 501598 - RNA, 19 nt, Artificial Sequence
  Description of Artificial Sequence: Synthetic oligonucleotide
  Antisense strand to SEQ ID NO: 501597
ucaucucagagacuacagu

SEQ ID NO: 501599 - RNA, 19 nt, Artificial Sequence
  Description of Artificial Sequence: Synthetic oligonucleotide
  Sense strand starting at position 1096 of SEQ ID NO: 317654
uguagucucugagaugaaa

SEQ ID NO: 501600 - RNA, 19 nt, Artificial Sequence
  Description of Artificial Sequence: Synthetic oligonucleotide
  Antisense strand to SEQ ID NO: 501599
uuucaucucagagacuaca

SEQ ID NO: 501601 - RNA, 19 nt, Artificial Sequence
  Description of Artificial Sequence: Synthetic oligonucleotide
  Sense strand starting at position 1148 of SEQ ID NO: 317654
cgucuaucgggcuaaagag

SEQ ID NO: 501602 - RNA, 19 nt, Artificial Sequence
  Description of Artificial Sequence: Synthetic oligonucleotide
  Antisense strand to SEQ ID NO: 501601
cucuuuagcccgauagacg

SEQ ID NO: 501603 - RNA, 19 nt, Artificial Sequence
  Description of Artificial Sequence: Synthetic oligonucleotide
  Sense strand starting at position 1249 of SEQ ID NO: 317654
gcaggcuuucugcagaguu

SEQ ID NO: 501604 - RNA, 19 nt, Artificial Sequence
  Description of Artificial Sequence: Synthetic oligonucleotide
  Antisense strand to SEQ ID NO: 501603
aacucugcagaaagccugc

SEQ ID NO: 501605 - RNA, 19 nt, Artificial Sequence
  Description of Artificial Sequence: Synthetic oligonucleotide
  Sense strand starting at position 1251 of SEQ ID NO: 317654
aggcuuucugcagaguuga

SEQ ID NO: 501606 - RNA, 19 nt, Artificial Sequence
  Description of Artificial Sequence: Synthetic oligonucleotide
  Antisense strand to SEQ ID NO: 501605
ucaacucugcagaaagccu

SEQ ID NO: 501607 - RNA, 19 nt, Artificial Sequence
  Description of Artificial Sequence: Synthetic oligonucleotide
  Sense strand starting at position 1404 of SEQ ID NO: 317654
ggcggaaagcgcagaguuu

SEQ ID NO: 501608 - RNA, 19 nt, Artificial Sequence
  Description of Artificial Sequence: Synthetic oligonucleotide
  Antisense strand to SEQ ID NO: 501607
aaacucugcgcuuuccgcc

SEQ ID NO: 501609 - RNA, 19 nt, Artificial Sequence
  Description of Artificial Sequence: Synthetic oligonucleotide
  Sense strand starting at position 1500 of SEQ ID NO: 317654
ggaagagccuucccaggaa

SEQ ID NO: 501610 - RNA, 19 nt, Artificial Sequence
  Description of Artificial Sequence: Synthetic oligonucleotide
  Antisense strand to SEQ ID NO: 501609
uuccugggaaggcucuucc

SEQ ID NO: 501611 - RNA, 19 nt, Artificial Sequence
  Description of Artificial Sequence: Synthetic oligonucleotide
  Sense strand starting at position 1503 of SEQ ID NO: 317654
agagccuucccaggaaacu

SEQ ID NO: 501612 - RNA, 19 nt, Artificial Sequence
  Description of Artificial Sequence: Synthetic oligonucleotide
  Antisense strand to SEQ ID NO: 501611
aguuuccugggaaggcucu

SEQ ID NO: 501613 - RNA, 19 nt, Artificial Sequence
  Description of Artificial Sequence: Synthetic oligonucleotide
  Sense strand starting at position 3062 of SEQ ID NO: 317654
gccguauaagccugucaua

SEQ ID NO: 501614 - RNA, 19 nt, Artificial Sequence
  Description of Artificial Sequence: Synthetic oligonucleotide
  Antisense strand to SEQ ID NO: 501613
uaugacaggcuuauacggc

SEQ ID NO: 501615 - RNA, 19 nt, Artificial Sequence
  Description of Artificial Sequence: Synthetic oligonucleotide
  Sense strand starting at position 3284 of SEQ ID NO: 317654
ggaugucaccagggacagu

SEQ ID NO: 501616 - RNA, 19 nt, Artificial Sequence
  Description of Artificial Sequence: Synthetic oligonucleotide
  Antisense strand to SEQ ID NO: 501615
acugucccuggugacaucc

SEQ ID NO: 501617 - RNA, 19 nt, Artificial Sequence
  Description of Artificial Sequence: Synthetic oligonucleotide
  Sense strand starting at position 3396 of SEQ ID NO: 317654
ucuggaaguuuccuccuau

SEQ ID NO: 501618 - RNA, 19 nt, Artificial Sequence
  Description of Artificial Sequence: Synthetic oligonucleotide
  Antisense strand to SEQ ID NO: 501617
auaggaggaaacuuccaga

SEQ ID NO: 501619 - RNA, 19 nt, Artificial Sequence
  Description of Artificial Sequence: Synthetic oligonucleotide
  Sense strand starting at position 3397 of SEQ ID NO: 317654
cuggaaguuuccuccuauu

SEQ ID NO: 501620 - RNA, 19 nt, Artificial Sequence
  Description of Artificial Sequence: Synthetic oligonucleotide
  Antisense strand to SEQ ID NO: 501619
aauaggaggaaacuuccag

SEQ ID NO: 501621 - RNA, 19 nt, Artificial Sequence
  Description of Artificial Sequence: Synthetic oligonucleotide
  Sense strand starting at position 3408 of SEQ ID NO: 317654
cuccuauucgagugugguc

SEQ ID NO: 501622 - RNA, 19 nt, Artificial Sequence
  Description of Artificial Sequence: Synthetic oligonucleotide
  Antisense strand to SEQ ID NO: 501621
gaccacacucgaauaggag

SEQ ID NO: 501623 - RNA, 19 nt, Artificial Sequence
  Description of Artificial Sequence: Synthetic oligonucleotide
  Sense strand starting at position 3564 of SEQ ID NO: 317654
ucaucucuuccaggagaug

SEQ ID NO: 501624 - RNA, 19 nt, Artificial Sequence
  Description of Artificial Sequence: Synthetic oligonucleotide
  Antisense strand to SEQ ID NO: 501623
caucuccuggaagagauga

SEQ ID NO: 501625 - RNA, 19 nt, Artificial Sequence
  Description of Artificial Sequence: Synthetic oligonucleotide
  Sense strand starting at position 3621 of SEQ ID NO: 317654
cucagaaccuucucgaaug

SEQ ID NO: 501626 - RNA, 19 nt, Artificial Sequence
  Description of Artificial Sequence: Synthetic oligonucleotide
  Antisense strand to SEQ ID NO: 501625
cauucgagaagguucugag

SEQ ID NO: 501627 - RNA, 19 nt, Artificial Sequence
  Description of Artificial Sequence: Synthetic oligonucleotide
  Sense strand starting at position 3706 of SEQ ID NO: 317654
cugcguuacccugagcaca

SEQ ID NO: 501628 - RNA, 19 nt, Artificial Sequence
  Description of Artificial Sequence: Synthetic oligonucleotide
  Antisense strand to SEQ ID NO: 501627
ugugcucaggguaacgcag

SEQ ID NO: 501629 - RNA, 19 nt, Artificial Sequence
  Description of Artificial Sequence: Synthetic oligonucleotide
  Sense strand starting at position 3740 of SEQ ID NO: 317654
cggauccuuccagagguuu

SEQ ID NO: 501630 - RNA, 19 nt, Artificial Sequence
  Description of Artificial Sequence: Synthetic oligonucleotide
  Antisense strand to SEQ ID NO: 501629
aaaccucuggaaggauccg

SEQ ID NO: 501631 - RNA, 19 nt, Artificial Sequence
  Description of Artificial Sequence: Synthetic oligonucleotide
  Sense strand starting at position 157 of SEQ ID NO: 317655
cugggcauuccauaaauca

SEQ ID NO: 501632 - RNA, 19 nt, Artificial Sequence
  Description of Artificial Sequence: Synthetic oligonucleotide
  Antisense strand to SEQ ID NO: 501631
ugauuuauggaaugcccag

SEQ ID NO: 501633 - RNA, 19 nt, Artificial Sequence
  Description of Artificial Sequence: Synthetic oligonucleotide
  Sense strand starting at position 306 of SEQ ID NO: 317655
acggauaaugaacguagua

SEQ ID NO: 501634 - RNA, 19 nt, Artificial Sequence
  Description of Artificial Sequence: Synthetic oligonucleotide
  Antisense strand to SEQ ID NO: 501633
uacuacguucauuauccgu

SEQ ID NO: 501635 - RNA, 19 nt, Artificial Sequence
  Description of Artificial Sequence: Synthetic oligonucleotide
  Sense strand starting at position 319 of SEQ ID NO: 317655
guaguauaucugggugaua

SEQ ID NO: 501636 - RNA, 19 nt, Artificial Sequence
  Description of Artificial Sequence: Synthetic oligonucleotide
  Antisense strand to SEQ ID NO: 501635
uaucacccagauauacuac

SEQ ID NO: 501637 - RNA, 19 nt, Artificial Sequence
  Description of Artificial Sequence: Synthetic oligonucleotide
  Sense strand starting at position 320 of SEQ ID NO: 317655
uaguauaucugggugauag

SEQ ID NO: 501638 - RNA, 19 nt, Artificial Sequence
  Description of Artificial Sequence: Synthetic oligonucleotide
  Antisense strand to SEQ ID NO: 501637
cuaucacccagauauacua

SEQ ID NO: 501639 - RNA, 19 nt, Artificial Sequence
  Description of Artificial Sequence: Synthetic oligonucleotide
  Sense strand starting at position 321 of SEQ ID NO: 317655
aguauaucugggugauagc

SEQ ID NO: 501640 - RNA, 19 nt, Artificial Sequence
  Description of Artificial Sequence: Synthetic oligonucleotide
  Antisense strand to SEQ ID NO: 501639
gcuaucacccagauauacu

SEQ ID NO: 501641 - RNA, 19 nt, Artificial Sequence
  Description of Artificial Sequence: Synthetic oligonucleotide
  Sense strand starting at position 322 of SEQ ID NO: 317655
guauaucugggugauagcu

SEQ ID NO: 501642 - RNA, 19 nt, Artificial Sequence
  Description of Artificial Sequence: Synthetic oligonucleotide
  Antisense strand to SEQ ID NO: 501641
agcuaucacccagauauac

SEQ ID NO: 501643 - RNA, 19 nt, Artificial Sequence
  Description of Artificial Sequence: Synthetic oligonucleotide
  Sense strand starting at position 334 of SEQ ID NO: 317655
gauagcugucagugaagag

SEQ ID NO: 501644 - RNA, 19 nt, Artificial Sequence
  Description of Artificial Sequence: Synthetic oligonucleotide
  Antisense strand to SEQ ID NO: 501643
cucuucacugacagcuauc

SEQ ID NO: 501645 - RNA, 19 nt, Artificial Sequence
  Description of Artificial Sequence: Synthetic oligonucleotide
  Sense strand starting at position 402 of SEQ ID NO: 317655
ugcucuagcccuggaaaug

SEQ ID NO: 501646 - RNA, 19 nt, Artificial Sequence
  Description of Artificial Sequence: Synthetic oligonucleotide
  Antisense strand to SEQ ID NO: 501645
cauuuccagggcuagagca

SEQ ID NO: 501647 - RNA, 19 nt, Artificial Sequence
  Description of Artificial Sequence: Synthetic oligonucleotide
  Sense strand starting at position 509 of SEQ ID NO: 317655
gcauuagugacgcugccuu

SEQ ID NO: 501648 - RNA, 19 nt, Artificial Sequence
  Description of Artificial Sequence: Synthetic oligonucleotide
  Antisense strand to SEQ ID NO: 501647
aaggcagcgucacuaaugc

SEQ ID NO: 501649 - RNA, 19 nt, Artificial Sequence
  Description of Artificial Sequence: Synthetic oligonucleotide
  Sense strand starting at position 613 of SEQ ID NO: 317655
uugagugagucauuccuca

SEQ ID NO: 501650 - RNA, 19 nt, Artificial Sequence
  Description of Artificial Sequence: Synthetic oligonucleotide
  Antisense strand to SEQ ID NO: 501649
ugaggaaugacucacucaa

SEQ ID NO: 501651 - RNA, 19 nt, Artificial Sequence
  Description of Artificial Sequence: Synthetic oligonucleotide
  Sense strand starting at position 617 of SEQ ID NO: 317655
gugagucauuccucauacc

SEQ ID NO: 501652 - RNA, 19 nt, Artificial Sequence
  Description of Artificial Sequence: Synthetic oligonucleotide
  Antisense strand to SEQ ID NO: 501651
gguaugaggaaugacucac

SEQ ID NO: 501653 - RNA, 19 nt, Artificial Sequence
  Description of Artificial Sequence: Synthetic oligonucleotide
  Sense strand starting at position 618 of SEQ ID NO: 317655
ugagucauuccucauacca

SEQ ID NO: 501654 - RNA, 19 nt, Artificial Sequence
  Description of Artificial Sequence: Synthetic oligonucleotide
  Antisense strand to SEQ ID NO: 501653
ugguaugaggaaugacuca

SEQ ID NO: 501655 - RNA, 19 nt, Artificial Sequence
  Description of Artificial Sequence: Synthetic oligonucleotide
  Sense strand starting at position 672 of SEQ ID NO: 317655
ugccuuagcguguucuacu

SEQ ID NO: 501656 - RNA, 19 nt, Artificial Sequence
  Description of Artificial Sequence: Synthetic oligonucleotide
  Antisense strand to SEQ ID NO: 501655
aguagaacacgcuaaggca

SEQ ID NO: 501657 - RNA, 19 nt, Artificial Sequence
  Description of Artificial Sequence: Synthetic oligonucleotide
  Sense strand starting at position 725 of SEQ ID NO: 317655
cugcaaacccuuugcagaa

SEQ ID NO: 501658 - RNA, 19 nt, Artificial Sequence
  Description of Artificial Sequence: Synthetic oligonucleotide
  Antisense strand to SEQ ID NO: 501657
uucugcaaaggguuugcag

SEQ ID NO: 501659 - RNA, 19 nt, Artificial Sequence
  Description of Artificial Sequence: Synthetic oligonucleotide
  Sense strand starting at position 811 of SEQ ID NO: 317655
agaguaagcucaucaguaa

SEQ ID NO: 501660 - RNA, 19 nt, Artificial Sequence
  Description of Artificial Sequence: Synthetic oligonucleotide
  Antisense strand to SEQ ID NO: 501659
uuacugaugagcuuacucu

SEQ ID NO: 501661 - RNA, 19 nt, Artificial Sequence
  Description of Artificial Sequence: Synthetic oligonucleotide
  Sense strand starting at position 812 of SEQ ID NO: 317655
gaguaagcucaucaguaaa

SEQ ID NO: 501662 - RNA, 19 nt, Artificial Sequence
  Description of Artificial Sequence: Synthetic oligonucleotide
  Antisense strand to SEQ ID NO: 501661
uuuacugaugagcuuacuc

SEQ ID NO: 501663 - RNA, 19 nt, Artificial Sequence
  Description of Artificial Sequence: Synthetic oligonucleotide
  Sense strand starting at position 2069 of SEQ ID NO: 317655
aguuuaaugguccacguca

SEQ ID NO: 501664 - RNA, 19 nt, Artificial Sequence
  Description of Artificial Sequence: Synthetic oligonucleotide
  Antisense strand to SEQ ID NO: 501663
ugacguggaccauuaaacu

SEQ ID NO: 501665 - RNA, 19 nt, Artificial Sequence
  Description of Artificial Sequence: Synthetic oligonucleotide
  Sense strand starting at position 2626 of SEQ ID NO: 317655
gaaagagaauucuaggauu

SEQ ID NO: 501666 - RNA, 19 nt, Artificial Sequence
  Description of Artificial Sequence: Synthetic oligonucleotide
  Antisense strand to SEQ ID NO: 501665
aauccuagaauucucuuuc

SEQ ID NO: 501667 - RNA, 19 nt, Artificial Sequence
  Description of Artificial Sequence: Synthetic oligonucleotide
  Sense strand starting at position 2865 of SEQ ID NO: 317655
ggacuccugcccuauagga

SEQ ID NO: 501668 - RNA, 19 nt, Artificial Sequence
  Description of Artificial Sequence: Synthetic oligonucleotide
  Antisense strand to SEQ ID NO: 501667
uccuauagggcaggagucc

SEQ ID NO: 501669 - RNA, 19 nt, Artificial Sequence
  Description of Artificial Sequence: Synthetic oligonucleotide
  Sense strand starting at position 2886 of SEQ ID NO: 317655
guagcuucucccgacagaa

SEQ ID NO: 501670 - RNA, 19 nt, Artificial Sequence
  Description of Artificial Sequence: Synthetic oligonucleotide
  Antisense strand to SEQ ID NO: 501669
uucugucgggagaagcuac

SEQ ID NO: 501671 - RNA, 19 nt, Artificial Sequence
  Description of Artificial Sequence: Synthetic oligonucleotide
  Sense strand starting at position 2929 of SEQ ID NO: 317655
aaugaugagguguguaaug

SEQ ID NO: 501672 - RNA, 19 nt, Artificial Sequence
  Description of Artificial Sequence: Synthetic oligonucleotide
  Antisense strand to SEQ ID NO: 501671
cauuacacaccucaucauu

SEQ ID NO: 501673 - RNA, 19 nt, Artificial Sequence
  Description of Artificial Sequence: Synthetic oligonucleotide
  Sense strand starting at position 2940 of SEQ ID NO: 317655
guguaaugugaugacaggu

SEQ ID NO: 501674 - RNA, 19 nt, Artificial Sequence
  Description of Artificial Sequence: Synthetic oligonucleotide
  Antisense strand to SEQ ID NO: 501673
accugucaucacauuacac

SEQ ID NO: 501675 - RNA, 19 nt, Artificial Sequence
  Description of Artificial Sequence: Synthetic oligonucleotide
  Sense strand starting at position 3037 of SEQ ID NO: 317655
uugggaugucacugaagug

SEQ ID NO: 501676 - RNA, 19 nt, Artificial Sequence
  Description of Artificial Sequence: Synthetic oligonucleotide
  Antisense strand to SEQ ID NO: 501675
cacuucagugacaucccaa

SEQ ID NO: 501677 - RNA, 19 nt, Artificial Sequence
  Description of Artificial Sequence: Synthetic oligonucleotide
  Sense strand starting at position 3052 of SEQ ID NO: 317655
agugauauuugaggaaaca

SEQ ID NO: 501678 - RNA, 19 nt, Artificial Sequence
  Description of Artificial Sequence: Synthetic oligonucleotide
  Antisense strand to SEQ ID NO: 501677
uguuuccucaaauaucacu

SEQ ID NO: 501679 - RNA, 19 nt, Artificial Sequence
  Description of Artificial Sequence: Synthetic oligonucleotide
  Sense strand starting at position 3157 of SEQ ID NO: 317655
cuugguuauuuguugaguu

SEQ ID NO: 501680 - RNA, 19 nt, Artificial Sequence
  Description of Artificial Sequence: Synthetic oligonucleotide
  Antisense strand to SEQ ID NO: 501679
aacucaacaaauaaccaag

SEQ ID NO: 501681 - RNA, 19 nt, Artificial Sequence
  Description of Artificial Sequence: Synthetic oligonucleotide
  Sense strand starting at position 3177 of SEQ ID NO: 317655
uuuccuuucugucugauau

SEQ ID NO: 501682 - RNA, 19 nt, Artificial Sequence
  Description of Artificial Sequence: Synthetic oligonucleotide
  Antisense strand to SEQ ID NO: 501681
auaucagacagaaaggaaa

SEQ ID NO: 501683 - RNA, 19 nt, Artificial Sequence
  Description of Artificial Sequence: Synthetic oligonucleotide
  Sense strand starting at position 3187 of SEQ ID NO: 317655
gucugauauccauguugga

SEQ ID NO: 501684 - RNA, 19 nt, Artificial Sequence
  Description of Artificial Sequence: Synthetic oligonucleotide
  Antisense strand to SEQ ID NO: 501683
uccaacauggauaucagac

SEQ ID NO: 501685 - RNA, 19 nt, Artificial Sequence
  Description of Artificial Sequence: Synthetic oligonucleotide
  Sense strand starting at position 3191 of SEQ ID NO: 317655
gauauccauguuggacauu

SEQ ID NO: 501686 - RNA, 19 nt, Artificial Sequence
  Description of Artificial Sequence: Synthetic oligonucleotide
  Antisense strand to SEQ ID NO: 501685
aauguccaacauggauauc

SEQ ID NO: 501687 - RNA, 19 nt, Artificial Sequence
  Description of Artificial Sequence: Synthetic oligonucleotide
  Sense strand starting at position 3226 of SEQ ID NO: 317655
cucccaaaggugggugaau

SEQ ID NO: 501688 - RNA, 19 nt, Artificial Sequence
  Description of Artificial Sequence: Synthetic oligonucleotide
  Antisense strand to SEQ ID NO: 501687
auucacccaccuuugggag

SEQ ID NO: 501689 - RNA, 19 nt, Artificial Sequence
  Description of Artificial Sequence: Synthetic oligonucleotide
  Sense strand starting at position 3238 of SEQ ID NO: 317655
ggugaaugguacuuagaag

SEQ ID NO: 501690 - RNA, 19 nt, Artificial Sequence
  Description of Artificial Sequence: Synthetic oligonucleotide
  Antisense strand to SEQ ID NO: 501689
cuucuaaguaccauucacc

SEQ ID NO: 501691 - RNA, 19 nt, Artificial Sequence
  Description of Artificial Sequence: Synthetic oligonucleotide
  Sense strand starting at position 3291 of SEQ ID NO: 317655
gccaaagaacuuuauguua

SEQ ID NO: 501692 - RNA, 19 nt, Artificial Sequence
  Description of Artificial Sequence: Synthetic oligonucleotide
  Antisense strand to SEQ ID NO: 501691
uaacauaaaguucuuuggc

SEQ ID NO: 501693 - RNA, 19 nt, Artificial Sequence
  Description of Artificial Sequence: Synthetic oligonucleotide
  Sense strand starting at position 3449 of SEQ ID NO: 317655
uuagcuguucgcccaaguu

SEQ ID NO: 501694 - RNA, 19 nt, Artificial Sequence
  Description of Artificial Sequence: Synthetic oligonucleotide
  Antisense strand to SEQ ID NO: 501693
aacuugggcgaacagcuaa

SEQ ID NO: 501695 - RNA, 19 nt, Artificial Sequence
  Description of Artificial Sequence: Synthetic oligonucleotide
  Sense strand starting at position 3683 of SEQ ID NO: 317655
ccaugcauuuacucaguuu

SEQ ID NO: 501696 - RNA, 19 nt, Artificial Sequence
  Description of Artificial Sequence: Synthetic oligonucleotide
  Antisense strand to SEQ ID NO: 501695
aaacugaguaaaugcaugg

SEQ ID NO: 501697 - RNA, 19 nt, Artificial Sequence
  Description of Artificial Sequence: Synthetic oligonucleotide
  Sense strand starting at position 3686 of SEQ ID NO: 317655
ugcauuuacucaguuucuu

SEQ ID NO: 501698 - RNA, 19 nt, Artificial Sequence
  Description of Artificial Sequence: Synthetic oligonucleotide
  Antisense strand to SEQ ID NO: 501697
aagaaacugaguaaaugca

SEQ ID NO: 501699 - RNA, 19 nt, Artificial Sequence
  Description of Artificial Sequence: Synthetic oligonucleotide
  Sense strand starting at position 3691 of SEQ ID NO: 317655
uuacucaguuucuuugaga

SEQ ID NO: 501700 - RNA, 19 nt, Artificial Sequence
  Description of Artificial Sequence: Synthetic oligonucleotide
  Antisense strand to SEQ ID NO: 501699
ucucaaagaaacugaguaa

SEQ ID NO: 501701 - RNA, 19 nt, Artificial Sequence
  Description of Artificial Sequence: Synthetic oligonucleotide
  Sense strand starting at position 3710 of SEQ ID NO: 317655
cuuuacaauucuuugagag

SEQ ID NO: 501702 - RNA, 19 nt, Artificial Sequence
  Description of Artificial Sequence: Synthetic oligonucleotide
  Antisense strand to SEQ ID NO: 501701
cucucaaagaauuguaaag

SEQ ID NO: 501703 - RNA, 19 nt, Artificial Sequence
  Description of Artificial Sequence: Synthetic oligonucleotide
  Sense strand starting at position 3711 of SEQ ID NO: 317655
uuuacaauucuuugagaga

SEQ ID NO: 501704 - RNA, 19 nt, Artificial Sequence
  Description of Artificial Sequence: Synthetic oligonucleotide
  Antisense strand to SEQ ID NO: 501703
ucucucaaagaauuguaaa

SEQ ID NO: 501705 - RNA, 19 nt, Artificial Sequence
  Description of Artificial Sequence: Synthetic oligonucleotide
  Sense strand starting at position 3775 of SEQ ID NO: 317655
agagucaguugauuccuga

SEQ ID NO: 501706 - RNA, 19 nt, Artificial Sequence
  Description of Artificial Sequence: Synthetic oligonucleotide
  Antisense strand to SEQ ID NO: 501705
ucaggaaucaacugacucu

SEQ ID NO: 501707 - RNA, 19 nt, Artificial Sequence
  Description of Artificial Sequence: Synthetic oligonucleotide
  Sense strand starting at position 3792 of SEQ ID NO: 317655
gaggucauaggcuagcaaa

SEQ ID NO: 501708 - RNA, 19 nt, Artificial Sequence
  Description of Artificial Sequence: Synthetic oligonucleotide
  Antisense strand to SEQ ID NO: 501707
uuugcuagccuaugaccuc

SEQ ID NO: 501709 - RNA, 19 nt, Artificial Sequence
  Description of Artificial Sequence: Synthetic oligonucleotide
  Sense strand starting at position 3964 of SEQ ID NO: 317655
agucacucaggaugacuua

SEQ ID NO: 501710 - RNA, 19 nt, Artificial Sequence
  Description of Artificial Sequence: Synthetic oligonucleotide
  Antisense strand to SEQ ID NO: 501709
uaagucauccugagugacu

SEQ ID NO: 501711 - RNA, 19 nt, Artificial Sequence
  Description of Artificial Sequence: Synthetic oligonucleotide
  Sense strand starting at position 1989 of SEQ ID NO: 317656
gcccguuaugugcacagga

SEQ ID NO: 501712 - RNA, 19 nt, Artificial Sequence
  Description of Artificial Sequence: Synthetic oligonucleotide
  Antisense strand to SEQ ID NO: 501711
uccugugcacauaacgggc

SEQ ID NO: 501713 - RNA, 19 nt, Artificial Sequence
  Description of Artificial Sequence: Synthetic oligonucleotide
  Sense strand starting at position 1991 of SEQ ID NO: 317656
ccguuaugugcacaggacu

SEQ ID NO: 501714 - RNA, 19 nt, Artificial Sequence
  Description of Artificial Sequence: Synthetic oligonucleotide
  Antisense strand to SEQ ID NO: 501713
aguccugugcacauaacgg

SEQ ID NO: 501715 - RNA, 19 nt, Artificial Sequence
  Description of Artificial Sequence: Synthetic oligonucleotide
  Sense strand starting at position 2037 of SEQ ID NO: 317656
acgggaacuuucggccaau

SEQ ID NO: 501716 - RNA, 19 nt, Artificial Sequence
  Description of Artificial Sequence: Synthetic oligonucleotide
  Antisense strand to SEQ ID NO: 501715
auuggccgaaaguucccgu

SEQ ID NO: 501717 - RNA, 19 nt, Artificial Sequence
  Description of Artificial Sequence: Synthetic oligonucleotide
  Sense strand starting at position 2038 of SEQ ID NO: 317656
cgggaacuuucggccaaug

SEQ ID NO: 501718 - RNA, 19 nt, Artificial Sequence
  Description of Artificial Sequence: Synthetic oligonucleotide
  Antisense strand to SEQ ID NO: 501717
cauuggccgaaaguucccg

SEQ ID NO: 501719 - RNA, 19 nt, Artificial Sequence
  Description of Artificial Sequence: Synthetic oligonucleotide
  Sense strand starting at position 2404 of SEQ ID NO: 317656
ggcagacaugcucagacuu

SEQ ID NO: 501720 - RNA, 19 nt, Artificial Sequence
  Description of Artificial Sequence: Synthetic oligonucleotide
  Antisense strand to SEQ ID NO: 501719
aagucugagcaugucugcc

SEQ ID NO: 501721 - RNA, 19 nt, Artificial Sequence
  Description of Artificial Sequence: Synthetic oligonucleotide
  Sense strand starting at position 2412 of SEQ ID NO: 317656
ugcucagacuuauaccgaa

SEQ ID NO: 501722 - RNA, 19 nt, Artificial Sequence
  Description of Artificial Sequence: Synthetic oligonucleotide
  Antisense strand to SEQ ID NO: 501721
uucgguauaagucugagca

SEQ ID NO: 501723 - RNA, 19 nt, Artificial Sequence
  Description of Artificial Sequence: Synthetic oligonucleotide
  Sense strand starting at position 2680 of SEQ ID NO: 317656
ucacccgagcacugauaau

SEQ ID NO: 501724 - RNA, 19 nt, Artificial Sequence
  Description of Artificial Sequence: Synthetic oligonucleotide
  Antisense strand to SEQ ID NO: 501723
auuaucagugcucggguga

SEQ ID NO: 501725 - RNA, 19 nt, Artificial Sequence
  Description of Artificial Sequence: Synthetic oligonucleotide
  Sense strand starting at position 2719 of SEQ ID NO: 317656
ccgguaacccaguguauuc

SEQ ID NO: 501726 - RNA, 19 nt, Artificial Sequence
  Description of Artificial Sequence: Synthetic oligonucleotide
  Antisense strand to SEQ ID NO: 501725
gaauacacuggguuaccgg

SEQ ID NO: 501727 - RNA, 19 nt, Artificial Sequence
  Description of Artificial Sequence: Synthetic oligonucleotide
  Sense strand starting at position 2796 of SEQ ID NO: 317656
gcacacucgcugucaagua

SEQ ID NO: 501728 - RNA, 19 nt, Artificial Sequence
  Description of Artificial Sequence: Synthetic oligonucleotide
  Antisense strand to SEQ ID NO: 501727
uacuugacagcgagugugc

SEQ ID NO: 501729 - RNA, 19 nt, Artificial Sequence
  Description of Artificial Sequence: Synthetic oligonucleotide
  Sense strand starting at position 2819 of SEQ ID NO: 317656
aggugcccuccuuaggaau

SEQ ID NO: 501730 - RNA, 19 nt, Artificial Sequence
  Description of Artificial Sequence: Synthetic oligonucleotide
  Antisense strand to SEQ ID NO: 501729
auuccuaaggagggcaccu

SEQ ID NO: 501731 - RNA, 19 nt, Artificial Sequence
  Description of Artificial Sequence: Synthetic oligonucleotide
  Sense strand starting at position 2821 of SEQ ID NO: 317656
gugcccuccuuaggaauuu

SEQ ID NO: 501732 - RNA, 19 nt, Artificial Sequence
  Description of Artificial Sequence: Synthetic oligonucleotide
  Antisense strand to SEQ ID NO: 501731
aaauuccuaaggagggcac

SEQ ID NO: 501733 - RNA, 19 nt, Artificial Sequence
  Description of Artificial Sequence: Synthetic oligonucleotide
  Sense strand starting at position 2914 of SEQ ID NO: 317656
gagagaaaguugugugcuu

SEQ ID NO: 501734 - RNA, 19 nt, Artificial Sequence
  Description of Artificial Sequence: Synthetic oligonucleotide
  Antisense strand to SEQ ID NO: 501733
aagcacacaacuuucucuc

SEQ ID NO: 501735 - RNA, 19 nt, Artificial Sequence
  Description of Artificial Sequence: Synthetic oligonucleotide
  Sense strand starting at position 2915 of SEQ ID NO: 317656
agagaaaguugugugcuuu

SEQ ID NO: 501736 - RNA, 19 nt, Artificial Sequence
  Description of Artificial Sequence: Synthetic oligonucleotide
  Antisense strand to SEQ ID NO: 501735
aaagcacacaacuuucucu

SEQ ID NO: 501737 - RNA, 19 nt, Artificial Sequence
  Description of Artificial Sequence: Synthetic oligonucleotide
  Sense strand starting at position 2968 of SEQ ID NO: 317656
uugagaguguggcaucacu

SEQ ID NO: 501738 - RNA, 19 nt, Artificial Sequence
  Description of Artificial Sequence: Synthetic oligonucleotide
  Antisense strand to SEQ ID NO: 501737
agugaugccacacucucaa

SEQ ID NO: 501739 - RNA, 19 nt, Artificial Sequence
  Description of Artificial Sequence: Synthetic oligonucleotide
  Sense strand starting at position 2989 of SEQ ID NO: 317656
cucauuaucuguugaacug

SEQ ID NO: 501740 - RNA, 19 nt, Artificial Sequence
  Description of Artificial Sequence: Synthetic oligonucleotide
  Antisense strand to SEQ ID NO: 501739
caguucaacagauaaugag

SEQ ID NO: 501741 - RNA, 19 nt, Artificial Sequence
  Description of Artificial Sequence: Synthetic oligonucleotide
  Sense strand starting at position 3076 of SEQ ID NO: 317656
gcuggauaguuuguuaauc

SEQ ID NO: 501742 - RNA, 19 nt, Artificial Sequence
  Description of Artificial Sequence: Synthetic oligonucleotide
  Antisense strand to SEQ ID NO: 501741
gauuaacaaacuauccagc

SEQ ID NO: 501743 - RNA, 19 nt, Artificial Sequence
  Description of Artificial Sequence: Synthetic oligonucleotide
  Sense strand starting at position 3077 of SEQ ID NO: 317656
cuggauaguuuguuaaucu

SEQ ID NO: 501744 - RNA, 19 nt, Artificial Sequence
  Description of Artificial Sequence: Synthetic oligonucleotide
  Antisense strand to SEQ ID NO: 501743
agauuaacaaacuauccag

SEQ ID NO: 501745 - RNA, 19 nt, Artificial Sequence
  Description of Artificial Sequence: Synthetic oligonucleotide
  Sense strand starting at position 3078 of SEQ ID NO: 317656
uggauaguuuguuaaucuu

SEQ ID NO: 501746 - RNA, 19 nt, Artificial Sequence
  Description of Artificial Sequence: Synthetic oligonucleotide
  Antisense strand to SEQ ID NO: 501745
aagauuaacaaacuaucca

SEQ ID NO: 501747 - RNA, 19 nt, Artificial Sequence
  Description of Artificial Sequence: Synthetic oligonucleotide
  Sense strand starting at position 3084 of SEQ ID NO: 317656
guuuguuaaucuuucgggu

SEQ ID NO: 501748 - RNA, 19 nt, Artificial Sequence
  Description of Artificial Sequence: Synthetic oligonucleotide
  Antisense strand to SEQ ID NO: 501747
acccgaaagauuaacaaac

SEQ ID NO: 501749 - RNA, 19 nt, Artificial Sequence
  Description of Artificial Sequence: Synthetic oligonucleotide
  Sense strand starting at position 3087 of SEQ ID NO: 317656
uguuaaucuuucggguugu

SEQ ID NO: 501750 - RNA, 19 nt, Artificial Sequence
  Description of Artificial Sequence: Synthetic oligonucleotide
  Antisense strand to SEQ ID NO: 501749
acaacccgaaagauuaaca

SEQ ID NO: 501751 - RNA, 19 nt, Artificial Sequence
  Description of Artificial Sequence: Synthetic oligonucleotide
  Sense strand starting at position 3098 of SEQ ID NO: 317656
cggguugugccaugugaaa

SEQ ID NO: 501752 - RNA, 19 nt, Artificial Sequence
  Description of Artificial Sequence: Synthetic oligonucleotide
  Antisense strand to SEQ ID NO: 501751
uuucacauggcacaacccg

SEQ ID NO: 501753 - RNA, 19 nt, Artificial Sequence
  Description of Artificial Sequence: Synthetic oligonucleotide
  Sense strand starting at position 3100 of SEQ ID NO: 317656
gguugugccaugugaaauu

SEQ ID NO: 501754 - RNA, 19 nt, Artificial Sequence
  Description of Artificial Sequence: Synthetic oligonucleotide
  Antisense strand to SEQ ID NO: 501753
aauuucacauggcacaacc

SEQ ID NO: 501755 - RNA, 19 nt, Artificial Sequence
  Description of Artificial Sequence: Synthetic oligonucleotide
  Sense strand starting at position 3130 of SEQ ID NO: 317656
gcgucugugacuuaccaaa

SEQ ID NO: 501756 - RNA, 19 nt, Artificial Sequence
  Description of Artificial Sequence: Synthetic oligonucleotide
  Antisense strand to SEQ ID NO: 501755
uuugguaagucacagacgc

SEQ ID NO: 501757 - RNA, 19 nt, Artificial Sequence
  Description of Artificial Sequence: Synthetic oligonucleotide
  Sense strand starting at position 3170 of SEQ ID NO: 317656
gaguauuaagaaugucuua

SEQ ID NO: 501758 - RNA, 19 nt, Artificial Sequence
  Description of Artificial Sequence: Synthetic oligonucleotide
  Antisense strand to SEQ ID NO: 501757
uaagacauucuuaauacuc

SEQ ID NO: 501759 - RNA, 19 nt, Artificial Sequence
  Description of Artificial Sequence: Synthetic oligonucleotide
  Sense strand starting at position 3537 of SEQ ID NO: 317656
augugacuuuacugcuaaa

SEQ ID NO: 501760 - RNA, 19 nt, Artificial Sequence
  Description of Artificial Sequence: Synthetic oligonucleotide
  Antisense strand to SEQ ID NO: 501759
uuuagcaguaaagucacau

SEQ ID NO: 501761 - RNA, 19 nt, Artificial Sequence
  Description of Artificial Sequence: Synthetic oligonucleotide
  Sense strand starting at position 3540 of SEQ ID NO: 317656
ugacuuuacugcuaaagug

SEQ ID NO: 501762 - RNA, 19 nt, Artificial Sequence
  Description of Artificial Sequence: Synthetic oligonucleotide
  Antisense strand to SEQ ID NO: 501761
cacuuuagcaguaaaguca

SEQ ID NO: 501763 - RNA, 19 nt, Artificial Sequence
  Description of Artificial Sequence: Synthetic oligonucleotide
  Sense strand starting at position 3584 of SEQ ID NO: 317656
ccauguauuaguggugucu

SEQ ID NO: 501764 - RNA, 19 nt, Artificial Sequence
  Description of Artificial Sequence: Synthetic oligonucleotide
  Antisense strand to SEQ ID NO: 501763
agacaccacuaauacaugg

SEQ ID NO: 501765 - RNA, 19 nt, Artificial Sequence
  Description of Artificial Sequence: Synthetic oligonucleotide
  Sense strand starting at position 3586 of SEQ ID NO: 317656
auguauuaguggugucuuu

SEQ ID NO: 501766 - RNA, 19 nt, Artificial Sequence
  Description of Artificial Sequence: Synthetic oligonucleotide
  Antisense strand to SEQ ID NO: 501765
aaagacaccacuaauacau

SEQ ID NO: 501767 - RNA, 19 nt, Artificial Sequence
  Description of Artificial Sequence: Synthetic oligonucleotide
  Sense strand starting at position 3635 of SEQ ID NO: 317656
cuaaacguacuuuguagau

SEQ ID NO: 501768 - RNA, 19 nt, Artificial Sequence
  Description of Artificial Sequence: Synthetic oligonucleotide
  Antisense strand to SEQ ID NO: 501767
aucuacaaaguacguuuag

SEQ ID NO: 501769 - RNA, 19 nt, Artificial Sequence
  Description of Artificial Sequence: Synthetic oligonucleotide
  Sense strand starting at position 3637 of SEQ ID NO: 317656
aaacguacuuuguagauua

SEQ ID NO: 501770 - RNA, 19 nt, Artificial Sequence
  Description of Artificial Sequence: Synthetic oligonucleotide
  Antisense strand to SEQ ID NO: 501769
uaaucuacaaaguacguuu

SEQ ID NO: 501771 - RNA, 19 nt, Artificial Sequence
  Description of Artificial Sequence: Synthetic oligonucleotide
  Sense strand starting at position 3639 of SEQ ID NO: 317656
acguacuuuguagauuaca

SEQ ID NO: 501772 - RNA, 19 nt, Artificial Sequence
  Description of Artificial Sequence: Synthetic oligonucleotide
  Antisense strand to SEQ ID NO: 501771
uguaaucuacaaaguacgu

SEQ ID NO: 501773 - RNA, 19 nt, Artificial Sequence
  Description of Artificial Sequence: Synthetic oligonucleotide
  Sense strand starting at position 3856 of SEQ ID NO: 317656
gccugaguccaagacccau

SEQ ID NO: 501774 - RNA, 19 nt, Artificial Sequence
  Description of Artificial Sequence: Synthetic oligonucleotide
  Antisense strand to SEQ ID NO: 501773
augggucuuggacucaggc

SEQ ID NO: 501775 - RNA, 19 nt, Artificial Sequence
  Description of Artificial Sequence: Synthetic oligonucleotide
  Sense strand starting at position 83 of SEQ ID NO: 317657
ggugguauuugcuuuagac

SEQ ID NO: 501776 - RNA, 19 nt, Artificial Sequence
  Description of Artificial Sequence: Synthetic oligonucleotide
  Antisense strand to SEQ ID NO: 501775
gucuaaagcaaauaccacc

SEQ ID NO: 501777 - RNA, 19 nt, Artificial Sequence
  Description of Artificial Sequence: Synthetic oligonucleotide
  Sense strand starting at position 91 of SEQ ID NO: 317657
uugcuuuagacgcauuaug

SEQ ID NO: 501778 - RNA, 19 nt, Artificial Sequence
  Description of Artificial Sequence: Synthetic oligonucleotide
  Antisense strand to SEQ ID NO: 501777
cauaaugcgucuaaagcaa

SEQ ID NO: 501779 - RNA, 19 nt, Artificial Sequence
  Description of Artificial Sequence: Synthetic oligonucleotide
  Sense strand starting at position 204 of SEQ ID NO: 317657
ucaguuaacaggugagaac

SEQ ID NO: 501780 - RNA, 19 nt, Artificial Sequence
  Description of Artificial Sequence: Synthetic oligonucleotide
  Antisense strand to SEQ ID NO: 501779
guucucaccuguuaacuga

SEQ ID NO: 501781 - RNA, 19 nt, Artificial Sequence
  Description of Artificial Sequence: Synthetic oligonucleotide
  Sense strand starting at position 211 of SEQ ID NO: 317657
acaggugagaacugcuuua

SEQ ID NO: 501782 - RNA, 19 nt, Artificial Sequence
  Description of Artificial Sequence: Synthetic oligonucleotide
  Antisense strand to SEQ ID NO: 501781
uaaagcaguucucaccugu

SEQ ID NO: 501783 - RNA, 19 nt, Artificial Sequence
  Description of Artificial Sequence: Synthetic oligonucleotide
  Sense strand starting at position 237 of SEQ ID NO: 317657
aggccucaguugcuaaaga

SEQ ID NO: 501784 - RNA, 19 nt, Artificial Sequence
  Description of Artificial Sequence: Synthetic oligonucleotide
  Antisense strand to SEQ ID NO: 501783
ucuuuagcaacugaggccu

SEQ ID NO: 501785 - RNA, 19 nt, Artificial Sequence
  Description of Artificial Sequence: Synthetic oligonucleotide
  Sense strand starting at position 409 of SEQ ID NO: 317657
uuccguuuaacaggaguaa

SEQ ID NO: 501786 - RNA, 19 nt, Artificial Sequence
  Description of Artificial Sequence: Synthetic oligonucleotide
  Antisense strand to SEQ ID NO: 501785
uuacuccuguuaaacggaa

SEQ ID NO: 501787 - RNA, 19 nt, Artificial Sequence
  Description of Artificial Sequence: Synthetic oligonucleotide
  Sense strand starting at position 1220 of SEQ ID NO: 317657
cugugaaacgucuaccaaa

SEQ ID NO: 501788 - RNA, 19 nt, Artificial Sequence
  Description of Artificial Sequence: Synthetic oligonucleotide
  Antisense strand to SEQ ID NO: 501787
uuugguagacguuucacag

SEQ ID NO: 501789 - RNA, 19 nt, Artificial Sequence
  Description of Artificial Sequence: Synthetic oligonucleotide
  Sense strand starting at position 1291 of SEQ ID NO: 317657
gucgcugguccagagagaa

SEQ ID NO: 501790 - RNA, 19 nt, Artificial Sequence
  Description of Artificial Sequence: Synthetic oligonucleotide
  Antisense strand to SEQ ID NO: 501789
uucucucuggaccagcgac

SEQ ID NO: 501791 - RNA, 19 nt, Artificial Sequence
  Description of Artificial Sequence: Synthetic oligonucleotide
  Sense strand starting at position 1493 of SEQ ID NO: 317657
gggaguugaaccuguacac

SEQ ID NO: 501792 - RNA, 19 nt, Artificial Sequence
  Description of Artificial Sequence: Synthetic oligonucleotide
  Antisense strand to SEQ ID NO: 501791
guguacagguucaacuccc

SEQ ID NO: 501793 - RNA, 19 nt, Artificial Sequence
  Description of Artificial Sequence: Synthetic oligonucleotide
  Sense strand starting at position 1549 of SEQ ID NO: 317657
gcucgcuguccuccggaaa

SEQ ID NO: 501794 - RNA, 19 nt, Artificial Sequence
  Description of Artificial Sequence: Synthetic oligonucleotide
  Antisense strand to SEQ ID NO: 501793
uuuccggaggacagcgagc

SEQ ID NO: 501795 - RNA, 19 nt, Artificial Sequence
  Description of Artificial Sequence: Synthetic oligonucleotide
  Sense strand starting at position 1590 of SEQ ID NO: 317657
guuacaaaucguuagccua

SEQ ID NO: 501796 - RNA, 19 nt, Artificial Sequence
  Description of Artificial Sequence: Synthetic oligonucleotide
  Antisense strand to SEQ ID NO: 501795
uaggcuaacgauuuguaac

SEQ ID NO: 501797 - RNA, 19 nt, Artificial Sequence
  Description of Artificial Sequence: Synthetic oligonucleotide
  Sense strand starting at position 1593 of SEQ ID NO: 317657
acaaaucguuagccuauga

SEQ ID NO: 501798 - RNA, 19 nt, Artificial Sequence
  Description of Artificial Sequence: Synthetic oligonucleotide
  Antisense strand to SEQ ID NO: 501797
ucauaggcuaacgauuugu

SEQ ID NO: 501799 - RNA, 19 nt, Artificial Sequence
  Description of Artificial Sequence: Synthetic oligonucleotide
  Sense strand starting at position 2487 of SEQ ID NO: 317657
augucagugguguugcgaa

SEQ ID NO: 501800 - RNA, 19 nt, Artificial Sequence
  Description of Artificial Sequence: Synthetic oligonucleotide
  Antisense strand to SEQ ID NO: 501799
uucgcaacaccacugacau

SEQ ID NO: 501801 - RNA, 19 nt, Artificial Sequence
  Description of Artificial Sequence: Synthetic oligonucleotide
  Sense strand starting at position 2561 of SEQ ID NO: 317657
gaaagagaggcuugcugaa

SEQ ID NO: 501802 - RNA, 19 nt, Artificial Sequence
  Description of Artificial Sequence: Synthetic oligonucleotide
  Antisense strand to SEQ ID NO: 501801
uucagcaagccucucuuuc

SEQ ID NO: 501803 - RNA, 19 nt, Artificial Sequence
  Description of Artificial Sequence: Synthetic oligonucleotide
  Sense strand starting at position 2614 of SEQ ID NO: 317657
gagguuccuuguguacuaa

SEQ ID NO: 501804 - RNA, 19 nt, Artificial Sequence
  Description of Artificial Sequence: Synthetic oligonucleotide
  Antisense strand to SEQ ID NO: 501803
uuaguacacaaggaaccuc

SEQ ID NO: 501805 - RNA, 19 nt, Artificial Sequence
  Description of Artificial Sequence: Synthetic oligonucleotide
  Sense strand starting at position 2615 of SEQ ID NO: 317657
agguuccuuguguacuaaa

SEQ ID NO: 501806 - RNA, 19 nt, Artificial Sequence
  Description of Artificial Sequence: Synthetic oligonucleotide
  Antisense strand to SEQ ID NO: 501805
uuuaguacacaaggaaccu

SEQ ID NO: 501807 - RNA, 19 nt, Artificial Sequence
  Description of Artificial Sequence: Synthetic oligonucleotide
  Sense strand starting at position 2704 of SEQ ID NO: 317657
ugcagaacagggugauaaa

SEQ ID NO: 501808 - RNA, 19 nt, Artificial Sequence
  Description of Artificial Sequence: Synthetic oligonucleotide
  Antisense strand to SEQ ID NO: 501807
uuuaucacccuguucugca

SEQ ID NO: 501809 - RNA, 19 nt, Artificial Sequence
  Description of Artificial Sequence: Synthetic oligonucleotide
  Sense strand starting at position 2801 of SEQ ID NO: 317657
ugcuaugaccaguguggaa

SEQ ID NO: 501810 - RNA, 19 nt, Artificial Sequence
  Description of Artificial Sequence: Synthetic oligonucleotide
  Antisense strand to SEQ ID NO: 501809
uuccacacuggucauagca

SEQ ID NO: 501811 - RNA, 19 nt, Artificial Sequence
  Description of Artificial Sequence: Synthetic oligonucleotide
  Sense strand starting at position 2808 of SEQ ID NO: 317657
accaguguggaacaguaau

SEQ ID NO: 501812 - RNA, 19 nt, Artificial Sequence
  Description of Artificial Sequence: Synthetic oligonucleotide
  Antisense strand to SEQ ID NO: 501811
auuacuguuccacacuggu

SEQ ID NO: 501813 - RNA, 19 nt, Artificial Sequence
  Description of Artificial Sequence: Synthetic oligonucleotide
  Sense strand starting at position 2827 of SEQ ID NO: 317657
gggaucuaaguuuaaagcu

SEQ ID NO: 501814 - RNA, 19 nt, Artificial Sequence
  Description of Artificial Sequence: Synthetic oligonucleotide
  Antisense strand to SEQ ID NO: 501813
agcuuuaaacuuagauccc

SEQ ID NO: 501815 - RNA, 19 nt, Artificial Sequence
  Description of Artificial Sequence: Synthetic oligonucleotide
  Sense strand starting at position 2835 of SEQ ID NO: 317657
aguuuaaagcuguaugaag

SEQ ID NO: 501816 - RNA, 19 nt, Artificial Sequence
  Description of Artificial Sequence: Synthetic oligonucleotide
  Antisense strand to SEQ ID NO: 501815
cuucauacagcuuuaaacu

SEQ ID NO: 501817 - RNA, 19 nt, Artificial Sequence
  Description of Artificial Sequence: Synthetic oligonucleotide
  Sense strand starting at position 2837 of SEQ ID NO: 317657
uuuaaagcuguaugaagaa

SEQ ID NO: 501818 - RNA, 19 nt, Artificial Sequence
  Description of Artificial Sequence: Synthetic oligonucleotide
  Antisense strand to SEQ ID NO: 501817
uucuucauacagcuuuaaa

SEQ ID NO: 501819 - RNA, 19 nt, Artificial Sequence
  Description of Artificial Sequence: Synthetic oligonucleotide
  Sense strand starting at position 2844 of SEQ ID NO: 317657
cuguaugaagaaugucaac

SEQ ID NO: 501820 - RNA, 19 nt, Artificial Sequence
  Description of Artificial Sequence: Synthetic oligonucleotide
  Antisense strand to SEQ ID NO: 501819
guugacauucuucauacag

SEQ ID NO: 501821 - RNA, 19 nt, Artificial Sequence
  Description of Artificial Sequence: Synthetic oligonucleotide
  Sense strand starting at position 2874 of SEQ ID NO: 317657
auuaguauaucccugugaa

SEQ ID NO: 501822 - RNA, 19 nt, Artificial Sequence
  Description of Artificial Sequence: Synthetic oligonucleotide
  Antisense strand to SEQ ID NO: 501821
uucacagggauauacuaau

SEQ ID NO: 501823 - RNA, 19 nt, Artificial Sequence
  Description of Artificial Sequence: Synthetic oligonucleotide
  Sense strand starting at position 2875 of SEQ ID NO: 317657
uuaguauaucccugugaaa

SEQ ID NO: 501824 - RNA, 19 nt, Artificial Sequence
  Description of Artificial Sequence: Synthetic oligonucleotide
  Antisense strand to SEQ ID NO: 501823
uuucacagggauauacuaa

SEQ ID NO: 501825 - RNA, 19 nt, Artificial Sequence
  Description of Artificial Sequence: Synthetic oligonucleotide
  Sense strand starting at position 2921 of SEQ ID NO: 317657
ucaaaugucugacuuuaag

SEQ ID NO: 501826 - RNA, 19 nt, Artificial Sequence
  Description of Artificial Sequence: Synthetic oligonucleotide
  Antisense strand to SEQ ID NO: 501825
cuuaaagucagacauuuga

SEQ ID NO: 501827 - RNA, 19 nt, Artificial Sequence
  Description of Artificial Sequence: Synthetic oligonucleotide
  Sense strand starting at position 2956 of SEQ ID NO: 317657
aggaccaauuguucuccua

SEQ ID NO: 501828 - RNA, 19 nt, Artificial Sequence
  Description of Artificial Sequence: Synthetic oligonucleotide
  Antisense strand to SEQ ID NO: 501827
uaggagaacaauugguccu

SEQ ID NO: 501829 - RNA, 19 nt, Artificial Sequence
  Description of Artificial Sequence: Synthetic oligonucleotide
  Sense strand starting at position 3118 of SEQ ID NO: 317657
cuuuccuggacugggaaua

SEQ ID NO: 501830 - RNA, 19 nt, Artificial Sequence
  Description of Artificial Sequence: Synthetic oligonucleotide
  Antisense strand to SEQ ID NO: 501829
uauucccaguccaggaaag

SEQ ID NO: 501831 - RNA, 19 nt, Artificial Sequence
  Description of Artificial Sequence: Synthetic oligonucleotide
  Sense strand starting at position 3119 of SEQ ID NO: 317657
uuuccuggacugggaauau

SEQ ID NO: 501832 - RNA, 19 nt, Artificial Sequence
  Description of Artificial Sequence: Synthetic oligonucleotide
  Antisense strand to SEQ ID NO: 501831
auauucccaguccaggaaa

SEQ ID NO: 501833 - RNA, 19 nt, Artificial Sequence
  Description of Artificial Sequence: Synthetic oligonucleotide
  Sense strand starting at position 3293 of SEQ ID NO: 317657
accaucacuccgggcaaau

SEQ ID NO: 501834 - RNA, 19 nt, Artificial Sequence
  Description of Artificial Sequence: Synthetic oligonucleotide
  Antisense strand to SEQ ID NO: 501833
auuugcccggagugauggu

SEQ ID NO: 501835 - RNA, 19 nt, Artificial Sequence
  Description of Artificial Sequence: Synthetic oligonucleotide
  Sense strand starting at position 3434 of SEQ ID NO: 317657
uagccuggccgggaauauu

SEQ ID NO: 501836 - RNA, 19 nt, Artificial Sequence
  Description of Artificial Sequence: Synthetic oligonucleotide
  Antisense strand to SEQ ID NO: 501835
aauauucccggccaggcua

SEQ ID NO: 501837 - RNA, 19 nt, Artificial Sequence
  Description of Artificial Sequence: Synthetic oligonucleotide
  Sense strand starting at position 3550 of SEQ ID NO: 317657
ugauguugugaacagugua

SEQ ID NO: 501838 - RNA, 19 nt, Artificial Sequence
  Description of Artificial Sequence: Synthetic oligonucleotide
  Antisense strand to SEQ ID NO: 501837
uacacuguucacaacauca

SEQ ID NO: 501839 - RNA, 19 nt, Artificial Sequence
  Description of Artificial Sequence: Synthetic oligonucleotide
  Sense strand starting at position 3553 of SEQ ID NO: 317657
uguugugaacaguguauga

SEQ ID NO: 501840 - RNA, 19 nt, Artificial Sequence
  Description of Artificial Sequence: Synthetic oligonucleotide
  Antisense strand to SEQ ID NO: 501839
ucauacacuguucacaaca

SEQ ID NO: 501841 - RNA, 19 nt, Artificial Sequence
  Description of Artificial Sequence: Synthetic oligonucleotide
  Sense strand starting at position 3555 of SEQ ID NO: 317657
uugugaacaguguaugaaa

SEQ ID NO: 501842 - RNA, 19 nt, Artificial Sequence
  Description of Artificial Sequence: Synthetic oligonucleotide
  Antisense strand to SEQ ID NO: 501841
uuucauacacuguucacaa

SEQ ID NO: 501843 - RNA, 19 nt, Artificial Sequence
  Description of Artificial Sequence: Synthetic oligonucleotide
  Sense strand starting at position 3585 of SEQ ID NO: 317657
gcucuuguucuguuaguuu

SEQ ID NO: 501844 - RNA, 19 nt, Artificial Sequence
  Description of Artificial Sequence: Synthetic oligonucleotide
  Antisense strand to SEQ ID NO: 501843
aaacuaacagaacaagagc

SEQ ID NO: 501845 - RNA, 19 nt, Artificial Sequence
  Description of Artificial Sequence: Synthetic oligonucleotide
  Sense strand starting at position 3721 of SEQ ID NO: 317657
ucaucugugcuaugggaag

SEQ ID NO: 501846 - RNA, 19 nt, Artificial Sequence
  Description of Artificial Sequence: Synthetic oligonucleotide
  Antisense strand to SEQ ID NO: 501845
cuucccauagcacagauga

SEQ ID NO: 501847 - RNA, 19 nt, Artificial Sequence
  Description of Artificial Sequence: Synthetic oligonucleotide
  Sense strand starting at position 3746 of SEQ ID NO: 317657
acuguaaguccucacagga

SEQ ID NO: 501848 - RNA, 19 nt, Artificial Sequence
  Description of Artificial Sequence: Synthetic oligonucleotide
  Antisense strand to SEQ ID NO: 501847
uccugugaggacuuacagu

SEQ ID NO: 501849 - RNA, 19 nt, Artificial Sequence
  Description of Artificial Sequence: Synthetic oligonucleotide
  Sense strand starting at position 3922 of SEQ ID NO: 317657
uuaccaguggauuaaguuu

SEQ ID NO: 501850 - RNA, 19 nt, Artificial Sequence
  Description of Artificial Sequence: Synthetic oligonucleotide
  Antisense strand to SEQ ID NO: 501849
aaacuuaauccacugguaa

SEQ ID NO: 501851 - RNA, 19 nt, Artificial Sequence
  Description of Artificial Sequence: Synthetic oligonucleotide
  Sense strand starting at position 3951 of SEQ ID NO: 317657
uuguuugaacucugaacac

SEQ ID NO: 501852 - RNA, 19 nt, Artificial Sequence
  Description of Artificial Sequence: Synthetic oligonucleotide
  Antisense strand to SEQ ID NO: 501851
guguucagaguucaaacaa

SEQ ID NO: 501853 - RNA, 19 nt, Artificial Sequence
  Description of Artificial Sequence: Synthetic oligonucleotide
  Sense strand starting at position 3961 of SEQ ID NO: 317657
ucugaacacuuggaaacaa

SEQ ID NO: 501854 - RNA, 19 nt, Artificial Sequence
  Description of Artificial Sequence: Synthetic oligonucleotide
  Antisense strand to SEQ ID NO: 501853
uuguuuccaaguguucaga

SEQ ID NO: 501855 - RNA, 19 nt, Artificial Sequence
  Description of Artificial Sequence: Synthetic oligonucleotide
  Sense strand starting at position 25 of SEQ ID NO: 317658
uguagaucauguuccaauu

SEQ ID NO: 501856 - RNA, 19 nt, Artificial Sequence
  Description of Artificial Sequence: Synthetic oligonucleotide
  Antisense strand to SEQ ID NO: 501855
aauuggaacaugaucuaca

SEQ ID NO: 501857 - RNA, 19 nt, Artificial Sequence
  Description of Artificial Sequence: Synthetic oligonucleotide
  Sense strand starting at position 118 of SEQ ID NO: 317658
ugccuacuguuucuagaga

SEQ ID NO: 501858 - RNA, 19 nt, Artificial Sequence
  Description of Artificial Sequence: Synthetic oligonucleotide
  Antisense strand to SEQ ID NO: 501857
ucucuagaaacaguaggca

SEQ ID NO: 501859 - RNA, 19 nt, Artificial Sequence
  Description of Artificial Sequence: Synthetic oligonucleotide
  Sense strand starting at position 171 of SEQ ID NO: 317658
ccgcaaauugaaugaaacu

SEQ ID NO: 501860 - RNA, 19 nt, Artificial Sequence
  Description of Artificial Sequence: Synthetic oligonucleotide
  Antisense strand to SEQ ID NO: 501859
aguuucauucaauuugcgg

SEQ ID NO: 501861 - RNA, 19 nt, Artificial Sequence
  Description of Artificial Sequence: Synthetic oligonucleotide
  Sense strand starting at position 231 of SEQ ID NO: 317658
uuaguaaguuaacucugaa

SEQ ID NO: 501862 - RNA, 19 nt, Artificial Sequence
  Description of Artificial Sequence: Synthetic oligonucleotide
  Antisense strand to SEQ ID NO: 501861
uucagaguuaacuuacuaa

SEQ ID NO: 501863 - RNA, 19 nt, Artificial Sequence
  Description of Artificial Sequence: Synthetic oligonucleotide
  Sense strand starting at position 281 of SEQ ID NO: 317658
ucuuauauuuaggagcuga

SEQ ID NO: 501864 - RNA, 19 nt, Artificial Sequence
  Description of Artificial Sequence: Synthetic oligonucleotide
  Antisense strand to SEQ ID NO: 501863
ucagcuccuaaauauaaga

SEQ ID NO: 501865 - RNA, 19 nt, Artificial Sequence
  Description of Artificial Sequence: Synthetic oligonucleotide
  Sense strand starting at position 294 of SEQ ID NO: 317658
agcugaaagaugcagugau

SEQ ID NO: 501866 - RNA, 19 nt, Artificial Sequence
  Description of Artificial Sequence: Synthetic oligonucleotide
  Antisense strand to SEQ ID NO: 501865
aucacugcaucuuucagcu

SEQ ID NO: 501867 - RNA, 19 nt, Artificial Sequence
  Description of Artificial Sequence: Synthetic oligonucleotide
  Sense strand starting at position 343 of SEQ ID NO: 317658
gaagccagcuuuguugaaa

SEQ ID NO: 501868 - RNA, 19 nt, Artificial Sequence
  Description of Artificial Sequence: Synthetic oligonucleotide
  Antisense strand to SEQ ID NO: 501867
uuucaacaaagcuggcuuc

SEQ ID NO: 501869 - RNA, 19 nt, Artificial Sequence
  Description of Artificial Sequence: Synthetic oligonucleotide
  Sense strand starting at position 407 of SEQ ID NO: 317658
agaugauucuaggcagacu

SEQ ID NO: 501870 - RNA, 19 nt, Artificial Sequence
  Description of Artificial Sequence: Synthetic oligonucleotide
  Antisense strand to SEQ ID NO: 501869
agucugccuagaaucaucu

SEQ ID NO: 501871 - RNA, 19 nt, Artificial Sequence
  Description of Artificial Sequence: Synthetic oligonucleotide
  Sense strand starting at position 676 of SEQ ID NO: 317658
agugacuggccuuaguaua

SEQ ID NO: 501872 - RNA, 19 nt, Artificial Sequence
  Description of Artificial Sequence: Synthetic oligonucleotide
  Antisense strand to SEQ ID NO: 501871
uauacuaaggccagucacu

SEQ ID NO: 501873 - RNA, 19 nt, Artificial Sequence
  Description of Artificial Sequence: Synthetic oligonucleotide
  Sense strand starting at position 806 of SEQ ID NO: 317658
ucagauucguacuuccacu

SEQ ID NO: 501874 - RNA, 19 nt, Artificial Sequence
  Description of Artificial Sequence: Synthetic oligonucleotide
  Antisense strand to SEQ ID NO: 501873
aguggaaguacgaaucuga

SEQ ID NO: 501875 - RNA, 19 nt, Artificial Sequence
  Description of Artificial Sequence: Synthetic oligonucleotide
  Sense strand starting at position 857 of SEQ ID NO: 317658
gcaauaagguuacucccaa

SEQ ID NO: 501876 - RNA, 19 nt, Artificial Sequence
  Description of Artificial Sequence: Synthetic oligonucleotide
  Antisense strand to SEQ ID NO: 501875
uugggaguaaccuuauugc

SEQ ID NO: 501877 - RNA, 19 nt, Artificial Sequence
  Description of Artificial Sequence: Synthetic oligonucleotide
  Sense strand starting at position 879 of SEQ ID NO: 317658
uccuguacuccaugaucca

SEQ ID NO: 501878 - RNA, 19 nt, Artificial Sequence
  Description of Artificial Sequence: Synthetic oligonucleotide
  Antisense strand to SEQ ID NO: 501877
uggaucauggaguacagga

SEQ ID NO: 501879 - RNA, 19 nt, Artificial Sequence
  Description of Artificial Sequence: Synthetic oligonucleotide
  Sense strand starting at position 880 of SEQ ID NO: 317658
ccuguacuccaugauccau

SEQ ID NO: 501880 - RNA, 19 nt, Artificial Sequence
  Description of Artificial Sequence: Synthetic oligonucleotide
  Antisense strand to SEQ ID NO: 501879
auggaucauggaguacagg

SEQ ID NO: 501881 - RNA, 19 nt, Artificial Sequence
  Description of Artificial Sequence: Synthetic oligonucleotide
  Sense strand starting at position 946 of SEQ ID NO: 317658
cgucaauuacgagauuaac

SEQ ID NO: 501882 - RNA, 19 nt, Artificial Sequence
  Description of Artificial Sequence: Synthetic oligonucleotide
  Antisense strand to SEQ ID NO: 501881
guuaaucucguaauugacg

SEQ ID NO: 501883 - RNA, 19 nt, Artificial Sequence
  Description of Artificial Sequence: Synthetic oligonucleotide
  Sense strand starting at position 1063 of SEQ ID NO: 317658
aggguauucgaguauuaua

SEQ ID NO: 501884 - RNA, 19 nt, Artificial Sequence
  Description of Artificial Sequence: Synthetic oligonucleotide
  Antisense strand to SEQ ID NO: 501883
uauaauacucgaauacccu

SEQ ID NO: 501885 - RNA, 19 nt, Artificial Sequence
  Description of Artificial Sequence: Synthetic oligonucleotide
  Sense strand starting at position 1186 of SEQ ID NO: 317658
gcaggaucgcgagaaggaa

SEQ ID NO: 501886 - RNA, 19 nt, Artificial Sequence
  Description of Artificial Sequence: Synthetic oligonucleotide
  Antisense strand to SEQ ID NO: 501885
uuccuucucgcgauccugc

SEQ ID NO: 501887 - RNA, 19 nt, Artificial Sequence
  Description of Artificial Sequence: Synthetic oligonucleotide
  Sense strand starting at position 1206 of SEQ ID NO: 317658
gcgagaacuagcuggguaa

SEQ ID NO: 501888 - RNA, 19 nt, Artificial Sequence
  Description of Artificial Sequence: Synthetic oligonucleotide
  Antisense strand to SEQ ID NO: 501887
uuacccagcuaguucucgc

SEQ ID NO: 501889 - RNA, 19 nt, Artificial Sequence
  Description of Artificial Sequence: Synthetic oligonucleotide
  Sense strand starting at position 1207 of SEQ ID NO: 317658
cgagaacuagcuggguaau

SEQ ID NO: 501890 - RNA, 19 nt, Artificial Sequence
  Description of Artificial Sequence: Synthetic oligonucleotide
  Antisense strand to SEQ ID NO: 501889
auuacccagcuaguucucg

SEQ ID NO: 501891 - RNA, 19 nt, Artificial Sequence
  Description of Artificial Sequence: Synthetic oligonucleotide
  Sense strand starting at position 1209 of SEQ ID NO: 317658
agaacuagcuggguaaugu

SEQ ID NO: 501892 - RNA, 19 nt, Artificial Sequence
  Description of Artificial Sequence: Synthetic oligonucleotide
  Antisense strand to SEQ ID NO: 501891
acauuacccagcuaguucu

SEQ ID NO: 501893 - RNA, 19 nt, Artificial Sequence
  Description of Artificial Sequence: Synthetic oligonucleotide
  Sense strand starting at position 1210 of SEQ ID NO: 317658
gaacuagcuggguaauguu

SEQ ID NO: 501894 - RNA, 19 nt, Artificial Sequence
  Description of Artificial Sequence: Synthetic oligonucleotide
  Antisense strand to SEQ ID NO: 501893
aacauuacccagcuaguuc

SEQ ID NO: 501895 - RNA, 19 nt, Artificial Sequence
  Description of Artificial Sequence: Synthetic oligonucleotide
  Sense strand starting at position 1218 of SEQ ID NO: 317658
uggguaauguuagccagaa

SEQ ID NO: 501896 - RNA, 19 nt, Artificial Sequence
  Description of Artificial Sequence: Synthetic oligonucleotide
  Antisense strand to SEQ ID NO: 501895
uucuggcuaacauuaccca

SEQ ID NO: 501897 - RNA, 19 nt, Artificial Sequence
  Description of Artificial Sequence: Synthetic oligonucleotide
  Sense strand starting at position 1219 of SEQ ID NO: 317658
ggguaauguuagccagaau

SEQ ID NO: 501898 - RNA, 19 nt, Artificial Sequence
  Description of Artificial Sequence: Synthetic oligonucleotide
  Antisense strand to SEQ ID NO: 501897
auucuggcuaacauuaccc

SEQ ID NO: 501899 - RNA, 19 nt, Artificial Sequence
  Description of Artificial Sequence: Synthetic oligonucleotide
  Sense strand starting at position 1220 of SEQ ID NO: 317658
gguaauguuagccagaauc

SEQ ID NO: 501900 - RNA, 19 nt, Artificial Sequence
  Description of Artificial Sequence: Synthetic oligonucleotide
  Antisense strand to SEQ ID NO: 501899
gauucuggcuaacauuacc

SEQ ID NO: 501901 - RNA, 19 nt, Artificial Sequence
  Description of Artificial Sequence: Synthetic oligonucleotide
  Sense strand starting at position 1222 of SEQ ID NO: 317658
uaauguuagccagaaucug

SEQ ID NO: 501902 - RNA, 19 nt, Artificial Sequence
  Description of Artificial Sequence: Synthetic oligonucleotide
  Antisense strand to SEQ ID NO: 501901
cagauucuggcuaacauua

SEQ ID NO: 501903 - RNA, 19 nt, Artificial Sequence
  Description of Artificial Sequence: Synthetic oligonucleotide
  Sense strand starting at position 1230 of SEQ ID NO: 317658
gccagaaucugggccuauu

SEQ ID NO: 501904 - RNA, 19 nt, Artificial Sequence
  Description of Artificial Sequence: Synthetic oligonucleotide
  Antisense strand to SEQ ID NO: 501903
aauaggcccagauucuggc

SEQ ID NO: 501905 - RNA, 19 nt, Artificial Sequence
  Description of Artificial Sequence: Synthetic oligonucleotide
  Sense strand starting at position 1377 of SEQ ID NO: 317658
uuaggauuggguuagcuuu

SEQ ID NO: 501906 - RNA, 19 nt, Artificial Sequence
  Description of Artificial Sequence: Synthetic oligonucleotide
  Antisense strand to SEQ ID NO: 501905
aaagcuaacccaauccuaa

SEQ ID NO: 501907 - RNA, 19 nt, Artificial Sequence
  Description of Artificial Sequence: Synthetic oligonucleotide
  Sense strand starting at position 2427 of SEQ ID NO: 317658
ccucaagagguccagcaaa

SEQ ID NO: 501908 - RNA, 19 nt, Artificial Sequence
  Description of Artificial Sequence: Synthetic oligonucleotide
  Antisense strand to SEQ ID NO: 501907
uuugcuggaccucuugagg

SEQ ID NO: 501909 - RNA, 19 nt, Artificial Sequence
  Description of Artificial Sequence: Synthetic oligonucleotide
  Sense strand starting at position 2510 of SEQ ID NO: 317658
cccucuuucuucgucauuu

SEQ ID NO: 501910 - RNA, 19 nt, Artificial Sequence
  Description of Artificial Sequence: Synthetic oligonucleotide
  Antisense strand to SEQ ID NO: 501909
aaaugacgaagaaagaggg

SEQ ID NO: 501911 - RNA, 19 nt, Artificial Sequence
  Description of Artificial Sequence: Synthetic oligonucleotide
  Sense strand starting at position 2511 of SEQ ID NO: 317658
ccucuuucuucgucauuua

SEQ ID NO: 501912 - RNA, 19 nt, Artificial Sequence
  Description of Artificial Sequence: Synthetic oligonucleotide
  Antisense strand to SEQ ID NO: 501911
uaaaugacgaagaaagagg

SEQ ID NO: 501913 - RNA, 19 nt, Artificial Sequence
  Description of Artificial Sequence: Synthetic oligonucleotide
  Sense strand starting at position 3034 of SEQ ID NO: 317658
gucuguuagcuguuucagu

SEQ ID NO: 501914 - RNA, 19 nt, Artificial Sequence
  Description of Artificial Sequence: Synthetic oligonucleotide
  Antisense strand to SEQ ID NO: 501913
acugaaacagcuaacagac

SEQ ID NO: 501915 - RNA, 19 nt, Artificial Sequence
  Description of Artificial Sequence: Synthetic oligonucleotide
  Sense strand starting at position 3045 of SEQ ID NO: 317658
guuucaguccuggaaggca

SEQ ID NO: 501916 - RNA, 19 nt, Artificial Sequence
  Description of Artificial Sequence: Synthetic oligonucleotide
  Antisense strand to SEQ ID NO: 501915
ugccuuccaggacugaaac

SEQ ID NO: 501917 - RNA, 19 nt, Artificial Sequence
  Description of Artificial Sequence: Synthetic oligonucleotide
  Sense strand starting at position 3093 of SEQ ID NO: 317658
ccuacauauuuguaaguaa

SEQ ID NO: 501918 - RNA, 19 nt, Artificial Sequence
  Description of Artificial Sequence: Synthetic oligonucleotide
  Antisense strand to SEQ ID NO: 501917
uuacuuacaaauauguagg

SEQ ID NO: 501919 - RNA, 19 nt, Artificial Sequence
  Description of Artificial Sequence: Synthetic oligonucleotide
  Sense strand starting at position 3515 of SEQ ID NO: 317658
ccugccauaucaguauaua

SEQ ID NO: 501920 - RNA, 19 nt, Artificial Sequence
  Description of Artificial Sequence: Synthetic oligonucleotide
  Antisense strand to SEQ ID NO: 501919
uauauacugauauggcagg

SEQ ID NO: 501921 - RNA, 19 nt, Artificial Sequence
  Description of Artificial Sequence: Synthetic oligonucleotide
  Sense strand starting at position 3518 of SEQ ID NO: 317658
gccauaucaguauauaaug

SEQ ID NO: 501922 - RNA, 19 nt, Artificial Sequence
  Description of Artificial Sequence: Synthetic oligonucleotide
  Antisense strand to SEQ ID NO: 501921
cauuauauacugauauggc

SEQ ID NO: 501923 - RNA, 19 nt, Artificial Sequence
  Description of Artificial Sequence: Synthetic oligonucleotide
  Sense strand starting at position 3782 of SEQ ID NO: 317658
gugggagaaucguuuguac

SEQ ID NO: 501924 - RNA, 19 nt, Artificial Sequence
  Description of Artificial Sequence: Synthetic oligonucleotide
  Antisense strand to SEQ ID NO: 501923
guacaaacgauucucccac

SEQ ID NO: 501925 - RNA, 19 nt, Artificial Sequence
  Description of Artificial Sequence: Synthetic oligonucleotide
  Sense strand starting at position 3784 of SEQ ID NO: 317658
gggagaaucguuuguaccc

SEQ ID NO: 501926 - RNA, 19 nt, Artificial Sequence
  Description of Artificial Sequence: Synthetic oligonucleotide
  Antisense strand to SEQ ID NO: 501925
ggguacaaacgauucuccc

SEQ ID NO: 501927 - RNA, 19 nt, Artificial Sequence
  Description of Artificial Sequence: Synthetic oligonucleotide
  Sense strand starting at position 3790 of SEQ ID NO: 317658
aucguuuguacccaggaga

SEQ ID NO: 501928 - RNA, 19 nt, Artificial Sequence
  Description of Artificial Sequence: Synthetic oligonucleotide
  Antisense strand to SEQ ID NO: 501927
ucuccuggguacaaacgau

SEQ ID NO: 501929 - RNA, 19 nt, Artificial Sequence
  Description of Artificial Sequence: Synthetic oligonucleotide
  Sense strand starting at position 3793 of SEQ ID NO: 317658
guuuguacccaggagauga

SEQ ID NO: 501930 - RNA, 19 nt, Artificial Sequence
  Description of Artificial Sequence: Synthetic oligonucleotide
  Antisense strand to SEQ ID NO: 501929
ucaucuccuggguacaaac

SEQ ID NO: 501931 - RNA, 19 nt, Artificial Sequence
  Description of Artificial Sequence: Synthetic oligonucleotide
  Sense strand starting at position 3939 of SEQ ID NO: 317658
augauaaauccuuagccug

SEQ ID NO: 501932 - RNA, 19 nt, Artificial Sequence
  Description of Artificial Sequence: Synthetic oligonucleotide
  Antisense strand to SEQ ID NO: 501931
caggcuaaggauuuaucau

SEQ ID NO: 501933 - RNA, 19 nt, Artificial Sequence
  Description of Artificial Sequence: Synthetic oligonucleotide
  Sense strand starting at position 3946 of SEQ ID NO: 317658
auccuuagccuggaaucuu

SEQ ID NO: 501934 - RNA, 19 nt, Artificial Sequence
  Description of Artificial Sequence: Synthetic oligonucleotide
  Antisense strand to SEQ ID NO: 501933
aagauuccaggcuaaggau

SEQ ID NO: 501935 - RNA, 19 nt, Artificial Sequence
  Description of Artificial Sequence: Synthetic oligonucleotide
  Sense strand starting at position 151 of SEQ ID NO: 317659
cuagcauaguuauuacaca

SEQ ID NO: 501936 - RNA, 19 nt, Artificial Sequence
  Description of Artificial Sequence: Synthetic oligonucleotide
  Antisense strand to SEQ ID NO: 501935
uguguaauaacuaugcuag

SEQ ID NO: 501937 - RNA, 19 nt, Artificial Sequence
  Description of Artificial Sequence: Synthetic oligonucleotide
  Sense strand starting at position 218 of SEQ ID NO: 317659
ucaggaacuccauguaaug

SEQ ID NO: 501938 - RNA, 19 nt, Artificial Sequence
  Description of Artificial Sequence: Synthetic oligonucleotide
  Antisense strand to SEQ ID NO: 501937
cauuacauggaguuccuga

SEQ ID NO: 501939 - RNA, 19 nt, Artificial Sequence
  Description of Artificial Sequence: Synthetic oligonucleotide
  Sense strand starting at position 227 of SEQ ID NO: 317659
ccauguaauggucauacaa

SEQ ID NO: 501940 - RNA, 19 nt, Artificial Sequence
  Description of Artificial Sequence: Synthetic oligonucleotide
  Antisense strand to SEQ ID NO: 501939
uuguaugaccauuacaugg

SEQ ID NO: 501941 - RNA, 19 nt, Artificial Sequence
  Description of Artificial Sequence: Synthetic oligonucleotide
  Sense strand starting at position 365 of SEQ ID NO: 317659
ggacuagacaacggucaaa

SEQ ID NO: 501942 - RNA, 19 nt, Artificial Sequence
  Description of Artificial Sequence: Synthetic oligonucleotide
  Antisense strand to SEQ ID NO: 501941
uuugaccguugucuagucc

SEQ ID NO: 501943 - RNA, 19 nt, Artificial Sequence
  Description of Artificial Sequence: Synthetic oligonucleotide
  Sense strand starting at position 402 of SEQ ID NO: 317659
uggaaauaaucuguuggca

SEQ ID NO: 501944 - RNA, 19 nt, Artificial Sequence
  Description of Artificial Sequence: Synthetic oligonucleotide
  Antisense strand to SEQ ID NO: 501943
ugccaacagauuauuucca

SEQ ID NO: 501945 - RNA, 19 nt, Artificial Sequence
  Description of Artificial Sequence: Synthetic oligonucleotide
  Sense strand starting at position 406 of SEQ ID NO: 317659
aauaaucuguuggcagaga

SEQ ID NO: 501946 - RNA, 19 nt, Artificial Sequence
  Description of Artificial Sequence: Synthetic oligonucleotide
  Antisense strand to SEQ ID NO: 501945
ucucugccaacagauuauu

SEQ ID NO: 501947 - RNA, 19 nt, Artificial Sequence
  Description of Artificial Sequence: Synthetic oligonucleotide
  Sense strand starting at position 790 of SEQ ID NO: 317659
gugacaguuuaaguauuaa

SEQ ID NO: 501948 - RNA, 19 nt, Artificial Sequence
  Description of Artificial Sequence: Synthetic oligonucleotide
  Antisense strand to SEQ ID NO: 501947
uuaauacuuaaacugucac

SEQ ID NO: 501949 - RNA, 19 nt, Artificial Sequence
  Description of Artificial Sequence: Synthetic oligonucleotide
  Sense strand starting at position 844 of SEQ ID NO: 317659
gcuuaacgucuccaacaaa

SEQ ID NO: 501950 - RNA, 19 nt, Artificial Sequence
  Description of Artificial Sequence: Synthetic oligonucleotide
  Antisense strand to SEQ ID NO: 501949
uuuguuggagacguuaagc

SEQ ID NO: 501951 - RNA, 19 nt, Artificial Sequence
  Description of Artificial Sequence: Synthetic oligonucleotide
  Sense strand starting at position 982 of SEQ ID NO: 317659
uuacuacugugagcuauca

SEQ ID NO: 501952 - RNA, 19 nt, Artificial Sequence
  Description of Artificial Sequence: Synthetic oligonucleotide
  Antisense strand to SEQ ID NO: 501951
ugauagcucacaguaguaa

SEQ ID NO: 501953 - RNA, 19 nt, Artificial Sequence
  Description of Artificial Sequence: Synthetic oligonucleotide
  Sense strand starting at position 1015 of SEQ ID NO: 317659
ggaacugagacucgguaua

SEQ ID NO: 501954 - RNA, 19 nt, Artificial Sequence
  Description of Artificial Sequence: Synthetic oligonucleotide
  Antisense strand to SEQ ID NO: 501953
uauaccgagucucaguucc

SEQ ID NO: 501955 - RNA, 19 nt, Artificial Sequence
  Description of Artificial Sequence: Synthetic oligonucleotide
  Sense strand starting at position 1017 of SEQ ID NO: 317659
aacugagacucgguauaua

SEQ ID NO: 501956 - RNA, 19 nt, Artificial Sequence
  Description of Artificial Sequence: Synthetic oligonucleotide
  Antisense strand to SEQ ID NO: 501955
uauauaccgagucucaguu

SEQ ID NO: 501957 - RNA, 19 nt, Artificial Sequence
  Description of Artificial Sequence: Synthetic oligonucleotide
  Sense strand starting at position 1020 of SEQ ID NO: 317659
ugagacucgguauauaagu

SEQ ID NO: 501958 - RNA, 19 nt, Artificial Sequence
  Description of Artificial Sequence: Synthetic oligonucleotide
  Antisense strand to SEQ ID NO: 501957
acuuauauaccgagucuca

SEQ ID NO: 501959 - RNA, 19 nt, Artificial Sequence
  Description of Artificial Sequence: Synthetic oligonucleotide
  Sense strand starting at position 1063 of SEQ ID NO: 317659
augggauucugacucaagu

SEQ ID NO: 501960 - RNA, 19 nt, Artificial Sequence
  Description of Artificial Sequence: Synthetic oligonucleotide
  Antisense strand to SEQ ID NO: 501959
acuugagucagaaucccau

SEQ ID NO: 501961 - RNA, 19 nt, Artificial Sequence
  Description of Artificial Sequence: Synthetic oligonucleotide
  Sense strand starting at position 1097 of SEQ ID NO: 317659
acucaaaugugaucuacag

SEQ ID NO: 501962 - RNA, 19 nt, Artificial Sequence
  Description of Artificial Sequence: Synthetic oligonucleotide
  Antisense strand to SEQ ID NO: 501961
cuguagaucacauuugagu

SEQ ID NO: 501963 - RNA, 19 nt, Artificial Sequence
  Description of Artificial Sequence: Synthetic oligonucleotide
  Sense strand starting at position 1134 of SEQ ID NO: 317659
augggauguuaggucaagu

SEQ ID NO: 501964 - RNA, 19 nt, Artificial Sequence
  Description of Artificial Sequence: Synthetic oligonucleotide
  Antisense strand to SEQ ID NO: 501963
acuugaccuaacaucccau

SEQ ID NO: 501965 - RNA, 19 nt, Artificial Sequence
  Description of Artificial Sequence: Synthetic oligonucleotide
  Sense strand starting at position 1252 of SEQ ID NO: 317659
gguacuuggaauuguaacu

SEQ ID NO: 501966 - RNA, 19 nt, Artificial Sequence
  Description of Artificial Sequence: Synthetic oligonucleotide
  Antisense strand to SEQ ID NO: 501965
aguuacaauuccaaguacc

SEQ ID NO: 501967 - RNA, 19 nt, Artificial Sequence
  Description of Artificial Sequence: Synthetic oligonucleotide
  Sense strand starting at position 1270 of SEQ ID NO: 317659
ugcgcugagcuucuacuua

SEQ ID NO: 501968 - RNA, 19 nt, Artificial Sequence
  Description of Artificial Sequence: Synthetic oligonucleotide
  Antisense strand to SEQ ID NO: 501967
uaaguagaagcucagcgca

SEQ ID NO: 501969 - RNA, 19 nt, Artificial Sequence
  Description of Artificial Sequence: Synthetic oligonucleotide
  Sense strand starting at position 1293 of SEQ ID NO: 317659
cuuuaaguacucuacagua

SEQ ID NO: 501970 - RNA, 19 nt, Artificial Sequence
  Description of Artificial Sequence: Synthetic oligonucleotide
  Antisense strand to SEQ ID NO: 501969
uacuguagaguacuuaaag

SEQ ID NO: 501971 - RNA, 19 nt, Artificial Sequence
  Description of Artificial Sequence: Synthetic oligonucleotide
  Sense strand starting at position 1295 of SEQ ID NO: 317659
uuaaguacucuacaguagu

SEQ ID NO: 501972 - RNA, 19 nt, Artificial Sequence
  Description of Artificial Sequence: Synthetic oligonucleotide
  Antisense strand to SEQ ID NO: 501971
acuacuguagaguacuuaa

SEQ ID NO: 501973 - RNA, 19 nt, Artificial Sequence
  Description of Artificial Sequence: Synthetic oligonucleotide
  Sense strand starting at position 2160 of SEQ ID NO: 317659
gacauuugcacgugcggau

SEQ ID NO: 501974 - RNA, 19 nt, Artificial Sequence
  Description of Artificial Sequence: Synthetic oligonucleotide
  Antisense strand to SEQ ID NO: 501973
auccgcacgugcaaauguc

SEQ ID NO: 501975 - RNA, 19 nt, Artificial Sequence
  Description of Artificial Sequence: Synthetic oligonucleotide
  Sense strand starting at position 2195 of SEQ ID NO: 317659
uuuaguauagcaugcauuu

SEQ ID NO: 501976 - RNA, 19 nt, Artificial Sequence
  Description of Artificial Sequence: Synthetic oligonucleotide
  Antisense strand to SEQ ID NO: 501975
aaaugcaugcuauacuaaa

SEQ ID NO: 501977 - RNA, 19 nt, Artificial Sequence
  Description of Artificial Sequence: Synthetic oligonucleotide
  Sense strand starting at position 2267 of SEQ ID NO: 317659
ggacuaugaugcucuacuu

SEQ ID NO: 501978 - RNA, 19 nt, Artificial Sequence
  Description of Artificial Sequence: Synthetic oligonucleotide
  Antisense strand to SEQ ID NO: 501977
aaguagagcaucauagucc

SEQ ID NO: 501979 - RNA, 19 nt, Artificial Sequence
  Description of Artificial Sequence: Synthetic oligonucleotide
  Sense strand starting at position 2301 of SEQ ID NO: 317659
ugaggagguuaauaaauuu

SEQ ID NO: 501980 - RNA, 19 nt, Artificial Sequence
  Description of Artificial Sequence: Synthetic oligonucleotide
  Antisense strand to SEQ ID NO: 501979
aaauuuauuaaccuccuca

SEQ ID NO: 501981 - RNA, 19 nt, Artificial Sequence
  Description of Artificial Sequence: Synthetic oligonucleotide
  Sense strand starting at position 2478 of SEQ ID NO: 317659
caaugagcuguaggaggau

SEQ ID NO: 501982 - RNA, 19 nt, Artificial Sequence
  Description of Artificial Sequence: Synthetic oligonucleotide
  Antisense strand to SEQ ID NO: 501981
auccuccuacagcucauug

SEQ ID NO: 501983 - RNA, 19 nt, Artificial Sequence
  Description of Artificial Sequence: Synthetic oligonucleotide
  Sense strand starting at position 2580 of SEQ ID NO: 317659
ugguguuagcaugauccca

SEQ ID NO: 501984 - RNA, 19 nt, Artificial Sequence
  Description of Artificial Sequence: Synthetic oligonucleotide
  Antisense strand to SEQ ID NO: 501983
ugggaucaugcuaacacca

SEQ ID NO: 501985 - RNA, 19 nt, Artificial Sequence
  Description of Artificial Sequence: Synthetic oligonucleotide
  Sense strand starting at position 2671 of SEQ ID NO: 317659
guagauuggccagaacuuc

SEQ ID NO: 501986 - RNA, 19 nt, Artificial Sequence
  Description of Artificial Sequence: Synthetic oligonucleotide
  Antisense strand to SEQ ID NO: 501985
gaaguucuggccaaucuac

SEQ ID NO: 501987 - RNA, 19 nt, Artificial Sequence
  Description of Artificial Sequence: Synthetic oligonucleotide
  Sense strand starting at position 2733 of SEQ ID NO: 317659
gugaaaucagcccaacugu

SEQ ID NO: 501988 - RNA, 19 nt, Artificial Sequence
  Description of Artificial Sequence: Synthetic oligonucleotide
  Antisense strand to SEQ ID NO: 501987
acaguugggcugauuucac

SEQ ID NO: 501989 - RNA, 19 nt, Artificial Sequence
  Description of Artificial Sequence: Synthetic oligonucleotide
  Sense strand starting at position 2871 of SEQ ID NO: 317659
ugaggccucccagauagua

SEQ ID NO: 501990 - RNA, 19 nt, Artificial Sequence
  Description of Artificial Sequence: Synthetic oligonucleotide
  Antisense strand to SEQ ID NO: 501989
uacuaucugggaggccuca

SEQ ID NO: 501991 - RNA, 19 nt, Artificial Sequence
  Description of Artificial Sequence: Synthetic oligonucleotide
  Sense strand starting at position 3026 of SEQ ID NO: 317659
ucucacauguagucacauu

SEQ ID NO: 501992 - RNA, 19 nt, Artificial Sequence
  Description of Artificial Sequence: Synthetic oligonucleotide
  Antisense strand to SEQ ID NO: 501991
aaugugacuacaugugaga

SEQ ID NO: 501993 - RNA, 19 nt, Artificial Sequence
  Description of Artificial Sequence: Synthetic oligonucleotide
  Sense strand starting at position 3166 of SEQ ID NO: 317659
cucaaugacuggcuuucua

SEQ ID NO: 501994 - RNA, 19 nt, Artificial Sequence
  Description of Artificial Sequence: Synthetic oligonucleotide
  Antisense strand to SEQ ID NO: 501993
uagaaagccagucauugag

SEQ ID NO: 501995 - RNA, 19 nt, Artificial Sequence
  Description of Artificial Sequence: Synthetic oligonucleotide
  Sense strand starting at position 3175 of SEQ ID NO: 317659
uggcuuucuauguagugaa

SEQ ID NO: 501996 - RNA, 19 nt, Artificial Sequence
  Description of Artificial Sequence: Synthetic oligonucleotide
  Antisense strand to SEQ ID NO: 501995
uucacuacauagaaagcca

SEQ ID NO: 501997 - RNA, 19 nt, Artificial Sequence
  Description of Artificial Sequence: Synthetic oligonucleotide
  Sense strand starting at position 3188 of SEQ ID NO: 317659
agugaacaaugggucuauu

SEQ ID NO: 501998 - RNA, 19 nt, Artificial Sequence
  Description of Artificial Sequence: Synthetic oligonucleotide
  Antisense strand to SEQ ID NO: 501997
aauagacccauuguucacu

SEQ ID NO: 501999 - RNA, 19 nt, Artificial Sequence
  Description of Artificial Sequence: Synthetic oligonucleotide
  Sense strand starting at position 3259 of SEQ ID NO: 317659
ucugguuccugaguuuaga

SEQ ID NO: 502000 - RNA, 19 nt, Artificial Sequence
  Description of Artificial Sequence: Synthetic oligonucleotide
  Antisense strand to SEQ ID NO: 501999
ucuaaacucaggaaccaga

SEQ ID NO: 502001 - RNA, 19 nt, Artificial Sequence
  Description of Artificial Sequence: Synthetic oligonucleotide
  Sense strand starting at position 3507 of SEQ ID NO: 317659
auuagaucaugagcucaga

SEQ ID NO: 502002 - RNA, 19 nt, Artificial Sequence
  Description of Artificial Sequence: Synthetic oligonucleotide
  Antisense strand to SEQ ID NO: 502001
ucugagcucaugaucuaau

SEQ ID NO: 502003 - RNA, 19 nt, Artificial Sequence
  Description of Artificial Sequence: Synthetic oligonucleotide
  Sense strand starting at position 3524 of SEQ ID NO: 317659
gaguccugggccugagauu

SEQ ID NO: 502004 - RNA, 19 nt, Artificial Sequence
  Description of Artificial Sequence: Synthetic oligonucleotide
  Antisense strand to SEQ ID NO: 502003
aaucucaggcccaggacuc

SEQ ID NO: 502005 - RNA, 19 nt, Artificial Sequence
  Description of Artificial Sequence: Synthetic oligonucleotide
  Sense strand starting at position 3617 of SEQ ID NO: 317659
uccguaaaugcugaacaca

SEQ ID NO: 502006 - RNA, 19 nt, Artificial Sequence
  Description of Artificial Sequence: Synthetic oligonucleotide
  Antisense strand to SEQ ID NO: 502005
uguguucagcauuuacgga

SEQ ID NO: 502007 - RNA, 19 nt, Artificial Sequence
  Description of Artificial Sequence: Synthetic oligonucleotide
  Sense strand starting at position 3644 of SEQ ID NO: 317659
agagaauccuguuuggugu

SEQ ID NO: 502008 - RNA, 19 nt, Artificial Sequence
  Description of Artificial Sequence: Synthetic oligonucleotide
  Antisense strand to SEQ ID NO: 502007
acaccaaacaggauucucu

SEQ ID NO: 502009 - RNA, 19 nt, Artificial Sequence
  Description of Artificial Sequence: Synthetic oligonucleotide
  Sense strand starting at position 3759 of SEQ ID NO: 317659
cuccaaggguuagcuaauu

SEQ ID NO: 502010 - RNA, 19 nt, Artificial Sequence
  Description of Artificial Sequence: Synthetic oligonucleotide
  Antisense strand to SEQ ID NO: 502009
aauuagcuaacccuuggag

SEQ ID NO: 502011 - RNA, 19 nt, Artificial Sequence
  Description of Artificial Sequence: Synthetic oligonucleotide
  Sense strand starting at position 3767 of SEQ ID NO: 317659
guuagcuaauuccuagaca

SEQ ID NO: 502012 - RNA, 19 nt, Artificial Sequence
  Description of Artificial Sequence: Synthetic oligonucleotide
  Antisense strand to SEQ ID NO: 502011
ugucuaggaauuagcuaac

SEQ ID NO: 502013 - RNA, 19 nt, Artificial Sequence
  Description of Artificial Sequence: Synthetic oligonucleotide
  Sense strand starting at position 3872 of SEQ ID NO: 317659
cuaaucacuccagggcaaa

SEQ ID NO: 502014 - RNA, 19 nt, Artificial Sequence
  Description of Artificial Sequence: Synthetic oligonucleotide
  Antisense strand to SEQ ID NO: 502013
uuugcccuggagugauuag

SEQ ID NO: 502015 - RNA, 19 nt, Artificial Sequence
  Description of Artificial Sequence: Synthetic oligonucleotide
  Sense strand starting at position 6 of SEQ ID NO: 317660
gcucaagaucucuagguac

SEQ ID NO: 502016 - RNA, 19 nt, Artificial Sequence
  Description of Artificial Sequence: Synthetic oligonucleotide
  Antisense strand to SEQ ID NO: 502015
guaccuagagaucuugagc

SEQ ID NO: 502017 - RNA, 19 nt, Artificial Sequence
  Description of Artificial Sequence: Synthetic oligonucleotide
  Sense strand starting at position 8 of SEQ ID NO: 317660
ucaagaucucuagguacua

SEQ ID NO: 502018 - RNA, 19 nt, Artificial Sequence
  Description of Artificial Sequence: Synthetic oligonucleotide
  Antisense strand to SEQ ID NO: 502017
uaguaccuagagaucuuga

SEQ ID NO: 502019 - RNA, 19 nt, Artificial Sequence
  Description of Artificial Sequence: Synthetic oligonucleotide
  Sense strand starting at position 118 of SEQ ID NO: 317660
uagggcauuucucuugcua

SEQ ID NO: 502020 - RNA, 19 nt, Artificial Sequence
  Description of Artificial Sequence: Synthetic oligonucleotide
  Antisense strand to SEQ ID NO: 502019
uagcaagagaaaugcccua

SEQ ID NO: 502021 - RNA, 19 nt, Artificial Sequence
  Description of Artificial Sequence: Synthetic oligonucleotide
  Sense strand starting at position 176 of SEQ ID NO: 317660
ugagcauaagacugguuau

SEQ ID NO: 502022 - RNA, 19 nt, Artificial Sequence
  Description of Artificial Sequence: Synthetic oligonucleotide
  Antisense strand to SEQ ID NO: 502021
auaaccagucuuaugcuca

SEQ ID NO: 502023 - RNA, 19 nt, Artificial Sequence
  Description of Artificial Sequence: Synthetic oligonucleotide
  Sense strand starting at position 179 of SEQ ID NO: 317660
gcauaagacugguuauaau

SEQ ID NO: 502024 - RNA, 19 nt, Artificial Sequence
  Description of Artificial Sequence: Synthetic oligonucleotide
  Antisense strand to SEQ ID NO: 502023
auuauaaccagucuuaugc

SEQ ID NO: 502025 - RNA, 19 nt, Artificial Sequence
  Description of Artificial Sequence: Synthetic oligonucleotide
  Sense strand starting at position 215 of SEQ ID NO: 317660
aaauguuggaguuagguga

SEQ ID NO: 502026 - RNA, 19 nt, Artificial Sequence
  Description of Artificial Sequence: Synthetic oligonucleotide
  Antisense strand to SEQ ID NO: 502025
ucaccuaacuccaacauuu

SEQ ID NO: 502027 - RNA, 19 nt, Artificial Sequence
  Description of Artificial Sequence: Synthetic oligonucleotide
  Sense strand starting at position 462 of SEQ ID NO: 317660
uaacaaguuugguugaaga

SEQ ID NO: 502028 - RNA, 19 nt, Artificial Sequence
  Description of Artificial Sequence: Synthetic oligonucleotide
  Antisense strand to SEQ ID NO: 502027
ucuucaaccaaacuuguua

SEQ ID NO: 502029 - RNA, 19 nt, Artificial Sequence
  Description of Artificial Sequence: Synthetic oligonucleotide
  Sense strand starting at position 610 of SEQ ID NO: 317660
ggcaaaguuggucacaaug

SEQ ID NO: 502030 - RNA, 19 nt, Artificial Sequence
  Description of Artificial Sequence: Synthetic oligonucleotide
  Antisense strand to SEQ ID NO: 502029
cauugugaccaacuuugcc

SEQ ID NO: 502031 - RNA, 19 nt, Artificial Sequence
  Description of Artificial Sequence: Synthetic oligonucleotide
  Sense strand starting at position 708 of SEQ ID NO: 317660
ucauguuugcaugagggaa

SEQ ID NO: 502032 - RNA, 19 nt, Artificial Sequence
  Description of Artificial Sequence: Synthetic oligonucleotide
  Antisense strand to SEQ ID NO: 502031
uucccucaugcaaacauga

SEQ ID NO: 502033 - RNA, 19 nt, Artificial Sequence
  Description of Artificial Sequence: Synthetic oligonucleotide
  Sense strand starting at position 743 of SEQ ID NO: 317660
ugaggcucucgugaaacaa

SEQ ID NO: 502034 - RNA, 19 nt, Artificial Sequence
  Description of Artificial Sequence: Synthetic oligonucleotide
  Antisense strand to SEQ ID NO: 502033
uuguuucacgagagccuca

SEQ ID NO: 502035 - RNA, 19 nt, Artificial Sequence
  Description of Artificial Sequence: Synthetic oligonucleotide
  Sense strand starting at position 861 of SEQ ID NO: 317660
aggagagucugaguagaug

SEQ ID NO: 502036 - RNA, 19 nt, Artificial Sequence
  Description of Artificial Sequence: Synthetic oligonucleotide
  Antisense strand to SEQ ID NO: 502035
caucuacucagacucuccu

SEQ ID NO: 502037 - RNA, 19 nt, Artificial Sequence
  Description of Artificial Sequence: Synthetic oligonucleotide
  Sense strand starting at position 905 of SEQ ID NO: 317660
cuuggaugacucuggguga

SEQ ID NO: 502038 - RNA, 19 nt, Artificial Sequence
  Description of Artificial Sequence: Synthetic oligonucleotide
  Antisense strand to SEQ ID NO: 502037
ucacccagagucauccaag

SEQ ID NO: 502039 - RNA, 19 nt, Artificial Sequence
  Description of Artificial Sequence: Synthetic oligonucleotide
  Sense strand starting at position 908 of SEQ ID NO: 317660
ggaugacucugggugaauc

SEQ ID NO: 502040 - RNA, 19 nt, Artificial Sequence
  Description of Artificial Sequence: Synthetic oligonucleotide
  Antisense strand to SEQ ID NO: 502039
gauucacccagagucaucc

SEQ ID NO: 502041 - RNA, 19 nt, Artificial Sequence
  Description of Artificial Sequence: Synthetic oligonucleotide
  Sense strand starting at position 909 of SEQ ID NO: 317660
gaugacucugggugaauca

SEQ ID NO: 502042 - RNA, 19 nt, Artificial Sequence
  Description of Artificial Sequence: Synthetic oligonucleotide
  Antisense strand to SEQ ID NO: 502041
ugauucacccagagucauc

SEQ ID NO: 502043 - RNA, 19 nt, Artificial Sequence
  Description of Artificial Sequence: Synthetic oligonucleotide
  Sense strand starting at position 956 of SEQ ID NO: 317660
ucucacuuccuagaggcau

SEQ ID NO: 502044 - RNA, 19 nt, Artificial Sequence
  Description of Artificial Sequence: Synthetic oligonucleotide
  Antisense strand to SEQ ID NO: 502043
augccucuaggaagugaga

SEQ ID NO: 502045 - RNA, 19 nt, Artificial Sequence
  Description of Artificial Sequence: Synthetic oligonucleotide
  Sense strand starting at position 962 of SEQ ID NO: 317660
uuccuagaggcaugaugaa

SEQ ID NO: 502046 - RNA, 19 nt, Artificial Sequence
  Description of Artificial Sequence: Synthetic oligonucleotide
  Antisense strand to SEQ ID NO: 502045
uucaucaugccucuaggaa

SEQ ID NO: 502047 - RNA, 19 nt, Artificial Sequence
  Description of Artificial Sequence: Synthetic oligonucleotide
  Sense strand starting at position 1049 of SEQ ID NO: 317660
auccgagcacuuugaaaga

SEQ ID NO: 502048 - RNA, 19 nt, Artificial Sequence
  Description of Artificial Sequence: Synthetic oligonucleotide
  Antisense strand to SEQ ID NO: 502047
ucuuucaaagugcucggau

SEQ ID NO: 502049 - RNA, 19 nt, Artificial Sequence
  Description of Artificial Sequence: Synthetic oligonucleotide
  Sense strand starting at position 1322 of SEQ ID NO: 317660
agaaaucauccuugggcau

SEQ ID NO: 502050 - RNA, 19 nt, Artificial Sequence
  Description of Artificial Sequence: Synthetic oligonucleotide
  Antisense strand to SEQ ID NO: 502049
augcccaaggaugauuucu

SEQ ID NO: 502051 - RNA, 19 nt, Artificial Sequence
  Description of Artificial Sequence: Synthetic oligonucleotide
  Sense strand starting at position 1662 of SEQ ID NO: 317660
ccacuuacggcucaggaaa

SEQ ID NO: 502052 - RNA, 19 nt, Artificial Sequence
  Description of Artificial Sequence: Synthetic oligonucleotide
  Antisense strand to SEQ ID NO: 502051
uuuccugagccguaagugg

SEQ ID NO: 502053 - RNA, 19 nt, Artificial Sequence
  Description of Artificial Sequence: Synthetic oligonucleotide
  Sense strand starting at position 1732 of SEQ ID NO: 317660
agcaaaugucuccagauua

SEQ ID NO: 502054 - RNA, 19 nt, Artificial Sequence
  Description of Artificial Sequence: Synthetic oligonucleotide
  Antisense strand to SEQ ID NO: 502053
uaaucuggagacauuugcu

SEQ ID NO: 502055 - RNA, 19 nt, Artificial Sequence
  Description of Artificial Sequence: Synthetic oligonucleotide
  Sense strand starting at position 1911 of SEQ ID NO: 317660
agagcucucuauuucuagu

SEQ ID NO: 502056 - RNA, 19 nt, Artificial Sequence
  Description of Artificial Sequence: Synthetic oligonucleotide
  Antisense strand to SEQ ID NO: 502055
acuagaaauagagagcucu

SEQ ID NO: 502057 - RNA, 19 nt, Artificial Sequence
  Description of Artificial Sequence: Synthetic oligonucleotide
  Sense strand starting at position 2065 of SEQ ID NO: 317660
aagcaaaggucaucugaca

SEQ ID NO: 502058 - RNA, 19 nt, Artificial Sequence
  Description of Artificial Sequence: Synthetic oligonucleotide
  Antisense strand to SEQ ID NO: 502057
ugucagaugaccuuugcuu

SEQ ID NO: 502059 - RNA, 19 nt, Artificial Sequence
  Description of Artificial Sequence: Synthetic oligonucleotide
  Sense strand starting at position 2192 of SEQ ID NO: 317660
gagauugugaaacgaggua

SEQ ID NO: 502060 - RNA, 19 nt, Artificial Sequence
  Description of Artificial Sequence: Synthetic oligonucleotide
  Antisense strand to SEQ ID NO: 502059
uaccucguuucacaaucuc

SEQ ID NO: 502061 - RNA, 19 nt, Artificial Sequence
  Description of Artificial Sequence: Synthetic oligonucleotide
  Sense strand starting at position 2197 of SEQ ID NO: 317660
ugugaaacgagguauguga

SEQ ID NO: 502062 - RNA, 19 nt, Artificial Sequence
  Description of Artificial Sequence: Synthetic oligonucleotide
  Antisense strand to SEQ ID NO: 502061
ucacauaccucguuucaca

SEQ ID NO: 502063 - RNA, 19 nt, Artificial Sequence
  Description of Artificial Sequence: Synthetic oligonucleotide
  Sense strand starting at position 2204 of SEQ ID NO: 317660
cgagguaugugacuaagag

SEQ ID NO: 502064 - RNA, 19 nt, Artificial Sequence
  Description of Artificial Sequence: Synthetic oligonucleotide
  Antisense strand to SEQ ID NO: 502063
cucuuagucacauaccucg

SEQ ID NO: 502065 - RNA, 19 nt, Artificial Sequence
  Description of Artificial Sequence: Synthetic oligonucleotide
  Sense strand starting at position 2231 of SEQ ID NO: 317660
ggaagauaugcaugaagug

SEQ ID NO: 502066 - RNA, 19 nt, Artificial Sequence
  Description of Artificial Sequence: Synthetic oligonucleotide
  Antisense strand to SEQ ID NO: 502065
cacuucaugcauaucuucc

SEQ ID NO: 502067 - RNA, 19 nt, Artificial Sequence
  Description of Artificial Sequence: Synthetic oligonucleotide
  Sense strand starting at position 2236 of SEQ ID NO: 317660
auaugcaugaagugaauga

SEQ ID NO: 502068 - RNA, 19 nt, Artificial Sequence
  Description of Artificial Sequence: Synthetic oligonucleotide
  Antisense strand to SEQ ID NO: 502067
ucauucacuucaugcauau

SEQ ID NO: 502069 - RNA, 19 nt, Artificial Sequence
  Description of Artificial Sequence: Synthetic oligonucleotide
  Sense strand starting at position 2240 of SEQ ID NO: 317660
gcaugaagugaaugaacaa

SEQ ID NO: 502070 - RNA, 19 nt, Artificial Sequence
  Description of Artificial Sequence: Synthetic oligonucleotide
  Antisense strand to SEQ ID NO: 502069
uuguucauucacuucaugc

SEQ ID NO: 502071 - RNA, 19 nt, Artificial Sequence
  Description of Artificial Sequence: Synthetic oligonucleotide
  Sense strand starting at position 2376 of SEQ ID NO: 317660
aucuuaugugucugaggaa

SEQ ID NO: 502072 - RNA, 19 nt, Artificial Sequence
  Description of Artificial Sequence: Synthetic oligonucleotide
  Antisense strand to SEQ ID NO: 502071
uuccucagacacauaagau

SEQ ID NO: 502073 - RNA, 19 nt, Artificial Sequence
  Description of Artificial Sequence: Synthetic oligonucleotide
  Sense strand starting at position 2416 of SEQ ID NO: 317660
gaguuagugugccuuauuu

SEQ ID NO: 502074 - RNA, 19 nt, Artificial Sequence
  Description of Artificial Sequence: Synthetic oligonucleotide
  Antisense strand to SEQ ID NO: 502073
aaauaaggcacacuaacuc

SEQ ID NO: 502075 - RNA, 19 nt, Artificial Sequence
  Description of Artificial Sequence: Synthetic oligonucleotide
  Sense strand starting at position 2984 of SEQ ID NO: 317660
gcaguagggagugaucaua

SEQ ID NO: 502076 - RNA, 19 nt, Artificial Sequence
  Description of Artificial Sequence: Synthetic oligonucleotide
  Antisense strand to SEQ ID NO: 502075
uaugaucacucccuacugc

SEQ ID NO: 502077 - RNA, 19 nt, Artificial Sequence
  Description of Artificial Sequence: Synthetic oligonucleotide
  Sense strand starting at position 3024 of SEQ ID NO: 317660
gcaggaguaauccaaguca

SEQ ID NO: 502078 - RNA, 19 nt, Artificial Sequence
  Description of Artificial Sequence: Synthetic oligonucleotide
  Antisense strand to SEQ ID NO: 502077
ugacuuggauuacuccugc

SEQ ID NO: 502079 - RNA, 19 nt, Artificial Sequence
  Description of Artificial Sequence: Synthetic oligonucleotide
  Sense strand starting at position 3115 of SEQ ID NO: 317660
uguugaguuccugaauucu

SEQ ID NO: 502080 - RNA, 19 nt, Artificial Sequence
  Description of Artificial Sequence: Synthetic oligonucleotide
  Antisense strand to SEQ ID NO: 502079
agaauucaggaacucaaca

SEQ ID NO: 502081 - RNA, 19 nt, Artificial Sequence
  Description of Artificial Sequence: Synthetic oligonucleotide
  Sense strand starting at position 3192 of SEQ ID NO: 317660
agucuuccuugacuugaga

SEQ ID NO: 502082 - RNA, 19 nt, Artificial Sequence
  Description of Artificial Sequence: Synthetic oligonucleotide
  Antisense strand to SEQ ID NO: 502081
ucucaagucaaggaagacu

SEQ ID NO: 502083 - RNA, 19 nt, Artificial Sequence
  Description of Artificial Sequence: Synthetic oligonucleotide
  Sense strand starting at position 3213 of SEQ ID NO: 317660
uuucuuggucuguaagauu

SEQ ID NO: 502084 - RNA, 19 nt, Artificial Sequence
  Description of Artificial Sequence: Synthetic oligonucleotide
  Antisense strand to SEQ ID NO: 502083
aaucuuacagaccaagaaa

SEQ ID NO: 502085 - RNA, 19 nt, Artificial Sequence
  Description of Artificial Sequence: Synthetic oligonucleotide
  Sense strand starting at position 3649 of SEQ ID NO: 317660
ucagauaaguuccuugaag

SEQ ID NO: 502086 - RNA, 19 nt, Artificial Sequence
  Description of Artificial Sequence: Synthetic oligonucleotide
  Antisense strand to SEQ ID NO: 502085
cuucaaggaacuuaucuga

SEQ ID NO: 502087 - RNA, 19 nt, Artificial Sequence
  Description of Artificial Sequence: Synthetic oligonucleotide
  Sense strand starting at position 3650 of SEQ ID NO: 317660
cagauaaguuccuugaaga

SEQ ID NO: 502088 - RNA, 19 nt, Artificial Sequence
  Description of Artificial Sequence: Synthetic oligonucleotide
  Antisense strand to SEQ ID NO: 502087
ucuucaaggaacuuaucug

SEQ ID NO: 502089 - RNA, 19 nt, Artificial Sequence
  Description of Artificial Sequence: Synthetic oligonucleotide
  Sense strand starting at position 3702 of SEQ ID NO: 317660
aaugcaucucaguaagaug

SEQ ID NO: 502090 - RNA, 19 nt, Artificial Sequence
  Description of Artificial Sequence: Synthetic oligonucleotide
  Antisense strand to SEQ ID NO: 502089
caucuuacugagaugcauu

SEQ ID NO: 502091 - RNA, 19 nt, Artificial Sequence
  Description of Artificial Sequence: Synthetic oligonucleotide
  Sense strand starting at position 3744 of SEQ ID NO: 317660
acuaacauugcacgaaacu

SEQ ID NO: 502092 - RNA, 19 nt, Artificial Sequence
  Description of Artificial Sequence: Synthetic oligonucleotide
  Antisense strand to SEQ ID NO: 502091
aguuucgugcaauguuagu

SEQ ID NO: 502093 - RNA, 19 nt, Artificial Sequence
  Description of Artificial Sequence: Synthetic oligonucleotide
  Sense strand starting at position 3745 of SEQ ID NO: 317660
cuaacauugcacgaaacua

SEQ ID NO: 502094 - RNA, 19 nt, Artificial Sequence
  Description of Artificial Sequence: Synthetic oligonucleotide
  Antisense strand to SEQ ID NO: 502093
uaguuucgugcaauguuag

SEQ ID NO: 502095 - RNA, 19 nt, Artificial Sequence
  Description of Artificial Sequence: Synthetic oligonucleotide
  Sense strand starting at position 149 of SEQ ID NO: 317661
cuuuauauguaguugcaau

SEQ ID NO: 502096 - RNA, 19 nt, Artificial Sequence
  Description of Artificial Sequence: Synthetic oligonucleotide
  Antisense strand to SEQ ID NO: 502095
auugcaacuacauauaaag

SEQ ID NO: 502097 - RNA, 19 nt, Artificial Sequence
  Description of Artificial Sequence: Synthetic oligonucleotide
  Sense strand starting at position 157 of SEQ ID NO: 317661
guaguugcaauauggcuaa

SEQ ID NO: 502098 - RNA, 19 nt, Artificial Sequence
  Description of Artificial Sequence: Synthetic oligonucleotide
  Antisense strand to SEQ ID NO: 502097
uuagccauauugcaacuac

SEQ ID NO: 502099 - RNA, 19 nt, Artificial Sequence
  Description of Artificial Sequence: Synthetic oligonucleotide
  Sense strand starting at position 198 of SEQ ID NO: 317661
gaauuacugcugcagagaa

SEQ ID NO: 502100 - RNA, 19 nt, Artificial Sequence
  Description of Artificial Sequence: Synthetic oligonucleotide
  Antisense strand to SEQ ID NO: 502099
uucucugcagcaguaauuc

SEQ ID NO: 502101 - RNA, 19 nt, Artificial Sequence
  Description of Artificial Sequence: Synthetic oligonucleotide
  Sense strand starting at position 219 of SEQ ID NO: 317661
ugauaaaucacguggucuc

SEQ ID NO: 502102 - RNA, 19 nt, Artificial Sequence
  Description of Artificial Sequence: Synthetic oligonucleotide
  Antisense strand to SEQ ID NO: 502101
gagaccacgugauuuauca

SEQ ID NO: 502103 - RNA, 19 nt, Artificial Sequence
  Description of Artificial Sequence: Synthetic oligonucleotide
  Sense strand starting at position 220 of SEQ ID NO: 317661
gauaaaucacguggucucu

SEQ ID NO: 502104 - RNA, 19 nt, Artificial Sequence
  Description of Artificial Sequence: Synthetic oligonucleotide
  Antisense strand to SEQ ID NO: 502103
agagaccacgugauuuauc

SEQ ID NO: 502105 - RNA, 19 nt, Artificial Sequence
  Description of Artificial Sequence: Synthetic oligonucleotide
  Sense strand starting at position 272 of SEQ ID NO: 317661
aagacuacuccugguuuga

SEQ ID NO: 502106 - RNA, 19 nt, Artificial Sequence
  Description of Artificial Sequence: Synthetic oligonucleotide
  Antisense strand to SEQ ID NO: 502105
ucaaaccaggaguagucuu

SEQ ID NO: 502107 - RNA, 19 nt, Artificial Sequence
  Description of Artificial Sequence: Synthetic oligonucleotide
  Sense strand starting at position 274 of SEQ ID NO: 317661
gacuacuccugguuugauc

SEQ ID NO: 502108 - RNA, 19 nt, Artificial Sequence
  Description of Artificial Sequence: Synthetic oligonucleotide
  Antisense strand to SEQ ID NO: 502107
gaucaaaccaggaguaguc

SEQ ID NO: 502109 - RNA, 19 nt, Artificial Sequence
  Description of Artificial Sequence: Synthetic oligonucleotide
  Sense strand starting at position 341 of SEQ ID NO: 317661
gagaaacagcaucgauguu

SEQ ID NO: 502110 - RNA, 19 nt, Artificial Sequence
  Description of Artificial Sequence: Synthetic oligonucleotide
  Antisense strand to SEQ ID NO: 502109
aacaucgaugcuguuucuc

SEQ ID NO: 502111 - RNA, 19 nt, Artificial Sequence
  Description of Artificial Sequence: Synthetic oligonucleotide
  Sense strand starting at position 353 of SEQ ID NO: 317661
cgauguuucuucccaacag

SEQ ID NO: 502112 - RNA, 19 nt, Artificial Sequence
  Description of Artificial Sequence: Synthetic oligonucleotide
  Antisense strand to SEQ ID NO: 502111
cuguugggaagaaacaucg

SEQ ID NO: 502113 - RNA, 19 nt, Artificial Sequence
  Description of Artificial Sequence: Synthetic oligonucleotide
  Sense strand starting at position 477 of SEQ ID NO: 317661
cgaccauuccacgaugugu

SEQ ID NO: 502114 - RNA, 19 nt, Artificial Sequence
  Description of Artificial Sequence: Synthetic oligonucleotide
  Antisense strand to SEQ ID NO: 502113
acacaucguggaauggucg

SEQ ID NO: 502115 - RNA, 19 nt, Artificial Sequence
  Description of Artificial Sequence: Synthetic oligonucleotide
  Sense strand starting at position 754 of SEQ ID NO: 317661
agggcacagucaucuggaa

SEQ ID NO: 502116 - RNA, 19 nt, Artificial Sequence
  Description of Artificial Sequence: Synthetic oligonucleotide
  Antisense strand to SEQ ID NO: 502115
uuccagaugacugugcccu

SEQ ID NO: 502117 - RNA, 19 nt, Artificial Sequence
  Description of Artificial Sequence: Synthetic oligonucleotide
  Sense strand starting at position 839 of SEQ ID NO: 317661
agggaauccucacaagacu

SEQ ID NO: 502118 - RNA, 19 nt, Artificial Sequence
  Description of Artificial Sequence: Synthetic oligonucleotide
  Antisense strand to SEQ ID NO: 502117
agucuugugaggauucccu

SEQ ID NO: 502119 - RNA, 19 nt, Artificial Sequence
  Description of Artificial Sequence: Synthetic oligonucleotide
  Sense strand starting at position 958 of SEQ ID NO: 317661
gggauuccauauuaaagag

SEQ ID NO: 502120 - RNA, 19 nt, Artificial Sequence
  Description of Artificial Sequence: Synthetic oligonucleotide
  Antisense strand to SEQ ID NO: 502119
cucuuuaauauggaauccc

SEQ ID NO: 502121 - RNA, 19 nt, Artificial Sequence
  Description of Artificial Sequence: Synthetic oligonucleotide
  Sense strand starting at position 1020 of SEQ ID NO: 317661
aaucaagucggguagggau

SEQ ID NO: 502122 - RNA, 19 nt, Artificial Sequence
  Description of Artificial Sequence: Synthetic oligonucleotide
  Antisense strand to SEQ ID NO: 502121
aucccuacccgacuugauu

SEQ ID NO: 502123 - RNA, 19 nt, Artificial Sequence
  Description of Artificial Sequence: Synthetic oligonucleotide
  Sense strand starting at position 1514 of SEQ ID NO: 317661
caaggagcuccaugucaca

SEQ ID NO: 502124 - RNA, 19 nt, Artificial Sequence
  Description of Artificial Sequence: Synthetic oligonucleotide
  Antisense strand to SEQ ID NO: 502123
ugugacauggagcuccuug

SEQ ID NO: 502125 - RNA, 19 nt, Artificial Sequence
  Description of Artificial Sequence: Synthetic oligonucleotide
  Sense strand starting at position 1569 of SEQ ID NO: 317661
acugaagacuaucauauga

SEQ ID NO: 502126 - RNA, 19 nt, Artificial Sequence
  Description of Artificial Sequence: Synthetic oligonucleotide
  Antisense strand to SEQ ID NO: 502125
ucauaugauagucuucagu

SEQ ID NO: 502127 - RNA, 19 nt, Artificial Sequence
  Description of Artificial Sequence: Synthetic oligonucleotide
  Sense strand starting at position 1571 of SEQ ID NO: 317661
ugaagacuaucauaugaaa

SEQ ID NO: 502128 - RNA, 19 nt, Artificial Sequence
  Description of Artificial Sequence: Synthetic oligonucleotide
  Antisense strand to SEQ ID NO: 502127
uuucauaugauagucuuca

SEQ ID NO: 502129 - RNA, 19 nt, Artificial Sequence
  Description of Artificial Sequence: Synthetic oligonucleotide
  Sense strand starting at position 1646 of SEQ ID NO: 317661
ccagauaagaugugaaagu

SEQ ID NO: 502130 - RNA, 19 nt, Artificial Sequence
  Description of Artificial Sequence: Synthetic oligonucleotide
  Antisense strand to SEQ ID NO: 502129
acuuucacaucuuaucugg

SEQ ID NO: 502131 - RNA, 19 nt, Artificial Sequence
  Description of Artificial Sequence: Synthetic oligonucleotide
  Sense strand starting at position 1723 of SEQ ID NO: 317661
cagguuacaccguacauua

SEQ ID NO: 502132 - RNA, 19 nt, Artificial Sequence
  Description of Artificial Sequence: Synthetic oligonucleotide
  Antisense strand to SEQ ID NO: 502131
uaauguacgguguaaccug

SEQ ID NO: 502133 - RNA, 19 nt, Artificial Sequence
  Description of Artificial Sequence: Synthetic oligonucleotide
  Sense strand starting at position 1725 of SEQ ID NO: 317661
gguuacaccguacauuaaa

SEQ ID NO: 502134 - RNA, 19 nt, Artificial Sequence
  Description of Artificial Sequence: Synthetic oligonucleotide
  Antisense strand to SEQ ID NO: 502133
uuuaauguacgguguaacc

SEQ ID NO: 502135 - RNA, 19 nt, Artificial Sequence
  Description of Artificial Sequence: Synthetic oligonucleotide
  Sense strand starting at position 1828 of SEQ ID NO: 317661
acgcucaucuaaguggaau

SEQ ID NO: 502136 - RNA, 19 nt, Artificial Sequence
  Description of Artificial Sequence: Synthetic oligonucleotide
  Antisense strand to SEQ ID NO: 502135
auuccacuuagaugagcgu

SEQ ID NO: 502137 - RNA, 19 nt, Artificial Sequence
  Description of Artificial Sequence: Synthetic oligonucleotide
  Sense strand starting at position 1829 of SEQ ID NO: 317661
cgcucaucuaaguggaauu

SEQ ID NO: 502138 - RNA, 19 nt, Artificial Sequence
  Description of Artificial Sequence: Synthetic oligonucleotide
  Antisense strand to SEQ ID NO: 502137
aauuccacuuagaugagcg

SEQ ID NO: 502139 - RNA, 19 nt, Artificial Sequence
  Description of Artificial Sequence: Synthetic oligonucleotide
  Sense strand starting at position 1940 of SEQ ID NO: 317661
gucugccgauacuuacaua

SEQ ID NO: 502140 - RNA, 19 nt, Artificial Sequence
  Description of Artificial Sequence: Synthetic oligonucleotide
  Antisense strand to SEQ ID NO: 502139
uauguaaguaucggcagac

SEQ ID NO: 502141 - RNA, 19 nt, Artificial Sequence
  Description of Artificial Sequence: Synthetic oligonucleotide
  Sense strand starting at position 2054 of SEQ ID NO: 317661
cugaguuugugaucuauac

SEQ ID NO: 502142 - RNA, 19 nt, Artificial Sequence
  Description of Artificial Sequence: Synthetic oligonucleotide
  Antisense strand to SEQ ID NO: 502141
guauagaucacaaacucag

SEQ ID NO: 502143 - RNA, 19 nt, Artificial Sequence
  Description of Artificial Sequence: Synthetic oligonucleotide
  Sense strand starting at position 2063 of SEQ ID NO: 317661
ugaucuauaccuggaggca

SEQ ID NO: 502144 - RNA, 19 nt, Artificial Sequence
  Description of Artificial Sequence: Synthetic oligonucleotide
  Antisense strand to SEQ ID NO: 502143
ugccuccagguauagauca

SEQ ID NO: 502145 - RNA, 19 nt, Artificial Sequence
  Description of Artificial Sequence: Synthetic oligonucleotide
  Sense strand starting at position 2290 of SEQ ID NO: 317661
agaaaugguucuguaucau

SEQ ID NO: 502146 - RNA, 19 nt, Artificial Sequence
  Description of Artificial Sequence: Synthetic oligonucleotide
  Antisense strand to SEQ ID NO: 502145
augauacagaaccauuucu

SEQ ID NO: 502147 - RNA, 19 nt, Artificial Sequence
  Description of Artificial Sequence: Synthetic oligonucleotide
  Sense strand starting at position 2348 of SEQ ID NO: 317661
aguugagaaguucgcacuu

SEQ ID NO: 502148 - RNA, 19 nt, Artificial Sequence
  Description of Artificial Sequence: Synthetic oligonucleotide
  Antisense strand to SEQ ID NO: 502147
aagugcgaacuucucaacu

SEQ ID NO: 502149 - RNA, 19 nt, Artificial Sequence
  Description of Artificial Sequence: Synthetic oligonucleotide
  Sense strand starting at position 2511 of SEQ ID NO: 317661
uccguucucccucaguaau

SEQ ID NO: 502150 - RNA, 19 nt, Artificial Sequence
  Description of Artificial Sequence: Synthetic oligonucleotide
  Antisense strand to SEQ ID NO: 502149
auuacugagggagaacgga

SEQ ID NO: 502151 - RNA, 19 nt, Artificial Sequence
  Description of Artificial Sequence: Synthetic oligonucleotide
  Sense strand starting at position 2513 of SEQ ID NO: 317661
cguucucccucaguaauca

SEQ ID NO: 502152 - RNA, 19 nt, Artificial Sequence
  Description of Artificial Sequence: Synthetic oligonucleotide
  Antisense strand to SEQ ID NO: 502151
ugauuacugagggagaacg

SEQ ID NO: 502153 - RNA, 19 nt, Artificial Sequence
  Description of Artificial Sequence: Synthetic oligonucleotide
  Sense strand starting at position 2514 of SEQ ID NO: 317661
guucucccucaguaaucau

SEQ ID NO: 502154 - RNA, 19 nt, Artificial Sequence
  Description of Artificial Sequence: Synthetic oligonucleotide
  Antisense strand to SEQ ID NO: 502153
augauuacugagggagaac

SEQ ID NO: 502155 - RNA, 19 nt, Artificial Sequence
  Description of Artificial Sequence: Synthetic oligonucleotide
  Sense strand starting at position 2590 of SEQ ID NO: 317661
cggucugggcuuuauauga

SEQ ID NO: 502156 - RNA, 19 nt, Artificial Sequence
  Description of Artificial Sequence: Synthetic oligonucleotide
  Antisense strand to SEQ ID NO: 502155
ucauauaaagcccagaccg

SEQ ID NO: 502157 - RNA, 19 nt, Artificial Sequence
  Description of Artificial Sequence: Synthetic oligonucleotide
  Sense strand starting at position 2625 of SEQ ID NO: 317661
auaggaaagcuguacuauc

SEQ ID NO: 502158 - RNA, 19 nt, Artificial Sequence
  Description of Artificial Sequence: Synthetic oligonucleotide
  Antisense strand to SEQ ID NO: 502157
gauaguacagcuuuccuau

SEQ ID NO: 502159 - RNA, 19 nt, Artificial Sequence
  Description of Artificial Sequence: Synthetic oligonucleotide
  Sense strand starting at position 2633 of SEQ ID NO: 317661
gcuguacuauccucagacu

SEQ ID NO: 502160 - RNA, 19 nt, Artificial Sequence
  Description of Artificial Sequence: Synthetic oligonucleotide
  Antisense strand to SEQ ID NO: 502159
agucugaggauaguacagc

SEQ ID NO: 502161 - RNA, 19 nt, Artificial Sequence
  Description of Artificial Sequence: Synthetic oligonucleotide
  Sense strand starting at position 2642 of SEQ ID NO: 317661
uccucagacucaucguuga

SEQ ID NO: 502162 - RNA, 19 nt, Artificial Sequence
  Description of Artificial Sequence: Synthetic oligonucleotide
  Antisense strand to SEQ ID NO: 502161
ucaacgaugagucugagga

SEQ ID NO: 502163 - RNA, 19 nt, Artificial Sequence
  Description of Artificial Sequence: Synthetic oligonucleotide
  Sense strand starting at position 2645 of SEQ ID NO: 317661
ucagacucaucguugaauc

SEQ ID NO: 502164 - RNA, 19 nt, Artificial Sequence
  Description of Artificial Sequence: Synthetic oligonucleotide
  Antisense strand to SEQ ID NO: 502163
gauucaacgaugagucuga

SEQ ID NO: 502165 - RNA, 19 nt, Artificial Sequence
  Description of Artificial Sequence: Synthetic oligonucleotide
  Sense strand starting at position 2646 of SEQ ID NO: 317661
cagacucaucguugaaucu

SEQ ID NO: 502166 - RNA, 19 nt, Artificial Sequence
  Description of Artificial Sequence: Synthetic oligonucleotide
  Antisense strand to SEQ ID NO: 502165
agauucaacgaugagucug

SEQ ID NO: 502167 - RNA, 19 nt, Artificial Sequence
  Description of Artificial Sequence: Synthetic oligonucleotide
  Sense strand starting at position 2689 of SEQ ID NO: 317661
uuuaucaacucugagaaug

SEQ ID NO: 502168 - RNA, 19 nt, Artificial Sequence
  Description of Artificial Sequence: Synthetic oligonucleotide
  Antisense strand to SEQ ID NO: 502167
cauucucagaguugauaaa

SEQ ID NO: 502169 - RNA, 19 nt, Artificial Sequence
  Description of Artificial Sequence: Synthetic oligonucleotide
  Sense strand starting at position 2823 of SEQ ID NO: 317661
accaguggcucuccucaua

SEQ ID NO: 502170 - RNA, 19 nt, Artificial Sequence
  Description of Artificial Sequence: Synthetic oligonucleotide
  Antisense strand to SEQ ID NO: 502169
uaugaggagagccacuggu

SEQ ID NO: 502171 - RNA, 19 nt, Artificial Sequence
  Description of Artificial Sequence: Synthetic oligonucleotide
  Sense strand starting at position 2848 of SEQ ID NO: 317661
cuguguuagacacacaguu

SEQ ID NO: 502172 - RNA, 19 nt, Artificial Sequence
  Description of Artificial Sequence: Synthetic oligonucleotide
  Antisense strand to SEQ ID NO: 502171
aacugugugucuaacacag

SEQ ID NO: 502173 - RNA, 19 nt, Artificial Sequence
  Description of Artificial Sequence: Synthetic oligonucleotide
  Sense strand starting at position 3913 of SEQ ID NO: 317661
cagggaagcugugcucuua

SEQ ID NO: 502174 - RNA, 19 nt, Artificial Sequence
  Description of Artificial Sequence: Synthetic oligonucleotide
  Antisense strand to SEQ ID NO: 502173
uaagagcacagcuucccug

SEQ ID NO: 502175 - RNA, 19 nt, Artificial Sequence
  Description of Artificial Sequence: Synthetic oligonucleotide
  Sense strand starting at position 69 of SEQ ID NO: 317662
cgcccuucccuagagauaa

SEQ ID NO: 502176 - RNA, 19 nt, Artificial Sequence
  Description of Artificial Sequence: Synthetic oligonucleotide
  Antisense strand to SEQ ID NO: 502175
uuaucucuagggaagggcg

SEQ ID NO: 502177 - RNA, 19 nt, Artificial Sequence
  Description of Artificial Sequence: Synthetic oligonucleotide
  Sense strand starting at position 121 of SEQ ID NO: 317662
ccuauuuauguuugcaugu

SEQ ID NO: 502178 - RNA, 19 nt, Artificial Sequence
  Description of Artificial Sequence: Synthetic oligonucleotide
  Antisense strand to SEQ ID NO: 502177
acaugcaaacauaaauagg

SEQ ID NO: 502179 - RNA, 19 nt, Artificial Sequence
  Description of Artificial Sequence: Synthetic oligonucleotide
  Sense strand starting at position 122 of SEQ ID NO: 317662
cuauuuauguuugcaugua

SEQ ID NO: 502180 - RNA, 19 nt, Artificial Sequence
  Description of Artificial Sequence: Synthetic oligonucleotide
  Antisense strand to SEQ ID NO: 502179
uacaugcaaacauaaauag

SEQ ID NO: 502181 - RNA, 19 nt, Artificial Sequence
  Description of Artificial Sequence: Synthetic oligonucleotide
  Sense strand starting at position 153 of SEQ ID NO: 317662
uguacauacucuuuguuau

SEQ ID NO: 502182 - RNA, 19 nt, Artificial Sequence
  Description of Artificial Sequence: Synthetic oligonucleotide
  Antisense strand to SEQ ID NO: 502181
auaacaaagaguauguaca

SEQ ID NO: 502183 - RNA, 19 nt, Artificial Sequence
  Description of Artificial Sequence: Synthetic oligonucleotide
  Sense strand starting at position 154 of SEQ ID NO: 317662
guacauacucuuuguuaua

SEQ ID NO: 502184 - RNA, 19 nt, Artificial Sequence
  Description of Artificial Sequence: Synthetic oligonucleotide
  Antisense strand to SEQ ID NO: 502183
uauaacaaagaguauguac

SEQ ID NO: 502185 - RNA, 19 nt, Artificial Sequence
  Description of Artificial Sequence: Synthetic oligonucleotide
  Sense strand starting at position 353 of SEQ ID NO: 317662
uucccauacccaggagaau

SEQ ID NO: 502186 - RNA, 19 nt, Artificial Sequence
  Description of Artificial Sequence: Synthetic oligonucleotide
  Antisense strand to SEQ ID NO: 502185
auucuccuggguaugggaa

SEQ ID NO: 502187 - RNA, 19 nt, Artificial Sequence
  Description of Artificial Sequence: Synthetic oligonucleotide
  Sense strand starting at position 477 of SEQ ID NO: 317662
gggcacuauguuugaucca

SEQ ID NO: 502188 - RNA, 19 nt, Artificial Sequence
  Description of Artificial Sequence: Synthetic oligonucleotide
  Antisense strand to SEQ ID NO: 502187
uggaucaaacauagugccc

SEQ ID NO: 502189 - RNA, 19 nt, Artificial Sequence
  Description of Artificial Sequence: Synthetic oligonucleotide
  Sense strand starting at position 586 of SEQ ID NO: 317662
augucuugugcgcugccaa

SEQ ID NO: 502190 - RNA, 19 nt, Artificial Sequence
  Description of Artificial Sequence: Synthetic oligonucleotide
  Antisense strand to SEQ ID NO: 502189
uuggcagcgcacaagacau

SEQ ID NO: 502191 - RNA, 19 nt, Artificial Sequence
  Description of Artificial Sequence: Synthetic oligonucleotide
  Sense strand starting at position 609 of SEQ ID NO: 317662
uuuaccuuugggugaauga

SEQ ID NO: 502192 - RNA, 19 nt, Artificial Sequence
  Description of Artificial Sequence: Synthetic oligonucleotide
  Antisense strand to SEQ ID NO: 502191
ucauucacccaaagguaaa

SEQ ID NO: 502193 - RNA, 19 nt, Artificial Sequence
  Description of Artificial Sequence: Synthetic oligonucleotide
  Sense strand starting at position 618 of SEQ ID NO: 317662
gggugaaugauguaacuuu

SEQ ID NO: 502194 - RNA, 19 nt, Artificial Sequence
  Description of Artificial Sequence: Synthetic oligonucleotide
  Antisense strand to SEQ ID NO: 502193
aaaguuacaucauucaccc

SEQ ID NO: 502195 - RNA, 19 nt, Artificial Sequence
  Description of Artificial Sequence: Synthetic oligonucleotide
  Sense strand starting at position 703 of SEQ ID NO: 317662
ccacgaauggccuacaauu

SEQ ID NO: 502196 - RNA, 19 nt, Artificial Sequence
  Description of Artificial Sequence: Synthetic oligonucleotide
  Antisense strand to SEQ ID NO: 502195
aauuguaggccauucgugg

SEQ ID NO: 502197 - RNA, 19 nt, Artificial Sequence
  Description of Artificial Sequence: Synthetic oligonucleotide
  Sense strand starting at position 711 of SEQ ID NO: 317662
ggccuacaauuugauaaac

SEQ ID NO: 502198 - RNA, 19 nt, Artificial Sequence
  Description of Artificial Sequence: Synthetic oligonucleotide
  Antisense strand to SEQ ID NO: 502197
guuuaucaaauuguaggcc

SEQ ID NO: 502199 - RNA, 19 nt, Artificial Sequence
  Description of Artificial Sequence: Synthetic oligonucleotide
  Sense strand starting at position 737 of SEQ ID NO: 317662
ggacuaaacggcuagcaaa

SEQ ID NO: 502200 - RNA, 19 nt, Artificial Sequence
  Description of Artificial Sequence: Synthetic oligonucleotide
  Antisense strand to SEQ ID NO: 502199
uuugcuagccguuuagucc

SEQ ID NO: 502201 - RNA, 19 nt, Artificial Sequence
  Description of Artificial Sequence: Synthetic oligonucleotide
  Sense strand starting at position 856 of SEQ ID NO: 317662
cgaaaugcucuauaugccu

SEQ ID NO: 502202 - RNA, 19 nt, Artificial Sequence
  Description of Artificial Sequence: Synthetic oligonucleotide
  Antisense strand to SEQ ID NO: 502201
aggcauauagagcauuucg

SEQ ID NO: 502203 - RNA, 19 nt, Artificial Sequence
  Description of Artificial Sequence: Synthetic oligonucleotide
  Sense strand starting at position 924 of SEQ ID NO: 317662
cagcaauuucgucacguca

SEQ ID NO: 502204 - RNA, 19 nt, Artificial Sequence
  Description of Artificial Sequence: Synthetic oligonucleotide
  Antisense strand to SEQ ID NO: 502203
ugacgugacgaaauugcug

SEQ ID NO: 502205 - RNA, 19 nt, Artificial Sequence
  Description of Artificial Sequence: Synthetic oligonucleotide
  Sense strand starting at position 949 of SEQ ID NO: 317662
ucugaacucguuuaccgaa

SEQ ID NO: 502206 - RNA, 19 nt, Artificial Sequence
  Description of Artificial Sequence: Synthetic oligonucleotide
  Antisense strand to SEQ ID NO: 502205
uucgguaaacgaguucaga

SEQ ID NO: 502207 - RNA, 19 nt, Artificial Sequence
  Description of Artificial Sequence: Synthetic oligonucleotide
  Sense strand starting at position 951 of SEQ ID NO: 317662
ugaacucguuuaccgaaau

SEQ ID NO: 502208 - RNA, 19 nt, Artificial Sequence
  Description of Artificial Sequence: Synthetic oligonucleotide
  Antisense strand to SEQ ID NO: 502207
auuucgguaaacgaguuca

SEQ ID NO: 502209 - RNA, 19 nt, Artificial Sequence
  Description of Artificial Sequence: Synthetic oligonucleotide
  Sense strand starting at position 973 of SEQ ID NO: 317662
aucugaggcguuuaucaga

SEQ ID NO: 502210 - RNA, 19 nt, Artificial Sequence
  Description of Artificial Sequence: Synthetic oligonucleotide
  Antisense strand to SEQ ID NO: 502209
ucugauaaacgccucagau

SEQ ID NO: 502211 - RNA, 19 nt, Artificial Sequence
  Description of Artificial Sequence: Synthetic oligonucleotide
  Sense strand starting at position 1034 of SEQ ID NO: 317662
ugaggcauccaccauuaau

SEQ ID NO: 502212 - RNA, 19 nt, Artificial Sequence
  Description of Artificial Sequence: Synthetic oligonucleotide
  Antisense strand to SEQ ID NO: 502211
auuaaugguggaugccuca

SEQ ID NO: 502213 - RNA, 19 nt, Artificial Sequence
  Description of Artificial Sequence: Synthetic oligonucleotide
  Sense strand starting at position 1068 of SEQ ID NO: 317662
cagauauggccuuacguua

SEQ ID NO: 502214 - RNA, 19 nt, Artificial Sequence
  Description of Artificial Sequence: Synthetic oligonucleotide
  Antisense strand to SEQ ID NO: 502213
uaacguaaggccauaucug

SEQ ID NO: 502215 - RNA, 19 nt, Artificial Sequence
  Description of Artificial Sequence: Synthetic oligonucleotide
  Sense strand starting at position 1643 of SEQ ID NO: 317662
ccuggcuuucgaugacaca

SEQ ID NO: 502216 - RNA, 19 nt, Artificial Sequence
  Description of Artificial Sequence: Synthetic oligonucleotide
  Antisense strand to SEQ ID NO: 502215
ugugucaucgaaagccagg

SEQ ID NO: 502217 - RNA, 19 nt, Artificial Sequence
  Description of Artificial Sequence: Synthetic oligonucleotide
  Sense strand starting at position 1644 of SEQ ID NO: 317662
cuggcuuucgaugacacau

SEQ ID NO: 502218 - RNA, 19 nt, Artificial Sequence
  Description of Artificial Sequence: Synthetic oligonucleotide
  Antisense strand to SEQ ID NO: 502217
augugucaucgaaagccag

SEQ ID NO: 502219 - RNA, 19 nt, Artificial Sequence
  Description of Artificial Sequence: Synthetic oligonucleotide
  Sense strand starting at position 1655 of SEQ ID NO: 317662
ugacacauuuccgucgcaa

SEQ ID NO: 502220 - RNA, 19 nt, Artificial Sequence
  Description of Artificial Sequence: Synthetic oligonucleotide
  Antisense strand to SEQ ID NO: 502219
uugcgacggaaauguguca

SEQ ID NO: 502221 - RNA, 19 nt, Artificial Sequence
  Description of Artificial Sequence: Synthetic oligonucleotide
  Sense strand starting at position 1657 of SEQ ID NO: 317662
acacauuuccgucgcaaag

SEQ ID NO: 502222 - RNA, 19 nt, Artificial Sequence
  Description of Artificial Sequence: Synthetic oligonucleotide
  Antisense strand to SEQ ID NO: 502221
cuuugcgacggaaaugugu

SEQ ID NO: 502223 - RNA, 19 nt, Artificial Sequence
  Description of Artificial Sequence: Synthetic oligonucleotide
  Sense strand starting at position 1947 of SEQ ID NO: 317662
uuauguauaugucuuagag

SEQ ID NO: 502224 - RNA, 19 nt, Artificial Sequence
  Description of Artificial Sequence: Synthetic oligonucleotide
  Antisense strand to SEQ ID NO: 502223
cucuaagacauauacauaa

SEQ ID NO: 502225 - RNA, 19 nt, Artificial Sequence
  Description of Artificial Sequence: Synthetic oligonucleotide
  Sense strand starting at position 1953 of SEQ ID NO: 317662
auaugucuuagagacguga

SEQ ID NO: 502226 - RNA, 19 nt, Artificial Sequence
  Description of Artificial Sequence: Synthetic oligonucleotide
  Antisense strand to SEQ ID NO: 502225
ucacgucucuaagacauau

SEQ ID NO: 502227 - RNA, 19 nt, Artificial Sequence
  Description of Artificial Sequence: Synthetic oligonucleotide
  Sense strand starting at position 3242 of SEQ ID NO: 317662
aguagauuauuugauacag

SEQ ID NO: 502228 - RNA, 19 nt, Artificial Sequence
  Description of Artificial Sequence: Synthetic oligonucleotide
  Antisense strand to SEQ ID NO: 502227
cuguaucaaauaaucuacu

SEQ ID NO: 502229 - RNA, 19 nt, Artificial Sequence
  Description of Artificial Sequence: Synthetic oligonucleotide
  Sense strand starting at position 3325 of SEQ ID NO: 317662
ucacuaguucuugagccuu

SEQ ID NO: 502230 - RNA, 19 nt, Artificial Sequence
  Description of Artificial Sequence: Synthetic oligonucleotide
  Antisense strand to SEQ ID NO: 502229
aaggcucaagaacuaguga

SEQ ID NO: 502231 - RNA, 19 nt, Artificial Sequence
  Description of Artificial Sequence: Synthetic oligonucleotide
  Sense strand starting at position 3327 of SEQ ID NO: 317662
acuaguucuugagccuuua

SEQ ID NO: 502232 - RNA, 19 nt, Artificial Sequence
  Description of Artificial Sequence: Synthetic oligonucleotide
  Antisense strand to SEQ ID NO: 502231
uaaaggcucaagaacuagu

SEQ ID NO: 502233 - RNA, 19 nt, Artificial Sequence
  Description of Artificial Sequence: Synthetic oligonucleotide
  Sense strand starting at position 3555 of SEQ ID NO: 317662
cuggaauggccauguaaua

SEQ ID NO: 502234 - RNA, 19 nt, Artificial Sequence
  Description of Artificial Sequence: Synthetic oligonucleotide
  Antisense strand to SEQ ID NO: 502233
uauuacauggccauuccag

SEQ ID NO: 502235 - RNA, 19 nt, Artificial Sequence
  Description of Artificial Sequence: Synthetic oligonucleotide
  Sense strand starting at position 3638 of SEQ ID NO: 317662
aauagagccgaguaucuau

SEQ ID NO: 502236 - RNA, 19 nt, Artificial Sequence
  Description of Artificial Sequence: Synthetic oligonucleotide
  Antisense strand to SEQ ID NO: 502235
auagauacucggcucuauu

SEQ ID NO: 502237 - RNA, 19 nt, Artificial Sequence
  Description of Artificial Sequence: Synthetic oligonucleotide
  Sense strand starting at position 3680 of SEQ ID NO: 317662
cugguaauaaguugugaaa

SEQ ID NO: 502238 - RNA, 19 nt, Artificial Sequence
  Description of Artificial Sequence: Synthetic oligonucleotide
  Antisense strand to SEQ ID NO: 502237
uuucacaacuuauuaccag

SEQ ID NO: 502239 - RNA, 19 nt, Artificial Sequence
  Description of Artificial Sequence: Synthetic oligonucleotide
  Sense strand starting at position 3694 of SEQ ID NO: 317662
ugaaacaaguguucucuaa

SEQ ID NO: 502240 - RNA, 19 nt, Artificial Sequence
  Description of Artificial Sequence: Synthetic oligonucleotide
  Antisense strand to SEQ ID NO: 502239
uuagagaacacuuguuuca

SEQ ID NO: 502241 - RNA, 19 nt, Artificial Sequence
  Description of Artificial Sequence: Synthetic oligonucleotide
  Sense strand starting at position 3795 of SEQ ID NO: 317662
gagaaauaugagugguagu

SEQ ID NO: 502242 - RNA, 19 nt, Artificial Sequence
  Description of Artificial Sequence: Synthetic oligonucleotide
  Antisense strand to SEQ ID NO: 502241
acuaccacucauauuucuc

SEQ ID NO: 502243 - RNA, 19 nt, Artificial Sequence
  Description of Artificial Sequence: Synthetic oligonucleotide
  Sense strand starting at position 3796 of SEQ ID NO: 317662
agaaauaugagugguaguu

SEQ ID NO: 502244 - RNA, 19 nt, Artificial Sequence
  Description of Artificial Sequence: Synthetic oligonucleotide
  Antisense strand to SEQ ID NO: 502243
aacuaccacucauauuucu

SEQ ID NO: 502245 - RNA, 19 nt, Artificial Sequence
  Description of Artificial Sequence: Synthetic oligonucleotide
  Sense strand starting at position 3815 of SEQ ID NO: 317662
gguguuauagcuuaaccaa

SEQ ID NO: 502246 - RNA, 19 nt, Artificial Sequence
  Description of Artificial Sequence: Synthetic oligonucleotide
  Antisense strand to SEQ ID NO: 502245
uugguuaagcuauaacacc

SEQ ID NO: 502247 - RNA, 19 nt, Artificial Sequence
  Description of Artificial Sequence: Synthetic oligonucleotide
  Sense strand starting at position 3869 of SEQ ID NO: 317662
gugaguucucagcaagaua

SEQ ID NO: 502248 - RNA, 19 nt, Artificial Sequence
  Description of Artificial Sequence: Synthetic oligonucleotide
  Antisense strand to SEQ ID NO: 502247
uaucuugcugagaacucac

SEQ ID NO: 502249 - RNA, 19 nt, Artificial Sequence
  Description of Artificial Sequence: Synthetic oligonucleotide
  Sense strand starting at position 3931 of SEQ ID NO: 317662
gguagcuauuucccuaagu

SEQ ID NO: 502250 - RNA, 19 nt, Artificial Sequence
  Description of Artificial Sequence: Synthetic oligonucleotide
  Antisense strand to SEQ ID NO: 502249
acuuagggaaauagcuacc

SEQ ID NO: 502251 - RNA, 19 nt, Artificial Sequence
  Description of Artificial Sequence: Synthetic oligonucleotide
  Sense strand starting at position 3932 of SEQ ID NO: 317662
guagcuauuucccuaagug

SEQ ID NO: 502252 - RNA, 19 nt, Artificial Sequence
  Description of Artificial Sequence: Synthetic oligonucleotide
  Antisense strand to SEQ ID NO: 502251
cacuuagggaaauagcuac

SEQ ID NO: 502253 - RNA, 19 nt, Artificial Sequence
  Description of Artificial Sequence: Synthetic oligonucleotide
  Sense strand starting at position 3966 of SEQ ID NO: 317662
cuuugauguuaaguaaguu

SEQ ID NO: 502254 - RNA, 19 nt, Artificial Sequence
  Description of Artificial Sequence: Synthetic oligonucleotide
  Antisense strand to SEQ ID NO: 502253
aacuuacuuaacaucaaag

SEQ ID NO: 502255 - RNA, 19 nt, Artificial Sequence
  Description of Artificial Sequence: Synthetic oligonucleotide
  Sense strand starting at position 258 of SEQ ID NO: 317663
uggccuauuugcuuuaacu

SEQ ID NO: 502256 - RNA, 19 nt, Artificial Sequence
  Description of Artificial Sequence: Synthetic oligonucleotide
  Antisense strand to SEQ ID NO: 502255
aguuaaagcaaauaggcca

SEQ ID NO: 502257 - RNA, 19 nt, Artificial Sequence
  Description of Artificial Sequence: Synthetic oligonucleotide
  Sense strand starting at position 319 of SEQ ID NO: 317663
gcgcguguaaucccagcaa

SEQ ID NO: 502258 - RNA, 19 nt, Artificial Sequence
  Description of Artificial Sequence: Synthetic oligonucleotide
  Antisense strand to SEQ ID NO: 502257
uugcugggauuacacgcgc

SEQ ID NO: 502259 - RNA, 19 nt, Artificial Sequence
  Description of Artificial Sequence: Synthetic oligonucleotide
  Sense strand starting at position 498 of SEQ ID NO: 317663
ugcgcccuucccuagagau

SEQ ID NO: 502260 - RNA, 19 nt, Artificial Sequence
  Description of Artificial Sequence: Synthetic oligonucleotide
  Antisense strand to SEQ ID NO: 502259
aucucuagggaagggcgca

SEQ ID NO: 502261 - RNA, 19 nt, Artificial Sequence
  Description of Artificial Sequence: Synthetic oligonucleotide
  Sense strand starting at position 500 of SEQ ID NO: 317663
cgcccuucccuagagauaa

SEQ ID NO: 502262 - RNA, 19 nt, Artificial Sequence
  Description of Artificial Sequence: Synthetic oligonucleotide
  Antisense strand to SEQ ID NO: 502261
uuaucucuagggaagggcg

SEQ ID NO: 502263 - RNA, 19 nt, Artificial Sequence
  Description of Artificial Sequence: Synthetic oligonucleotide
  Sense strand starting at position 552 of SEQ ID NO: 317663
ccuauuuauguuugcaugu

SEQ ID NO: 502264 - RNA, 19 nt, Artificial Sequence
  Description of Artificial Sequence: Synthetic oligonucleotide
  Antisense strand to SEQ ID NO: 502263
acaugcaaacauaaauagg

SEQ ID NO: 502265 - RNA, 19 nt, Artificial Sequence
  Description of Artificial Sequence: Synthetic oligonucleotide
  Sense strand starting at position 553 of SEQ ID NO: 317663
cuauuuauguuugcaugua

SEQ ID NO: 502266 - RNA, 19 nt, Artificial Sequence
  Description of Artificial Sequence: Synthetic oligonucleotide
  Antisense strand to SEQ ID NO: 502265
uacaugcaaacauaaauag

SEQ ID NO: 502267 - RNA, 19 nt, Artificial Sequence
  Description of Artificial Sequence: Synthetic oligonucleotide
  Sense strand starting at position 584 of SEQ ID NO: 317663
uguacauacucuuuguuau

SEQ ID NO: 502268 - RNA, 19 nt, Artificial Sequence
  Description of Artificial Sequence: Synthetic oligonucleotide
  Antisense strand to SEQ ID NO: 502267
auaacaaagaguauguaca

SEQ ID NO: 502269 - RNA, 19 nt, Artificial Sequence
  Description of Artificial Sequence: Synthetic oligonucleotide
  Sense strand starting at position 585 of SEQ ID NO: 317663
guacauacucuuuguuaua

SEQ ID NO: 502270 - RNA, 19 nt, Artificial Sequence
  Description of Artificial Sequence: Synthetic oligonucleotide
  Antisense strand to SEQ ID NO: 502269
uauaacaaagaguauguac

SEQ ID NO: 502271 - RNA, 19 nt, Artificial Sequence
  Description of Artificial Sequence: Synthetic oligonucleotide
  Sense strand starting at position 784 of SEQ ID NO: 317663
uucccauacccaggagaau

SEQ ID NO: 502272 - RNA, 19 nt, Artificial Sequence
  Description of Artificial Sequence: Synthetic oligonucleotide
  Antisense strand to SEQ ID NO: 502271
auucuccuggguaugggaa

SEQ ID NO: 502273 - RNA, 19 nt, Artificial Sequence
  Description of Artificial Sequence: Synthetic oligonucleotide
  Sense strand starting at position 908 of SEQ ID NO: 317663
gggcacuauguuugaucca

SEQ ID NO: 502274 - RNA, 19 nt, Artificial Sequence
  Description of Artificial Sequence: Synthetic oligonucleotide
  Antisense strand to SEQ ID NO: 502273
uggaucaaacauagugccc

SEQ ID NO: 502275 - RNA, 19 nt, Artificial Sequence
  Description of Artificial Sequence: Synthetic oligonucleotide
  Sense strand starting at position 1017 of SEQ ID NO: 317663
augucuugugcgcugccaa

SEQ ID NO: 502276 - RNA, 19 nt, Artificial Sequence
  Description of Artificial Sequence: Synthetic oligonucleotide
  Antisense strand to SEQ ID NO: 502275
uuggcagcgcacaagacau

SEQ ID NO: 502277 - RNA, 19 nt, Artificial Sequence
  Description of Artificial Sequence: Synthetic oligonucleotide
  Sense strand starting at position 1040 of SEQ ID NO: 317663
uuuaccuuugggugaauga

SEQ ID NO: 502278 - RNA, 19 nt, Artificial Sequence
  Description of Artificial Sequence: Synthetic oligonucleotide
  Antisense strand to SEQ ID NO: 502277
ucauucacccaaagguaaa

SEQ ID NO: 502279 - RNA, 19 nt, Artificial Sequence
  Description of Artificial Sequence: Synthetic oligonucleotide
  Sense strand starting at position 1049 of SEQ ID NO: 317663
gggugaaugauguaacuuu

SEQ ID NO: 502280 - RNA, 19 nt, Artificial Sequence
  Description of Artificial Sequence: Synthetic oligonucleotide
  Antisense strand to SEQ ID NO: 502279
aaaguuacaucauucaccc

SEQ ID NO: 502281 - RNA, 19 nt, Artificial Sequence
  Description of Artificial Sequence: Synthetic oligonucleotide
  Sense strand starting at position 1134 of SEQ ID NO: 317663
ccacgaauggccuacaauu

SEQ ID NO: 502282 - RNA, 19 nt, Artificial Sequence
  Description of Artificial Sequence: Synthetic oligonucleotide
  Antisense strand to SEQ ID NO: 502281
aauuguaggccauucgugg

SEQ ID NO: 502283 - RNA, 19 nt, Artificial Sequence
  Description of Artificial Sequence: Synthetic oligonucleotide
  Sense strand starting at position 1142 of SEQ ID NO: 317663
ggccuacaauuugauaaac

SEQ ID NO: 502284 - RNA, 19 nt, Artificial Sequence
  Description of Artificial Sequence: Synthetic oligonucleotide
  Antisense strand to SEQ ID NO: 502283
guuuaucaaauuguaggcc

SEQ ID NO: 502285 - RNA, 19 nt, Artificial Sequence
  Description of Artificial Sequence: Synthetic oligonucleotide
  Sense strand starting at position 1168 of SEQ ID NO: 317663
ggacuaaacggcuagcaaa

SEQ ID NO: 502286 - RNA, 19 nt, Artificial Sequence
  Description of Artificial Sequence: Synthetic oligonucleotide
  Antisense strand to SEQ ID NO: 502285
uuugcuagccguuuagucc

SEQ ID NO: 502287 - RNA, 19 nt, Artificial Sequence
  Description of Artificial Sequence: Synthetic oligonucleotide
  Sense strand starting at position 1263 of SEQ ID NO: 317663
cccacuccuacgcgagaaa

SEQ ID NO: 502288 - RNA, 19 nt, Artificial Sequence
  Description of Artificial Sequence: Synthetic oligonucleotide
  Antisense strand to SEQ ID NO: 502287
uuucucgcguaggaguggg

SEQ ID NO: 502289 - RNA, 19 nt, Artificial Sequence
  Description of Artificial Sequence: Synthetic oligonucleotide
  Sense strand starting at position 1287 of SEQ ID NO: 317663
cgaaaugcucuauaugccu

SEQ ID NO: 502290 - RNA, 19 nt, Artificial Sequence
  Description of Artificial Sequence: Synthetic oligonucleotide
  Antisense strand to SEQ ID NO: 502289
aggcauauagagcauuucg

SEQ ID NO: 502291 - RNA, 19 nt, Artificial Sequence
  Description of Artificial Sequence: Synthetic oligonucleotide
  Sense strand starting at position 1355 of SEQ ID NO: 317663
cagcaauuucgucacguca

SEQ ID NO: 502292 - RNA, 19 nt, Artificial Sequence
  Description of Artificial Sequence: Synthetic oligonucleotide
  Antisense strand to SEQ ID NO: 502291
ugacgugacgaaauugcug

SEQ ID NO: 502293 - RNA, 19 nt, Artificial Sequence
  Description of Artificial Sequence: Synthetic oligonucleotide
  Sense strand starting at position 1380 of SEQ ID NO: 317663
ucugaacucguuuaccgaa

SEQ ID NO: 502294 - RNA, 19 nt, Artificial Sequence
  Description of Artificial Sequence: Synthetic oligonucleotide
  Antisense strand to SEQ ID NO: 502293
uucgguaaacgaguucaga

SEQ ID NO: 502295 - RNA, 19 nt, Artificial Sequence
  Description of Artificial Sequence: Synthetic oligonucleotide
  Sense strand starting at position 1382 of SEQ ID NO: 317663
ugaacucguuuaccgaaau

SEQ ID NO: 502296 - RNA, 19 nt, Artificial Sequence
  Description of Artificial Sequence: Synthetic oligonucleotide
  Antisense strand to SEQ ID NO: 502295
auuucgguaaacgaguuca

SEQ ID NO: 502297 - RNA, 19 nt, Artificial Sequence
  Description of Artificial Sequence: Synthetic oligonucleotide
  Sense strand starting at position 1400 of SEQ ID NO: 317663
ucuaaucugaggcguuuau

SEQ ID NO: 502298 - RNA, 19 nt, Artificial Sequence
  Description of Artificial Sequence: Synthetic oligonucleotide
  Antisense strand to SEQ ID NO: 502297
auaaacgccucagauuaga

SEQ ID NO: 502299 - RNA, 19 nt, Artificial Sequence
  Description of Artificial Sequence: Synthetic oligonucleotide
  Sense strand starting at position 1404 of SEQ ID NO: 317663
aucugaggcguuuaucaga

SEQ ID NO: 502300 - RNA, 19 nt, Artificial Sequence
  Description of Artificial Sequence: Synthetic oligonucleotide
  Antisense strand to SEQ ID NO: 502299
ucugauaaacgccucagau

SEQ ID NO: 502301 - RNA, 19 nt, Artificial Sequence
  Description of Artificial Sequence: Synthetic oligonucleotide
  Sense strand starting at position 1465 of SEQ ID NO: 317663
ugaggcauccaccauuaau

SEQ ID NO: 502302 - RNA, 19 nt, Artificial Sequence
  Description of Artificial Sequence: Synthetic oligonucleotide
  Antisense strand to SEQ ID NO: 502301
auuaaugguggaugccuca

SEQ ID NO: 502303 - RNA, 19 nt, Artificial Sequence
  Description of Artificial Sequence: Synthetic oligonucleotide
  Sense strand starting at position 1499 of SEQ ID NO: 317663
cagauauggccuuacguua

SEQ ID NO: 502304 - RNA, 19 nt, Artificial Sequence
  Description of Artificial Sequence: Synthetic oligonucleotide
  Antisense strand to SEQ ID NO: 502303
uaacguaaggccauaucug

SEQ ID NO: 502305 - RNA, 19 nt, Artificial Sequence
  Description of Artificial Sequence: Synthetic oligonucleotide
  Sense strand starting at position 1507 of SEQ ID NO: 317663
gccuuacguuauuucgcua

SEQ ID NO: 502306 - RNA, 19 nt, Artificial Sequence
  Description of Artificial Sequence: Synthetic oligonucleotide
  Antisense strand to SEQ ID NO: 502305
uagcgaaauaacguaaggc

SEQ ID NO: 502307 - RNA, 19 nt, Artificial Sequence
  Description of Artificial Sequence: Synthetic oligonucleotide
  Sense strand starting at position 2074 of SEQ ID NO: 317663
ccuggcuuucgaugacaca

SEQ ID NO: 502308 - RNA, 19 nt, Artificial Sequence
  Description of Artificial Sequence: Synthetic oligonucleotide
  Antisense strand to SEQ ID NO: 502307
ugugucaucgaaagccagg

SEQ ID NO: 502309 - RNA, 19 nt, Artificial Sequence
  Description of Artificial Sequence: Synthetic oligonucleotide
  Sense strand starting at position 2075 of SEQ ID NO: 317663
cuggcuuucgaugacacau

SEQ ID NO: 502310 - RNA, 19 nt, Artificial Sequence
  Description of Artificial Sequence: Synthetic oligonucleotide
  Antisense strand to SEQ ID NO: 502309
augugucaucgaaagccag

SEQ ID NO: 502311 - RNA, 19 nt, Artificial Sequence
  Description of Artificial Sequence: Synthetic oligonucleotide
  Sense strand starting at position 2086 of SEQ ID NO: 317663
ugacacauuuccgucgcaa

SEQ ID NO: 502312 - RNA, 19 nt, Artificial Sequence
  Description of Artificial Sequence: Synthetic oligonucleotide
  Antisense strand to SEQ ID NO: 502311
uugcgacggaaauguguca

SEQ ID NO: 502313 - RNA, 19 nt, Artificial Sequence
  Description of Artificial Sequence: Synthetic oligonucleotide
  Sense strand starting at position 2088 of SEQ ID NO: 317663
acacauuuccgucgcaaag

SEQ ID NO: 502314 - RNA, 19 nt, Artificial Sequence
  Description of Artificial Sequence: Synthetic oligonucleotide
  Antisense strand to SEQ ID NO: 502313
cuuugcgacggaaaugugu

SEQ ID NO: 502315 - RNA, 19 nt, Artificial Sequence
  Description of Artificial Sequence: Synthetic oligonucleotide
  Sense strand starting at position 2335 of SEQ ID NO: 317663
gaugcagcuccgggaaagu

SEQ ID NO: 502316 - RNA, 19 nt, Artificial Sequence
  Description of Artificial Sequence: Synthetic oligonucleotide
  Antisense strand to SEQ ID NO: 502315
acuuucccggagcugcauc

SEQ ID NO: 502317 - RNA, 19 nt, Artificial Sequence
  Description of Artificial Sequence: Synthetic oligonucleotide
  Sense strand starting at position 2370 of SEQ ID NO: 317663
cggcuauauuauguauaug

SEQ ID NO: 502318 - RNA, 19 nt, Artificial Sequence
  Description of Artificial Sequence: Synthetic oligonucleotide
  Antisense strand to SEQ ID NO: 502317
cauauacauaauauagccg

SEQ ID NO: 502319 - RNA, 19 nt, Artificial Sequence
  Description of Artificial Sequence: Synthetic oligonucleotide
  Sense strand starting at position 2378 of SEQ ID NO: 317663
uuauguauaugucuuagag

SEQ ID NO: 502320 - RNA, 19 nt, Artificial Sequence
  Description of Artificial Sequence: Synthetic oligonucleotide
  Antisense strand to SEQ ID NO: 502319
cucuaagacauauacauaa

SEQ ID NO: 502321 - RNA, 19 nt, Artificial Sequence
  Description of Artificial Sequence: Synthetic oligonucleotide
  Sense strand starting at position 2384 of SEQ ID NO: 317663
auaugucuuagagacguga

SEQ ID NO: 502322 - RNA, 19 nt, Artificial Sequence
  Description of Artificial Sequence: Synthetic oligonucleotide
  Antisense strand to SEQ ID NO: 502321
ucacgucucuaagacauau

SEQ ID NO: 502323 - RNA, 19 nt, Artificial Sequence
  Description of Artificial Sequence: Synthetic oligonucleotide
  Sense strand starting at position 2386 of SEQ ID NO: 317663
augucuuagagacgugagu

SEQ ID NO: 502324 - RNA, 19 nt, Artificial Sequence
  Description of Artificial Sequence: Synthetic oligonucleotide
  Antisense strand to SEQ ID NO: 502323
acucacgucucuaagacau

SEQ ID NO: 502325 - RNA, 19 nt, Artificial Sequence
  Description of Artificial Sequence: Synthetic oligonucleotide
  Sense strand starting at position 2388 of SEQ ID NO: 317663
gucuuagagacgugagucu

SEQ ID NO: 502326 - RNA, 19 nt, Artificial Sequence
  Description of Artificial Sequence: Synthetic oligonucleotide
  Antisense strand to SEQ ID NO: 502325
agacucacgucucuaagac

SEQ ID NO: 502327 - RNA, 19 nt, Artificial Sequence
  Description of Artificial Sequence: Synthetic oligonucleotide
  Sense strand starting at position 3673 of SEQ ID NO: 317663
aguagauuauuugauacag

SEQ ID NO: 502328 - RNA, 19 nt, Artificial Sequence
  Description of Artificial Sequence: Synthetic oligonucleotide
  Antisense strand to SEQ ID NO: 502327
cuguaucaaauaaucuacu

SEQ ID NO: 502329 - RNA, 19 nt, Artificial Sequence
  Description of Artificial Sequence: Synthetic oligonucleotide
  Sense strand starting at position 3719 of SEQ ID NO: 317663
uuugauuucuuguaucacu

SEQ ID NO: 502330 - RNA, 19 nt, Artificial Sequence
  Description of Artificial Sequence: Synthetic oligonucleotide
  Antisense strand to SEQ ID NO: 502329
agugauacaagaaaucaaa

SEQ ID NO: 502331 - RNA, 19 nt, Artificial Sequence
  Description of Artificial Sequence: Synthetic oligonucleotide
  Sense strand starting at position 3756 of SEQ ID NO: 317663
ucacuaguucuugagccuu

SEQ ID NO: 502332 - RNA, 19 nt, Artificial Sequence
  Description of Artificial Sequence: Synthetic oligonucleotide
  Antisense strand to SEQ ID NO: 502331
aaggcucaagaacuaguga

SEQ ID NO: 502333 - RNA, 19 nt, Artificial Sequence
  Description of Artificial Sequence: Synthetic oligonucleotide
  Sense strand starting at position 3758 of SEQ ID NO: 317663
acuaguucuugagccuuua

SEQ ID NO: 502334 - RNA, 19 nt, Artificial Sequence
  Description of Artificial Sequence: Synthetic oligonucleotide
  Antisense strand to SEQ ID NO: 502333
uaaaggcucaagaacuagu

SEQ ID NO: 502335 - RNA, 19 nt, Artificial Sequence
  Description of Artificial Sequence: Synthetic oligonucleotide
  Sense strand starting at position 27 of SEQ ID NO: 317664
ggaugaugaucauguauag

SEQ ID NO: 502336 - RNA, 19 nt, Artificial Sequence
  Description of Artificial Sequence: Synthetic oligonucleotide
  Antisense strand to SEQ ID NO: 502335
cuauacaugaucaucaucc

SEQ ID NO: 502337 - RNA, 19 nt, Artificial Sequence
  Description of Artificial Sequence: Synthetic oligonucleotide
  Sense strand starting at position 140 of SEQ ID NO: 317664
agguuaacuucuguuacau

SEQ ID NO: 502338 - RNA, 19 nt, Artificial Sequence
  Description of Artificial Sequence: Synthetic oligonucleotide
  Antisense strand to SEQ ID NO: 502337
auguaacagaaguuaaccu

SEQ ID NO: 502339 - RNA, 19 nt, Artificial Sequence
  Description of Artificial Sequence: Synthetic oligonucleotide
  Sense strand starting at position 265 of SEQ ID NO: 317664
gccuuaacauaagcaguua

SEQ ID NO: 502340 - RNA, 19 nt, Artificial Sequence
  Description of Artificial Sequence: Synthetic oligonucleotide
  Antisense strand to SEQ ID NO: 502339
uaacugcuuauguuaaggc

SEQ ID NO: 502341 - RNA, 19 nt, Artificial Sequence
  Description of Artificial Sequence: Synthetic oligonucleotide
  Sense strand starting at position 309 of SEQ ID NO: 317664
agaccaaacugacuaguuu

SEQ ID NO: 502342 - RNA, 19 nt, Artificial Sequence
  Description of Artificial Sequence: Synthetic oligonucleotide
  Antisense strand to SEQ ID NO: 502341
aaacuagucaguuuggucu

SEQ ID NO: 502343 - RNA, 19 nt, Artificial Sequence
  Description of Artificial Sequence: Synthetic oligonucleotide
  Sense strand starting at position 356 of SEQ ID NO: 317664
ccacccucugcucagagau

SEQ ID NO: 502344 - RNA, 19 nt, Artificial Sequence
  Description of Artificial Sequence: Synthetic oligonucleotide
  Antisense strand to SEQ ID NO: 502343
aucucugagcagagggugg

SEQ ID NO: 502345 - RNA, 19 nt, Artificial Sequence
  Description of Artificial Sequence: Synthetic oligonucleotide
  Sense strand starting at position 358 of SEQ ID NO: 317664
acccucugcucagagauga

SEQ ID NO: 502346 - RNA, 19 nt, Artificial Sequence
  Description of Artificial Sequence: Synthetic oligonucleotide
  Antisense strand to SEQ ID NO: 502345
ucaucucugagcagagggu

SEQ ID NO: 502347 - RNA, 19 nt, Artificial Sequence
  Description of Artificial Sequence: Synthetic oligonucleotide
  Sense strand starting at position 362 of SEQ ID NO: 317664
ucugcucagagaugaaaug

SEQ ID NO: 502348 - RNA, 19 nt, Artificial Sequence
  Description of Artificial Sequence: Synthetic oligonucleotide
  Antisense strand to SEQ ID NO: 502347
cauuucaucucugagcaga

SEQ ID NO: 502349 - RNA, 19 nt, Artificial Sequence
  Description of Artificial Sequence: Synthetic oligonucleotide
  Sense strand starting at position 479 of SEQ ID NO: 317664
ccuccaagagccuaaugau

SEQ ID NO: 502350 - RNA, 19 nt, Artificial Sequence
  Description of Artificial Sequence: Synthetic oligonucleotide
  Antisense strand to SEQ ID NO: 502349
aucauuaggcucuuggagg

SEQ ID NO: 502351 - RNA, 19 nt, Artificial Sequence
  Description of Artificial Sequence: Synthetic oligonucleotide
  Sense strand starting at position 488 of SEQ ID NO: 317664
gccuaaugaucagauacca

SEQ ID NO: 502352 - RNA, 19 nt, Artificial Sequence
  Description of Artificial Sequence: Synthetic oligonucleotide
  Antisense strand to SEQ ID NO: 502351
ugguaucugaucauuaggc

SEQ ID NO: 502353 - RNA, 19 nt, Artificial Sequence
  Description of Artificial Sequence: Synthetic oligonucleotide
  Sense strand starting at position 588 of SEQ ID NO: 317664
acguguucccucuaccaag

SEQ ID NO: 502354 - RNA, 19 nt, Artificial Sequence
  Description of Artificial Sequence: Synthetic oligonucleotide
  Antisense strand to SEQ ID NO: 502353
cuugguagagggaacacgu

SEQ ID NO: 502355 - RNA, 19 nt, Artificial Sequence
  Description of Artificial Sequence: Synthetic oligonucleotide
  Sense strand starting at position 761 of SEQ ID NO: 317664
guaucaggcgcgguguuaa

SEQ ID NO: 502356 - RNA, 19 nt, Artificial Sequence
  Description of Artificial Sequence: Synthetic oligonucleotide
  Antisense strand to SEQ ID NO: 502355
uuaacaccgcgccugauac

SEQ ID NO: 502357 - RNA, 19 nt, Artificial Sequence
  Description of Artificial Sequence: Synthetic oligonucleotide
  Sense strand starting at position 772 of SEQ ID NO: 317664
gguguuaagcccugggcaa

SEQ ID NO: 502358 - RNA, 19 nt, Artificial Sequence
  Description of Artificial Sequence: Synthetic oligonucleotide
  Antisense strand to SEQ ID NO: 502357
uugcccagggcuuaacacc

SEQ ID NO: 502359 - RNA, 19 nt, Artificial Sequence
  Description of Artificial Sequence: Synthetic oligonucleotide
  Sense strand starting at position 773 of SEQ ID NO: 317664
guguuaagcccugggcaau

SEQ ID NO: 502360 - RNA, 19 nt, Artificial Sequence
  Description of Artificial Sequence: Synthetic oligonucleotide
  Antisense strand to SEQ ID NO: 502359
auugcccagggcuuaacac

SEQ ID NO: 502361 - RNA, 19 nt, Artificial Sequence
  Description of Artificial Sequence: Synthetic oligonucleotide
  Sense strand starting at position 850 of SEQ ID NO: 317664
aagauuucggcacguccaa

SEQ ID NO: 502362 - RNA, 19 nt, Artificial Sequence
  Description of Artificial Sequence: Synthetic oligonucleotide
  Antisense strand to SEQ ID NO: 502361
uuggacgugccgaaaucuu

SEQ ID NO: 502363 - RNA, 19 nt, Artificial Sequence
  Description of Artificial Sequence: Synthetic oligonucleotide
  Sense strand starting at position 949 of SEQ ID NO: 317664
gcugaagagccagaguuaa

SEQ ID NO: 502364 - RNA, 19 nt, Artificial Sequence
  Description of Artificial Sequence: Synthetic oligonucleotide
  Antisense strand to SEQ ID NO: 502363
uuaacucuggcucuucagc

SEQ ID NO: 502365 - RNA, 19 nt, Artificial Sequence
  Description of Artificial Sequence: Synthetic oligonucleotide
  Sense strand starting at position 960 of SEQ ID NO: 317664
agaguuaagcucuaaauua

SEQ ID NO: 502366 - RNA, 19 nt, Artificial Sequence
  Description of Artificial Sequence: Synthetic oligonucleotide
  Antisense strand to SEQ ID NO: 502365
uaauuuagagcuuaacucu

SEQ ID NO: 502367 - RNA, 19 nt, Artificial Sequence
  Description of Artificial Sequence: Synthetic oligonucleotide
  Sense strand starting at position 1349 of SEQ ID NO: 317664
cccgguagaccauaauguu

SEQ ID NO: 502368 - RNA, 19 nt, Artificial Sequence
  Description of Artificial Sequence: Synthetic oligonucleotide
  Antisense strand to SEQ ID NO: 502367
aacauuauggucuaccggg

SEQ ID NO: 502369 - RNA, 19 nt, Artificial Sequence
  Description of Artificial Sequence: Synthetic oligonucleotide
  Sense strand starting at position 1367 of SEQ ID NO: 317664
uuuaaauaugcgcgggaag

SEQ ID NO: 502370 - RNA, 19 nt, Artificial Sequence
  Description of Artificial Sequence: Synthetic oligonucleotide
  Antisense strand to SEQ ID NO: 502369
cuucccgcgcauauuuaaa

SEQ ID NO: 502371 - RNA, 19 nt, Artificial Sequence
  Description of Artificial Sequence: Synthetic oligonucleotide
  Sense strand starting at position 1368 of SEQ ID NO: 317664
uuaaauaugcgcgggaagu

SEQ ID NO: 502372 - RNA, 19 nt, Artificial Sequence
  Description of Artificial Sequence: Synthetic oligonucleotide
  Antisense strand to SEQ ID NO: 502371
acuucccgcgcauauuuaa

SEQ ID NO: 502373 - RNA, 19 nt, Artificial Sequence
  Description of Artificial Sequence: Synthetic oligonucleotide
  Sense strand starting at position 1369 of SEQ ID NO: 317664
uaaauaugcgcgggaaguu

SEQ ID NO: 502374 - RNA, 19 nt, Artificial Sequence
  Description of Artificial Sequence: Synthetic oligonucleotide
  Antisense strand to SEQ ID NO: 502373
aacuucccgcgcauauuua

SEQ ID NO: 502375 - RNA, 19 nt, Artificial Sequence
  Description of Artificial Sequence: Synthetic oligonucleotide
  Sense strand starting at position 1370 of SEQ ID NO: 317664
aaauaugcgcgggaaguuu

SEQ ID NO: 502376 - RNA, 19 nt, Artificial Sequence
  Description of Artificial Sequence: Synthetic oligonucleotide
  Antisense strand to SEQ ID NO: 502375
aaacuucccgcgcauauuu

SEQ ID NO: 502377 - RNA, 19 nt, Artificial Sequence
  Description of Artificial Sequence: Synthetic oligonucleotide
  Sense strand starting at position 1412 of SEQ ID NO: 317664
gucgauucugcauagcaca

SEQ ID NO: 502378 - RNA, 19 nt, Artificial Sequence
  Description of Artificial Sequence: Synthetic oligonucleotide
  Antisense strand to SEQ ID NO: 502377
ugugcuaugcagaaucgac

SEQ ID NO: 502379 - RNA, 19 nt, Artificial Sequence
  Description of Artificial Sequence: Synthetic oligonucleotide
  Sense strand starting at position 1842 of SEQ ID NO: 317664
cugagagcugcugaaauag

SEQ ID NO: 502380 - RNA, 19 nt, Artificial Sequence
  Description of Artificial Sequence: Synthetic oligonucleotide
  Antisense strand to SEQ ID NO: 502379
cuauuucagcagcucucag

SEQ ID NO: 502381 - RNA, 19 nt, Artificial Sequence
  Description of Artificial Sequence: Synthetic oligonucleotide
  Sense strand starting at position 1968 of SEQ ID NO: 317664
gcugaauccugccuggaac

SEQ ID NO: 502382 - RNA, 19 nt, Artificial Sequence
  Description of Artificial Sequence: Synthetic oligonucleotide
  Antisense strand to SEQ ID NO: 502381
guuccaggcaggauucagc

SEQ ID NO: 502383 - RNA, 19 nt, Artificial Sequence
  Description of Artificial Sequence: Synthetic oligonucleotide
  Sense strand starting at position 1969 of SEQ ID NO: 317664
cugaauccugccuggaaca

SEQ ID NO: 502384 - RNA, 19 nt, Artificial Sequence
  Description of Artificial Sequence: Synthetic oligonucleotide
  Antisense strand to SEQ ID NO: 502383
uguuccaggcaggauucag

SEQ ID NO: 502385 - RNA, 19 nt, Artificial Sequence
  Description of Artificial Sequence: Synthetic oligonucleotide
  Sense strand starting at position 1970 of SEQ ID NO: 317664
ugaauccugccuggaacaa

SEQ ID NO: 502386 - RNA, 19 nt, Artificial Sequence
  Description of Artificial Sequence: Synthetic oligonucleotide
  Antisense strand to SEQ ID NO: 502385
uuguuccaggcaggauuca

SEQ ID NO: 502387 - RNA, 19 nt, Artificial Sequence
  Description of Artificial Sequence: Synthetic oligonucleotide
  Sense strand starting at position 1983 of SEQ ID NO: 317664
gaacaaugggagugcuaca

SEQ ID NO: 502388 - RNA, 19 nt, Artificial Sequence
  Description of Artificial Sequence: Synthetic oligonucleotide
  Antisense strand to SEQ ID NO: 502387
uguagcacucccauuguuc

SEQ ID NO: 502389 - RNA, 19 nt, Artificial Sequence
  Description of Artificial Sequence: Synthetic oligonucleotide
  Sense strand starting at position 2013 of SEQ ID NO: 317664
gcugcugccaucuggugaa

SEQ ID NO: 502390 - RNA, 19 nt, Artificial Sequence
  Description of Artificial Sequence: Synthetic oligonucleotide
  Antisense strand to SEQ ID NO: 502389
uucaccagauggcagcagc

SEQ ID NO: 502391 - RNA, 19 nt, Artificial Sequence
  Description of Artificial Sequence: Synthetic oligonucleotide
  Sense strand starting at position 2046 of SEQ ID NO: 317664
acaguuccagcugggaauu

SEQ ID NO: 502392 - RNA, 19 nt, Artificial Sequence
  Description of Artificial Sequence: Synthetic oligonucleotide
  Antisense strand to SEQ ID NO: 502391
aauucccagcuggaacugu

SEQ ID NO: 502393 - RNA, 19 nt, Artificial Sequence
  Description of Artificial Sequence: Synthetic oligonucleotide
  Sense strand starting at position 2075 of SEQ ID NO: 317664
aaauauuggcgcugaagua

SEQ ID NO: 502394 - RNA, 19 nt, Artificial Sequence
  Description of Artificial Sequence: Synthetic oligonucleotide
  Antisense strand to SEQ ID NO: 502393
uacuucagcgccaauauuu

SEQ ID NO: 502395 - RNA, 19 nt, Artificial Sequence
  Description of Artificial Sequence: Synthetic oligonucleotide
  Sense strand starting at position 2235 of SEQ ID NO: 317664
gccucuugucccuggagua

SEQ ID NO: 502396 - RNA, 19 nt, Artificial Sequence
  Description of Artificial Sequence: Synthetic oligonucleotide
  Antisense strand to SEQ ID NO: 502395
uacuccagggacaagaggc

SEQ ID NO: 502397 - RNA, 19 nt, Artificial Sequence
  Description of Artificial Sequence: Synthetic oligonucleotide
  Sense strand starting at position 2348 of SEQ ID NO: 317664
auauuagauugcugcauuu

SEQ ID NO: 502398 - RNA, 19 nt, Artificial Sequence
  Description of Artificial Sequence: Synthetic oligonucleotide
  Antisense strand to SEQ ID NO: 502397
aaaugcagcaaucuaauau

SEQ ID NO: 502399 - RNA, 19 nt, Artificial Sequence
  Description of Artificial Sequence: Synthetic oligonucleotide
  Sense strand starting at position 2375 of SEQ ID NO: 317664
aauauccugccuggguaua

SEQ ID NO: 502400 - RNA, 19 nt, Artificial Sequence
  Description of Artificial Sequence: Synthetic oligonucleotide
  Antisense strand to SEQ ID NO: 502399
uauacccaggcaggauauu

SEQ ID NO: 502401 - RNA, 19 nt, Artificial Sequence
  Description of Artificial Sequence: Synthetic oligonucleotide
  Sense strand starting at position 2376 of SEQ ID NO: 317664
auauccugccuggguauau

SEQ ID NO: 502402 - RNA, 19 nt, Artificial Sequence
  Description of Artificial Sequence: Synthetic oligonucleotide
  Antisense strand to SEQ ID NO: 502401
auauacccaggcaggauau

SEQ ID NO: 502403 - RNA, 19 nt, Artificial Sequence
  Description of Artificial Sequence: Synthetic oligonucleotide
  Sense strand starting at position 2377 of SEQ ID NO: 317664
uauccugccuggguauauu

SEQ ID NO: 502404 - RNA, 19 nt, Artificial Sequence
  Description of Artificial Sequence: Synthetic oligonucleotide
  Antisense strand to SEQ ID NO: 502403
aauauacccaggcaggaua

SEQ ID NO: 502405 - RNA, 19 nt, Artificial Sequence
  Description of Artificial Sequence: Synthetic oligonucleotide
  Sense strand starting at position 2385 of SEQ ID NO: 317664
cuggguauauucuuacuuu

SEQ ID NO: 502406 - RNA, 19 nt, Artificial Sequence
  Description of Artificial Sequence: Synthetic oligonucleotide
  Antisense strand to SEQ ID NO: 502405
aaaguaagaauauacccag

SEQ ID NO: 502407 - RNA, 19 nt, Artificial Sequence
  Description of Artificial Sequence: Synthetic oligonucleotide
  Sense strand starting at position 3443 of SEQ ID NO: 317664
cggaaauacuaauaucuca

SEQ ID NO: 502408 - RNA, 19 nt, Artificial Sequence
  Description of Artificial Sequence: Synthetic oligonucleotide
  Antisense strand to SEQ ID NO: 502407
ugagauauuaguauuuccg

SEQ ID NO: 502409 - RNA, 19 nt, Artificial Sequence
  Description of Artificial Sequence: Synthetic oligonucleotide
  Sense strand starting at position 3863 of SEQ ID NO: 317664
uaguacuaggcauacauga

SEQ ID NO: 502410 - RNA, 19 nt, Artificial Sequence
  Description of Artificial Sequence: Synthetic oligonucleotide
  Antisense strand to SEQ ID NO: 502409
ucauguaugccuaguacua

SEQ ID NO: 502411 - RNA, 19 nt, Artificial Sequence
  Description of Artificial Sequence: Synthetic oligonucleotide
  Sense strand starting at position 3948 of SEQ ID NO: 317664
uuugcauugcuccacaguu

SEQ ID NO: 502412 - RNA, 19 nt, Artificial Sequence
  Description of Artificial Sequence: Synthetic oligonucleotide
  Antisense strand to SEQ ID NO: 502411
aacuguggagcaaugcaaa

SEQ ID NO: 502413 - RNA, 19 nt, Artificial Sequence
  Description of Artificial Sequence: Synthetic oligonucleotide
  Sense strand starting at position 3982 of SEQ ID NO: 317664
aguuuacgcucacuuacau

SEQ ID NO: 502414 - RNA, 19 nt, Artificial Sequence
  Description of Artificial Sequence: Synthetic oligonucleotide
  Antisense strand to SEQ ID NO: 502413
auguaagugagcguaaacu

SEQ ID NO: 502415 - RNA, 19 nt, Artificial Sequence
  Description of Artificial Sequence: Synthetic oligonucleotide
  Sense strand starting at position 55 of SEQ ID NO: 317665
gucucaucccuuuaguaaa

SEQ ID NO: 502416 - RNA, 19 nt, Artificial Sequence
  Description of Artificial Sequence: Synthetic oligonucleotide
  Antisense strand to SEQ ID NO: 502415
uuuacuaaagggaugagac

SEQ ID NO: 502417 - RNA, 19 nt, Artificial Sequence
  Description of Artificial Sequence: Synthetic oligonucleotide
  Sense strand starting at position 96 of SEQ ID NO: 317665
cgcaucaguguuuaccaca

SEQ ID NO: 502418 - RNA, 19 nt, Artificial Sequence
  Description of Artificial Sequence: Synthetic oligonucleotide
  Antisense strand to SEQ ID NO: 502417
ugugguaaacacugaugcg

SEQ ID NO: 502419 - RNA, 19 nt, Artificial Sequence
  Description of Artificial Sequence: Synthetic oligonucleotide
  Sense strand starting at position 263 of SEQ ID NO: 317665
uguagaaagagugguuagu

SEQ ID NO: 502420 - RNA, 19 nt, Artificial Sequence
  Description of Artificial Sequence: Synthetic oligonucleotide
  Antisense strand to SEQ ID NO: 502419
acuaaccacucuuucuaca

SEQ ID NO: 502421 - RNA, 19 nt, Artificial Sequence
  Description of Artificial Sequence: Synthetic oligonucleotide
  Sense strand starting at position 265 of SEQ ID NO: 317665
uagaaagagugguuaguga

SEQ ID NO: 502422 - RNA, 19 nt, Artificial Sequence
  Description of Artificial Sequence: Synthetic oligonucleotide
  Antisense strand to SEQ ID NO: 502421
ucacuaaccacucuuucua

SEQ ID NO: 502423 - RNA, 19 nt, Artificial Sequence
  Description of Artificial Sequence: Synthetic oligonucleotide
  Sense strand starting at position 283 of SEQ ID NO: 317665
acaauagcaccugagaguu

SEQ ID NO: 502424 - RNA, 19 nt, Artificial Sequence
  Description of Artificial Sequence: Synthetic oligonucleotide
  Antisense strand to SEQ ID NO: 502423
aacucucaggugcuauugu

SEQ ID NO: 502425 - RNA, 19 nt, Artificial Sequence
  Description of Artificial Sequence: Synthetic oligonucleotide
  Sense strand starting at position 355 of SEQ ID NO: 317665
ccugaaauuuccugggauu

SEQ ID NO: 502426 - RNA, 19 nt, Artificial Sequence
  Description of Artificial Sequence: Synthetic oligonucleotide
  Antisense strand to SEQ ID NO: 502425
aaucccaggaaauuucagg

SEQ ID NO: 502427 - RNA, 19 nt, Artificial Sequence
  Description of Artificial Sequence: Synthetic oligonucleotide
  Sense strand starting at position 623 of SEQ ID NO: 317665
uacagcugugaggguuaaa

SEQ ID NO: 502428 - RNA, 19 nt, Artificial Sequence
  Description of Artificial Sequence: Synthetic oligonucleotide
  Antisense strand to SEQ ID NO: 502427
uuuaacccucacagcugua

SEQ ID NO: 502429 - RNA, 19 nt, Artificial Sequence
  Description of Artificial Sequence: Synthetic oligonucleotide
  Sense strand starting at position 635 of SEQ ID NO: 317665
gguuaaaugaguuaacgca

SEQ ID NO: 502430 - RNA, 19 nt, Artificial Sequence
  Description of Artificial Sequence: Synthetic oligonucleotide
  Antisense strand to SEQ ID NO: 502429
ugcguuaacucauuuaacc

SEQ ID NO: 502431 - RNA, 19 nt, Artificial Sequence
  Description of Artificial Sequence: Synthetic oligonucleotide
  Sense strand starting at position 745 of SEQ ID NO: 317665
gaacaaaguuauucuggca

SEQ ID NO: 502432 - RNA, 19 nt, Artificial Sequence
  Description of Artificial Sequence: Synthetic oligonucleotide
  Antisense strand to SEQ ID NO: 502431
ugccagaauaacuuuguuc

SEQ ID NO: 502433 - RNA, 19 nt, Artificial Sequence
  Description of Artificial Sequence: Synthetic oligonucleotide
  Sense strand starting at position 757 of SEQ ID NO: 317665
ucuggcagcugucugagaa

SEQ ID NO: 502434 - RNA, 19 nt, Artificial Sequence
  Description of Artificial Sequence: Synthetic oligonucleotide
  Antisense strand to SEQ ID NO: 502433
uucucagacagcugccaga

SEQ ID NO: 502435 - RNA, 19 nt, Artificial Sequence
  Description of Artificial Sequence: Synthetic oligonucleotide
  Sense strand starting at position 758 of SEQ ID NO: 317665
cuggcagcugucugagaau

SEQ ID NO: 502436 - RNA, 19 nt, Artificial Sequence
  Description of Artificial Sequence: Synthetic oligonucleotide
  Antisense strand to SEQ ID NO: 502435
auucucagacagcugccag

SEQ ID NO: 502437 - RNA, 19 nt, Artificial Sequence
  Description of Artificial Sequence: Synthetic oligonucleotide
  Sense strand starting at position 769 of SEQ ID NO: 317665
cugagaauccacuggagug

SEQ ID NO: 502438 - RNA, 19 nt, Artificial Sequence
  Description of Artificial Sequence: Synthetic oligonucleotide
  Antisense strand to SEQ ID NO: 502437
cacuccaguggauucucag

SEQ ID NO: 502439 - RNA, 19 nt, Artificial Sequence
  Description of Artificial Sequence: Synthetic oligonucleotide
  Sense strand starting at position 893 of SEQ ID NO: 317665
cuguauugaugaucauuga

SEQ ID NO: 502440 - RNA, 19 nt, Artificial Sequence
  Description of Artificial Sequence: Synthetic oligonucleotide
  Antisense strand to SEQ ID NO: 502439
ucaaugaucaucaauacag

SEQ ID NO: 502441 - RNA, 19 nt, Artificial Sequence
  Description of Artificial Sequence: Synthetic oligonucleotide
  Sense strand starting at position 910 of SEQ ID NO: 317665
gaaauuggaugugaaagga

SEQ ID NO: 502442 - RNA, 19 nt, Artificial Sequence
  Description of Artificial Sequence: Synthetic oligonucleotide
  Antisense strand to SEQ ID NO: 502441
uccuuucacauccaauuuc

SEQ ID NO: 502443 - RNA, 19 nt, Artificial Sequence
  Description of Artificial Sequence: Synthetic oligonucleotide
  Sense strand starting at position 946 of SEQ ID NO: 317665
gaaguacaaguuugagauu

SEQ ID NO: 502444 - RNA, 19 nt, Artificial Sequence
  Description of Artificial Sequence: Synthetic oligonucleotide
  Antisense strand to SEQ ID NO: 502443
aaucucaaacuuguacuuc

SEQ ID NO: 502445 - RNA, 19 nt, Artificial Sequence
  Description of Artificial Sequence: Synthetic oligonucleotide
  Sense strand starting at position 1100 of SEQ ID NO: 317665
agcgucugccgcucugaaa

SEQ ID NO: 502446 - RNA, 19 nt, Artificial Sequence
  Description of Artificial Sequence: Synthetic oligonucleotide
  Antisense strand to SEQ ID NO: 502445
uuucagagcggcagacgcu

SEQ ID NO: 502447 - RNA, 19 nt, Artificial Sequence
  Description of Artificial Sequence: Synthetic oligonucleotide
  Sense strand starting at position 1172 of SEQ ID NO: 317665
ggagcagaugcugagacuu

SEQ ID NO: 502448 - RNA, 19 nt, Artificial Sequence
  Description of Artificial Sequence: Synthetic oligonucleotide
  Antisense strand to SEQ ID NO: 502447
aagucucagcaucugcucc

SEQ ID NO: 502449 - RNA, 19 nt, Artificial Sequence
  Description of Artificial Sequence: Synthetic oligonucleotide
  Sense strand starting at position 1186 of SEQ ID NO: 317665
gacuuagaacgccagcauu

SEQ ID NO: 502450 - RNA, 19 nt, Artificial Sequence
  Description of Artificial Sequence: Synthetic oligonucleotide
  Antisense strand to SEQ ID NO: 502449
aaugcuggcguucuaaguc

SEQ ID NO: 502451 - RNA, 19 nt, Artificial Sequence
  Description of Artificial Sequence: Synthetic oligonucleotide
  Sense strand starting at position 1303 of SEQ ID NO: 317665
aagggaauccuauggcuuu

SEQ ID NO: 502452 - RNA, 19 nt, Artificial Sequence
  Description of Artificial Sequence: Synthetic oligonucleotide
  Antisense strand to SEQ ID NO: 502451
aaagccauaggauucccuu

SEQ ID NO: 502453 - RNA, 19 nt, Artificial Sequence
  Description of Artificial Sequence: Synthetic oligonucleotide
  Sense strand starting at position 1372 of SEQ ID NO: 317665
uacggaacguuucuuagaa

SEQ ID NO: 502454 - RNA, 19 nt, Artificial Sequence
  Description of Artificial Sequence: Synthetic oligonucleotide
  Antisense strand to SEQ ID NO: 502453
uucuaagaaacguuccgua

SEQ ID NO: 502455 - RNA, 19 nt, Artificial Sequence
  Description of Artificial Sequence: Synthetic oligonucleotide
  Sense strand starting at position 1373 of SEQ ID NO: 317665
acggaacguuucuuagaaa

SEQ ID NO: 502456 - RNA, 19 nt, Artificial Sequence
  Description of Artificial Sequence: Synthetic oligonucleotide
  Antisense strand to SEQ ID NO: 502455
uuucuaagaaacguuccgu

SEQ ID NO: 502457 - RNA, 19 nt, Artificial Sequence
  Description of Artificial Sequence: Synthetic oligonucleotide
  Sense strand starting at position 1475 of SEQ ID NO: 317665
aauccaguuugggaagaau

SEQ ID NO: 502458 - RNA, 19 nt, Artificial Sequence
  Description of Artificial Sequence: Synthetic oligonucleotide
  Antisense strand to SEQ ID NO: 502457
auucuucccaaacuggauu

SEQ ID NO: 502459 - RNA, 19 nt, Artificial Sequence
  Description of Artificial Sequence: Synthetic oligonucleotide
  Sense strand starting at position 2228 of SEQ ID NO: 317665
uuuauuguaccagggcgau

SEQ ID NO: 502460 - RNA, 19 nt, Artificial Sequence
  Description of Artificial Sequence: Synthetic oligonucleotide
  Antisense strand to SEQ ID NO: 502459
aucgcccugguacaauaaa

SEQ ID NO: 502461 - RNA, 19 nt, Artificial Sequence
  Description of Artificial Sequence: Synthetic oligonucleotide
  Sense strand starting at position 2280 of SEQ ID NO: 317665
ccugccuugcucuagggaa

SEQ ID NO: 502462 - RNA, 19 nt, Artificial Sequence
  Description of Artificial Sequence: Synthetic oligonucleotide
  Antisense strand to SEQ ID NO: 502461
uucccuagagcaaggcagg

SEQ ID NO: 502463 - RNA, 19 nt, Artificial Sequence
  Description of Artificial Sequence: Synthetic oligonucleotide
  Sense strand starting at position 2282 of SEQ ID NO: 317665
ugccuugcucuagggaaau

SEQ ID NO: 502464 - RNA, 19 nt, Artificial Sequence
  Description of Artificial Sequence: Synthetic oligonucleotide
  Antisense strand to SEQ ID NO: 502463
auuucccuagagcaaggca

SEQ ID NO: 502465 - RNA, 19 nt, Artificial Sequence
  Description of Artificial Sequence: Synthetic oligonucleotide
  Sense strand starting at position 2315 of SEQ ID NO: 317665
acguaagaacaaugcgaaa

SEQ ID NO: 502466 - RNA, 19 nt, Artificial Sequence
  Description of Artificial Sequence: Synthetic oligonucleotide
  Antisense strand to SEQ ID NO: 502465
uuucgcauuguucuuacgu

SEQ ID NO: 502467 - RNA, 19 nt, Artificial Sequence
  Description of Artificial Sequence: Synthetic oligonucleotide
  Sense strand starting at position 2387 of SEQ ID NO: 317665
gcuagcuagcugggaauuu

SEQ ID NO: 502468 - RNA, 19 nt, Artificial Sequence
  Description of Artificial Sequence: Synthetic oligonucleotide
  Antisense strand to SEQ ID NO: 502467
aaauucccagcuagcuagc

SEQ ID NO: 502469 - RNA, 19 nt, Artificial Sequence
  Description of Artificial Sequence: Synthetic oligonucleotide
  Sense strand starting at position 2388 of SEQ ID NO: 317665
cuagcuagcugggaauuua

SEQ ID NO: 502470 - RNA, 19 nt, Artificial Sequence
  Description of Artificial Sequence: Synthetic oligonucleotide
  Antisense strand to SEQ ID NO: 502469
uaaauucccagcuagcuag

SEQ ID NO: 502471 - RNA, 19 nt, Artificial Sequence
  Description of Artificial Sequence: Synthetic oligonucleotide
  Sense strand starting at position 2409 of SEQ ID NO: 317665
ccagaaacggcuugcgaua

SEQ ID NO: 502472 - RNA, 19 nt, Artificial Sequence
  Description of Artificial Sequence: Synthetic oligonucleotide
  Antisense strand to SEQ ID NO: 502471
uaucgcaagccguuucugg

SEQ ID NO: 502473 - RNA, 19 nt, Artificial Sequence
  Description of Artificial Sequence: Synthetic oligonucleotide
  Sense strand starting at position 2451 of SEQ ID NO: 317665
guuacaaacuccgcggauu

SEQ ID NO: 502474 - RNA, 19 nt, Artificial Sequence
  Description of Artificial Sequence: Synthetic oligonucleotide
  Antisense strand to SEQ ID NO: 502473
aauccgcggaguuuguaac

SEQ ID NO: 502475 - RNA, 19 nt, Artificial Sequence
  Description of Artificial Sequence: Synthetic oligonucleotide
  Sense strand starting at position 2452 of SEQ ID NO: 317665
uuacaaacuccgcggauua

SEQ ID NO: 502476 - RNA, 19 nt, Artificial Sequence
  Description of Artificial Sequence: Synthetic oligonucleotide
  Antisense strand to SEQ ID NO: 502475
uaauccgcggaguuuguaa

SEQ ID NO: 502477 - RNA, 19 nt, Artificial Sequence
  Description of Artificial Sequence: Synthetic oligonucleotide
  Sense strand starting at position 2535 of SEQ ID NO: 317665
ggguguaguacucaucaga

SEQ ID NO: 502478 - RNA, 19 nt, Artificial Sequence
  Description of Artificial Sequence: Synthetic oligonucleotide
  Antisense strand to SEQ ID NO: 502477
ucugaugaguacuacaccc

SEQ ID NO: 502479 - RNA, 19 nt, Artificial Sequence
  Description of Artificial Sequence: Synthetic oligonucleotide
  Sense strand starting at position 2538 of SEQ ID NO: 317665
uguaguacucaucagagcu

SEQ ID NO: 502480 - RNA, 19 nt, Artificial Sequence
  Description of Artificial Sequence: Synthetic oligonucleotide
  Antisense strand to SEQ ID NO: 502479
agcucugaugaguacuaca

SEQ ID NO: 502481 - RNA, 19 nt, Artificial Sequence
  Description of Artificial Sequence: Synthetic oligonucleotide
  Sense strand starting at position 2589 of SEQ ID NO: 317665
uuccgccauuucuacagaa

SEQ ID NO: 502482 - RNA, 19 nt, Artificial Sequence
  Description of Artificial Sequence: Synthetic oligonucleotide
  Antisense strand to SEQ ID NO: 502481
uucuguagaaauggcggaa

SEQ ID NO: 502483 - RNA, 19 nt, Artificial Sequence
  Description of Artificial Sequence: Synthetic oligonucleotide
  Sense strand starting at position 2630 of SEQ ID NO: 317665
ccuaauaggugauauuuaa

SEQ ID NO: 502484 - RNA, 19 nt, Artificial Sequence
  Description of Artificial Sequence: Synthetic oligonucleotide
  Antisense strand to SEQ ID NO: 502483
uuaaauaucaccuauuagg

SEQ ID NO: 502485 - RNA, 19 nt, Artificial Sequence
  Description of Artificial Sequence: Synthetic oligonucleotide
  Sense strand starting at position 2768 of SEQ ID NO: 317665
accagaaaugggugccaga

SEQ ID NO: 502486 - RNA, 19 nt, Artificial Sequence
  Description of Artificial Sequence: Synthetic oligonucleotide
  Antisense strand to SEQ ID NO: 502485
ucuggcacccauuucuggu

SEQ ID NO: 502487 - RNA, 19 nt, Artificial Sequence
  Description of Artificial Sequence: Synthetic oligonucleotide
  Sense strand starting at position 2783 of SEQ ID NO: 317665
cagagauaugccugcacua

SEQ ID NO: 502488 - RNA, 19 nt, Artificial Sequence
  Description of Artificial Sequence: Synthetic oligonucleotide
  Antisense strand to SEQ ID NO: 502487
uagugcaggcauaucucug

SEQ ID NO: 502489 - RNA, 19 nt, Artificial Sequence
  Description of Artificial Sequence: Synthetic oligonucleotide
  Sense strand starting at position 3074 of SEQ ID NO: 317665
agcauucuauuggcauaaa

SEQ ID NO: 502490 - RNA, 19 nt, Artificial Sequence
  Description of Artificial Sequence: Synthetic oligonucleotide
  Antisense strand to SEQ ID NO: 502489
uuuaugccaauagaaugcu

SEQ ID NO: 502491 - RNA, 19 nt, Artificial Sequence
  Description of Artificial Sequence: Synthetic oligonucleotide
  Sense strand starting at position 3153 of SEQ ID NO: 317665
gccagcugauuaucaauaa

SEQ ID NO: 502492 - RNA, 19 nt, Artificial Sequence
  Description of Artificial Sequence: Synthetic oligonucleotide
  Antisense strand to SEQ ID NO: 502491
uuauugauaaucagcuggc

SEQ ID NO: 502493 - RNA, 19 nt, Artificial Sequence
  Description of Artificial Sequence: Synthetic oligonucleotide
  Sense strand starting at position 3748 of SEQ ID NO: 317665
caguuagacuggcuauuau

SEQ ID NO: 502494 - RNA, 19 nt, Artificial Sequence
  Description of Artificial Sequence: Synthetic oligonucleotide
  Antisense strand to SEQ ID NO: 502493
auaauagccagucuaacug

SEQ ID NO: 502495 - RNA, 19 nt, Artificial Sequence
  Description of Artificial Sequence: Synthetic oligonucleotide
  Sense strand starting at position 82 of SEQ ID NO: 317666
auaugucaaucuccuggaa

SEQ ID NO: 502496 - RNA, 19 nt, Artificial Sequence
  Description of Artificial Sequence: Synthetic oligonucleotide
  Antisense strand to SEQ ID NO: 502495
uuccaggagauugacauau

SEQ ID NO: 502497 - RNA, 19 nt, Artificial Sequence
  Description of Artificial Sequence: Synthetic oligonucleotide
  Sense strand starting at position 85 of SEQ ID NO: 317666
ugucaaucuccuggaaauu

SEQ ID NO: 502498 - RNA, 19 nt, Artificial Sequence
  Description of Artificial Sequence: Synthetic oligonucleotide
  Antisense strand to SEQ ID NO: 502497
aauuuccaggagauugaca

SEQ ID NO: 502499 - RNA, 19 nt, Artificial Sequence
  Description of Artificial Sequence: Synthetic oligonucleotide
  Sense strand starting at position 299 of SEQ ID NO: 317666
cucacagucuugucucaac

SEQ ID NO: 502500 - RNA, 19 nt, Artificial Sequence
  Description of Artificial Sequence: Synthetic oligonucleotide
  Antisense strand to SEQ ID NO: 502499
guugagacaagacugugag

SEQ ID NO: 502501 - RNA, 19 nt, Artificial Sequence
  Description of Artificial Sequence: Synthetic oligonucleotide
  Sense strand starting at position 396 of SEQ ID NO: 317666
ucaucauaccuccgucaug

SEQ ID NO: 502502 - RNA, 19 nt, Artificial Sequence
  Description of Artificial Sequence: Synthetic oligonucleotide
  Antisense strand to SEQ ID NO: 502501
caugacggagguaugauga

SEQ ID NO: 502503 - RNA, 19 nt, Artificial Sequence
  Description of Artificial Sequence: Synthetic oligonucleotide
  Sense strand starting at position 461 of SEQ ID NO: 317666
uguaacauguucuucucua

SEQ ID NO: 502504 - RNA, 19 nt, Artificial Sequence
  Description of Artificial Sequence: Synthetic oligonucleotide
  Antisense strand to SEQ ID NO: 502503
uagagaagaacauguuaca

SEQ ID NO: 502505 - RNA, 19 nt, Artificial Sequence
  Description of Artificial Sequence: Synthetic oligonucleotide
  Sense strand starting at position 462 of SEQ ID NO: 317666
guaacauguucuucucuag

SEQ ID NO: 502506 - RNA, 19 nt, Artificial Sequence
  Description of Artificial Sequence: Synthetic oligonucleotide
  Antisense strand to SEQ ID NO: 502505
cuagagaagaacauguuac

SEQ ID NO: 502507 - RNA, 19 nt, Artificial Sequence
  Description of Artificial Sequence: Synthetic oligonucleotide
  Sense strand starting at position 466 of SEQ ID NO: 317666
cauguucuucucuagaggu

SEQ ID NO: 502508 - RNA, 19 nt, Artificial Sequence
  Description of Artificial Sequence: Synthetic oligonucleotide
  Antisense strand to SEQ ID NO: 502507
accucuagagaagaacaug

SEQ ID NO: 502509 - RNA, 19 nt, Artificial Sequence
  Description of Artificial Sequence: Synthetic oligonucleotide
  Sense strand starting at position 474 of SEQ ID NO: 317666
ucucuagaggucugguaaa

SEQ ID NO: 502510 - RNA, 19 nt, Artificial Sequence
  Description of Artificial Sequence: Synthetic oligonucleotide
  Antisense strand to SEQ ID NO: 502509
uuuaccagaccucuagaga

SEQ ID NO: 502511 - RNA, 19 nt, Artificial Sequence
  Description of Artificial Sequence: Synthetic oligonucleotide
  Sense strand starting at position 552 of SEQ ID NO: 317666
auuagaaugcccuaggguu

SEQ ID NO: 502512 - RNA, 19 nt, Artificial Sequence
  Description of Artificial Sequence: Synthetic oligonucleotide
  Antisense strand to SEQ ID NO: 502511
aacccuagggcauucuaau

SEQ ID NO: 502513 - RNA, 19 nt, Artificial Sequence
  Description of Artificial Sequence: Synthetic oligonucleotide
  Sense strand starting at position 554 of SEQ ID NO: 317666
uagaaugcccuaggguuua

SEQ ID NO: 502514 - RNA, 19 nt, Artificial Sequence
  Description of Artificial Sequence: Synthetic oligonucleotide
  Antisense strand to SEQ ID NO: 502513
uaaacccuagggcauucua

SEQ ID NO: 502515 - RNA, 19 nt, Artificial Sequence
  Description of Artificial Sequence: Synthetic oligonucleotide
  Sense strand starting at position 559 of SEQ ID NO: 317666
ugcccuaggguuuauauaa

SEQ ID NO: 502516 - RNA, 19 nt, Artificial Sequence
  Description of Artificial Sequence: Synthetic oligonucleotide
  Antisense strand to SEQ ID NO: 502515
uuauauaaacccuagggca

SEQ ID NO: 502517 - RNA, 19 nt, Artificial Sequence
  Description of Artificial Sequence: Synthetic oligonucleotide
  Sense strand starting at position 589 of SEQ ID NO: 317666
uguugauguaggcaugauu

SEQ ID NO: 502518 - RNA, 19 nt, Artificial Sequence
  Description of Artificial Sequence: Synthetic oligonucleotide
  Antisense strand to SEQ ID NO: 502517
aaucaugccuacaucaaca

SEQ ID NO: 502519 - RNA, 19 nt, Artificial Sequence
  Description of Artificial Sequence: Synthetic oligonucleotide
  Sense strand starting at position 623 of SEQ ID NO: 317666
ugaggaaacugagaucuuc

SEQ ID NO: 502520 - RNA, 19 nt, Artificial Sequence
  Description of Artificial Sequence: Synthetic oligonucleotide
  Antisense strand to SEQ ID NO: 502519
gaagaucucaguuuccuca

SEQ ID NO: 502521 - RNA, 19 nt, Artificial Sequence
  Description of Artificial Sequence: Synthetic oligonucleotide
  Sense strand starting at position 856 of SEQ ID NO: 317666
cuagaacaugccuagcaaa

SEQ ID NO: 502522 - RNA, 19 nt, Artificial Sequence
  Description of Artificial Sequence: Synthetic oligonucleotide
  Antisense strand to SEQ ID NO: 502521
uuugcuaggcauguucuag

SEQ ID NO: 502523 - RNA, 19 nt, Artificial Sequence
  Description of Artificial Sequence: Synthetic oligonucleotide
  Sense strand starting at position 892 of SEQ ID NO: 317666
auaguucuagaaugacuga

SEQ ID NO: 502524 - RNA, 19 nt, Artificial Sequence
  Description of Artificial Sequence: Synthetic oligonucleotide
  Antisense strand to SEQ ID NO: 502523
ucagucauucuagaacuau

SEQ ID NO: 502525 - RNA, 19 nt, Artificial Sequence
  Description of Artificial Sequence: Synthetic oligonucleotide
  Sense strand starting at position 895 of SEQ ID NO: 317666
guucuagaaugacugaaug

SEQ ID NO: 502526 - RNA, 19 nt, Artificial Sequence
  Description of Artificial Sequence: Synthetic oligonucleotide
  Antisense strand to SEQ ID NO: 502525
cauucagucauucuagaac

SEQ ID NO: 502527 - RNA, 19 nt, Artificial Sequence
  Description of Artificial Sequence: Synthetic oligonucleotide
  Sense strand starting at position 922 of SEQ ID NO: 317666
auugaugaauugguguaua

SEQ ID NO: 502528 - RNA, 19 nt, Artificial Sequence
  Description of Artificial Sequence: Synthetic oligonucleotide
  Antisense strand to SEQ ID NO: 502527
uauacaccaauucaucaau

SEQ ID NO: 502529 - RNA, 19 nt, Artificial Sequence
  Description of Artificial Sequence: Synthetic oligonucleotide
  Sense strand starting at position 925 of SEQ ID NO: 317666
gaugaauugguguauagcu

SEQ ID NO: 502530 - RNA, 19 nt, Artificial Sequence
  Description of Artificial Sequence: Synthetic oligonucleotide
  Antisense strand to SEQ ID NO: 502529
agcuauacaccaauucauc

SEQ ID NO: 502531 - RNA, 19 nt, Artificial Sequence
  Description of Artificial Sequence: Synthetic oligonucleotide
  Sense strand starting at position 945 of SEQ ID NO: 317666
ccaagccugguuuaggaaa

SEQ ID NO: 502532 - RNA, 19 nt, Artificial Sequence
  Description of Artificial Sequence: Synthetic oligonucleotide
  Antisense strand to SEQ ID NO: 502531
uuuccuaaaccaggcuugg

SEQ ID NO: 502533 - RNA, 19 nt, Artificial Sequence
  Description of Artificial Sequence: Synthetic oligonucleotide
  Sense strand starting at position 1057 of SEQ ID NO: 317666
ggaggucugugauugcacu

SEQ ID NO: 502534 - RNA, 19 nt, Artificial Sequence
  Description of Artificial Sequence: Synthetic oligonucleotide
  Antisense strand to SEQ ID NO: 502533
agugcaaucacagaccucc

SEQ ID NO: 502535 - RNA, 19 nt, Artificial Sequence
  Description of Artificial Sequence: Synthetic oligonucleotide
  Sense strand starting at position 1058 of SEQ ID NO: 317666
gaggucugugauugcacua

SEQ ID NO: 502536 - RNA, 19 nt, Artificial Sequence
  Description of Artificial Sequence: Synthetic oligonucleotide
  Antisense strand to SEQ ID NO: 502535
uagugcaaucacagaccuc

SEQ ID NO: 502537 - RNA, 19 nt, Artificial Sequence
  Description of Artificial Sequence: Synthetic oligonucleotide
  Sense strand starting at position 1279 of SEQ ID NO: 317666
aagauuaagugacugacuu

SEQ ID NO: 502538 - RNA, 19 nt, Artificial Sequence
  Description of Artificial Sequence: Synthetic oligonucleotide
  Antisense strand to SEQ ID NO: 502537
aagucagucacuuaaucuu

SEQ ID NO: 502539 - RNA, 19 nt, Artificial Sequence
  Description of Artificial Sequence: Synthetic oligonucleotide
  Sense strand starting at position 1312 of SEQ ID NO: 317666
aauaaaucggagcaugagu

SEQ ID NO: 502540 - RNA, 19 nt, Artificial Sequence
  Description of Artificial Sequence: Synthetic oligonucleotide
  Antisense strand to SEQ ID NO: 502539
acucaugcuccgauuuauu

SEQ ID NO: 502541 - RNA, 19 nt, Artificial Sequence
  Description of Artificial Sequence: Synthetic oligonucleotide
  Sense strand starting at position 1319 of SEQ ID NO: 317666
cggagcaugagucacgaua

SEQ ID NO: 502542 - RNA, 19 nt, Artificial Sequence
  Description of Artificial Sequence: Synthetic oligonucleotide
  Antisense strand to SEQ ID NO: 502541
uaucgugacucaugcuccg

SEQ ID NO: 502543 - RNA, 19 nt, Artificial Sequence
  Description of Artificial Sequence: Synthetic oligonucleotide
  Sense strand starting at position 1328 of SEQ ID NO: 317666
agucacgauauaggagaua

SEQ ID NO: 502544 - RNA, 19 nt, Artificial Sequence
  Description of Artificial Sequence: Synthetic oligonucleotide
  Antisense strand to SEQ ID NO: 502543
uaucuccuauaucgugacu

SEQ ID NO: 502545 - RNA, 19 nt, Artificial Sequence
  Description of Artificial Sequence: Synthetic oligonucleotide
  Sense strand starting at position 2055 of SEQ ID NO: 317666
ugggcuggccugggauaau

SEQ ID NO: 502546 - RNA, 19 nt, Artificial Sequence
  Description of Artificial Sequence: Synthetic oligonucleotide
  Antisense strand to SEQ ID NO: 502545
auuaucccaggccagccca

SEQ ID NO: 502547 - RNA, 19 nt, Artificial Sequence
  Description of Artificial Sequence: Synthetic oligonucleotide
  Sense strand starting at position 2103 of SEQ ID NO: 317666
aagguuugguucucuggaa

SEQ ID NO: 502548 - RNA, 19 nt, Artificial Sequence
  Description of Artificial Sequence: Synthetic oligonucleotide
  Antisense strand to SEQ ID NO: 502547
uuccagagaaccaaaccuu

SEQ ID NO: 502549 - RNA, 19 nt, Artificial Sequence
  Description of Artificial Sequence: Synthetic oligonucleotide
  Sense strand starting at position 2104 of SEQ ID NO: 317666
agguuugguucucuggaaa

SEQ ID NO: 502550 - RNA, 19 nt, Artificial Sequence
  Description of Artificial Sequence: Synthetic oligonucleotide
  Antisense strand to SEQ ID NO: 502549
uuuccagagaaccaaaccu

SEQ ID NO: 502551 - RNA, 19 nt, Artificial Sequence
  Description of Artificial Sequence: Synthetic oligonucleotide
  Sense strand starting at position 2264 of SEQ ID NO: 317666
ccauauuguucuguacuaa

SEQ ID NO: 502552 - RNA, 19 nt, Artificial Sequence
  Description of Artificial Sequence: Synthetic oligonucleotide
  Antisense strand to SEQ ID NO: 502551
uuaguacagaacaauaugg

SEQ ID NO: 502553 - RNA, 19 nt, Artificial Sequence
  Description of Artificial Sequence: Synthetic oligonucleotide
  Sense strand starting at position 2434 of SEQ ID NO: 317666
ucguuaagucaucaccacu

SEQ ID NO: 502554 - RNA, 19 nt, Artificial Sequence
  Description of Artificial Sequence: Synthetic oligonucleotide
  Antisense strand to SEQ ID NO: 502553
aguggugaugacuuaacga

SEQ ID NO: 502555 - RNA, 19 nt, Artificial Sequence
  Description of Artificial Sequence: Synthetic oligonucleotide
  Sense strand starting at position 2536 of SEQ ID NO: 317666
cguguuuaucugcugaucu

SEQ ID NO: 502556 - RNA, 19 nt, Artificial Sequence
  Description of Artificial Sequence: Synthetic oligonucleotide
  Antisense strand to SEQ ID NO: 502555
agaucagcagauaaacacg

SEQ ID NO: 502557 - RNA, 19 nt, Artificial Sequence
  Description of Artificial Sequence: Synthetic oligonucleotide
  Sense strand starting at position 3357 of SEQ ID NO: 317666
ugaauaaaguaagacuuga

SEQ ID NO: 502558 - RNA, 19 nt, Artificial Sequence
  Description of Artificial Sequence: Synthetic oligonucleotide
  Antisense strand to SEQ ID NO: 502557
ucaagucuuacuuuauuca

SEQ ID NO: 502559 - RNA, 19 nt, Artificial Sequence
  Description of Artificial Sequence: Synthetic oligonucleotide
  Sense strand starting at position 3400 of SEQ ID NO: 317666
uuaaucuuuccuggcggau

SEQ ID NO: 502560 - RNA, 19 nt, Artificial Sequence
  Description of Artificial Sequence: Synthetic oligonucleotide
  Antisense strand to SEQ ID NO: 502559
auccgccaggaaagauuaa

SEQ ID NO: 502561 - RNA, 19 nt, Artificial Sequence
  Description of Artificial Sequence: Synthetic oligonucleotide
  Sense strand starting at position 3482 of SEQ ID NO: 317666
uaagaaagguaaucagguu

SEQ ID NO: 502562 - RNA, 19 nt, Artificial Sequence
  Description of Artificial Sequence: Synthetic oligonucleotide
  Antisense strand to SEQ ID NO: 502561
aaccugauuaccuuucuua

SEQ ID NO: 502563 - RNA, 19 nt, Artificial Sequence
  Description of Artificial Sequence: Synthetic oligonucleotide
  Sense strand starting at position 3737 of SEQ ID NO: 317666
gggaaaugggccuaauguu

SEQ ID NO: 502564 - RNA, 19 nt, Artificial Sequence
  Description of Artificial Sequence: Synthetic oligonucleotide
  Antisense strand to SEQ ID NO: 502563
aacauuaggcccauuuccc

SEQ ID NO: 502565 - RNA, 19 nt, Artificial Sequence
  Description of Artificial Sequence: Synthetic oligonucleotide
  Sense strand starting at position 3743 of SEQ ID NO: 317666
ugggccuaauguuuguaau

SEQ ID NO: 502566 - RNA, 19 nt, Artificial Sequence
  Description of Artificial Sequence: Synthetic oligonucleotide
  Antisense strand to SEQ ID NO: 502565
auuacaaacauuaggccca

SEQ ID NO: 502567 - RNA, 19 nt, Artificial Sequence
  Description of Artificial Sequence: Synthetic oligonucleotide
  Sense strand starting at position 3744 of SEQ ID NO: 317666
gggccuaauguuuguaaua

SEQ ID NO: 502568 - RNA, 19 nt, Artificial Sequence
  Description of Artificial Sequence: Synthetic oligonucleotide
  Antisense strand to SEQ ID NO: 502567
uauuacaaacauuaggccc

SEQ ID NO: 502569 - RNA, 19 nt, Artificial Sequence
  Description of Artificial Sequence: Synthetic oligonucleotide
  Sense strand starting at position 3745 of SEQ ID NO: 317666
ggccuaauguuuguaauag

SEQ ID NO: 502570 - RNA, 19 nt, Artificial Sequence
  Description of Artificial Sequence: Synthetic oligonucleotide
  Antisense strand to SEQ ID NO: 502569
cuauuacaaacauuaggcc

SEQ ID NO: 502571 - RNA, 19 nt, Artificial Sequence
  Description of Artificial Sequence: Synthetic oligonucleotide
  Sense strand starting at position 3787 of SEQ ID NO: 317666
guaaguugaauugaguauu

SEQ ID NO: 502572 - RNA, 19 nt, Artificial Sequence
  Description of Artificial Sequence: Synthetic oligonucleotide
  Antisense strand to SEQ ID NO: 502571
aauacucaauucaacuuac

SEQ ID NO: 502573 - RNA, 19 nt, Artificial Sequence
  Description of Artificial Sequence: Synthetic oligonucleotide
  Sense strand starting at position 3962 of SEQ ID NO: 317666
gcagcagaucaauggaaag

SEQ ID NO: 502574 - RNA, 19 nt, Artificial Sequence
  Description of Artificial Sequence: Synthetic oligonucleotide
  Antisense strand to SEQ ID NO: 502573
cuuuccauugaucugcugc

SEQ ID NO: 502575 - RNA, 19 nt, Artificial Sequence
  Description of Artificial Sequence: Synthetic oligonucleotide
  Sense strand starting at position 2 of SEQ ID NO: 317667
acuaguuaucucgauauga

SEQ ID NO: 502576 - RNA, 19 nt, Artificial Sequence
  Description of Artificial Sequence: Synthetic oligonucleotide
  Antisense strand to SEQ ID NO: 502575
ucauaucgagauaacuagu

SEQ ID NO: 502577 - RNA, 19 nt, Artificial Sequence
  Description of Artificial Sequence: Synthetic oligonucleotide
  Sense strand starting at position 4 of SEQ ID NO: 317667
uaguuaucucgauaugauu

SEQ ID NO: 502578 - RNA, 19 nt, Artificial Sequence
  Description of Artificial Sequence: Synthetic oligonucleotide
  Antisense strand to SEQ ID NO: 502577
aaucauaucgagauaacua

SEQ ID NO: 502579 - RNA, 19 nt, Artificial Sequence
  Description of Artificial Sequence: Synthetic oligonucleotide
  Sense strand starting at position 12 of SEQ ID NO: 317667
ucgauaugauucuuacaug

SEQ ID NO: 502580 - RNA, 19 nt, Artificial Sequence
  Description of Artificial Sequence: Synthetic oligonucleotide
  Antisense strand to SEQ ID NO: 502579
cauguaagaaucauaucga

SEQ ID NO: 502581 - RNA, 19 nt, Artificial Sequence
  Description of Artificial Sequence: Synthetic oligonucleotide
  Sense strand starting at position 113 of SEQ ID NO: 317667
auaggaaaggcucgaguga

SEQ ID NO: 502582 - RNA, 19 nt, Artificial Sequence
  Description of Artificial Sequence: Synthetic oligonucleotide
  Antisense strand to SEQ ID NO: 502581
ucacucgagccuuuccuau

SEQ ID NO: 502583 - RNA, 19 nt, Artificial Sequence
  Description of Artificial Sequence: Synthetic oligonucleotide
  Sense strand starting at position 114 of SEQ ID NO: 317667
uaggaaaggcucgagugaa

SEQ ID NO: 502584 - RNA, 19 nt, Artificial Sequence
  Description of Artificial Sequence: Synthetic oligonucleotide
  Antisense strand to SEQ ID NO: 502583
uucacucgagccuuuccua

SEQ ID NO: 502585 - RNA, 19 nt, Artificial Sequence
  Description of Artificial Sequence: Synthetic oligonucleotide
  Sense strand starting at position 202 of SEQ ID NO: 317667
guaggaaguguucaaaguc

SEQ ID NO: 502586 - RNA, 19 nt, Artificial Sequence
  Description of Artificial Sequence: Synthetic oligonucleotide
  Antisense strand to SEQ ID NO: 502585
gacuuugaacacuuccuac

SEQ ID NO: 502587 - RNA, 19 nt, Artificial Sequence
  Description of Artificial Sequence: Synthetic oligonucleotide
  Sense strand starting at position 377 of SEQ ID NO: 317667
ucuagagaauaugccauau

SEQ ID NO: 502588 - RNA, 19 nt, Artificial Sequence
  Description of Artificial Sequence: Synthetic oligonucleotide
  Antisense strand to SEQ ID NO: 502587
auauggcauauucucuaga

SEQ ID NO: 502589 - RNA, 19 nt, Artificial Sequence
  Description of Artificial Sequence: Synthetic oligonucleotide
  Sense strand starting at position 381 of SEQ ID NO: 317667
gagaauaugccauauugug

SEQ ID NO: 502590 - RNA, 19 nt, Artificial Sequence
  Description of Artificial Sequence: Synthetic oligonucleotide
  Antisense strand to SEQ ID NO: 502589
cacaauauggcauauucuc

SEQ ID NO: 502591 - RNA, 19 nt, Artificial Sequence
  Description of Artificial Sequence: Synthetic oligonucleotide
  Sense strand starting at position 439 of SEQ ID NO: 317667
uacaaugugggcuacauau

SEQ ID NO: 502592 - RNA, 19 nt, Artificial Sequence
  Description of Artificial Sequence: Synthetic oligonucleotide
  Antisense strand to SEQ ID NO: 502591
auauguagcccacauugua

SEQ ID NO: 502593 - RNA, 19 nt, Artificial Sequence
  Description of Artificial Sequence: Synthetic oligonucleotide
  Sense strand starting at position 441 of SEQ ID NO: 317667
caaugugggcuacauauua

SEQ ID NO: 502594 - RNA, 19 nt, Artificial Sequence
  Description of Artificial Sequence: Synthetic oligonucleotide
  Antisense strand to SEQ ID NO: 502593
uaauauguagcccacauug

SEQ ID NO: 502595 - RNA, 19 nt, Artificial Sequence
  Description of Artificial Sequence: Synthetic oligonucleotide
  Sense strand starting at position 513 of SEQ ID NO: 317667
ccaaacagauauucgucaa

SEQ ID NO: 502596 - RNA, 19 nt, Artificial Sequence
  Description of Artificial Sequence: Synthetic oligonucleotide
  Antisense strand to SEQ ID NO: 502595
uugacgaauaucuguuugg

SEQ ID NO: 502597 - RNA, 19 nt, Artificial Sequence
  Description of Artificial Sequence: Synthetic oligonucleotide
  Sense strand starting at position 516 of SEQ ID NO: 317667
aacagauauucgucaaacg

SEQ ID NO: 502598 - RNA, 19 nt, Artificial Sequence
  Description of Artificial Sequence: Synthetic oligonucleotide
  Antisense strand to SEQ ID NO: 502597
cguuugacgaauaucuguu

SEQ ID NO: 502599 - RNA, 19 nt, Artificial Sequence
  Description of Artificial Sequence: Synthetic oligonucleotide
  Sense strand starting at position 517 of SEQ ID NO: 317667
acagauauucgucaaacga

SEQ ID NO: 502600 - RNA, 19 nt, Artificial Sequence
  Description of Artificial Sequence: Synthetic oligonucleotide
  Antisense strand to SEQ ID NO: 502599
ucguuugacgaauaucugu

SEQ ID NO: 502601 - RNA, 19 nt, Artificial Sequence
  Description of Artificial Sequence: Synthetic oligonucleotide
  Sense strand starting at position 543 of SEQ ID NO: 317667
acacaaaucuccgauuugu

SEQ ID NO: 502602 - RNA, 19 nt, Artificial Sequence
  Description of Artificial Sequence: Synthetic oligonucleotide
  Antisense strand to SEQ ID NO: 502601
acaaaucggagauuugugu

SEQ ID NO: 502603 - RNA, 19 nt, Artificial Sequence
  Description of Artificial Sequence: Synthetic oligonucleotide
  Sense strand starting at position 611 of SEQ ID NO: 317667
auaggugcauauucuagau

SEQ ID NO: 502604 - RNA, 19 nt, Artificial Sequence
  Description of Artificial Sequence: Synthetic oligonucleotide
  Antisense strand to SEQ ID NO: 502603
aucuagaauaugcaccuau

SEQ ID NO: 502605 - RNA, 19 nt, Artificial Sequence
  Description of Artificial Sequence: Synthetic oligonucleotide
  Sense strand starting at position 615 of SEQ ID NO: 317667
gugcauauucuagauaaau

SEQ ID NO: 502606 - RNA, 19 nt, Artificial Sequence
  Description of Artificial Sequence: Synthetic oligonucleotide
  Antisense strand to SEQ ID NO: 502605
auuuaucuagaauaugcac

SEQ ID NO: 502607 - RNA, 19 nt, Artificial Sequence
  Description of Artificial Sequence: Synthetic oligonucleotide
  Sense strand starting at position 624 of SEQ ID NO: 317667
cuagauaaauauccguuua

SEQ ID NO: 502608 - RNA, 19 nt, Artificial Sequence
  Description of Artificial Sequence: Synthetic oligonucleotide
  Antisense strand to SEQ ID NO: 502607
uaaacggauauuuaucuag

SEQ ID NO: 502609 - RNA, 19 nt, Artificial Sequence
  Description of Artificial Sequence: Synthetic oligonucleotide
  Sense strand starting at position 626 of SEQ ID NO: 317667
agauaaauauccguuuaag

SEQ ID NO: 502610 - RNA, 19 nt, Artificial Sequence
  Description of Artificial Sequence: Synthetic oligonucleotide
  Antisense strand to SEQ ID NO: 502609
cuuaaacggauauuuaucu

SEQ ID NO: 502611 - RNA, 19 nt, Artificial Sequence
  Description of Artificial Sequence: Synthetic oligonucleotide
  Sense strand starting at position 869 of SEQ ID NO: 317667
gagcuugcagcgcuagauu

SEQ ID NO: 502612 - RNA, 19 nt, Artificial Sequence
  Description of Artificial Sequence: Synthetic oligonucleotide
  Antisense strand to SEQ ID NO: 502611
aaucuagcgcugcaagcuc

SEQ ID NO: 502613 - RNA, 19 nt, Artificial Sequence
  Description of Artificial Sequence: Synthetic oligonucleotide
  Sense strand starting at position 963 of SEQ ID NO: 317667
cuucuuuagugguccauga

SEQ ID NO: 502614 - RNA, 19 nt, Artificial Sequence
  Description of Artificial Sequence: Synthetic oligonucleotide
  Antisense strand to SEQ ID NO: 502613
ucauggaccacuaaagaag

SEQ ID NO: 502615 - RNA, 19 nt, Artificial Sequence
  Description of Artificial Sequence: Synthetic oligonucleotide
  Sense strand starting at position 965 of SEQ ID NO: 317667
ucuuuagugguccaugaaa

SEQ ID NO: 502616 - RNA, 19 nt, Artificial Sequence
  Description of Artificial Sequence: Synthetic oligonucleotide
  Antisense strand to SEQ ID NO: 502615
uuucauggaccacuaaaga

SEQ ID NO: 502617 - RNA, 19 nt, Artificial Sequence
  Description of Artificial Sequence: Synthetic oligonucleotide
  Sense strand starting at position 1071 of SEQ ID NO: 317667
ccggcuuaucaggacacau

SEQ ID NO: 502618 - RNA, 19 nt, Artificial Sequence
  Description of Artificial Sequence: Synthetic oligonucleotide
  Antisense strand to SEQ ID NO: 502617
auguguccugauaagccgg

SEQ ID NO: 502619 - RNA, 19 nt, Artificial Sequence
  Description of Artificial Sequence: Synthetic oligonucleotide
  Sense strand starting at position 1079 of SEQ ID NO: 317667
ucaggacacauucgggaua

SEQ ID NO: 502620 - RNA, 19 nt, Artificial Sequence
  Description of Artificial Sequence: Synthetic oligonucleotide
  Antisense strand to SEQ ID NO: 502619
uaucccgaauguguccuga

SEQ ID NO: 502621 - RNA, 19 nt, Artificial Sequence
  Description of Artificial Sequence: Synthetic oligonucleotide
  Sense strand starting at position 1140 of SEQ ID NO: 317667
ggaaguaccugggaaauca

SEQ ID NO: 502622 - RNA, 19 nt, Artificial Sequence
  Description of Artificial Sequence: Synthetic oligonucleotide
  Antisense strand to SEQ ID NO: 502621
ugauuucccagguacuucc

SEQ ID NO: 502623 - RNA, 19 nt, Artificial Sequence
  Description of Artificial Sequence: Synthetic oligonucleotide
  Sense strand starting at position 1257 of SEQ ID NO: 317667
uuaauuagagcugagguuu

SEQ ID NO: 502624 - RNA, 19 nt, Artificial Sequence
  Description of Artificial Sequence: Synthetic oligonucleotide
  Antisense strand to SEQ ID NO: 502623
aaaccucagcucuaauuaa

SEQ ID NO: 502625 - RNA, 19 nt, Artificial Sequence
  Description of Artificial Sequence: Synthetic oligonucleotide
  Sense strand starting at position 1270 of SEQ ID NO: 317667
agguuuacauaaucgcaaa

SEQ ID NO: 502626 - RNA, 19 nt, Artificial Sequence
  Description of Artificial Sequence: Synthetic oligonucleotide
  Antisense strand to SEQ ID NO: 502625
uuugcgauuauguaaaccu

SEQ ID NO: 502627 - RNA, 19 nt, Artificial Sequence
  Description of Artificial Sequence: Synthetic oligonucleotide
  Sense strand starting at position 1960 of SEQ ID NO: 317667
gcagaagguucugcugaca

SEQ ID NO: 502628 - RNA, 19 nt, Artificial Sequence
  Description of Artificial Sequence: Synthetic oligonucleotide
  Antisense strand to SEQ ID NO: 502627
ugucagcagaaccuucugc

SEQ ID NO: 502629 - RNA, 19 nt, Artificial Sequence
  Description of Artificial Sequence: Synthetic oligonucleotide
  Sense strand starting at position 2825 of SEQ ID NO: 317667
gucugcugcaguuugcaaa

SEQ ID NO: 502630 - RNA, 19 nt, Artificial Sequence
  Description of Artificial Sequence: Synthetic oligonucleotide
  Antisense strand to SEQ ID NO: 502629
uuugcaaacugcagcagac

SEQ ID NO: 502631 - RNA, 19 nt, Artificial Sequence
  Description of Artificial Sequence: Synthetic oligonucleotide
  Sense strand starting at position 2932 of SEQ ID NO: 317667
agaggaaaguguguucugu

SEQ ID NO: 502632 - RNA, 19 nt, Artificial Sequence
  Description of Artificial Sequence: Synthetic oligonucleotide
  Antisense strand to SEQ ID NO: 502631
acagaacacacuuuccucu

SEQ ID NO: 502633 - RNA, 19 nt, Artificial Sequence
  Description of Artificial Sequence: Synthetic oligonucleotide
  Sense strand starting at position 2934 of SEQ ID NO: 317667
aggaaaguguguucuguuu

SEQ ID NO: 502634 - RNA, 19 nt, Artificial Sequence
  Description of Artificial Sequence: Synthetic oligonucleotide
  Antisense strand to SEQ ID NO: 502633
aaacagaacacacuuuccu

SEQ ID NO: 502635 - RNA, 19 nt, Artificial Sequence
  Description of Artificial Sequence: Synthetic oligonucleotide
  Sense strand starting at position 2997 of SEQ ID NO: 317667
cugagaguuugaccuaaag

SEQ ID NO: 502636 - RNA, 19 nt, Artificial Sequence
  Description of Artificial Sequence: Synthetic oligonucleotide
  Antisense strand to SEQ ID NO: 502635
cuuuaggucaaacucucag

SEQ ID NO: 502637 - RNA, 19 nt, Artificial Sequence
  Description of Artificial Sequence: Synthetic oligonucleotide
  Sense strand starting at position 3337 of SEQ ID NO: 317667
guaagaaacuaucuuguac

SEQ ID NO: 502638 - RNA, 19 nt, Artificial Sequence
  Description of Artificial Sequence: Synthetic oligonucleotide
  Antisense strand to SEQ ID NO: 502637
guacaagauaguuucuuac

SEQ ID NO: 502639 - RNA, 19 nt, Artificial Sequence
  Description of Artificial Sequence: Synthetic oligonucleotide
  Sense strand starting at position 3461 of SEQ ID NO: 317667
aguguuaaauguuuccaua

SEQ ID NO: 502640 - RNA, 19 nt, Artificial Sequence
  Description of Artificial Sequence: Synthetic oligonucleotide
  Antisense strand to SEQ ID NO: 502639
uauggaaacauuuaacacu

SEQ ID NO: 502641 - RNA, 19 nt, Artificial Sequence
  Description of Artificial Sequence: Synthetic oligonucleotide
  Sense strand starting at position 3540 of SEQ ID NO: 317667
augguuugaacccggaaga

SEQ ID NO: 502642 - RNA, 19 nt, Artificial Sequence
  Description of Artificial Sequence: Synthetic oligonucleotide
  Antisense strand to SEQ ID NO: 502641
ucuuccggguucaaaccau

SEQ ID NO: 502643 - RNA, 19 nt, Artificial Sequence
  Description of Artificial Sequence: Synthetic oligonucleotide
  Sense strand starting at position 3722 of SEQ ID NO: 317667
gcuaauuuaccuuguagcu

SEQ ID NO: 502644 - RNA, 19 nt, Artificial Sequence
  Description of Artificial Sequence: Synthetic oligonucleotide
  Antisense strand to SEQ ID NO: 502643
agcuacaagguaaauuagc

SEQ ID NO: 502645 - RNA, 19 nt, Artificial Sequence
  Description of Artificial Sequence: Synthetic oligonucleotide
  Sense strand starting at position 3809 of SEQ ID NO: 317667
gucaaauagcaauacugua

SEQ ID NO: 502646 - RNA, 19 nt, Artificial Sequence
  Description of Artificial Sequence: Synthetic oligonucleotide
  Antisense strand to SEQ ID NO: 502645
uacaguauugcuauuugac

SEQ ID NO: 502647 - RNA, 19 nt, Artificial Sequence
  Description of Artificial Sequence: Synthetic oligonucleotide
  Sense strand starting at position 3882 of SEQ ID NO: 317667
gagcaaguuccugaaaggu

SEQ ID NO: 502648 - RNA, 19 nt, Artificial Sequence
  Description of Artificial Sequence: Synthetic oligonucleotide
  Antisense strand to SEQ ID NO: 502647
accuuucaggaacuugcuc

SEQ ID NO: 502649 - RNA, 19 nt, Artificial Sequence
  Description of Artificial Sequence: Synthetic oligonucleotide
  Sense strand starting at position 3939 of SEQ ID NO: 317667
aagggagcuuguuauuuaa

SEQ ID NO: 502650 - RNA, 19 nt, Artificial Sequence
  Description of Artificial Sequence: Synthetic oligonucleotide
  Antisense strand to SEQ ID NO: 502649
uuaaauaacaagcucccuu

SEQ ID NO: 502651 - RNA, 19 nt, Artificial Sequence
  Description of Artificial Sequence: Synthetic oligonucleotide
  Sense strand starting at position 3957 of SEQ ID NO: 317667
aaggaauucucugggaaag

SEQ ID NO: 502652 - RNA, 19 nt, Artificial Sequence
  Description of Artificial Sequence: Synthetic oligonucleotide
  Antisense strand to SEQ ID NO: 502651
cuuucccagagaauuccuu

SEQ ID NO: 502653 - RNA, 19 nt, Artificial Sequence
  Description of Artificial Sequence: Synthetic oligonucleotide
  Sense strand starting at position 3959 of SEQ ID NO: 317667
ggaauucucugggaaagag

SEQ ID NO: 502654 - RNA, 19 nt, Artificial Sequence
  Description of Artificial Sequence: Synthetic oligonucleotide
  Antisense strand to SEQ ID NO: 502653
cucuuucccagagaauucc

SEQ ID NO: 502655 - RNA, 19 nt, Artificial Sequence
  Description of Artificial Sequence: Synthetic oligonucleotide
  Sense strand starting at position 89 of SEQ ID NO: 317668
aaacaaucacgguacagua

SEQ ID NO: 502656 - RNA, 19 nt, Artificial Sequence
  Description of Artificial Sequence: Synthetic oligonucleotide
  Antisense strand to SEQ ID NO: 502655
uacuguaccgugauuguuu

SEQ ID NO: 502657 - RNA, 19 nt, Artificial Sequence
  Description of Artificial Sequence: Synthetic oligonucleotide
  Sense strand starting at position 99 of SEQ ID NO: 317668
gguacaguacucuacgcaa

SEQ ID NO: 502658 - RNA, 19 nt, Artificial Sequence
  Description of Artificial Sequence: Synthetic oligonucleotide
  Antisense strand to SEQ ID NO: 502657
uugcguagaguacuguacc

SEQ ID NO: 502659 - RNA, 19 nt, Artificial Sequence
  Description of Artificial Sequence: Synthetic oligonucleotide
  Sense strand starting at position 429 of SEQ ID NO: 317668
agaaguuaaugccuaccau

SEQ ID NO: 502660 - RNA, 19 nt, Artificial Sequence
  Description of Artificial Sequence: Synthetic oligonucleotide
  Antisense strand to SEQ ID NO: 502659
augguaggcauuaacuucu

SEQ ID NO: 502661 - RNA, 19 nt, Artificial Sequence
  Description of Artificial Sequence: Synthetic oligonucleotide
  Sense strand starting at position 470 of SEQ ID NO: 317668
auguguacacauuagagua

SEQ ID NO: 502662 - RNA, 19 nt, Artificial Sequence
  Description of Artificial Sequence: Synthetic oligonucleotide
  Antisense strand to SEQ ID NO: 502661
uacucuaauguguacacau

SEQ ID NO: 502663 - RNA, 19 nt, Artificial Sequence
  Description of Artificial Sequence: Synthetic oligonucleotide
  Sense strand starting at position 776 of SEQ ID NO: 317668
ugagaucacguguauucua

SEQ ID NO: 502664 - RNA, 19 nt, Artificial Sequence
  Description of Artificial Sequence: Synthetic oligonucleotide
  Antisense strand to SEQ ID NO: 502663
uagaauacacgugaucuca

SEQ ID NO: 502665 - RNA, 19 nt, Artificial Sequence
  Description of Artificial Sequence: Synthetic oligonucleotide
  Sense strand starting at position 783 of SEQ ID NO: 317668
acguguauucuagcgugga

SEQ ID NO: 502666 - RNA, 19 nt, Artificial Sequence
  Description of Artificial Sequence: Synthetic oligonucleotide
  Antisense strand to SEQ ID NO: 502665
uccacgcuagaauacacgu

SEQ ID NO: 502667 - RNA, 19 nt, Artificial Sequence
  Description of Artificial Sequence: Synthetic oligonucleotide
  Sense strand starting at position 928 of SEQ ID NO: 317668
cagggaugcccuggaacuu

SEQ ID NO: 502668 - RNA, 19 nt, Artificial Sequence
  Description of Artificial Sequence: Synthetic oligonucleotide
  Antisense strand to SEQ ID NO: 502667
aaguuccagggcaucccug

SEQ ID NO: 502669 - RNA, 19 nt, Artificial Sequence
  Description of Artificial Sequence: Synthetic oligonucleotide
  Sense strand starting at position 1533 of SEQ ID NO: 317668
gagccuuaccucggacacu

SEQ ID NO: 502670 - RNA, 19 nt, Artificial Sequence
  Description of Artificial Sequence: Synthetic oligonucleotide
  Antisense strand to SEQ ID NO: 502669
aguguccgagguaaggcuc

SEQ ID NO: 502671 - RNA, 19 nt, Artificial Sequence
  Description of Artificial Sequence: Synthetic oligonucleotide
  Sense strand starting at position 2039 of SEQ ID NO: 317668
gcugcagaucauuggccaa

SEQ ID NO: 502672 - RNA, 19 nt, Artificial Sequence
  Description of Artificial Sequence: Synthetic oligonucleotide
  Antisense strand to SEQ ID NO: 502671
uuggccaaugaucugcagc

SEQ ID NO: 502673 - RNA, 19 nt, Artificial Sequence
  Description of Artificial Sequence: Synthetic oligonucleotide
  Sense strand starting at position 2042 of SEQ ID NO: 317668
gcagaucauuggccaaagu

SEQ ID NO: 502674 - RNA, 19 nt, Artificial Sequence
  Description of Artificial Sequence: Synthetic oligonucleotide
  Antisense strand to SEQ ID NO: 502673
acuuuggccaaugaucugc

SEQ ID NO: 502675 - RNA, 19 nt, Artificial Sequence
  Description of Artificial Sequence: Synthetic oligonucleotide
  Sense strand starting at position 2250 of SEQ ID NO: 317668
uggccuuguggucagucau

SEQ ID NO: 502676 - RNA, 19 nt, Artificial Sequence
  Description of Artificial Sequence: Synthetic oligonucleotide
  Antisense strand to SEQ ID NO: 502675
augacugaccacaaggcca

SEQ ID NO: 502677 - RNA, 19 nt, Artificial Sequence
  Description of Artificial Sequence: Synthetic oligonucleotide
  Sense strand starting at position 2275 of SEQ ID NO: 317668
cccgaacaaugggagaauu

SEQ ID NO: 502678 - RNA, 19 nt, Artificial Sequence
  Description of Artificial Sequence: Synthetic oligonucleotide
  Antisense strand to SEQ ID NO: 502677
aauucucccauuguucggg

SEQ ID NO: 502679 - RNA, 19 nt, Artificial Sequence
  Description of Artificial Sequence: Synthetic oligonucleotide
  Sense strand starting at position 2302 of SEQ ID NO: 317668
ccauaaagugucggucacu

SEQ ID NO: 502680 - RNA, 19 nt, Artificial Sequence
  Description of Artificial Sequence: Synthetic oligonucleotide
  Antisense strand to SEQ ID NO: 502679
agugaccgacacuuuaugg

SEQ ID NO: 502681 - RNA, 19 nt, Artificial Sequence
  Description of Artificial Sequence: Synthetic oligonucleotide
  Sense strand starting at position 2303 of SEQ ID NO: 317668
cauaaagugucggucacuu

SEQ ID NO: 502682 - RNA, 19 nt, Artificial Sequence
  Description of Artificial Sequence: Synthetic oligonucleotide
  Antisense strand to SEQ ID NO: 502681
aagugaccgacacuuuaug

SEQ ID NO: 502683 - RNA, 19 nt, Artificial Sequence
  Description of Artificial Sequence: Synthetic oligonucleotide
  Sense strand starting at position 2329 of SEQ ID NO: 317668
ggacgucgcgugguacaau

SEQ ID NO: 502684 - RNA, 19 nt, Artificial Sequence
  Description of Artificial Sequence: Synthetic oligonucleotide
  Antisense strand to SEQ ID NO: 502683
auuguaccacgcgacgucc

SEQ ID NO: 502685 - RNA, 19 nt, Artificial Sequence
  Description of Artificial Sequence: Synthetic oligonucleotide
  Sense strand starting at position 2341 of SEQ ID NO: 317668
guacaauuggccuguggga

SEQ ID NO: 502686 - RNA, 19 nt, Artificial Sequence
  Description of Artificial Sequence: Synthetic oligonucleotide
  Antisense strand to SEQ ID NO: 502685
ucccacaggccaauuguac

SEQ ID NO: 502687 - RNA, 19 nt, Artificial Sequence
  Description of Artificial Sequence: Synthetic oligonucleotide
  Sense strand starting at position 2343 of SEQ ID NO: 317668
acaauuggccugugggagu

SEQ ID NO: 502688 - RNA, 19 nt, Artificial Sequence
  Description of Artificial Sequence: Synthetic oligonucleotide
  Antisense strand to SEQ ID NO: 502687
acucccacaggccaauugu

SEQ ID NO: 502689 - RNA, 19 nt, Artificial Sequence
  Description of Artificial Sequence: Synthetic oligonucleotide
  Sense strand starting at position 2392 of SEQ ID NO: 317668
gggaaagggccgggaaauu

SEQ ID NO: 502690 - RNA, 19 nt, Artificial Sequence
  Description of Artificial Sequence: Synthetic oligonucleotide
  Antisense strand to SEQ ID NO: 502689
aauuucccggcccuuuccc

SEQ ID NO: 502691 - RNA, 19 nt, Artificial Sequence
  Description of Artificial Sequence: Synthetic oligonucleotide
  Sense strand starting at position 2401 of SEQ ID NO: 317668
ccgggaaauuuccacuucu

SEQ ID NO: 502692 - RNA, 19 nt, Artificial Sequence
  Description of Artificial Sequence: Synthetic oligonucleotide
  Antisense strand to SEQ ID NO: 502691
agaaguggaaauuucccgg

SEQ ID NO: 502693 - RNA, 19 nt, Artificial Sequence
  Description of Artificial Sequence: Synthetic oligonucleotide
  Sense strand starting at position 2438 of SEQ ID NO: 317668
agugaugacccgcaagaau

SEQ ID NO: 502694 - RNA, 19 nt, Artificial Sequence
  Description of Artificial Sequence: Synthetic oligonucleotide
  Antisense strand to SEQ ID NO: 502693
auucuugcgggucaucacu

SEQ ID NO: 502695 - RNA, 19 nt, Artificial Sequence
  Description of Artificial Sequence: Synthetic oligonucleotide
  Sense strand starting at position 2446 of SEQ ID NO: 317668
cccgcaagaauuggucaaa

SEQ ID NO: 502696 - RNA, 19 nt, Artificial Sequence
  Description of Artificial Sequence: Synthetic oligonucleotide
  Antisense strand to SEQ ID NO: 502695
uuugaccaauucuugcggg

SEQ ID NO: 502697 - RNA, 19 nt, Artificial Sequence
  Description of Artificial Sequence: Synthetic oligonucleotide
  Sense strand starting at position 2447 of SEQ ID NO: 317668
ccgcaagaauuggucaaau

SEQ ID NO: 502698 - RNA, 19 nt, Artificial Sequence
  Description of Artificial Sequence: Synthetic oligonucleotide
  Antisense strand to SEQ ID NO: 502697
auuugaccaauucuugcgg

SEQ ID NO: 502699 - RNA, 19 nt, Artificial Sequence
  Description of Artificial Sequence: Synthetic oligonucleotide
  Sense strand starting at position 2457 of SEQ ID NO: 317668
uggucaaauuuggaguaga

SEQ ID NO: 502700 - RNA, 19 nt, Artificial Sequence
  Description of Artificial Sequence: Synthetic oligonucleotide
  Antisense strand to SEQ ID NO: 502699
ucuacuccaaauuugacca

SEQ ID NO: 502701 - RNA, 19 nt, Artificial Sequence
  Description of Artificial Sequence: Synthetic oligonucleotide
  Sense strand starting at position 2492 of SEQ ID NO: 317668
gugaaacuucuacgucaag

SEQ ID NO: 502702 - RNA, 19 nt, Artificial Sequence
  Description of Artificial Sequence: Synthetic oligonucleotide
  Antisense strand to SEQ ID NO: 502701
cuugacguagaaguuucac

SEQ ID NO: 502703 - RNA, 19 nt, Artificial Sequence
  Description of Artificial Sequence: Synthetic oligonucleotide
  Sense strand starting at position 2495 of SEQ ID NO: 317668
aaacuucuacgucaaggau

SEQ ID NO: 502704 - RNA, 19 nt, Artificial Sequence
  Description of Artificial Sequence: Synthetic oligonucleotide
  Antisense strand to SEQ ID NO: 502703
auccuugacguagaaguuu

SEQ ID NO: 502705 - RNA, 19 nt, Artificial Sequence
  Description of Artificial Sequence: Synthetic oligonucleotide
  Sense strand starting at position 2567 of SEQ ID NO: 317668
gagacuauggccggagaau

SEQ ID NO: 502706 - RNA, 19 nt, Artificial Sequence
  Description of Artificial Sequence: Synthetic oligonucleotide
  Antisense strand to SEQ ID NO: 502705
auucuccggccauagucuc

SEQ ID NO: 502707 - RNA, 19 nt, Artificial Sequence
  Description of Artificial Sequence: Synthetic oligonucleotide
  Sense strand starting at position 2605 of SEQ ID NO: 317668
aaaggaagccaucagucuu

SEQ ID NO: 502708 - RNA, 19 nt, Artificial Sequence
  Description of Artificial Sequence: Synthetic oligonucleotide
  Antisense strand to SEQ ID NO: 502707
aagacugauggcuuccuuu

SEQ ID NO: 502709 - RNA, 19 nt, Artificial Sequence
  Description of Artificial Sequence: Synthetic oligonucleotide
  Sense strand starting at position 2704 of SEQ ID NO: 317668
ggugaagauguguaaccua

SEQ ID NO: 502710 - RNA, 19 nt, Artificial Sequence
  Description of Artificial Sequence: Synthetic oligonucleotide
  Antisense strand to SEQ ID NO: 502709
uagguuacacaucuucacc

SEQ ID NO: 502711 - RNA, 19 nt, Artificial Sequence
  Description of Artificial Sequence: Synthetic oligonucleotide
  Sense strand starting at position 3024 of SEQ ID NO: 317668
ggaacugucccacguagga

SEQ ID NO: 502712 - RNA, 19 nt, Artificial Sequence
  Description of Artificial Sequence: Synthetic oligonucleotide
  Antisense strand to SEQ ID NO: 502711
uccuacgugggacaguucc

SEQ ID NO: 502713 - RNA, 19 nt, Artificial Sequence
  Description of Artificial Sequence: Synthetic oligonucleotide
  Sense strand starting at position 3118 of SEQ ID NO: 317668
ggcaguuucgaguucuggu

SEQ ID NO: 502714 - RNA, 19 nt, Artificial Sequence
  Description of Artificial Sequence: Synthetic oligonucleotide
  Antisense strand to SEQ ID NO: 502713
accagaacucgaaacugcc

SEQ ID NO: 502715 - RNA, 19 nt, Artificial Sequence
  Description of Artificial Sequence: Synthetic oligonucleotide
  Sense strand starting at position 3119 of SEQ ID NO: 317668
gcaguuucgaguucuggug

SEQ ID NO: 502716 - RNA, 19 nt, Artificial Sequence
  Description of Artificial Sequence: Synthetic oligonucleotide
  Antisense strand to SEQ ID NO: 502715
caccagaacucgaaacugc

SEQ ID NO: 502717 - RNA, 19 nt, Artificial Sequence
  Description of Artificial Sequence: Synthetic oligonucleotide
  Sense strand starting at position 3165 of SEQ ID NO: 317668
gcgcguuugcuguuucauu

SEQ ID NO: 502718 - RNA, 19 nt, Artificial Sequence
  Description of Artificial Sequence: Synthetic oligonucleotide
  Antisense strand to SEQ ID NO: 502717
aaugaaacagcaaacgcgc

SEQ ID NO: 502719 - RNA, 19 nt, Artificial Sequence
  Description of Artificial Sequence: Synthetic oligonucleotide
  Sense strand starting at position 3197 of SEQ ID NO: 317668
acucgcuccucugugaaau

SEQ ID NO: 502720 - RNA, 19 nt, Artificial Sequence
  Description of Artificial Sequence: Synthetic oligonucleotide
  Antisense strand to SEQ ID NO: 502719
auuucacagaggagcgagu

SEQ ID NO: 502721 - RNA, 19 nt, Artificial Sequence
  Description of Artificial Sequence: Synthetic oligonucleotide
  Sense strand starting at position 3290 of SEQ ID NO: 317668
gucccaaacuuacaggaaa

SEQ ID NO: 502722 - RNA, 19 nt, Artificial Sequence
  Description of Artificial Sequence: Synthetic oligonucleotide
  Antisense strand to SEQ ID NO: 502721
uuuccuguaaguuugggac

SEQ ID NO: 502723 - RNA, 19 nt, Artificial Sequence
  Description of Artificial Sequence: Synthetic oligonucleotide
  Sense strand starting at position 3396 of SEQ ID NO: 317668
uaaucagaucuguguggug

SEQ ID NO: 502724 - RNA, 19 nt, Artificial Sequence
  Description of Artificial Sequence: Synthetic oligonucleotide
  Antisense strand to SEQ ID NO: 502723
caccacacagaucugauua

SEQ ID NO: 502725 - RNA, 19 nt, Artificial Sequence
  Description of Artificial Sequence: Synthetic oligonucleotide
  Sense strand starting at position 3453 of SEQ ID NO: 317668
ggagaucucuuccucccua

SEQ ID NO: 502726 - RNA, 19 nt, Artificial Sequence
  Description of Artificial Sequence: Synthetic oligonucleotide
  Antisense strand to SEQ ID NO: 502725
uagggaggaagagaucucc

SEQ ID NO: 502727 - RNA, 19 nt, Artificial Sequence
  Description of Artificial Sequence: Synthetic oligonucleotide
  Sense strand starting at position 3491 of SEQ ID NO: 317668
gucuuuaucuugucaguaa

SEQ ID NO: 502728 - RNA, 19 nt, Artificial Sequence
  Description of Artificial Sequence: Synthetic oligonucleotide
  Antisense strand to SEQ ID NO: 502727
uuacugacaagauaaagac

SEQ ID NO: 502729 - RNA, 19 nt, Artificial Sequence
  Description of Artificial Sequence: Synthetic oligonucleotide
  Sense strand starting at position 3494 of SEQ ID NO: 317668
uuuaucuugucaguaaaga

SEQ ID NO: 502730 - RNA, 19 nt, Artificial Sequence
  Description of Artificial Sequence: Synthetic oligonucleotide
  Antisense strand to SEQ ID NO: 502729
ucuuuacugacaagauaaa

SEQ ID NO: 502731 - RNA, 19 nt, Artificial Sequence
  Description of Artificial Sequence: Synthetic oligonucleotide
  Sense strand starting at position 3495 of SEQ ID NO: 317668
uuaucuugucaguaaagag

SEQ ID NO: 502732 - RNA, 19 nt, Artificial Sequence
  Description of Artificial Sequence: Synthetic oligonucleotide
  Antisense strand to SEQ ID NO: 502731
cucuuuacugacaagauaa

SEQ ID NO: 502733 - RNA, 19 nt, Artificial Sequence
  Description of Artificial Sequence: Synthetic oligonucleotide
  Sense strand starting at position 3942 of SEQ ID NO: 317668
agcaacacaucgucucaaa

SEQ ID NO: 502734 - RNA, 19 nt, Artificial Sequence
  Description of Artificial Sequence: Synthetic oligonucleotide
  Antisense strand to SEQ ID NO: 502733
uuugagacgauguguugcu

SEQ ID NO: 502735 - RNA, 19 nt, Artificial Sequence
  Description of Artificial Sequence: Synthetic oligonucleotide
  Sense strand starting at position 89 of SEQ ID NO: 317669
aaacaaucacgguacagua

SEQ ID NO: 502736 - RNA, 19 nt, Artificial Sequence
  Description of Artificial Sequence: Synthetic oligonucleotide
  Antisense strand to SEQ ID NO: 502735
uacuguaccgugauuguuu

SEQ ID NO: 502737 - RNA, 19 nt, Artificial Sequence
  Description of Artificial Sequence: Synthetic oligonucleotide
  Sense strand starting at position 99 of SEQ ID NO: 317669
gguacaguacucuacgcaa

SEQ ID NO: 502738 - RNA, 19 nt, Artificial Sequence
  Description of Artificial Sequence: Synthetic oligonucleotide
  Antisense strand to SEQ ID NO: 502737
uugcguagaguacuguacc

SEQ ID NO: 502739 - RNA, 19 nt, Artificial Sequence
  Description of Artificial Sequence: Synthetic oligonucleotide
  Sense strand starting at position 429 of SEQ ID NO: 317669
agaaguuaaugccuaccau

SEQ ID NO: 502740 - RNA, 19 nt, Artificial Sequence
  Description of Artificial Sequence: Synthetic oligonucleotide
  Antisense strand to SEQ ID NO: 502739
augguaggcauuaacuucu

SEQ ID NO: 502741 - RNA, 19 nt, Artificial Sequence
  Description of Artificial Sequence: Synthetic oligonucleotide
  Sense strand starting at position 470 of SEQ ID NO: 317669
auguguacacauuagagua

SEQ ID NO: 502742 - RNA, 19 nt, Artificial Sequence
  Description of Artificial Sequence: Synthetic oligonucleotide
  Antisense strand to SEQ ID NO: 502741
uacucuaauguguacacau

SEQ ID NO: 502743 - RNA, 19 nt, Artificial Sequence
  Description of Artificial Sequence: Synthetic oligonucleotide
  Sense strand starting at position 776 of SEQ ID NO: 317669
ugagaucacguguauucua

SEQ ID NO: 502744 - RNA, 19 nt, Artificial Sequence
  Description of Artificial Sequence: Synthetic oligonucleotide
  Antisense strand to SEQ ID NO: 502743
uagaauacacgugaucuca

SEQ ID NO: 502745 - RNA, 19 nt, Artificial Sequence
  Description of Artificial Sequence: Synthetic oligonucleotide
  Sense strand starting at position 783 of SEQ ID NO: 317669
acguguauucuagcgugga

SEQ ID NO: 502746 - RNA, 19 nt, Artificial Sequence
  Description of Artificial Sequence: Synthetic oligonucleotide
  Antisense strand to SEQ ID NO: 502745
uccacgcuagaauacacgu

SEQ ID NO: 502747 - RNA, 19 nt, Artificial Sequence
  Description of Artificial Sequence: Synthetic oligonucleotide
  Sense strand starting at position 928 of SEQ ID NO: 317669
cagggaugcccuggaacuu

SEQ ID NO: 502748 - RNA, 19 nt, Artificial Sequence
  Description of Artificial Sequence: Synthetic oligonucleotide
  Antisense strand to SEQ ID NO: 502747
aaguuccagggcaucccug

SEQ ID NO: 502749 - RNA, 19 nt, Artificial Sequence
  Description of Artificial Sequence: Synthetic oligonucleotide
  Sense strand starting at position 1533 of SEQ ID NO: 317669
gagccuuaccucggacacu

SEQ ID NO: 502750 - RNA, 19 nt, Artificial Sequence
  Description of Artificial Sequence: Synthetic oligonucleotide
  Antisense strand to SEQ ID NO: 502749
aguguccgagguaaggcuc

SEQ ID NO: 502751 - RNA, 19 nt, Artificial Sequence
  Description of Artificial Sequence: Synthetic oligonucleotide
  Sense strand starting at position 2039 of SEQ ID NO: 317669
gcugcagaucauuggccaa

SEQ ID NO: 502752 - RNA, 19 nt, Artificial Sequence
  Description of Artificial Sequence: Synthetic oligonucleotide
  Antisense strand to SEQ ID NO: 502751
uuggccaaugaucugcagc

SEQ ID NO: 502753 - RNA, 19 nt, Artificial Sequence
  Description of Artificial Sequence: Synthetic oligonucleotide
  Sense strand starting at position 2042 of SEQ ID NO: 317669
gcagaucauuggccaaagu

SEQ ID NO: 502754 - RNA, 19 nt, Artificial Sequence
  Description of Artificial Sequence: Synthetic oligonucleotide
  Antisense strand to SEQ ID NO: 502753
acuuuggccaaugaucugc

SEQ ID NO: 502755 - RNA, 19 nt, Artificial Sequence
  Description of Artificial Sequence: Synthetic oligonucleotide
  Sense strand starting at position 2250 of SEQ ID NO: 317669
uggccuuguggucagucau

SEQ ID NO: 502756 - RNA, 19 nt, Artificial Sequence
  Description of Artificial Sequence: Synthetic oligonucleotide
  Antisense strand to SEQ ID NO: 502755
augacugaccacaaggcca

SEQ ID NO: 502757 - RNA, 19 nt, Artificial Sequence
  Description of Artificial Sequence: Synthetic oligonucleotide
  Sense strand starting at position 2275 of SEQ ID NO: 317669
cccgaacaaugggagaauu

SEQ ID NO: 502758 - RNA, 19 nt, Artificial Sequence
  Description of Artificial Sequence: Synthetic oligonucleotide
  Antisense strand to SEQ ID NO: 502757
aauucucccauuguucggg

SEQ ID NO: 502759 - RNA, 19 nt, Artificial Sequence
  Description of Artificial Sequence: Synthetic oligonucleotide
  Sense strand starting at position 2302 of SEQ ID NO: 317669
ccauaaagugucggucacu

SEQ ID NO: 502760 - RNA, 19 nt, Artificial Sequence
  Description of Artificial Sequence: Synthetic oligonucleotide
  Antisense strand to SEQ ID NO: 502759
agugaccgacacuuuaugg

SEQ ID NO: 502761 - RNA, 19 nt, Artificial Sequence
  Description of Artificial Sequence: Synthetic oligonucleotide
  Sense strand starting at position 2303 of SEQ ID NO: 317669
cauaaagugucggucacuu

SEQ ID NO: 502762 - RNA, 19 nt, Artificial Sequence
  Description of Artificial Sequence: Synthetic oligonucleotide
  Antisense strand to SEQ ID NO: 502761
aagugaccgacacuuuaug

SEQ ID NO: 502763 - RNA, 19 nt, Artificial Sequence
  Description of Artificial Sequence: Synthetic oligonucleotide
  Sense strand starting at position 2329 of SEQ ID NO: 317669
ggacgucgcgugguacaau

SEQ ID NO: 502764 - RNA, 19 nt, Artificial Sequence
  Description of Artificial Sequence: Synthetic oligonucleotide
  Antisense strand to SEQ ID NO: 502763
auuguaccacgcgacgucc

SEQ ID NO: 502765 - RNA, 19 nt, Artificial Sequence
  Description of Artificial Sequence: Synthetic oligonucleotide
  Sense strand starting at position 2341 of SEQ ID NO: 317669
guacaauuggccuguggga

SEQ ID NO: 502766 - RNA, 19 nt, Artificial Sequence
  Description of Artificial Sequence: Synthetic oligonucleotide
  Antisense strand to SEQ ID NO: 502765
ucccacaggccaauuguac

SEQ ID NO: 502767 - RNA, 19 nt, Artificial Sequence
  Description of Artificial Sequence: Synthetic oligonucleotide
  Sense strand starting at position 2343 of SEQ ID NO: 317669
acaauuggccugugggagu

SEQ ID NO: 502768 - RNA, 19 nt, Artificial Sequence
  Description of Artificial Sequence: Synthetic oligonucleotide
  Antisense strand to SEQ ID NO: 502767
acucccacaggccaauugu

SEQ ID NO: 502769 - RNA, 19 nt, Artificial Sequence
  Description of Artificial Sequence: Synthetic oligonucleotide
  Sense strand starting at position 2392 of SEQ ID NO: 317669
gggaaagggccgggaaauu

SEQ ID NO: 502770 - RNA, 19 nt, Artificial Sequence
  Description of Artificial Sequence: Synthetic oligonucleotide
  Antisense strand to SEQ ID NO: 502769
aauuucccggcccuuuccc

SEQ ID NO: 502771 - RNA, 19 nt, Artificial Sequence
  Description of Artificial Sequence: Synthetic oligonucleotide
  Sense strand starting at position 2401 of SEQ ID NO: 317669
ccgggaaauuuccacuucu

SEQ ID NO: 502772 - RNA, 19 nt, Artificial Sequence
  Description of Artificial Sequence: Synthetic oligonucleotide
  Antisense strand to SEQ ID NO: 502771
agaaguggaaauuucccgg

SEQ ID NO: 502773 - RNA, 19 nt, Artificial Sequence
  Description of Artificial Sequence: Synthetic oligonucleotide
  Sense strand starting at position 2438 of SEQ ID NO: 317669
agugaugacccgcaagaau

SEQ ID NO: 502774 - RNA, 19 nt, Artificial Sequence
  Description of Artificial Sequence: Synthetic oligonucleotide
  Antisense strand to SEQ ID NO: 502773
auucuugcgggucaucacu

SEQ ID NO: 502775 - RNA, 19 nt, Artificial Sequence
  Description of Artificial Sequence: Synthetic oligonucleotide
  Sense strand starting at position 2446 of SEQ ID NO: 317669
cccgcaagaauuggucaaa

SEQ ID NO: 502776 - RNA, 19 nt, Artificial Sequence
  Description of Artificial Sequence: Synthetic oligonucleotide
  Antisense strand to SEQ ID NO: 502775
uuugaccaauucuugcggg

SEQ ID NO: 502777 - RNA, 19 nt, Artificial Sequence
  Description of Artificial Sequence: Synthetic oligonucleotide
  Sense strand starting at position 2447 of SEQ ID NO: 317669
ccgcaagaauuggucaaau

SEQ ID NO: 502778 - RNA, 19 nt, Artificial Sequence
  Description of Artificial Sequence: Synthetic oligonucleotide
  Antisense strand to SEQ ID NO: 502777
auuugaccaauucuugcgg

SEQ ID NO: 502779 - RNA, 19 nt, Artificial Sequence
  Description of Artificial Sequence: Synthetic oligonucleotide
  Sense strand starting at position 2457 of SEQ ID NO: 317669
uggucaaauuuggaguaga

SEQ ID NO: 502780 - RNA, 19 nt, Artificial Sequence
  Description of Artificial Sequence: Synthetic oligonucleotide
  Antisense strand to SEQ ID NO: 502779
ucuacuccaaauuugacca

SEQ ID NO: 502781 - RNA, 19 nt, Artificial Sequence
  Description of Artificial Sequence: Synthetic oligonucleotide
  Sense strand starting at position 2492 of SEQ ID NO: 317669
gugaaacuucuacgucaag

SEQ ID NO: 502782 - RNA, 19 nt, Artificial Sequence
  Description of Artificial Sequence: Synthetic oligonucleotide
  Antisense strand to SEQ ID NO: 502781
cuugacguagaaguuucac

SEQ ID NO: 502783 - RNA, 19 nt, Artificial Sequence
  Description of Artificial Sequence: Synthetic oligonucleotide
  Sense strand starting at position 2495 of SEQ ID NO: 317669
aaacuucuacgucaaggau

SEQ ID NO: 502784 - RNA, 19 nt, Artificial Sequence
  Description of Artificial Sequence: Synthetic oligonucleotide
  Antisense strand to SEQ ID NO: 502783
auccuugacguagaaguuu

SEQ ID NO: 502785 - RNA, 19 nt, Artificial Sequence
  Description of Artificial Sequence: Synthetic oligonucleotide
  Sense strand starting at position 2567 of SEQ ID NO: 317669
gagacuauggccggagaau

SEQ ID NO: 502786 - RNA, 19 nt, Artificial Sequence
  Description of Artificial Sequence: Synthetic oligonucleotide
  Antisense strand to SEQ ID NO: 502785
auucuccggccauagucuc

SEQ ID NO: 502787 - RNA, 19 nt, Artificial Sequence
  Description of Artificial Sequence: Synthetic oligonucleotide
  Sense strand starting at position 2605 of SEQ ID NO: 317669
aaaggaagccaucagucuu

SEQ ID NO: 502788 - RNA, 19 nt, Artificial Sequence
  Description of Artificial Sequence: Synthetic oligonucleotide
  Antisense strand to SEQ ID NO: 502787
aagacugauggcuuccuuu

SEQ ID NO: 502789 - RNA, 19 nt, Artificial Sequence
  Description of Artificial Sequence: Synthetic oligonucleotide
  Sense strand starting at position 2704 of SEQ ID NO: 317669
ggugaagauguguaaccua

SEQ ID NO: 502790 - RNA, 19 nt, Artificial Sequence
  Description of Artificial Sequence: Synthetic oligonucleotide
  Antisense strand to SEQ ID NO: 502789
uagguuacacaucuucacc

SEQ ID NO: 502791 - RNA, 19 nt, Artificial Sequence
  Description of Artificial Sequence: Synthetic oligonucleotide
  Sense strand starting at position 3024 of SEQ ID NO: 317669
ggaacugucccacguagga

SEQ ID NO: 502792 - RNA, 19 nt, Artificial Sequence
  Description of Artificial Sequence: Synthetic oligonucleotide
  Antisense strand to SEQ ID NO: 502791
uccuacgugggacaguucc

SEQ ID NO: 502793 - RNA, 19 nt, Artificial Sequence
  Description of Artificial Sequence: Synthetic oligonucleotide
  Sense strand starting at position 3118 of SEQ ID NO: 317669
ggcaguuucgaguucuggu

SEQ ID NO: 502794 - RNA, 19 nt, Artificial Sequence
  Description of Artificial Sequence: Synthetic oligonucleotide
  Antisense strand to SEQ ID NO: 502793
accagaacucgaaacugcc

SEQ ID NO: 502795 - RNA, 19 nt, Artificial Sequence
  Description of Artificial Sequence: Synthetic oligonucleotide
  Sense strand starting at position 3119 of SEQ ID NO: 317669
gcaguuucgaguucuggug

SEQ ID NO: 502796 - RNA, 19 nt, Artificial Sequence
  Description of Artificial Sequence: Synthetic oligonucleotide
  Antisense strand to SEQ ID NO: 502795
caccagaacucgaaacugc

SEQ ID NO: 502797 - RNA, 19 nt, Artificial Sequence
  Description of Artificial Sequence: Synthetic oligonucleotide
  Sense strand starting at position 3165 of SEQ ID NO: 317669
gcgcguuugcuguuucauu

SEQ ID NO: 502798 - RNA, 19 nt, Artificial Sequence
  Description of Artificial Sequence: Synthetic oligonucleotide
  Antisense strand to SEQ ID NO: 502797
aaugaaacagcaaacgcgc

SEQ ID NO: 502799 - RNA, 19 nt, Artificial Sequence
  Description of Artificial Sequence: Synthetic oligonucleotide
  Sense strand starting at position 3197 of SEQ ID NO: 317669
acucgcuccucugugaaau

SEQ ID NO: 502800 - RNA, 19 nt, Artificial Sequence
  Description of Artificial Sequence: Synthetic oligonucleotide
  Antisense strand to SEQ ID NO: 502799
auuucacagaggagcgagu

SEQ ID NO: 502801 - RNA, 19 nt, Artificial Sequence
  Description of Artificial Sequence: Synthetic oligonucleotide
  Sense strand starting at position 3290 of SEQ ID NO: 317669
gucccaaacuuacaggaaa

SEQ ID NO: 502802 - RNA, 19 nt, Artificial Sequence
  Description of Artificial Sequence: Synthetic oligonucleotide
  Antisense strand to SEQ ID NO: 502801
uuuccuguaaguuugggac

SEQ ID NO: 502803 - RNA, 19 nt, Artificial Sequence
  Description of Artificial Sequence: Synthetic oligonucleotide
  Sense strand starting at position 3396 of SEQ ID NO: 317669
uaaucagaucuguguggug

SEQ ID NO: 502804 - RNA, 19 nt, Artificial Sequence
  Description of Artificial Sequence: Synthetic oligonucleotide
  Antisense strand to SEQ ID NO: 502803
caccacacagaucugauua

SEQ ID NO: 502805 - RNA, 19 nt, Artificial Sequence
  Description of Artificial Sequence: Synthetic oligonucleotide
  Sense strand starting at position 3453 of SEQ ID NO: 317669
ggagaucucuuccucccua

SEQ ID NO: 502806 - RNA, 19 nt, Artificial Sequence
  Description of Artificial Sequence: Synthetic oligonucleotide
  Antisense strand to SEQ ID NO: 502805
uagggaggaagagaucucc

SEQ ID NO: 502807 - RNA, 19 nt, Artificial Sequence
  Description of Artificial Sequence: Synthetic oligonucleotide
  Sense strand starting at position 3491 of SEQ ID NO: 317669
gucuuuaucuugucaguaa

SEQ ID NO: 502808 - RNA, 19 nt, Artificial Sequence
  Description of Artificial Sequence: Synthetic oligonucleotide
  Antisense strand to SEQ ID NO: 502807
uuacugacaagauaaagac

SEQ ID NO: 502809 - RNA, 19 nt, Artificial Sequence
  Description of Artificial Sequence: Synthetic oligonucleotide
  Sense strand starting at position 3494 of SEQ ID NO: 317669
uuuaucuugucaguaaaga

SEQ ID NO: 502810 - RNA, 19 nt, Artificial Sequence
  Description of Artificial Sequence: Synthetic oligonucleotide
  Antisense strand to SEQ ID NO: 502809
ucuuuacugacaagauaaa

SEQ ID NO: 502811 - RNA, 19 nt, Artificial Sequence
  Description of Artificial Sequence: Synthetic oligonucleotide
  Sense strand starting at position 3495 of SEQ ID NO: 317669
uuaucuugucaguaaagag

SEQ ID NO: 502812 - RNA, 19 nt, Artificial Sequence
  Description of Artificial Sequence: Synthetic oligonucleotide
  Antisense strand to SEQ ID NO: 502811
cucuuuacugacaagauaa

SEQ ID NO: 502813 - RNA, 19 nt, Artificial Sequence
  Description of Artificial Sequence: Synthetic oligonucleotide
  Sense strand starting at position 3942 of SEQ ID NO: 317669
agcaacacaucgucucaaa

SEQ ID NO: 502814 - RNA, 19 nt, Artificial Sequence
  Description of Artificial Sequence: Synthetic oligonucleotide
  Antisense strand to SEQ ID NO: 502813
uuugagacgauguguugcu

SEQ ID NO: 502815 - RNA, 19 nt, Artificial Sequence
  Description of Artificial Sequence: Synthetic oligonucleotide
  Sense strand starting at position 7 of SEQ ID NO: 317670
cauuaucauuugggacaga

SEQ ID NO: 502816 - RNA, 19 nt, Artificial Sequence
  Description of Artificial Sequence: Synthetic oligonucleotide
  Antisense strand to SEQ ID NO: 502815
ucugucccaaaugauaaug

SEQ ID NO: 502817 - RNA, 19 nt, Artificial Sequence
  Description of Artificial Sequence: Synthetic oligonucleotide
  Sense strand starting at position 8 of SEQ ID NO: 317670
auuaucauuugggacagaa

SEQ ID NO: 502818 - RNA, 19 nt, Artificial Sequence
  Description of Artificial Sequence: Synthetic oligonucleotide
  Antisense strand to SEQ ID NO: 502817
uucugucccaaaugauaau

SEQ ID NO: 502819 - RNA, 19 nt, Artificial Sequence
  Description of Artificial Sequence: Synthetic oligonucleotide
  Sense strand starting at position 233 of SEQ ID NO: 317670
auaacaauccuuugaguag

SEQ ID NO: 502820 - RNA, 19 nt, Artificial Sequence
  Description of Artificial Sequence: Synthetic oligonucleotide
  Antisense strand to SEQ ID NO: 502819
cuacucaaaggauuguuau

SEQ ID NO: 502821 - RNA, 19 nt, Artificial Sequence
  Description of Artificial Sequence: Synthetic oligonucleotide
  Sense strand starting at position 261 of SEQ ID NO: 317670
guaaucauauguccaccua

SEQ ID NO: 502822 - RNA, 19 nt, Artificial Sequence
  Description of Artificial Sequence: Synthetic oligonucleotide
  Antisense strand to SEQ ID NO: 502821
uagguggacauaugauuac

SEQ ID NO: 502823 - RNA, 19 nt, Artificial Sequence
  Description of Artificial Sequence: Synthetic oligonucleotide
  Sense strand starting at position 386 of SEQ ID NO: 317670
ccacgagagaguugaauaa

SEQ ID NO: 502824 - RNA, 19 nt, Artificial Sequence
  Description of Artificial Sequence: Synthetic oligonucleotide
  Antisense strand to SEQ ID NO: 502823
uuauucaacucucucgugg

SEQ ID NO: 502825 - RNA, 19 nt, Artificial Sequence
  Description of Artificial Sequence: Synthetic oligonucleotide
  Sense strand starting at position 514 of SEQ ID NO: 317670
gggagauggaugugcaaug

SEQ ID NO: 502826 - RNA, 19 nt, Artificial Sequence
  Description of Artificial Sequence: Synthetic oligonucleotide
  Antisense strand to SEQ ID NO: 502825
cauugcacauccaucuccc

SEQ ID NO: 502827 - RNA, 19 nt, Artificial Sequence
  Description of Artificial Sequence: Synthetic oligonucleotide
  Sense strand starting at position 521 of SEQ ID NO: 317670
ggaugugcaaugcauuagu

SEQ ID NO: 502828 - RNA, 19 nt, Artificial Sequence
  Description of Artificial Sequence: Synthetic oligonucleotide
  Antisense strand to SEQ ID NO: 502827
acuaaugcauugcacaucc

SEQ ID NO: 502829 - RNA, 19 nt, Artificial Sequence
  Description of Artificial Sequence: Synthetic oligonucleotide
  Sense strand starting at position 532 of SEQ ID NO: 317670
gcauuaguccaugcgucuu

SEQ ID NO: 502830 - RNA, 19 nt, Artificial Sequence
  Description of Artificial Sequence: Synthetic oligonucleotide
  Antisense strand to SEQ ID NO: 502829
aagacgcauggacuaaugc

SEQ ID NO: 502831 - RNA, 19 nt, Artificial Sequence
  Description of Artificial Sequence: Synthetic oligonucleotide
  Sense strand starting at position 575 of SEQ ID NO: 317670
guguuuccugagggaagaa

SEQ ID NO: 502832 - RNA, 19 nt, Artificial Sequence
  Description of Artificial Sequence: Synthetic oligonucleotide
  Antisense strand to SEQ ID NO: 502831
uucuucccucaggaaacac

SEQ ID NO: 502833 - RNA, 19 nt, Artificial Sequence
  Description of Artificial Sequence: Synthetic oligonucleotide
  Sense strand starting at position 911 of SEQ ID NO: 317670
uggccacuccuggacaaau

SEQ ID NO: 502834 - RNA, 19 nt, Artificial Sequence
  Description of Artificial Sequence: Synthetic oligonucleotide
  Antisense strand to SEQ ID NO: 502833
auuuguccaggaguggcca

SEQ ID NO: 502835 - RNA, 19 nt, Artificial Sequence
  Description of Artificial Sequence: Synthetic oligonucleotide
  Sense strand starting at position 1021 of SEQ ID NO: 317670
guuacaaaucaggguuuau

SEQ ID NO: 502836 - RNA, 19 nt, Artificial Sequence
  Description of Artificial Sequence: Synthetic oligonucleotide
  Antisense strand to SEQ ID NO: 502835
auaaacccugauuuguaac

SEQ ID NO: 502837 - RNA, 19 nt, Artificial Sequence
  Description of Artificial Sequence: Synthetic oligonucleotide
  Sense strand starting at position 1052 of SEQ ID NO: 317670
aggucuucgagaggagaau

SEQ ID NO: 502838 - RNA, 19 nt, Artificial Sequence
  Description of Artificial Sequence: Synthetic oligonucleotide
  Antisense strand to SEQ ID NO: 502837
auucuccucucgaagaccu

SEQ ID NO: 502839 - RNA, 19 nt, Artificial Sequence
  Description of Artificial Sequence: Synthetic oligonucleotide
  Sense strand starting at position 1127 of SEQ ID NO: 317670
gcaguuuaacgagaggaga

SEQ ID NO: 502840 - RNA, 19 nt, Artificial Sequence
  Description of Artificial Sequence: Synthetic oligonucleotide
  Antisense strand to SEQ ID NO: 502839
ucuccucucguuaaacugc

SEQ ID NO: 502841 - RNA, 19 nt, Artificial Sequence
  Description of Artificial Sequence: Synthetic oligonucleotide
  Sense strand starting at position 1151 of SEQ ID NO: 317670
aguugauugguaggccaaa

SEQ ID NO: 502842 - RNA, 19 nt, Artificial Sequence
  Description of Artificial Sequence: Synthetic oligonucleotide
  Antisense strand to SEQ ID NO: 502841
uuuggccuaccaaucaacu

SEQ ID NO: 502843 - RNA, 19 nt, Artificial Sequence
  Description of Artificial Sequence: Synthetic oligonucleotide
  Sense strand starting at position 2321 of SEQ ID NO: 317670
auaggagaguggccaaauu

SEQ ID NO: 502844 - RNA, 19 nt, Artificial Sequence
  Description of Artificial Sequence: Synthetic oligonucleotide
  Antisense strand to SEQ ID NO: 502843
aauuuggccacucuccuau

SEQ ID NO: 502845 - RNA, 19 nt, Artificial Sequence
  Description of Artificial Sequence: Synthetic oligonucleotide
  Sense strand starting at position 2362 of SEQ ID NO: 317670
ucaauuaagcuucgaccua

SEQ ID NO: 502846 - RNA, 19 nt, Artificial Sequence
  Description of Artificial Sequence: Synthetic oligonucleotide
  Antisense strand to SEQ ID NO: 502845
uaggucgaagcuuaauuga

SEQ ID NO: 502847 - RNA, 19 nt, Artificial Sequence
  Description of Artificial Sequence: Synthetic oligonucleotide
  Sense strand starting at position 2429 of SEQ ID NO: 317670
cggaguaaucagcaacucu

SEQ ID NO: 502848 - RNA, 19 nt, Artificial Sequence
  Description of Artificial Sequence: Synthetic oligonucleotide
  Antisense strand to SEQ ID NO: 502847
agaguugcugauuacuccg

SEQ ID NO: 502849 - RNA, 19 nt, Artificial Sequence
  Description of Artificial Sequence: Synthetic oligonucleotide
  Sense strand starting at position 2600 of SEQ ID NO: 317670
caaggcugagucuagguua

SEQ ID NO: 502850 - RNA, 19 nt, Artificial Sequence
  Description of Artificial Sequence: Synthetic oligonucleotide
  Antisense strand to SEQ ID NO: 502849
uaaccuagacucagccuug

SEQ ID NO: 502851 - RNA, 19 nt, Artificial Sequence
  Description of Artificial Sequence: Synthetic oligonucleotide
  Sense strand starting at position 2603 of SEQ ID NO: 317670
ggcugagucuagguuaaua

SEQ ID NO: 502852 - RNA, 19 nt, Artificial Sequence
  Description of Artificial Sequence: Synthetic oligonucleotide
  Antisense strand to SEQ ID NO: 502851
uauuaaccuagacucagcc

SEQ ID NO: 502853 - RNA, 19 nt, Artificial Sequence
  Description of Artificial Sequence: Synthetic oligonucleotide
  Sense strand starting at position 2605 of SEQ ID NO: 317670
cugagucuagguuaauauc

SEQ ID NO: 502854 - RNA, 19 nt, Artificial Sequence
  Description of Artificial Sequence: Synthetic oligonucleotide
  Antisense strand to SEQ ID NO: 502853
gauauuaaccuagacucag

SEQ ID NO: 502855 - RNA, 19 nt, Artificial Sequence
  Description of Artificial Sequence: Synthetic oligonucleotide
  Sense strand starting at position 2649 of SEQ ID NO: 317670
aguauauuggaguaagcaa

SEQ ID NO: 502856 - RNA, 19 nt, Artificial Sequence
  Description of Artificial Sequence: Synthetic oligonucleotide
  Antisense strand to SEQ ID NO: 502855
uugcuuacuccaauauacu

SEQ ID NO: 502857 - RNA, 19 nt, Artificial Sequence
  Description of Artificial Sequence: Synthetic oligonucleotide
  Sense strand starting at position 2754 of SEQ ID NO: 317670
acagaagaguguucccaaa

SEQ ID NO: 502858 - RNA, 19 nt, Artificial Sequence
  Description of Artificial Sequence: Synthetic oligonucleotide
  Antisense strand to SEQ ID NO: 502857
uuugggaacacucuucugu

SEQ ID NO: 502859 - RNA, 19 nt, Artificial Sequence
  Description of Artificial Sequence: Synthetic oligonucleotide
  Sense strand starting at position 2756 of SEQ ID NO: 317670
agaagaguguucccaaaga

SEQ ID NO: 502860 - RNA, 19 nt, Artificial Sequence
  Description of Artificial Sequence: Synthetic oligonucleotide
  Antisense strand to SEQ ID NO: 502859
ucuuugggaacacucuucu

SEQ ID NO: 502861 - RNA, 19 nt, Artificial Sequence
  Description of Artificial Sequence: Synthetic oligonucleotide
  Sense strand starting at position 2785 of SEQ ID NO: 317670
acaaucauuggucauugua

SEQ ID NO: 502862 - RNA, 19 nt, Artificial Sequence
  Description of Artificial Sequence: Synthetic oligonucleotide
  Antisense strand to SEQ ID NO: 502861
uacaaugaccaaugauugu

SEQ ID NO: 502863 - RNA, 19 nt, Artificial Sequence
  Description of Artificial Sequence: Synthetic oligonucleotide
  Sense strand starting at position 2837 of SEQ ID NO: 317670
ccuauuuaucgugguguua

SEQ ID NO: 502864 - RNA, 19 nt, Artificial Sequence
  Description of Artificial Sequence: Synthetic oligonucleotide
  Antisense strand to SEQ ID NO: 502863
uaacaccacgauaaauagg

SEQ ID NO: 502865 - RNA, 19 nt, Artificial Sequence
  Description of Artificial Sequence: Synthetic oligonucleotide
  Sense strand starting at position 2850 of SEQ ID NO: 317670
guguuacuaauguaaaguu

SEQ ID NO: 502866 - RNA, 19 nt, Artificial Sequence
  Description of Artificial Sequence: Synthetic oligonucleotide
  Antisense strand to SEQ ID NO: 502865
aacuuuacauuaguaacac

SEQ ID NO: 502867 - RNA, 19 nt, Artificial Sequence
  Description of Artificial Sequence: Synthetic oligonucleotide
  Sense strand starting at position 2895 of SEQ ID NO: 317670
gcagcaccucuggaaucau

SEQ ID NO: 502868 - RNA, 19 nt, Artificial Sequence
  Description of Artificial Sequence: Synthetic oligonucleotide
  Antisense strand to SEQ ID NO: 502867
augauuccagaggugcugc

SEQ ID NO: 502869 - RNA, 19 nt, Artificial Sequence
  Description of Artificial Sequence: Synthetic oligonucleotide
  Sense strand starting at position 3032 of SEQ ID NO: 317670
ucaggacugcuuuauuaca

SEQ ID NO: 502870 - RNA, 19 nt, Artificial Sequence
  Description of Artificial Sequence: Synthetic oligonucleotide
  Antisense strand to SEQ ID NO: 502869
uguaauaaagcaguccuga

SEQ ID NO: 502871 - RNA, 19 nt, Artificial Sequence
  Description of Artificial Sequence: Synthetic oligonucleotide
  Sense strand starting at position 3034 of SEQ ID NO: 317670
aggacugcuuuauuacagu

SEQ ID NO: 502872 - RNA, 19 nt, Artificial Sequence
  Description of Artificial Sequence: Synthetic oligonucleotide
  Antisense strand to SEQ ID NO: 502871
acuguaauaaagcaguccu

SEQ ID NO: 502873 - RNA, 19 nt, Artificial Sequence
  Description of Artificial Sequence: Synthetic oligonucleotide
  Sense strand starting at position 3323 of SEQ ID NO: 317670
auuuauuccuaaguguugu

SEQ ID NO: 502874 - RNA, 19 nt, Artificial Sequence
  Description of Artificial Sequence: Synthetic oligonucleotide
  Antisense strand to SEQ ID NO: 502873
acaacacuuaggaauaaau

SEQ ID NO: 502875 - RNA, 19 nt, Artificial Sequence
  Description of Artificial Sequence: Synthetic oligonucleotide
  Sense strand starting at position 3359 of SEQ ID NO: 317670
gugagaaccuuuguguaca

SEQ ID NO: 502876 - RNA, 19 nt, Artificial Sequence
  Description of Artificial Sequence: Synthetic oligonucleotide
  Antisense strand to SEQ ID NO: 502875
uguacacaaagguucucac

SEQ ID NO: 502877 - RNA, 19 nt, Artificial Sequence
  Description of Artificial Sequence: Synthetic oligonucleotide
  Sense strand starting at position 3369 of SEQ ID NO: 317670
uuguguacagcugaauaga

SEQ ID NO: 502878 - RNA, 19 nt, Artificial Sequence
  Description of Artificial Sequence: Synthetic oligonucleotide
  Antisense strand to SEQ ID NO: 502877
ucuauucagcuguacacaa

SEQ ID NO: 502879 - RNA, 19 nt, Artificial Sequence
  Description of Artificial Sequence: Synthetic oligonucleotide
  Sense strand starting at position 3420 of SEQ ID NO: 317670
uccugcuuccuauagauug

SEQ ID NO: 502880 - RNA, 19 nt, Artificial Sequence
  Description of Artificial Sequence: Synthetic oligonucleotide
  Antisense strand to SEQ ID NO: 502879
caaucuauaggaagcagga

SEQ ID NO: 502881 - RNA, 19 nt, Artificial Sequence
  Description of Artificial Sequence: Synthetic oligonucleotide
  Sense strand starting at position 3454 of SEQ ID NO: 317670
aauuaaauggcuuauuggu

SEQ ID NO: 502882 - RNA, 19 nt, Artificial Sequence
  Description of Artificial Sequence: Synthetic oligonucleotide
  Antisense strand to SEQ ID NO: 502881
accaauaagccauuuaauu

SEQ ID NO: 502883 - RNA, 19 nt, Artificial Sequence
  Description of Artificial Sequence: Synthetic oligonucleotide
  Sense strand starting at position 3460 of SEQ ID NO: 317670
auggcuuauuggucucuaa

SEQ ID NO: 502884 - RNA, 19 nt, Artificial Sequence
  Description of Artificial Sequence: Synthetic oligonucleotide
  Antisense strand to SEQ ID NO: 502883
uuagagaccaauaagccau

SEQ ID NO: 502885 - RNA, 19 nt, Artificial Sequence
  Description of Artificial Sequence: Synthetic oligonucleotide
  Sense strand starting at position 3531 of SEQ ID NO: 317670
uguguacaagcuuauaaua

SEQ ID NO: 502886 - RNA, 19 nt, Artificial Sequence
  Description of Artificial Sequence: Synthetic oligonucleotide
  Antisense strand to SEQ ID NO: 502885
uauuauaagcuuguacaca

SEQ ID NO: 502887 - RNA, 19 nt, Artificial Sequence
  Description of Artificial Sequence: Synthetic oligonucleotide
  Sense strand starting at position 3779 of SEQ ID NO: 317670
auuuguguuuaugccaauu

SEQ ID NO: 502888 - RNA, 19 nt, Artificial Sequence
  Description of Artificial Sequence: Synthetic oligonucleotide
  Antisense strand to SEQ ID NO: 502887
aauuggcauaaacacaaau

SEQ ID NO: 502889 - RNA, 19 nt, Artificial Sequence
  Description of Artificial Sequence: Synthetic oligonucleotide
  Sense strand starting at position 3866 of SEQ ID NO: 317670
cuuauaguuugggcagaua

SEQ ID NO: 502890 - RNA, 19 nt, Artificial Sequence
  Description of Artificial Sequence: Synthetic oligonucleotide
  Antisense strand to SEQ ID NO: 502889
uaucugcccaaacuauaag

SEQ ID NO: 502891 - RNA, 19 nt, Artificial Sequence
  Description of Artificial Sequence: Synthetic oligonucleotide
  Sense strand starting at position 3869 of SEQ ID NO: 317670
auaguuugggcagauaauu

SEQ ID NO: 502892 - RNA, 19 nt, Artificial Sequence
  Description of Artificial Sequence: Synthetic oligonucleotide
  Antisense strand to SEQ ID NO: 502891
aauuaucugcccaaacuau

SEQ ID NO: 502893 - RNA, 19 nt, Artificial Sequence
  Description of Artificial Sequence: Synthetic oligonucleotide
  Sense strand starting at position 3877 of SEQ ID NO: 317670
ggcagauaauuugauaucu

SEQ ID NO: 502894 - RNA, 19 nt, Artificial Sequence
  Description of Artificial Sequence: Synthetic oligonucleotide
  Antisense strand to SEQ ID NO: 502893
agauaucaaauuaucugcc

SEQ ID NO: 502895 - RNA, 19 nt, Artificial Sequence
  Description of Artificial Sequence: Synthetic oligonucleotide
  Sense strand starting at position 105 of SEQ ID NO: 317671
agaugccaccucuguaaua

SEQ ID NO: 502896 - RNA, 19 nt, Artificial Sequence
  Description of Artificial Sequence: Synthetic oligonucleotide
  Antisense strand to SEQ ID NO: 502895
uauuacagagguggcaucu

SEQ ID NO: 502897 - RNA, 19 nt, Artificial Sequence
  Description of Artificial Sequence: Synthetic oligonucleotide
  Sense strand starting at position 131 of SEQ ID NO: 317671
uucccauauguaugugauu

SEQ ID NO: 502898 - RNA, 19 nt, Artificial Sequence
  Description of Artificial Sequence: Synthetic oligonucleotide
  Antisense strand to SEQ ID NO: 502897
aaucacauacauaugggaa

SEQ ID NO: 502899 - RNA, 19 nt, Artificial Sequence
  Description of Artificial Sequence: Synthetic oligonucleotide
  Sense strand starting at position 172 of SEQ ID NO: 317671
guuuauugaucugucacuu

SEQ ID NO: 502900 - RNA, 19 nt, Artificial Sequence
  Description of Artificial Sequence: Synthetic oligonucleotide
  Antisense strand to SEQ ID NO: 502899
aagugacagaucaauaaac

SEQ ID NO: 502901 - RNA, 19 nt, Artificial Sequence
  Description of Artificial Sequence: Synthetic oligonucleotide
  Sense strand starting at position 176 of SEQ ID NO: 317671
auugaucugucacuuuaug

SEQ ID NO: 502902 - RNA, 19 nt, Artificial Sequence
  Description of Artificial Sequence: Synthetic oligonucleotide
  Antisense strand to SEQ ID NO: 502901
cauaaagugacagaucaau

SEQ ID NO: 502903 - RNA, 19 nt, Artificial Sequence
  Description of Artificial Sequence: Synthetic oligonucleotide
  Sense strand starting at position 311 of SEQ ID NO: 317671
cgauauaaacuuuggaauc

SEQ ID NO: 502904 - RNA, 19 nt, Artificial Sequence
  Description of Artificial Sequence: Synthetic oligonucleotide
  Antisense strand to SEQ ID NO: 502903
gauuccaaaguuuauaucg

SEQ ID NO: 502905 - RNA, 19 nt, Artificial Sequence
  Description of Artificial Sequence: Synthetic oligonucleotide
  Sense strand starting at position 321 of SEQ ID NO: 317671
uuuggaaucaguugucuag

SEQ ID NO: 502906 - RNA, 19 nt, Artificial Sequence
  Description of Artificial Sequence: Synthetic oligonucleotide
  Antisense strand to SEQ ID NO: 502905
cuagacaacugauuccaaa

SEQ ID NO: 502907 - RNA, 19 nt, Artificial Sequence
  Description of Artificial Sequence: Synthetic oligonucleotide
  Sense strand starting at position 323 of SEQ ID NO: 317671
uggaaucaguugucuaguu

SEQ ID NO: 502908 - RNA, 19 nt, Artificial Sequence
  Description of Artificial Sequence: Synthetic oligonucleotide
  Antisense strand to SEQ ID NO: 502907
aacuagacaacugauucca

SEQ ID NO: 502909 - RNA, 19 nt, Artificial Sequence
  Description of Artificial Sequence: Synthetic oligonucleotide
  Sense strand starting at position 524 of SEQ ID NO: 317671
uaaacaauagcagguagau

SEQ ID NO: 502910 - RNA, 19 nt, Artificial Sequence
  Description of Artificial Sequence: Synthetic oligonucleotide
  Antisense strand to SEQ ID NO: 502909
aucuaccugcuauuguuua

SEQ ID NO: 502911 - RNA, 19 nt, Artificial Sequence
  Description of Artificial Sequence: Synthetic oligonucleotide
  Sense strand starting at position 917 of SEQ ID NO: 317671
ucuuaacucugugcuaaag

SEQ ID NO: 502912 - RNA, 19 nt, Artificial Sequence
  Description of Artificial Sequence: Synthetic oligonucleotide
  Antisense strand to SEQ ID NO: 502911
cuuuagcacagaguuaaga

SEQ ID NO: 502913 - RNA, 19 nt, Artificial Sequence
  Description of Artificial Sequence: Synthetic oligonucleotide
  Sense strand starting at position 952 of SEQ ID NO: 317671
ggaacugcuguauagugaa

SEQ ID NO: 502914 - RNA, 19 nt, Artificial Sequence
  Description of Artificial Sequence: Synthetic oligonucleotide
  Antisense strand to SEQ ID NO: 502913
uucacuauacagcaguucc

SEQ ID NO: 502915 - RNA, 19 nt, Artificial Sequence
  Description of Artificial Sequence: Synthetic oligonucleotide
  Sense strand starting at position 986 of SEQ ID NO: 317671
agaaaccugucuuucugau

SEQ ID NO: 502916 - RNA, 19 nt, Artificial Sequence
  Description of Artificial Sequence: Synthetic oligonucleotide
  Antisense strand to SEQ ID NO: 502915
aucagaaagacagguuucu

SEQ ID NO: 502917 - RNA, 19 nt, Artificial Sequence
  Description of Artificial Sequence: Synthetic oligonucleotide
  Sense strand starting at position 992 of SEQ ID NO: 317671
cugucuuucugaucauaug

SEQ ID NO: 502918 - RNA, 19 nt, Artificial Sequence
  Description of Artificial Sequence: Synthetic oligonucleotide
  Antisense strand to SEQ ID NO: 502917
cauaugaucagaaagacag

SEQ ID NO: 502919 - RNA, 19 nt, Artificial Sequence
  Description of Artificial Sequence: Synthetic oligonucleotide
  Sense strand starting at position 993 of SEQ ID NO: 317671
ugucuuucugaucauauga

SEQ ID NO: 502920 - RNA, 19 nt, Artificial Sequence
  Description of Artificial Sequence: Synthetic oligonucleotide
  Antisense strand to SEQ ID NO: 502919
ucauaugaucagaaagaca

SEQ ID NO: 502921 - RNA, 19 nt, Artificial Sequence
  Description of Artificial Sequence: Synthetic oligonucleotide
  Sense strand starting at position 1082 of SEQ ID NO: 317671
gaccuaauucuguguacga

SEQ ID NO: 502922 - RNA, 19 nt, Artificial Sequence
  Description of Artificial Sequence: Synthetic oligonucleotide
  Antisense strand to SEQ ID NO: 502921
ucguacacagaauuagguc

SEQ ID NO: 502923 - RNA, 19 nt, Artificial Sequence
  Description of Artificial Sequence: Synthetic oligonucleotide
  Sense strand starting at position 1083 of SEQ ID NO: 317671
accuaauucuguguacgau

SEQ ID NO: 502924 - RNA, 19 nt, Artificial Sequence
  Description of Artificial Sequence: Synthetic oligonucleotide
  Antisense strand to SEQ ID NO: 502923
aucguacacagaauuaggu

SEQ ID NO: 502925 - RNA, 19 nt, Artificial Sequence
  Description of Artificial Sequence: Synthetic oligonucleotide
  Sense strand starting at position 1084 of SEQ ID NO: 317671
ccuaauucuguguacgauc

SEQ ID NO: 502926 - RNA, 19 nt, Artificial Sequence
  Description of Artificial Sequence: Synthetic oligonucleotide
  Antisense strand to SEQ ID NO: 502925
gaucguacacagaauuagg

SEQ ID NO: 502927 - RNA, 19 nt, Artificial Sequence
  Description of Artificial Sequence: Synthetic oligonucleotide
  Sense strand starting at position 1176 of SEQ ID NO: 317671
cugugucuagcacagagaa

SEQ ID NO: 502928 - RNA, 19 nt, Artificial Sequence
  Description of Artificial Sequence: Synthetic oligonucleotide
  Antisense strand to SEQ ID NO: 502927
uucucugugcuagacacag

SEQ ID NO: 502929 - RNA, 19 nt, Artificial Sequence
  Description of Artificial Sequence: Synthetic oligonucleotide
  Sense strand starting at position 1178 of SEQ ID NO: 317671
gugucuagcacagagaaua

SEQ ID NO: 502930 - RNA, 19 nt, Artificial Sequence
  Description of Artificial Sequence: Synthetic oligonucleotide
  Antisense strand to SEQ ID NO: 502929
uauucucugugcuagacac

SEQ ID NO: 502931 - RNA, 19 nt, Artificial Sequence
  Description of Artificial Sequence: Synthetic oligonucleotide
  Sense strand starting at position 1188 of SEQ ID NO: 317671
cagagaauauguuagagaa

SEQ ID NO: 502932 - RNA, 19 nt, Artificial Sequence
  Description of Artificial Sequence: Synthetic oligonucleotide
  Antisense strand to SEQ ID NO: 502931
uucucuaacauauucucug

SEQ ID NO: 502933 - RNA, 19 nt, Artificial Sequence
  Description of Artificial Sequence: Synthetic oligonucleotide
  Sense strand starting at position 1190 of SEQ ID NO: 317671
gagaauauguuagagaaag

SEQ ID NO: 502934 - RNA, 19 nt, Artificial Sequence
  Description of Artificial Sequence: Synthetic oligonucleotide
  Antisense strand to SEQ ID NO: 502933
cuuucucuaacauauucuc

SEQ ID NO: 502935 - RNA, 19 nt, Artificial Sequence
  Description of Artificial Sequence: Synthetic oligonucleotide
  Sense strand starting at position 1207 of SEQ ID NO: 317671
agguuucgauaaccugaaa

SEQ ID NO: 502936 - RNA, 19 nt, Artificial Sequence
  Description of Artificial Sequence: Synthetic oligonucleotide
  Antisense strand to SEQ ID NO: 502935
uuucagguuaucgaaaccu

SEQ ID NO: 502937 - RNA, 19 nt, Artificial Sequence
  Description of Artificial Sequence: Synthetic oligonucleotide
  Sense strand starting at position 1518 of SEQ ID NO: 317671
gugggaacagacuguguuu

SEQ ID NO: 502938 - RNA, 19 nt, Artificial Sequence
  Description of Artificial Sequence: Synthetic oligonucleotide
  Antisense strand to SEQ ID NO: 502937
aaacacagucuguucccac

SEQ ID NO: 502939 - RNA, 19 nt, Artificial Sequence
  Description of Artificial Sequence: Synthetic oligonucleotide
  Sense strand starting at position 1523 of SEQ ID NO: 317671
aacagacuguguuugcuua

SEQ ID NO: 502940 - RNA, 19 nt, Artificial Sequence
  Description of Artificial Sequence: Synthetic oligonucleotide
  Antisense strand to SEQ ID NO: 502939
uaagcaaacacagucuguu

SEQ ID NO: 502941 - RNA, 19 nt, Artificial Sequence
  Description of Artificial Sequence: Synthetic oligonucleotide
  Sense strand starting at position 1527 of SEQ ID NO: 317671
gacuguguuugcuuauuua

SEQ ID NO: 502942 - RNA, 19 nt, Artificial Sequence
  Description of Artificial Sequence: Synthetic oligonucleotide
  Antisense strand to SEQ ID NO: 502941
uaaauaagcaaacacaguc

SEQ ID NO: 502943 - RNA, 19 nt, Artificial Sequence
  Description of Artificial Sequence: Synthetic oligonucleotide
  Sense strand starting at position 1530 of SEQ ID NO: 317671
uguguuugcuuauuuacaa

SEQ ID NO: 502944 - RNA, 19 nt, Artificial Sequence
  Description of Artificial Sequence: Synthetic oligonucleotide
  Antisense strand to SEQ ID NO: 502943
uuguaaauaagcaaacaca

SEQ ID NO: 502945 - RNA, 19 nt, Artificial Sequence
  Description of Artificial Sequence: Synthetic oligonucleotide
  Sense strand starting at position 1689 of SEQ ID NO: 317671
cccuaaugauggucaccuu

SEQ ID NO: 502946 - RNA, 19 nt, Artificial Sequence
  Description of Artificial Sequence: Synthetic oligonucleotide
  Antisense strand to SEQ ID NO: 502945
aaggugaccaucauuaggg

SEQ ID NO: 502947 - RNA, 19 nt, Artificial Sequence
  Description of Artificial Sequence: Synthetic oligonucleotide
  Sense strand starting at position 2473 of SEQ ID NO: 317671
ucaaguguccucugaggua

SEQ ID NO: 502948 - RNA, 19 nt, Artificial Sequence
  Description of Artificial Sequence: Synthetic oligonucleotide
  Antisense strand to SEQ ID NO: 502947
uaccucagaggacacuuga

SEQ ID NO: 502949 - RNA, 19 nt, Artificial Sequence
  Description of Artificial Sequence: Synthetic oligonucleotide
  Sense strand starting at position 2478 of SEQ ID NO: 317671
uguccucugagguagacaa

SEQ ID NO: 502950 - RNA, 19 nt, Artificial Sequence
  Description of Artificial Sequence: Synthetic oligonucleotide
  Antisense strand to SEQ ID NO: 502949
uugucuaccucagaggaca

SEQ ID NO: 502951 - RNA, 19 nt, Artificial Sequence
  Description of Artificial Sequence: Synthetic oligonucleotide
  Sense strand starting at position 2499 of SEQ ID NO: 317671
cagauacguuuaucagaag

SEQ ID NO: 502952 - RNA, 19 nt, Artificial Sequence
  Description of Artificial Sequence: Synthetic oligonucleotide
  Antisense strand to SEQ ID NO: 502951
cuucugauaaacguaucug

SEQ ID NO: 502953 - RNA, 19 nt, Artificial Sequence
  Description of Artificial Sequence: Synthetic oligonucleotide
  Sense strand starting at position 2795 of SEQ ID NO: 317671
ccacuugccaagugagaag

SEQ ID NO: 502954 - RNA, 19 nt, Artificial Sequence
  Description of Artificial Sequence: Synthetic oligonucleotide
  Antisense strand to SEQ ID NO: 502953
cuucucacuuggcaagugg

SEQ ID NO: 502955 - RNA, 19 nt, Artificial Sequence
  Description of Artificial Sequence: Synthetic oligonucleotide
  Sense strand starting at position 2845 of SEQ ID NO: 317671
auagcaaguguuuaguauu

SEQ ID NO: 502956 - RNA, 19 nt, Artificial Sequence
  Description of Artificial Sequence: Synthetic oligonucleotide
  Antisense strand to SEQ ID NO: 502955
aauacuaaacacuugcuau

SEQ ID NO: 502957 - RNA, 19 nt, Artificial Sequence
  Description of Artificial Sequence: Synthetic oligonucleotide
  Sense strand starting at position 3045 of SEQ ID NO: 317671
aaugcuugauuggugauua

SEQ ID NO: 502958 - RNA, 19 nt, Artificial Sequence
  Description of Artificial Sequence: Synthetic oligonucleotide
  Antisense strand to SEQ ID NO: 502957
uaaucaccaaucaagcauu

SEQ ID NO: 502959 - RNA, 19 nt, Artificial Sequence
  Description of Artificial Sequence: Synthetic oligonucleotide
  Sense strand starting at position 3049 of SEQ ID NO: 317671
cuugauuggugauuaucuu

SEQ ID NO: 502960 - RNA, 19 nt, Artificial Sequence
  Description of Artificial Sequence: Synthetic oligonucleotide
  Antisense strand to SEQ ID NO: 502959
aagauaaucaccaaucaag

SEQ ID NO: 502961 - RNA, 19 nt, Artificial Sequence
  Description of Artificial Sequence: Synthetic oligonucleotide
  Sense strand starting at position 3053 of SEQ ID NO: 317671
auuggugauuaucuucuaa

SEQ ID NO: 502962 - RNA, 19 nt, Artificial Sequence
  Description of Artificial Sequence: Synthetic oligonucleotide
  Antisense strand to SEQ ID NO: 502961
uuagaagauaaucaccaau

SEQ ID NO: 502963 - RNA, 19 nt, Artificial Sequence
  Description of Artificial Sequence: Synthetic oligonucleotide
  Sense strand starting at position 3055 of SEQ ID NO: 317671
uggugauuaucuucuaaac

SEQ ID NO: 502964 - RNA, 19 nt, Artificial Sequence
  Description of Artificial Sequence: Synthetic oligonucleotide
  Antisense strand to SEQ ID NO: 502963
guuuagaagauaaucacca

SEQ ID NO: 502965 - RNA, 19 nt, Artificial Sequence
  Description of Artificial Sequence: Synthetic oligonucleotide
  Sense strand starting at position 3307 of SEQ ID NO: 317671
ugagcuaugauugagcaaa

SEQ ID NO: 502966 - RNA, 19 nt, Artificial Sequence
  Description of Artificial Sequence: Synthetic oligonucleotide
  Antisense strand to SEQ ID NO: 502965
uuugcucaaucauagcuca

SEQ ID NO: 502967 - RNA, 19 nt, Artificial Sequence
  Description of Artificial Sequence: Synthetic oligonucleotide
  Sense strand starting at position 3346 of SEQ ID NO: 317671
agagucauaccaugucuca

SEQ ID NO: 502968 - RNA, 19 nt, Artificial Sequence
  Description of Artificial Sequence: Synthetic oligonucleotide
  Antisense strand to SEQ ID NO: 502967
ugagacaugguaugacucu

SEQ ID NO: 502969 - RNA, 19 nt, Artificial Sequence
  Description of Artificial Sequence: Synthetic oligonucleotide
  Sense strand starting at position 3431 of SEQ ID NO: 317671
guaaauuaggcagagcaau

SEQ ID NO: 502970 - RNA, 19 nt, Artificial Sequence
  Description of Artificial Sequence: Synthetic oligonucleotide
  Antisense strand to SEQ ID NO: 502969
auugcucugccuaauuuac

SEQ ID NO: 502971 - RNA, 19 nt, Artificial Sequence
  Description of Artificial Sequence: Synthetic oligonucleotide
  Sense strand starting at position 3747 of SEQ ID NO: 317671
ccaguaaaugguggugagu

SEQ ID NO: 502972 - RNA, 19 nt, Artificial Sequence
  Description of Artificial Sequence: Synthetic oligonucleotide
  Antisense strand to SEQ ID NO: 502971
acucaccaccauuuacugg

SEQ ID NO: 502973 - RNA, 19 nt, Artificial Sequence
  Description of Artificial Sequence: Synthetic oligonucleotide
  Sense strand starting at position 3951 of SEQ ID NO: 317671
agaguuaaguucuuacaac

SEQ ID NO: 502974 - RNA, 19 nt, Artificial Sequence
  Description of Artificial Sequence: Synthetic oligonucleotide
  Antisense strand to SEQ ID NO: 502973
guuguaagaacuuaacucu

SEQ ID NO: 502975 - RNA, 19 nt, Artificial Sequence
  Description of Artificial Sequence: Synthetic oligonucleotide
  Sense strand starting at position 311 of SEQ ID NO: 317672
cgcuuuaugcuuuagggaa

SEQ ID NO: 502976 - RNA, 19 nt, Artificial Sequence
  Description of Artificial Sequence: Synthetic oligonucleotide
  Antisense strand to SEQ ID NO: 502975
uucccuaaagcauaaagcg

SEQ ID NO: 502977 - RNA, 19 nt, Artificial Sequence
  Description of Artificial Sequence: Synthetic oligonucleotide
  Sense strand starting at position 770 of SEQ ID NO: 317672
gagcaaggcucugucaaag

SEQ ID NO: 502978 - RNA, 19 nt, Artificial Sequence
  Description of Artificial Sequence: Synthetic oligonucleotide
  Antisense strand to SEQ ID NO: 502977
cuuugacagagccuugcuc

SEQ ID NO: 502979 - RNA, 19 nt, Artificial Sequence
  Description of Artificial Sequence: Synthetic oligonucleotide
  Sense strand starting at position 1082 of SEQ ID NO: 317672
uuaauaaagucauucguca

SEQ ID NO: 502980 - RNA, 19 nt, Artificial Sequence
  Description of Artificial Sequence: Synthetic oligonucleotide
  Antisense strand to SEQ ID NO: 502979
ugacgaaugacuuuauuaa

SEQ ID NO: 502981 - RNA, 19 nt, Artificial Sequence
  Description of Artificial Sequence: Synthetic oligonucleotide
  Sense strand starting at position 1209 of SEQ ID NO: 317672
aggcuuuggaaguggaaga

SEQ ID NO: 502982 - RNA, 19 nt, Artificial Sequence
  Description of Artificial Sequence: Synthetic oligonucleotide
  Antisense strand to SEQ ID NO: 502981
ucuuccacuuccaaagccu

SEQ ID NO: 502983 - RNA, 19 nt, Artificial Sequence
  Description of Artificial Sequence: Synthetic oligonucleotide
  Sense strand starting at position 1210 of SEQ ID NO: 317672
ggcuuuggaaguggaagaa

SEQ ID NO: 502984 - RNA, 19 nt, Artificial Sequence
  Description of Artificial Sequence: Synthetic oligonucleotide
  Antisense strand to SEQ ID NO: 502983
uucuuccacuuccaaagcc

SEQ ID NO: 502985 - RNA, 19 nt, Artificial Sequence
  Description of Artificial Sequence: Synthetic oligonucleotide
  Sense strand starting at position 1336 of SEQ ID NO: 317672
uguuuaaaggccuauagca

SEQ ID NO: 502986 - RNA, 19 nt, Artificial Sequence
  Description of Artificial Sequence: Synthetic oligonucleotide
  Antisense strand to SEQ ID NO: 502985
ugcuauaggccuuuaaaca

SEQ ID NO: 502987 - RNA, 19 nt, Artificial Sequence
  Description of Artificial Sequence: Synthetic oligonucleotide
  Sense strand starting at position 1345 of SEQ ID NO: 317672
gccuauagcagucagagau

SEQ ID NO: 502988 - RNA, 19 nt, Artificial Sequence
  Description of Artificial Sequence: Synthetic oligonucleotide
  Antisense strand to SEQ ID NO: 502987
aucucugacugcuauaggc

SEQ ID NO: 502989 - RNA, 19 nt, Artificial Sequence
  Description of Artificial Sequence: Synthetic oligonucleotide
  Sense strand starting at position 1412 of SEQ ID NO: 317672
aggaaagaaugacacaauu

SEQ ID NO: 502990 - RNA, 19 nt, Artificial Sequence
  Description of Artificial Sequence: Synthetic oligonucleotide
  Antisense strand to SEQ ID NO: 502989
aauugugucauucuuuccu

SEQ ID NO: 502991 - RNA, 19 nt, Artificial Sequence
  Description of Artificial Sequence: Synthetic oligonucleotide
  Sense strand starting at position 1481 of SEQ ID NO: 317672
cgcuaaguuauggaaagca

SEQ ID NO: 502992 - RNA, 19 nt, Artificial Sequence
  Description of Artificial Sequence: Synthetic oligonucleotide
  Antisense strand to SEQ ID NO: 502991
ugcuuuccauaacuuagcg

SEQ ID NO: 502993 - RNA, 19 nt, Artificial Sequence
  Description of Artificial Sequence: Synthetic oligonucleotide
  Sense strand starting at position 1537 of SEQ ID NO: 317672
guucuauggaaacgagaga

SEQ ID NO: 502994 - RNA, 19 nt, Artificial Sequence
  Description of Artificial Sequence: Synthetic oligonucleotide
  Antisense strand to SEQ ID NO: 502993
ucucucguuuccauagaac

SEQ ID NO: 502995 - RNA, 19 nt, Artificial Sequence
  Description of Artificial Sequence: Synthetic oligonucleotide
  Sense strand starting at position 1883 of SEQ ID NO: 317672
gacagaauacacugugucu
